(19) United States
(12) Patent Application Publication
(10) Pub. No.: US 2026/0062700 A1
(43) Pub. Date: Mar. 5, 2026

(54) ENGINEERED RETRONS AND METHODS OF USE

(71) Applicant: ReNAgade Therapeutics Management Inc., Cambridge, MA (US)

(72) Inventors: Alim LADHA, Cambridge, MA (US); Vladimir PRESNYAK, Cambridge, MA (US); Inna SHCHERBAKOVA, Cambridge, MA (US); Brian GOODMAN, Cambridge, MA (US); Mario Rodriguez MESTRE, Cambridge, MA (US); Kyong-Rim KIEFFER-KWON, Cambridge, MA (US); Socheata LY, Cambridge, MA (US); Devin Scott QUINLAN, Cambridge, MA (US); Muthusamy JAYARAMAN, Cambridge, MA (US); Stephen SCULLY, Cambridge, MA (US); Jacob LAYER, Cambridge, MA (US); Abril Fleitas Beitans, Cambridge, MA (US); Zhongxia YI, Cambridge, MA (US)

(21) Appl. No.: 19/104,782

(22) PCT Filed: Aug. 24, 2023
(86) PCT No.: PCT/US2023/072872

§ 371 Date: Feb. 19, 2025

Related U.S. Application Data
(63) Continuation-in-part of application No. 18/087,673, filed on Dec. 22, 2022, now Pat. No. 11,866,728.
Application No. 18/087,673 is a continuation-in-part of application No. PCT/US2023/061038, filed on Jan. 20, 2023.
(60) Provisional application No. 63/373,545, filed on Aug. 25, 2022.
(60) Provisional application No. 63/476,900, filed on Dec. 22, 2022.
(60) Provisional application No. 63/488,317, filed on Mar. 3, 2023.
(60) Provisional application No. 63/491,603, filed on Mar. 22, 2023.
(60) Provisional application No. 63/515,783, filed on Jul. 26, 2023.

(51) Int. Cl. C12N 15/113; A61K 31/7105; A61K 48/00; C12N 5/071; C12N 5/10; C12N 9/12; C12N 9/22; C12N 15/62

(52) U.S. Cl. CPC C12N 15/113; A61K 31/7105; A61K 48/005; C12N 5/0602; C12N 5/10; C12N 9/1276; C12N 9/226; C12N 15/62; C12Y 207/07049; C12N 2310/20; C12N 2310/531; C12N 2510/00

(57) ABSTRACT

Disclosed are engineered retrons and methods of use such as to modify the genome of a host (e.g, mammalian) cell by delivering the engineered retron or the encoded ncRNA in vitro or in vivo to the host (e.g., mammalian) cell.

### RELATED APPLICATIONS

[0001] This application claims priority under 35 U.S.C. § 119(e) to U.S. Provisional Application Ser. No. 63/373,545, filed Aug. 25, 2022 (RTX003-P1), U.S. application Ser. No. 18/087,673, filed Dec. 22, 2022 (RTX004-T1), U.S. Provisional Application Ser. No. 63/476,900, filed Dec. 22, 2022 (RTX005-P1), International PCT Application No. PCT/US2023/61038, filed Jan. 20, 2023 (RTX006-PCT1), U.S. Provisional Application Ser. No. 63/488,317 (RTX007-P1), filed Mar. 3, 2023, U.S. Provisional Application Ser. No. 63/491,603, filed Mar. 22, 2023 (RTX008-P1), and U.S. Provisional Application Ser. No. 63/515,783, filed Jul. 26, 2023 (RTX009-P1), each of which are incorporated herein by reference in their entireties.

[0002] This application references the following applications: U.S. Provisional Application Ser. No. 63/301,936, filed Jan. 21, 2022 (RTX001-P1), and U.S. Provisional Application Ser. No. 63/370,880, filed Aug. 9, 2022 (RTX002-P1), each of which are incorporated herein by reference in their entireties.

[0003] The foregoing applications, and all documents cited therein or during their prosecution (“appln cited documents”) and all documents cited or referenced in the appln cited documents, and all documents cited or referenced herein (“herein cited documents”), and all documents cited or referenced in herein cited documents, together with any manufacturer's instructions, descriptions, product specifications, and product sheets for any products mentioned herein or in any document incorporated by reference herein, are hereby incorporated herein by reference, and may be employed in the practice of the invention. More specifically, all referenced documents are incorporated by reference to the same extent as if each individual document was specifically and individually indicated to be incorporated by reference.

### SEQUENCE LISTING

[0004] This application as originally filed includes/contains a Sequence Listing filed in electronic form in eXtensible Markup Language (XML) format entitled J0356-99004.xml, created on Aug. 24, 2023 and having a size of 36,884,841 bytes. The contents of the Sequence Listing are incorporated herein in its entirety.

### TECHNICAL FIELD

[0005] The present disclosure generally relates to systems, methods and compositions used for precise genome editing, including nucleic acid insertions, replacements, and deletions at targeted and precise genome sites, wherein said systems, methods, and compositions are based on novel and/or engineered retrons.

### BACKGROUND OF THE INVENTION

[0006] Precise genome editing by programmable nucleases (e.g., RNA-guided nucleases (e.g., CRISPR nucleases), zinc-finger nucleases (ZFN), and transcription activator-like effector nucleases (TALENS)) typically relies on homology-directed repair (HDR) and the presence of a donor DNA template at the site of a double-strand break (DSB) induced by the programmable nuclease. It is generally accepted that a limiting step for HDR-dependent precise genome editing is the delivery of donor DNA template to the nuclease-induced DSB (e.g., see Ling et al., “Improving the efficiency of precise genome editing with site-specific Cas9-oligonucleotide conjugates,” Science Advances, 2020, Vol. 6, No. 15, pp. 1-8). Various methods aimed at boosting the efficiency of HDR-dependent editing have been reported, many of which involve the physical tethering of the DNA donor to a component of the precise editing system. Exemplary methods have been discussed in: K. Lee et al., “Synthetically modified guide RNA and donor DNA are a versatile platform for CRISPR-Cas9 engineering,” eLife 6, e25312 (2017); J. Carlson-Stevermer et al., “Assembly of CRISPR ribonucleoproteins with biotinylated oligonucleotides via an RNA aptamer for precise gene editing,” Nat. Commun. 8, 1711 (2017); N. Savic, et al., “Covalent linkage of the DNA repair template to the CRISPR-Cas9 nuclease enhances homology-directed repair,” eLife 7, e33761 (2018); and E. J. Aird et al., “Increasing Cas9-mediated homology-directed repair efficiency through covalent tethering of DNA repair template.,” Commun. Biol. 1, 54 (2018), each of which are incorporated herein by reference. Despite these efforts, efficiency of HDR-dependent precise editing remains unsatisfactory.

[0007] Retrons are defined by their unique ability to produce an unusual satellite DNA known as msDNA (multicopy single-stranded DNA). DNA encoding retrons includes a reverse trancriptase (RT)-coding gene (ret) and a nucleic acid sequence encoding the non-coding RNA (ncRNA), which contains two contiguous and inverted non-coding sequences referred to as the msr and msd. The ret gene and the non-coding RNA (including the msr and msd) are transcribed as a single RNA transcript, which becomes folded into a specific secondary structure following post-transcriptional processing. Once translated, the RT binds the RNA template downstream from the msd locus, initiating reverse transcription of the RNA towards its 5′ end, assisted by the 2′OH group present in a conserved branching guanosine residue that acts as a primer. Reverse transcription halts before reaching the msr locus, and the resulting DNA, the msDNA, remains covalently attached to the RNA template via a 2′-5′ phosphodiester bond and base-pairing between the 3′ ends of the msDNA and the RNA template. The external regions, at the 5′ and 3′ ends of the msd/msr transcript (a1 and a2, respectively) are complementary and can hybridize, leaving the structures located in the msr and msd regions in internal positions (see FIG. 1A). The msr locus, which is not reverse transcribed, forms one to three short stem-loops of variable size, ranging from 3 to 10 base pairs, whereas the msd locus folds into a single/double long hairpin with a highly variable long stem of 10-50 bp in length that is also present in the final msDNA form.

[0008] It has recently been reported that retrons may be utilized as a means to provide donor DNA template for HDR-dependent genome editing (e.g., see Lopez et al., “Precise genome editing across kingdoms of life using retron-derived DNA,” Nature Chemical Biology, Dec. 12, 2021, 18, pages 199-206 (2022)), however, producing sufficient levels of donor DNA template intracellularly to sufficiently support efficient HDR-dependent editing remains a significant challenge. Improved retron-based genome modification systems are highly desirous in the art.

### SUMMARY OF THE INVENTION

[0009] In one aspect, the present disclosure provides recombinant retrons comprising one or more genetic modifications which improves the functionality and/or properties of a retron. Such genetic modifications can include a mutation, insertion, deletion, inversion, replacement, substitution, or translocation of one or more contiguous or non-contiguous nucleobases in a nucleic acid molecule encoding a retron or a component of a retron, such as an ncRNA or a reverse transcriptase. In various aspects, the retron that becomes modified with the one or more genetic modifications (i.e., the “pre-modified” or “unmodified” retron or retron component) is a naturally occurring retron or retron component (e.g., naturally occurring ncRNA of Table A or RT) ability to facilitate homology-dependent recombination (or HDR) in a cell, thereby resulting in a relative increase in the concentrations or amounts of msDNA comprising a DNA donor template. In particular embodiments, the recombinant retrons are based on and/or derived from a naturally-occurring retron, such as any retron-related sequence provided by Table X (the introduction of the one or more genetic modifications into a set of 7257 previously unknown retrons discovered through computational methods described herein (e.g., see Examples). In other embodiments, the recombinant retrons are based on introducing the one or more genetic modifications into previously available retron sequences (e.g., the “Mestre et al., Systematic Prediction of Genes Functionally Associated with Bacterial Retrons and Classification of The Encoded Tripartite Systems, Nucleic Acids Research, Volume 48, Issue 22, 16 Dec. 2020, Pages 12632-12647” (incorporated herein by reference) to achieve recombinant retrons with the enhanced ability to produce increased concentrations or amounts of msDNA comprising a DNA donor template.

[0010] In another aspect, the present disclosure further provides nucleic acid molecules encoding the recombinant retrons and/or recombinant retron components (e.g., a recombinant ncRNA and/or a recombinant retron RT). In still another aspect, the present disclosure provides genome editing systems comprising recombinant retron components (e.g., recombinant ncRNA and/or recombinant RT), programmable nucleases (e.g., RNA-guided nucleases, such as CRISPR-Cas proteins, ZFPs, and TALENS), and guide RNAs (in the case where RNA-guide nucleases are used in said genome editing systems). In a further aspect, the disclosure provides nucleic acid molecules encoding the described genome editing systems and said components thereof, as well as polypeptides making up the components of said genome editing systems. In yet another aspect, the disclosure provides vectors for transferring and/or expressing said genome editing systems, e.g., under in vitro, ex vivo, and in vivo conditions. In still another aspect, the disclosure provides cell-delivery compositions and methods, including compositions for passive and/or active transport to cells (e.g., plasmids), delivery by virus-based recombinant vectors (e.g., AAV and/or lentivirus vectors), delivery by non-virus-based systems (e.g., liposomes and LNPs), and delivery by virus-like particles. Depending on the delivery system employed, the retron-based genome editing systems described herein may be delivered in the form of DNA (e.g., plasmids or DNA-based virus vectors), RNA (e.g., ncRNA and mRNA delivered by LNPs), a mixture of DNA and RNA, protein (e.g., virus-like particles), and ribonucleoprotein (RNP) complexes. Any suitable combinations of approaches for delivering the components of the herein disclosed retron-based genome editing systems may be employed. In one embodiment, each of the components of the retron-based genome editing system is delivered by an all-RNA system, e.g., the delivery of one or more RNA molecules (e.g., mRNA and/or ncRNA) by one or more LNPs, wherein the one or more RNA molecules form the ncRNA and guide RNA (as needed) and/or are translated into the polypeptide components (e.g., the RT and a programmable nuclease). In yet another aspect, the disclosure provides methods for genome editing by introducing a retron-based genome editing system described herein into a cell (e.g., under in vitro, in vivo, or ex vivo conditions) comprising a target edit site, thereby resulting in an edit at the target edit. In other aspects, the disclosure provides formulations comprising any of the aforementioned components for delivery to cells and/or tissues, including in vitro, in vivo, and ex vivo delivery, recombinant cells and/or tissues modified by the recombinant retron-based genome modification systems and methods described herein, and methods of modifying cells by conducting genome editing and related DNA donor-dependent methods, such as recombineering, or cell recording, using the herein disclosed retron-based genome modification systems. The disclosure also provides methods of making the recombinant retrons, retron-based genome modification systems, vectors, compositions and formulations described herein, as well as to pharmaceutical compositions and kits for modifying cells under in vitro, in vivo, and ex vivo conditions that comprise the herein disclosed genome editing and/or modification systems.

[0011] In an embodiment, this disclosure or the inventions herein provide a gene editing system comprising one or more delivery vehicles, wherein: the delivery vehicle(s) comprise RNA cargo; the RNA cargo comprises (a) at least one mRNA molecule encoding (i) a nucleic acid programmable nuclease and (ii) a retron reverse transcriptase, (b) an engineered retron ncRNA, and (c) guide RNA for the programmable nuclease; and each delivery vehicle contains (a)(i) and/or (a)(ii) and/or (b) and/or (c); whereby one delivery vehicle or more than one delivery vehicle delivers (a)(i), (a)(ii), (b), and (c).

[0012] In an embodiment, in the gene editing system, (a)(i) and (a)(ii) comprise a single mRNA molecule encoding the nucleic acid programmable nuclease and the retron reverse transcriptase.

[0013] In an embodiment, in the gene editing system, (a)(i) and (a)(ii) are encoded and expressed as a fusion protein.

[0014] In an embodiment, in the gene editing system (a)(i) and (a)(ii) are encoded and expressed as a fusion protein and the fusion protein comprises the C-terminal end of the nucleic acid programmable nuclease fused to the N-terminal end of the retron reverse transcriptase (nuclease:RT fusion); or the fusion protein comprises the N-terminal end of the nucleic acid programmable nuclease fused to the C-terminal end of the retron reverse transcriptase (RT:nuclease fusion).

[0015] In an embodiment, in the gene editing system, (a)(i) and (a)(ii) comprise a first mRNA molecule encoding the nucleic acid programmable nuclease and a second mRNA molecule encoding the retron reverse transcriptase.

[0016] In an embodiment, in the gene editing system, (c) is separate from (a)(i), (a)(ii) and (b) or is provided in trans.

[0017] In an embodiment, in the gene editing system, (b) the engineered retron ncRNA, and (c) the guide RNA are fused or are provided in cis.

[0018] In an embodiment, in the gene editing system, (b) the engineered retron ncRNA, and (c) the guide RNA are fused or are provided in cis and the guide RNA is fused to the 5′ end of the retron ncRNA.

[0019] In an embodiment, in the gene editing system, (b) the engineered retron ncRNA, and (c) the guide RNA are fused or are provided in cis and the guide RNA is fused to the 3′ end of the retron ncRNA.

[0020] In an embodiment, in the gene editing system, (b) the engineered retron ncRNA, and (c) the guide RNA are fused or are provided in cis and the engineered ncRNA comprises a first guide RNA fused to the 5′ end of the retron ncRNA, and a second guide RNA fused to the 3′ end of the retron ncRNA, and the first and second guide RNAs target different sequences. Thus, on a broader scale, in an embodiment, in the gene editing system, (c) guide RNA for the programmable nuclease, can comprise one or more guides that target the same or different target sequences. Such guide RNA(s) in an embodiment, can be single guide RNA(s) or sgRNA(s); for instance, when the nucleic acid programmable nuclease comprises a Cas9.

[0021] In an embodiment, in the gene editing system, the one or more delivery vehicles comprise a liposome or a lipid nanoparticle (LNP).

[0022] In an embodiment, in the gene editing system, (a) the at least one mRNA molecule encoding (i) the nucleic acid programmable nuclease and (ii) the retron reverse transcriptase, and (b) the engineered retron ncRNA, are in the same delivery vehicle.

[0023] In an embodiment, in the gene editing system, (a) the at least one mRNA molecule encoding (i) the nucleic acid programmable nuclease and (ii) the retron reverse transcriptase, and (b) the engineered retron ncRNA, are in separate delivery vehicles.

[0024] In an embodiment, in the gene editing system, the nucleic acid programmable nuclease and the retron reverse transcriptase are encoded on separate mRNA molecules and those separate mRNA molecules of (a)(i) and (a)(ii) are contained in the same delivery vehicle.

[0025] In an embodiment, in the gene editing system, the nucleic acid programmable nuclease and the retron reverse transcriptase are encoded on separate mRNA molecules and those separate mRNA molecules of (a)(i) and (a)(ii) are contained in different delivery vehicles.

[0026] In an embodiment, in the gene editing system, the engineered retron ncRNA includes a sequence of interest encoding a donor polynucleotide comprising an intended edit to be integrated at a target sequence in a cell, and wherein the donor polynucleotide is flanked by a 5′ homology arm that hybridizes to a sequence 5′ to the target sequence and a 3′ homology arm that hybridizes to a sequence 3′ to the target sequence. In an embodiment, the donor polynucleotide can be heterologous to the cell. In an embodiment, the donor polynucleotide can be endogenous to the cell; for instance, the cell can contain a sequence that is typical for those in a population having a disease state and the donor polynucleotide can be a sequence that is typical for those in the population not having a non-disease state (e.g., the donor can be for a genetic correction or repair of a cell to modify the cell from having a mutation or modification that gives rise to a disease state to having a sequence typical of not having the disease state). Such can be done in an animal cell, or a mammalian cell (e.g., a primate, a non-human primate, or a domesticated mammal such as a cat or dog or horse) or a human cell; for instance to correct, address, treat, mitigate a genetic condition in the animal, mammal, domesticated mammal, cat, dog, horse or human. Such can be done in plant cells to introduce mutations that give rise to favorable phenotypic characteristics such as disease resistance or other favorable plant trait(s).

[0027] In an embodiment, in the gene editing system, the nucleic acid programmable nuclease comprises a Cas9 nuclease, a TnpB nuclease, or a Cas12a nuclease.

[0028] In an embodiment, in the gene editing system, the engineered retron ncRNA comprises: A) a pre-msr sequence having a first complementary region of the retron ncRNA; B) an msr sequence including an msr stem-loop structure; C) an msd sequence including an msd stem-loop structure and a sequence of interest, wherein said msd sequence templates a single strand DNA product (RT-DNA) in the presence of the retron reverse transcriptase; and D) a post-msd sequence having a second complementary region, wherein the first and second complementary regions form an a1/a2 duplex region of the retron ncRNA, wherein the msr stem-loop structure, the msd stem-loop structure, or the a1/a2 duplex comprise a modification which result in increased editing efficiency in the presence of a nucleic acid programmable nuclease that associates with the one or more guide RNAs, and wherein optionally one or more of the guide RNAs of (c) are coupled to the pre-msr sequence, the post-msd sequence, or both the pre-msr sequence and the post-msd sequence. In such an embodiment where the engineered retron ncRNA comprises A), B), C) and D), wherein the sequence of interest can encode a donor polynucleotide comprising an intended edit to be integrated at a target sequence of a cell, wherein the donor polynucleotide is flanked by a 5′ homology arm that hybridizes to a sequence 5′ to the target sequence and a 3′ homology arm that hybridizes to a sequence 3′ to the target sequence. In such an embodiment where the engineered retron ncRNA comprises A), B), C) and D) (either with the sequence of interest encoding a donor polynucleotide or simply being a sequence of interest), the ncRNA has a nucleotide sequence of Table B, or a nucleotide sequence having at least 75%, 80%, 85%, 90%, 95%, 99%, or 100% sequence identity with a sequence from Table B. The donor polynucleotide can be heterologous to a cell. Alternatively, the donor polynucleotide can be endogenous to the cell. For instance, the cell can contain a sequence that is typical for those in a population having a disease state and the donor polynucleotide can be a sequence that is typical for those in the population not having a non-disease state (e.g., the donor can be for a genetic correction or repair of a cell to modify the cell from having a mutation or modification that gives rise to a disease state to having a sequence typical of not having the disease state).

[0029] In an embodiment of the gene editing system, the gene editing system can comprise any combination(s) of the foregoing embodiments of the gene editing system.

[0030] In an embodiment, this disclosure or the inventions herein provide a cell, such as an isolated cell comprising the gene editing system disclosed herein, such as in any of the foregoing paragraphs. In an embodiment the cell, e.g., isolated cell, can be a eukaryotic cell. In an embodiment the eukaryotic cell can be a plant cell or an animal cell or a mammalian cell, e.g., an isolated plant cell or an isolated animal cell or an isolated mammalian cell. In an embodiment, the mammalian cell, e.g., an isolated mammalian cell, can be a human cell. In an embodiment, the cell can be a prokaryotic cell, e.g., a bacterial cell. In such an embodiment where the cell is a bacterial cell, the donor polynucleotide can code for antibiotic susceptibility; and thus, the invention can involve a means for addressing antibiotic resistant bacteria by rendering such bacteria susceptible to antibiotics (and a subject to whom the gene editing system is administered can also then receive antibiotics to which the bacteria are rendered susceptible by the gene editing system).

[0031] In an embodiment, this disclosure or the inventions herein provide a composition comprising: a) the gene editing system disclosed herein, such as in any of the foregoing paragraphs; and b) a pharmaceutically or veterinarily acceptable carrier. In an embodiment, in the composition the delivery vehicle can comprise a lipid nanoparticle comprising: a) one or more ionizable lipids; b) one or more structural lipids; c) one or more PEGylated lipids; and d) one or more phospholipids. In an embodiment, in the composition the one or more ionizable lipids comprises an ionizable lipid set forth in Table 2.

[0032] In an embodiment, this disclosure or the inventions herein provide uses of the gene editing system embodiments and/or the compositions disclosed herein, such as in any of the foregoing paragraphs; for instance, use in modifying a cell or genetically modifying a cell, e.g., a eukaryotic or a prokaryotic cell and/or an animal cell and/or a mammalian and/or a human cell and/or a bacterial cell and/or a plant cell, in vivo, in vitro or ex vivo (e.g., any cell discussed herein wherein the cell comprises an isolated cell). In an embodiment this disclosure or the inventions herein provide uses of the gene editing system embodiments and/or the compositions disclosed herein, such as in any of the foregoing paragraphs; for instance, use in treating or addressing a genetic condition of a subject,

[0033] In an embodiment, this disclosure or the inventions herein provide methods of genetically modifying a cell comprising: contacting a gene editing system as herein discussed, such as in any of the foregoing paragraphs, or a composition as herein discussed, such as in any of the foregoing paragraphs (which comprises a gene editing system as herein discussed, such as in any of the foregoing paragraphs), advantageously a gene editing system that includes a sequence of interest encoding a donor polynucleotide comprising an intended edit to be integrated at a target sequence in a cell, said method comprising contacting the composition or the gene editing system with the cell, thereby delivering the RNA cargo to the cell, wherein: the nucleic acid programmable nuclease forms a complex with the guide RNA, wherein said guide RNA directs the complex to the target sequence; the nucleic acid programmable nuclease creates a double-stranded break in in the target sequence; the retron reverse transcriptase and engineered retron ncRNA create RT DNA that comprises the donor polynucleotide; and the donor polynucleotide becomes integrated at the target sequence; whereby editing the cell is genetically modified. In an embodiment, the cell can be a eukaryotic or a prokaryotic cell or an animal cell or a mammalian cell or a human cell or a bacterial cell or a plant cell.

[0034] Exemplary and non-limiting aspects and embodiments of the disclosure are summarized as follows in the form of numbered paragraphs.
[0035] 1. A gene editing system comprising one or more delivery vehicles, wherein:
   [0036] the delivery vehicle(s) comprise RNA cargo,
   [0037] said RNA cargo comprises (a) at least one mRNA molecule encoding (i) a nucleic acid programmable nuclease and (ii) a retron reverse transcriptase, (b) an engineered retron ncRNA, and (c) guide RNA for the nucleic acid programmable nuclease,
   [0038] each delivery vehicle contains (a)(i) and/or (a)(ii) and/or (b) and/or (c),
   [0039] whereby one delivery vehicle or more than one delivery vehicle delivers (a)(i), (a)(ii), (b), and (c).
[0040] 2. The gene editing system of paragraph 1,
   [0041] wherein the engineered retron ncRNA comprises an HDR nucleotide sequence substituted into a retron ncRNA;
   [0042] wherein the retron reverse transcriptase has an amino acid sequence comprising at least 90% sequence identity to a retron reverse transcriptase of Table A;
   [0043] wherein the retron ncRNA has about 85% to 98% sequence identity to a retron ncRNA of Table B.
[0044] 3. The gene editing system of paragraph 2, wherein the retron ncRNA and the retron reverse transcriptase are from the same clade.
[0045] 4. The gene editing system of paragraph 2, wherein the retron ncRNA nucleotide sequence has about 85% to 98% sequence identity to SEQ ID NO:15327, and the retron reverse transcriptase has at least 90% sequence identity to a type I-C retron reverse transcriptase.
[0046] 5. The gene editing system of paragraph 4, wherein the retron reverse transcriptase comprises an amino acid sequence at least about 90% identical to SEQ ID NO:1262.
[0047] 6. The gene editing system of paragraph 4, wherein the retron ncRNA nucleotide sequence has about 85% to 98% sequence identity to SEQ ID NO:16411, and the retron reverse transcriptase has at least 90% sequence identity to a type III retron reverse transcriptase.
[0048] 7. The gene editing system of paragraph 6, wherein the retron reverse transcriptase comprises an amino acid sequence at least about 90% identical to SEQ ID NO:2781.
[0049] 8. The gene editing system of paragraph 6, wherein the retron ncRNA nucleotide sequence has about 85% to 98% sequence identity to SEQ ID NO:18731. and the retron reverse transcriptase has at least 90% sequence identity to a type XIII retron reverse transcriptase.
[0050] 9. The gene editing system of paragraph 8, wherein the retron reverse transcriptase comprises an amino acid sequence at least about 90% identical to SEQ ID NO:6342.
[0051] 10. The gene editing system of paragraph 1, wherein the retron reverse transcriptase comprises at least one amino acid substitution that increases processivity and/or fidelity.
[0052] 11. The gene editing system of paragraph 10, wherein the retron reverse transcriptase comprises an amino acid substitution in an amino acid residue that corresponds to the following amino acid residues in Eco1 RT: Q190, E302, or T306.
[0053] 12. The gene editing system of paragraph 10, wherein the retron reverse transcriptase comprises an amino acid substitution in an amino acid residue that corresponds to the following amino acid substitutions in Eco1 RT: Q190F, E302R, or T306K.
[0054] 13. A gene editing system comprising one or more delivery vehicles, wherein:
   [0055] the delivery vehicle(s) comprise RNA cargo,
   [0056] said RNA cargo comprises (a) at least one mRNA molecule encoding (i) a nucleic acid programmable nuclease and (ii) an engineered retron reverse transcriptase, (b) an engineered retron ncRNA, and (c) guide RNA for the programmable nuclease,
   [0057] each delivery vehicle contains (a)(i) and/or (a)(ii) and/or (b) and/or (c),
   [0058] whereby one delivery vehicle or more than one delivery vehicle delivers (a)(i), (a)(ii), (b), and (c), and
   [0059] wherein the engineered retron reverse transcriptase comprises a processivity enhancing domain or a fidelity enhancing domain.
[0060] 14. The gene editing system of paragraph 13, wherein the processivity enhancing domain comprises Sso7d or Sac7d.
[0061] 15. The gene editing system of paragraph 13, wherein the fidelity enhancing domain comprises a 3′ to 5′ exonuclease domain.
[0062] 16. The gene editing system of paragraph 15, wherein the exonuclease domain comprises POLE1 POLD1, POLG, Pfu, or KOD.
[0063] 17. The gene editing system of paragraph 13, wherein the engineered retron ncRNA comprises an HDR nucleotide sequence substituted into a retron ncRNA;
   [0064] wherein the retron reverse transcriptase has an amino acid sequence comprising at least 90% sequence identity to a retron reverse transcriptase of Table A;
   [0065] wherein the retron ncRNA has about 85% to 98% sequence identity to a retron ncRNA of Table B.
[0066] 18. The gene editing system of paragraph 13, wherein the retron ncRNA and the retron reverse transcriptase are from the same clade.
[0067] 19. A gene editing system comprising one or more delivery vehicles, wherein:
   [0068] the delivery vehicle(s) comprise RNA cargo,
   [0069] said RNA cargo comprises (a) at least one mRNA molecule encoding (i) a nucleic acid programmable nuclease and (ii) an engineered reverse transcriptase, (b) an engineered retron ncRNA, and (c) guide RNA for the programmable nuclease,
   [0070] each delivery vehicle contains (a)(i) and/or (a)(ii) and/or (b) and/or (c),
   [0071] whereby one delivery vehicle or more than one delivery vehicle delivers (a)(i), (a)(ii), (b), and (c), and
   [0072] wherein the engineered reverse transcriptase comprises a Y region domain that is from a retron RT that corresponds to the engineered retron ncRNA.
[0073] 20. The gene editing system of paragraph 19, wherein the engineered reverse transcriptase is a chimera comprising an MMLV RT fused to the Y region of the retron RT.
[0074] 21. The gene editing system of paragraph 1, wherein (a)(i) and (a)(ii) comprise a single mRNA molecule encoding the nucleic acid programmable nuclease and the retron reverse transcriptase.
[0075] 22. The gene editing system of paragraph 21, wherein (a)(i) and (a)(ii) are encoded and expressed as a fusion protein.
[0076] 23. The gene editing system of paragraph 22, wherein the fusion protein comprises the C-terminal end of the nucleic acid programmable nuclease fused to the N-terminal end of the retron reverse transcriptase (nuclease:RT fusion).
[0077] 24. The gene editing system of paragraph 22, wherein the fusion protein comprises the N-terminal end of the nucleic acid programmable nuclease fused to the C-terminal end of the retron reverse transcriptase (RT:nuclease fusion).
[0078] 25. The gene editing system of paragraph 1, wherein (a)(i) and (a)(ii) comprise a first mRNA molecule encoding the nucleic acid programmable nuclease and a second mRNA molecule encoding the retron reverse transcriptase.
[0079] 26. The gene editing system of paragraph 1, wherein (c) is separate from (a)(i), (a)(ii) and (b) or is provided in trans.
[0080] 27. The gene editing system of paragraph 1, wherein (b) the engineered retron ncRNA, and (c) the guide RNA are fused or are provided in cis.
[0081] 28. The gene editing system of paragraph 27, wherein the guide RNA is fused to the 5′ end of the retron ncRNA.
[0082] 29. The gene editing system of paragraph 27, wherein the guide RNA is fused to the 3′ end of the retron ncRNA.
[0083] 30. The gene editing system of paragraph 27, wherein the engineered ncRNA comprises a first guide RNA fused to the 5′ end of the retron ncRNA, and a second guide RNA fused to the 3′ end of the retron ncRNA, and the first and second guide RNAs target different sequences.
[0084] 31. The gene editing system of paragraph 1, wherein the one or more delivery vehicles comprise a liposome or a lipid nanoparticle (LNP).
[0085] 32. The gene editing system of paragraph 1, wherein (a) the at least one mRNA molecule encoding (i) the nucleic acid programmable nuclease and (ii) the retron reverse transcriptase, and (b) the engineered retron ncRNA are in the same delivery vehicle.
[0086] 33. The gene editing system of paragraph 1, wherein the (a) the at least one mRNA molecule encoding (i) the nucleic acid programmable nuclease and (ii) the retron reverse transcriptase, and (b) the engineered retron ncRNA are in separate delivery vehicles.
[0087] 34. The gene editing system of paragraph 1, wherein the nucleic acid programmable nuclease and the retron reverse transcriptase are encoded on separate mRNA molecules and those separate mRNA molecules of (a)(i) and (a)(ii) are contained in the same delivery vehicle.
[0088] 35. The gene editing system of paragraph 1, wherein the nucleic acid programmable nuclease and the retron reverse transcriptase are encoded on separate mRNA molecules and those separate mRNA molecules of (a)(i) and (a)(ii) are contained in different delivery vehicles.
[0089] 36. The gene editing system of paragraph 1, wherein the engineered retron ncRNA includes a sequence of interest encoding a donor polynucleotide comprising an intended edit to be integrated at a target sequence in a cell, and wherein the donor polynucleotide is flanked by a 5′ homology arm that hybridizes to a sequence 5′ to the target sequence and a 3′ homology arm that hybridizes to a sequence 3′ to the target sequence.
[0090] 37. The gene editing system of paragraph 1, wherein the nucleic acid programmable nuclease comprises a Cas9 nuclease, a TnpB nuclease, or a Cas12a nuclease.
[0091] 38. The gene editing system of paragraph 1, wherein the nucleic acid programmable nuclease comprises a Cas9 nuclease.
[0092] 39. The gene editing system of paragraph 1, wherein the nucleic acid programmable nuclease comprises a Cas9 nickase.
[0093] 40. An isolated cell comprising the gene editing system of paragraph 1.
[0094] 41. The isolated cell of paragraph 40, wherein the isolated cell is a mammalian cell.
[0095] 42. The isolated cell of paragraph 41, wherein the mammalian cell is a human cell.
[0096] 43. A composition comprising:
   [0097] a) the gene editing system of paragraph 1; and
   [0098] b) a pharmaceutically or veterinarily acceptable carrier.
[0099] 44. The composition of paragraph 43, wherein the delivery vehicle is a lipid nanoparticle comprising:
   [0100] a) one or more ionizable lipids;
   [0101] b) one or more structural lipids;
   [0102] c) one or more PEGylated lipids; and
   [0103] d) one or more phospholipids.
[0104] 45. The composition of paragraph 44, wherein the one or more ionizable lipids comprises an ionizable lipid set forth in Table 2.
[0105] 46. A method of genetically modifying a cell comprising:
[0106] contacting the gene editing system of paragraph 1 with the cell, thereby delivering the RNA cargo to the cell,
   [0107] wherein:
   [0108] the nucleic acid programmable nuclease forms a complex with the guide RNA, wherein said guide RNA directs the complex to the target sequence,
   [0109] the nucleic acid programmable nuclease creates a double-stranded break in in the target sequence,
   [0110] the retron reverse transcriptase and engineered retron ncRNA create RT DNA that comprises the donor polynucleotide, and
   [0111] the donor polynucleotide becomes integrated at the target sequence,
[0112] whereby editing the cell is genetically modified.

[0113] Further exemplary and non-limiting aspects and embodiments of the disclosure are summarized as follows in the form of numbered paragraphs.
[0114] 1. An engineered nucleic acid construct comprising:
   [0115] a) a first polynucleotide encoding a non-coding RNA (ncRNA), said first polynucleotide comprising:
      [0116] 1) an msr locus encoding the msr RNA portion of a multi-copy single-stranded DNA (msDNA); and
      [0117] 2) an msd locus encoding the msd RNA portion of the msDNA; and
   [0118] b) one or more heterologous nucleic acids inserted at or within a location selected from: the msd locus, upstream of the msr locus, upstream of the msd locus, and downstream of the msd locus,
   [0119] wherein the ncRNA comprises:
   [0120] (I) an ncRNA listed in Table B, or an ncRNA having at least 50%, at least 55%, at least 60%, at least 65%, at least 70%, at least 75%, at least 80%, at least 85%, at least 90%, at least 910%, at least 92%, at least 93%, at least 94%, at least 95%, at least 96%, at least 97%, at least 98%, at least 99%, at least 99.1%, at least 99.2%, at least 99.3%, at least 99.4%, at least 99.5%, at least 99.6%, at least 99.7%, at least 99.8% or at least 99.9% sequence identity with an ncRNA listed in Table B; and/or
   [0121] (II) an ncRNA having a conserved structure of any one of the ncRNA structures of FIGS. 2-27; and
   [0122] wherein the ncRNA optionally excludes any ncRNA associated in nature with any one of the retron reverse transcriptases of Table X.
[0123] 2. The engineered nucleic acid construct of paragraph 1, further comprising a second polynucleotide encoding a reverse transcriptase (RT), or a portion thereof, wherein the encoded RT or portion thereof is capable of synthesizing a DNA copy of at least a portion of the msd locus encoding the msDNA.
[0124] 3. The engineered nucleic acid construct of paragraph 2,
   [0125] wherein the second polynucleotide comprises:
      [0126] III) a polynucleotide listed in Table A, or a polynucleotide having at least 50%, at least 55%, at least 60%, at least 65%, at least 70%, at least 75%, at least 80%, at least 85%, at least 90%, at least 91%, at least 92%, at least 93%, at least 94%, at least 95%, at least 96%, at least 97%, at least 98%, at least 99%, at least 99.1%, at least 99.2%, at least 99.3%, at least 99.4%, at least 99.5%, at least 99.6%, at least 99.7%, at least 99.8% or at least 99.9% sequence identity to a polynucleotide listed in Table A; and/or
      [0127] IV) encodes a consensus amino acid sequence of Table C, or encodes an amino acid sequence having at least 50%, at least 55%, at least 60%, at least 65%, at least 70%, at least 75%, at least 80%, at least 85%, at least 90%, at least 91%, at least 92%, at least 93%, at least 94%, at least 95%, at least 96%, at least 97%, at least 98%, at least 99%, at least 99.1%, at least 99.2%, at least 99.3%, at least 99.4%, at least 99.5%, at least 99.6%, at least 99.7%, at least 99.8% or at least 99.9% sequence identity to an amino acid sequence listed in Table C; and/or
   [0128] wherein the second polynucleotide encodes:
      [0129] V) a polypeptide listed in Table A, or a polypeptide having at least 50%, at least 55%, at least 60%, at least 65%, at least 70%, at least 75%, at least 80%, at least 85%, at least 90%, at least 91%, at least 92%, at least 93%, at least 94%, at least 95%, at least 96%, at least 97%, at least 98%, at least 99%, at least 99.1%, at least 99.2%, at least 99.3%, at least 99.4%, at least 99.5%, at least 99.6%, at least 99.7%, at least 99.8% or at least 99.9% sequence identity to a polypeptide listed in Table A; and/or
      [0130] VI) a polypeptide comprising a polypeptide consensus sequence listed in Table C, or a polypeptide having at least 50%, at least 55%, at least 60%, at least 65%, at least 70%, at least 75%, at least 80%, at least 85%, at least 90%, at least 91%, at least 92%, at least 93%, at least 94%, at least 95%, at least 96%, at least 97%, at least 98%, at least 99%, at least 99.1%, at least 99.2%, at least 99.3%, at least 99.4%, at least 99.5%, at least 99.6%, at least 99.7%, at least 99.8% or at least 99.9% sequence identity to an amino acid sequence listed in Table C; and/or
   [0131] wherein the second polynucleotide optionally does not encode an amino acid sequence listed in Table X.
[0132] 4. An engineered nucleic acid construct comprising:
   [0133] a) a first polynucleotide encoding a non-coding RNA (ncRNA), said first polynucleotide comprising:
      [0134] 1) an msr locus encoding the msr RNA portion of a multi-copy single-stranded DNA (msDNA); and
      [0135] 2) an msd locus encoding the msd RNA portion of the msDNA;
   [0136] b) one or more heterologous nucleic acids inserted at or within a location selected from: the msd locus, upstream of the msr locus, upstream of the msd locus, and downstream of the msd locus; and
   [0137] c) a second polynucleotide encoding a reverse transcriptase (RT), or a portion thereof, wherein the encoded RT or portion thereof is capable of synthesizing a DNA copy of at least a portion of the msd locus encoding the msDNA, and,
   [0138] wherein the non-coding RNA (ncRNA) of the first polynucleotide optionally has a conserved structure of any one of the ncRNA structures of FIGS. 2-27;
   [0139] wherein the second polynucleotide comprises:
   [0140] I) a polynucleotide listed in Table A, or a polynucleotide having at least 50%, at least 55%, at least 60%, at least 65%, at least 70%, at least 75%, at least 80%, at least 85%, at least 90%, at least 91%, at least 92%, at least 93%, at least 94%, at least 95%, at least 96%, at least 97%, at least 98%, at least 99%, at least 99.1%, at least 99.2%, at least 99.3%, at least 99.4%, at least 99.5%, at least 99.6%, at least 99.7%, at least 99.8% or at least 99.9% sequence identity to a polynucleotide listed in Table A; and/or
   [0141] wherein the second polynucleotide encodes:
   [0142] II) a polypeptide listed in Table A, or a polypeptide having at least 50%, at least 55%, at least 60%, at least 65%, at least 70%, at least 75%, at least 80%, at least 85%, at least 90%, at least 91%, at least 92%, at least 93%, at least 94%, at least 95%, at least 96%, at least 97%, at least 98%, at least 99%, at least 99.1%, at least 99.2%, at least 99.3%, at least 99.4%, at least 99.5%, at least 99.6%, at least 99.7%, at least 99.8% or at least 99.9% sequence identity to a polypeptide listed in Table A; and/or
   [0143] IV) a polypeptide comprising a polypeptide consensus sequence listed in Table C, or a polypeptide having at least 50%, at least 55%, at least 60%, at least 65%, at least 70%, at least 75%, at least 80%, at least 85%, at least 90%, at least 91%, at least 92%, at least 93%, at least 94%, at least 95%, at least 96%, at least 97%, at least 98%, at least 99%, at least 99.1%, at least 99.2%, at least 99.3%, at least 99.4%, at least 99.5%, at least 99.6%, at least 99.7%, at least 99.8% or at least 99.9% sequence identity to a polypeptide listed in Table C; and
   [0144] wherein the second polynucleotide optionally does not encode an amino acid sequence of Table X.
[0145] 4a. An engineered nucleic acid construct, comprising:
   [0146] 1) an msr locus (that encodes the msr RNA portion of an msDNA);
   [0147] 2) an msd locus encoding the msd RNA portion of the msDNA;
   [0148] 3) a sequence encoding a retron reverse transcriptase (RT), wherein said msd RNA is capable of being reverse transcribed to form the msDNA by the retron reverse transcriptase (RT); and,
   [0149] 4) a heterologous nucleic acid inserted at or within the msd locus, upstream of the msr locus, upstream or downstream of the msd locus;
   [0150] wherein the engineered nucleic acid construct optionally has (a) a secondary structure of a wild-type ncRNA of any one of FIGS. 2-27 or
   [0151] b) a variant of a), having:
      [0152] i) up to 1, 2, or 3 (e.g., up to 1) nucleotide changes per 10 red lettered-nucleotides;
      [0153] ii) up to 4, 5, or 6 (e.g., up to 1 or 2) nucleotide changes per 10 black lettered-nucleotides; and/or
      [0154] iii) up to 7, 8, or 9 (e.g., up to 3 or 4) nucleotide changes per 10 grey lettered-nucleotides; and/or
      [0155] optionally further comprising:
      [0156] i) 7, 8, 9, or 10 (e.g., 9 or 10) nucleotides present per 10 red-circled nucleotides;
      [0157] ii) 6, 7, 8, 9, or 10 (e.g., 8, 9 or 10) nucleotides present per 10 black-circled nucleotides;
      [0158] iii) 4, 5, 6, 7, 8, 9, or 10 (e.g., 6, 7, 8, 9 or 10) nucleotides present per 10 grey-circled nucleotides; and/or
      [0159] iv) 2, 3, 4, 5, 6, 7, 8, 9, or 10 (e.g., 4, 5, 6, 7, 8, 9, or 10) nucleotides present per 10 white-circled nucleotides.
[0160] 5. The engineered nucleic acid construct of any one of paragraphs 1 to 4a, comprising one or more sequence modifications (e.g., an insertion, deletion, and/or substitution of one or more nucleotide(s)) in the msr locus and/or the msd locus that:
   [0161] a) modulates (e.g., enhances) reverse transcription, processivity, accuracy/fidelity, and/or production of the msDNA (e.g., in the mammalian cell);
   [0162] b) modulates (e.g., reduces) immunogenicity of ncRNA encoded by the engineered retron (e.g., the msr locus and/or the msd locus) in a host (e.g., a host comprising the mammalian cell);
   [0163] c) modulates (e.g., inhibits, either permanently or transiently) a function of the msDNA; and/or
   [0164] d) modulates (e.g., improves) efficiency of targeted genome editing/engineering.
[0165] 6. The engineered nucleic acid construct of any one of paragraphs 1 to 4, wherein said engineered nucleic acid construct has a secondary structure of a wild-type retron encoding a wild-type retron ncRNA encompassed by:
   [0166] a) any one of the structures as depicted in FIGS. 2-27, or
   [0167] b) a variant of a), having:
      [0168] i) up to 1, 2, or 3 (e.g., up to 1) nucleotide changes per 10 red lettered-nucleotides;
      [0169] ii) up to 4, 5, or 6 (e.g., up to 1 or 2) nucleotide changes per 10 black lettered-nucleotides; and/or
      [0170] iii) up to 7, 8, or 9 (e.g., up to 3 or 4) nucleotide changes per 10 grey lettered-nucleotides; and/or
   [0171] optionally further comprising:
      [0172] i) 7, 8, 9, or 10 (e.g., 9 or 10) nucleotides present per 10 red-circled nucleotides;
      [0173] ii) 6, 7, 8, 9, or 10 (e.g., 8, 9 or 10) nucleotides present per 10 black-circled nucleotides;
      [0174] iii) 4, 5, 6, 7, 8, 9, or 10 (e.g., 6, 7, 8, 9 or 10) nucleotides present per 10 grey-circled nucleotides; and/or
      [0175] iv) 2, 3, 4, 5, 6, 7, 8, 9, or 10 (e.g., 4, 5, 6, 7, 8, 9, or 10) nucleotides present per 10 white-circled nucleotides.
[0176] 7. The engineered nucleic acid construct of any one of paragraphs 1-6, wherein the nucleic acid construct is engineered by introducing the one or more sequence modifications into a wild-type retron encoding a wild-type ncRNA listed in Table B.
[0177] 8. The engineered nucleic acid construct of any one of paragraphs 1-7, wherein the one or more sequence modifications in the ncRNA comprises one or more of:
   [0178] (i) a modified (e.g., mutated, reduced, or eliminated) bulge in a1, a2, or both a1 and a2;
   [0179] (ii) an extension or shortening of a1, a2, or both a1 and a2;
   [0180] (iii) an extension or shortening of a spacer sequence between hairpin loops (e.g., S1, S2, S3, and/or S4);
   [0181] (iv) an additional or modified (e.g., mutated or eliminated) bulge in hairpin loops (e.g., L2 and/or L3 (e.g., by removing unpaired bases in the bulge, or by replacing unpaired bases with an equivalent number of base pairs));
   [0182] (v) a modified (e.g., extended or shortened) length of hairpin loops (e.g., L1, L2, L3, and/or L4);
   [0183] (vi) an alternative L1 and/or L2 having complement, reverse, or reverse complement sequences;
   [0184] (vii) a modified (e.g., increased) number of unpaired bases at the tip of hairpin loops (e.g., L1, L2, L3, and/or L4);
   [0185] (viii) a modified (e.g., increased or decreased) GC content in hairpin loops (e.g., L1, L2, L3, and/or L4);
   [0186] (ix) an insertion of the heterologous nucleic acid in spacer sequences between hairpin loops (e.g., S1, S2, S3 and/or S4), or at the tip of hairpin loops (e.g., L1, L2, L3, and/or L4);
   [0187] (x) a deletion of one or more hairpin loops (e.g., L1, L2, L3 and/or L4);
   [0188] (xi) an addition of a new loop in a spacer sequence between hairpin loops (e.g., S1, S2, S3, and/or S4);
   [0189] (xii) circularization of the ncRNA with the 5′ end and the 3′ end of the ncRNA being connected either directly, or via a spacer sequence;
   [0190] (xiii) a repositioned branching guanosine capable of initiating reverse transcription priming;
   [0191] (xiv) a staggered end sequence that reduces immunogenicity of the retron ncRNA, created by, e.g., adding or removing the 5′ al nucleotides and/or the 3′ a2 nucleotides; and/or,
   [0192] (xv) an antisense sequence complementary to a CRISPR/Cas guide RNA (gRNA) sequence encoded by the heterologous nucleic acid, wherein the antisense sequence hybridizes to and inhibits said gRNA in the encoded retron ncRNA, and wherein said antisense sequence is removed upon reverse transcription of the msDNA.
[0193] 9. The engineered nucleic acid construct of any one of paragraphs 1-8, wherein the one or more heterologous nucleic acid sequences comprise:
   [0194] a) a heterologous nucleic acid (such as the coding sequence for an RNA aptamer or a ribozyme) inserted into the msr locus or the msd locus (such as in an S region (e.g., S1, S2, S3 and/or S4), or the tip of an L region (e.g., L1, L2, L3 and/or L4), or upstream or downstream of either the msr locus or the msd locus; or
   [0195] b) a first heterologous nucleic acid inserted into the msd locus, and a second heterologous nucleic acid inserted either upstream of the msr locus or downstream of the msd locus, wherein the second heterologous nucleic acid encodes a guide RNA.
[0196] 10. The engineered nucleic acid construct of any one of paragraphs 1-9, wherein said heterologous nucleic acid encodes:
   [0197] (a) a protein or peptide of interest, or wherein said heterologous nucleic acid comprises;
   [0198] (b) a DNA donor template sequence;
   [0199] (c) a functional DNA element selected from a promoter, an enhancer, a protein binding sequence, a methylation site, a homology region for assisting gene editing, and the like; or
   [0200] (d) a coding sequence for a functional RNA element selected from a guide RNA and a ncRNA.
[0201] 11. The engineered nucleic acid construct of paragraph 10, wherein said protein or peptide of interest comprises a therapeutic protein useful in treating a disease.
[0202] 12. The engineered nucleic acid construct of paragraph 10, wherein said DNA donor template sequence corrects/repairs/removes a mutation at the target genome site.
[0203] 13. The engineered nucleic acid construct of any one of paragraphs 1-12, further comprising or encoding a sequence-specific nuclease (such as a CRISPR/Cas effector enzyme, a ZFN, a TALEN, a meganuclease, TnpB, IscB, or a restriction endonuclease (RE)), and/or a DNA-repair modulating biomolecule.
[0204] 13b. The engineered nucleic acid construct of paragraphs 1-13 wherein the engineered nucleic acid is an all-RNA component system.
[0205] 13c. The engineered nucleic acid construct of paragraphs 1-13 wherein the engineered nucleic acid is an all-DNA molecule system.
[0206] 14. The engineered nucleic acid construct of paragraph 13, wherein the sequence-specific nuclease is fused to the RT, optionally via a flexible linker (e.g., a flexible linker comprising Gly and Ser rich sequences such as G4S repeats or GS repeats) or by a generally disordered protein sequence (such as unstructured hydrophilic, biodegradable protein polymer, e.g., an XTEN peptide polymer).
[0207] 15. The engineered nucleic acid construct of paragraph 13 or 14, wherein the nuclease is a CRISPR/Cas effector enzyme that forms a complex with a guide RNA (gRNA) recognizing a target sequence, wherein the gRNA is linked to the ncRNA and/or the msDNA, either directly or through a linker/spacer polynucleotide.
[0208] 16. The engineered nucleic acid construct of paragraph 13, wherein the DNA-repair modulating biomolecule is a regulatory protein that modulates (e.g., enhances) HDR, and the regulatory protein is fused to the RT or to the sequence-specific nuclease, optionally via a flexible linker (e.g., the flexible linker comprising Gly and Ser rich sequences such as G4S repeats or GS repeats) or by a generally disordered protein sequence (such as unstructured hydrophilic, biodegradable protein polymer, e.g., an XTEN peptide polymer).
[0209] 17. A vector system comprising one or more vectors comprising the engineered nucleic acid construct of any one of paragraphs 1-16, wherein the vector system is optionally all-RNA.
[0210] 18. The vector system of paragraph 17, wherein the msr locus, the msd locus, and the polynucleotide encoding the RT are comprised within the same vector.
[0211] 19. The vector system of paragraph 17 or 18, wherein the same vector further comprises a promoter operably linked to the msr locus and/or the msd locus.
[0212] 20. The vector system of paragraph 19, wherein the promoter is further operably linked to the polynucleotide encoding the RT.
[0213] 21. A vector system comprising one or more vectors, comprising the engineered nucleic acid construct of paragraph 1 or 2, wherein the vector system further comprises a second polynucleotide encoding a reverse transcriptase (RT), or a portion thereof, wherein the encoded RT is capable of synthesizing a DNA copy of at least a portion of the msd locus encoding the msDNA, and wherein the msr locus, the msd locus, and the second polynucleotide encoding the RT are provided by at least two different vectors.
[0214] 22. The vector system of paragraph 21, wherein:
   [0215] a) the second polynucleotide comprises:
      [0216] i) a polynucleotide listed in Table A, or a polynucleotide having at least 50%, at least 55%, at least 60%, at least 65%, at least 70%, at least 75%, at least 80%, at least 85%, at least 90%, at least 91%, at least 92%, at least 93%, at least 94%, at least 95%, at least 96%, at least 97%, at least 98%, at least 99%, at least 99.1%, at least 99.2%, at least 99.3%, at least 99.4%, at least 99.5%, at least 99.6%, at least 99.7%, at least 99.8% or at least 99.9% sequence identity to a polynucleotide listed in Table A; and/or
   [0217] b) the second polynucleotide encodes:
      [0218] i) a polypeptide listed in Table A, or a polypeptide having at least 50%, at least 55%, at least 60%, at least 65%, at least 70%, at least 75%, at least 80%, at least 85%, at least 90%, at least 91%, at least 92%, at least 93%, at least 94%, at least 95%, at least 96%, at least 97%, at least 98%, at least 99%, at least 99.1%, at least 99.2%, at least 99.3%, at least 99.4%, at least 99.5%, at least 99.6%, at least 99.7%, at least 99.8% or at least 99.9% sequence identity to a polypeptide listed in Table A; and/or
      [0219] ii) a polypeptide listed in Table C, or a polypeptide having at least 50%, at least 55%, at least 60%, at least 65%, at least 70%, at least 75%, at least 80%, at least 85%, at least 90%, at least 91%, at least 92%, at least 93%, at least 94%, at least 95%, at least 96%, at least 97%, at least 98%, at least 99%, at least 99.1%, at least 99.2%, at least 99.3%, at least 99.4%, at least 99.5%, at least 99.6%, at least 99.7%, at least 99.8% or at least 99.9% sequence identity to a polypeptide listed in Table C; and
   [0220] wherein the second polynucleotide optionally does not encode a polypeptide listed in Table X.
[0221] 23. The vector system of paragraph 21 or 22, wherein the polynucleotide encoding the RT is provided in trans with respect to the msr gene and/or the msd gene.
[0222] 24. The vector system of any one of paragraphs 17-23, wherein the one or more vectors comprise a viral vector.
[0223] 25. The vector system of paragraph 24, wherein the viral vector is a retroviral vector, a lentiviral vector, an adenoviral vector, an adeno-associated viral vector, a vaccinia viral vector, a poxviral vector, or a herpes simplex viral vector.
[0224] 26. The vector system of any one of paragraphs 17-23, wherein the one or more vectors comprise a non-viral vector.
[0225] 27. The vector system of paragraph 26, wherein the non-viral vector comprises a plasmid.
[0226] 28. The vector system of paragraph 26, wherein the non-viral vector comprises a liposome, a lipid nanoparticle (LNP), a cationic polymer, a vesicle, or a gold nanoparticle.
[0227] 29. The vector system of any one of paragraphs 17-28, comprising a vector encoding a sequence-specific nuclease.
[0228] 30. The vector system of paragraph 29, wherein the sequence-specific nuclease comprises an RNA-guided sequence-specific nuclease (e.g., a CRISPR/Cas effector enzyme, an engineered RNA-guided FokI-nuclease (e.g., dCas-FokI), an RNA-guided DNA endonuclease, TnpB, IscB, or a transposon-associated nuclease), or a non-RNA-guided sequence-specific nuclease (e.g., a meganuclease, a zinc finger nuclease (ZFN), a TALE nuclease (TALEN), or a restriction endonuclease (RE)).
[0229] 31. The vector system of paragraph 30, wherein the Cas effector enzyme is a Class 1, Type I, II, or III Cas; a Class 2, Type II Cas (e.g., Cas9); or a Class 2, Type V Cas (e.g., Cpf1).
[0230] 32. The vector system of paragraph 30, wherein:
   [0231] 1) the RNA-guided sequence-specific nuclease comprises the CRISPR/Cas effector enzyme, the engineered RNA-guided FokI-nuclease (e.g., dCas-FokI), the RNA-guided DNA endonuclease, TnpB, IscB, IsrB, or the transposon-associated nuclease; or,
   [0232] 2) non-RNA-guided sequence-specific nuclease comprises the meganuclease, the zinc finger nuclease (ZFN), the TALE nuclease (TALEN), or the restriction endonuclease (RE).
[0233] 33. The vector system of any one of paragraphs 17-32, further comprising a vector encoding a homologous recombination enhancer protein.
[0234] 34. An RNA molecule encoded by the engineered nucleic acid construct of any one of paragraphs 1-16.
[0235] 35. An engineered nucleic acid-enzyme construct comprising:
   [0236] a) a non-coding RNA (ncRNA) comprising:
      [0237] i) an msr locus encoding the msr RNA portion of a multi-copy single-stranded DNA (msDNA); and
      [0238] ii) an msd locus encoding the msd RNA portion of the msDNA;
   [0239] b) a heterologous nucleic acid inserted at or within a location selected from: the msd locus, upstream of the msr locus, upstream of the msd locus, and downstream of the msd locus; and
   [0240] c) a sequence encoding a reverse transcriptase (RT), or a domain thereof comprising:
      [0241] i) a polypeptide listed in Table A, or a polypeptide having at least 50%, at least 55%, at least 60%, at least 65%, at least 70%, at least 75%, at least 80%, at least 85%, at least 90%, at least 91%, at least 92%, at least 93%, at least 94%, at least 95%, at least 96%, at least 97%, at least 98%, at least 99%, at least 99.1%, at least 99.2%, at least 99.3%, at least 99.4%, at least 99.5%, at least 99.6%, at least 99.7%, at least 99.8% or at least 99.9% sequence identity to a polypeptide listed in Table A; and/or
      [0242] ii) a polypeptide listed in Table C, or a polypeptide having at least 50%, at least 55%, at least 60%, at least 65%, at least 70%, at least 75%, at least 80%, at least 85%, at least 90%, at least 91%, at least 92%, at least 93%, at least 94%, at least 95%, at least 96%, at least 97%, at least 98%, at least 99%, at least 99.1%, at least 99.2%, at least 99.3%, at least 99.4%, at least 99.5%, at least 99.6%, at least 99.7%, at least 99.8% or at least 99.9% sequence identity to a polypeptide listed in Table C; and
   [0243] wherein, the RT optionally does not comprise a polypeptide listed in Table X.
[0244] 36. An engineered nucleic acid-enzyme construct comprising:
   [0245] a) a non-coding RNA (ncRNA) comprising:
      [0246] i) an msr locus encoding the msr RNA portion of a multi-copy single-stranded DNA (msDNA); and
      [0247] ii) an msd locus encoding the msd RNA portion of the msDNA;
   [0248] wherein the ncRNA comprises:
      [0249] i) an ncRNA listed in Table B, or an ncRNA having at least 50%, at least 55%, at least 60%, at least 65%, at least 70%, at least 75%, at least 80%, at least 85%, at least 90%, at least 91%, at least 92%, at least 93%, at least 94%, at least 95%, at least 96%, at least 97%, at least 98%, at least 99%, at least 99.1%, at least 99.2%, at least 99.3%, at least 99.4%, at least 99.5%, at least 99.6%, at least 99.7%, at least 99.8% or at least 99.9% sequence identity to an ncRNA listed in Table B; and/or
      [0250] ii) an ncRNA having a conserved structure of any one of the ncRNA structures of FIGS. 2-27; and
      [0251] wherein the ncRNA optionally excludes any ncRNA associated in nature with any one of the retron reverse transcriptases of Table X;
   [0252] b) a heterologous nucleic acid inserted at or within a location selected from: the msd locus; upstream of the msr locus; upstream of the msd locus; and downstream of the msd locus; and
   [0253] c) a reverse transcriptase (RT), or a portion thereof, wherein the RT is capable of synthesizing a DNA copy of at least a portion of the msd locus encoding the msDNA.
[0254] 37. An engineered nucleic acid-enzyme construct comprising:
   [0255] a) a non-coding RNA (ncRNA) comprising:
      [0256] i) an msr locus encoding the msr RNA portion of a multi-copy single-stranded DNA (msDNA); and
      [0257] ii) an msd locus encoding the msd RNA portion of the msDNA;
   [0258] wherein, the ncRNA comprises:
      [0259] i) an ncRNA listed in Table B, or an ncRNA having at least 50%, at least 55%, at least 60%, at least 65%, at least 70%, at least 75%, at least 80%, at least 85%, at least 90%, at least 91%, at least 92%, at least 93%, at least 94%, at least 95%, at least 96%, at least 97%, at least 98%, at least 99%, at least 99.1%, at least 99.2%, at least 99.3%, at least 99.4%, at least 99.5%, at least 99.6%, at least 99.7%, at least 99.8% or at least 99.9% sequence identity to an ncRNA listed in Table B; and/or
      [0260] ii) an ncRNA having a conserved structure of any one of the ncRNA structures of FIGS. 2-27; and
      [0261] wherein the ncRNA optionally excludes any ncRNA associated in nature with any one of the retron reverse transcriptases of Table X;
   [0262] b) a heterologous nucleic acid inserted at or within a location selected from: the msd locus, upstream of the msr locus, upstream of the msd locus, and downstream of the msd locus; and
   [0263] c) a reverse transcriptase (RT) or a domain thereof:
   [0264] wherein the RT comprises:
   [0265] i) an RT listed in Table A, or an RT having at least 50%, at least 55%, at least 60%, at least 65%, at least 70%, at least 75%, at least 80%, at least 85%, at least 90%, at least 91%, at least 92%, at least 93%, at least 94%, at least 95%, at least 96%, at least 97%, at least 98%, at least 99%, at least 99.1%, at least 99.2%, at least 99.3%, at least 99.4%, at least 99.5%, at least 99.6%, at least 99.7%, at least 99.8% or at least 99.9% sequence identity to an RT listed in Table A; and/or
   [0266] ii) a consensus sequence listed in Table C, or a polypeptide having at least 50%, at least 55%, at least 60%, at least 65%, at least 70%, at least 75%, at least 80%, at least 85%, at least 90%, at least 91%, at least 92%, at least 93%, at least 94%, at least 95%, at least 96%, at least 97%, at least 98%, at least 99%, at least 99.1%, at least 99.2%, at least 99.3%, at least 99.4%, at least 99.5%, at least 99.6%, at least 99.7%, at least 99.8% or at least 99.9% sequence identity to an amino acid sequence listed in Table C; and
   [0267] wherein the RT does not optionally comprise an RT listed in Table X.
[0268] 38. An isolated host cell comprising the engineered nucleic acid construct of any one of paragraphs 1-16, the vector system of any of paragraphs 17-33, the RNA molecule of paragraph 34, or the engineered nucleic acid-enzyme construct of any one of paragraphs 35-37.
[0269] 39. The isolated host cell of paragraph 38, wherein the host cell is a prokaryotic, archeon, or eukaryotic host cell.
[0270] 40. The isolated host cell of paragraph 38, wherein the eukaryotic host cell is a mammalian host cell.
[0271] 41. The isolated host cell of paragraph 39, wherein the eukaryotic host cell is a non-human host cell.
[0272] 42. The isolated host cell of paragraph 40, wherein the mammalian host cell is a human host cell.
[0273] 43. The isolated host cell of any one of paragraphs 38-42, wherein the host cell is an artificial cell or genetically modified cell.
[0274] 44. A pharmaceutical composition comprising:
   [0275] a) the engineered nucleic acid construct of any one of paragraphs 1-16, ncRNA encoded by the engineered nucleic acid construct of any one of paragraphs 1-16, the vector system of any one of paragraphs 17-33, the RNA molecule of paragraph 34, the engineered nucleic acid-enzyme construct of any one of paragraphs 35-37, and/or the isolated host cell of any one of paragraphs 38-43; and
   [0276] b) a pharmaceutically acceptable carrier.
[0277] 45. A pharmaceutical composition comprising:
   [0278] a) a lipid nanoparticle (LNP); and
   [0279] b) the engineered nucleic acid construct of any one of paragraphs 1-16, ncRNA encoded by the engineered nucleic acid construct of any one of paragraphs 1-16, the vector system of any one of paragraphs 17-33, the RNA molecule of paragraph 34, and/or the engineered nucleic acid-enzyme construct of any one of paragraphs 35-37.
[0280] 46. The pharmaceutical composition of paragraph 45, wherein the LNP encapsulates the engineered nucleic acid construct, ncRNA, vector system, RNA molecule, and/or engineered nucleic acid-enzyme construct.
[0281] 47. The pharmaceutical composition of paragraph 45 or 46, wherein the lipid nanoparticle comprises:
   [0282] a) one or more ionizable lipids;
   [0283] b) one or more structural lipids;
   [0284] c) one or more PEGylated lipids; and
   [0285] d) one or more phospholipids.
[0286] 48. The pharmaceutical composition of paragraph 47, wherein the one or more ionizable lipids is selected from the group consisting of those disclosed in Table 2.
[0287] 49. The pharmaceutical composition of paragraph 47 or 48, wherein the one or more structural lipids are selected from the group consisting of cholesterol, fecosterol, beta sitosterol, sitosterol, ergosterol, campesterol, stigmasterol, brassicasterol, tomatidine, tomatine, ursolic acid, alpha-tocopherol, prednisolone, dexamethasone, prednisone, and hydrocortisone.
[0288] 50. The pharmaceutical composition of any one of paragraphs 47-49, wherein the one or more PEGylated lipids are selected from the group consisting of PEG-c-DOMG, PEG-DMG, PEG-DLPE, PEG-DMPE, PEG-DPPC, and PEG-DSPE.
[0289] 51. The pharmaceutical composition of any one of paragraphs 47-50, wherein the one or more phospholipids are selected from the group consisting of 1,2-distearoyl-sn-glycero-3-phosphocholine (DSPC), 1,2-dioleoyl-sn-glycero-3-phosphoethanolamine (DOPE), 1,2-dilinoleoyl-sn-glycero-3-phosphocholine (DLPC), 1,2-dimyristoyl-sn-glycero-phosphocholine (DMPC), 1.2-dioleoyl-sn-glycero-3-phosphocholine (DOPC), 1,2-dipalmitoyl-sn-glycero-3-phosphocholine (DPPC), 1,2-diundecanoyl-sn-glycero-phosphocholine (DUPC), 1-palmitoyl-2-oleoyl-sn-glycero-3-phosphocho line (POPC), 1,2-di-O-octadecenyl-sn-glycero-3-phosphocholine (18:0 Diether PC), 1-oleoyl-2-cholesterylhemisuccinoyl-sn-glycero-3-phosphocholine (OChemsPC), 1-hexadecyl-sn-glycero-3-phosphocholine (C16 Lyso PC), 1,2-dilinolenoyl-sn-glycero-3-phosphocholine, 1,2-diarachidonoyl-sn-glycero-3-phosphocholine, 1,2-didocosahexaenoyl-sn-glycero-3-phosphocholine, 1,2-diphytanoylsn-glycero-3-phosphoethanolamine (ME 16.0 PE), 1,2-distearoyl-sn-glycero-3-phosphoethanolamine, 1,2-dilinoleoyl-sn-glycero-3-phosphoethanolamine, 1,2-dilinolenoyl-sn-glycero-3-phosphoethanolamine, 1,2-diarachidonoyl-sn-glycero-3-phosphoethanolamine, 1,2-didocosahexaenoyl-sn-glycero-3-phosphoethanolamine, 1,2-dioleoyl-sn-glycero-3-phospho-rac-(1-glycerol) sodium salt (DOPG), and sphingomyelin.
[0290] 52. The pharmaceutical composition of any one of paragraphs 47-51, wherein the lipid nanoparticle comprises about 48.5 mol % ionizable lipid, about 10 mol % phospholipid, about 40 mol % structural lipid, and about 1.5 mol % of PEG lipid.
[0291] 53. The pharmaceutical composition of any one of paragraphs 47-52, wherein the lipid nanoparticle comprises about 48.5 mol % ionizable lipid, about 10 mol % phospholipid, about 39 mol % structural lipid, and about 2.5 mol % of PEG lipid.
[0292] 54. The pharmaceutical composition of any one of paragraphs 47-53, wherein the LNP further comprises a targeting moiety operably connected to the LNP.
[0293] 55. The pharmaceutical composition of any one of paragraphs 47-54, wherein the LNP further comprises one or more additional components selected from the group consisting of DDAB, EPC, 14PA, 18BMP, DODAP, DOTAP, and C12-200.
[0294] 56. The pharmaceutical composition of paragraph 45, wherein the lipid nanoparticle comprises at least one cationic lipid selected from the group consisting of: a lipid in Table 2, a lipid having a structure of Formula (I), a lipid having a structure of Formula (II), a lipid having a structure of Formula (III), a lipid having a structure of Formula (IV), a lipid having a structure of Formula (V), a lipid having a structure of Formula (VI), and combinations thereof.
[0295] 57. A kit comprising the engineered nucleic acid construct of any one of paragraphs 1-16, ncRNA encoded by the engineered nucleic acid construct of any one of paragraphs 1-16, the vector system of any one of paragraphs 17-33, the RNA molecule of paragraph 34, the engineered nucleic acid-enzyme construct of any one of paragraphs 35-37, the host cell of any one of paragraphs 38-43, or the pharmaceutical composition of any one of paragraphs 44-56, and instructions for genetically modifying a cell with said engineered nucleic acid construct, ncRNA, vector system, host cell, or pharmaceutical composition.
[0296] 58. A method of modifying a target DNA sequence in a host (e.g., mammalian) cell, the method comprising introducing into the mammalian cell the engineered nucleic acid construct of any one of paragraphs 1-16, ncRNA encoded by the engineered nucleic acid construct of any one of paragraphs 1-16, the vector system of any one of paragraphs 17-33, the RNA molecule of paragraph 34, the engineered nucleic acid-enzyme construct of any one of paragraphs 35-37, or the pharmaceutical composition of any one of paragraphs 44-56, to allow production of the msDNA in the host (e.g., mammalian) cell, wherein the heterologous nucleic acid in the msDNA is integrated into the genome of the host (e.g., mammalian) cell at the target DNA sequence by homology-dependent recombination.
[0297] 59. The method of paragraph 58, wherein the modifying comprises introducing an insertion, deletion and/or substitution into the target DNA sequence.
[0298] 60. A method of treating a disease or condition in a subject in need thereof, the method comprising administering a therapeutically effective amount of the engineered nucleic acid construct of any one of paragraphs 1-16, ncRNA encoded by the engineered nucleic acid construct of any one of paragraphs 1-16, the vector system of any one of paragraphs 17-33, the RNA molecule of paragraph 34, the engineered nucleic acid-enzyme construct of any one of paragraphs 35-37, the host cell of any one of paragraphs 38-43, or the pharmaceutical composition of any one of paragraphs 44-56 to the subject, thereby treating the disease or condition in the subject.
[0299] 61. A method of treating a disease or condition in a subject in need thereof, the method comprising administering a therapeutically effective amount of the host cell of any one of paragraphs 38-43 to the subject, thereby treating the disease or condition in the subject.
[0300] 62. The method of paragraph 61, wherein the host cell is autologous to the subject.
[0301] 63. The method of paragraph 61, wherein the host cell is allogeneic to the subject.

### BRIEF DESCRIPTION OF THE DRAWINGS

[0302] The following drawings form part of the present specification and are included to further demonstrate certain aspects of the present disclosure, which can be better understood by reference to one or more of these drawings in combination with the detailed description of specific embodiments presented herein.

[0303] FIG. 1A is a schematic that depicts naturally occurring retrons from genomic DNA stage through production of the msDNA chimeric microsatellite molecule. Retrons are encoded in the bacterial genome and comprise a non-coding RNA (ncRNA) portion and a portion encoding a specialized reverse transcriptase (RT). The ncRNA and the RT initially are transcribed from the retron DNA as a single polycistronic message. The initial transcript is processed resulting in the removal or separation of the transcript encoding the retron RT. The remaining transcript is the ncRNA, which undergoes folding to form a secondary structure having several characteristic stem-loops and a duplex formed between the 5′ and 3′ regions of the ncRNA (i.e., the a1/a2 duplex). The folded ncRNA is recognized by the accompanying RT which is separately translated and provided in trans. The translated RT typically recognizes certain secondary structures in the ncRNA, and binds the RNA template downstream from the msd region. The RT initiates reverse transcription of the RNA towards its 5′ end, starting from the 2′-end of a conserved guanosine (G) residue found immediately after a double-stranded RNA structure (the a1/a2 region) within the ncRNA. A portion (i.e., the msd region) of the ncRNA serves as a template for reverse transcription, and reverse transcription terminates before reaching the msr locus. During reverse transcription, cellular RNase H degrades the segment of the ncRNA that serves as template, but not other parts of the ncRNA. The result of the reverse transcription, the msDNA (lower right of schematic), remains covalently attached to the RNA template via the 2′-5′ phosphodiester bond, and base-pairs with the RNA template using the 3′ end of the msDNA.

[0304] FIG. 1B is a schematic depicting an embodiment of a recombinant retron contemplated by this disclosure. In this embodiment, a nucleic acid molecule comprises a nucleotide sequence encoding a retron ncRNA region (the msr/msd region) is depicted at the top left. The msr region has been modified by introducing one or more nucleotide modifications (e.g., a nucleotide substitution, deletion, or insertion). For example, it may be desirable to introduce one or more nucleotide substitutions in the msr to enhance functionality (e.g., binding of the corresponding ncRNA to RT, improved stability, improved folding, etc.). The modified msr is referred to as msr′. In addition, the msd has been modified by introducing a heterologous nucleotide sequence encoding an HDR donor template. Lastly, the retron DNA has been modified to introduce a nucleotide sequence encoding a guide RNA at the 3′ end of the retron DNA sequence. is configured on a DNA vector (e.g., a plasmid). The DNA is shown to be transcribed as a polycistronic message that includes the msr′/msd′ region (forming the ncRNA) which is fused at its 3′ end to the guide RNA (in other embodiments, the guide RNA could be fused to the 5′ end of the retron ncRNA. This intermediate is shown to form a complex with a reverse transcriptase provided in trans (e.g., by way of a separate expression vector or delivered mRNA). The top right schematic shows the formation of a complex between the recombinant ncRNA and the RT and the beginning of reverse transcription from the covalently-linked conserved guanosine (G) (i.e., the “priming G” or “priming guanosine”) using the msd RNA as a template sequence. Following the completion of reverse transcription and RNaseH degradation of the template RNA sequence, a recombinant msDNA is formed which comprises three modifications, as shown: (a) a guide RNA linked to the 3′ end of the msDNA, (b) a nucleotide change in the msr′, and (c) the reverse-transcribed single-strand DNA comprises a region that is an HDR donor template. Such a recombinant msDNA could then facilitate various genome modification applications in the cell, including genome editing with an RNA-guided nuclease provided to the cell in trans.

[0305] FIG. 1C is a schematic depicting a recombinant retron-based genome editing system described herein. In the case of genome editing involving an RNA-guided nuclease, the components of such a system may include (a) a guide RNA provided in cis (e.g., fused to the recombinant retron msDNA) and/or in trans (e.g., separately expressed in a cell), (b) a recombinant ncRNA (including at least a sequence encoding an HDR donor template and optionally a guide RNA fused to the ncRNA), (c) a reverse transcriptase, and (d) a programmable nuclease. These components are provided to a cell in the form of DNA and/or RNA and/or protein by a delivery means (e.g., LNPs, liposomes, virus-based delivery, or passive/active transport). Once inside the cell, the recombinant msDNA is formed. The msDNA and the programmable nuclease translocate to the nuclease to conduct gene editing at a target DNA site, thereby producing an edited DNA target.

[0306] FIG. 1D provides a simplified schematic of a the natural lifecycle of a retron. Retrons typically comprise a reverse transcriptase (RT) and two non-coding contiguous inverted sequences (msr and msd) transcribed as a single RNA that is folded into a specific secondary structure. The conserved NAXXH motif and VTG triplet in retron RTs are indicated. The RT binds downstream from the msd locus in the RNA, initiating reverse transcription of the RNA template towards its 5′ end, assisted by the 2′OH group present in a conserved branching G residue acting as a primer. Reverse transcription halts before the msr region is reached, and the resulting msDNA remains covalently attached to the RNA template via a 2′-5′ phosphodiester bond and base-pairing of the 3′ ends of the molecules.

[0307] FIG. 1E provides a detailed representation of the natural biological pathway of a retron in a cell, concluding with the generation of the msDNA satellite molecule. This figure parallels FIG. 1D but more completely depicts the stages of msDNA production. (1) depicts the retron locus which includes an ncRNA locus having an msr locus and a msd locus (both of which are non-coding) and a reverse transcriptase (RT) locus. The ncDNA locus and the RT locus are transcribed as a single RNA transcript, which is depicted in (2). The colors representing each component in (1) are carried through each of stages (2) through (6). Stages (3) and (4) depict the folding of the ncRNA portion into a series of stem loops, wherein the 5′ end and the 3′ ends of the ncRNA form a duplex. In addition, the position of the conserved branching guanosine residue having a 2′OH group is show. The branching guanosine serves as a future priming site for the reverse transcriptase. Stage (4) further shows that the region of the transcript encoding the reverse transcriptase is removed, separately being translated to produce the reverse transcriptase enzyme. In stage (5), the reverse transcriptase associates with the folded ncRNA and begins polymerization of a single strand of DNA (i.e., the reverse transcription product) from the primer site (i.e., the conserved branching guanosine residue having the 2′OH end) and using the msd RNA sequence as a template. Reverse transcription terminates at the msr region. The msd RNA template is exonucleotically removed, thereby resulting in a chimeric molecule comprising the msr RNA region which is covalently joined to the ssDNA transcription product through covalent linkage to the conserved guanosine primer residue. There is also a short duplex region that forms between the 3′ end of the msr RNA and the 3′ of the ssDNA reverse transcript product. The complete molecule is referred to as the “msDNA.”

[0308] FIG. 1F is a schematic depicting that the herein disclosed recombinant retron-based genome modification systems may be implemented as (a) cell recorder systems, (b) genome editing systems, and (c) recombineering systems. These uses are not intended to be limiting.

[0309] FIG. 1G is a schematic depicting various configurations contemplated for the recombinant retron disclosed herein. (1) shows the operonic structure of a wild type retron; (2) shows the operonic structure of a recombinant retron configured to encode an HDR donor template in the final msDNA molecule; (3) shows (2) but further modified to encode a guide RNA at the 3′ end of the retron; (4) shows (2) but further modified to encode a guide RNA in trans.

[0310] FIG. 1H is a schematic that emphasizes that any suitable configuration for presenting the components of the recombinant retron-based genome modification systems disclosed herein to a cell are contemplated, including where the RT and/or the programmable nuclease are provided in trans relative to the retron ncRNA. In some embodiments, the RT and the programmable nuclease may be provided as a fusion protein.

[0311] FIG. 1I depicts that the RT and programmable nuclease may be provided as fusion proteins (top, middle) or provided separate from one another.

[0312] FIG. 1J depicts that nuclear localization signals may be engineered into the polypeptides of the disclosure (e.g., a RNA-guide nuclease) to facilitate translocation into the nuclease of cell where editing occurs.

[0313] FIG. 1K is a schematic (not to scale) representation depicting an embodiment of genome editing, in which double-stranded break (DSB) created by a suitable nuclease (such as a CRISPR/Cas effector enzyme, a ZFN, TALEN, meganuclease, TnpB, IscB, or restriction enzymes (Res)) promotes the insertion of a donor or template sequence (shown here as a “marker” flanked by homologous sequences matching those flanking the DSB, provided on a “donor vector”).

[0314] FIG. 1L depicts the capability of three different kinds of retrons (Eco1-R1, Eco3-R2, Eco5-R3) to insert a 16 base pair insertion at a specific genomic site, the EMX1 gene.

[0315] FIG. 1M outlines a procedure used to evaluate the capability of a retron to produce genomic insertions.

[0316] FIG. 2 (SEQ ID NO:19970) is a schematic representation of a consensus secondary structure of a retron ncRNA nsr/nsd of Type IA/IIA1 retron produced by computational structural alignment of ncRNA sequences from Table B as described in Example 3.

[0317] The colored dots represents the probability a base is at that location (e.g., red circle represents the presence of a base in 97% of the cases, black represents the presence of a base in 90-97% of the cases, grey represents the presence of a base in 75-90% of the cases, and white represents the presence of a base in 50-75% of the cases), as opposed to a gap (no base), whereas the colored letters represent bases that are conserved to different degrees (e.g., with red representing 97%+ conserved, black being 90%+ conserved, and grey at least 75% conserved). Each highlighted base-pair represents a significantly covarying basepair.

[0318] FIG. 3 (SEQ ID NO:19971) is a schematic representation of a consensus secondary structure of a retron ncRNA msr/msd of Type IB1 retrons produced by computational structural alignment of ncRNA sequences from Table B as described in Example 3.

[0319] The colored dots represents the probability a base is at that location (e.g., red circle represents the presence of a base in 97% of the cases, black represents the presence of a base in 90-97% of the cases, grey represents the presence of a base in 75-90% of the cases, and white represents the presence of a base in 50-75% of the cases), as opposed to a gap (no base), whereas the colored letters represent bases that are conserved to different degrees (e.g., with red representing 97%+ conserved, black being 90%+ conserved, and grey at least 75% conserved). Each highlighted base-pair represents a significantly covarying basepair.

[0320] FIG. 4 (SEQ ID NO:19972) is a schematic representation of a consensus secondary structure of a retron ncRNA msr/msd of Type IB2 retrons produced by computational structural alignment of ncRNA sequences from Table B as described in Example 3.

[0321] The colored dots represents the probability a base is at that location (e.g., red circle represents the presence of a base in 97% of the cases, black represents the presence of a base in 90-97% of the cases, grey represents the presence of a base in 75-90% of the cases, and white represents the presence of a base in 50-75% of the cases), as opposed to a gap (no base), whereas the colored letters represent bases that are conserved to different degrees (e.g., with red representing 97%+ conserved, black being 90%+ conserved, and grey at least 75% conserved). Each highlighted base-pair represents a significantly covarying basepair.

[0322] FIG. 5 (SEQ ID NO:19973) is a schematic representation of a consensus secondary structure of a retron ncRNA msr/msd of Type IC retrons produced by computational structural alignment of ncRNA sequences from Table B as described in Example 3.

[0323] The colored dots represents the probability a base is at that location (e.g., red circle represents the presence of a base in 97% of the cases, black represents the presence of a base in 90-97% of the cases, grey represents the presence of a base in 75-90% of the cases, and white represents the presence of a base in 50-75% of the cases), as opposed to a gap (no base), whereas the colored letters represent bases that are conserved to different degrees (e.g., with red representing 97%+ conserved, black being 90%+ conserved, and grey at least 75% conserved). Each highlighted base-pair represents a significantly covarying basepair.

[0324] FIG. 6 (SEQ ID NO:19974) is a schematic representation of a consensus secondary structure of a retron ncRNA msr/msd of Type IIA other retrons produced by computational structural alignment of ncRNA sequences from Table B as described in Example 3.

[0325] The colored dots represents the probability a base is at that location (e.g., red circle represents the presence of a base in 97% of the cases, black represents the presence of a base in 90-97% of the cases, grey represents the presence of a base in 75-90% of the cases, and white represents the presence of a base in 50-75% of the cases), as opposed to a gap (no base), whereas the colored letters represent bases that are conserved to different degrees (e.g., with red representing 97%+ conserved, black being 90%+ conserved, and grey at least 75% conserved). Each highlighted base-pair represents a significantly covarying basepair.

[0326] FIG. 7 (SEQ ID NO:19975) is a schematic representation of a consensus secondary structure of a retron ncRNA msr/msd of Type IIA2 retrons produced by computational structural alignment of ncRNA sequences from Table B as described in Example 3.

[0327] The colored dots represents the probability a base is at that location (e.g., red circle represents the presence of a base in 97% of the cases, black represents the presence of a base in 90-97% of the cases, grey represents the presence of a base in 75-90% of the cases, and white represents the presence of a base in 50-75% of the cases), as opposed to a gap (no base), whereas the colored letters represent bases that are conserved to different degrees (e.g., with red representing 97%+ conserved, black being 90%+ conserved, and grey at least 75% conserved). Each highlighted base-pair represents a significantly covarying basepair.

[0328] FIG. 8 (SEQ ID NO:19976) is a schematic representation of a consensus secondary structure of a retron ncRNA msr/msd of Type IIA3 retrons produced by computational structural alignment of ncRNA sequences from Table B as described in Example 3.

[0329] The colored dots represents the probability a base is at that location (e.g., red circle represents the presence of a base in 97% of the cases, black represents the presence of a base in 90-97% of the cases, grey represents the presence of a base in 75-90% of the cases, and white represents the presence of a base in 50-75% of the cases), as opposed to a gap (no base), whereas the colored letters represent bases that are conserved to different degrees (e.g., with red representing 97%+ conserved, black being 90%+ conserved, and grey at least 75% conserved). Each highlighted base-pair represents a significantly covarying basepair.

[0330] FIG. 9 (SEQ ID NO:19977) is a schematic representation of a consensus secondary structure of a retron ncRNA msr/msd of Type IIA4 retrons produced by computational structural alignment of ncRNA sequences from Table B as described in Example 3.

[0331] The colored dots represents the probability a base is at that location (e.g., red circle represents the presence of a base in 97% of the cases, black represents the presence of a base in 90-97% of the cases, grey represents the presence of a base in 75-90% of the cases, and white represents the presence of a base in 50-75% of the cases), as opposed to a gap (no base), whereas the colored letters represent bases that are conserved to different degrees (e.g., with red representing 97%+ conserved, black being 90%+ conserved, and grey at least 75% conserved). Each highlighted base-pair represents a significantly covarying basepair.

[0332] FIG. 10 (SEQ ID NO:19978) is a schematic representation of a consensus secondary structure of a retron ncRNA msr/msd of Type IIA5 retrons produced by computational structural alignment of ncRNA sequences from Table B as described in Example 3.

[0333] The colored dots represents the probability a base is at that location (e.g., red circle represents the presence of a base in 97% of the cases, black represents the presence of a base in 90-97% of the cases, grey represents the presence of a base in 75-90% of the cases, and white represents the presence of a base in 50-75% of the cases), as opposed to a gap (no base), whereas the colored letters represent bases that are conserved to different degrees (e.g., with red representing 97%+ conserved, black being 90%+ conserved, and grey at least 75% conserved). Each highlighted base-pair represents a significantly covarying basepair.

[0334] FIG. 11 (SEQ ID NO:19979) is a schematic representation of a consensus secondary structure of a retron ncRNA msr/msd of Type IIIA1 retrons produced by computational structural alignment of ncRNA sequences from Table B as described in Example 3.

[0335] The colored dots represents the probability a base is at that location (e.g., red circle represents the presence of a base in 97% of the cases, black represents the presence of a base in 90-97% of the cases, grey represents the presence of a base in 75-90% of the cases, and white represents the presence of a base in 50-75% of the cases), as opposed to a gap (no base), whereas the colored letters represent bases that are conserved to different degrees (e.g., with red representing 97%+ conserved, black being 90%+ conserved, and grey at least 75% conserved). Each highlighted base-pair represents a significantly covarying basepair.

[0336] FIG. 12 (SEQ ID NO:19980) is a schematic representation of a consensus secondary structure of a retron ncRNA msr/msd of Type IIIA2 retrons produced by computational structural alignment of ncRNA sequences from Table B as described in Example 3.

[0337] The colored dots represents the probability a base is at that location (e.g., red circle represents the presence of a base in 97% of the cases, black represents the presence of a base in 90-97% of the cases, grey represents the presence of a base in 75-90% of the cases, and white represents the presence of a base in 50-75% of the cases), as opposed to a gap (no base), whereas the colored letters represent bases that are conserved to different degrees (e.g., with red representing 97%+ conserved, black being 90%+ conserved, and grey at least 75% conserved). Each highlighted base-pair represents a significantly covarying basepair.

[0338] FIG. 13 (SEQ ID NO:19981) is a schematic representation of a consensus secondary structure of a retron ncRNA msr/msd of IIIA3 retrons produced by computational structural alignment of ncRNA sequences from Table B as described in Example 3.

[0339] The colored dots represents the probability a base is at that location (e.g., red circle represents the presence of a base in 97% of the cases, black represents the presence of a base in 90-97% of the cases, grey represents the presence of a base in 75-90% of the cases, and white represents the presence of a base in 50-75% of the cases), as opposed to a gap (no base), whereas the colored letters represent bases that are conserved to different degrees (e.g., with red representing 97%+ conserved, black being 90%+ conserved, and grey at least 75% conserved). Each highlighted base-pair represents a significantly covarying basepair.

[0340] FIG. 14 (SEQ ID NO:19982) is a schematic representation of a consensus secondary structure of a retron ncRNA msr/msd of Type IIIA4 retrons produced by computational structural alignment of ncRNA sequences from Table B as described in Example 3.

[0341] The colored dots represents the probability a base is at that location (e.g., red circle represents the presence of a base in 97% of the cases, black represents the presence of a base in 90-97% of the cases, grey represents the presence of a base in 75-90% of the cases, and white represents the presence of a base in 50-75% of the cases), as opposed to a gap (no base), whereas the colored letters represent bases that are conserved to different degrees (e.g., with red representing 97%+ conserved, black being 90%+ conserved, and grey at least 75% conserved). Each highlighted base-pair represents a significantly covarying basepair.

[0342] FIG. 15 (SEQ ID NO:19983) is a schematic representation of a consensus secondary structure of a retron ncRNA msr/msd of Type IIIA5 retrons produced by computational structural alignment of ncRNA sequences from Table B as described in Example 3.

[0343] The colored dots represents the probability a base is at that location (e.g., red circle represents the presence of a base in 97% of the cases, black represents the presence of a base in 90-97% of the cases, grey represents the presence of a base in 75-90% of the cases, and white represents the presence of a base in 50-75% of the cases), as opposed to a gap (no base), whereas the colored letters represent bases that are conserved to different degrees (e.g., with red representing 97%+ conserved, black being 90%+ conserved, and grey at least 75% conserved). Each highlighted base-pair represents a significantly covarying basepair.

[0344] FIG. 16 (SEQ ID NO:19984) is a schematic representation of a consensus secondary structure of a retron ncRNA msr/msd of Type IIIunk retrons produced by computational structural alignment of ncRNA sequences from Table B as described in Example 3.

[0345] The colored dots represents the probability a base is at that location (e.g., red circle represents the presence of a base in 97% of the cases, black represents the presence of a base in 90-97% of the cases, grey represents the presence of a base in 75-90% of the cases, and white represents the presence of a base in 50-75% of the cases), as opposed to a gap (no base), whereas the colored letters represent bases that are conserved to different degrees (e.g., with red representing 97%+ conserved, black being 90%+ conserved, and grey at least 75% conserved). Each highlighted base-pair represents a significantly covarying basepair.

[0346] FIG. 17 (SEQ ID NO:19985) is a schematic representation of a consensus secondary structure of a retron ncRNA msr/msd of Type IV retrons produced by computational structural alignment of ncRNA sequences from Table B as described in Example 3.

[0347] The colored dots represents the probability a base is at that location (e.g., red circle represents the presence of a base in 97% of the cases, black represents the presence of a base in 90-97% of the cases, grey represents the presence of a base in 75-90% of the cases, and white represents the presence of a base in 50-75% of the cases), as opposed to a gap (no base), whereas the colored letters represent bases that are conserved to different degrees (e.g., with red representing 97%+ conserved, black being 90%+ conserved, and grey at least 75% conserved). Each highlighted base-pair represents a significantly covarying basepair.

[0348] FIG. 18 (SEQ ID NO:19986) is a schematic representation of a consensus secondary structure of a retron ncRNA msr/msd of Type IX retrons produced by computational structural alignment of ncRNA sequences from Table B as described in Example 3.

[0349] The colored dots represents the probability a base is at that location (e.g., red circle represents the presence of a base in 97% of the cases, black represents the presence of a base in 90-97% of the cases, grey represents the presence of a base in 75-90% of the cases, and white represents the presence of a base in 50-75% of the cases), as opposed to a gap (no base), whereas the colored letters represent bases that are conserved to different degrees (e.g., with red representing 97%+ conserved, black being 90%+ conserved, and grey at least 75% conserved). Each highlighted base-pair represents a significantly covarying basepair.

[0350] FIG. 19 (SEQ ID NO:19987) is a schematic representation of a consensus secondary structure of a retron ncRNA msr/msd of Type V retrons produced by computational structural alignment of ncRNA sequences from Table B as described in Example 3.

[0351] The colored dots represents the probability a base is at that location (e.g., red circle represents the presence of a base in 97% of the cases, black represents the presence of a base in 90-97% of the cases, grey represents the presence of a base in 75-90% of the cases, and white represents the presence of a base in 50-75% of the cases), as opposed to a gap (no base), whereas the colored letters represent bases that are conserved to different degrees (e.g., with red representing 97%+ conserved, black being 90%+ conserved, and grey at least 75% conserved). Each highlighted base-pair represents a significantly covarying basepair.

[0352] FIG. 20 (SEQ ID NO:19988) is a schematic representation of a consensus secondary structure of a retron ncRNA msr/msd of Type VI retrons produced by computational structural alignment of ncRNA sequences from Table B as described in Example 3.

[0353] The colored dots represents the probability a base is at that location (e.g., red circle represents the presence of a base in 97% of the cases, black represents the presence of a base in 90-97% of the cases, grey represents the presence of a base in 75-90% of the cases, and white represents the presence of a base in 50-75% of the cases), as opposed to a gap (no base), whereas the colored letters represent bases that are conserved to different degrees (e.g., with red representing 97%+ conserved, black being 90%+ conserved, and grey at least 75% conserved). Each highlighted base-pair represents a significantly covarying basepair.

[0354] FIG. 21 (SEQ ID NO:19989) is a schematic representation of a consensus secondary structure of a retron ncRNA msr/msd of Type XI Group 1 retrons produced by computational structural alignment of ncRNA sequences from Table B as described in Example 3.

[0355] The colored dots represents the probability a base is at that location (e.g., red circle represents the presence of a base in 97% of the cases, black represents the presence of a base in 90-97% of the cases, grey represents the presence of a base in 75-90% of the cases, and white represents the presence of a base in 50-75% of the cases), as opposed to a gap (no base), whereas the colored letters represent bases that are conserved to different degrees (e.g., with red representing 97%+ conserved, black being 90%+ conserved, and grey at least 75% conserved). Each highlighted base-pair represents a significantly covarying basepair.

[0356] FIG. 22 (SEQ ID NO:19990) is a schematic representation of a consensus secondary structure of a retron ncRNA msr/msd of Type XI Group 2 retrons produced by computational structural alignment of ncRNA sequences from Table B as described in Example 3.

[0357] The colored dots represents the probability a base is at that location (e.g., red circle represents the presence of a base in 97% of the cases, black represents the presence of a base in 90-97% of the cases, grey represents the presence of a base in 75-90% of the cases, and white represents the presence of a base in 50-75% of the cases), as opposed to a gap (no base), whereas the colored letters represent bases that are conserved to different degrees (e.g., with red representing 97%+ conserved, black being 90%+ conserved, and grey at least 75% conserved). Each highlighted base-pair represents a significantly covarying basepair.

[0358] FIG. 23 (SEQ ID NO:19991) is a schematic representation of a consensus secondary structure of a retron ncRNA msr/msd of Type XII retrons produced by computational structural alignment of ncRNA sequences from Table B as described in Example 3.

[0359] The colored dots represents the probability a base is at that location (e.g., red circle represents the presence of a base in 97% of the cases, black represents the presence of a base in 90-97% of the cases, grey represents the presence of a base in 75-90% of the cases, and white represents the presence of a base in 50-75% of the cases), as opposed to a gap (no base), whereas the colored letters represent bases that are conserved to different degrees (e.g., with red representing 97%+ conserved, black being 90%+ conserved, and grey at least 75% conserved). Each highlighted base-pair represents a significantly covarying basepair.

[0360] FIG. 24 (SEQ ID NO:19992) is a schematic representation of a consensus secondary structure of a retron ncRNA msr/msd of Type XIII retrons produced by computational structural alignment of ncRNA sequences from Table B as described in Example 3.

[0361] The colored dots represents the probability a base is at that location (e.g., red circle represents the presence of a base in 97% of the cases, black represents the presence of a base in 90-97% of the cases, grey represents the presence of a base in 75-90% of the cases, and white represents the presence of a base in 50-75% of the cases), as opposed to a gap (no base), whereas the colored letters represent bases that are conserved to different degrees (e.g., with red representing 97%+ conserved, black being 90%+ conserved, and grey at least 75% conserved). Each highlighted base-pair represents a significantly covarying basepair.

[0362] FIG. 25 (SEQ ID NO:19993) is a schematic representation of a consensus secondary structure of a retron ncRNA msr/msd of Type XIV retrons produced by computational structural alignment of ncRNA sequences from Table B as described in Example 3.

[0363] The colored dots represents the probability a base is at that location (e.g., red circle represents the presence of a base in 97% of the cases, black represents the presence of a base in 90-97% of the cases, grey represents the presence of a base in 75-90% of the cases, and white represents the presence of a base in 50-75% of the cases), as opposed to a gap (no base), whereas the colored letters represent bases that are conserved to different degrees (e.g., with red representing 97%+ conserved, black being 90%+ conserved, and grey at least 75% conserved). Each highlighted base-pair represents a significantly covarying basepair.

[0364] FIG. 26 (SEQ ID NO:19994) is a schematic representation of a consensus secondary structure of a retron ncRNA msr/msd of Ec107 retrons produced by computational structural alignment of ncRNA sequences from Table B as described in Example 3.

[0365] The colored dots represents the probability a base is at that location (e.g., red circle represents the presence of a base in 97% of the cases, black represents the presence of a base in 90-97% of the cases, grey represents the presence of a base in 75-90% of the cases, and white represents the presence of a base in 50-75% of the cases), as opposed to a gap (no base), whereas the colored letters represent bases that are conserved to different degrees (e.g., with red representing 97%+ conserved, black being 90%+ conserved, and grey at least 75% conserved). Each highlighted base-pair represents a significantly covarying basepair.

[0366] FIG. 27 (SEQ ID NO:19995) is a schematic representation of a consensus secondary structure of a retron ncRNA msr/msd of Outgroup A retrons produced by computational structural alignment of ncRNA sequences from Table B as described in Example 3.

[0367] The colored dots represents the probability a base is at that location (e.g., red circle represents the presence of a base in 97% of the cases, black represents the presence of a base in 90-97% of the cases, grey represents the presence of a base in 75-90% of the cases, and white represents the presence of a base in 50-75% of the cases), as opposed to a gap (no base), whereas the colored letters represent bases that are conserved to different degrees (e.g., with red representing 97%+ conserved, black being 90%+ conserved, and grey at least 75% conserved). Each highlighted base-pair represents a significantly covarying basepair.

[0368] FIG. 28 is a phylogenetic tree of RT sequences constructed in accordance with Example 3.

[0369] FIG. 29 is a structural representation of the retron loci associated with each retron type in FIG. 28.

[0370] FIG. 30 shows the position of certain retrons (EcoI, Eco3, Eco5, AcoI, RTX003_2042, RTX003_6083v1, and RTX003_6943) within the phylogenetic retron tree of FIG. 28.

[0371] FIG. 31A is a plasmid map of an exemplary retron (EcoI) tested in the Examples herein.

[0372] FIG. 31B is a linear representation in 5′ to 3′ direction of the plasmid map of FIG. 31A.

[0373] FIG. 31C is a plasmid map of an exemplary retron (RTX3_6083v1) tested in the Examples herein.

[0374] FIG. 31D is a linear representation in 5′ to 3′ direction of the plasmid map of FIG. 31C.

[0375] FIG. 32 is a representation of a plasmid-based assay used to measure retron precise edits and indels as performed in the Examples. In Step 1, a plasmid (e.g., that of FIG. 31A or FIG. 31C) is transfected into human cells (e.g., HEK293t cells) which are engineered to express Cas9. Editing is allowed to occur for 72 hours at 37° C. In Step 2, the genomic DNA is extracted from the cells and used to prepare a next-generation sequencing (NGS) library for sequencing. The library is sequenced over the target site (e.g., EMX1) of editing to generate sequence reads. In Step 3, the sequencing reads are analyzed to obtain a frequency of sequence reads containing the desired edit (percentage of precision editing) and a frequence of indels at the desired edit site (percentage of indels).

[0376] FIG. 33 is an equivalent representation of FIG. 32.

[0377] FIG. 34 is a representation of a methodology for transfecting HEK293T cells. Cells were seeded in 24 well plate one day prior to transfection. Appropriate amount of plasmid and transfection reagent (e.g., Lipofectamine 3000) were mixed and transferred to cells. After 72 hours incubation, genomic DNA was extracted and the target edit region was amplified into sequencing libraries. Sequencing data was analyzed by CRISPResso2 and percentage of precise edit and indels were calculated.

[0378] FIG. 35 (SEQ ID NOs:19996-20003) (Top to Bottom) is an example of reference sequence and desired editing outcome for Eco3 retron at the EMX1 genomic site. Analysis of editing outcomes is performed using CRISPresso2 pipeline. In this example, the editing template inserts a 10 bp insertion into the EMX1 gene (TTACGTCTGC) (SEQ ID NO: 19931) along with a 6 bp substitution to mutate the PAM sequence (GAAGGG>AAAGTT) (SEQ ID NO: 19954).

[0379] FIG. 36 shows the results of plasmid-based assay (e.g., according to FIG. 33) demonstrating up to about 0.3% precise edits and as low as 40% indels with Eco1 retron in Cas9 expressing HEK293T cells. The plasmid that encodes Eco1 RT and Eco1 ncRNA-sgRNA fusion targeting EMX1 was transfected via lipofection using two different amounts of Lipofectamine.

[0380] FIG. 37 shows the results of plasmid-based assay (e.g., according to FIG. 33) demonstrating up to about 0.1% precise edits and as low as 3% indels with AcoI. Acol retron has not been experimentally validated to produce msDNA. Precise editing activity observed in this experiment strongly support that Aco1 retron is capable of generating msDNA inside human cells.

[0381] FIG. 38 shows the results of plasmid-based assay (e.g., according to FIG. 33) demonstrating up to about 0.3% precise edits and as low as 5% indels with RTX003_2042. This retron can achieve a comparable precise editing to Eco1 but with significantly lower indels (10-fold). RTX003_2042 is a novel retron and precise editing activity observed in this experiment strongly support that RTX003_2042 retron could generate msDNA inside human cells.

[0382] FIG. 39A shows the results of plasmid-based assay demonstrating up to about 0.05˜0.08% precise edits and as low as 2.5˜4% indels with RTX003_6083v1 and 6943. Both are novel retrons and precise editing activity observed in this experiment strongly support that RTX003_6083v1 and 6943 retron could generate msDNA inside human cells.

[0383] FIG. 39B shows follow up experiments using the same assay of FIG. 39A indicated that RTX3_6083v1 and RTX3_6943 generated 3-4 fold more precise edits than Eco1 while indels generated from these two retrons were 2-3 fold lower. RTX3_2042 showed precise editing at similar frequencies to Eco1 but had more variability than other samples.

[0384] FIG. 39C shows follow up experiments using the same assay of FIG. 39A indicated that RTX3_6083v1 and RTX3_6943 generated 3-4 fold more precise edits than Eco1 while indels generated from these two retrons were 2-3 fold lower. RTX3_2042 showed precise editing at similar frequencies to Eco1 but had more variability than other samples.

[0385] FIG. 39D shows the results of plasmid-based assay demonstrating up to about 0.7% precise edits and as low as ˜4% indels with RTX003_0637, RTX003_1262, and RTX003_6342 compared to empty vector and EcoI. RTX003_0637, RTX003_1262, and RTX003_6342 are novel retrons and precise editing activity observed in this experiment strongly support that these retrons could generate msDNA inside cells.

[0386] FIG. 39E shows the results of plasmid-based assay demonstrating precise editing and indel generation for an array of retrons, including EcoI, Eco3, RTX3_2042_RT inactivated, RTX3_2042, RTX3_6083v1, RTX3_6943, RTX3_6943, RTX3_1262, RTX3_6342S, and RTX3_6342L. up to about 2.5% precise edits and as low as ˜4% indels with EcoI, Eco3, RTX3_2042_RT_inactivated, RTX3_2042, RTX3_6083v1, RTX3_6943, RTX3_6943, RTX3_1262, RTX3_6342S, and RTX3_6342L compared to empty vector and EcoI as controls.

[0387] FIG. 40 is a representation of an two-RNA editing assay used in the Examples to measure the relative editing efficiency of exemplary retrons using electroporation-based delivery of two RNA components into HEK293T cells. Appropriate amount of RT mRNA and ncRNA-sgRNA fusion were mixed and electroporated to cells. After 72 hours incubation, genomic DNA was extracted and the targeting region was amplified into sequencing libraries. Sequencing data was analyzed by CRISPResso2 and precise edit and indels were calculated.

[0388] FIG. 41 shows the results of two-RNA system (RT mRNA+ncRNA-sgRNA fusion) delivered to Cas9 expressing HEK293T cells by electroporation. Eco1, Eco3 and Eco5 retrons were tested. Results showed precise edits (left graph) up to 0.4% for Eco3 and as low as 10% indels (right graph) for Eco3. Precise edits mediated by Eco3 increased with augmenting amount of ncRNA-sgRNA fusion from 1:2 to 1:4 ratio between RT mRNA and ncRNA-sgRNA fusion.

[0389] FIG. 42 shows the results of titration of two-component Eco3 RNA system (RT mRNA+ncRNA-sgRNA fusion) delivered to Cas9 expressing 293T cells by electroporation. The RT mRNA and the ncRNA were mixed at ratios of 1:2, 1:3, 1:4, 1:5, 1:8, 1:10, respectively, and delivered at two different amounts of RT mRNA (0.2 or 0.5 g). On left, data showed that Eco3 at 0.5 μg produced highest percentage of precise edits at a 1:3 and 1:5 ratio of RT mRNA to ncRNA. On right, data further showed that a more equivalent ratio of RT mRNA to ncRNA resulted in a trend of lower percentage of indels.

[0390] FIG. 43 is a representation of a three-RNA retron editing system which involves delivery by electroporation of three RNA components (RT mRNA, retron ncRNA-sgRNA fusion, and Cas9 mRNA) into HEK293T cells. Appropriate amount of RT mRNA, ncRNA-sgRNA fusion, and Cas9 mRNA were mixed and electroporated to cells. After 72 hours incubation, genomic DNA was extracted and targeting region was amplified into sequencing libraries. Sequencing data was analyzed by CRISPResso2 and precise edit and indels were calculated.

[0391] FIG. 44 shows the results of Cas9 mRNA titration of three-component Eco3 RNA system (RT mRNA+ncRNA-sgRNA fusion+Cas9 mRNA) delivered to 293T cells by electroporation. The RT mRNA and the ncRNA-sgRNA fusion were mixed at given amounts on the graph and the amount Cas9 mRNA was titrated. At 0.2 μg of Cas9 mRNA, up to 0.1% of precise editing was observed. While the editing efficiency is an order of magnitude lower than two RNA system, the editing occurred by specific action of Cas9 and retron, since absence of either abrogated the editing.

[0392] FIG. 45 depicts a process of lipofection using three RNA system in HEK293T cells. Cells were seeded in 96 well plate one day prior to transfection. Appropriate amount of RT mRNA, ncRNA-sgRNA fusion, Cas9 mRNA and Lipofectamine reagent were mixed and transferred to cells. After 72 hours incubation, genomic DNA was extracted and targeting region was amplified into sequencing libraries. Sequencing data was analyzed by CRISPResso2 and precise edit and indels were calculated.

[0393] FIG. 46 shows the results of three-component Aco1 RNA system (RT mRNA+ncRNA+Cas9 mRNA) delivered to HEK293T cells by lipofection. The RT mRNA, the ncRNA and the Cas9 mRNA were mixed at amounts indicated in the graph and transfected to HEK293T cells. 56 bp insertion and 6 bp deletion at EMX1 locus was scored as precise edits and ˜0.1% of cell population has undergone precise editing on the left graph. The editing was dependent on Cas9 nuclease since its absence abrogated the editing. The frequency of indels was about 1.5% on the right graph.

[0394] FIG. 47 shows the results of minimal Cas9 nuclease activity when sgRNA is fused to ncRNA of Eco3 retron. Cas9 activity was evaluated by frequency of indels. 1 g of ncRNA-sgRNA fusion shows 20-fold lower activity than equimolar separated sgRNA alone. In parallel, activity of chemical modified vs unmodified sgRNA was compared and the former shows 6-fold higher activity than the latter at the condition described in the graph.

[0395] FIG. 48 is a representation of the all-RNA editing assay used in the Examples to measure the relative editing efficiency of the sample retrons in an all-RNA format, modified with a step of in trans guide RNA spike-in. Electroporation using three RNA system+sgRNA trans spike-in in HEK293T cells. Appropriate amount of RT mRNA, ncRNA-sgRNA fusion, Cas9 mRNA, and sgRNA were mixed and electroporated to cells. After 72 hours incubation, genomic DNA was extracted and targeting region was amplified into sequencing libraries. Sequencing data was analyzed by CRISPResso2 and precise edit and indels were calculated.

[0396] FIG. 49 shows the results of guide RNA spike-in in all RNA system (RT mRNA+ncRNA-sgRNA fusion+Cas9 mRNA+sgRNA) delivered to HEK293T cells by electroporation. At given amount of Cas9 and RT mRNA on the graph, the amount of guide RNA spike-in is titrated at 50, 100 and 200 ng. The titration was done at two different ratios of RT mRNA: ncRNA-sgRNA fusion=1:6 or 1:8. The guide RNA spike-in in all RNA system increased precise editing up to ˜50 fold. The increasing amount of guide RNA gradually increased precise editing and 1:8 of RT mRNA:ncRNA-sgRNA fusion performed slightly better than 1:6, reaching 13% of precise editing. On the right graph, frequency of indels is shown for respective conditions.

[0397] FIG. 50 represents a lipofection process using three RNA system+gRNA trans spike-in in HEK293T cells. Cells were seeded in 96 well plate one day prior to transfection. Appropriate amount of RT mRNA, ncRNA-sgRNA fusion, Cas9 mRNA, sgRNA and Lipofectamine reagent were mixed and transferred to cells. After 72 hours incubation, genomic DNA was extracted and targeting region was amplified into sequencing libraries. Sequencing data was analyzed by CRISPResso2 and precise edit and indels were calculated.

[0398] FIG. 51 shows the results of guide RNA spike-in (i.e., delivering a separate molecule bolus of guide RNA which in all RNA system (RT mRNA+ncRNA-sgRNA fusion+Cas9 mRNA+sgRNA) delivered to HEK293T cells by lipofection. At given amount of RT mRNA, ncRNA-sgRNA fusion, and Cas9 mRNA on the graph, the amount of guide RNA spike-in is titrated at 2, 5 and 10 ng. The guide RNA spike-in in all RNA system increased precise editing up to 3.5 fold, 12% of efficiency. The increasing amount of guide RNA at this range did not further increase precise editing. The precise editing is completely dependent on the presence of Retron machinery. On the right graph, frequency of indels is shown for respective conditions.

[0399] FIG. 52 shows the results of ncRNA-sgRNA fusion separation in all RNA system (RT mRNA+Cas9 mRNA+either ncRNA-sgRNA fusion OR separate ncRNA+sgRNA) delivered to HEK293T cells by lipofection. At given amount of RT mRNA and Cas9 mRNA on the graph, the amount of guide RNA spike-in is titrated at 0, 2, 5, 10, 50 and 100 ng. At 10 ng guide RNA, precise editing peaked at 2.23% compared to 1.78% with ncRNA-sgRNA fusion. The increasing amount of guide RNA at this range did not further increase precise editing. On the right graph, frequency of indels is shown for respective conditions.

[0400] FIG. 53 is a schematic of improved templates used for in vitro transcription to produce ncRNA (left or A) and ncRNA modifications (right or B). (A) relates to the optimization of RNA production by in vitro transcription. Previously made in vitro transcription experiments to produce RNA used a double-stranded DNA template containing a 3′ overhang (on same strand as T7 promoter sequence). A new template with a blunt end was designed and tested and as shown in FIG. 54 results in increased precise editing efficiency. (B) relates to modified ncRNAs which are modified by addition of an MS2 stem loop hairpin at the 3′ end of the ncRNA. Without being bound by theory, the MS2 loop helps stabilize the ncRNA and results in significantly improved precise editing efficiency, as shown in FIG. 54.

[0401] FIG. 54 shows the results of ncRNA-sgRNA fusion separation in 4 component all-RNA system (RT mRNA+Cas9 mRNA+ncRNA+sgRNA) delivered to HEK293T cells by Lipofectamine MessengerMAX. All RNA was transfected at a fixed amount as shown on the graphs. Using RNA generated from linearized plasmid template containing a 3′ overhang produced 1.35% precise edits. Using RNA generated from the improved linearized plasmid template containing a blunt end increased precise editing to 5.94%. Adding an MS2 stem loop to the 3′ end of the ncRNA (blunt end) further increased precise editing to 12.39%. On the right graph, frequency of indels is shown for respective conditions.

[0402] FIG. 55 (SEQ ID NO: 19969) provides schematics for end protection of RNA from cellular nuclease activity by capping and tailing. In (A), a 7-methylguanosine cap0 was added to 5′ triphosphate of RNA. In (B), a poly-A tail was added to the 3′ end by enzymatic addition. Tail length is estimated over 50 nucleotides. In (C), RNA containing both a 5′ cap and a 3′ tail is shown. Results are shown in FIG. 56.

[0403] FIG. 56 shows the result of end protection of ncRNA-sgRNA fusion by cap and tail in 4 component all-RNA system (RT mRNA+Cas9 mRNA+ncRNA+sgRNA) delivered to HEK293T cells by Lipofectamine MessengerMAX. All RNA was transfected at a fixed amount RT mRNA 100 ng, ncRNA-sgRNA 400 ng, Cas9 mRNA 100 ng, and sgRNA 5 ng. ncRNA-gRNA fusion was either capped (+cap −tail) or poly-A tailed (−cap +tail) or both capped and poly-A tailed (+cap +tail). Using RNA without end protection (−cap −tail) produced ˜4.5% precise edits and the editing was dependent on retron since the absence of RT abrogated precise editing. Using RNA with either or both protection by cap and tail produced lower precise editing (left graph) but lowered indels (right graph) than without cap and tail.

[0404] FIG. 57 shows the result that shortening msd stems can modulate precising editing in a retron specific manner. Modified retrons include RTX3_4536 (long (L) and short (S) versions), RTX3_6279 (long (L) and short (S) versions), RTX3_6342 (long (L) and short (S) versions), RTX3_6438 (long (L) and short (S) versions), RTX3_6549 (long (L) and short (S) versions), and RTX3_6605 (long (L) and short (S) versions).

[0405] FIG. 58 shows the result that shortening msd stems can modulate precising editing in a retron specific manner. Modified retrons include RTX3_5752 (long (L) and short (S) versions), RTX3_6221 (long (L) and short (S) versions), and RTX3_6034 (long (L) and short (S) versions).

[0406] FIG. 59A Demonstrates that four retrons from various clades are capable of insertions of up to 100 bps to EMX1 locus. Figure shows the results of testing different template lengths for four different retrons in all RNA system delivered to HEK293T cells by lipofection. At given amount of RT mRNA and Cas9 mRNA, ncRNA-sgRNA fusion with different template lengths ranging from 10 to 100 bp were added. For 100 bp insertions, precise editing was 1.04% for Eco3, 1.52% for Aco1, 1.37% for R2042, and 0.05% for R6943. On the bottom row of graphs, frequency of indels is shown for respective conditions.

[0407] FIG. 59B Demonstrates that four retrons from various clades are capable of insertions of up to 100 bps to EMX1 locus. Figure shows indel results corresponding with the constructs of FIG. 59A, graphing frequency of indels for respective conditions.

[0408] FIG. 60A Demonstrates that additional sgRNA targeting the same genomic locus increases the indel and insert frequencies. This figure reports same conditions as FIGS. 59A-59B but with sgRNA added, which increases the frequency of precise editing and indels. For 100 bp insertions, precise editing was 1.82% for Eco3, 4.50% for Aco1, 4.40% for R2042 and 0.38% for R6943. On the bottom row of graphs, frequency of indels is shown for respective conditions.

[0409] FIG. 60B Demonstrates that additional sgRNA targeting the same genomic locus increases the indel and insert frequencies. This figure reports the frequency of indels associated with the retrons of FIG. 60A.

[0410] FIG. 61A is a schematic showing unedited and edited allele by GFP gene insertion at EMX1 locus using retron editing system. Primer pair EMX1 Forward and Reverse hybridizes just outside of 5′ and 3′ homology arms and amplifies 169 bp on the unedited allele. On the edited allele, they amplify 1433 bp spanning GFP gene insertion. Primers to detect 5′ and 3′ junctions are indicated on the edited allele. 5′ junction on the edited allele is amplified by primer pair: EMX1 Forward and 5′ Junction GFP Reverse and 3′ junction is amplified by primer pair: 3′ Junction GFP forward and EMX1 Reverse. Neither 5′ Junction GFP Reverse nor 3′ Junction GFP Forward primer binds to unedited allele.

[0411] FIG. 61B Demonstrates three retrons from various clades are capable of GFP integration at EMX1 locus. The figure provides qPCR data depicting GFP insertion at 5′ or 3′ junctions at EMX1 locus by three retrons. ncRNA-sgRNA engineered to contain GFP gene insert was transfected to HEK293T cells, together with RT mRNA of each retron, Cas9 mRNA, with/without additional sgRNA. Genomic DNA was analyzed by indicated primer pairs to detect GFP gene insertion at 5′ or 3′ junctions on the edited allele. ΔCt was obtained by subtracting +RT sample's Ct value from −RT sample's Ct value for relative quantification of GFP insertion at EMX1 locus. The bigger value of ΔCt indicates the higher frequency of insert in the sample. With all three retrons, amplicons of both 5′ and 3′ junctions are detectable significantly above background level. Amplicon of 3′ junction is more abundant than that of 5′ junction probably because insertion at 3′ is facilitated by more enriched 5′ end of msDNA from reverse transcription.

[0412] FIG. 61C Demonstrates that two retrons are capable of GFP integration at EMX1 locus. The figure provides qPCR data depicting GFP insertion at 5′ or 3′ junctions at EMX1 locus by two retrons. ncRNA-sgRNA engineered to contain GFP gene insert was transfected to HEK293T cells, together with RT mRNA of each retron, Cas9 mRNA, with/without additional sgRNA. Genomic DNA was analyzed by indicated primer pairs in the table to detect GFP gene insertion at 5′ or 3′ junctions on the edited allele. ΔCt was obtained by subtracting junction Ct value from EMX1 Ct value for relative quantification of GFP insertion at EMX1 locus. With all two retrons, amplicons of both 5′ and 3′ junctions are detectable significantly above background level. Amplicon of 3′ junction is slightly more abundant than that of 5′ junction probably because insertion at 3′ is facilitated by more enriched 5′ end of msDNA from reverse transcription.

[0413] FIG. 61D shows PCR products for Aco1 were run on Agilent Tapestation High Sensitivity D1000 screentape. In the presence of RT (+RT sample, left on the gel), the expected size of amplicons were detected at both 5′ and 3′ junctions of edited alleles as indicated by arrows. Edited alleles were not detected in the absence of RT (−RT sample, right on the gel). Triangles indicate the expected amplicon for unedited alleles, which is present in both −RT and +RT samples.

[0414] FIG. 62A Demonstrates that order of sgRNA and ncRNA within fused RNA wherein sgRNA is positioned upstream of ncRNA is more active in precise editing and indels. Results of testing different ncRNA-sgRNA fusion orders for three different retrons in all RNA system delivered to HEK293T cells by lipofection. At given amount of RT mRNA and Cas9 mRNA, ncRNA fusions with different order were added. For Eco3, Aco1 and R2042, precise editing was increased was higher with sgRNA-ncRNA compared to ncRNA-sgRNA. On the bottom row of graphs, frequency of indels is shown for respective conditions.

[0415] FIG. 62B Demonstrates that where sgRNA is positioned downstream of ncRNA, additional sgRNA compensates for lower editing activity of configuration. Same as previous figure but with the addition of sgRNA, In the presence of additional of sgRNA, the differences between ncRNA-sgRNA and sgRNA-ncRNA depends on each retron. For Eco3 and R2042, sgRNA-ncRNA performed better than ncRNA-sgRNA. For Aco1, ncRNA-sgRNA performed slightly better than sgRNA-ncRNA. On the bottom row of graphs, frequency of indels is shown for respective conditions.

[0416] FIG. 63 Demonstrates that RT and Cas9 are required for precise editing. Results of testing negative controls in all RNA system delivered to HEK293T cells by lipofection. RT and Cas9 are required for precise editing. When any one of these components is removed, precise editing is undetectable or at background levels. On the bottom graphs, frequency of indels is shown for respective conditions.

[0417] FIG. 64 Demonstrates that separation of ncRNA and gRNA does not result in the decreased frequency of precise edits. Results of testing ncRNA-sgRNA fusions versus separate ncRNA for four different retrons in all RNA system delivered to HEK293T cells by lipofection. At given amount of RT mRNA, Cas9 mRNA and additional sgRNA described underneath of graph, ncRNA/ncRNA-sgRNA/sgRNA-ncRNA were added. All insertion templates tested were 25 bp. The best ncRNA format depends on each retron. For Eco3, the highest precise editing was observed with separate ncRNA+additional sgRNA (9.88%). For Aco1, the highest precise editing was observed with ncRNA-sgRNA+additional sgRNA (2.96%). For R2042, the highest precise editing was observed with separate ncRNA+additional sgRNA (7.4%). For R6943, the highest precise editing was observed with ncRNA-sgRNA fusion+additional sgRNA (0.39%). On the bottom row of graphs, frequency of indels is shown for respective conditions.

[0418] FIG. 65 Demonstrates that retrons can achieve precise editing at AAVS1 gene locus. Results of testing four different retrons to insert 25 bp template into AAVS1 locus. Retrons were delivered as all RNA to HEK293T cells by lipofection. For all four retrons, the best precise editing was observed in the presence of additional sgRNA and ranged from 0.73% to 2.05% depending on the retron used. On the right, frequency of indels is shown for respective conditions.

[0419] FIG. 66 Demonstrates that retrons can achieve precise editing at AAVS1 gene locus. Results of negative controls for AAVS1 experiments in previous figure. Removing either RT, ncRNA-sgRNA or Cas9 mRNA abrogates precise editing. On the bottom row of graphs, frequency of indels is shown for respective conditions.

[0420] FIG. 67 Demonstrates that template for either target or non-target strand can be used for precise editing. Results of testing templates on different strands relative to Cas9 sgRNA target strand for two different retrons in all RNA system delivered to HEK293T cells by lipofection. At given amount of RT mRNA, Cas9 mRNA and additional sgRNA, ncRNA-sgRNA was added. All insertion templates tested were 25 bp. All previous figures encoded the insertion template on the same strand targeted by the Cas9 sgRNA denoted by the letter T. For Eco3, in the presence of additional sgRNA, precise editing was 1.67% when template was on the target strand and 0.85% when the template was on the non-target strand. For Aco1, in the presence of additional sgRNA, precise editing was 2.96% when template was on the target strand and 3.40% when the template was on the non-target strand. On the bottom row of graphs, frequency of indels is shown for respective conditions.

[0421] FIG. 68 Demonstrates that retron mediated Precise editing is observed with Cas9 nickase in 4 component all-RNA system. Cas9 nickase activity in 4 component all-RNA system (RT mRNA+Cas9 mRNA+ncRNA/ncRNA-sgRNA+sgRNA) delivered to HEK293T cells by Lipofectamine MessengerMAX. All RNA was transfected at a fixed amount RT mRNA 100 ng, ncRNA/ncRNA-sgRNA 400 ng, Cas9 variant mRNA 100 ng, and sgRNA 5 ng. Either separated ncRNA or ncRNA-sgRNA fusion was used. Precise editing by Cas9 WT (Wild Type) was ˜9% when either ncRNA or ncRNA-sgRNA was used with additional sgRNA. With Cas9 H480A mutant that nicks non-target strand, activity was barely seen above background in any condition. With Cas9 D10A mutant that nicks target strand, precise editing was observed ˜0.1% frequency in both separated and fused ncRNA and sgRNA format. Indels are shown at the right graph at respective conditions of left graph. As expected, indels are extremely low for either nickases with or without additional sgRNA and only WT Cas9 generated significant indels.

[0422] FIG. 69. Demonstrates that retron mediated precise editing by Cas9 nickase is dependent on each component of all RNA system. Same as previous figure but testing negative controls that lack one of components (Cas9 or ncRNA/ncRNA-sgRNA or RT) of all RNA system with or without additional sgRNA. All control conditions tested show background precise editing activity in the top graph suggesting that precise editing achieved by Cas9 WT or Cas9 nickase is dependent on each component of all RNA system. Significant indels are detectable only with Cas9 WT in the bottom graph.

[0423] FIG. 70 demonstrates that dual sgRNAs increases precise editing, but not indels. The figure shows the results of testing dual sgRNAs for R2042 in all RNA system delivered to HEK293T cells by lipofection. At given amount of RT mRNA, Cas9 mRNA and ncRNA-sgRNA, additional sgRNA was added. The same ncRNA-sgRNA with template encoded a 25 bp insertion on the Cas9 sgRNA's non-targeting strand was used for all conditions. With one additional sgRNA (#1), precise editing was 0.27%, which increased to either 1.33% (#2) or 1.13% (#3) in the presence of a second sgRNA. On the bottom graph, frequency of indels is shown for respective conditions. See Example 9.

[0424] FIG. 71 Precise editing and indel results in HEK293T cells administered by lipofection an all-RNA retron editing system based on R6083 in various configurations. Configurations included testing different template lengths (25 bp-100 bp) with fused ncRNA-sgRNA constructs (with and with spiked sgRNA) and separated ncRNA and sgRNA constructs. At given amount of RT mRNA and Cas9 mRNA, ncRNA-sgRNA fusion with different template lengths ranging from 25 to 100 bp or ncRNA with 25 bp insertion were added. Precise insertion of 100 bp was observed at ˜2% efficiency. Separated ncRNA showed lower activity than ncRNA-sgRNA fusion with 25 bp insertion. The precise editing was dependent on the presence of RT and ncRNA as shown in top, right graph. On the bottom row of graphs, frequency of indels is shown for respective conditions.

[0425] FIG. 72 Results of testing R6083 retron to insert 25 bp template into AAVS1 locus in HEK293T cells. Retron (ncRNA-sgRNA fusion), retron RT, and Cas9 components were delivered as all RNA to HEK293T cells by lipofection. With additional sgRNA, 3% of editing efficiency was observed and the activity was completely dependent on the presence of either RT or ncRNA. On the right, frequency of indels is shown for respective conditions.

[0426] FIG. 73 Demonstrates that the separation of Cas9 and RT enzymes shows higher editing efficiency than when they are fused in retron editing with Eco3. Results of testing Cas9 and RT fusion for precise editing by Eco3 in all-RNA system delivered to HEK293T cells by Lipofectamine MessengerMAX. The same molar concentration of Cas9 or RT mRNA as in Cas9-RT fusion format were used in separation and the editing efficiency of fused or separated enzyme were compared for either Eco3 ncRNA (left on left graph) or Eco3 ncRNA-sgRNA fusion (right on right graph). With both ncRNA and ncRNA-sgRNA, separated Cas9 and RT achieved higher editing efficiency than when they were fused. Indels are shown at the right graph at respective conditions of left graph.

[0427] FIG. 74 Demonstrates that both cap and tail modifications to ncRNA significantly increased editing efficiency about 2-fold. Results of end protection of ncRNA-sgRNA fusion by cap and tail in 4 component all-RNA system (RT mRNA+Cas9 mRNA+ncRNA+sgRNA) delivered to HEK293T cells by Lipofectamine MessengerMAX. All RNA was transfected at a fixed amount RT mRNA 100 ng, ncRNA-sgRNA 400 ng, Cas9 mRNA 100 ng, and sgRNA 5 ng. ncRNA-gRNA fusion was either capped (+cap −tail) or poly-A tailed (−cap +tail) or both capped and poly-A tailed (+cap +tail). Using RNA without end protection (−cap −tail) produced ˜4.5% precise edits and the editing was dependent on retron since the absence of RT abrogated precise editing. While capping alone did not change editing efficiency, tailing alone slightly increased editing and both cap and tail significantly increased editing efficiency about 2-fold (left graph). Indels at all conditions were comparable in right graph.

[0428] FIG. 75 Schematics of ncRNA circularization which as demonstrated in FIG. 76 resulted in increase editing efficiency. Step 1. ncRNA is flanked by internal homology, intron and another homology sequences outward toward both ends. Step 2. Two homology sequences facilitate closer proximity of both ends. Exogenous GTP initiates a series of trans-esterification Step 3. introns are excised and ncRNA is ligated to a circular form.

[0429] FIG. 76 Results of testing modified ncRNAs (3′MS2 modification and circularized ncRNA) for precise editing in 4 component all-RNA system (RT mRNA+Cas9 mRNA+ncRNA+sgRNA) delivered to HEK293T cells by Lipofectamine MessengerMAX. All RNA was transfected at a fixed amount RT mRNA 100 ng, ncRNA 400 ng, Cas9 mRNA 100 ng, and sgRNA 5 ng. With the addition of MS2 stem loop at 3′ end of ncRNA, the activity nearly doubled at 15% efficiency from unmodified ncRNA (˜8%). Circularization of ncRNA achieved further increase of the efficiency, reaching editing efficiency of 22%. Circularization of ncRNA was done as described in FIG. 75. Without sgRNA, both precise edit and indels were not detectable as expected. Indels are shown at the right graph at respective conditions of left graph.

[0430] FIG. 77 Results suggest pairing between RT and its cognate ncRNA are required for precise editing. Results of pairing RT and ncRNA from same or different retrons for precise editing at EMX1 locus in HEK293T cells by all-RNA system. All RNA was transfected at a fixed amount RT mRNA 100 ng, ncRNA 400 ng, Cas9 mRNA 100 ng, and sgRNA 5 ng. At left graph, Aco1 RT was pared with either Eco3 ncRNA or its cognate Aco1 ncRNA (left panel). Eco3 RT was paired with Aco1 ncRNA or its cognate Eco3 ncRNA (right panel). Only when RT was paired with its cognate ncRNA, the system supported precise editing. Indels are shown at the right graph at respective conditions of left graph.

[0431] FIG. 78 Retron editing supports insertion of exon-sized long insertions of up to 305 bp. Results of testing exon-size long insertion at EMX1 locus with Aco1, Eco3 and R1262 retrons. Aco1 achieved precise insertions of 10, 100 and 205 bp at 8, 4, and 1.3% (left graph). Eco3 made precise insertions of 10 and 205 bp at 12 and 2.3%, respectively. A novel retron R1262 obtained 25, 205, and 305 bp insertion at 20, 15 and 8.8% efficiency. Indels are shown at the bottom graphs at respective conditions of top graphs.

[0432] FIG. 79 Demonstrates that novel retron R1262 inserts 205 bp insertion at AAVS1 at over 11% efficiency. Results of testing 205 bp insertion at AAVS1 locus with a novel retron R1262. R1262 obtained 25 and 205 bp insertion at 25%, and 11.1% efficiency respectively. As controls, precise editing was dependent on the presence of RT and sgRNA. Indels are shown at the right graph at respective conditions of left graph.

[0433] FIG. 80 Optimization of ratios of RT to ncRNA for precise editing by R1262 to install 205-305 bp insertions. Results of testing RT: ncRNA ratio for >200 bp long insertion at EMX1 locus with a novel reton R1262. RT: ncRNA ratio was tested at 1:12.5, 1:16.7 and 1:25 molar ratio. 1:16.7 ratio corresponds to 1:4 mass ratio that was used in the rest of studies. With ncRNA (right in the left graph), the best editing was observed at 1:12.5 ratio for both 205 and 305 bp insertion. With ncRNA-sgRNA fusion (left at left graph), all ratio tested generated comparable editing but a weak tendency of increased editing was seen with increased amount of ncRNA-sgRNA. Indels are shown at the right graph at respective conditions of left graph.

[0434] FIG. 81 NHEJ-based insertion of retron-made double strand DNA at target site A. Some retrons could produce double strand DNA using msR-msD hybrid as a primer (e.g. Sen1). Desired sequence to insert in the genome flanked by guide-RNA recognition sequence is integrated in msD of ncRNA. Both ends of double strand DNA produced by reverse transcription is trimmed by nuclease-guide RNA complex and inserted to the target site cleaved by nuclease-guide RNA complex. B. ncRNA is designed as in A to contain a sequence to insert at the target site flanked with guide-RNA recognition sequences. Second ncRNA includes a reverse complementary sequence of the first ncRNA in order that two of them form a duplex. Such double strand DNA is trimmed by nuclease-guide RNA complex and inserted to the target site cleaved by nuclease-guide RNA complex.

[0435] FIG. 82A Non-coding RNA optimization A. There are number of structural components in retron ncRNA, 1. a1/a2 inverted repeat 2. msR stem loops 3. msD stem loop 4. msR DNA. Fine-tuning strength of these structural elements by varying GC content, length and number of stem loops could enhance msD DNA production and consequent gene editing.

[0436] FIG. 82B Non-coding RNA optimization B. Separation of msR RT primer and msD RT template allows chemical modification of msR RT primer. In combination with end protection of msD RT template by cap and tail, the stability of ncRNA could be enhanced. Use of reverse complementary sequences at 3′ end of RT primer and 5′ end of msD RT template (depicted in dashed lines) stabilizes the primer/template complex.

[0437] FIG. 83A provides a schematic outline a modified retron gene editing system that comprises an engineered variant reverse transcriptase (RT) with improved fidelity and/or processivity. The engineered RT is produced by introducing selective amino acid substitutions into the sequence of a retron RT at residue positions that are orthologous to those altered residues in Murine Leukemia Virus (MMLV) RT that result in improved fidelity and processivity of MMLV RT. In Step (a), a structural alignment is constructed as between a retron RT and an engineered MMLV RT having one or more amino acid substitutions that are associated with improved fidelity and processivity in the MMLV RT context. In Step (b), the alignment is inspected to identify the orthologous amino acid residues in the retron RT that correspond with the substituted MMLV RT amino acids. Once identified, an engineered retron RT comprise one or more corresponding orthologous amino acid substitutions is constructed using routine recombinant engineering methodologies. In Step (c), unnecessary residues may be deleted optionally and based on the structural alignment information. In one embodiment, a retron gene editing system may comprise in (d) a ncRNA, a guide, a programmable nuclease (or an RNA encoding same), and the engineered RT (or an RNA encoding same). In Step (e), the components (which can be in all RNA format) are delivered to a cell (e.g., by LNP delivery), which results in (f) the targeted single (in the case of a nickase) or double strand cut, followed by (g) targeted repair by the reverse transcription product of the ncRNA at the cut site. This results in (h) DNA with a precise edit.

[0438] FIG. 83B provides a summary of mutations for installing in RTX3_1262 RT and RTX3_6242, as well as in Eco1 RT that are orthologous to known beneficial amino acid substitutions made in MMLV that are reported in the literature. In addition, the table provides for the reported phenotype change associated with the mutation in MMLV and the domain of the mutation.

[0439] FIG. 83C provides a structural alignment between RTX3_6342 RT (yellow) and MMLV-RT (Protein Data Bank 4MH8) (green), which reveals that the N-terminus of the RTX3-6342 RT may be able to be truncated, for example, at the suggested points of truncation.

[0440] FIG. 83D shows three dimensional structures of MMLV RT proximal to Q190 and the corresponding orthogonal positions Q161 in Eco1. In the top pictures, the glutamine is conserved in both MMLV and Eco1. The middle picture shows that the Q161 position in Eco1 is involved in nucleic acid contact. The lower shows that engineered MMLV variants having a Q190F mutation results in increased fidelity of around 2-fold. A corresponding substitution in Eco1 at Q161 (i.e., a Q161F mutation) may also result in increased fidelity of the Eco1 RT.

[0441] FIG. 83E Mutations in MMLV RT and Eco1 that improve processivity. Provides three dimensional structures of E302 of MMLV RT and the corresponding reside of G283 in Eco1, both of which appear to be involved in binding to nucleic acid. Residues in nucleic acid binding domains can be mutated to enforce stronger interactions. MMLV E302R creates a positive charge to interact with the negatively charged template. Eco1 G283 is in a conserved DNA binding alpha helix. Mutating G283 and orthologous retron residues to a positively charged amino acid may improve processivity.

[0442] FIG. 83F Mutations in MMLV RT and Eco1 that improve processivity. Provides three dimensional structures of T306 of MMLV RT and the corresponding reside of F287 in Eco1, both of which appear to be involved in binding to nucleic acid. Residues in nucleic acid binding domains can be mutated to enforce stronger interactions. MMLV T306K creates a positive charge to interact with the negatively charged template. Eco1 F287 is in a conserved DNA binding alpha helix. Mutating F287 and orthologous retron residues to a positively charged amino acid may improve processivity.

[0443] FIG. 84 describes the making of variant retron RTs by saturation mutagenesis of targeted domains involved in processivity and fidelity (e.g., palm, fingers, and thumb domains). An engineered RT is produced by introducing saturation mutagenesis into palm, finger, and thumb domains in a retron RT that are identified through a structural alignment with MMLV RT. In Step (a), a structural alignment is constructed as between a retron RT and an engineered MMLV RT having one or more amino acid substitutions that are associated with improved fidelity and processivity in the MMLV RT context, particularly in the palm, finger, and thumb domains. In Step (b), the palm, finger, and thumb domains are identified. In Step (c), the palm, finger, and/or thumb domains are mutagenized using a saturation mutagenis methodology and the resultant mutants are screened in an activity assay to select one or more leads variants that have increased processivity and/or fidelity. In Step (e), the components (which can be in all RNA format), including the lead retron RT variants, are delivered to a cell (e.g., by LNP delivery), which results in (f) the targeted single (in the case of a nickase) or double strand cut, followed by (g) targeted repair by the reverse transcription product of the ncRNA at the cut site. This results in (h) DNA with a precise edit.

[0444] FIG. 85A describes the making of variant retron RTs by constructing chimeric RT proteins that fuse a “Y region” of a retron RT (i.e., the region that is reported to be responsible for binding to the msr region of a retron ncRNA) with another RT (e.g, an MMLV RT) or replacing the “Y region” or one retron RT with that of another retron RT. In this way, the chimeric protein could be engineered against any particular ncRNA to have the corresponding Y region that would be expected to bind to that ncRNA.

[0445] FIG. 85B (SEQ ID NOS:19955-19968) (Top to Bottom) provides a multiple sequence alignment of amino acid sequences of numerous retron RTs (top). The boxed region indicates the position of a conserved VTG triplet that marks the N-terminal side of the Y region (as reported in Anna J Simon, Andrew D Ellington, Ilya J Finkelstein, Retrons and their applications in genome engineering, Nucleic Acids Research, Volume 47, Issue 21, 2 Dec. 2019, Pages 11007-11019, which is incorporated herein by reference), which is about 90 amino acids in length. The schematic below is a magnified version of the top figure.

[0446] FIG. 86 describes the making of variant retron RTs by fusing one or more processivity-enhancing factors, such as Sso7d and Sac7d, and/or one more fidelity-enhancing factors, e.g., 3′>5′ exonuclease domains to increase proofreading activity (e.g., POLE1, POLD1, POLG, Pfu, or KOD). In selecting appropriate factors to enhance the processivity and/or fidelity of retron RTs, reference is made Oscorbin et al., “The attachment of a DNA-binding Sso7d-like protein improves processivity and resistance to inhibitors of M-MuLV reverse transcriptase,” FEBS Lett, 594: 4338-4356 and Yarnall et al., “Drag-and-drop genome insertion of large sequences without double-strand DNA cleavage using CRISPR-directed integrases,” Nature Biotechnol, 2022.

[0447] FIG. 87 Electroporation using plasmid in K562 cells. Appropriate mixtures of plasmids were mixed and electroporated using a Neon Electroporation System into cells. After 72 hours incubation, genomic DNA was extracted and targeting region was amplified into sequencing libraries. Sequencing data was analyzed by CRISPResso2 and precise edit and indels were calculated.

[0448] FIG. 88 Results of plasmid-based assay in K562 cells demonstrating up to about 1˜10% precise edits and as low as 5˜30% indels with RTX003_2042, 6083v1, 6943, 1262, 6342L and 6342S. All are novel retrons and precise editing activity observed in this experiment strongly support that these novel retrons could generate msDNA inside K562 cells. These data replicate prior results seen in 293T cells suggesting that retron-mediated gene-editing is not impacted by cell-type specific effects.

[0449] FIG. 89 Results of plasmid-based assay comparing literature annotated retrons to novel retrons in K562 cells. These data demonstrate that novel retrons RTX3_1262, RTX3_6342L, and RTX3_6342S can generate about 15-19% precise edits and as low as 20˜35% indels. Novel retrons perform as well or better than Aco1 and better than the other literature validated retrons: Eco1, Eco3, Saul, and Sen1.

[0450] FIG. 90 Results of plasmid-based assay comparing RTX3_2781 to lead retrons RTX3_1262 and RTX3_6342S/L in K562 cells. These data demonstrate that RTX3_2781 installs precise edits at comparable efficiencies to RTX3_1262 and 6342S/L.

[0451] FIG. 91 Results of plasmid-based assay in K562 cells demonstrating up to about 0.6% precise edits and as low as 5% indels with RTX003_2042, 6083v1, 6943, 1262, 6342L and 6342S using a Cas9 D10A nickases. All are novel retrons and precise editing activity observed in this experiment strongly support that these novel retrons could generate msDNA inside cells can be used for nickase-initiated gene-editing.

[0452] FIG. 92 Results of plasmid-based assay in K562 cells demonstrating up to 0.5% precise edits using the LbCas12a nuclease. Precise editing in this system strongly suggests the generation of msDNA inside cells and compatibility with Cas12a-like nucleases for gene-editing.

[0453] FIG. 93 Results of plasmid-based assay in K562 cells demonstrating up to 0.5% precise edits using the TnpB nuclease. Precise editing in this system suggests the generation of msDNA inside cells and compatibility with TnpB-like nucleases for gene-editing.

[0454] FIG. 94 RTX3_6342 (predicted structure from alpha-fold)(yellow) aligned to MMLV-RT (PDB 4MH8) (green). Native RTX3_6342 RT is fused to a non-RT related domain at the N-terminus that may not be necessary for reverse transcription. Arrows mark potential truncation points of interest. Jumper et al. Highly accurate protein structure prediction with AlphaFold. Nature 596, 583-589 (2021). https://doi.org/10.1038/s41586-021-03819-2.

[0455] FIG. 95 Results of plasmid-based assay in K562 cells demonstrating up to about ˜20% precise edits and ˜20% indels with RTX003_6342S and truncation variants. Precise editing activity observed in this experiment strongly support that these truncations retain the capability to generate msDNA inside cells.

[0456] FIG. 96 Results of plasmid-based assay in K562 cells demonstrating up to ˜40% precise edits and ˜60% indels with RTX003_6342S and RTX3_1262 with differing insert sizes. Precise editing activity observed in this experiment suggest that RTX3_6342S can insert sequences of up to 405 bp into the EMX1 locus without a decline in precise editing. RTX3_1262 can insert up to 205 bp at the EMX1 locus before editing efficiencies decline. Substitutions in reads were ignored during CRISPResso2 analysis in this experiment.

[0457] FIG. 97 Results of plasmid-based assay in K562 cells demonstrating up to ˜40% precise edits and ˜40% indels with RTX003_6342S and RTX3_1262 with differing insert sizes while ignoring or quantifying substitutions during CRISPResso2 analysis. Precise editing activity observed in this experiment suggest that RTX3_6342S can insert sequences of up to 405 bp into the EMX1 locus but that RT fidelity could limit accurate installation of the intended edit (compare ignore (circles) vs count (triangles) substitutions).

[0458] FIG. 98 Results of plasmid-based assay in K562 cells screening mutations in RTX3_6342 reverse transcriptase predicted to interact with ncRNA after structural alignment of a predicted alphafold RTX3_6342 structure and a crystal structure of Retron Eco1 with ncRNA. Most mutations have modest effects on the installation of shorter 10 bp inserts but only two (N465K and N465R) potentially increase the installation frequencies of larger (305 bp) inserts.

[0459] FIG. 99 Results of plasmid-based assay in K562 cells demonstrating that orthologous MMLV mutations in RTX3_63425 do not consistently increase the installation frequencies of inserts >205 bp. MMLV (L139P)==RTX3_6342 (V265P), MMLV (T306K)==RTX3_6342 (M470K), MMLV (W313F)==RTX3_6342 (V477F).

[0460] FIG. 100 Results of plasmid-based assay in K562 cells screening mutations in RTX3_6342 reverse transcriptase predicted to interact with ncRNA after structural alignment of a predicted alphafold RTX3_6342 structure and a crystal structure of Retron Eco1 with ncRNA. The E238R, E479K and K255P are mutations that potentially increase the installation frequencies of 305 bp inserts at the EMX1 locus.

[0461] FIG. 101 Predicted structures of RTX3_6342 wildtype and with different N-terminal truncations. Predicted structures were generated with Alphafold and aligned to the Eco1/CryoEM structure (79VU.pdb) using PyMoL align.

[0462] FIG. 102 Results of plasmid-based assay in K562 cells assessing the effects of partial or full deletions of N-terminal helices of RTX3_6342 on the installation frequencies of longer inserts. We observed that partial N-terminal truncation boost the precise edits/indel ratio of longer inserts.

[0463] FIG. 103 Results of plasmid-based assay in K562 cells assessing the effects of DNA-binding domain fusion to RTX3_6342 on the installation frequencies of 405 bp inserts. Fusion of Sac7d or Sso7d DNA-binding domains to the N-terminus of retron reverse transcriptases led to two-fold (RTX3_6342S) or ten-fold (RTX3_1262) increases in installation frequencies of 405 bp inserts.

[0464] FIG. 104 Results of plasmid-based assay in K562 cells screening retron family members similar to RTX3_6342, 6083, 6943, or 1262. We noted that most retrons with robust gene-editing activity were in the RTX3_6342 family.

[0465] FIG. 105 Results of testing precise editing activity of a novel reton R2781 in all-RNA system. In FIG. 16, R2781 demonstrated 10 bp insertion at EMX1 locus in plasmid system, at similar activity as other hits, R1262, R6342S, 6342L. Here, the activity of R2781 for 25 bp, 205 bp and 405 bp insertion at EMX1 locus was evaluated with two different homology arm (HA) length (30 bp for both arms or 49 bp left/65 bp right). Precise insertion of 25 bp with 30 bp homology arm was achieved at 11% efficiency. The efficiency of same length insertion was reduced to half with longer homology arm (49/65 bp) suggesting that this retron reverse transcriptase might have limited enzymatic processivity. Conversely, the activity inserting 205 or 405 bp significantly dropped. Indels are shown at the right graph at respective conditions of left graph.

[0466] FIG. 106 Results of testing precise editing activity of a novel retron R6342S in all-RNA system with Cas.9 D10A. Previously, it was demonstrated that retron R6342S could achieve precise editing with Cas9 WT. Here, the activity for 25 bp insertion in EMX1 locus was evaluated in 293T cells with either Cas9 D10A or Cas9 D10A R221K/N394K mutant and either 10 or 50 ng sgRNA. Cas9 D10A demonstrated up to 0.4% editing while Cas9 D10A R221K/N394K showed higher activity up to 0.7% editing. These data demonstrate that retron-mediated genomic insertions are possible with Cas9 nickase as well as Cas9 WT which makes double-stranded breaks. Indels are shown at the right graph at respective conditions of left graph.

[0467] FIG. 107 Results of testing precise deletion activity of a novel reton R1262 in all-RNA system. In top panel, two deletion strategies are shown. Retron ncRNA is designed by juxtaposing left and right homology arms sequences to delete the intervening sequence. Dell is deleting 214 bp upstream of Cas9 cutting site and de12 is deleting 248 bp downstream of Cas9 cutting site at EMX1 locus. Retron mediated deletion was compared with direct delivery of increasing amount of single strand DNA (ssDNA) donor (150 and 300 ng). Bottom panel, left graph shows that R1262 was able to delete 248 bp (de12) from EMX1 locus at similar activity as ssDNA donor. Indels are shown at the right graph at respective conditions of left graph. Of note, unintended indel activity by retron-mediated deletion was ˜6 fold lower than ssDNA donor mediated deletion. Deletion activity of 214 bp (del1) by R1262 was not detected

[0468] FIG. 108 Results of testing non-homologous end joining (NHEJ) based insertion activity of a novel reton R1262 and R6342 in all-RNA system. At left, the strategy to derive double strand DNA (dsDNA), which is the substrate of NHEJ mechanism is depicted. 1. Retron reverse transcriptase generates complementary single strand DNAs from two ncRNAs that contain either sense or anti-sense insert sequences. 2. Complementary single strand DNAs form duplex 3. Cas9-sgRNA complex remove Y-shape single stranded portion (msR and msD spacer sequences) at both extremes. 4. Cas9 trimmed blunt-end double strand DNA is successfully inserted at target site. The inclusion of sgRNA recognition sequences (same as genomic target sequence) in tandem at both ends of insert leads to blunt-ended double strand DNA and only one direction of insertion allows more stable integration by preventing from recutting by Cas9. Using this strategy, R1262 with two complementary ncRNAs integrated ˜120 bp dsDNA on EMX1 locus at ˜1% efficiency, higher when insert sequence is flanked with two sgRNA sequences in tandem (right, top graph). Basal insertion activity of R6342 without tandem sgRNA sequences was slightly higher than that of R1262. Indels are shown at the right, bottom graph at respective conditions of top graph.

[0469] FIG. 109 Results of testing immune response to retron RNAs. Human peripheral blood mononuclear cells (hPBMCs) were used to evaluate immune response since PBMCs contain both innate and adaptive immune cells and they are equipped with sensors to detect foreign nucleic acids. Frozen hPBMCs were thawed to rest for overnight. RT mRNA with U or m1′P and ncRNA with/without cap0 (m7G) at 5′ end were electroporated individually or together as indicated in the label, along with unmodified GFP mRNA from TriLink as a control. After overnight culture, the supernatant was analyzed for cytokine production. Among 25 cytokines and chemokines examined, those detected above detection limit are shown. Type I interferon, a hallmark of immune response to foreign nucleic acids was not detected in any retron RNA transfected cells and some inflammatory cytokines/chemokines were detected at low level in retron RNA transfected cells, but at much lower level than control GFP mRNA except RT mRNA without U modification.

[0470] FIG. 110 Results of testing retron-mediated gene editing in human stem progenitor cells (HSPCs) in all-RNA system. Bone marrow derived CD34+ human stem progenitor cells (HSPCs) were used to evaluate the performance of retron-mediated gene editing in primary cells. Frozen HSPCs were thawed to expand for three days in the presence of hSCF, hFLT3-L, hTPO cytokines to prevent differentiation. Cas9 mRNA, guide RNA (gRNA), R6342 RT mRNA and ncRNA was mixed at mass ratio indicated in each label, and electroporated to HSPCs by Lonza electroporator using two different programs. After additional three-day culture, genomic DNA was extracted and sequenced to measure editing frequency. With total of 5 microgram of RNA, divided at 1:0.3:4:1=Cas9:gRNA:ncRNA:RT, precise insertion of 25 bp at AAVS1 locus was observed at 0.1% of frequency (left graph). Indels at respective condition is shown at the right graph.

[0471] FIG. 111 Results of testing retron-mediated gene editing in human T-cells in all-RNA system. Human pan T-cells from peripheral blood were used to evaluate the performance of retron-mediated gene editing in primary cells. Frozen T-cells were thawed and activated for two days in the presence of anti-CD3/anti-CD28 conjugated magnetic beads and IL-2 cytokine. Cas9 mRNA, guide RNA (gRNA), R6342 RT mRNA and ncRNA was mixed at mass ratio indicated in each label, and electroporated to T-cells by either Neon or Lonza electroporator. After additional three-day culture, genomic DNA was extracted and sequenced to measure editing frequency. With total of 3 microgram of RNA, divided at 1:0.3:3:1=Cas9:gRNA:ncRNA:RT, precise insertion of 25 bp at AAVS1 locus was observed up to 1.7% of frequency using Neon machine (left graph). Indels in their respective condition is shown at the right graph.

[0472] FIG. 112 provides a schematic of retron ncRNA library. Variants of different elements in the ncRNA (modified a1:a2 stem, msR, msD regions) are associated with unique barcodes and the library is synthesized as an oligo library. By sequencing barcodes inserted at the genomic locus, the efficiency of associated ncRNA variants can be measured in human cells.

[0473] FIG. 113 outlines the variant library of Example 31.

[0474] FIG. 114 provides a schematic depicting the screening process used to screen the ncRNA variant library described in Example 31.

[0475] FIG. 115 provides a scatter plot summarizing the results of FIG. 31. In the scatter plot, each dot represents one variant with relative genomic insertion level on the y-axis and ssDNA production level on the x-axis. Dotted lines represent the levels of genomic insertion and ssDNA production from WT R6342S control. Hence, the ncRNA variants on the upper right part of the dotted lines are outperforming WT R6342S control on both levels. As can be seen, most of these variants have either a1a2 or msD stem elements. We list 13 such variants that show over 1.5-fold over WT R6342S control on both genomic insertion and ssDNA production level.

### DEFINITIONS

[0476] All technical and scientific terms used herein have the meaning commonly understood by a person skilled in the art to which this invention belongs. The following references provide one of skill with a general definition of many of the terms used in this invention: Singleton et al., Dictionary of Microbiology and Molecular Biology (2nd ed. 1994); The Cambridge Dictionary of Science and Technology (Walker ed., 1988); The Glossary of Genetics, 5th Ed., R. Rieger et al. (eds.), Springer Verlag (1991); and Hale & 62/1005 Marham, The Harper Collins Dictionary of Biology (1991).

[0477] General methods in molecular and cellular biochemistry can be found in such standard textbooks as Molecular Cloning: A Laboratory Manual, 3rd Ed. (Sambrook et al., HaRBor Laboratory Press 2001); Short Protocols in Molecular Biology, 4th Ed. (Ausubel et al. eds., John Wiley & Sons 1999); Protein Methods (Bollag et al., John Wiley & Sons 1996); Nonviral Vectors for Gene Therapy (Wagner et al. eds., Academic Press 1999); Viral Vectors (Kaplift & Loewy eds., Academic Press 1995); Immunology Methods Manual (I. Lefkovits ed., Academic Press 1997); and Cell and Tissue Culture: Laboratory Procedures in Biotechnology (Doyle & Griffiths, John Wiley & Sons 1998), the disclosures of which are incorporated herein by reference.

[0478] Where a range of values is provided, it is understood that each intervening value, to the tenth of the unit of the lower limit unless the context clearly dictates otherwise, between the upper and lower limit of that range and any other stated or intervening value in that stated range, is encompassed within the disclosure. The upper and lower limits of these smaller ranges may independently be included in the smaller ranges, and are also encompassed within the disclosure, subject to any specifically excluded limit in the stated range. Where the stated range includes one or both of the limits, ranges excluding either or both of those included limits are also included in the disclosure.

[0479] It must be noted that as used herein and in the appended claims, the singular forms “a,” “an,” and “the” include plural referents unless the context clearly dictates otherwise. Thus, for example, reference to “a ncRNA” includes a plurality of ncRNAs and reference to “the reverse transcriptase” includes reference to one or more RTs and equivalents thereof known to those skilled in the art, and so forth. It is further noted that the claims may be drafted to exclude any optional element. As such, this statement is intended to serve as antecedent basis for use of such exclusive terminology as “solely,” “only” and the like in connection with the recitation of claim elements, or use of a “negative” limitation. For example, claims may be drafted to exclude certain RT sequences.

[0480] It is appreciated that certain features of the invention, which are, for clarity, described in the context of separate embodiments, may also be provided in combination in a single embodiment. Conversely, various features of the invention, which are, for brevity, described in the context of a single embodiment, may also be provided separately or in any suitable sub-combination. All combinations of the embodiments pertaining to the invention are specifically embraced by the present invention and are disclosed herein just as if each and every combination was individually and explicitly disclosed. In addition, all sub-combinations of the various embodiments and elements thereof are also specifically embraced by the present invention and are disclosed herein just as if each and every such sub combination was individually and explicitly disclosed herein.

### Biologically Active

[0481] As used herein, the term “biologically active” refers to a characteristic of an agent (e.g., DNA, RNA, or protein) that has activity in a biological system (including in vitro and in vivo biological system), and particularly in a living organism, such as in a mammal, including human and non-human mammals. For instance, an agent when administered to an organism has a biological effect on that organism, is considered to be biologically active.

### Bulge

[0482] As used herein, the term “bulge” refers to a small region of unpaired base(s) that interrupts a “stem” of base-paired nucleotides. The bulge may comprise one or two single-stranded or unbase-paired nucleotides joined at both ends by base-paired nucleotides of the stem. The bulge can be symmetrical (viz., the two unbase-paired single-stranded regions have the same number of nucleotides), or asymmetrical (viz., the unbase-paired single stranded region(s) have different or unequal numbers of nucleotides), or there is only one unbase-paired nucleotide on one strand. A bulge can be described as A/B (such as a “2/2 bulge,” or a “1/0 bulge”) wherein A represents the number of unpaired nucleotides on the upstream strand of the stem, and B represents the number of unpaired nucleotides on the downstream strand of the stem. An upstream strand of a bulge is more 5′ to a downstream strand of the bulge in the primary nucleotide sequence. cDNA

[0483] As used hereing, the term “cDNA” refers to a strand of DNA copied from an RNA template, e.g., by a reverse transcriptase.

### Cognate

[0484] The term “cognate” refers to two biomolecules that normally interact or co-exist in nature.

### Complementary

[0485] As used herein, the terms “complementary” or “substantially complementary” are meant to refer to a nucleic acid (e.g., RNA, DNA) that comprises a sequence of nucleotides that enables it to non-covalently bind, i.e., form Watson-Crick base pairs and/or G/U base pairs, “anneal”, or “hybridize,” to another nucleic acid in a sequence-specific, antiparallel, manner (i.e., a nucleic acid specifically binds to a complementary nucleic acid) under the appropriate in vitro and/or in vivo conditions of temperature and solution ionic strength. Standard Watson-Crick base-pairing includes: adenine (A) pairing with thymidine (T), adenine (A) pairing with uracil (U), and guanine (G) pairing with cytosine (C) [DNA, RNA]. In addition, for hybridization between two RNA molecules (e.g., dsRNA), and for hybridization of a DNA molecule with an RNA molecule (e.g., when a DNA target nucleic acid base pairs with a guide RNA, etc.): guanine (G) can also base pair with uracil (U). For example, G/U base-pairing is at least partially responsible for the degeneracy (i.e., redundancy) of the genetic code in the context of tRNA anti-codon base-pairing with codons in mRNA. Thus, in the context of this disclosure, a guanine (G) is considered complementary to both a uracil (U) and to an adenine (A). For example, when a G/U base-pair can be made at a given nucleotide position of a dsRNA duplex of a guide RNA molecule, the position is not considered to be non-complementary, but is instead considered to be complementary.

[0486] It is understood that the sequence of a polynucleotide need not be 100% complementary to that of its target nucleic acid to be specifically hybridizable or hybridizable. Moreover, a polynucleotide may hybridize over one or more segments such that intervening or adjacent segments are not involved in the hybridization event (e.g., a bulge, a loop structure or hairpin structure, etc.). A polynucleotide can comprise 60% or more, 65% or more, 70% or more, 75% or more, 80% or more, 85% or more, 90% or more, 95% or more, 98% or more, 99% or more, 99.5% or more, or 100% sequence complementarity to a target region within the target nucleic acid sequence to which it will hybridize. For example, an antisense nucleic acid in which 18 of 20 nucleotides of the antisense compound are complementary to a target region, and would therefore specifically hybridize, would represent 90 percent complementarity. In this example, the remaining noncomplementary nucleotides may be clustered or interspersed with complementary nucleotides and need not be contiguous to each other or to complementary nucleotides. Percent complementarity between particular stretches of nucleic acid sequences within nucleic acids can be determined using any convenient method. Example methods include BLAST programs (basic local alignment search tools) and PowerBLAST programs (Altschul et al., J. Mol. Biol., 1990, 215, 403-410; Zhang and Madden, Genome Res., 1997, 7, 649-656), the Gap program (Wisconsin Sequence Analysis Package, Version 8 for Unix, Genetics Computer Group, University Research Park, Madison Wis.), e.g., using default settings, which uses the algorithm of Smith and Waterman (Adv. Appl. Math., 1981, 2, 482-489), and the like.

### DNA-Guided Nuclease

[0487] As used herein, an “DNA-guided nuclease” is a type of “programmable nuclease,” and a specific type of “nucleic acid-guided nuclease.” An example of a DNA-guided nuclease is reported in Varshney et al., DNA-guided genome editing using structure-guided endonucleases, Genome Biology, 2016, 17(1), 187, which may be used in the context of the present disclosure and is incorporated herein by reference. As used herein, the term “DNA-guided nuclease” or “DNA-guided endonuclease” refers to a nuclease that associates covalently or non-covalently with a guide RNA thereby forming a complex between the guide RNA and the DNA-guided nuclease. The guide RNA comprises a spacer sequence which comprises a nucleotide sequence having complementarity with a strand of a target DNA sequence. Thus, the DNA-guided nuclease is indirectly guided or programmed to localize to a specific site in a DNA molecule through its association with the guide RNA, which directly binds or anneals to a strand of the target DNA through its complementarity region via Watson-Crick base-pairing.

### DNA Regulatory Sequences

[0488] As used herein, the terms “DNA regulatory sequences,” “control elements,” and “regulatory elements,” can be used interchangeably herein to refer to transcriptional and translational control sequences, such as promoters, enhancers, polyadenylation signals, terminators, protein degradation signals, and the like, that provide for and/or regulate transcription of a non-coding sequence (e.g., guide RNA) or a coding sequence and/or regulate translation of a mRNA into an encoded polypeptide.

### Donor Nucleic Acid

[0489] By a “donor nucleic acid” or “donor polynucleotide” or “donor DNA” or “HDR donor DNA” it is meant a single-stranded DNA to be inserted at a site cleaved by a programmable nuclease (e.g., a CRISPR/Cas effector protein; a TALEN; a ZFN; a meganuclease) (e.g., after dsDNA cleavage, after nicking a target DNA, after dual nicking a target DNA, and the like). The donor polynucleotide can contain sufficient homology to a genomic sequence at the target site, e.g. 70%, 80%, 85%, 90%, 95%, or 100% homology with the nucleotide sequences flanking the target site, e.g., within about 200 bases or less of the target site, e.g., within about 190 bases or less of the target site, e.g., within about 180 bases or less of the target site, e.g., within about 170 bases or less of the target site, e.g., within about 160 bases or less of the target site, e.g., within about 150 bases or less of the target site, e.g., within about 140 bases or less of the target site, e.g., within about 130 bases or less of the target site, e.g., within about 120 bases or less of the target site, e.g., within about 110 bases or less of the target site, e.g., within about 100 bases or less of the target site, e.g., within about 90 bases or less of the target site, e.g., within about 80 bases or less of the target site, e.g., within about 70 bases or less of the target site, e.g., within about 60 bases or less of the target site, e.g., 50 bases or less of the target site, e.g., within about 30 bases, within about 15 bases, within about 10 bases, within about 5 bases, or immediately flanking the target site, to support homology-directed repair between it and the genomic sequence to which it bears homology.

### Encodes

[0490] As used herein, a DNA sequence that “encodes” a particular RNA is a DNA nucleotide sequence that is transcribed into RNA. A DNA polynucleotide may encode an RNA (mRNA) that is translated into protein (and therefore the DNA and the mRNA both encode the protein), or a DNA polynucleotide may encode an RNA that is not translated into protein (e.g. tRNA, rRNA, microRNA (miRNA), a “non-coding” RNA (ncRNA), a guide RNA, etc.). In the case of retrons, the retron DNA may encode the ncRNA loci (which includes the msr and msd regions) as well as a retron RT.

### Engineered Retron

[0491] As used herein, the term “engineered retron” or equivalently, “recombinant retron,” refers to a retron that does not occur in nature. In one embodiment, engineered retrons can include wildtype or naturally-occurring retrons that are modified to contain at least one modification, including a single nucleotide substitution, insertion, or deletion, or a substitution, insertion, or deletion of more than one nucleotide, i.e., up to 2, 3, 4, 5, 6, 7, 8, 9, 10, 11, 12, 13, 14, 15, 16, 17, 18, 19, 20, 21, 22, 23, 24, 25, 26, 27, 28, 29, 30, 31, 32, 33, 34, 35, 36, 37, 38, 39, 40, 41, 42, 43, 44, 45, 46, 47, 48, 49, 50, 51, 52, 53, 54, 55, 56, 57, 58, 59, 60, 61, 62, 63, 64, 65, 66, 67, 68, 69, 70, 71, 72, 73, 74, 75, 76, 77, 78, 79, 80, 81, 82, 83, 84, 85, 86, 87, 88, 89, 90, 91, 92, 93, 94, 95, 96, 97, 98, 99, or up to 100, or up to 200, 300, 400, 500, 600, 700, 800, 900, 1000, 1100, 1200, 1300, 1400, 1500, 1600, 1700, 1800, 1900, or up to 2000 nucleotides substituted, inserted, or deleted from a starting point retron (e.g., a wildtype retron). Where more than one nucleotide of a starting point retron (e.g., a wildtype retron) is substituted, deleted, or inserted, the nucleotides may be contiguous or non-contiguous. While an engineered retron as a whole is not naturally-occurring, it may include components such as nucleotide sequences that do occur in nature. For example, an engineered retron can have nucleotide sequences from different organisms (e.g., from different bacteria species), or from completely synthetic/artificial/recombinant nucleic acid sequences. Thus, an engineered retron can have a bacterial nucleotide sequence, a human nucleotide sequence, a viral nucleotide sequence, and/or a synthetic/artificial/recombinant nucleotide sequence, and/or combinations of such sequences. An example of modifications of the recombinant retrons disclosed herein include the insertion of a heterologous nucleic acid sequence in a retron, for example, inserted into the ncRNA locus, such as in the msr or the msd loci. Linking guide RNA molecules to the 5′ and/or 3′ ends (i.e., linking one at the 5′ end of a ncRNA and/or one at the 3′ end of a ncRNA) also represent another modification envisioned by the recombinant retrons disclosed herein. In such embodiments, the guide RNA molecules may also be categorized or referred to more generally as types of heterologous nucleic acid sequences used to modify starting point retrons.

### Exosomes

[0492] As used herein, the term “exosomes” refer to small membrane bound vesicles with an endocytic origin. Without wishing to be bound by theory, exosomes are generally released into an extracellular environment from host/progenitor cells post fusion of multivesicular bodies the cellular plasma membrane. As such, exosomes can include components of the progenitor membrane in addition to designed components (e.g. engineered retron). Exosome membranes are generally lamellar, composed of a bilayer of lipids, with an aqueous inter-nanoparticle space.

### Expression Vector

[0493] As used herein, the term “expression vector” or “expression construct” refers to a vector that includes one or more expression control sequences, and an “expression control sequence” is a DNA sequence that controls and regulates the transcription and/or translation of another DNA sequence. Suitable expression vectors include, without limitation, plasmids and viral vectors derived from, for example, bacteriophage, baculoviruses, tobacco mosaic virus, herpes viruses, cytomegalovirus, retroviruses, vaccinia viruses, adenoviruses, and adeno-associated viruses. Numerous vectors and expression systems are commercially available, such as from Novagen (Madison, WI), Clontech (Palo Alto, CA), Stratagene (La Jolla, CA), and Invitrogen/Life Technologies (Carlsbad, CA). The present invention comprehends recombinant vectors that may include viral vectors, bacterial vectors, protozoan vectors, DNA vectors, or recombinants thereof.

### Guide RNA

[0494] The RNA molecule that binds to a programmable nuclease of a retron-based gene editing systems and which targets the nuclease to a specific location within the targeted polynucleotide sequence is referred to herein as the “guide RNA” or “guide RNA polynucleotide” (also referred to herein as a “guide RNA” or “gRNA” or “crRNA”). In certain embodiments (depending on the particular nuclease to which it interacts with), a guide RNA comprises two segments, a “DNA-targeting segment” and a “protein-binding segment.” By “segment” it is meant a segment/section/region of a molecule, e.g., a contiguous stretch of nucleotides in an RNA. As an illustrative, non-limiting example, a protein-binding segment of a guide RNA can comprise base pairs 5-20 of the RNA molecule that is 40 base pairs in length; and the DNA-targeting segment can comprise base pairs 21-40 of the RNA molecule that is 40 base pairs in length. The definition of “segment,” unless otherwise specifically defined in a particular context, is not limited to a specific number of total base pairs, is not limited to any particular number of base pairs from a given RNA molecule, is not limited to a particular number of separate molecules within a complex, and may include regions of RNA molecules that are of any total length and may or may not include regions with complementarity to other molecules.

[0495] The DNA-targeting segment (or “DNA-targeting sequence”) comprises a nucleotide sequence that is complementary to a specific sequence within a targeted polynucleotide sequence (the complementary strand of the targeted polynucleotide sequence) designated the “protospacer-like” sequence herein. The protein-binding segment (or “protein-binding sequence”) interacts with a site-directed modifying polypeptide. When the site-directed modifying polypeptide is a CRISPR nuclease, site-specific cleavage of the targeted polynucleotide sequence may occur at locations determined by both (i) base-pairing complementarity between the guide RNA and the targeted polynucleotide sequence; and (ii) a short motif (referred to as the protospacer adjacent motif (PAM)) in the targeted polynucleotide sequence.

### Heterologous Nucleic Acid Sequence

[0496] As used herein, the term “heterologous nucleic acid” refers to a genotypically distinct entity from that of the rest of the entity to which it is compared or into which it is introduced or incorporated. For example, a polynucleotide introduced by genetic engineering techniques into a different cell type is a heterologous polynucleotide (e.g., DNA or RNA) and, if expressed, can encode a heterologous polypeptide. Similarly, a cellular sequence (e.g., a gene or portion thereof) that is incorporated into a viral vector is a heterologous nucleotide sequence with respect to the vector. In some embodiments, the heterologous sequence inserted into the wild-type retron regions does not naturally insert into such regions (e.g., the engineered retron with the inserted heterologous sequence is not naturally existing). For example, the heterologous sequence can be from the same species of bacteria in which the wild-type retron is normally found, so long as the heterologous sequence is not naturally inserted in the wild-type retron at the location in which the heterologous sequence is inserted. In certain embodiments, the heterologous sequence is a mammalian sequence (e.g., a human sequence), or a reverse complement thereof. Heterologous nucleic acid sequences introduced into retrons can including without limitation guide RNA sequences, HDR donor templates, protein-encoding genes, or non-coding functional RNA elements (e.g., stem-loops, hairpins, and bulges).

### Homology-Directed Repair

[0497] As used herein, “homology-directed repair (HDR)” refers to the specialized form DNA repair that takes place, for example, during repair of double-strand breaks in cells. This process requires nucleotide sequence homology, uses a “donor” molecule to template repair of a “target” molecule (i.e., the one that experienced the double-strand break), and leads to the transfer of genetic information from the donor to the target. Homology-directed repair may result in an alteration of the sequence of the target molecule (e.g., insertion, deletion, mutation), if the donor polynucleotide differs from the target molecule and part or all of the sequence of the donor polynucleotide is incorporated into the targeted polynucleotide sequence.

### Identical

[0498] As used herein, the term “identical” refers to two or more sequences or subsequences which are the same. In addition, the term “substantially identical,” as used herein, refers to two or more sequences which have a percentage of sequential units which are the same when compared and aligned for maximum correspondence over a comparison window, or designated region as measured using a comparison algorithm or by manual alignment and visual inspection. By way of example only, two or more sequences may be “substantially identical” if the sequential units are about 60% identical, about 65% identical, about 70% identical, about 75% identical, about 80% identical, about 85% identical, about 90% identical, or about 95% identical over a specified region. Such percentages to describe the “percent identity” of two or more sequences. The identity of a sequence can exist over a region that is at least about 75-100 sequential units in length, over a region that is about 50 sequential units in length, or, where not specified, across the entire sequence. This definition also refers to the complement of a test sequence.

[0499] Alternatively, substantially identical or similarity exists when a nucleic acid or fragment thereof hybridizes to another nucleic acid, to a strand of another nucleic acid, or to the complementary strand thereof, under stringent hybridization conditions. “Stringent hybridization conditions” and “stringent wash conditions” in the context of nucleic acid hybridization experiments depend upon a number of different physical parameters. Nucleic acid hybridization will be affected by such conditions as salt concentration, temperature, solvents, the base composition of the hybridizing species, length of the complementary regions, and the number of nucleotide base mismatches between the hybridizing nucleic acids, as will be readily appreciated by those skilled in the art. One having ordinary skill in the art knows how to vary these parameters to achieve a particular stringency of hybridization.

### Lipid Nanoparticle (LNP)

[0500] As used herein, the term “lipid nanoparticle” or LNP refers to a type of lipid particle delivery system formed of small solid or semi-solid particles possessing an exterior lipid layer with a hydrophilic exterior surface that is exposed to the non-LNP environment, an interior space which may aqueous (vesicle like) or non-aqueous (micelle like), and at least one hydrophobic inter-membrane space. LNP membranes may be lamellar or non-lamellar and may be comprised of 1, 2, 3, 4, 5 or more layers. In some embodiments, LNPs may comprise a nucleic acid (e.g. engineered retron) into their interior space, into the inter membrane space, onto their exterior surface, or any combination thereof. In some embodiments, an LNP of the present disclosure comprises an ionizable lipid, a structural lipid, a PEGylated lipid (aka PEG lipid), and a phospholipid. In alternative embodiments, an LNP comprises an ionizable lipid, a structural lipid, a PEGylated lipid (aka PEG lipid), and a zwitterionic amino acid lipid.

[0501] Further discuss of liposomes can be found, for example, in Tenchov et al., “Lipid Nanoparticles—From Liposomes to mRNA Vaccine Delivery, a Landscape of Diversity and Advancement,” ACS Nano, 2021, 15, pp. 16982-17015 (the contents of which are incorporated by reference).

### Linker

[0502] As used herein, the term“linker” refers to a molecule linking or joining two other molecules or moieties. The linker can be an amino acid sequence in the case of a linker joining two fusion proteins. For example, an RNA-guided nuclease (e.g., Cas12a) can be fused to a retron reverse transcriptase by an amino acid linker sequence. The linker can also be a nucleotide sequence in the case of joining two nucleotide sequences together. For example, in the instant case, a ncRNA at its 5′ and/or 3′ ends may be linked by a nucleotide sequence linker to one or more guide RNAs. In other embodiments, the linker is an organic molecule, group, polymer, or chemical moiety. In some embodiments, the linker is 5-100 amino acids in length, for example, 5, 6, 7, 8, 9, 10, 11, 12, 13, 14, 15, 16, 17, 18, 19, 20, 21, 22, 23, 24, 25, 26, 27, 28, 29, 30, 30-35, 35-40, 40-45, 45-50, 50-60, 60-70, 70-80, 80-90, 90-100, 100-150, or 150-200 amino acids in length. Longer or shorter linkers are also contemplated.

### Liposomes

[0503] As used herein, the term “liposomes” refer to a type of lipid particle delivery system comprising small vesicles that contain at least one lipid membrane surrounding an aqueous inner-nanoparticle space that is generally not derived from a progenitor/host cell. Liposomes are a versatile carrier platform in that they are capable of transporting hydrophobic or hydrophilic molecules, including small molecules, proteins, and nucleic acids into cells. They were the earliest developed generation of nanoscale medicine delivery platform. Numerous liposomal drug formulations have been approved for human medicines, e.g., Doxil, a lipid nanoparticle formulation of the antitumor agent doxorubicin. Further discuss of liposomes can be found, for example, in Tenchov et al., “Lipid Nanoparticles—From Liposomes to mRNA Vaccine Delivery, a Landscape of Diversity and Advancement,” ACS Nano, 2021, 15, pp. 16982-17015 (the contents of which are incorporated by reference).

### Loop

[0504] As used herein, the term “loop” in a polynucleotide refers to a single stranded stretch of one or more nucleotides, such as 2, 3, 4, 5, 6, 7, 8, 9, or 10 nucleotides, wherein the most 5′ nucleotide and the most 3′ nucleotide of the loop are each linked to a base-paired nucleotide in a stem.

### Micelles

[0505] As used herein, the term “micelles” refer to small particles which do not have an aqueous intra-particle space.

### Nanoparticle

[0506] As used herein, the term “nanoparticle” refers to any nanoscale particle typically ranging in size from about 1 nm to 1000 nm.

### Nuclear Localization Sequence (NLS)

[0507] As used herein, the term“nuclear localization sequence” or “NLS” refers to an amino acid sequence that promotes import of a protein (e.g., a RNA-guided nuclease) into the cell nucleus, for example, by nuclear transport. Nuclear localization sequences are known in the art. For example, NLS sequences are described in Plank et al., international PCT application, PCT/EP2000/011690, filed Nov. 23, 2000, published as WO/2001/038547 on May 31, 2001, the contents of which are incorporated herein by reference for its disclosure of exemplary nuclear localization sequences.

### Nucleic Acid

[0508] As used herein, the term “nucleic acid” or “nucleic acid molecule” or “nucleic acid sequence” or “polynucleotide” generally refer to deoxyribonucleic or ribonucleic oligonucleotides in either single- or double-stranded form. The term may also encompass oligonucleotides containing known analogues of natural nucleotides. The term also may also encompass nucleic acid-like structures with synthetic backbones, see, e.g., Eckstein, 1991; Baserga et al., 1992; Milligan, 1993; WO 97/03211; WO 96/39154; Mata, 1997; Strauss-Soukup, 1997; and Samstag, 1996. The term encompasses both ribonucleic acid (RNA) and DNA, including cDNA (including RT DNA), genomic DNA, synthetic, synthesized (e.g., chemically synthesized) DNA, and/or DNA (or RNA) containing nucleic acid analogs. The nucleotides Adenine (A), Thymine (T), Guanine (G) and Cytosine (C) also may (or may not) encompass nucleotide modifications, e.g., methylated and/or hydroxylated nucleotides, e.g., Cytosine (C) encompasses 5-methylcytosine and 5-hydroxymethylcytosine.

### Nucleic Acid-Guided Nuclease

[0509] As used herein, the term “nucleic acid-guided nuclease” or “nucleic acid-guided endonuclease” refers to a nuclease that associates covalently or non-covalently with a guide nucleic acid (e.g., a guide RNA or a guide DNA) thereby forming a complex between the guide nucleic acid and the nucleic acid-guided nuclease. The guide nucleic acid comprises a spacer sequence which comprises a nucleotide sequence having complementarity with a strand of a target DNA sequence. Thus, the nucleic acid-guided nuclease is indirectly guided or programmed to localize to a specific site in a DNA molecule through its association with the guide nucleic acid, which directly binds or anneals to a strand of the target DNA through its complementarity region via Watson-Crick base-pairing. In some embodiments, the nucleic acid-guided nuclease will include a DNA-binding activity (e.g., as in the case for CRISPR Cas9). Most commonly, the nucleic acid-guided nuclease is programmed by associating with a guide RNA molecule and in such cases the nuclease may be called “RNA-guided nuclease.” When programmed by a guide DNA, the nuclease may be called a “DNA-guided nuclease.” Nucleic acid-guided, RNA-guided, or DNA-guided nucleases may also be referred to as “programmable nucleases,” which also include other classes of programmable nucleases which associate with specific DNA sequences through amino acid/nucleotide sequence recognition (e.g., zinc fingers nucleases (ZFN) and transcription activator like effector nucleases (TALEN)) rather than through guide RNAs. In addition, any nuclease contemplated herein may also be engineered to remove, inactivate, or otherwise eliminate one or more nuclease activities (e.g., by introducing a nuclease-inactivating mutation in the active site(s) of a nuclease). A nuclease that has been modified to remove, inactivate, or otherwise eliminate all nuclease activity may be referred to as a “dead” nuclease. A dead nuclease is not able to cut either strand of a double-stranded DNA molecule. A nuclease that has been modified to remove, inactivate, or otherwise eliminate at least one nuclease activity but which still retains at least one nuclease activity may be referred to as a “nickase” nuclease. A nickase nuclease cuts one strand of a double-stranded DNA molecule, but not both strands. For example, a CRISPR Cas9 naturally comprises two distinct nuclease activity domains, namely, the HNH domain and the RuvC domain. The HNH domain cuts the strand of DNA bound to the guide RNA and the RuvC domain cuts the protospacer strand. One can obtain a nickase Cas9 by inactivating either the HNH domain or the RuvC domain. One can obtain a dead Cas9 by inactivating both the HNH domain and the RuvC domain. Other RNA-guided nuclease may be similarly converted to nickases and/or dead nucleases by inactivating one or more of the existing nuclease domains.

### Operably Linked

[0510] As used herein, the term “operably linked” or “under transcriptional control,” when used in conjunction with the description of a promoter, refers to the correct location and orientation in relation to a polynucleotide (e.g., a coding sequence) to control the initiation of transcription by RNA polymerase and expression of the coding sequence, such as one for the msr gene, msd gene, and/or the ret gene. Other transcriptional control regulatory elements (e.g., enhancer sequences, transcription factor binding sites) may also be operably linked to a gene if their location relative to a gene controls or regulates the expression of the gene.

### Programmable Nuclease

[0511] As used herein, the term “programmable nuclease” is meant to refer to a polypeptide that has the property of selective localization to a specific desired nucleotide sequence target in a nucleic acid molecule (e.g., to a specific gene target) due to one or more targeting functions. Such targeting functions can include one or more DNA-binding domains, such as zinc finger domains characteristic of many different types of DNA binding proteins or TALE domains characteristic of TALEN proteins. Such targeting function may also include the ability to associate and/or form a complex with a guide RNA, which then localizes to a specific site on the DNA which bears a sequence that is complementary to a portion of the guide RNA (i.e., the spacer of the guide RNA). In some embodiments, the programmable nuclease may be a single protein which comprises both a domain that binds directly (e.g., a ZF protein) or indirectly (e.g., an RNA-guided protein) to a target DNA site, as well as a nuclease domain. In other embodiments, the programmable nuclease may be a composite of two or more separate proteins or domains (from different proteins) which together provide the necessary functions of selective DNA binding and nuclease activity. For example, the programmable nuclease may comprise a (a) nuclease-inactive RNA-guided nuclease (which still is capable of binding a guide RNA, localizing to a target DNA, and binding to the target DNA, but not capable of cutting or nicking the strands) fused to a (b) nuclease protein or domain, such as a FokI nuclease.

### Promoter

[0512] As used herein, the term“promoter” is art-recognized and refers to a nucleic acid molecule with a sequence recognized by the cellular transcription machinery and which is able to initiate transcription of a downstream gene. A promoter can be constitutively active, meaning that the promoter is always active in a given cellular context, or conditionally active, meaning that the promoter is only active in the presence of a specific condition. For example, a conditional promoter may only be active in the presence of a specific protein that connects a protein associated with a regulatory element in the promoter to the basic transcriptional machinery, or only in the absence of an inhibitory molecule. Within the promoter sequence will be found a transcription initiation site, as well as protein binding domains responsible for the binding of RNA polymerase. Eukaryotic promoters will often, but not always, contain “TATA” boxes and “CAT” boxes. Various promoters, including inducible promoters, may be used to drive expression by the various vectors of the present disclosure.

### Recombinant Nucleic Acid

[0513] A “recombinant nucleic acid” or “recombinant nucleotide” refers to a molecule that is constructed by joining nucleic acid molecules, which optionally may self-replicate in a live cell.

### Retron

[0514] As used herein, the term “retron” refers to a specific type of naturally-occurring and distinct DNA sequence found in the genome of many bacteria which typically encodes three distinct components, namely, (a) a non-coding RNA (“ncRNA”) (comprising contiguous inverted sequences (msr and msd), (b) a reverse transcriptase (RT)-coding gene (ret), and (c) in many cases, a retron-associated gene of unknown function. Retrons are particularly defined by their unique ability to produce a satellite DNA known as msDNA (multicopy single-stranded DNA). The ncRNA (comprising the msr and msd elements) and the ret gene are transcribed as a single polycistronic RNA transcript which processed into the ncRNA transcript and a transcript encoding the ret gene. The ncRNA then becomes folded into a specific secondary structure. Once translated, the RT then binds the folded ncRNA and reverse transcribes the msd region to form a single strand of cDNA (the msDNA) that remains covalently attached to the RNA template via a 2′-5′ phosphodiester bond and base-pairing between the 3′ ends of the msDNA and the RNA template. See FIG. 1A which provides a schematic of the production of an msDNA from a naturally-occurring retron.

### Retron Component

[0515] As used herein, the term “retron component” refers to a distinct element or feature of a retron, namely (a) a non-coding RNA (“ncRNA”) (comprising contiguous inverted sequences (msr and msd), (b) a reverse transcriptase (RT)-coding gene (ret), and (c) in many cases, a retron-associated gene of unknown function.

### RNA-Guided Nuclease

[0516] As used herein, an “RNA-guided nuclease” is a type of “programmable nuclease,” and a specific type of “nucleic acid-guided nuclease.” As used herein, the term “RNA-guided nuclease” or “RNA-guided endonuclease” refers to a nuclease that associates covalently or non-covalently with a guide RNA thereby forming a complex between the guide RNA and the RNA-guided nuclease. The guide RNA comprises a spacer sequence which comprises a nucleotide sequence having complementarity with a strand of a target DNA sequence. Thus, the RNA-guided nuclease is indirectly guided or programmed to localize to a specific site in a DNA molecule through its association with the guide RNA, which directly binds or anneals to a strand of the target DNA through its complementarity region via Watson-Crick base-pairing.

### Sequence Identity

[0517] As used herein, the term “sequence identity” refers to the overall relatedness between polymeric molecules, e.g., between polynucleotide molecules (e.g., DNA molecules and/or RNA molecules) and/or between polypeptide molecules. Calculation of the percent identity of two polynucleotide sequences, for example, can be performed by aligning the two sequences for optimal comparison purposes (e.g., gaps can be introduced in one or both of a first and a second nucleic acid sequences for optimal alignment and non-identical sequences can be disregarded for comparison purposes). For example, the length of a sequence aligned for comparison purposes is at least 30%, at least 40%, at least 50%, at least 60%, at least 70%, at least 80%, at least 90%, at least 95%, or 100% of the length of the reference sequence. The nucleotides at corresponding nucleotide positions are then compared. When a position in the first sequence is occupied by the same nucleotide as the corresponding position in the second sequence, then the molecules are identical at that position. The percent identity between the two sequences is a function of the number of identical positions shared by the sequences, taking into account the number of gaps, and the length of each gap, which needs to be introduced for optimal alignment of the two sequences. The comparison of sequences and determination of percent identity between two sequences can be accomplished using a mathematical algorithm. For example, the percent identity between two nucleotide sequences can be determined using methods such as those described in Computational Molecular Biology, Lesk, A. M., ed., Oxford University Press, New York, 1988; Biocomputing: Informatics and Genome Projects, Smith, D. W., ed., Academic Press, New York, 1993; Sequence Analysis in Molecular Biology, von Heinje, G., Academic Press, 1987; Computer Analysis of Sequence Data, Part I, Griffin, A. M., and Griffin, H. G., eds., Humana Press, New Jersey, 1994; and Sequence Analysis Primer, Gribskov, M. and Devereux, J., eds., M Stockton Press, New York, 1991; each of which is incorporated herein by reference. For example, the percent identity between two nucleotide sequences can be determined using the algorithm of Meyers and Miller (CABIOS, 1989, 4:11-17), which has been incorporated into the ALIGN program (version 2.0) using a PAM120 weight residue table, a gap length penalty of 12 and a gap penalty of 4. The percent identity between two nucleotide sequences can, alternatively, be determined using the GAP program in the GCG software package using an NWSgapdna. CMP matrix. Methods commonly employed to determine percent identity between sequences include, but are not limited to those disclosed in Carillo, H. and Lipman, D., SIAM J Applied Math., 48:1073 (1988); incorporated herein by reference. Techniques for determining identity are codified in publicly available computer programs. Exemplary computer software to determine homology between two sequences include, but are not limited to, GCG program package, Devereux, J., et al., Nucleic Acids Research, 12(1), 387 (1984)), BLASTP, BLASTN, and FASTA Altschul, S. F. et al., J. Molec. Biol., 215, 403 (1990).

[0518] It is noted that when this disclosure speaks to a polypeptide (including anywhere in this specification, including in Table A and the Examples) having a percent identity with respect to another amino acid sequence (a reference amino acid sequence), such as a polypeptide at least 50%, at least 55%, at least 60%, at least 65%, at least 70%, at least 75%, at least 80%, at least 85%, at least 90%, at least 91%, at least 92%, at least 93%, at least 94%, at least 95, at least 96%, at least 97%, at least 98%, at least 99%, at least 99.1%, at least 99.2%, at least 99.3%, at least 99.4%, at least 99.5%, at least 99.6%, at least 99.7%, at least 99.8% or at least 99.9% identical to another amino acid sequence (a reference amino acid sequence), it is advantageous that in the polypeptide having a percent identity to the reference amino acid sequence conserved regions of the reference amino acid sequence (e.g., conserved when compared with other retron RTs, such as those identified herein) be preserved and/or that the polypeptide has at least one activity selected from reverse transcriptase; endonuclease activity; endoribonuclease activity, or RNA-guided DNase activity and/or that the polypeptide of which comprises: a. one or more α-helical recognition lobe (REC) and a nuclease lobe (NUC); b. a Wedge (WED), α-helical recognition lobe (REC), PAM-interacting (PI), RuvC nuclease, Bridge Helix (BH) and NUC domains; or c. one or more domains selected from RuvC, REC, WED, BH, PI and NUC domains and/or that the polypeptide recognizes or binds a guide RNA or ncRNA as the case may be. Likewise, when this disclosure speaks to a nucleic acid sequence or molecule having a percent identity with respect to a nucleic acid sequence having a percent identity with respect to another nucleic acid sequence or molecule (a reference nucleic acid sequence), such as a nucleic acid sequence at least 50%, at least 55%, at least 60%, at least 65%, at least 70%, at least 75%, at least 80%, at least 85%, at least 90%, at least 91%, at least 92%, at least 93%, at least 94%, at least 95%, at least 96%, at least 97%, at least 98%, at least 99%, at least 99.1%, at least 99.2%, at least 99.3%, at least 99.4%, at least 99.5%, at least 99.6%, at least 99.7%, at least 99.8% or at least 99.9% identical to another nucleic acid sequence, it is advantageous that in the nucleic acid sequence that has a percent identity to the reference nucleic acid sequence that conserved regions of the reference nucleic acid sequence (e.g., conserved when compared with other retron ncRNAs, such as those identified herein) be preserved and/or that in the polypeptide that is expressed from the nucleic acid sequence that has a percent identity to the reference nucleic acid sequence that the polypeptide contain conserved region(s) (e.g., conserved when compared with other retron sequences, such as those identified herein) and/or that the polypeptide has at least one activity selected from reverse transcriptase; endonuclease activity; endoribonuclease activity, or RNA-guided DNase activity and/or that the polypeptide of which comprises: a. one or more α-helical recognition lobe (REC) and a nuclease lobe (NUC); b. a Wedge (WED), α-helical recognition lobe (REC), PAM-interacting (PI), RuvC nuclease, Bridge Helix (BH) and NUC domains; or c. one or more domains selected from RuvC, REC, WED, BH, PI and NUC domains and/or that the polypeptide recognizes or binds a guide RNA.

### Subject

[0519] As used herein, the term“subject” refers to an individual organism, for example, an individual mammal. In some embodiments, the subject is a human. In some embodiments, the subject is a non-human mammal. In some embodiments, the subject is a non-human primate. In some embodiments, the subject is a rodent. In some embodiments, the subject is a sheep, a goat, a cattle, a cat, or a dog. In some embodiments, the subject is a vertebrate, an amphibian, a reptile, a fish, an insect, a fly, or a nematode. In some embodiments, the subject is a research animal. In some embodiments, the subject is genetically engineered, e.g., a genetically engineered non-human subject. The subject may be of either sex and at any stage of development. The terms “individual,” “subject,” “host,” and “patient,” used interchangeably herein.

### Stem

[0520] As used herein, the term “stem” refers to two or more base pairs, such as 3, 4, 5, 6, 7, 8, 9, 10, 11, 12, 13, 14, 15, 16, 17, 18, 19, 20 or more base pairs, formed by inverted repeat sequences connected at a “tip,” where the more 5′ or “upstream” strand of the stem bends to allows the more 3′ or “downstream” strand to base-pair with the upstream strand. The number of base pairs in a stem is the “length” of the stem. The tip of the stem is typically at least 3 nucleotides, but can be 4, 5, 6, 7, 8, 9, 10, 11, 12, 13, 14, 15 or more nucleotides. Larger tips with more than 5 nucleotides are also referred to as a “loop.” An otherwise continuous stem may be interrupted by one or more bulges as defined herein. The number of unpaired nucleotides in the bulge(s) are not included in the length of the stem. The position of a bulge closest to the tip can be described by the number of base pairs between the bulge and the tip (e.g., the bulge is 4 bps from the tip). The position of the other bulges (if any) further away from the tip can be described by the number of base pairs in the stem between the bulge in question and the tip, excluding any unpaired bases of other bulges in between.

### Synthetic or Artificial Nucleic Acid

[0521] A “synthetic or artificial nucleic acid” refers nucleic acids that are non-naturally occurring sequences. Such sequences do not originate from, or are not known to be present in any living organism (e.g., based on sequence search in existing sequence databases). Recombinant nucleic acids and synthetic nucleic acids also include those molecules that result from the replication of either of the foregoing. Engineered nucleic acid constructs of the present disclosure, such as the engineer ed retron described herein, may be encoded by a single molecule (e.g., encoded by or present on the same plasmid or other suitable vector) or by multiple different molecules (e.g., multiple independently-replicating vectors).

### Target Site

[0522] As used herein, a “target site” as used herein is a polynucleotide (e.g., DNA such as genomic DNA) that includes a site or specific locus (“target site” or “target sequence”) targeted by a recombinant retron genome modification system disclosed herein. In the context of retron genome modification systems disclosed herein that comprise an RNA-guided nuclease, a target sequence is the sequence to which the guide sequence of a guide nucleic acid (e.g., guide RNA) will hybridize. For example, the target site (or target sequence) 5′-GTCAATGGACC-3′ (SEQ ID NO:19933) within a target nucleic acid is targeted by (or is bound by, or hybridizes with, or is complementary to) the sequence 5′-GGTCCATTGAC-3′ (SEQ ID NO:19934). Suitable hybridization conditions include physiological conditions normally present in a cell. For a double stranded target nucleic acid, the strand of the target nucleic acid that is complementary to and hybridizes with the guide RNA is referred to as the “complementary strand” or “target strand”; while the strand of the target nucleic acid that is complementary to the “target strand” (and is therefore not complementary to the guide RNA) is referred to as the “non-target strand” or “non-complementary strand.”

### Treatment

[0523] As used herein, the terms“treatment,” “treat,” and“treating,” refer to a clinical intervention aimed to reverse, alleviate, delay the onset of, or inhibit the progress of a disease or disorder, or one or more symptoms thereof, as described herein. In some embodiments, treatment may be administered after one or more symptoms have developed and/or after a disease has been diagnosed. In other embodiments, treatment may be administered in the absence of symptoms, e.g., to prevent or delay onset of a symptom or inhibit onset or progression of a disease. For example, treatment may be administered to a susceptible individual prior to the onset of symptoms (e.g., in light of a history of symptoms and/or in light of genetic or other susceptibility factors). Treatment may also be continued after symptoms have resolved, for example, to prevent or delay their recurrence.

### Upstream and Downstream

[0524] As used herein, the terms “upstream” and “downstream” are terms of relativity that define the linear position of at least two elements located in a nucleic acid molecule (whether single or double-stranded) that is orientated in a 5′-to-3′ direction. A first element is said to be upstream of a second element in a nucleic acid molecule where the first element is positioned somewhere that is 5′ to the second element. Conversely, a first element is downstream of a second element in a nucleic acid molecule where the first element is positioned somewhere that is 3′ to the second element.

### Variant

[0525] As used herein the term“variant” should be taken to mean the exhibition of qualities that have a pattern that deviates from what occurs in nature, e.g., a variant retron RT is retron RT comprising one or more changes in amino acid residues as compared to a wild type retron RT amino acid sequence. The term“variant” encompasses homologous proteins having at least 75%, or at least 80%, or at least 85%, or at least 90%, or at least 95%, or at least 99% percent identity with a reference sequence and having the same or substantially the same functional activity or activities as the reference sequence. The term also encompasses mutants, truncations, or domains of a reference sequence, and which display the same or substantially the same functional activity or activities as the reference sequence.

### Vector

[0526] As used herein, the term “vector” permits or facilitates the transfer of a polynucleotide from one environment to another. It is a replicon such as a plasmid, phage, or cosmid into which another DNA segment may be inserted so as to bring about the replication of the inserted segment (e.g., the subject engineered retron). Generally, a vector is capable of replication when associated with the proper control elements. The term “vector” may include cloning and expression vectors, as well as viral vectors and integrating vectors.

### Wild Type

[0527] As used herein the term “wild type” is a term of the art understood by skilled persons and means the typical form of an organism, strain, gene, protein, or characteristic as it occurs in nature as distinguished from mutant or variant forms.

### DETAILED DESCRIPTION

[0528] The present disclosure provides systems, methods and compositions used for precise genome editing, including installing nucleic acid insertions, replacements, and deletions at targeted and precise genome sites, wherein said systems, methods, and compositions are based on novel and/or modified retrons or components thereof, such as modified versions of the retron RTs of Table X, modified versions of the ncRNAs of Table A, and modified versions of the RTs of Table B.

[0529] In one aspect, the present disclosure provides recombinant retrons comprising one or more genetic modifications which improves the functionality and/or properties of a retron. Such genetic modifications can include a mutation, insertion, deletion, inversion, replacement, substitution, or translocation of one or more contiguous or non-contiguous nucleobases in a nucleic acid molecule encoding a retron or a component of a retron, such as an ncRNA or a reverse transcriptase. In various aspects, the retron that becomes modified with the one or more genetic modifications (i.e., the “pre-modified” or “unmodified” retron or retron component) is a naturally occurring retron or retron component (e.g., naturally occurring ncRNA of Table A or RT) ability to facilitate homology-dependent recombination (or HDR) in a cell, thereby resulting in a relative increase in the concentrations or amounts of msDNA comprising a DNA donor template. In particular embodiments, the recombinant retrons are based on and/or derived from a naturally-occurring retron, such as any retron-related sequence provided by Table X (the introduction of the one or more genetic modifications into a set of 7257 previously unknown retrons discovered through computational methods described herein (e.g., see Examples). In other embodiments, the recombinant retrons are based on introducing the one or more genetic modifications into previously available retron sequences (e.g., the “Mestre et al., Systematic Prediction of Genes Functionally Associated with Bacterial Retrons and Classification of The Encoded Tripartite Systems, Nucleic Acids Research, Volume 48, Issue 22, 16 Dec. 2020, Pages 12632-12647” (incorporated herein by reference) to achieve recombinant retrons with the enhanced ability to produce increased concentrations or amounts of msDNA comprising a DNA donor template.

[0530] In another aspect, the present disclosure further provides nucleic acid molecules encoding the recombinant retrons and/or recombinant retron components (e.g., a recombinant ncRNA and/or a recombinant retron RT). In still another aspect, the present disclosure provides genome editing systems comprising recombinant retron components (e.g., recombinant ncRNA and/or recombinant RT), programmable nucleases (e.g., RNA-guided nucleases, such as CRISPR-Cas proteins, ZFPs, and TALENS), and guide RNAs (in the case where RNA-guide nucleases are used in said genome editing systems). In a further aspect, the disclosure provides nucleic acid molecules encoding the described genome editing systems and said components thereof, as well as polypeptides making up the components of said genome editing systems. In yet another aspect, the disclosure provides vectors for transferring and/or expressing said genome editing systems, e.g., under in vitro, ex vivo, and in vivo conditions. In still another aspect, the disclosure provides cell-delivery compositions and methods, including compositions for passive and/or active transport to cells (e.g., plasmids), delivery by virus-based recombinant vectors (e.g., AAV and/or lentivirus vectors), delivery by non-virus-based systems (e.g., liposomes and LNPs), and delivery by virus-like particles. Depending on the delivery system employed, the retron-based genome editing systems described herein may be delivered in the form of DNA (e.g., plasmids or DNA-based virus vectors), RNA (e.g., ncRNA and mRNA delivered by LNPs), a mixture of DNA and RNA, protein (e.g., virus-like particles), and ribonucleoprotein (RNP) complexes. Any suitable combinations of approaches for delivering the components of the herein disclosed retron-based genome editing systems may be employed. In one embodiment, each of the components of the retron-based genome editing system is delivered by an all-RNA system, e.g., the delivery of one or more RNA molecules (e.g., mRNA and/or ncRNA) by one or more LNPs, wherein the one or more RNA molecules form the ncRNA and guide RNA (as needed) and/or are translated into the polypeptide components (e.g., the RT and a programmable nuclease). In yet another aspect, the disclosure provides methods for genome editing by introducing a retron-based genome editing system described herein into a cell (e.g., under in vitro, in vivo, or ex vivo conditions) comprising a target edit site, thereby resulting in an edit at the target edit. In other aspects, the disclosure provides formulations comprising any of the aforementioned components for delivery to cells and/or tissues, including in vitro, in vivo, and ex vivo delivery, recombinant cells and/or tissues modified by the recombinant retron-based genome modification systems and methods described herein, and methods of modifying cells by conducting genome editing and related DNA donor-dependent methods, such as recombineering, or cell recording, using the herein disclosed retron-based genome modification systems. The disclosure also provides methods of making the recombinant retrons, retron-based genome modification systems, vectors, compositions and formulations described herein, as well as to pharmaceutical compositions and kits for modifying cells under in vitro, in vivo, and ex vivo conditions that comprise the herein disclosed genome editing and/or modification systems.

[0531] Described herein are engineered retrons comprising one or more heterologous nucleic acids. The one or more heterologous nucleic acids may be inserted, for example, at or within a location selected from: the msd locus, upstream of the msr locus, upstream of the msd locus, and downstream of the msd locus. In some embodiments, the engineered retrons have structural improvements over their naturally existing counterparts or wild-type retrons at least with respect to the encoded ncRNA and/or the reverse transcriptase (RT), such that the engineered retron or the encoded ncRNA thereof, when delivered to a host cell, such as a mammalian host cell, exhibits various functional improvements over its naturally existing/wild-type retron elements.

[0532] Exemplary (non-limiting functional improvements) may include any one or more of the features described herein. For example, in some embodiments, the engineered retron may comprise a sequence modification (e.g., insertion, deletion, and/or substitution of one or more nucleotide(s)) in the msr locus and/or the msd locus that: i) modulates (e.g., enhances) reverse transcription, processivity, accuracy/fidelity, and/or production of the msDNA (e.g., in the mammalian cell); ii) modulates (e.g., reduces) immunogenicity of the ncRNA encoded by the engineered retron (e.g., encoded by the msr locus and/or the msd locus) in a host (e.g., a host comprising the mammalian cell); iii) comprises a nucleotide sequence that modulates (e.g., inhibits or antagonizes) a function of the msDNA; and/or iv) modulates (e.g., improves) efficiency of targeted genomic engineering.

[0533] Thus, in general, the engineered retron is an engineered nucleic acid construct comprising: a) a first polynucleotide encoding a non-coding RNA (ncRNA), said first polynucleotide comprising: i) an msr locus encoding the msr RNA portion of a multi-copy single-stranded DNA (msDNA); and ii) an msd locus encoding the msd RNA portion of the msDNA; and

[0534] b) one or more heterologous nucleic acids inserted at or within a location selected from: the msd locus, upstream of the msr locus, upstream of the msd locus, and downstream of the msd locus.

[0535] The engineered nucleic acid construct (e.g., the engineered retron) may further comprise a second polynucleotide encoding a reverse transcriptase (RT), or a portion thereof, wherein the encoded RT is capable of synthesizing a DNA copy of at least a portion of the msd locus encoding the msDNA.

[0536] In certain embodiments, the engineered retron of the invention encodes a reverse transcriptase (RT) or a functional domain thereof, comprising: i) a polypeptide listed in Table A, or a polypeptide having at least 50%, at least 55%, at least 60%, at least 65%, at least 70%, at least 75%, at least 80%, at least 85%, at least 90%, at least 91%, at least 92%, at least 93%, at least 94%, at least 95%, at least 96%, at least 97%, at least 98%, at least 99%, at least 99.1%, at least 99.2%, at least 99.3%, at least 99.4%, at least 99.5%, at least 99.6%, at least 99.7%, at least 99.8% or at least 99.9% sequence identity to a polypeptide listed in Table A; and/or ii) a polypeptide listed in any one of Table C. In some embodiments, the RT does not comprise a polypeptide listed in Table X.

[0537] In certain embodiments, the engineered retron of the invention encodes a reverse transcriptase (RT) or a functional domain thereof, comprising: i) a polynucleotide listed in Table A, or a polynucleotide having at least 50%, at least 55%, at least 60%, at least 65%, at least 70%, at least 75%, at least 80%, at least 85%, at least 90%, at least 91%, at least 92%, at least 93%, at least 94%, at least 95%, at least 96%, at least 97%, at least 98%, at least 99%, at least 99.1%, at least 99.2%, at least 99.3%, at least 99.4%, at least 99.5%, at least 99.6%, at least 99.7%, at least 99.8% or at least 99.9% sequence identity to a polynucleotide listed in Table A; and/or ii) a consensus polynucleotide sequence listed in Table C. In some embodiments, the polynucleotide encoding the RT does not comprise a polynucleotide of Table X.

[0538] In certain embodiments, the engineered retron of the invention encodes an ncRNA comprising: (I) an ncRNA listed in Table B, or an ncRNA having at least 50%, at least 55%, at least 60%, at least 65%, at least 70%, at least 75%, at least 80%, at least 85%, at least 90%, at least 91%, at least 92%, at least 93%, at least 94%, at least 95%, at least 96%, at least 97%, at least 98%, at least 99%, at least 99.1%, at least 99.2%, at least 99.3%, at least 99.4%, at least 99.5%, at least 99.6%, at least 99.7%, at least 99.8% or at least 99.9% sequence identity to an ncRNA in Table B.

[0539] In certain embodiments, the engineered retron of the invention encodes an ncRNA and a reverse transcriptase (RT) or a functional domain thereof, wherein the ncRNA and the RT or functional domain thereof are as described above.

[0540] Specifically, in such embodiment, the ncRNA may comprise: (I) an ncRNA listed in Table B, or an ncRNA having at least 50%, at least 55%, at least 60%, at least 65%, at least 70%, at least 75%, at least 80%, at least 85%, at least 90%, at least 91%, at least 92%, at least 93%, at least 94%, at least 95%, at least 96%, at least 97%, at least 98%, at least 99%, at least 99.1%, at least 99.2%, at least 99.3%, at least 99.4%, at least 99.5%, at least 99.6%, at least 99.7%, at least 99.8% or at least 99.9% sequence identity to an ncRNA listed in Table B.

[0541] Also in such embodiment, the reverse transcriptase (RT) or functional domain thereof comprises: (A) i) a polypeptide listed in Table A, or a polypeptide having at least 50%, at least 55%, at least 60%, at least 65%, at least 70%, at least 75%, at least 80%, at least 85%, at least 90%, at least 91%, at least 92%, at least 93%, at least 94%, at least 95%, at least 96%, at least 97%, at least 98%, at least 99%, at least 99.1%, at least 99.2%, at least 99.3%, at least 99.4%, at least 99.5%, at least 99.6%, at least 99.7%, at least 99.8% or at least 99.9% sequence identity to a polypeptide listed in Table A; and/or ii) a polypeptide listed in Table C; optionally, the RT does not comprise a polypeptide listed in Table X; OR (B) i) a polynucleotide listed in Table A, or a polynucleotide having at least 50%, at least 55%, at least 60%, at least 65%, at least 70%, at least 75%, at least 80%, at least 85%, at least 90%, at least 91%, at least 92%, at least 93%, at least 94%, at least 95%, at least 96%, at least 97%, at least 98%, at least 99%, at least 99.10%, at least 99.2%, at least 99.3%, at least 99.4%, at least 99.5%, at least 99.6%, at least 99.7%, at least 99.8% or at least 99.9% sequence identity to a polynucleotide in Table A; and/or optionally, the polynucleotide encoding the RT does not comprise a polynucleotide in Table X.

[0542] In certain embodiments, the engineered nucleic acid construct comprises: 1) an msr locus (that encodes the msr RNA portion of an msDNA); 2) an msd locus encoding the msd RNA portion of the msDNA; 3) a sequence encoding a retron reverse transcriptase (RT), wherein said msd RNA is capable of being reverse transcribed to form the msDNA by the retron reverse transcriptase (RT); and, 4) a heterologous nucleic acid inserted at or within the msd locus, upstream of the msr locus, upstream or downstream of the msd locus; wherein the engineered nucleic acid construct is engineered based on and/or to resemble a secondary structure of a wild-type or consensus retron encoding a wild-type or consensus retron ncRNA encompassed by: a) any one of the sequences and/or structures as depicted in any one of SEQ ID NOs: of Table B and/or FIGS. 2-27; or b) a variant of a), having: i) up to 1, 2, or 3 (e.g., up to 1) nucleotide changes per 10 red lettered-nucleotides; ii) up to 4, 5, or 6 (e.g., up to 1 or 2) nucleotide changes per 10 black lettered-nucleotides; and/or iii) up to 7, 8, or 9 (e.g., up to 3 or 4) nucleotide changes per 10 grey lettered-nucleotides; and/or optionally further comprising: i) 7, 8, 9, or 10 (e.g., 9 or 10) nucleotides present per 10 red-circled nucleotides; ii) 6, 7, 8, 9, or 10 (e.g., 8, 9 or 10) nucleotides present per 10 black-circled nucleotides; iii) 4, 5, 6, 7, 8, 9, or 10 (e.g., 6, 7, 8, 9 or 10) nucleotides present per 10 grey-circled nucleotides; and/or iv) 2, 3, 4, 5, 6, 7, 8, 9, or 10 (e.g., 4, 5, 6, 7, 8, 9, or 10) nucleotides present per 10 white-circled nucleotides; wherein the ncRNA does not comprise an ncRNA associated with the sequences of Table X.

[0543] The engineered nucleic acid construct (e.g., the engineered retron) may comprise one or more sequence modifications (e.g., an insertion, deletion, and/or substitution of one or more nucleotide(s)) in the msr locus and/or the msd locus that: a) modulates (e.g., enhances) reverse transcription, processivity, accuracy/fidelity, and/or production of the msDNA (e.g., in the mammalian cell); b) modulates (e.g., reduces) immunogenicity of ncRNA encoded by the engineered retron (e.g., the msr locus and/or the msd locus) in a host (e.g., a host comprising the mammalian cell); c) modulates (e.g., inhibits, either permanently or transiently) a function of the msDNA; and/or d) modulates (e.g., improves) efficiency of targeted genome editing/engineering.

[0544] In some embodiments, the engineered nucleic acid construct (e.g., the engineered retron) is engineered based on and/or to resemble a secondary structure of a wild-type or consensus retron encoding a wild-type or consensus retron ncRNA encompassed by: a) the sequence of any one of Table B ncRNA sequences and/or the structure depicted in any one of FIGS. 2-27; or b) a variant of a), having: i) up to 1, 2, or 3 (e.g., up to 1) nucleotide changes per 10 red lettered-nucleotides; ii) up to 4, 5, or 6 (e.g., up to 1 or 2) nucleotide changes per 10 black lettered-nucleotides; and/or iii) up to 7, 8, or 9 (e.g., up to 3 or 4) nucleotide changes per 10 grey lettered-nucleotides; and/or optionally further comprising: i) 7, 8, 9, or 10 (e.g., 9 or 10) nucleotides present per 10 red-circled nucleotides; ii) 6, 7, 8, 9, or 10 (e.g., 8, 9 or 10) nucleotides present per 10 black-circled nucleotides; iii) 4, 5, 6, 7, 8, 9, or 10 (e.g., 6, 7, 8, 9 or 10) nucleotides present per 10 grey-circled nucleotides; and/or iv) 2, 3, 4, 5, 6, 7, 8, 9, or 10 (e.g., 4, 5, 6, 7, 8, 9, or 10) nucleotides present per 10 white-circled nucleotides.

[0545] Another aspect of the disclosure provides a vector system comprising a vector comprising the engineered retron described herein.

[0546] Another aspect of the disclosure provides an isolated host cell comprising the engineered retron described herein, or the vector system described herein.

[0547] Another aspect of the disclosure provides a pharmaceutical composition comprising the engineered retron described herein, or the vector system described herein.

[0548] Another aspect of the disclosure provides a delivery vehicle comprising the engineered retron described herein or the ncRNA encoded by the engineered retron described herein, the vector or vector system described herein, the host cell described herein, or the pharmaceutical composition described herein.

[0549] Another aspect of the disclosure provides a kit comprising the engineered retron described herein or the ncRNA encoded by the engineered retron described herein, and optionally instructions for genetically modifying a cell using the engineered retron described herein or the ncRNA encoded by the engineered retron described herein.

[0550] Another aspect of the disclosure provides a method of modifying a target DNA sequence in a host cell (e.g., a mammalian cell), the method comprising introducing into the host cell (e.g., the mammalian cell) the engineered retron of the invention, the ncRNA encoded by the engineered retron of the invention, or the vector/vector system described herein, to allow the production of the msDNA in the host cell (e.g., mammalian cell), wherein at least a part of the heterologous nucleic acid in the msDNA is integrated into the genome of the host (e.g., mammalian) cell at the target DNA sequence. Optionally, the target sequence is recognized by a suitable nuclease, such as a CRISPR/Cas effector enzyme, a ZFN, a TALEN, a meganuclease, TnpB, IscB, or a restriction endonuclease (RE), and a double-stranded break (DSB) is created by the nuclease to facilitate/promote the insertion of the part of the heterologous nucleic acid into the target sequence. Further optionally, the target sequence modified/inserted by the part of the heterologous nucleic acid can no longer be recognized by the nuclease to re-create a DSB.

[0551] Another aspect of the disclosure provides a use of the engineered retron in the various methods described herein.

[0552] Another aspect of the disclosure provides a genome editing system comprising: a) nuclease capable of acting at a target site on a genome (e.g. human genome), such as a CRISPR/Cas effector enzyme, a ZFN, a TALEN, a meganuclease, TnpB, IscB, or a restriction endonuclease (RE); and b) an engineered retron described herein, or an ncRNA encoded thereby, or a vector or a vector system comprising or encoding the same. Optionally, the nuclease may be linked to one or more element(s) of the engineered retron or the encoded ncRNA. For example, in one embodiment, the nuclease may be linked (e.g., fused or conjugated) to the reverse transcriptase of the engineered retron described herein. In another embodiment, the nuclease may engage/bind to form a complex with a nucleic acid guide sequence (such as a single-guided RNA of a Cas enzyme), wherein the guide sequence is linked to the ncRNA and/or msDNA of the engineered retron described herein.

[0553] Another aspect of the disclosure provides an enhanced genome editing system, comprising the genome editing system of the disclosure connected to a biomolecule that modulates host DNA repair, in order to, for example, modulate (e.g., enhance) the incorporation of the heterologous nucleic acid sequence into a genome (e.g., human genome).

[0554] With the general aspect of the disclosure described herein, specific aspects and embodiments of the disclosure are further described in the sections below. It should be understood that any one embodiment of the disclosure, including those described only in the examples or the claims, or only in one section herein below, can be combined with any one or more additional embodiments of the invention, unless such combination is expressly disclaimed or are improper.

### A. Recombinant Retrons

[0555] The present disclosure provides engineered retrons, as well as compositions, systems, and methods that include or utilize the engineered retrons for genome modification, such as genome editing, cell recording, and recombineering.

[0556] Retrons were originally discovered in 1984 in Myxococcus xanthus bacterium when a short, multi-copy single-stranded DNA (msDNA) that is abundantly present in the bacterial cell was identified. Since then, a number of naturally existing retrons have been found in many prokaryotes such as bacteria.

[0557] As depicted in FIG. 1A, retrons encode and transcribe as a single RNA, which comprises a non-coding RNA (ncRNA) portion and a portion encoding a specialized reverse transcriptase (RT). The retron ncRNA (msr and msd) is the precursor of the hybrid molecule that eventually forms, and it initially folds into a typical RNA secondary structure that is recognized by the accompanying RT. The translated RT typically recognizes certain secondary structures in the ncRNA, and binds the RNA template downstream from the msd region. The RT initiates reverse transcription of the RNA towards its 5′ end, starting from the 2′-end of a conserved guanosine (G) residue found immediately after a double-stranded RNA structure (the a1/a2 region) within the ncRNA. A portion of the ncRNA serves as a template for reverse transcription, and reverse transcription terminates before reaching the msr locus. During reverse transcription, cellular RNase H degrades the segment of the ncRNA that serves as template, but not other parts of the ncRNA. The result of the reverse transcription, the msDNA, remains covalently attached to the RNA template via the 2′-5′ phosphodiester bond, and base-pairs with the RNA template using the 3′ end of the msDNA. See FIG. 1A for a general or typical organization of the retron coding sequence, including the RT encoding sequence and the msr and msd loci, as well as the synthesis of the msDNA by reverse transcription of the initial ncRNA transcript.

[0558] Many retrons also contain an accessory protein (not depicted in FIG. 1A), which may have a variable function that may not be fully understood. In certain embodiments, the engineered retrons described herein do not comprise the accessory protein naturally associated with the wild-type or template retron.

[0559] Applicant has discovered, analyzed, and phylogenetically classified 7257 previously unknown retrons from nature based on multiple criteria, including sequence homology and conserved predicted secondary structures, and has grouped these retrons into different phylogenetic clades based on sequence homology and/or conserved predicted secondary structures. These clades include Type IA_IIA1 (FIG. 2), Type 1B1 (FIG. 3), Type IB2 (FIG. 4), Type 1C (FIG. 5), Type IIA1 other (FIG. 6), Type IIA2 (FIG. 7), Type IIA3 (FIG. 8), Type IIA4 (FIG. 9), Type IIA5 (FIG. 10), Type IIIA1 (FIG. 11), Type IIIA2 (FIG. 12), Type IIIA3 (FIG. 13), Type IIIA4 (FIG. 14), Type IIIA5 (FIG. 15), Type IIIunk (FIG. 16), Type IV (FIG. 1X), Type V (FIG. 19), Type VI (FIG. 20), Type XI Group 1 (FIG. 21), Type XI (Group 2) (FIG. 22), Type XII (FIG. 23), Type XIII (FIG. 24), Type XIV (FIG. 25), Eco107-like (FIG. 26), and Outgroup A (FIG. 27). The disclosure further describes the engineering and/or modification of these newly discovered retron sequences as a starting point to obtain useful recombinant retrons, such as those depicted in FIG. 1B.

[0560] FIG. 1B.1 depicts an embodiment of a recombinant retron construct (e.g., a nucleotide sequence cloned into an expression vector) contemplated by the present disclosure. In the top left schematic, the single thin black line represents a double-stranded nucleotide sequence (e.g., as cloned into an expression vector, such as a plasmid). The recombinant retron is constructed by modifying a starting point retron DNA sequence encoding a ncRNA (the msr/msd region) (such as any one of the herein disclosed 7257 newly discovered retron sequences, and specifically any one of the 7257 ncRNA sequences of Table B. A starting point retron DNA sequence encoding an ncRNA may be modified in any number of ways and can including one modification or more than one modification. For example, the retron DNA may modified to contain at least one nucleotide modification, including a single nucleotide substitution, insertion, or deletion, or a substitution, insertion, or deletion of more than one nucleotide, i.e., up to 2, 3, 4, 5, 6, 7, 8, 9, 10, 11, 12, 13, 14, 15, 16, 17, 18, 19, 20, 21, 22, 23, 24, 25, 26, 27, 28, 29, 30, 31, 32, 33, 34, 35, 36, 37, 38, 39, 40, 41, 42, 43, 44, 45, 46, 47, 48, 49, 50, 51, 52, 53, 54, 55, 56, 57, 58, 59, 60, 61, 62, 63, 64, 65, 66, 67, 68, 69, 70, 71, 72, 73, 74, 75, 76, 77, 78, 79, 80, 81, 82, 83, 84, 85, 86, 87, 88, 89, 90, 91, 92, 93, 94, 95, 96, 97, 98, 99, or up to 100, or up to 200, 300, 400, 500, 600, 700, 800, 900, 1000, 1100, 1200, 1300, 1400, 1500, 1600, 1700, 1800, 1900, or up to 2000 nucleotides substituted, inserted, or deleted from a starting point retron (e.g., a wildtype retron). Where more than one nucleotide of a starting point retron (e.g., a wildtype retron) is substituted, deleted, or inserted, the nucleotides may be contiguous or non-contiguous. While an engineered retron as a whole is not naturally-occurring, it may include components such as nucleotide sequences that do occur in nature. For example, an engineered retron can have nucleotide sequences from different organisms (e.g., from different bacteria species), or from completely synthetic/artificial/recombinant nucleic acid sequences. Thus, an engineered retron can have a bacterial nucleotide sequence, a human nucleotide sequence, a viral nucleotide sequence, and/or a synthetic/artificial/recombinant nucleotide sequence, and/or combinations of such sequences. An example of modifications of the recombinant retrons disclosed herein include the insertion of a heterologous nucleic acid sequence in a retron, for example, inserted into the ncRNA locus, such as in the msr or the msd loci. Linking guide RNA molecules to the 5′ and/or 3′ ends (i.e., linking one at the 5′ end of a ncRNA and/or one at the 3′ end of a ncRNA) also represents another modification contemplated by the recombinant retrons disclosed herein. In such embodiments, the guide RNA molecules may also be categorized or referred to more generally as types of heterologous nucleic acid sequences used to modify starting point retrons. These modifications are depicted in FIG. 1B.

[0561] In addition to the DNA encoding the ncRNA, the DNA encoding the RT may also be modified to obtain a recombinant RT. For example, the RT-encoding DNA may modified to contain at least one nucleotide modification, including a single nucleotide substitution, insertion, or deletion, or a substitution, insertion, or deletion of more than one nucleotide, i.e., up to 2, 3, 4, 5, 6, 7, 8, 9, 10, 11, 12, 13, 14, 15, 16, 17, 18, 19, 20, 21, 22, 23, 24, 25, 26, 27, 28, 29, 30, 31, 32, 33, 34, 35, 36, 37, 38, 39, 40, 41, 42, 43, 44, 45, 46, 47, 48, 49, 50, 51, 52, 53, 54, 55, 56, 57, 58, 59, 60, 61, 62, 63, 64, 65, 66, 67, 68, 69, 70, 71, 72, 73, 74, 75, 76, 77, 78, 79, 80, 81, 82, 83, 84, 85, 86, 87, 88, 89, 90, 91, 92, 93, 94, 95, 96, 97, 98, 99, or up to 100, or up to 200, 300, 400, 500, 600, 700, 800, 900, 1000, 1100, 1200, 1300, 1400, 1500, 1600, 1700, 1800, 1900, or up to 2000 nucleotides substituted, inserted, or deleted from a starting point retron (e.g., a wildtype retron) within the RT gene.

[0562] Such modifications to the DNA encoding ncRNA and/or RT may modulate the function of the ncRNA and/or RT in various ways, including i) modulating (e.g., enhancing) reverse transcription, processivity, accuracy/fidelity, and/or production of the msDNA (e.g., in the mammalian cell); ii) modulating (e.g., reducing) immunogenicity of ncRNA (msr locus and msd locus) encoded by the engineered retron in a host (e.g., a host comprising the mammalian cell); iii) modulating (e.g., inhibits, either permanently or transiently) a function of the msDNA; and/or iv) modulating (e.g., improving) efficiency of targeted genome editing/engineering.

[0563] In one embodiment, the present disclosure provides recombinant retrons having the general structure of: a) an msr locus; b) an msd locus encoding the msd RNA portion of the msDNA; c) a sequence encoding a retron reverse transcriptase (RT) (optionally in trans to the ncRNA), wherein the msd RNA is capable of being reverse transcribed (e.g., in a host cell such as a mammalian cell) to form an msDNA by the retron reverse transcriptase (RT); d) a heterologous nucleic acid (e.g., heterologous DNA) capable of being transcribed with the msr locus and/or the msd locus, optionally, the heterologous nucleic acid is inserted at or within the msd locus, upstream of the msr locus, upstream or downstream of the msd locus.

[0564] The engineered retrons of the invention are optionally structurally further modified to include one or more heterologous nucleic acids. The engineered retron may be further modified to provide various functional improvements, such as (without limitation), to enhance the production of msDNA in a cell (e.g., a mammalian cell, including a human cell).

[0565] In certain embodiments, the disclosure provides engineered retrons based on their conserved predicted secondary structures, such as those in FIGS. 2-27.

[0566] In other embodiments, the disclosure provides engineered retrons based on their sequence identity. Exemplary RT amino acid sequences and ret gene nucleic acid sequences are provided in Table A. Exemplary RT consensus amino acid sequences and/or ret gene nucleic acid sequences are provided in Table C. Exemplary ncRNA sequences are provided in Table B.

[0567] Retron sequences that may be provisoed out of the scope of the invention in some embodiments are provided in Table X.

[0568] In certain embodiments, exemplary engineered retrons of the invention (1) are engineered based on or engineered to resemble the secondary structures as depicted in any one of FIGS. 2-27, and/or (2) are provided in Table B. Sequences with significant sequence percentage identity (e.g., at least 50%, at least 55%, at least 60%, at least 65%, at least 70%, at least 75%, at least 80%, at least 85%, at least 90%, at least 91%, at least 92%, at least 93%, at least 94%, at least 95%, at least 96%, at least 97%, at least 98%, at least 99%, at least 99.1%, at least 99.2%, at least 99.3%, at least 99.4%, at least 99.5%, at least 99.6%, at least 99.7%, at least 99.8% or at least 99.9% sequence identity) are also within the scope of the invention.

[0569] In certain embodiments, the engineered nucleic acid construct comprises: 1) an msr locus (that encodes the msr RNA portion of an msDNA); 2) an msd locus encoding the msd RNA portion of the msDNA; 3) a sequence encoding a retron reverse transcriptase (RT), wherein said msd RNA is capable of being reverse transcribed to form the msDNA by the retron reverse transcriptase (RT); and, 4) a heterologous nucleic acid inserted at or within the msd locus, upstream of the msr locus, upstream or downstream of the msd locus; wherein the engineered nucleic acid construct is engineered based on and/or to resemble a secondary structure of a wild-type or consensus retron encoding a wild-type or consensus retron ncRNA encompassed by: a) any one of the sequences and/or structures as depicted in any one of SEQ ID Nos of Table B and/or FIGS. 2-27; or b) a variant of a), having: i) up to 1, 2, or 3 (e.g., up to 1) nucleotide changes per 10 red lettered-nucleotides; ii) up to 4, 5, or 6 (e.g., up to 1 or 2) nucleotide changes per 10 black lettered-nucleotides; and/or iii) up to 7, 8, or 9 (e.g., up to 3 or 4) nucleotide changes per 10 grey lettered-nucleotides; and/or optionally further comprising: i) 7, 8, 9, or 10 (e.g., 9 or 10) nucleotides present per 10 red-circled nucleotides; ii) 6, 7, 8, 9, or 10 (e.g., 8, 9 or 10) nucleotides present per 10 black-circled nucleotides; iii) 4, 5, 6, 7, 8, 9, or 10 (e.g., 6, 7, 8, 9 or 10) nucleotides present per 10 grey-circled nucleotides; and/or iv) 2, 3, 4, 5, 6, 7, 8, 9, or 10 (e.g., 4, 5, 6, 7, 8, 9, or 10) nucleotides present per 10 white-circled nucleotides; wherein the ncRNA does not comprise an ncRNA associated with the sequences of Table X.

[0570] In certain embodiments, insertion of a heterologous nucleic acid includes deletion of a retron nucleic acid. In certain embodiment, the inserted heterologous nucleic acid substitutes for a retron nucleic acid which is deleted. There is no requirement that the inserted heterologous nucleic acid and the deleted retron nucleic acid be of the same or similar size. In certain embodiments, substitution comprises replacement of a portion of a hairpin loop region of a retron. In certain embodiments, substitution comprises replacement of a portion of a stem-loop region of a retron. In certain embodiments, substitution comprises replacement of a region of a retron that does not comprise a stem or a loop. In certain instances, identification of retron structure involves comparison to model ncRNA structures provided herein, e.g. by comparison to one or more of FIGS. 2-27. In certain instances, identification of retron structure involves modeling by an nucleic acid folding algorithm, such as but not limited to RNAfold (Gruber A R, et al., The Vienna RNA Websuite. Nucleic Acids Research, Volume 36, Issue suppl_2, 1 Jul. 2008, Pages W70-W74), UNAFold (Markham N R, et al., UNAFold: software for nucleic acid folding and hybridization. Methods Mol Biol. Vol. 453, 2008, Pages 3-31), and SPOT-RNA (Singh J et al., RNA secondary structure prediction using an ensemble of two-dimensional deep neural networks and transfer learning. Nature communications, Vol. 10, 2019, Pages 1-13).

[0571] In certain embodiments, the engineered retron of the invention encodes a reverse transcriptase (RT) or a functional domain thereof, comprising: i) a polypeptide listed in Table A, or a polypeptide having at least 50%, at least 55%, at least 60%, at least 65%, at least 70%, at least 75%, at least 80%, at least 85%, at least 90%, at least 91%, at least 92%, at least 93%, at least 94%, at least 95%, at least 96%, at least 97%, at least 98%, at least 99%, at least 99.1%, at least 99.2%, at least 99.3%, at least 99.4%, at least 99.5%, at least 99.6%, at least 99.7%, at least 99.8% or at least 99.9% sequence identity to a polypeptide listed in Table A. In some embodiments, the RT does not comprise a polypeptide identified in Table X.

[0572] In certain embodiments, the engineered retron of the invention encodes a reverse transcriptase (RT) or a functional domain thereof, comprising: i) a polynucleotide listed in Table A, or a polynucleotide having at least 50%, at least 55%, at least 60%, at least 65%, at least 70%, at least 75%, at least 80%, at least 85%, at least 90%, at least 91%, at least 92%, at least 93%, at least 94%, at least 95%, at least 96%, at least 97%, at least 98%, at least 99%, at least 99.1%, at least 99.2%, at least 99.3%, at least 99.4%, at least 99.5%, at least 99.6%, at least 99.7%, at least 99.8% or at least 99.9% sequence identity to a polynucleotide of Table A and/or ii) a consensus polynucleotide sequence listed in Table A. In some embodiments, the polynucleotide encoding the RT does not comprise a polynucleotide identified in Table X.

[0573] In certain embodiments, the engineered retron of the invention encodes an ncRNA comprising: (I) an ncRNA listed in Table B, or an ncRNA having at least 50%, at least 55%, at least 60%, at least 65%, at least 70%, at least 75%, at least 80%, at least 85%, at least 90%, at least 91%, at least 92%, at least 93%, at least 94%, at least 95%, at least 96%, at least 97%, at least 98%, at least 99%, at least 99.1%, at least 99.2%, at least 99.3%, at least 99.4%, at least 99.5%, at least 99.6%, at least 99.7%, at least 99.8% or at least 99.9% sequence identity to an ncRNA of Table B.

[0574] Engineered ncRNAs of the invention can diverge in size from ncRNAs on which they are based and the proportion of the ncRNA retained in the engineered ncRNA can vary. In certain embodiments the retained amount of the ncRNA is about 50%, about 55%, about 60%, about 65%, about 70%, about 75%, about 80%, about 85%, about 88%, about 90%, about 91%, about 92%, about 93%, about 94%, about 95%, about 96%, about 97%, about 98%, about 99%, about 99.5%, or from 50% to 80%, or from 60% to 85%, of from 70% to 90%, or from 80% to 95%, or from 85% to 98%, or from 90% to 99%, or all of the ncRNA.

[0575] In certain embodiments, the engineered retron of the invention encodes an ncRNA and a reverse transcriptase (RT) or a functional domain thereof, wherein the ncRNA and the RT or functional domain thereof are as described above.

[0576] Specifically, in such embodiments, the ncRNA may comprise: (I) an ncRNA listed in Table B, or an ncRNA having at least 50%, at least 55%, at least 60%, at least 65%, at least 70%, at least 75%, at least 80%, at least 85%, at least 90%, at least 91%, at least 92%, at least 93%, at least 94%, at least 95%, at least 96%, at least 97%, at least 98%, at least 99%, at least 99.1%, at least 99.2%, at least 99.3%, at least 99.4%, at least 99.5%, at least 99.6%, at least 99.7%, at least 99.8% or at least 99.9% sequence identity to an ncRNA listed in Table B; and wherein the ncRNA optionally excludes the ncRNA associated with the sequences identified in Table X.

[0577] Also in such embodiment, the reverse transcriptase (RT) or functional domain thereof comprises: (A) i) a polypeptide listed in Table A, or a polypeptide having at least 50%, at least 55%, at least 60%, at least 65%, at least 70%, at least 75%, at least 80%, at least 85%, at least 90%, at least 91%, at least 92%, at least 93%, at least 94%, at least 95%, at least 96%, at least 97%, at least 98%, at least 99%, at least 99.1%, at least 99.2%, at least 99.3%, at least 99.4%, at least 99.5%, at least 99.6%, at least 99.7%, at least 99.8% or at least 99.9% sequence identity to a polypeptide listed in Table A; and/or ii) a polypeptide listed in Table C; optionally, the RT does not comprise a polypeptide identified in Table X; OR (B) i) a polynucleotide listed in Table A, or a polynucleotide having at least 50%, at least 55%, at least 60%, at least 65%, at least 70%, at least 75%, at least 80%, at least 85%, at least 90%, at least 91%, at least 92%, at least 93%, at least 94%, at least 95%, at least 96%, at least 97%, at least 98%, at least 99%, at least 99.10%, at least 99.2%, at least 99.3%, at least 99.4%, at least 99.5%, at least 99.6%, at least 99.7%, at least 99.8% or at least 99.9% sequence identity to a polynucleotide listed in Table A; optionally, the polynucleotide encoding the RT does not comprise a polynucleotide associated with the sequences identified in Table X.

[0578] In certain embodiments, the heterologous nucleic acid is between >20 nucleotides and about 10,000 nucleotides.

[0579] The engineered retron may further comprise a sequence modification (e.g., insertion, deletion, and/or substitution of one or more nucleotide(s)) in the msr locus and/or the msd locus that: i) modulates (e.g., enhances) reverse transcription, processivity, accuracy/fidelity, and/or production of the msDNA (e.g., in the mammalian cell); ii) modulates (e.g., reduces) immunogenicity of ncRNA (msr locus and msd locus) encoded by the engineered retron in a host (e.g., a host comprising the mammalian cell); iii) comprises a nucleotide sequence that modulates (e.g., inhibits, either permanently or transiently) a function of the msDNA; and/or iv) modulates (e.g., improves) efficiency of targeted genome editing/engineering.

[0580] Retron msr gene, msd gene, and RT nucleic acid sequences (e.g., the ret gene) as well as the encoded retron reverse transcriptase protein sequences that may serve as the template of the engineered retron described herein may be derived from any source, such as those in Table A, optionally excluding those associated with the sequences of Table X.

[0581] In some embodiments, template or wild-type (wt) sequences of the msr gene, msd gene, and the RT coding sequence (viz., the ret gene) used in the engineered retron are derived from a bacterial retron.

[0582] In some embodiments, representative template/wild-type retrons are from gram negative bacteria. In some embodiments, the retron is from a bacterium listed in Table X.

[0583] In some embodiments, the engineered retrons are engineered based on clades defined on retron/retron RTs, in which the retrons are associated with a tripartite system composed of the ncRNA, the RT and an additional protein or RT-fused domain with diverse enzymatic functions. See, for example, “Mestre et al., Systematic Prediction of Genes Functionally Associated with Bacterial Retrons and Classification of The Encoded Tripartite Systems, Nucleic Acids Research, Volume 48, Issue 22, 16 Dec. 2020, Pages 12632-12647” (incorporated herein by reference). While the clades are based primarily upon naturally occurring ncRNA and retron/retron RT, and an additional protein or RT-fused domain, the clades, for the purpose of serving as the templates for the subject engineered retrons, are not limited to naturally occurring sequences. Rather, the clades can also encompass non-naturally occurring ncRNA and RT, including, without limitation, recombinant, modified or altered, chimeric, hybrid, synthetic, artificial, etc.

[0584] Thus, according to the instant disclosure, retrons may be considered phylogenetically related based on a Neighbor-Joining algorithm of at least 75% (of at least 1000 replicates) and a Poisson correction distance measurement of no more than 0.05, based on alignment of the retron RT. Alternatively or in addition, retrons may be considered phylogenetically related when/if the same RT, or closely related RT, can recognize the secondary structures of the ncRNA of the retrons and reserve transcribe the retrons to produce msDNA.

[0585] In certain embodiments, sequence alignments between different retron sequences (e.g., ncRNA and/or RT (protein and/or nucleic acid) sequences) or secondary structure generations are based on software known to one of ordinary skill in the art.

[0586] The retron ncRNA sequences including msr and msd sequences within the same clade may be highly conserved at certain positions, while being less conserved at other positions.

[0587] Exemplary consensus sequences based on clade members were generated (see, for example, the corresponding FIGS. 2-27, respectively) to show these conserved sequences and/or secondary structures, including the highly conserved nucleotides with at least 97% sequence conservation at red lettered-nucleotides, those with between 90-97% sequence conservation at black lettered-nucleotides, and 75-90% nucleotide sequence identity at grey-lettered nucleotides. Further structural limitations of the consensus sequences for the clades are provided as colored circles indicating the probability of having a base at that specific position, including red circles representing a base in 97% of the cases, black circles representing a base in 90-97% of the cases, and grey circles representing a base in 75-90% of the cases.

[0588] In some embodiments, the template ncRNA based on which the subject engineered retron is modified (including the msr and msd region sequences) is a consensus sequence for the various retron ncRNA (including msr and msd nucleic acid sequences) clades, as provided in any one of SEQ ID NOs: of Table B and the corresponding FIGS. 2-27, respectively, including the bases that are highly conserved and depicted by a specific-colored letters or circles, and optionally further including bases that may be present at specific locations by specific-colored circles.

[0589] In some embodiments, the engineered retron is engineered, based on and/or to resemble a secondary structure of a wild-type or consensus retron encoding a wild-type or consensus retron ncRNA encompassed by: 1) the sequences and/or structures as depicted in any one of SEQ ID NOs: of Table B and the corresponding FIGS. 2-27, respectively; or 2) a variant of 1), having: A) up to 1, 2, or 3 (e.g., up to 1) nucleotide changes per 10 red lettered-nucleotides; B) up to 4, 5, or 6 (e.g., up to 1 or 2) nucleotide changes per 10 black lettered-nucleotides; and/or C) up to 7, 8, or 9 (e.g., up to 3 or 4) nucleotide changes per 10 grey lettered-nucleotides. Optionally, the variant of 1) further comprises: a) 7, 8, 9, or 10 (e.g., 9 or 10) nucleotides present per 10 red-circled nucleotides; b) 6, 7, 8, 9, or 10 (e.g., 8, 9 or 10) nucleotides present per 10 black-circled nucleotides; c) 4, 5, 6, 7, 8, 9, or 10 (e.g., 6, 7, 8, 9 or 10) nucleotides present per 10 grey-circled nucleotides; and/or d) 2, 3, 4, 5, 6, 7, 8, 9, or 10 (e.g., 4, 5, 6, 7, 8, 9, or 10) nucleotides present per 10 white-circled nucleotides.

[0590] The engineered retron may be engineered by introducing the sequence modifications (e.g., deletions, additions, or substitutions) into the wild-type retron encoding wild-type retron ncRNA, or into the retron encoding the consensus retron ncRNA.

[0591] For example, a variant retron may not satisfy the sequence and/or structural requirements of any one of SEQ ID NOs: of Table B and the corresponding FIGS. 2-27, respectively, but may still be a suitable template for the engineered retron described herein, so long as one or more of the conditions set forth in A)-C) and/or a)-d) are met.

[0592] In certain embodiments, the highly conserved sequences in the template retrons are preserved/conserved or substantially preserved/conserved in the engineered retron described herein.

[0593] In certain embodiments, all or substantially all the red lettered-nucleotides (i.e., those conserved in about 97% or more of the retrons in the same clade) are preserved/conserved in the engineered retron described herein. In certain embodiments, no more than 1, 2, or 3 (e.g., up to 1) nucleotide change(s) (e.g., deleted or substituted) occur per 10 red lettered-nucleotides in the engineered retron described herein. In certain embodiments, no more than about 0.3%, 0.5%, 1%, 2%, 3%, 4%, or 5% of the red lettered-nucleotides are changed (e.g., deleted or substituted) in the engineered retron described herein.

[0594] In certain embodiments, all or substantially all the black lettered-nucleotides (i.e., those conserved in about 90-97% of the retrons in the same clade) are preserved/conserved in the engineered retron described herein. In certain embodiments, no more than 1, 2, 3, 4, 5, 6, 7, 8, 9, or 10 (e.g., up to 1 or 2) nucleotide change(s) (e.g., deleted or substituted) occur per 10 black lettered-nucleotides are changed in the engineered retron described herein. In certain embodiments, no more than about 3%, 4%, 5% or 10% of the black lettered-nucleotides are changed (e.g., deleted or substituted) in the engineered retron described herein.

[0595] In certain embodiments, all or substantially all the grey lettered-nucleotides (i.e., those conserved in about 75-90% of the retrons in the same clade) are preserved/conserved in the engineered retron described herein. In certain embodiments, no more than 1, 2, 3, 4, 5, 6, 7, 8, 9, 10, 11, 12, 13, 14, or 15 (e.g., up to 3 or 4, or up to 7, 8, or 9) nucleotide change(s) (e.g., deleted or substituted) occur per 10 grey lettered-nucleotides are changed in the engineered retron described herein. In certain embodiments, no more than about 5%, 10%, 15%, 20%, or 25% of the grey lettered-nucleotides are changed (e.g., deleted or substituted) in the engineered retron described herein.

[0596] In certain embodiments, all or substantially all the red circled-nucleotides (i.e., those with a nucleotide in about 97% or more of the retrons in the same clade) are present in the engineered retron described herein. In certain embodiments, no more than 1, 2, or 3 (e.g., 0.3, 0.5, or up to 1) nucleotides are absent (e.g., deleted) per 10 red circled-nucleotides in the engineered retron described herein. In certain embodiments, 7, 8, 9, or 10 (e.g., 9 or 10) nucleotides are present per 10 red circled-nucleotides in the engineered retron described herein. In certain embodiments, no more than about 0.3%, 0.5%, 1%, 2%, 3%, 4%, or 5% of the red circled-nucleotides are absent (e.g., deleted) in the engineered retron described herein.

[0597] In certain embodiments, all or substantially all the black circled-nucleotides (i.e., those with a nucleotide in about 90-97% of the retrons in the same clade) are present in the engineered retron described herein. In certain embodiments, no more than 1, 2, 3, or 4 (e.g., up to 1 or 2) nucleotides are absent (e.g., deleted) per 10 black circled-nucleotides in the engineered retron described herein. In certain embodiments, 6, 7, 8, 9, or 10 (e.g., 8, 9 or 10) nucleotides are present per 10 black circled-nucleotides in the engineered retron described herein. In certain embodiments, no more than about 1%, 2%, 3%, 5% or 10% of the black circled-nucleotides are absent (e.g., deleted) in the engineered retron described herein.

[0598] In certain embodiments, all or substantially all the grey circled-nucleotides (i.e., those with a nucleotide in about 75-90% of the retrons in the same clade) are present in the engineered retron described herein. In certain embodiments, no more than 1, 2, 3, 4, or 5 (e.g., up to 2, 3, or 4) nucleotides are absent (e.g., deleted) per 10 grey circled-nucleotides in the engineered retron described herein. In certain embodiments, 4, 5, 6, 7, 8, 9, or 10 (e.g., 6, 7, 8, 9 or 10) nucleotides are present per 10 grey circled-nucleotides in the engineered retron described herein. In certain embodiments, no more than about 5%, 10%, 15%, 20%, or 25% of the grey circled-nucleotides are absent (e.g., deleted) in the engineered retron described herein.

[0599] In certain embodiments, all or substantially all the white circled-nucleotides (i.e., those with a nucleotide in about 50-75% of the retrons in the same clade) are present in the engineered retron described herein. In certain embodiments, no more than 1, 2, 3, 4, 5, 6, or 6 (e.g., up to 2, 3, 4, 5, 6) nucleotide are absent (e.g., deleted) per 10 white circled-nucleotides in the engineered retron described herein. In certain embodiments, 2, 3, 4, 5, 6, 7, 8, 9, or 10 (e.g., 4, 5, 6, 7, 8, 9 or 10) nucleotides are present per 10 grey circled-nucleotides in the engineered retron described herein. In certain embodiments, no more than about 5%, 10%, 15%, 20%, 30%, 40%, or 50% of the white circled-nucleotides are absent (e.g., deleted) in the engineered retron described herein.

[0600] In some embodiments, the engineered retron is synthetically produced. In other embodiments, the synthetically produced engineered retron comprises the sequences and/or secondary structures as depicted in any one of SEQ ID NOs: of Table B and the corresponding FIGS. 2-27, respectively, and at least the conserved color lettered nucleotides according to their respective levels of sequence identity (e.g., red, black and gray letters), and/or at least the conserved colored circle nucleotides according to their respective levels of probability of sequence presence (e.g., red, black and gray circles).

[0601] In some embodiments, the sequence modification in the engineered retrons leads to/results in the encoded retron ncRNA having the desired functional improvement.

[0602] In certain embodiments, the one or more sequence modifications comprises, in the ncRNA, one or more of: (i) a modified (e.g., mutated, reduced, or eliminated) bulge in a1, a2, or both a1 and a2; (ii) an extension or shortening of a1, a2, or both a1 and a2; (iii) an extension or shortening of a spacer sequence between hairpin loops (e.g., S1, S2, S3, and/or S4 in FIG. 2, or any of the S regions in an one of FIGS. 2-27); (iv) an additional or modified (e.g., mutated or eliminated) bulge in hairpin loops (e.g., L2 and/or L3 in FIG. 2, or any of the L regions in an one of FIGS. 2-27 (e.g., by removing unpaired bases in the bulge, or by replacing unpaired bases with an equivalent number of base pairs)); (v) a modified (e.g., extended or shortened) length of hairpin loops (e.g., L1, L2, L3, and/or L4 in FIG. 2, or any of the L regions in an one of FIGS. 2-27); (vi) an alternative L1 and/or L2 (in FIG. 2, or any of the L regions in an one of FIGS. 2-27) having complement, reverse, or reverse complement sequences; (vii) a modified (e.g., increased) number of unpaired bases at the tip of hairpin loops (e.g., L1, L2, L3, and/or L4 in FIG. 2, or any of the L regions in an one of FIGS. 2-27); (viii) a modified (e.g., increased or decreased) GC content in hairpin loops (e.g., L1, L2, L3, and/or L4 in FIG. 2, or any of the L regions in an one of FIGS. 2-27); (ix) an insertion of the heterologous nucleic acid in spacer sequences between hairpin loops (e.g., S1, S2, S3 and/or S4 in FIG. 2, or any of the S regions in an one of FIGS. 2-27), or at the tip of hairpin loops (e.g., L1, L2, L3, and/or L4 in FIG. 2, or any of the L regions in an one of FIGS. 2-27); (x) a deletion of one or more hairpin loops (e.g., L1, L2, L3 and/or L4 in FIG. 2, or any of the L regions in any one of FIGS. 2-27); (xi) an addition of a new loop in a spacer sequence between hairpin loops (e.g., S1, S2, S3, and/or S4 in FIG. 2, or any of the S regions in any one of FIGS. 2-27); (xii) circularization of the ncRNA with the 5′ end and the 3′ end of the ncRNA being connected either directly, or via a spacer sequence; (xiii) a repositioned branching guanosine capable of initiating reverse transcription priming; (xiv) a staggered end sequence that reduces immunogenicity of the retron ncRNA, created by, e.g., adding or removing the 5′ al nucleotides and/or the 3′ a2 nucleotides; and/or, (xv) an antisense sequence complementary to a CRISPR/Cas guide RNA (gRNA) sequence encoded by the heterologous nucleic acid, wherein the antisense sequence hybridizes to and inhibits said gRNA in the encoded retron ncRNA, and wherein said antisense sequence is removed upon reverse transcription of the msDNA.

[0603] Unless specifically indicated otherwise, the a1 and a2 regions are both single-stranded and substantially reverse complementary to each other, forming a stem with optional interruption by a symmetric or asymmetric bulge, with optional one or more 5′ and/or 3′ overhang/unpaired nucleotide(s), wherein the al region generally ends before (e.g., ends immediately 5′ to) the conserved branching guanosine (G) providing the 2′-OH for reverse transcription priming.

[0604] In some embodiments, the sequence change comprises a mutated, reduced, or eliminated bulge in the a1/a2 stem region, including sequence change(s) in one (i.e., al or a2) strand, or both a1 and a2 strands.

[0605] For example, in some embodiments, the sequence change comprises deleting nucleotides from a1, a2, or both a1 and a2, such that the size of the bulge is reduced, or a symmetrical bulge becomes asymmetrical or vice versa, or a bulge is eliminated.

[0606] In some embodiments, the sequence change comprises replacing/substituting nucleotides in a1, a2, or both a1 and a2, such that previously unpaired bases in the bulge become base-paired.

[0607] In some embodiments, the sequence change comprises replacing an unpaired purine base with one or more unpaired pyrimidine base(s).

[0608] In some embodiments, the sequence change comprises replacing an unpaired pyrimidine base with one or more unpaired purine base(s).

[0609] In some embodiments, the sequence change comprises replacing one unpaired purine base (e.g., A or G) with another unpaired purine base (e.g., G or A, respectively).

[0610] In some embodiments, the sequence change comprises replacing one unpaired pyrimidine base (e.g., T/U or C) with another unpaired pyrimidine base (e.g., C or T/U, respectively).

[0611] In some embodiments, the sequence change comprises an extension or shortening of a1, a2, or both a1 and a2.

[0612] For example, the length of al can be shortened by deleting 5′ overhang, deleting any upstream bulge nucleotides, deleting bases involved in base-pairing. Likewise, the length of al can be extended by adding 5′ overhang, adding any upstream bulge nucleotides, adding bases involved in base-pairing.

[0613] In some embodiments, the length of a2 can be shortened by deleting 5′ overhang, deleting any downstream bulge nucleotides, deleting bases involved in base-pairing. Likewise, the length of a2 can be extended by adding 5′ overhang, adding any downstream bulge nucleotides, adding bases involved in base-pairing.

[0614] In some embodiments, the spacer sequences between hairpin loops as depicted in any one of FIGS. 2-27, (e.g., S1, S2, S3 and/or S4 in FIG. 2) can be extended or shortened. In some embodiments the modification can be by inserting a heterologous nucleic acid sequence in spacer sequences between hairpin loops (e.g., S1, S2, S3 and/or S4 in FIG. 2). In certain embodiments, one or more heterologous nucleic acid sequences is inserted in a spacer sequence in the msd region. In some embodiments, the modification of the spacer region can be by interrupting the spacer with additional bulges or hairpin loops.

[0615] In other embodiments, a bulge in the hairpin loops are mutated or eliminated (e.g., by removing unpaired bases) in the bulge, such that, for example, a symmetric bulge becomes an unsymmetrical bulge, or an unsymmetrical bulge becomes a symmetric one or an even more unsymmetrical one. In certain embodiments, unpaired bases in the bulge is replaced with an equivalent number of base pairs. The additional base pairs may be merged into the stem at one or both ends of the previous bulge, or may bisect a previous bulge to create two bulges.

[0616] In some embodiments, the length of one or more hairpin loops as depicted in any one of FIGS. 2-27, (e.g., L1, L2, L3 and/or L4 of FIG. 2) can be extended or shortened. For example, the number of unpaired bases within the tip or loop can be increased or decreased. Further, a heterologous nucleic acid sequence of interest can be inserted within the tip or the hairpin loop. In certain embodiments, the heterologous nucleic acid sequence of interest is inserted within the tip or the hairpin loop in the msd locus.

[0617] In other embodiments, the GC content in the tip or hairpin loops are increased or decreased.

[0618] In still other embodiments, a hairpin loop can be deleted.

[0619] In some embodiments, the ncRNA with the 5′ end and the 3′ end of the ncRNA can be circularized by being connected either directly, or via a spacer sequence.

[0620] In some embodiments, one or more hairpin loops (e.g. L1, L2, L3 and/or L4 of FIG. 2) are modified to have complement, reverse, or reverse complement sequences.

[0621] In certain embodiments, the branching guanosine (G) capable of initiating reverse transcription priming is repositioned. For example, the G can be placed further downstream of the end of the al sequence by, for example, 1, 2, 3, 4, or 5 additional nucleotides.

[0622] In certain embodiments, immunogenicity of the retron ncRNA is reduced by, e.g., adding or removing the 5′ al nucleotides and/or the 3′ a2 nucleotides.

[0623] In certain embodiments, the one or more heterologous nucleic acid sequences (inserted into the subject engineered retron) comprise: a) a heterologous nucleic acid (such as the coding sequence for an RNA aptamer or a ribozyme) inserted into the msr locus or the msd locus (such as in an S region (e.g., S1, S2, S3 and/or S4 in FIG. 2, or any of the S regions in any one of FIGS. 2-27), or the tip of an L region (e.g., L1, L2, L3 and/or L4 in FIG. 2, or any of the L regions in any one of FIGS. 2-27), or upstream or downstream of either the msr locus or the msd locus; or b) a first heterologous nucleic acid inserted into the msd locus, and a second heterologous nucleic acid inserted either upstream of the msr locus or downstream of the msd locus, wherein the second heterologous nucleic acid encodes a CRISPR/Cas guide RNA (gRNA).

[0624] In certain embodiments, an antisense sequence complementary to a CRISPR/Cas guide RNA (gRNA) sequence encoded by the heterologous nucleic acid can be included, wherein the antisense sequence hybridizes to and inhibits the gRNA in the encoded retron ncRNA, and wherein the antisense sequence is removed upon reverse transcription of the msDNA.

[0625] In certain embodiments, said heterologous nucleic acid encodes a protein or peptide of interest, or wherein said heterologous nucleic acid comprises or encodes a donor/template sequence (e.g., a donor that corrects/repairs/removes a mutation at the target genome site, such as a mutated exon in a disease gene; a functional DNA element (such as a promoter, an enhancer, a protein binding sequence, a methylation site, a homology region for assisting gene editing, etc.); or a coding sequence for a functional RNA element (ncRNAs, etc.)).

[0626] In certain embodiments, the protein or peptide of interest comprises a therapeutic protein (such as a wildtype protein defective in a disease cell, or a therapeutic antibody or antigen-binding fragment thereof) useful in treating a disease.

[0627] Other heterologous nucleic acids of the invention are described in other section of the specification, all incorporated herein by reference.

[0628] In some embodiments, the template/wild-type retron for the engineered retron encodes a wild-type or consensus retron ncRNA polynucleotide having a consensus secondary structure shown in any one of FIGS. 2-27, which are described individually below:

[0629] Variants of this template, which can also be used in the engineered retron of the invention, include a variant having: A) up to 1, 2, or 3 (e.g., up to 1) nucleotide changes per 10 red lettered-nucleotides; B) up to 4, 5, or 6 (e.g., up to 1 or 2) nucleotide changes per 10 black lettered-nucleotides; and/or C) up to 7, 8, or 9 (e.g., up to 3 or 4) nucleotide changes per 10 grey lettered-nucleotides; and/or optionally further comprising: a) 7, 8, 9, or 10 (e.g., 9 or 10) nucleotides present per 10 red-circled nucleotides; b) 6, 7, 8, 9, or 10 (e.g., 8, 9 or 10) nucleotides present per 10 black-circled nucleotides; c) 4, 5, 6, 7, 8, 9, or 10 (e.g., 6, 7, 8, 9 or 10) nucleotides present per 10 grey-circled nucleotides; and/or d) 2, 3, 4, 5, 6, 7, 8, 9, or 10 (e.g., 4, 5, 6, 7, 8, 9, or 10) nucleotides present per 10 white-circled nucleotides.

[0630] In some embodiments, the engineered retron is entirely synthetically produced and having the conserved nucleotides as denoted by the colored letters as shown in SEQ ID NO. XX and FIGS. 2-27.

[0631] In some embodiments, the non-coding RNA (ncRNA) portion of the engineered retron comprises a polynucleotide (e.g., a DNA molecule) encoding an ncRNA listed in Table B, or an ncRNA having at least 50%, at least 55%, at least 60%, at least 65%, at least 70%, at least 75%, at least 80%, at least 85%, at least 90%, at least 91%, at least 92%, at least 93%, at least 94%, at least 95%, at least 96%, at least 97%, at least 98%, at least 99%, at least 99.1%, at least 99.2%, at least 99.3%, at least 99.4%, at least 99.5%, at least 99.6%, at least 99.7%, at least 99.8% or at least 99.9% sequence identity to an ncRNA listed in Table B. In some embodiments, the ncRNA does not comprise an ncRNA associated with the sequences of Table X.

[0632] Amplification of an engineered retron described herein may be performed, for example, before transfection of cells or ligation into vectors. Any method for amplifying the engineered retron may be used, including, but not limited to polymerase chain reaction (PCR), isothermal amplification, nucleic acid sequence-based amplification (NASBA), transcription mediated amplification (TMA), strand displacement amplification (SDA), and ligase chain reaction (LCR). In one embodiment, the engineered retron comprise common 5′ and 3′ priming sites to allow amplification of retron sequences in parallel with a set of universal primers. In another embodiment, a set of selective primers is used to selectively amplify a subset of retron sequences from a pooled mixture.

[0633] In some embodiments, the template/wild-type retron for the engineered retron encodes a wild-type or consensus retron ncRNA polynucleotide having a consensus secondary structure shown in FIG. 2-27, and as described individually below:

### Type IA/IIA1 Retron (FIG. 2)

[0634] In some embodiments, the template/wt retron for the subject engineered retron encodes a wild-type retron ncRNA polynucleotide having a consensus secondary structure that can be described as:

[chemical structure]

wherein:
[0635] a1/a2 is a stem 8 bp in length;
[0636] L1 is a stem of 5 bps with a 10-nt tip;
[0637] L2 is a stem of 7 bps with a 5-nt tip, and a 1/1 bulge 3 nt from the tip;
[0638] L3 is a stem of 23 bps with a 22-nt tip, and a 2/2 bulge 21 bps from the tip;
[0639] L4 is a stem of 11 bps with a 5-nt tip;
[0640] S1 is a single-stranded spacer region between the a1/a2 stem and L1, with no spacer between L1 and L2;
[0641] S2 is a single-stranded spacer region between L2 and L3;
[0642] S3 is a single-stranded spacer region between L3 and the a1/a2 stem; and
[0643] S4 is a single-stranded spacer region between the a1/a2 stem and L4, and
[0644] the conserved nucleotides are as shown in SEQ ID NO: 1 and FIG. 2, and wherein the colored circled nucleotides are present at the respective levels of certainty (e.g., at least about 97% of the red-circled nucleotides, at least about 90-97% of the black-circled nucleotides, at least about 75-90% of the grey-circled nucleotides, and at least about 50% of the white-circled nucleotides are present).

[0645] In some embodiments, the engineered retron is entirely synthetically produced and having the conserved nucleotides as denoted by the colored letters as shown in FIG. 2.

### Type IB1 Retron (FIG. 3)

[0646] In some embodiments, the template/wt retron for the subject engineered retron encodes a wild-type retron ncRNA polynucleotide having a consensus secondary structure that can be described as:

[chemical structure]

wherein:
[0647] a1/a2 is a stem 6 bps in length with a 2/2 bulge 3 bps from the tip, wherein al has a 2-nt overhang and a2 has a 6-nt overhang;
[0648] L1 is a stem of 14 bps with a 3-nt tip, a 1/0 bulge 4 bps from the tip, and a 0/6 bulge 10 bps from the tip;
[0649] L2 is a stem of 23 bps with a 5-nt tip, a 1/1 bulge 4 bps from the tip, and a 0/1 bulge 18 bps from the tip;
[0650] S1 is a single-stranded spacer region between a1/a2 and L1;
[0651] S2 is a single-stranded spacer region between L1 and L2;
[0652] S3 is a single-stranded spacer region between L2 and a1/a2,
[0653] the conserved nucleotides are as shown in FIG. 3, and wherein the colored circled nucleotides are present at the respective levels of certainty (e.g., at least about 97% of the red-circled nucleotides, at least about 90-97% of the black-circled nucleotides, at least about 75-90% of the grey-circled nucleotides, and at least about 50% of the white-circled nucleotides are present).

[0654] In some embodiments, the engineered retron is entirely synthetically produced and having the conserved nucleotides as denoted by the colored letters as shown in FIG. 3.

### Type IB2 Retron (FIG. 4)

[0655] In some embodiments, the template/wt retron for the subject engineered retron encodes a wild-type retron ncRNA polynucleotide having a consensus secondary structure that can be described as:

[chemical structure]

wherein:
[0656] the a1/a2 stem is 16 bp in length, with a 17-base 5′ overhang and a 16-base 3′ overhang;
   [0657] L1 is a stem of 6 bps with a 4-nt tip;
   [0658] L2 is a stem of 4 bps with a 4-nt tip, with a 2/2 bulge 2 nts from the tip;
   [0659] L3 is a stem of 3 bps with a 5-nt tip;
   [0660] L4 is a stem of 9 bps with a 5-nt tip, and a 1/1 bulge 4 nts from the tip;
   [0661] S1, S2, S3, and S4 are single-stranded spacer regions between the a1/a2 stem and L1, L2 and L3, L3 and L4, and L4 and the a1/a2 stem, respectively, with no spacer between L1 and L2; wherein the last 5 nts of S1 and the 5^{th}-9^{th} nts of S2 form a 5-bp stem, and,
[0662] the conserved nucleotides are as shown in FIG. 4, and wherein the colored circled nucleotides are present at the respective levels of certainty (e.g., at least about 97% of the red-circled nucleotides, at least about 90-97% of the black-circled nucleotides, at least about 75-90% of the grey-circled nucleotides, and at least about 50% of the white-circled nucleotides are present).

[0663] In some embodiments, the engineered retron is entirely synthetically produced and having the conserved nucleotides as denoted by the colored letters as shown in FIG. 4.

### Type 1C Retron (FIG. 5)

[0664] In some embodiments, the template/wt retron for the subject engineered retron encodes a wild-type retron ncRNA polynucleotide having a consensus secondary structure that can be described as:

[chemical structure]

wherein:
[0665] a1/a2 is a stem 13 bps in length;
[0666] L1 is a stem of 9 bps with a 3-nt tip;
[0667] L2 is a stem of 10 bps with a 5-nt tip;
[0668] S1 is a single-stranded spacer region between a1/a2 and L1;
[0669] S2 is a single-stranded spacer region between L1 and L2;
[0670] S3 is a single-stranded spacer region between L2 and a1/a2,
[0671] the conserved nucleotides are as shown in FIG. 5, and wherein the colored circled nucleotides are present at the respective levels of certainty (e.g., at least about 97% of the red-circled nucleotides, at least about 90-97% of the black-circled nucleotides, at least about 75-90% of the grey-circled nucleotides, and at least about 50% of the white-circled nucleotides are present).

[0672] In some embodiments, the engineered retron is entirely synthetically produced and having the conserved nucleotides as denoted by the colored letters as shown in FIG. 5.

### Type IIA1 Retron (FIG. 6)

[0673] In some embodiments, the template/wt retron for the subject engineered retron encodes a wild-type retron ncRNA polynucleotide having a consensus secondary structure that can be described as:

[chemical structure]

wherein:
[0674] a1/a2 is a stem 10 bps in length with a 1-nt overhang on a2;
[0675] L1 is a stem of 10 bps with a 3-nt tip;
[0676] L2 is a stem of 7 bps with a 5-nt tip;
[0677] L3 is a stem of 27 bps with a 8-nt tip and a 0/2 bulge 26 bps from the tip;
[0678] S1 is a single-stranded spacer region between a1/a2 and L1;
[0679] S2 is a single-stranded spacer region between L1 and L2;
[0680] S3 is a single-stranded spacer region between L2 and L3;
[0681] S4 is a single-stranded spacer region between L3 and a1/a2,
[0682] the conserved nucleotides are as shown in FIG. 6, and wherein the colored circled nucleotides are present at the respective levels of certainty (e.g., at least about 97% of the red-circled nucleotides, at least about 90-97% of the black-circled nucleotides, at least about 75-90% of the grey-circled nucleotides, and at least about 50% of the white-circled nucleotides are present).

[0683] In some embodiments, the engineered retron is entirely synthetically produced and having the conserved nucleotides as denoted by the colored letters as shown in FIG. 6.

### Type IIA2 Retron (FIG. 7)

[0684] In some embodiments, the template/wt retron for the subject engineered retron encodes a wild-type retron ncRNA polynucleotide having a consensus secondary structure that can be described as:

[chemical structure]

wherein:
[0685] a1/a2 is a stem 7 bp in length with no overhangs;
[0686] L1 is a stem of 8 bps with a 3-nt tip;
[0687] L2 is a stem of 30 bps with a 8-nt tip, a 1/1 bulge 2 bps from the tip, and a 1/1 bulge 27 bps from the tip;
[0688] L3 is a stem of 8 bps with a 5-nt tip, and a 0/1 bulge 3 nt from the tip;
[0689] S1 is a single-stranded spacer region between the a1/a2 stem and L1;
[0690] S2 is a single-stranded spacer region between L1 and L2; and, S3 is a single-stranded spacer region between L3 and the a1/a2 stem;
[0691] the conserved nucleotides are as shown in FIG. 7, and wherein the colored circled nucleotides are present at the respective levels of certainty (e.g., at least about 97% of the red-circled nucleotides, at least about 90-97% of the black-circled nucleotides, at least about 75-90% of the grey-circled nucleotides, and at least about 50% of the white-circled nucleotides are present).

[0692] In some embodiments, the engineered retron is entirely synthetically produced and having the conserved nucleotides as denoted by the colored letters as shown in FIG. 7.

### Type IIA3 Retron (FIG. 8)

[0693] In some embodiments, the template/wt retron for the subject engineered retron encodes a wild-type retron ncRNA polynucleotide having a consensus secondary structure that can be described as:

[chemical structure]

wherein:
[0694] a1/a2 is a stem 6 bps in length;
[0695] L1 is a stem of 8 bps with a 9-nt tip;
[0696] L2 is a stem of 8 bps with a 3-nt tip;
[0697] S1 is a single-stranded spacer region between a1/a2 and L1;
[0698] S2 is a single-stranded spacer region between L2 and L3;
[0699] S3 is a single-stranded spacer region between L3 and a1/a2,
[0700] the conserved nucleotides are as shown in FIG. 8, and wherein the colored circled nucleotides are present at the respective levels of certainty (e.g., at least about 97% of the red-circled nucleotides, at least about 90-97% of the black-circled nucleotides, at least about 75-90% of the grey-circled nucleotides, and at least about 50% of the white-circled nucleotides are present).

[0701] In some embodiments, the engineered retron is entirely synthetically produced and having the conserved nucleotides as denoted by the colored letters as shown in FIG. 8.

### Type IIA4 Retron (FIG. 9)

[0702] In some embodiments, the template/wt retron for the subject engineered retron encodes a wild-type retron ncRNA polynucleotide having a consensus secondary structure that can be described as:

[chemical structure]

wherein:
[0703] a1/a2 is a stem 3 bp in length with no overhangs and a 7-nt tip;
[0704] L1 is a stem of 7 bps with a 3-nt tip;
[0705] L2 is a stem of 6 bps with a 4-nt tip;
[0706] L3 is a stem of 40 bps with a 5-nt tip, and a 2/2 bulge 3 bps from the tip, a 5/4 bulge 10 bps from the tip, and a 12/15 bulge 30 bps from the tip;
[0707] L4 is a stem of 4 bps with a 9-nt tip;
[0708] S1 is a single-stranded spacer region between L1 and L2/L3;
[0709] S2 is a single-stranded spacer region between L2/L3 and L4;
[0710] S3 is a single-stranded spacer region between L4 and the 3′ end of the ncRNA; and
[0711] the conserved nucleotides are as shown in FIG. 9, and wherein the colored circled nucleotides are present at the respective levels of certainty (e.g., at least about 97% of the red-circled nucleotides, at least about 90-97% of the black-circled nucleotides, at least about 75-90% of the grey-circled nucleotides, and at least about 50% of the white-circled nucleotides are present).

[0712] In some embodiments, the engineered retron is entirely synthetically produced and having the conserved nucleotides as denoted by the colored letters as shown in FIG. 9.

### Type IIA5 Novel Retron (FIG. 10)

[0713] In some embodiments, the template/wt retron for the subject engineered retron encodes a wild-type retron ncRNA polynucleotide having a consensus secondary structure that can be described as:

[chemical structure]

wherein:
[0714] a1/a2 is a stem 15 bps in length with a 1-nt overhang on al, a 13-nt overhang on a2, and a 7/5 bulge 13-nt from the tip;
[0715] L1 is a stem of 10 bps with a 3-nt tip;
[0716] L2 is a stem of 35 bps with a 3-nt tip;
[0717] L3 is a stem of 6 bps with a 5-nt tip;
[0718] S1 is a single-stranded spacer region between a1/a2 and L1;
[0719] S2 is a single-stranded spacer region between L1 and L2;
[0720] S3 is a single-stranded spacer region between L2 and L3;
[0721] S4 is a single-stranded spacer region between L3 and a1/a2,
[0722] the conserved nucleotides are as shown in FIG. 10, and wherein the colored circled nucleotides are present at the respective levels of certainty (e.g., at least about 97% of the red-circled nucleotides, at least about 90-97% of the black-circled nucleotides, at least about 75-90% of the grey-circled nucleotides, and at least about 50% of the white-circled nucleotides are present).

[0723] In some embodiments, the engineered retron is entirely synthetically produced and having the conserved nucleotides as denoted by the colored letters as shown in FIG. 10.

### Type IIIA1 Retron (FIG. 11)

[0724] In some embodiments, the template/wt retron for the subject engineered retron encodes a wild-type retron ncRNA polynucleotide having a consensus secondary structure that can be described as:

[chemical structure]

wherein:
[0725] a1/a2 is a stem 2 bps in length with a 1-nt overhang on a2;
[0726] L1 is a stem of 8 bps with a 4-nt tip;
[0727] L2 is a stem of 9 bps with a 3-nt tip and a 1/1 bulge 3 bps from the tip;
[0728] L3 is a stem of 20 bps with a 3-nt tip and a 1/2 bulge 3 bps from the tip;
[0729] S1 is a single-stranded spacer region between a1/a2 and L1;
[0730] S2 is a single-stranded spacer region between L2 and L3;
[0731] S3 is a single-stranded spacer region between L3 and a1/a2,
[0732] the conserved nucleotides are as shown in FIG. 11, and wherein the colored circled nucleotides are present at the respective levels of certainty (e.g., at least about 97% of the red-circled nucleotides, at least about 90-97% of the black-circled nucleotides, at least about 75-90% of the grey-circled nucleotides, and at least about 50% of the white-circled nucleotides are present).

[0733] In some embodiments, the engineered retron is entirely synthetically produced and having the conserved nucleotides as denoted by the colored letters as shown in FIG. 11.

### Type IIIA2 Retron (FIG. 12)

[0734] In some embodiments, the template/wt retron for the subject engineered retron encodes a wild-type retron ncRNA polynucleotide having a consensus secondary structure that can be described as:

[chemical structure]

wherein:
[0735] a1/a2 is a stem 15 bp in length;
[0736] L1 is a stem of 6 bps with a 4-nt tip;
[0737] L2 is a stem of 13 bps with a 5-nt tip;
[0738] L3 is a stem of 4 bps with a 8-nt tip;
[0739] L4 is a stem of 20 bps with a 4-nt tip and a 2/2 bulge 6 bp from the tip;
[0740] S1 is a single-stranded spacer region between a1/a2 and L1;
[0741] S2 is a single-stranded spacer region between L1 and L2;
[0742] S3 is a single-stranded spacer region between L2 and L3;
[0743] S4 is a single-stranded spacer region between L3 and L4;
[0744] S5 is a single-stranded spacer region between L4 and a1/a2;
[0745] the conserved nucleotides are as shown in FIG. 12, and wherein the colored circled nucleotides are present at the respective levels of certainty (e.g., at least about 97% of the red-circled nucleotides, at least about 90-97% of the black-circled nucleotides, at least about 75-90% of the grey-circled nucleotides, and at least about 50% of the white-circled nucleotides are present).

[0746] In some embodiments, the engineered retron is entirely synthetically produced and having the conserved nucleotides as denoted by the colored letters as shown in FIG. 12.

### Type IIIA3 Retron (FIG. 13)

[0747] In some embodiments, the template/wt retron for the subject engineered retron encodes a wild-type retron ncRNA polynucleotide having a consensus secondary structure that can be described as:

[chemical structure]

wherein:
[0748] a1/a2 is a stem 24 bps in length and having a 1/0 bulge 15 bps from the tip, and a 1/1 bulge 19 bps from the tip;
[0749] L1 is a stem of 7 bps with a 4-nt tip;
[0750] L2 is a stem of 9 bps with a 8-nt tip;
[0751] L3 is a stem of 8 bps with a 4-nt tip;
[0752] L4 is a stem of 4 bps with a 9-nt tip, and a 2/2 bulge 3 bps from the tip;
[0753] L5 is a stem of 19 bps with a 18-nt tip;
[0754] L6 is a stem of 5 bps with a 3-nt tip;
[0755] S1 is a single-stranded spacer region between a1/a2 and L1;
[0756] S2 is a single-stranded spacer region between L1 and L2;
[0757] S3 is a single-stranded spacer region between L2 and L3;
[0758] S4 is a single-stranded spacer region between L3 and L4;
[0759] S5 is a single-stranded spacer region between L6 and a1/a2;
[0760] the conserved nucleotides are as shown in FIG. 13, and wherein the colored circled nucleotides are present at the respective levels of certainty (e.g., at least about 97% of the red-circled nucleotides, at least about 90-97% of the black-circled nucleotides, at least about 75-90% of the grey-circled nucleotides, and at least about 50% of the white-circled nucleotides are present).

[0761] In some embodiments, the engineered retron is entirely synthetically produced and having the conserved nucleotides as denoted by the colored letters as shown in FIG. 13.

### Type IIIA4 Retron (FIG. 14)

[0762] In some embodiments, the template/wt retron for the subject engineered retron encodes a wild-type retron ncRNA polynucleotide having a consensus secondary structure that can be described as:

[chemical structure]

wherein:
[0763] a1/a2 is a stem 5 bps in length with a 1/2 bulge 2 bps from the tip;
[0764] L1 is a stem of 8 bps with a 6-nt tip;
[0765] L2 is a stem of 8 bps with a 5-nt tip;
[0766] L3 is a stem of 13 bps with a 14-nt tip and a 1/0 bulge 2 bps from the tip;
[0767] S1 is a single-stranded spacer region between a1/a2 and L1;
[0768] S2 is a single-stranded spacer region between L1 and L2;
[0769] S3 is a single-stranded spacer region between L2 and L3: S4 is a single-stranded spacer region between L3 and a1/a2,
[0770] the conserved nucleotides are as shown in SEQ ID NO: 19 and FIG. 20, and wherein the colored circled nucleotides are present at the respective levels of certainty (e.g., at least about 97% of the red-circled nucleotides, at least about 90-97% of the black-circled nucleotides, at least about 75-90% of the grey-circled nucleotides, and at least about 50% of the white-circled nucleotides are present).

[0771] In some embodiments, the engineered retron is entirely synthetically produced and having the conserved nucleotides as denoted by the colored letters as shown in FIG. 14.

### Type IIIA5 Retron (FIG. 15)

[0772] In some embodiments, the template/wt retron for the subject engineered retron encodes a wild-type retron ncRNA polynucleotide having a consensus secondary structure that can be described as:

[chemical structure]

wherein:
[0773] the a1/a2 stem is 11 bp in length with no overhang;
[0774] L1 is a stem of 9 bps with a 3-nt tip;
[0775] L2 is a stem of 14 bps with a 5-nt tip;
[0776] L3 is a stem of 9 bps with a 7-nt tip;
[0777] L4 is a stem of 15 bps with a 7-nt tip;
[0778] S1, S2, and S3 are single-stranded spacer regions between the a1/a2 stem and L1, L2 and L3, and L4 and the a1/a2 stem, respectively, with no spacer between L1 and L2, and no spacer between L2 and L3; wherein the 5^{th}-2^{nd} last nts of S2 and the 3^{rd}-6^{th} nts of S3 forms a 4-bp stem, and,
[0779] the conserved nucleotides are as shown in FIG. 15, and wherein the colored circled nucleotides are present at the respective levels of certainty (e.g., at least about 97% of the red-circled nucleotides, at least about 90-97% of the black-circled nucleotides, at least about 75-90% of the grey-circled nucleotides, and at least about 50% of the white-circled nucleotides are present).

[0780] In some embodiments, the engineered retron is entirely synthetically produced and having the conserved nucleotides as denoted by the colored letters as shown in FIG. 15.

### Type IIIunk Retron (FIG. 16)

[0781] In some embodiments, the template/wt retron for the subject engineered retron encodes a wild-type retron ncRNA polynucleotide having a consensus secondary structure that can be described as:

[chemical structure]

wherein:
[0782] a1/a2 is a stem 11 bps in length;
[0783] L1 is a stem of 12 bps with a 2-nt tip;
[0784] L2 is a stem of 21 bps with a 1-nt tip;
[0785] L3 is a stem of 20 bps with a 4-nt tip;
[0786] S1 is a single-stranded spacer region between a1/a2 and L1;
[0787] S2 is a single-stranded spacer region between L1 and L2;
[0788] S3 is a single-stranded spacer region between L2 and L3;
[0789] S4 is a single-stranded spacer region between L3 and a1/a2,
[0790] the conserved nucleotides are as shown in FIG. 16, and wherein the colored circled nucleotides are present at the respective levels of certainty (e.g., at least about 97% of the red-circled nucleotides, at least about 90-97% of the black-circled nucleotides, at least about 75-90% of the grey-circled nucleotides, and at least about 50% of the white-circled nucleotides are present).

[0791] In some embodiments, the engineered retron is entirely synthetically produced and having the conserved nucleotides as denoted by the colored letters as shown in FIG. 16.

### Type IV Retron (FIG. 17)

[0792] In some embodiments, the template/wt retron for the subject engineered retron encodes a wild-type retron ncRNA polynucleotide having a consensus secondary structure that can be described as:

[chemical structure]

wherein:
[0793] a1/a2 is a stem 9 bp in length with no overhang;
[0794] L1 is a stem of 5 bps with a 6-nt tip;
[0795] L2 is a stem of 9 bps with a 4-nt tip;
[0796] L3 is a stem of 26 bps with a 5-nt tip, a 0/1 bulge 7 bps from the tip, and a 0/1 bulge 9 bps from the tip;
[0797] S1 is a single-stranded spacer region between the a1/a2 stem and L1, with no spacer region between L1 and L2;
[0798] S2 is a single-stranded spacer region between L2 and L3; and, S3 is a single-stranded spacer region between L3 and the a1/a2 stem;
[0799] the conserved nucleotides are as shown in FIG. 17, and wherein the colored circled nucleotides are present at the respective levels of certainty (e.g., at least about 97% of the red-circled nucleotides, at least about 90-97% of the black-circled nucleotides, at least about 75-90% of the grey-circled nucleotides, and at least about 50% of the white-circled nucleotides are present).

[0800] In some embodiments, the engineered retron is entirely synthetically produced and having the conserved nucleotides as denoted by the colored letters as shown in FIG. 17.

### Type IX Retron (FIG. 18)

[0801] In some embodiments, the template/wt retron for the subject engineered retron encodes a wild-type retron ncRNA polynucleotide having a consensus secondary structure that can be described as:

[chemical structure]

wherein:
[0802] a1/a2 is a stem 12 bp in length, wherein al has a 14-nt overhang and a2 has a 2-nt overhang;
[0803] L1 is a stem of 11 bps with a 3-nt tip and a 1/3 bulge 7 bp from the tip;
[0804] L2 is a stem of 25 bps with a 7-nt tip;
[0805] S1 is a single-stranded spacer region between L1 and L2;
[0806] S2 is a single-stranded spacer region between L2 and a1/a2;
[0807] the conserved nucleotides are as shown in FIG. 18, and wherein the colored circled nucleotides are present at the respective levels of certainty (e.g., at least about 97% of the red-circled nucleotides, at least about 90-97% of the black-circled nucleotides, at least about 75-90% of the grey-circled nucleotides, and at least about 50% of the white-circled nucleotides are present).

[0808] In some embodiments, the engineered retron is entirely synthetically produced and having the conserved nucleotides as denoted by the colored letters as shown in FIG. 18.

### Type V Retron (FIG. 19)

[0809] In some embodiments, the template/wt retron for the subject engineered retron encodes a wild-type retron ncRNA polynucleotide having a consensus secondary structure that can be described as:

[chemical structure]

wherein:
[0810] a1/a2 is a stem 13 bps in length;
[0811] L1 is a stem of 20 bps with a 4-nt tip and a 6/4 bulge 6 bps from the tip;
[0812] L2 is a stem of 14 bps with a 4-nt tip and a 1/0 bulge 5 bps from the tip;
[0813] S1 is a single-stranded spacer region between a1/a2 and L1;
[0814] S2 is a single-stranded spacer region between L1 and L2;
[0815] S3 is a single-stranded spacer region between L2 and a1/a2,
[0816] the conserved nucleotides are as shown in FIG. 19, and wherein the colored circled nucleotides are present at the respective levels of certainty (e.g., at least about 97% of the red-circled nucleotides, at least about 90-97% of the black-circled nucleotides, at least about 75-90% of the grey-circled nucleotides, and at least about 50% of the white-circled nucleotides are present).

[0817] In some embodiments, the engineered retron is entirely synthetically produced and having the conserved nucleotides as denoted by the colored letters as shown in FIG. 19.

### Type VI Retron (FIG. 20)

[0818] In some embodiments, the template/wt retron for the subject engineered retron encodes a wild-type retron ncRNA polynucleotide having a consensus secondary structure that can be described as:

[chemical structure]

wherein:
[0819] a1/a2 is a stem 4 bp in length with a 1 bp 5′ overhang;
[0820] L1 is a stem of 7 bps with a 4-nt tip;
[0821] L2 is a stem of 8 bps with a 4-nt tip;
[0822] L3 is a stem of 16 bps with a 6-nt tip, a 3/4 bulge 3 bps from the tip, a 2/3 bulge 5 bps from the tip, and a 3/1 bulge 8 bps from the tip;
[0823] S1 is a single-stranded spacer region between the a1/a2 stem and L1;
[0824] S2 is a single-stranded spacer region between L1 and L2;
[0825] S3 is a single-stranded spacer region between L2 and L3, with no spacer region between L3 and L4;
[0826] S4 is a single-stranded spacer region between L4 and the a1/a2 stem; and,
[0827] the conserved nucleotides are as shown in FIG. 20, and wherein the colored circled nucleotides are present at the respective levels of certainty (e.g., at least about 97% of the red-circled nucleotides, at least about 90-97% of the black-circled nucleotides, at least about 75-90% of the grey-circled nucleotides, and at least about 50% of the white-circled nucleotides are present).

[0828] In some embodiments, the engineered retron is entirely synthetically produced and having the conserved nucleotides as denoted by the colored letters as shown in FIG. 20.

### Type XI Group 1 Retron (FIG. 21)

[0829] In some embodiments, the template/wt retron for the subject engineered retron encodes a wild-type retron ncRNA polynucleotide having a consensus secondary structure that can be described as:

[chemical structure]

wherein:
[0830] a1/a2 is a stem 16 bps in length with a 5-nt overhang on al, and a 3-nt overhang on a2;
[0831] L1 is a stem of 9 bps with a 3-nt tip;
[0832] L2 is a stem of 7 bps with a 13-nt tip;
[0833] S1 is a single-stranded spacer region between a1/a2 and L1;
[0834] S2 is a single-stranded spacer region between L1 and L2;
[0835] S3 is a single-stranded spacer region between L2 and a1/a2,
[0836] the conserved nucleotides are as shown in FIG. 21, and wherein the colored circled nucleotides are present at the respective levels of certainty (e.g., at least about 97% of the red-circled nucleotides, at least about 90-97% of the black-circled nucleotides, at least about 75-90% of the grey-circled nucleotides, and at least about 50% of the white-circled nucleotides are present).

[0837] In some embodiments, the engineered retron is entirely synthetically produced and having the conserved nucleotides as denoted by the colored letters as shown in FIG. 21.

### Type XI Group 2 Retron (FIG. 22)

[0838] In some embodiments, the template/wt retron for the subject engineered retron encodes a wild-type retron ncRNA polynucleotide having a consensus secondary structure that can be described as:

[chemical structure]

wherein:
[0839] a1/a2 is a stem 13 bps in length with a 1-nt overhang on a2;
[0840] L1 is a stem of 7 bps with a 3-nt tip and a 2/2 bulge 1 bp from the tip;
[0841] L2 is a stem of 8 bps with a 20-nt tip;
[0842] S1 is a single-stranded spacer region between a1/a2 and L1;
[0843] S2 is a single-stranded spacer region between L1 and L2;
[0844] S3 is a single-stranded spacer region between L2 and a1/a2,
[0845] the conserved nucleotides are as shown in FIG. 22, and wherein the colored circled nucleotides are present at the respective levels of certainty (e.g., at least about 97% of the red-circled nucleotides, at least about 90-97% of the black-circled nucleotides, at least about 75-90% of the grey-circled nucleotides, and at least about 50% of the white-circled nucleotides are present).

[0846] In some embodiments, the engineered retron is entirely synthetically produced and having the conserved nucleotides as denoted by the colored letters as shown in FIG. 22.

### Type XII Retron (FIG. 23)

[0847] In some embodiments, the template/wt retron for the subject engineered retron encodes a wild-type retron ncRNA polynucleotide having a consensus secondary structure that can be described as:

[chemical structure]

wherein:
[0848] a1/a2 is a stem 13 bps in length with a 1-nt overhang on a2;
[0849] L1 is a stem of 7 bps with a 3-nt tip, and a 2/2 bulge 1 bp from the tip;
[0850] L2 is a stem of 8 bps with a 19-nt tip;
[0851] S1 is a single-stranded spacer region between a1/a2 and L1;
[0852] S2 is a single-stranded spacer region between L1 and L2;
[0853] S3 is a single-stranded spacer region between L2 and a1/a2,
[0854] the conserved nucleotides are as shown in FIG. 23, and wherein the colored circled nucleotides are present at the respective levels of certainty (e.g., at least about 97% of the red-circled nucleotides, at least about 90-97% of the black-circled nucleotides, at least about 75-90% of the grey-circled nucleotides, and at least about 50% of the white-circled nucleotides are present).

[0855] In some embodiments, the engineered retron is entirely synthetically produced and having the conserved nucleotides as denoted by the colored letters as shown in FIG. 23.

### Type XIII Retron (FIG. 24)

[0856] In some embodiments, the template/wt retron for the subject engineered retron encodes a wild-type retron ncRNA polynucleotide having a consensus secondary structure that can be described as:

[chemical structure]

wherein:
[0857] a1/a2 is a stem 7 bp in length with no overhangs;
[0858] L1 is a stem of 8 bps with a 3-nt tip;
[0859] L2 is a stem of 30 bps with a 8-nt tip, a 1/1 bulge 2 bps from the tip, and a 1/1 bulge 27 bps from the tip;
[0860] L3 is a stem of 8 bps with a 5-nt tip, and a 0/1 bulge 3 nt from the tip;
[0861] S1 is a single-stranded spacer region between the a1/a2 stem and L1;
[0862] S2 is a single-stranded spacer region between L1 and L2; and,
[0863] S3 is a single-stranded spacer region between L3 and the a1/a2 stem;
[0864] the conserved nucleotides are as shown in FIG. 24, and wherein the colored circled nucleotides are present at the respective levels of certainty (e.g., at least about 97% of the red-circled nucleotides, at least about 90-97% of the black-circled nucleotides, at least about 75-90% of the grey-circled nucleotides, and at least about 50% of the white-circled nucleotides are present).

[0865] In some embodiments, the engineered retron is entirely synthetically produced and having the conserved nucleotides as denoted by the colored letters as shown in FIG. 24.

### Type XIV Retron (FIG. 25)

[0866] In some embodiments, the template/wt retron for the subject engineered retron encodes a wild-type retron ncRNA polynucleotide having a consensus secondary structure that can be described as:

[chemical structure]

wherein:
[0867] the a1/a2 stem is 15 bp in length with no overhang, and a 4/2 bulge 7 bps from the 5′ end of al;
[0868] L1 is a stem of 8 bps with a 5-nt tip;
[0869] L2 is a stem of 7 bps with a 5-nt tip;
[0870] L3 is a stem of 13 bps with a 2-nt tip, a 5/9 bulge 5 bps from the tip, and a 5/5 bulge 8 bps from the tip;
[0871] S1, S2, and S3 are single-stranded spacer regions between the a1/a2 stem and L1, L2 and L3, and L3 and the a1/a2 stem, respectively, with no spacer between L1 and L2; and wherein the 5^{th}-3^{rd} last nts of S1 and the 2nd-5th 4 nts of S2 forms a 3-bp stem; and,
[0872] the conserved nucleotides are as shown in FIG. 25, and wherein the colored circled nucleotides are present at the respective levels of certainty (e.g., at least about 97% of the red-circled nucleotides, at least about 90-97% of the black-circled nucleotides, at least about 75-90% of the grey-circled nucleotides, and at least about 50% of the white-circled nucleotides are present).

[0873] In some embodiments, the engineered retron is entirely synthetically produced and having the conserved nucleotides as denoted by the colored letters as shown in FIG. 25.

### Ec107-Like Retron (FIG. 26)

[0874] In some embodiments, the template/wt retron for the subject engineered retron encodes a wild-type retron ncRNA polynucleotide having a consensus secondary structure that can be described as:

[chemical structure]

wherein:
[0875] a1/a2 is a stem 12 bp in length;
[0876] L1 is a stem of 4 bps with a 8-nt tip;
[0877] L2 is a stem of 8 bps with a 3-nt tip;
[0878] L3 is a stem of 22 bps with a 3-nt tip, a 4/6 bulge 6 bp from the tip, a 3/3 bulge 13 bp from the tip, and a 1/1 bulge 18 bp from the tip;
[0879] S1 is a single-stranded spacer region between a1/a2 and L1;
[0880] S2 is a single-stranded spacer region between L1 and L2;
[0881] S3 is a single-stranded spacer region between L2 and L3; and
[0882] S4 is a single-stranded spacer region between L3 and a1/a2,
[0883] the conserved nucleotides are as shown in FIG. 26, and wherein the colored circled nucleotides are present at the respective levels of certainty (e.g., at least about 97% of the red-circled nucleotides, at least about 90-97% of the black-circled nucleotides, at least about 75-90% of the grey-circled nucleotides, and at least about 50% of the white-circled nucleotides are present).

[0884] In some embodiments, the engineered retron is entirely synthetically produced and having the conserved nucleotides as denoted by the colored letters as shown in FIG. 26.

### Outgroup A Retron (FIG. 27)

[0885] In some embodiments, the template/wt retron for the subject engineered retron encodes a wild-type retron ncRNA polynucleotide having a consensus secondary structure that can be described as:

[chemical structure]

wherein:
[0886] a1/a2 is a stem 5 bps in length with a 2-nt overhang on a2;
[0887] L1 is a stem of 11 bps with a 4-nt tip;
[0888] L2 is a stem of 8 bps with a 3-nt tip;
[0889] L3 is a stem of 18 bps with a 3-nt tip;
[0890] S1 is a single-stranded spacer region between a1/a2 and L1;
[0891] S2 is a single-stranded spacer region between L1 and L2;
[0892] S3 is a single-stranded spacer region between L2 and L3;
[0893] S4 is a single-stranded spacer region between L3 and a1/a2,
[0894] the conserved nucleotides are as shown in FIG. 27, and wherein the colored circled nucleotides are present at the respective levels of certainty (e.g., at least about 97% of the red-circled nucleotides, at least about 90-97% of the black-circled nucleotides, at least about 75-90% of the grey-circled nucleotides, and at least about 50% of the white-circled nucleotides are present).

[0895] In some embodiments, the engineered retron is entirely synthetically produced and having the conserved nucleotides as denoted by the colored letters as shown in FIG. 27.

[0896] Amplification of an engineered retron described herein (e.g., in FIGS. 2-27) may be performed, for example, before transfection of cells or ligation into vectors. Any method for amplifying the engineered retron may be used, including, but not limited to polymerase chain reaction (PCR), isothermal amplification, nucleic acid sequence-based amplification (NASBA), transcription mediated amplification (TMA), strand displacement amplification (SDA), and ligase chain reaction (LCR). In one embodiment, the engineered retron comprise common 5′ and 3′ priming sites to allow amplification of retron sequences in parallel with a set of universal primers. In another embodiment, a set of selective primers is used to selectively amplify a subset of retron sequences from a pooled mixture.

[0897] Variants of these templates, which can also be used in the engineered retron of the invention, include a variant having: A) up to 1, 2, or 3 (e.g., up to 1) nucleotide changes per 10 red lettered-nucleotides; B) up to 4, 5, or 6 (e.g., up to 1 or 2) nucleotide changes per 10 black lettered-nucleotides; and/or C) up to 7, 8, or 9 (e.g., up to 3 or 4) nucleotide changes per 10 grey lettered-nucleotides; and/or optionally further comprising: a) 7, 8, 9, or 10 (e.g., 9 or 10) nucleotides present per 10 red-circled nucleotides; b) 6, 7, 8, 9, or 10 (e.g., 8, 9 or 10) nucleotides present per 10 black-circled nucleotides; c) 4, 5, 6, 7, 8, 9, or 10 (e.g., 6, 7, 8, 9 or 10) nucleotides present per 10 grey-circled nucleotides; and/or d) 2, 3, 4, 5, 6, 7, 8, 9, or 10 (e.g., 4, 5, 6, 7, 8, 9, or 10) nucleotides present per 10 white-circled nucleotides.

[0898] In some embodiments, the non-coding RNA (ncRNA) portion of the engineered retron comprises a polynucleotide (e.g., a DNA molecule) encoding an ncRNA listed in Table B, or an ncRNA having at least 50%, at least 55%, at least 60%, at least 65%, at least 70%, at least 75%, at least 80%, at least 85%, at least 90%, at least 91%, at least 92%, at least 93%, at least 94%, at least 95%, at least 96%, at least 97%, at least 98%, at least 99%, at least 99.1%, at least 99.2%, at least 99.3%, at least 99.4%, at least 99.5%, at least 99.6%, at least 99.7%, at least 99.8% or at least 99.9% sequence identity to an ncRNA listed in Table B. In some embodiments, the ncRNA does not comprise an ncRNA associated with the RT sequences of Table X.

Format of ncRNA and Guide RNA

[0899] In certain embodiments, the ncRNA and the guide RNA can be delivered as a single molecule, i.e., with the guide RNA fused to the 5′ and/or 3′ end of the ncRNA. The ncRNA may have guide RNAs located at both ends in some embodiments.

[0900] In other embodiments, the guide RNA and ncRNA may be provided and/or delivered as separate components. As shown in Example 4, separation of the guide RNA from the ncRNA can result in increased editing efficiency.

[0901] In still other embodiments, a ncRNA-gRNA fusion may be co-delivered with a separate guide RNA.

Modified ncRNAs

[0902] In still other embodiments, the ncRNAs disclosed herein may be modified by introducing additional RNA motifs into the ncRNAs, e.g., at the 5′ and 3′ termini of the ncRNAs, or even at positions therein between (e.g., in the msr or msd regions) to improve transcriptional production and/or stability and/or function (e.g., RT-DNA production). Such structures may include, but are not limited to RNA hairpins, RNA step-loops, RNA quadruplexes, cap structures, and poly(A) tails, or ribozyme functions and the like. Also, ncRNAs could also be modified to include one or more nuclear localization sequences.

[0903] Additional RNA motifs could also improve RT processivity of the ncRNA or enhance ncRNA activity by enhancing RT binding. Addition of dimerization motifs—such as kissing loops or a GNRA tetraloop/tetraloop receptor pair—at the 5′ and 3′ termini of the ncRNA could also result in effective circularization of the ncRNA, improving stability. Additionally, it is envisioned that addition of these motifs could enable the physical separation of ncRNA components, e.g., separation of the msr and msd regions. Short 5′ extensions or 3′ extensions to the ncRNA that form a small toehold hairpin at either or both ends of the ncRNA could also compete favorably against the annealing of intracomplementary regions along the length of the ncRNA. Finally, kissing loops could also be used to recruit other RNAs or proteins to the genomic site and enable swapping of RT activity from one RNA to the other.

[0904] ncRNAs could be further improved via directed evolution, in an analogous fashion to how protein function can be improved. Directed evolution could enhance ncRNA recognition by RT and/or reduce off-site targeting and/or indels and/or improve precise editing efficiency.

[0905] The present disclosure contemplates any such ways to further improve the stability and/or functionality of the ncRNAs disclosed here.

[0906] In some embodiments, the RNAs (including the guide RNAs and the ncRNAs) used in the compositions of the disclosure have undergone a chemical or biological modification to render them more stable. Exemplary modifications to an RNA include the depletion of a base (e.g., by deletion or by the substitution of one nucleotide for another) or modification of a base, for example, the chemical modification of a base. The phrase “chemical modifications” as used herein, includes modifications which introduce chemistries which differ from those seen in naturally occurring RNA, for example, covalent modifications such as the introduction of modified nucleotides, (e.g., nucleotide analogs, or the inclusion of pendant groups which are not naturally found in such mRNA molecules).

[0907] Other suitable polynucleotide modifications that may be incorporated into the RNAs used in the compositions of the disclosure include, but are not limited to, 4′-thio-modified bases: 4′-thio-adenosine, 4′-thio-guanosine, 4′-thio-cytidine, 4′-thio-uridine, 4′-thio-5-methyl-cytidine, 4′-thio-pseudouridine, and 4′-thio-2-thiouridine, pyridin-4-one ribonucleoside, 5-aza-uridine, 2-thio-5-aza-uridine, 2-thiouridine, 4-thio-pseudouridine, 2-thio-pseudouridine, 5-hydroxyuridine, 3-methyluridine, 5-carboxymethyl-uridine, 1-carboxymethyl-pseudouridine, 5-propynyl-uridine, 1-propynyl-pseudouridine, 5-taurinomethyluridine, 1-taurinomethyl-pseudouridine, 5-taurinomethyl-2-thio-uridine, 1-taurinomethyl-4-thio-uridine, 5-methyluridine, 1-methyl-pseudouridine, 4-thio-1-methyl-pseudouridine, 2-thio-1-methyl-pseudouridine, 1-methyl-1-deaza-pseudouridine, 2-thio-1-methyl-1-deaza-pseudouridine, dihydrouridine, dihydropseudouridine, 2-thio-dihydrouridine, 2-thio-dihydropseudouridine, 2-methoxyuridine, 2-methoxy-4-thio-uridine, 4-methoxy-pseudouridine, 4-methoxy-2-thio-pseudouridine, 5-aza-cytidine, pseudoisocytidine, 3-methyl-cytidine, N4-acetylcytidine, 5-formylcytidine, N4-methylcytidine, 5-hydroxymethylcytidine, 1-methyl-pseudoisocytidine, pyrrolo-cytidine, pyrrolo-pseudoisocytidine, 2-thio-cytidine, 2-thio-5-methyl-cytidine, 4-thio-pseudoisocytidine, 4-thio-1-methyl-pseudoisocytidine, 4-thio-1-methyl-1-deaza-pseudoisocytidine, 1-methyl-1-deaza-pseudoisocytidine, zebularine, 5-aza-zebularine, 5-methyl-zebularine, 5-aza-2-thio-zebularine, 2-thio-zebularine, 2-methoxy-cytidine, 2-methoxy-5-methyl-cytidine, 4-methoxy-pseudoisocytidine, 4-methoxy-1-methyl-pseudoisocytidine, 2-aminopurine, 2,6-diaminopurine, 7-deaza-adenine, 7-deaza-8-aza-adenine, 7-deaza-2-aminopurine, 7-deaza-8-aza-2-aminopurine, 7-deaza-2,6-diaminopurine, 7-deaza-8-aza-2,6-diaminopurine, 1-methyladenosine, N6-methyladenosine, N6-isopentenyladenosine, N6-(cis-hydroxyisopentenyl)adenosine, 2-methylthio-N6-(cis-hydroxyisopentenyl)adenosine, N6-glycinylcarbamoyladenosine, N6-threonylcarbamoyladenosine, 2-methylthio-N6-threonyl carbamoyladenosine, N6,N6-dimethyladenosine, 7-methyladenine, 2-methylthio-adenine, and 2-methoxy-adenine, inosine, 1-methyl-inosine, wyosine, wybutosine, 7-deaza-guanosine, 7-deaza-8-aza-guanosine, 6-thio-guanosine, 6-thio-7-deaza-guanosine, 6-thio-7-deaza-8-aza-guanosine, 7-methyl-guanosine, 6-thio-7-methyl-guanosine, 7-methylinosine, 6-methoxy-guanosine, 1-methylguanosine, N2-methylguanosine, N2,N2-dimethylguanosine, 8-oxo-guanosine, 7-methyl-8-oxo-guanosine, 1-methyl-6-thio-guanosine, N2-methyl-6-thio-guanosine, and N2,N2-dimethyl-6-thio-guanosine, and combinations thereof. The term modification also includes, for example, the incorporation of non-nucleotide linkages or modified nucleotides into the mRNA sequences of the present invention (e.g., modifications to one or both of the 3′ and 5′ ends of an mRNA molecule encoding a functional protein or enzyme). Such modifications include the addition of bases to an mRNA sequence (e.g., the inclusion of a poly A tail or a longer poly A tail), the alteration of the 3′ UTR or the 5′ UTR, complexing the mRNA with an agent (e.g., a protein or a complementary nucleic acid molecule), and inclusion of elements which change the structure of an RNA molecule (e.g., which form secondary structures).

[0908] In some embodiments, RNAs (e.g., ncRNAs) include a 5′ cap structure. A 5′ cap is typically added as follows: first, an RNA terminal phosphatase removes one of the terminal phosphate groups from the 5′ nucleotide, leaving two terminal phosphates; guanosine triphosphate (GTP) is then added to the terminal phosphates via a guanylyl transferase, producing a 5′5′5 triphosphate linkage; and the 7-nitrogen of guanine is then methylated by a methyltransferase. Examples of cap structures include, but are not limited to, m7G(5′)ppp (5′(A,G(5′)ppp(5′)A and G(5′)ppp(5′)G. Naturally occurring cap structures comprise a 7-methyl guanosine that is linked via a triphosphate bridge to the 5′-end of the first transcribed nucleotide, resulting in a dinucleotide cap of m7G(5′)ppp(5′)N, where N is any nucleoside. In vivo, the cap is added enzymatically. The cap is added in the nucleus and is catalyzed by the enzyme guanylyl transferase. The addition of the cap to the 5′ terminal end of RNA occurs immediately after initiation of transcription. The terminal nucleoside is typically a guanosine, and is in the reverse orientation to all the other nucleotides, i.e., G(5′)ppp(5′)GpNpNp.

[0909] Additional cap analogs include, but are not limited to, a chemical structures selected from the group consisting of m7GpppG, m7GpppA, m7GpppC; unmethylated cap analogs (e.g., GpppG); dimethylated cap analog (e.g., m2,7GpppG), trimethylated cap analog (e.g., m2,2,7GpppG), dimethylated symmetrical cap analogs (e.g., m7Gpppm7G), or anti reverse cap analogs (e.g., ARCA; m7,2′OmeGpppG, m72′dGpppG, m7,3′OmeGpppG, m7,3′dGpppG and their tetraphosphate derivatives) (see, e.g., Jemielity, J. et al., “Novel ‘anti-reverse’ cap analogs with superior translational properties”, RNA, 9: 1108-1122 (2003)).

[0910] Typically, the presence of a “tail” serves to protect the RNA (e.g., ncRNA) from exonuclease degradation. A poly A or poly U tail is thought to stabilize natural messengers and synthetic sense RNA. Therefore, in certain embodiments a long poly A or poly U tail can be added to an RNA molecule thus rendering the RNA more stable. Poly A or poly U tails can be added using a variety of art-recognized techniques. For example, long poly A tails can be added to synthetic or in vitro transcribed RNA using poly A polymerase (Yokoe, et al. Nature Biotechnology. 1996; 14: 1252-1256). A transcription vector can also encode long poly A tails. In addition, poly A tails can be added by transcription directly from PCR products. Poly A may also be ligated to the 3′ end of a sense RNA with RNA ligase (see, e.g., Molecular Cloning A Laboratory Manual, 2nd Ed., ed. by Sambrook, Fritsch and Maniatis (Cold Spring Harbor Laboratory Press: 1991 edition)).

[0911] Typically, the length of a poly A or poly U tail can be at least about 10, 50, 100, 200, 300, 400 at least 500 nucleotides. In some embodiments, a poly-A tail on the 3′ terminus of mRNA typically includes about 10 to 300 adenosine nucleotides (e.g., about 10 to 200 adenosine nucleotides, about 10 to 150 adenosine nucleotides, about 10 to 100 adenosine nucleotides, about 20 to 70 adenosine nucleotides, or about 20 to 60 adenosine nucleotides). In some embodiments, mRNAs include a 3′ poly(C) tail structure. A suitable poly-C tail on the 3′ terminus of mRNA typically include about 10 to 200 cytosine nucleotides (e.g., about 10 to 150 cytosine nucleotides, about 10 to 100 cytosine nucleotides, about 20 to 70 cytosine nucleotides, about 20 to 60 cytosine nucleotides, or about 10 to 40 cytosine nucleotides). The poly-C tail may be added to the poly-A or poly U tail or may substitute the poly-A or poly U tail.

[0912] RNAs according to the present disclosure (e.g., ncRNAs) may be synthesized according to any of a variety of known methods. For example, RNAs according to the present invention may be synthesized via in vitro transcription (IVT). Briefly, IVT is typically performed with a linear or circular DNA template containing a promoter, a pool of ribonucleotide triphosphates, a buffer system that may include DTT and magnesium ions, and an appropriate RNA polymerase (e.g., T3, T7 or SP6 RNA polymerase), DNAse I, pyrophosphatase, and/or RNAse inhibitor. The exact conditions will vary according to the specific application. An improved method of IVT of a ncRNA is disclosed in Example 5 herein.

[0913] In a particular embodiment (as exemplified in Example 6 herein), the ncRNAs can comprise an MS2 modification, as specific RNA hairpin structure recognized in nature by a certain MS2-binding protein. This domain can help to stabilize the ncRNA and improve the editing efficiency. The disclosure contemplates other similar modifications. A review of other such MS2-like domains are described in the art, for example, in Johansson et al., “RNA recognition by the MS2 phage coat protein,” Sem Virol., 1997, Vol. 8(3): 176-185; Delebecque et al., “Organization of intracellular reactions with rationally designed RNA assemblies,” Science, 2011, Vol. 333: 470-474; Mali et al., “Cas9 transcriptional activators for target specificity screening and paired nickases for cooperative genome engineering,” Nat. Biotechnol., 2013, Vol. 31: 833-838; and Zalatan et al., “Engineering complex synthetic transcriptional programs with CRISPR RNA scaffolds,” Cell, 2015, Vol. 160: 339-350, each of which are incorporated herein by reference in their entireties. Other systems include the PP7 hairpin, which specifically recruits the PCP protein, and the “com” hairpin, which specifically recruits the Com protein. See Zalatan et al. The nucleotide sequence of the MS2 hairpin (or equivalently referred to as the “MS2 aptamer”) is: GCCAACATGAGGATCACCCATGTCTGCAGGGCC (SEQ ID NO:19935).

### B. Heterologous Nucleotide Sequence (HNS)

[0914] The engineered retron may comprise or encode a heterologous nucleic acid (e.g., DNA or RNA) within the msr locus or the msd locus (such as in an S region or the tip of an L region in the consensus structure in any one of FIGS. 2-27, and variants thereof), or upstream or downstream of either the msr locus or the msd locus. In some embodiments, the heterologous nucleic acid is inserted within the msd locus. In some embodiments, the heterologous nucleic acid is inserted upstream of the msr locus. In some embodiments, the heterologous nucleic acid is inserted upstream or downstream of the msd locus. In other embodiments, the heterologous nucleic acid is inserted in spacer sequences (e.g., S1, S2, S3 and/or S4 as depicted in FIG. 2) between hairpin loops and/or within hairpin loops (e.g., L1, L2, L3 and/or L4 as depicted in FIG. 2), e.g., the tip or loop region, or within a bulge. In some embodiments, the heterologous nucleic acid sequence can be inserted in the tip of an L region or hairpin loop (e.g., L1, L2, L3 and/or L4 as depicted in FIG. 2). In some embodiments, one or more heterologous nucleic acids are inserted into the msd locus. In some embodiments, a first heterologous nucleic acid is inserted into the msd locus, and a second heterologous nucleic acid is inserted either upstream of the msr locus or upstream or downstream of the msd locus.

[0915] In some embodiments, the heterologous nucleic acid comprises flanking contiguous nucleotides (also referred to as homologous arms) that are substantially complementary to a target site genomic sequence of a cell to facilitate insertion of at least part of the heterologous nucleic acid into the genome of the cell at the target site via homology directed repair (HDR). In some embodiments, the heterologous nucleic acid is between >20 nucleotides and 10,000 nucleotides (e.g., including the flanking homologous arms).

[0916] In some embodiments, one or both of the homology arm(s) on the heterologous nucleic acid are 100% identical to a target genomic sequence. In some embodiments, one or both of the homology arm(s) on the heterologous nucleic acid are less than 100% complementary to the target genomic sequence, for example, 99%, 98%, 97%, 96%, 95%, 94%, 93%, 92%, 91%, or 90% identical to a target genomic sequence.

[0917] The part of the heterologous nucleic acid to be inserted into the target genome sequence is sometimes referred to as a donor sequence. The donor sequence may be partially identical to the full length or portions thereof of a target genomic sequence, or may be unrelated to the target genomic sequence. The donor sequence may be used, for example, to introduce modifications (e.g., substitutions, deletions, insertions, or a combination thereof) such as mutations or other genetic changes (e.g., genetic elements such as stop codons or a shift in an open reading frame on the target polynucleotide) into its target sequence.

[0918] In some embodiments, the heterologous nucleic acid sequence is or encodes a biologically active molecule such as, but not limited to, a therapeutic protein.

[0919] Any therapeutic proteins may be encoded by the heterologous nucleic acid.

[0920] In some embodiments, the heterologous nucleic acid sequences encodes one or more prophylactically- or therapeutically-active proteins, polypeptides, or other factors.

[0921] As a non-limiting example, the heterologous sequences may be or encode an agent that enhances tumor killing activity such as, but not limited to, TRAIL or tumor necrosis factor (TNF), in a cancer. As another non-limiting example, the heterologous sequences may be or encode an agent suitable for the treatment of conditions such as muscular dystrophy (e.g., heterologous sequences are or encode dystrophin or a functional fragment or variant thereof such as the numerous dystrophin minigenes or microdystrophine coding sequences known in the art), cardiovascular disease (e.g., heterologous sequences are or encode SERCA2a, GATA4, Tbx5, Mef2C, Hand2, Myocd, etc.), neurodegenerative disease (e.g., heterologous sequences is or encodes NGF, BDNF, GDNF, NT-3, etc.).

[0922] As additional non-limiting example, the heterologous nucleic acid sequence may be or encode an agent that enhances tumor killing activity such as, but not limited to, TRAIL or tumor necrosis factor (TNF), in a cancer. As another non-limiting example, the heterologous nucleic acid sequence may be or encode an agent suitable for the treatment of conditions such as muscular dystrophy (e.g., heterologous nucleic acid sequence is or encodes Dystrophin), cardiovascular disease (e.g., heterologous nucleic acid sequence is or encodes SERCA2a, GATA4, Tbx5, Mef2C, Hand2, Myocd, etc.), neurodegenerative disease (e.g., heterologous nucleic acid sequence is or encodes NGF, BDNF, GDNF, NT-3, etc.), chronic pain (e.g., heterologous nucleic acid sequence is or encodes GlyRal), an enkephalin, or a glutamate decarboxylase (e.g., heterologous nucleic acid sequence is or encodes GAD65, GAD67, or another isoform), lung disease (e.g., heterologous nucleic acid sequence is or encodes CFTR), hemophilia (e.g., heterologous nucleic acid sequence is or encodes Factor VIII or Factor IX), neoplasia (e.g., heterologous nucleic acid sequence is or encodes PTEN, ATM, ATR, EGFR, ERBB2, ERBB3, ERBB4, Notchl, Notch2, Notch3, Notch4, AKT, AKT2, AKT3, HIF, HI Fla, HIF3a, Met, HRG, Bcl2, PPARalpha, PPAR gamma, WT1 (Wilms Tumor), FGF Receptor Family members (5 members: 1, 2, 3, 4, 5), CDKN2a, APC, RB (retinoblastoma), MEN1, VHL, BRCA1, BRCA2, AR (Androgen Receptor), TSG101, IGF, IGF Receptor, Igfl (4 variants), Igf2 (3 variants), Igfl Receptor, Igf2 Receptor, Bax, Bcl2, caspases family (9 members: 1, 2, 3, 4, 6, 7, 8, 9, 12), Kras, Ape), age-related macular degeneration (e.g., heterologous nucleic acid sequence is or encodes Aber, Ccl2, Cc2, cp (ceruloplasmin), Timp3, cathepsin D, Vldlr), schizophrenia (e.g., Neuregulin (Nrgl), Erb4 (receptor for Neuregulin), Complexin-1 (Cplxl), Tphl Tryptophan hydroxylase, Tph2 Tryptophan hydroxylase 2, Neurexin 1, GSK3, GSK3a, GSK3b, 5-HIT (Slc6a4), COMT, DRD (Drdla), SLC6A3, DAOA, DTNBPI, Dao (Daol)), trinucleotide repeat disorders (e.g., HTT (Huntington's Dx), SBMA/SMAXI/AR (Kennedy's Dx), FXN/X25 (Friedrich's Ataxia), ATX3 (Machado-Joseph's Dx), ATXNI and ATXN2 (spinocerebellar ataxias), DMPK (myotonic dystrophy), Atrophin-1 and Atnl(DRPLA Dx), CBP (Creb-BP-global instability), VLDLR (Alzheimer's), Atxn7, Atxn10), fragile X syndrome (e.g., heterologous nucleic acid sequence is or encodes FMR2, FXRI, FXR2, mGLUR5), secretase related disorders (e.g., heterologous nucleic acid sequence is or encodes APH-1 (alpha and beta), Presenilin (Psenl), nicastrin (Ncstn), PEN-2), ALS (e.g., heterologous nucleic acid sequence is or encodes SOD1, ALS2, STEX, FUS, TARD BP, VEGF (VEGF-a, VEGF-b, VEGF-c)), autism (e.g., heterologous nucleic acid sequence is or encodes Mecp2, BZRAP1, MDGA2, Sema5A, Neurexin 1), Alzheimer's disease (e.g., heterologous nucleic acid sequence is or encodes E1, CHIP, UCH, UBB, Tau, LRP, PICALM, Clusterin, PSI, SORL1, CR1, Vldlr, Ubal, Uba3, CHIP28 (Aqpl, Aquaporin 1), Uchll, Uchl3, APP), inflammation (e.g., heterologous nucleic acid sequence is or encodes IL-10, IL-1 (IL-Ia, IL-Ib), IL-13, IL-17 (IL-17a (CTLA8), IL-17b, IL-17c, IL-17d, IL-171), 11-23, Cx3crl, ptpn22, TNFa, NOD2/CARD15 for IBD, IL-6, IL-12 (IL-12a, IL-12b), CTLA4, Cx3cll), Parkinson's Disease (e.g., x-Synuclein, DJ-1, LRRK2, Parkin, PINK1), blood and coagulation disorders, such as, e.g., anemia, bare lymphocyte syndrome, bleeding disorders, hemophagocytic lymphohistiocytosis disorders, hemophilia A, hemophilia B, hemorrhagic disorders, leukocyte deficiencies and disorders, sickle cell anemia, and thalassemia (e.g., heterologous nucleic acid sequence is or encodes CRAN1, CDA1, RPS19, DBA, PKLR, PK1, NT5C3, UMPH1, PSNI, RHAG, RH50A, NRAMP2, SPTB, ALAS2, ANHI, ASB, ABCB7, ABC7, ASAT, TAPBP, TPSN, TAP2, ABCB3, PSF2, RING11, MHC2TA, C2TA, RFX5, RFXAP, RFX5, TBXA2R, P2RX1, P2X1, HF1, CFH, HUS, MCFD2, FANCA, FAC A, FA1, FA, FA A, FAAP95, FAAP90, FLJ34064, FANCB, FANCC, FACC, BRCA2, FANCDI, FANCD2, FANCD, FACD, FAD, FANCE, FACE, FANCF, XRCC9, FANCG, BR1PI, BACH1, FANCJ, PHF9, FANCL, FANCM, KIAA1596, PRF1, HPLH2, UNC13D, MUNC13-4, HPLH3, HLH3, FHL3, F8, FSC, PI, ATT, F5, ITGB2, CD18, LCAMB, LAD, EIF2B1, EIF2BA, EIF2B2, EIF2B3, EIF2B5, LVWM, CACH, CLE, EIF2B4, HBB, HBA2, HBB, HBD, LCRB, HBA1), B-cell non-Hodgkin lymphoma or leukemia (e.g., heterologous nucleic acid sequence is or encodes BCL7A, BCL7, ALI, TCL5, SCL, TAL2, FLT3, NBS1, NBS, ZNFN1AI, 1KI, LYF1, HOXD4, HOX4B, BCR, CML, PHL, ALL, ARNT, KRAS2, RASK2, GMPS, AFIO, ARHGEF12, LARG, KIAA0382, CALM, CLTH, CEBPA, CEBP, CHIC2, BTL, FLT3, KIT, PBT, LPP, NPMI, NUP214, D9S46E, CAN, CAIN, RUNXI, CBFA2, AMLI, WHSCILI, NSD3, FLT3, AF1Q, NPMI, NUMA1, ZNF145, PLZF, PML, MYL, STAT5B, AF1Q, CALM, CLTH, ARL11, ARLTSI, P2RX7, P2X7, BCR, CML, PHL, ALL, GRAF, NF1, VRNF, WSS, NFNS, PTPNII, PTP2C, SHP2, NS1, BCL2, CCND1, PRAD1, BCL1, TCRA, GATA1, GF1, ERYF1, NFE1, ABLI, NQO1, DIA4, NMOR1, NUP214, D9S46E, CAN, CAIN), inflammation and immune related diseases and disorders (e.g., heterologous nucleic acid sequence is or encodes KIR3DL1, NKAT3, NKB1, AMB11, K1R3DS1, IFNG, CXCL12, TNFRSF6, APT1, FAS, CD95, ALPS1A, IL2RG, SCIDX1, SCIDX, IMD4, CCL5, SCYA5, D17S136E, TCP228, IL10, CSIF, CMKBR2, CCR2, CMKBR5, CCCKR5 (CCR5), CD3E, CD3G, AICDA, AID, HIGM2, TNFRSF5, CD40, UNG, DGU, HIGM4, TNFSFS, CD40LG, HIGM1, IGM, FOXP3, IPEX, AIID, XPID, PIDX, TNFRSF14B, TACI), inflammation (e.g., heterologous nucleic acid sequence is or encodes IL-10, IL-1 (IL-IA, IL-IB), IL-13, IL-17 (IL-17a (CTLA8), IL-17b, IL-17c, IL-17d, IL-171), 11-23, Cx3crl, ptpn22, TNFa, NOD2/CARD15 for IBD, IL-6, IL-12 (IL-12a, IL-12b), CTLA4, Cx3cII), JAK3, JAKL, DCLREIC, ARTEMIS, SCIDA, RAG1, RAG2, ADA, PTPRC, CD45, LCA, IL7R, CD3D, T3D, IL2RG, SCIDXI, SCIDX, IMD4), metabolic, liver, kidney and protein diseases and disorders (e.g., heterologous nucleic acid sequence is or encodes TTR, PALB, APOA1, APP, AAA, CVAP, ADI, GSN, FGA, LYZ, TTR, PALB, KRT18, KRT8, CIRHIA, NAIC, TEX292, KIAA1988, CFTR, ABCC7, CF, MRP7, SLC2A2, GLUT2, G6PC, G6PT, G6PT1, GAA, LAMP2, LAMPB, AGL, GDE, GBE1, GYS2, PYGL, PFKM, TCF1, HNF1A, MODY3, SCOD1, SCOI, CTNNB1, PDGFRL, PDGRL, PRLTS, AX1NI, AXIN, CTNNB1, TP53, P53, LFS1, IGF2R, MPRI, MET, CASP8, MCH5, UMOD, HNFJ, FJHN, MCKD2, ADMCKD2, PAH, PKU1, QDPR, DHPR, PTS, FCYT, PKHD1, ARPKD, PKD1, PKD2, PKD4, PKDTS, PRKCSH, G19P1, PCLD, SEC63), muscular/skeletal diseases and disorders (e.g., heterologous nucleic acid sequence is or encodes DMD, BMD, MYF6, LMNA, LMN1, EMD2, FPLD, CMDIA, HGPS, LGMDIB, LMNA, LMNI, EMD2, FPLD, CMDIA, FSHMD IA, FSHD1A, FKRP, MDC IC, LGMD2I, LAMA2, LAMM, LARGE, KIAA0609, MDC1D, FCMD, TTID, MYOT, CAPN3, CANP3, DYSF, LGMD2B, SGCG, LGMD2C, DMDA1, SCG3, SGCA, ADL, DAG2, LGMD2D, DMDA2, SGCB, LGMD2E, SGCD, SGD, LGMD2F, CMD1L, TCAP, LGMD2G, CMD1N, TRIM32, HT2A, LGMD2H, FKRP, MDCIC, LGMD21, TTN, CMD1G, TMD, LGMD2J, POMT1, CAV3, LGMD1C, SEPN1, SELN, RSMD1, PLEC1, PLTN, EBS1, LRP5, BMNDI, LRP7, LR3, OPPG, VBCH2, CLCN7, CLC7, OPTA2, OSTMI, GL, TCIRG1, TIRC7, OC116, OPTB1, VAPB, VAPC, ALS8, SMN1, SMA1, SMA2, SMA3, SMA4, BSCL2, SPG17, GARS, SMADI, CMT2D, HEXB, IGHMBP2, SMUBP2, CATF1, SMARD1), neurological and neuronal diseases and disorders (e.g., heterologous nucleic acid sequence is or encodes SOD1, ALS2, STEX, FUS, TARDBP, VEGF (VEGF-a, VEGF-b, VEGF-c), APP, AAA, CVAP, ADI, APOE, AD2, PSEN2, AD4, STM2, APBB2, FE65L1, NOS3, PLAU, URK, ACE, DCPI, ACEI, MPO, PACIPI, PAXIPIL, PTIP, A2M, BLMH, BMH, PSEN1, AD3, Mecp2, BZRAP1, MDGA2, Sema5A, Neurexin 1, GLOl, MECP2, RTT, PPMX, MRX16, MRX79, NLGN3, NLGN4, KIAA1260, AUTSX2, FMR2, FXR1, FXR2, mGLUR5, HD, IT15, PRNP, PRIP, JPH3, JP3, HDL2, TBP, SCA17, NR4A2, NURR1, NOT, TINUR, SNCAIP, TBP, SCA17, SNCA, NACP, PARK1, PARK4, DJI, PARK7, LRRK2, PARK8, PINKI, PARK6, UCHL1, PARK5, SNCA, NACP, PARK1, PARK4, PRKN, PARK2, PDJ, DBH, NDUFV2, MECP2, RTT, PPMX, MRX16, MRX79, CDKL5, STK9, MECP2, RTT, PPMX, MRX16, MRX79, x-Synuclein, DJ-1, Neuregulin-1 (Nrgl), Erb4 (receptor for Neuregulin), Complexin-1 (Cplxl), Tphl Tryptophan hydroxylase, Tph2, Tryptophan hydroxylase 2, Neurexin 1, GSK3, GSK3a, GSK3b, 5-HTT (Slc6a4), CONT, DRD (Drdla), SLC6A, DAOA, DTNBP1, Dao (Daol), APH-l(alpha and beta), Presenilin (Psenl), Nicastrin, (Ncstn), PEN-2, Nosl, Parpl, Natl, Nat2, HTT, SBMA/SMAX1/AR, FXN/X25, ATX3, TXN, ATXN2, DMPK, Atrophin-1, Atnl, CBP, VLDLR, Atxn7, and AtxnlO), and ocular diseases and disorders (e.g., Aber, Ccl2, Cc2, cp (ceruloplasmin), Timp3, cathepsin-D, Vldlr, Ccr2, CRYAA, CRYA1, CRYBB2, CRYB2, PITX3, BFSP2, CP49, CP47, CRYAA, CRYAI, PAX6, AN2, MGDA, CRYBAI, CRYB1, CRYGC, CRYG3, CCL, LIM2, MP19, CRYGD, CRYG4, BFSP2, CP49, CP47, HSF4, CTM, HSF4, CTM, MIP, AQPO, CRYAB, CRYA2, CTPP2, CRYBB1, CRYGD, CRYG4, CRYBB2, CRYB2, CRYGC, CRYG3, CCL, CRYAA, CRYAI, GJA8, CX50, CAE1, GJA3, CX46, CZP3, CAE3, CCM1, CAM, KRIT1, APOA1, TGFBI, CSD2, CDGG1, CSD, BIGH3, CDG2, TACSTD2, TROP2, MlSI, VSX1, RINX, PPCD, PPD, KTCN, COL8A2, FECD, PPCD2, PIP5K3, CFD, KERA, CNA2, MYOC, TIGR, GLCIA, JO AG, GPOA, OPTN, GLC1E, FIP2, HYPL, NRP, CYP1BI, GLC3A, OPA1, NTG, NPG, CYPIBI, GLC3A, CRB1, RP12, CRX, CORD2, CRD, RPGRIPI, LCA6, CORD9, RPE65, RP20, AIPL1, LCA4, GUCY2D, GUC2D, LCA1, CORD6, RDH12, LCA3, ELOVL4, ADMD, STGD2, STGD3, RDS, RP7, PRPH2, PRPH, AVMD, AOFMD, and VMD2).

[0923] In some embodiments, the heterologous nucleic acid sequence is or encodes a factor that can affect the differentiation of a cell. As a non-limiting example, the expression of one or more of Oct4, Klf4, Sox2, c-Myc, L-Myc, dominant-negative p53, Nanog, Glisl, Lin28, TFIID, mir-302/367, or other miRNAs can cause the cell to become an induced pluripotent stem (iPS) cell.

[0924] In some embodiments, the heterologous nucleic acid sequence is or encodes a factor for transdifferentiating cells. Non-limiting examples of factors include: one or more of GATA4, Tbx5, Mef2C, Myocd, Hand2, SRF, Mespl, SMARCD3 for cardiomyocytes; Ascii, Nurrl, LmxlA, Bm2, Mytll, NeuroDl, FoxA2 for neural cells; and Hnf4a, Foxal, Foxa2 or Foxa3 for hepatic cells.

[0925] In certain embodiments, the heterologous nucleic acid encodes a therapeutic antibody, or an antigen-binding fragment thereof.

[0926] In certain embodiments, the heterologous nucleic acid encodes a protein for replacement therapy. The protein may be defective in a disease cell or a disease organism/individual, and the wild-type protein or a functional fragment or variant thereof, when delivered by the heterologous nucleic acid to the disease cell/tissue/organism/individual, at least partially or fully restores the lost function of the protein the disease cell/tissue/organism/individual.

### HNS=Donor DNA Template

[0927] In some embodiments, the heterologous nucleic acid sequence is a donor DNA template that can be integrated into a host genome via HDR.

[0928] In some embodiments, the heterologous nucleic acid sequence is a donor DNA that can serve as a template or primer for recombineering during replication.

[0929] In certain embodiments, the heterologous nucleic acid comprises or encodes a donor/template sequence, wherein the donor/template corrects/repairs/removes a mutation at the target genome site. For example, the mutation may be a mutated exon in a disease gene.

[0930] In certain embodiments, the donor/template may encode or comprises a functional DNA element, such as a promoter, an enhancer, a protein binding sequence, a methylation site, or a homology region for assisting gene editing, etc.

[0931] By “donor DNA” or “donor DNA template” it is meant a single-stranded DNA to be inserted at a site cleaved by a gene-editing nuclease (e.g., a CRISPR/Cas effector protein; a TALEN; a ZFN) (e.g., after dsDNA cleavage, after nicking a target DNA, after dual nicking a target DNA, and the like). The donor DNA template can contain sufficient homology to a genomic sequence at the target site, e.g., 70%, 80%, 85%, 90%, 95%, or 100% homology with the nucleotide sequences flanking the target site, e.g. within about 50 bases or less of the target site, e.g. within about 30 bases, within about 15 bases, within about 10 bases, within about 5 bases, or immediately flanking the target site, to support homology-directed repair between it and the genomic sequence to which it bears homology.

[0932] Approximately 25, 50, 100, or 200 nucleotides, or more than 200 nucleotides, of sequence homology between a donor DNA template and a genomic sequence (or any integral value between 10 and 200 nucleotides, or more) can support homology-directed repair. Donor DNA template can be of any length, e.g., 50 nucleotides or more, 100 nucleotides or more, 250 nucleotides or more, 500 nucleotides or more, 1000 nucleotides or more, 5000 nucleotides or more, etc. A suitable donor DNA template can be from 50 nucleotides to 100 nucleotides, from 100 nucleotides to 500 nucleotides, from 500 nucleotides to 1000 nucleotides, from 1000 nucleotides to 5000 nucleotides, or from 5000 nucleotides to 10,000 nucleotides, or more than 10,000 nucleotides, in length.

[0933] As noted above, the donor DNA template comprises a first homology arm and a second homology arm. The first homology arm is at or near the 5′ end of the donor DNA; and comprises a nucleotide sequence that is at least partially complementary to a first nucleotide sequence in a target nucleic acid. The second homology arm is at or near the 3′ end of the donor DNA; and comprises a nucleotide sequence that is at least partially complementary to a second nucleotide sequence in the target nucleic acid. The first and second homology arms can each independently have a length of from about 10 nucleotides to 400 nucleotides; e.g., from 10 nucleotides (nt) to 15 nt, from 15 nt to 20 nt, from 20 nt to 25 nt, from 25 nt to 30 nt, from 30 nt to 35 nt, from 35 nt to 40 nt, from 40 nt to 45 nt, from 45 nt to 50 nt, from 50 nt to 75 nt, from 75 nt to 100 nt, from 100 nt to 125 nt, from 125 nt to 150 nt, from 150 nt to 175 nt, from 175 nt to 200 nt, from 200 nt to 225 nt, from 225 nt to 250 nt, from 250 nt to 275 nt, from 275 nt to 300 nt, from 325 nt to 350 nt, from 350 nt to 375 nt, or from 375 nt to 400 nt.

[0934] In certain embodiments, the donor DNA template is used for editing the target nucleotide sequence. In certain embodiments, the donor DNA template comprises one or more mutations to be introduced into the target polynucleotide. Examples of such mutations include substitutions, deletions, insertions, or a combination thereof. In certain embodiments, the mutation causes a shift in an open reading frame on the target polynucleotide. In certain embodiments, the donor polynucleotide alters a stop codon in the target polynucleotide. In certain embodiments, the donor polynucleotide corrects a premature stop codon. The correction can be achieved by deleting the stop codon, or by introducing one or more sequence changes to alter the stop codon to a codon. In certain embodiments, the donor polynucleotide addresses loss of function mutations, deletions, or translocations that may occur, for example, in certain disease contexts by inserting or restoring a functional copy of a gene, or functional fragment thereof, or a functional regulatory sequence or functional fragment of a regulatory sequence. A functional fragment includes a fragment less than the entire copy of a gene but otherwise provides sufficient nucleotide sequence to restore the functionality of a wild type gene or non-coding regulatory sequence (e.g., sequences encoding long non-coding RNA).

[0935] In certain embodiments, the donor DNA template may be used to replace a single allele of a defective gene or defective fragment thereof. In another embodiment, the donor DNA template is used to replace both alleles of a defective gene or defective gene fragment. A “defective gene” or “defective gene fragment” is a gene or portion of a gene that when expressed, fails to generate a functioning protein or non-coding RNA with functionality of the corresponding wild-type gene.

[0936] In certain example embodiments, these defective genes may be associated with one or more disease phenotypes. In certain example embodiments, the defective gene or gene fragment is not replaced but the heterologous nucleic acid is used to insert donor polynucleotides that encode gene or gene fragments that compensate for or override defective gene expression such that cell phenotypes associated with defective gene expression are eliminated or changed to a different or desired cellular phenotype. This can be achieved by including the coding sequence of a therapeutic protein, such as a therapeutic antibody or functional fragment thereof, or a wild-type version of a defective protein associated with one or more disease phenotypes.

[0937] In certain embodiments, the donor may include, but not be limited to, genes or gene fragments, encoding proteins or RNA transcripts to be expressed, regulatory elements, repair templates, and the like. According to the invention, the donor polynucleotides may comprise left end and right end sequence elements that function with transposition components that mediate insertion.

[0938] In certain embodiments, the donor DNA template manipulates a splicing site on the target polynucleotide. In certain embodiments, the donor DNA template disrupts a splicing site. The disruption may be achieved by inserting the polynucleotide to a splicing site and/or introducing one or more mutations to the splicing site. In certain embodiments, the donor polynucleotide may restore a splicing site. For example, the polynucleotide may comprise a splicing site sequence.

[0939] In certain embodiments, the donor DNA template to be inserted has a size from 10 bp to 50 kb in length, e.g., from 50 bp to ˜40 kb, from 100 bp to ˜30 kb, from 100 bp to ˜10 kb, from 100 bp to 300 bp, from 200 bp to 400 bp, from 300 bp to 500 bp, from 400 bp to 600 bp, from 500 bp to 700 bp, from 600 bp to 800 bp, from 700 bp to 900 bp, from 800 bp to 1000 bp, from 900 bp to 1100 bp, from 1000 bp to 1200 bp, from 1100 bp to 1300 bp, from 1200 bp to 1400 bp, from 1300 bp to 1500 bp, from 1400 bp to 1600 bp, from 1500 bp to 1700 bp, from 1600 bp to 1800 bp, from 1700 bp to 1900 bp, from 1800 bp to 2000 bp nucleotides in length.

[0940] In certain embodiments, the homologous arm on one or both ends of the sequence to be inserted is independently about 20 bp, 40 bp, 60 bp, 80 bp, 100 bp, 120 bp, or 150 bp.

[0941] The first homology arm and the second homology arm of the donor DNA flank a nucleotide sequence (“a nucleotide sequence of interest” or “an intervening nucleotide sequence”) that is to be introduced into a target nucleic acid. The nucleotide sequence of interest can comprise: i) a nucleotide sequence encoding a polypeptide of interest; ii) a nucleotide sequence encoding an exon of a gene; iii) a promoter sequence; iv) an enhancer sequence; v) a nucleotide sequence encoding a non-coding RNA; or vi) any combination of the foregoing.

[0942] The donor DNA can provide for gene correction, gene replacement, gene tagging, transgene insertion, nucleotide deletion, gene disruption, gene mutation, etc. For example, the donor DNA can be used to add, e.g., insert or replace, nucleic acid material to a target DNA (e.g. to “knock in” a nucleic acid that encodes a protein, an siRNA, an miRNA, etc.), to add a tag (e.g., 6× His, a fluorescent protein (e.g., a green fluorescent protein; a yellow fluorescent protein, etc.), hemagglutinin (HA), FLAG, etc.), to add a regulatory sequence to a gene (e.g. promoter, polyadenylation signal, internal ribosome entry sequence (IRES), 2A peptide, start codon, stop codon, splice signal, localization signal, enhancer, etc.), to modify a nucleic acid sequence (e.g., introduce a mutation), and the like. For example, the donor DNA can be used to modify DNA in a site-specific, i.e. “targeted”, way; for example gene knock-out, gene knock-in, gene editing, gene tagging, etc., as used in, for example, gene therapy, e.g. to treat a disease; or as an antiviral, antipathogenic, or anticancer therapeutic, the production of genetically modified organisms in agriculture, the large scale production of proteins by cells for therapeutic, diagnostic, or research purposes, the induction of pluripotent stem cells, biological research, the targeting of genes of pathogens for deletion or replacement, etc.

[0943] In some cases, the donor DNA comprises a nucleotide sequence encoding a polypeptide of interest. Polypeptides of interest include, e.g., a) functional versions of a polypeptide that comprises one or more amino acid substitutions, insertions, and/or deletions and that exhibits reduced function, e.g., where the reduced function is associated with or causes a pathological condition; b) fluorescent polypeptides; c) hormones; d) receptors for ligands; e) ion channels; f) neurotransmitters; g) and the like.

[0944] In some cases, the donor DNA comprises a nucleotide sequence that encodes a wild-type protein that is lacking in the recipient cell. In some cases, the donor DNA encodes a wild type factor (e.g. Factor VII, Factor VIII, Factor IX and the like) involved in coagulation. In some cases, the donor DNA comprises a nucleotide sequence that encodes a therapeutic antibody. In some cases, the donor DNA comprises a nucleotide sequence that encodes an engineered protein or receptor. In some cases, the engineered receptor is a T cell receptor (TCR), a natural killer (NK) receptor (NKR), or a B cell receptor (BCR). In some cases, the engineered TCR or NKR targets a cancer marker (e.g., a polypeptide that is expressed (e.g., over-expressed) on the surface of a cancer cell). In some cases, the donor DNA comprises a nucleotide sequence that encodes a chimeric antigen receptor (CAR). In some cases, the CAR targets a cancer marker. Donor DNAs encoding CAR, TCR, and/or NCR proteins may be folded into DNA origami structures (DNA nanostructures) and delivered into T cells or NK cells in vitro or in vivo.

[0945] Non-limiting examples of polypeptides that can be encoded by a donor DNA include, e.g., IL1B (interleukin 1, beta), XDH (xanthine dehydrogenase), TP53 (tumor protein p53), PTGIS (prostaglandin 12 (prostacyclin) synthase), MB (myoglobin), IL4 (interleukin 4), ANGPT1 (angiopoietin 1), ABCG8 (ATP-binding cassette, sub-family G (WHITE), member 8), CTSK (cathepsin K), PTGIR (prostaglandin 12 (prostacyclin) receptor (IP)), KCNJ11 (potassium inwardly-rectifying channel, subfamily J, member 11), INS (insulin), CRP (C-reactive protein, pentraxin-related), PDGFRB (platelet-derived growth factor receptor, beta polypeptide), CCNA2 (cyclin A2), PDGFB (platelet-derived growth factor beta polypeptide (simian sarcoma viral (v-sis) oncogene homolog)), KCNJ5 (potassium inwardly-rectifying channel, subfamily J, member 5), KCNN3 (potassium intermediate/small conductance calcium-activated channel, subfamily N, member 3), CAPN10 (calpain 10), PTGES (prostaglandin E synthase), ADRA2B (adrenergic, alpha-2B-, receptor), ABCG5 (ATP-binding cassette, sub-family G (WHITE), member 5), PRDX2 (peroxiredoxin 2), CAPN5 (calpain 5), PARP14 (poly (ADP-ribose) polymerase family, member 14), MEX3C (mex-3 homolog C (C. elegans)), ACE angiotensin I converting enzyme (peptidyl-dipeptidase A) 1), TNF (tumor necrosis factor (TNF superfamily, member 2)), IL6 (interleukin 6 (interferon, beta 2)), STN (statin), SERPINE1 (serpin peptidase inhibitor, clade E (nexin, plasminogen activator inhibitor type 1), member 1), ALB (albumin), ADIPOQ (adiponectin, C1Q and collagen domain containing), APOB (apolipoprotein B (including Ag(x) antigen)), APOE (apolipoprotein E), LEP (leptin), MTHFR (5,10-methylenetetrahydrofolate reductase (NADPH)), APOA1 (apolipoprotein A-I), EDN1 (endothelin 1), NPPB (natriuretic peptide precursor B), NOS3 (nitric oxide synthase 3 (endothelial cell)), PPARG (peroxisome proliferator-activated receptor gamma), PLAT (plasminogen activator, tissue), PTGS2 (prostaglandin-endoperoxide synthase 2 (prostaglandin G/H synthase and cyclooxygenase)), CETP (cholesteryl ester transfer protein, plasma), AGTR1 (angiotensin II receptor, type 1), HMGCR (3-hydroxy-3-methylglutaryl-Coenzyme A reductase), IGF1 (insulin-like growth factor 1 (somatomedin C)), SELE (selectin E), REN (renin), PPARA (peroxisome proliferator-activated receptor alpha), PON1 (paraoxonase 1), KNG1 (kininogen 1), CCL2 (chemokine (C-C motif) ligand 2), LPL (lipoprotein lipase), vWF (von Willebrand factor), F2 (coagulation factor II (thrombin)), ICAM1 (intercellular adhesion molecule 1), TGFB1 (transforming growth factor, beta 1), NPPA (natriuretic peptide precursor A), IL10 (interleukin 10), EPO (erythropoietin), SOD1 (superoxide dismutase 1, soluble), VCAMI1 (vascular cell adhesion molecule 1), IFNG (interferon, gamma), LPA (lipoprotein, Lp(a)), MPO (myeloperoxidase), ESR1 (estrogen receptor 1), MAPK1 (mitogen-activated protein kinase 1), HP (haptoglobin), F3 (coagulation factor III (thromboplastin, tissue factor)), CST3 (cystatin C), COG2 (component of oligomeric Golgi complex 2), MMP9 (matrix metallopeptidase 9 (gelatinase B, 92 kDa gelatinase, 92 kDa type IV collagenase)), SERPINC1 (serpin peptidase inhibitor, clade C (antithrombin), member 1), F8 (coagulation factor VIII, procoagulant component), HMOX1 (heme oxygenase (decycling) 1), APOC3 (apolipoprotein C-III), IL8 (interleukin 8), PROK (prokineticin 1), CBS (cystathionine-beta-synthase), NOS2 (nitric oxide synthase 2, inducible), TLR4 (toll-like receptor 4), SELP (selectin P (granule membrane protein 140 kDa, antigen CD62)), ABCA1 (ATP-binding cassette, sub-family A (ABC1), member 1), AGT (angiotensinogen (serpin peptidase inhibitor, clade A, member 8)), LDLR (low density lipoprotein receptor), GPT (glutamic-pyruvate transaminase (alanine aminotransferase)), VEGFA (vascular endothelial growth factor A), NR3C2 (nuclear receptor subfamily 3, group C, member 2), IL18 (interleukin 18 (interferon-gamma-inducing factor)), NOS1 (nitric oxide synthase 1 (neuronal)), NR3C1 (nuclear receptor subfamily 3, group C, member 1 (glucocorticoid receptor)), FGB (fibrinogen beta chain), HGF (hepatocyte growth factor (hepapoietin A; scatter factor)), ILIA (interleukin 1, alpha), RETN (resistin), AKT1 (v-akt murine thymoma viral oncogene homolog 1), LIPC (lipase, hepatic), HSPD1 (heat shock 60 kDa protein 1 (chaperonin)), MAPK14 (mitogen-activated protein kinase 14), SPP1 (secreted phosphoprotein 1), ITGB3 (integrin, beta 3 (platelet glycoprotein 111a, antigen CD61)), CAT (catalase), UTS2 (urotensin 2), THBD (thrombomodulin), F10 (coagulation factor X), CP (ceruloplasmin (ferroxidase)), TNFRSF11B (tumor necrosis factor receptor superfamily, member lib), EDNRA (endothelin receptor type A), EGFR (epidermal growth factor receptor (erythroblastic leukemia viral (v-erb-b) oncogene homolog, avian)), MMP2 (matrix metallopeptidase 2 (gelatinase A, 72 kDa gelatinase, 72 kDa type IV collagenase)), PLG (plasminogen), NPY (neuropeptide Y), RHOD (ras homolog gene family, member D), MAPK8 (mitogen-activated protein kinase 8), MYC (v-myc myelocytomatosis viral oncogene homolog (avian)), FN1 (fibronectin 1), CMA1 (chymase 1, mast cell), PLAU (plasminogen activator, urokinase), GNB3 (guanine nucleotide binding protein (G protein), beta polypeptide 3), ADRB2 (adrenergic, beta-2-, receptor, surface), APOA5 (apolipoprotein A-V), SOD2 (superoxide dismutase 2, mitochondrial), F5 (coagulation factor V (proaccelerin, labile factor)), VDR (vitamin D (1,25-dihydroxyvitamin D3) receptor), ALOX5 (arachidonate 5-lipoxygenase), HLA-DRB1 (major histocompatibility complex, class II, DR beta 1), PARP1 (poly (ADP-ribose) polymerase 1), CD40LG (CD40 ligand), PON2 (paraoxonase 2), AGER (advanced glycosylation end product-specific receptor), IRS1 (insulin receptor substrate 1), PTGS1 (prostaglandin-endoperoxide synthase 1 (prostaglandin G/H synthase and cyclooxygenase)), ECE1 (endothelin converting enzyme 1), F7 (coagulation factor VII (serum prothrombin conversion accelerator)), URN (interleukin 1 receptor antagonist), EPHX2 (epoxide hydrolase 2, cytoplasmic), IGFBP1 (insulin-like growth factor binding protein 1), MAPK10 (mitogen-activated protein kinase 10), FAS (Fas (TNF receptor superfamily, member 6)), ABCB1 (ATP-binding cassette, sub-family B (MDR/TAP), member 1), JUN (jun oncogene), IGFBP3 (insulin-like growth factor binding protein 3), CD14 (CD14 molecule), PDE5A (phosphodiesterase 5A, cGMP-specific), AGTR2 (angiotensin II receptor, type 2), CD40 (CD40 molecule, TNF receptor superfamily member 5), LCAT (lecithin-cholesterol acyltransferase), CCR5 (chemokine (C-C motif) receptor 5), MMP1 (matrix metallopeptidase 1 (interstitial collagenase)), TIMP1 (TIMP metallopeptidase inhibitor 1), ADM (adrenomedullin), DYT10 (dystonia 10), STAT3 (signal transducer and activator of transcription 3 (acute-phase response factor)), MMP3 (matrix metallopeptidase 3 (stromelysin 1, progelatinase)), ELN (elastin), USF1 (upstream transcription factor 1), CFH (complement factor H), HSPA4 (heat shock 70 kDa protein 4), MMP12 (matrix metallopeptidase 12 (macrophage elastase)), MME (membrane metallo-endopeptidase), F2R (coagulation factor II (thrombin) receptor), SELL (selectin L), CTSB (cathepsin B), ANXA5 (annexin A5), ADRB1 (adrenergic, beta-1-, receptor), CYBA (cytochrome b-245, alpha polypeptide), FGA (fibrinogen alpha chain), GGT1 (gamma-glutamyltransferase 1), LIPG (lipase, endothelial), HIFI A (hypoxia inducible factor 1, alpha subunit (basic helix-loop-helix transcription factor)), CXCR4 (chemokine (C-X-C motif) receptor 4), PROC (protein C (inactivator of coagulation factors Va and Villa)), SCARB1 (scavenger receptor class B, member 1), CD79A (CD79a molecule, immunoglobulin-associated alpha), PLTP (phospholipid transfer protein), ADD1 (adducin 1 (alpha)), FGG (fibrinogen gamma chain), SAA1 (serum amyloid Al), KCNH2 (potassium voltage-gated channel, subfamily H (eag-related), member 2), DPP4 (dipeptidyl-peptidase 4), G6PD (glucose-6-phosphate dehydrogenase), NPR1 (natriuretic peptide receptor A/guanylate cyclase A (atrionatriuretic peptide receptor A)), VTN (vitronectin), KIAA0101 (KIAA0101), FOS (FBJ murine osteosarcoma viral oncogene homolog), TLR2 (toll-like receptor 2), PPIG (peptidylprolyl isomer ase G (cyclophilin G)), IL1R1 (interleukin 1 receptor, type I), AR (androgen receptor), CYP1A1 (cytochrome P450, family 1, subfamily A, polypeptide 1), SERPINA1 (serpin peptidase inhibitor, clade A (alpha-1 antiproteinase, antitrypsin), member 1), MTR (5-methyltetrahydrofolate-homocysteine methyltransferase), RBP4 (retinol binding protein 4, plasma), APOA4 (apolipoprotein A-IV), CDKN2A (cyclin-dependent kinase inhibitor 2A (melanoma, p16, inhibits CDK4)), FGF2 (fibroblast growth factor 2 (basic)), EDNRB (endothelin receptor type B), ITGA2 (integrin, alpha 2 (CD49B, alpha 2 subunit of VLA-2 receptor)), CAB 1NI (calcineurin binding protein 1), SHBG (sex hormone-binding globulin), HMGB1 (high-mobility group box 1), HSP90B2P (heat shock protein 90 kDa beta (Grp94), member 2 (pseudogene)), CYP3A4 (cytochrome P450, family 3, subfamily A, polypeptide 4), GJA1 (gap junction protein, alpha 1, 43 kDa), CAV1 (caveolin 1, caveolae protein, 22 kDa), ESR2 (estrogen receptor 2 (ER beta)), LTA (lymphotoxin alpha (TNF superfamily, member 1)), GDF15 (growth differentiation factor 15), BDNF (brain-derived neurotrophic factor), CYP2D6 (cytochrome P450, family 2, subfamily D, polypeptide 6), NGF (nerve growth factor (beta polypeptide)), SP1 (Sp 1 transcription factor), TGIF1 (TGFB-induced factor homeobox 1), SRC (v-src sarcoma (Schmidt-Ruppin A-2) viral oncogene homolog (avian)), EGF (epidermal growth factor (beta-urogastrone)), PIK3CG (phosphoinositide-3-kinase, catalytic, gamma polypeptide), HLA-A (major histocompatibility complex, class I, A), KCNQ1 (potassium voltage-gated channel, KQT-like subfamily, member 1), CNR1 (cannabinoid receptor 1 (brain)), FBN1 (fibrillin 1), CHKA (choline kinase alpha), BEST1 (bestrophin 1), APP (amyloid beta (A4) precursor protein), CTNNB1 (catenin (cadherin-associated protein), beta 1, 88 kDa), IL2 (interleukin 2), CD36 (CD36 molecule (thrombospondin receptor)), PRKAB1 (protein kinase, AMP-activated, beta 1 non-catalytic subunit), TPO (thyroid peroxidase), ALDH7A1 (aldehyde dehydrogenase 7 family, member Al), CX3CR1 (chemokine (C-X3-C motif) receptor 1), TH (tyrosine hydroxylase), F9 (coagulation factor IX), GH1 (growth hormone 1), TF (transferrin), HFE (hemochromatosis), IE17A (interleukin 17A), PTEN (phosphatase and tensin homolog), GSTM1 (glutathione S-transferase mu 1), DMD (dystrophin), GATA4 (GATA binding protein 4), F13A1 (coagulation factor XIII, Al polypeptide), TTR (transthyretin), FABP4 (fatty acid binding protein 4, adipocyte), PON3 (paraoxonase 3), APOC1 (apolipoprotein C-I), INSR (insulin receptor), TNFRSF1B (tumor necrosis factor receptor superfamily, member IB), HTR2A (5-hydroxytryptamine (serotonin) receptor 2A), CSF3 (colony stimulating factor 3 (granulocyte)), CYP2C9 (cytochrome P450, family 2, subfamily C, polypeptide 9), TXN (thioredoxin), CYP11B2 (cytochrome P450, family 11, subfamily B, polypeptide 2), PTH (parathyroid hormone), CSF2 (colony stimulating factor 2 (granulocyte-macrophage)), KDR (kinase insert domain receptor (a type III receptor tyrosine kinase)), PLA2G2A (phospholipase A2, group IIA (platelets, synovial fluid)), B2M (beta-2-microglobulin), THBS1 (thrombospondin 1), GCG (glucagon), RHOA (ras homolog gene family, member A), ALDH2 (aldehyde dehydrogenase 2 family (mitochondrial)), TCF7L2 (transcription factor 7-like 2 (T-cell specific, HMG-box)), BDKRB2 (bradykinin receptor B2), NFE2L2 (nuclear factor (erythroid-derived 2)-like 2), NOTCH1 (Notch homolog 1, translocation-associated (Drosophila)), UGT1A1 (UDP glucuronosyltransferase 1 family, polypeptide Al), IFNA1 (interferon, alpha 1), PPARD (peroxisome proliferator-activated receptor delta), SIRT1 (sirtuin (silent mating type information regulation 2 homolog) 1 (S. cerevisiae)), GNRH1 (gonadotropin-releasing hormone 1 (luteinizing-releasing hormone)), PAPPA (pregnancy-associated plasma protein A, pappalysin 1), ARR3 (arrestin 3, retinal (X-arrestin)), NPPC (natriuretic peptide precursor C), AHSP (alpha hemoglobin stabilizing protein), PTK2 (PTK2 protein tyrosine kinase 2), IL13 (interleukin 13), MTOR (mechanistic target of rapamycin (serine/threonine kinase)), ITGB2 (integrin, beta 2 (complement component 3 receptor 3 and 4 subunit)), GSTT1 (glutathione S-transferase theta 1), IL6ST (interleukin 6 signal transducer (gpl30, oncostatin M receptor)), CPB2 (carboxypeptidase B2 (plasma)), CYP1A2 (cytochrome P450, family 1, subfamily A, polypeptide 2), HNF4A (hepatocyte nuclear factor 4, alpha), SLC6A4 (solute carrier family 6 (neurotransmitter transporter, serotonin), member 4), PLA2G6 (phospholipase A2, group VI (cytosolic, calcium-independent)), TNFSF11 (tumor necrosis factor (ligand) superfamily, member 11), SLC8A1 (solute carrier family 8 (sodium/calcium exchanger), member 1), F2RL1 (coagulation factor II (thrombin) receptor-like 1), AKR1A1 (aldo-keto reductase family 1, member A1 (aldehyde reductase)), ALDH9A1 (aldehyde dehydrogenase 9 family, member Al), BGLAP (bone gamma-carboxyglutamate (gla) protein), MTTP (microsomal triglyceride transfer protein), MTRR (5-methyltetrahydrofolate-homocysteine methyltransferase reductase), SULT1A3 (sulfotransferase family, cytosolic, IA, phenol-preferring, member 3), RAGE (renal tumor antigen), C4B (complement component 4B (Chido blood group), P2RY12 (purinergic receptor P2Y, G-protein coupled, 12), RNLS (renalase, FAD-dependent amine oxidase), CREBI (cAMP responsive element binding protein 1), POMC (proopiomelanocortin), RAC1 (ras-related C3 botulinum toxin substrate 1 (rho family, small GTP binding protein Racl)), LMNA (lamin NC), CD59 (CD59 molecule, complement regulatory protein), SCN5A (sodium channel, voltage-gated, type V, alpha subunit), CYP1B1 (cytochrome P450, family 1, subfamily B, polypeptide 1), MIF (macrophage migration inhibitory factor (glycosylation-inhibiting factor)), MMP13 (matrix metallopeptidase 13 (collagenase 3)), TIMP2 (TIMP metallopeptidase inhibitor 2), CYP19A1 (cytochrome P450, family 19, subfamily A, polypeptide 1), CYP21A2 (cytochrome P450, family 21, subfamily A, polypeptide 2), PTPN22 (protein tyrosine phosphatase, non-receptor type 22 (lymphoid)), MYH14 (myosin, heavy chain 14, non-muscle), MBL2 (mannose-binding lectin (protein C) 2, soluble (opsonic defect)), SELPLG (selectin P ligand), AOC3 (amine oxidase, copper containing 3 (vascular adhesion protein 1)), CTSL1 (cathepsin LI), PCNA (proliferating cell nuclear antigen), IGF2 (insulin like growth factor 2 (somatomedin A)), ITGB1 (integrin, beta 1 (fibronectin receptor, beta polypeptide, antigen CD29 includes MDF2, MSK12)), CAST (calpastatin), CXCL12 (chemokine (C-X-C motif) ligand 12 (stromal cell-derived factor 1)), IGHE (immunoglobulin heavy constant epsilon), KCNE1 (potassium voltage-gated channel, Isk-related family, member 1), TFRC (transferrin receptor (p90, CD71)), COL1A1 (collagen, type I, alpha 1), COLlA2 (collagen, type I, alpha 2), IL2RB (interleukin 2 receptor, beta), PLA2G10 (phospholipase A2, group X), ANGPT2 (angiopoietin 2), PROCR (protein C receptor, endothelial (EPCR)), NOX4 (NADPH oxidase 4), HAMP (hepcidin antimicrobial peptide), PTPN11 (protein tyrosine phosphatase, non-receptor type 11), SLC2A1 (solute carrier family 2 (facilitated glucose transporter), member 1), IL2RA (interleukin 2 receptor, alpha), CCL5 (chemokine (C-C motif) ligand 5), IRF1 (interferon regulatory factor 1), CFLAR (CASP8 and FADD-like apoptosis regulator), CALC A (calcitonin-related polypeptide alpha), EIF4E (eukaryotic translation initiation factor 4E), GSTP1 (glutathione S-transferase pi 1), JAK2 (Janus kinase 2), CYP3A5 (cytochrome P450, family 3, subfamily A, polypeptide 5), HSPG2 (heparan sulfate proteoglycan 2), CCL3 (chemokine (C-C motif) ligand 3), MYD88 (myeloid differentiation primary response gene (88)), VIP (vasoactive intestinal peptide), SOAT1 (sterol O-acyltransferase 1), ADRBK1 (adrenergic, beta, receptor kinase 1), NR4A2 (nuclear receptor subfamily 4, group A, member 2), MMP8 (matrix metallopeptidase 8 (neutrophil collagenase)), NPR2 (natriuretic peptide receptor B/guanylate cyclase B (atrionatriuretic peptide receptor B)), GCH1 (GTP cyclohydrolase 1), EPRS (glutamyl-prolyl-tRNA synthetase), PPARGC1A (peroxisome proliferator-activated receptor gamma, coactivator 1 alpha), F12 (coagulation factor XII (Hageman factor)), PEC AMI (platelet/endothelial cell adhesion molecule), CCL4 (chemokine (C-C motif) ligand 4), SERPINA3 (serpin peptidase inhibitor, clade A (alpha-1 antiproteinase, antitrypsin), member 3), CASR (calcium-sensing receptor), GJA5 (gap junction protein, alpha 5, 40 kDa), FABP2 (fatty acid binding protein 2, intestinal), TTF2 (transcription termination factor, RNA polymerase II), PROS1 (protein S (alpha)), CTF1 (cardiotrophin 1), SGCB (sarcoglycan, beta (43 kDa dystrophin-associated glycoprotein)), YME1L1 (YMEl-like 1 (S. cerevisiae)), CAMP (cathelicidin antimicrobial peptide), ZC3H12A (zinc finger CCCH-type containing 12A), AKR1B1 (aldo-keto reductase family 1, member B1 (aldose reductase)), DES (desmin), MMP7 (matrix metallopeptidase 7 (matrilysin, uterine)), AHR (aryl hydrocarbon receptor), CSF1 (colony stimulating factor 1 (macrophage)), HDAC9 (histone deacetylase 9), CTGF (connective tissue growth factor), KCNMA1 (potassium large conductance calcium-activated channel, subfamily M, alpha member 1), UGT1A (UDP glucuronosyltransferase 1 family, polypeptide A complex locus), PRKCA (protein kinase C, alpha), COMT (catechol-b-methyltransferase), S100B (S100 calcium binding protein B), EGR1 (early growth response 1), PRL (prolactin), IL15 (interleukin 15), DRD4 (dopamine receptor D4), CAMK2G (calcium/calmodulin-dependent protein kinase II gamma), SLC22A2 (solute carrier family 22 (organic cation transporter), member 2), CCL11 (chemokine (C-C motif) ligand 11), PGF (placental growth factor), THPO (thrombopoietin), GP6 (glycoprotein VI (platelet)), TACR1 (tachykinin receptor 1), NTS (neurotensin), HNF1A (HNF1 homeobox A), SST (somatostatin), KCND1 (potassium voltage-gated channel, Shal-related subfamily, member 1), LOC646627 (phospholipase inhibitor), TBXAS1 (thromboxane A synthase 1 (platelet)), CYP2J2 (cytochrome P450, family 2, subfamily J, polypeptide 2), TBXA2R (thromboxane A2 receptor), ADHIC (alcohol dehydrogenase 1C (class I), gamma polypeptide), ALOX12 (arachidonate 12-lipoxygenase), AHSG (alpha-2-HS-glycoprotein), BHMT (betaine-homocysteine methyltransferase), GJA4 (gap junction protein, alpha 4, 37 kDa), SLC25A4 (solute carrier family 25 (mitochondrial carrier; adenine nucleotide translocator), member 4), ACLY (ATP citrate lyase), ALOX5AP (arachidonate 5-lipoxygenase-activating protein), NUMA1 (nuclear mitotic apparatus protein 1), CYP27B1 (cytochrome P450, family 27, subfamily B, polypeptide 1), CYSLTR2 (cysteinyl leukotriene receptor 2), SOD3 (superoxide dismutase 3, extracellular), LTC4S (leukotriene C4 synthase), UCN (urocortin), GHRL (ghrelin/obestatin prepropeptide), APOC2 (apolipoprotein C-II), CLEC4A (C-type lectin domain family 4, member A), KBTBD10 (kelch repeat and BTB (POZ) domain containing 10), TNC (tenascin C), TYMS (thymidylate synthetase), SHC1 (SHC (Src homology 2 domain containing) transforming protein 1), LRP1 (low density lipoprotein receptor-related protein 1), SOCS3 (suppressor of cytokine signaling 3), ADH1B (alcohol dehydrogenase IB (class I), beta polypeptide), KLK3 (kallikrein-related peptidase 3), HSD11B1 (hydroxysteroid (11-beta) dehydrogenase 1), VKORC1 (vitamin K epoxide reductase complex, subunit 1), SERPINB2 (serpin peptidase inhibitor, clade B (ovalbumin), member 2), TNS1 (tensin 1), RNF19A (ring finger protein 19A), EPOR (erythropoietin receptor), ITGAM (integrin, alpha M (complement component 3 receptor 3 subunit)), PITX2 (paired-like homeodomain 2), MAPK7 (mitogen-activated protein kinase 7), FCGR3A (Fc fragment of IgG, low affinity 111a, receptor (CD16a)), LEPR (leptin receptor), ENG (endoglin), GPX1 (glutathione peroxidase 1), GOT2 (glutamic-oxaloacetic transaminase 2, mitochondrial (aspartate aminotransferase 2)), HRH1 (histamine receptor HI), NR112 (nuclear receptor subfamily 1, group I, member 2), CRH (corticotropin releasing hormone), HTR1A (5-hydroxytryptamine (serotonin) receptor 1A), VDAC1 (voltage-dependent anion channel 1), HPSE (heparanase), SFTPD (surfactant protein D), TAP2 (transporter 2, ATP-binding cassette, sub-family B (MDR/TAP)), RNF123 (ring finger protein 123), PTK2B (PTK2B protein tyrosine kinase 2 beta), NTRK2 (neurotrophic tyrosine kinase, receptor, type 2), IL6R (interleukin 6 receptor), ACHE (acetylcholinesterase (Yt blood group)), GLP1R (glucagon-like peptide 1 receptor), GHR (growth hormone receptor), GSR (glutathione reductase), NQOl (NAD(P)H dehydrogenase, quinone 1), NR5A1 (nuclear receptor subfamily 5, group A, member 1), GJB2 (gap junction protein, beta 2, 26 kDa), SLC9A1 (solute carrier family 9 (sodium/hydrogen exchanger), member 1), MAOA (monoamine oxidase A), PCSK9 (proprotein convertase subtilisin/kexin type 9), FCGR2A (Fc fragment of IgG, low affinity Ia, receptor (CD32)), SERPINF1 (serpin peptidase inhibitor, clade F (alpha-2 antiplasmin, pigment epithelium derived factor), member 1), EDN3 (endothelin 3), DHFR (dihydrofolate reductase), GAS6 (growth arrest-specific 6), SMPD1 (sphingomyelin phosphodiesterase 1, acid lysosomal), UCP2 (uncoupling protein 2 (mitochondrial, proton carrier)), TFAP2A (transcription factor AP-2 alpha (activating enhancer binding protein 2 alpha)), C4BPA (complement component 4 binding protein, alpha), SERPINF2 (serpin peptidase inhibitor, clade F (alpha-2 antiplasmin, pigment epithelium derived factor), member 2), TYMP (thymidine phosphorylase), ALPP (alkaline phosphatase, placental (Regan isozyme)), CXCR2 (chemokine (C-X-C motif) receptor 2), SLC39A3 (solute carrier family 39 (zinc transporter), member 3), ABCG2 (ATP-binding cassette, sub-family G (WHITE), member 2), ADA (adenosine deaminase), JAK3 (Janus kinase 3), HSPA1A (heat shock 70 kDa protein 1A), FASN (fatty acid synthase), FGF1 (fibroblast growth factor 1 (acidic)), Fll (coagulation factor XI), ATP7A (ATPase, Cu++ transporting, alpha polypeptide), CR1 (complement component (3b/4b) receptor 1 (Knops blood group)), GFAP (glial fibrillary acidic protein), ROCK1 (Rho-associated, coiled-coil containing protein kinase 1), MECP2 (methyl CpG binding protein 2 (Rett syndrome)), MYLK (myosin light chain kinase), BCFlE (butyrylcholinesterase), LIPE (lipase, hormone-sensitive), PRDX5 (peroxiredoxin 5), ADORA1 (adenosine A1 receptor), WRN (Werner syndrome, RecQ helicase-like), CXCR3 (chemokine (C-X-C motif) receptor 3), CD81 (CD81 molecule), SMAD7 (SMAD family member 7), LAMC2 (laminin, gamma 2), MAP3K5 (mitogen-activated protein kinase kinase kinase 5), CF1GA (chromogranin A (parathyroid secretory protein 1)), IAPP (islet amyloid polypeptide), RFIO (rhodopsin), ENPP1 (ectonucleotide pyrophosphatase/phosphodiesterase 1), PTF1LF1 (parathyroid hormone-like hormone), NRG1 (neuregulin 1), VEGFC (vascular endothelial growth factor C), ENPEP (glutamyl aminopeptidase (aminopeptidase A)), CEBPB (CCAAT/enhancer binding protein (C/EBP), beta), NAGLU (N-acetylglucosaminidase, alpha), F2RL3 (coagulation factor II (thrombin) receptor-like 3), CX3CL1 (chemokine (C-X3-C motif) ligand 1), BDKRB1 (bradykinin receptor Bl), ADAMTS13 (ADAM metallopeptidase with thrombospondin type 1 motif, 13), ELANE (elastase, neutrophil expressed), ENPP2 (ectonucleotide pyrophosphatase/phosphodiesterase 2), CISFI (cytokine inducible SF12-containing protein), GAST (gastrin), MYOC (myocilin, trabecular mesh work inducible glucocorticoid response), ATP1 A2 (ATPase, Na+/K+ transporting, alpha 2 polypeptide), NF1 (neurofibromin 1), GJB1 (gap junction protein, beta 1, 32 kDa), MEF2A (myocyte enhancer factor 2A), VCL (vinculin), BMPR2 (bone morphogenetic protein receptor, type II (serine/threonine kinase)), TUBB (tubulin, beta), CDC42 (cell division cycle 42 (GTP binding protein, 25 kDa)), KRT18 (keratin 18), F1SF1 (heat shock transcription factor 1), MYB (v-myb myeloblastosis viral oncogene homolog (avian)), PRKAA2 (protein kinase, AMP-activated, alpha 2 catalytic subunit), ROCK2 (Rho-associated, coiled-coil containing protein kinase 2), TFPI (tissue factor pathway inhibitor (lipoprotein-associated coagulation inhibitor)), PRKG1 (protein kinase, cGMP-dependent, type I), BMP2 (bone morphogenetic protein 2), CTNND1 (catenin (cadherin-associated protein), delta 1), CTF1 (cystathionase (cystathionine gamma-lyase)), CTSS (cathepsin S), VAV2 (vav 2 guanine nucleotide exchange factor), NPY2R (neuropeptide Y receptor Y2), IGFBP2 (insulin-like growth factor binding protein 2, 36 kDa), CD28 (CD28 molecule), GSTA1 (glutathione S-transferase alpha 1), PPIA (peptidylprolyl isomerase A (cyclophilin A)), APOF1 (apolipoprotein FI (beta-2-glycoprotein I)), S100A8 (S100 calcium binding protein A8), IL11 (interleukin 11), ALOX15 (arachidonate 15-lipoxygenase), FBLN1 (fibulin 1), NR1F13 (nuclear receptor subfamily 1, group FI, member 3), SCD (stearoyl-CoA desaturase (delta-9-desaturase)), GIP (gastric inhibitory polypeptide), CF1 GB (chromogranin B (secretogranin 1)), PRKCB (protein kinase C, beta), SRD5A1 (steroid-5-alpha-reductase, alpha polypeptide 1 (3-oxo-5 alpha-steroid delta 4-dehydrogenase alpha 1)), F1SD11B2 (hydroxy steroid (11-beta) dehydrogenase 2), CALCRL (calcitonin receptor-like), GALNT2 (UDP-N-acetyl-alpha-D-galactosamine.polypeptide N-acetylgalactosaminyltransferase 2 (GalNAc-T2)), ANGPTL4 (angiopoietin-like 4), KCNN4 (potassium intermediate/small conductance calcium-activated channel, subfamily N, member 4), PIK3C2A (phosphoinositide-3-kinase, class 2, alpha polypeptide), HBEGF (heparin-binding EGF-like growth factor), CYP7A1 (cytochrome P450, family 7, subfamily A, polypeptide 1), HLA-DRB5 (major histocompatibility complex, class II, DR beta 5), BNIP3 (BCL2/adeno virus E1B 19 kDa interacting protein 3), GCKR (glucokinase (hexokinase 4) regulator), S100A12 (S100 calcium binding protein A 12), PADI4 (peptidyl arginine deaminase, type IV), HSPA14 (heat shock 70 kDa protein 14), CXCR1 (chemokine (C-X-C motif) receptor 1), H19 (H19, imprinted maternally expressed transcript (non-protein coding)), KRTAP19-3 (keratin associated protein 19-3), insulin, RAC2 (ras-related C3 botulinum toxin substrate 2 (rho family, small GTP binding protein Rac2)), RYR1 (ryanodine receptor 1 (skeletal)), CLOCK (clock homolog (mouse)), NGFR (nerve growth factor receptor (TNFR superfamily, member 16)), DBH (dopamine beta-hydroxylase (dopamine beta-monooxygenase)), CHRNA4 (cholinergic receptor, nicotinic, alpha 4), CACNAlC (calcium channel, voltage-dependent, L type, alpha 1C subunit), PRKAG2 (protein kinase, AMP-activated, gamma 2 non-catalytic subunit), CHAT (choline acetyltransferase), PTGDS (prostaglandin D2 synthase 21 kDa (brain)), NR1H2 (nuclear receptor subfamily 1, group H, member 2), TEK (TEK tyrosine kinase, endothelial), VEGFB (vascular endothelial growth factor B), MEF2C (myocyte enhancer factor 2C), MAPKAPK2 (mitogen-activated protein kinase-activated protein kinase 2), TNFRSF11 A (tumor necrosis factor receptor superfamily, member 11a, NFKB activator), HSPA9 (heat shock 70 kDa protein 9 (mortalin)), CYSLTR1 (cysteinyl leukotriene receptor 1), MAT1A (methionine adenosyltransferase I, alpha), OPRL1 (opiate receptor-like 1), IMPA1 (inositol(myo)-l(or 4)-monophosphatase 1), CLCN2 (chloride channel 2), DLD (dihydrolipoamide dehydrogenase), PSMA6 (proteasome (prosome, macropain) subunit, alpha type, 6), PSMB8 (proteasome (prosome, macropain) subunit, beta type, 8 (large multifunctional peptidase 7)), CHI3L1 (chitinase 3-like 1 (cartilage glycoprotein-39)), ALDH1B1 (aldehyde dehydrogenase 1 family, member Bl), PARP2 (poly (ADP-ribose) polymerase 2), STAR (steroidogenic acute regulatory protein), LBP (lipopolysaccharide binding protein), ABCC6 (ATP-binding cassette, sub-family C(CFTR/MRP), member 6), RGS2 (regulator of G-protein signaling 2, 24 kDa), EFNB2 (ephrin-B2), cystic fibrosis transmembrane conductance regulator (CFTR), GJB6 (gap junction protein, beta 6, 30 kDa), APOA2 (apolipoprotein A-II), AMPD1 (adenosine monophosphate deaminase 1), DYSF (dysferlin, limb girdle muscular dystrophy 2B (autosomal recessive)), FDFT1 (farnesyl-diphosphate farnesyltransferase 1), EDN2 (endothelin 2), CCR6 (chemokine (C-C motif) receptor 6), GJB3 (gap junction protein, beta 3, 31 kDa), IL1RL1 (interleukin 1 receptor-like 1), ENTPD1 (ectonucleoside triphosphate diphosphohydrolase 1), BBS4 (Bardet-Biedl syndrome 4), CELSR2 (cadherin, EGF LAG seven-pass G-type receptor 2 (flamingo homolog, Drosophila)), F1IR (Fll receptor), RAPGEF3 (Rap guanine nucleotide exchange factor (GEF) 3), HYAL1 (hyaluronoglucosaminidase 1), ZNF259 (zinc finger protein 259), ATOX1 (ATX1 antioxidant protein 1 homolog (yeast)), ATF6 (activating transcription factor 6), K¹HK (ketohexokinase (fructokinase)), SAT1 (spermidine/spermine Nl-acetyltransferase 1), GGFI (gamma-glutamyl hydrolase (conjugase, folylpolygammaglutamyl hydrolase)), TIMP4 (TIMP metallopeptidase inhibitor 4), SLC4A4 (solute carrier family 4, sodium bicarbonate cotransporter, member 4), PDE2A (phosphodiesterase 2 A, cGMP-stimulated), PDE3B (phosphodiesterase 3B, cGMP-inhibited), FADS1 (fatty acid desaturase 1), FADS2 (fatty acid desaturase 2), TMSB4X (thymosin beta 4, X-linked), TXNIP (thioredoxin interacting protein), LIMS1 (LIM and senescent cell antigen-like domains 1), RFIOB (ras homolog gene family, member B), LY96 (lymphocyte antigen 96), FOXOl (forkhead box 01), PNPLA2 (patatin-like phospholipase domain containing 2), TRH (thyrotropin-releasing hormone), GJC1 (gap junction protein, gamma 1, 45 kDa), SLC17A5 (solute carrier family 17 (anion/sugar transporter), member 5), FTO (fat mass and obesity associated), GJD2 (gap junction protein, delta 2, 36 kDa), PSRC1 (proline/serine-rich coiled-coil 1), CASP12 (caspase 12 (gene/pseudogene)), GPBAR1 (G protein-coupled bile acid receptor 1), PXK (PX domain containing serine/threonine kinase), IL33 (interleukin 33), TRIB1 (tribbles homolog 1 (Drosophila)), PBX4 (pre-B-cell leukemia homeobox 4), NUPRI (nuclear protein, transcriptional regulator, 1), 15-Sep (15 kDa selenoprotein), CILP2 (cartilage intermediate layer protein 2), TERC (telomerase RNA component), GGT2 (gamma-glutamyltransf erase 2), MT-COl (mitochondrially encoded cytochrome c oxidase I), UOX (urate oxidase, pseudogene), a CRISPR/Cas effector polypeptide, an enzymatically active CRISPR/Cas effector polypeptide (e.g., is capable of cleaving a target nucleic acid) and a CRISPR/Cas effector polypeptide that is not enzymatically active (e.g., does not cleave a target nucleic acid, but retains binding to the target nucleic acid). In some cases, the donor DNA encodes a wild-type version of any of the foregoing polypeptides; i.e., the donor DNA can encode a “normal” version that does not include a mutation(s) that results in reduced function, lack of function, or pathogenesis.

[0946] In some cases, the donor DNA comprises a nucleotide sequence encoding a fluorescent polypeptide. Suitable fluorescent proteins include, but are not limited to, green fluorescent protein (GFP) or variants thereof, blue fluorescent variant of GFP (BFP), cyan fluorescent variant of GFP (CFP), yellow fluorescent variant of GFP (YFP), enhanced GFP (EGFP), enhanced CFP (ECFP), enhanced YFP (EYFP), GFPS65T, Emerald, Topaz (TYFP), Venus, Citrine, mCitrine, GFPuv, destabilized EGFP (dEGFP), destabilized ECFP (dECFP), destabilised EYFP (dEYFP), mCFPm, Cerulean, T-Sapphire, CyPet, YPet, mKO, HcRed, t-HcRed, DsRed, DsRed2, DsRed-monomer, J-Red, dimer2, t-dimer2(12), mRFPl, pocilloporin, Renilla GFP, Monster GFP, paGFP, Kaede protein and kindling protein, Phycobiliproteins and Phycobiliprotein conjugates including B-Phycoerythrin, R-Phycoerythrin and Allophycocyanin. Other examples of fluorescent proteins include mHoneydew, mBanana, mOrange, dTomato, tdTomato, mTangerine, mStrawberry, mCherry, mGrapel, mRaspberry, mGrape2, m PI urn (Shaner et al. (2005) Nat. Methods 2:905-909), and the like. Any of a variety of fluorescent and colored proteins from Anthozoan species, as described in, e.g., Matz et al. (1999) Nature Biotechnol. 17:969-973, can be encoded.

[0947] In some cases, the donor DNA encodes an RNA, e.g., an siRNA, a microRNA, a short hairpin RNA (shRNA), an anti-sense RNA, a riboswitch, a ribozyme, an aptamer, a ribosomal RNA, a transfer RNA, and the like.

[0948] A donor DNA can include, in addition to a nucleotide sequence encoding one or more gene products (e.g., an RNA and/or a polypeptide), one or more transcriptional control elements, e.g., a promoter, an enhancer, and the like. In some cases, the transcriptional control element is inducible. In some cases, the promoter is reversible. In some cases, the transcriptional control element is constitutive. In some cases, the promoter is functional in a eukaryotic cell. In some cases, the promoter is a cell type-specific promoter. In some cases, the promoter is a tissue-specific promoter.

[0949] The nucleotide sequence of the donor DNA is typically not identical to the target nucleic acid (e.g., genomic sequence) that it replaces. Rather, the donor DNA may contain at least one or more single base changes, insertions, deletions, inversions or rearrangements with respect to the target nucleic acid (e.g., genomic sequence), so long as sufficient homology is present to support homology-directed repair (e.g., for gene correction, e.g., to convert a disease-causing base pair or a non-disease-causing base pair). In some cases, the donor DNA comprises a non-homologous sequence flanked by two regions of homology, such that homology-directed repair between the target DNA region and the two flanking sequences results in insertion of the non-homologous sequence at the target region. Donor DNA may also comprise a vector backbone containing sequences that are not homologous to the DNA region of interest (the target nucleic acid) and that are not intended for insertion into the DNA region of interest (the target nucleic acid). Generally, the homologous region(s) of a donor sequence will have at least 50% sequence identity to a target nucleic acid (e.g., a genomic sequence) with which recombination is desired. In certain cases, 60%, 70%, 80%, 90%, 95%, 98%, 99%, or 99.9% sequence identity is present. Any value between 1% and 100% sequence identity can be present, depending upon the length of the donor polynucleotide.

[0950] The donor DNA may comprise certain nucleotide sequence differences as compared to the target nucleic acid (e.g., genomic sequence), where such difference include, e.g. restriction sites, nucleotide polymorphisms, selectable markers (e.g., drug resistance genes, fluorescent proteins, enzymes etc.), etc., which may be used to assess for successful insertion of the donor DNA at the cleavage site or in some cases may be used for other purposes (e.g., to signify expression at the targeted genomic locus). In some cases, if located in a coding region, such nucleotide sequence differences will not change the amino acid sequence, or will make silent amino acid changes (i.e., changes which do not affect the structure or function of the protein). Alternatively, these sequences differences may include flanking recombination sequences such as FLPs, loxP sequences, or the like, that can be activated at a later time for removal of the marker sequence. In some cases, the donor DNA will include one or more nucleotide sequences to aid in localization of the donor to the nucleus of the recipient cell or to aid in the integration of the donor DNA into the target nucleic acid. For example, in some case, the donor DNA may comprise one or more nucleotide sequences encoding one or more nuclear localization signals (e.g. PKKKRKV (SEQ ID NO: 19399), VSRKRPRP (SEQ ID NO: 19400), QRKRKQ (SEQ ID NO: 19401), and the like (Frietas et al (2009) Cun-Genomics 10:550-7). In some cases, the donor DNA will include nucleotide sequences to recruit DNA repair enzymes to increase insertion efficiency. Fiuman enzymes involved in homology directed repair include MRN-CtIP, BLM-DNA2, Exol, ERCC1, Rad51, Rad52, Ligase 1, RoIQ, PARP1, Ligase 3, BRCA2, RecQ/BLM-ToroIIIa, RTEL, Roid, and Roih (Verma and Greenburg (2016) Genes Dev. 30 (10): 1138-1154). In some cases, the donor DNA is delivered as reconstituted chromatin (Cruz-Becerra and Kadonaga (2020) eLife 2020; 9:e55780 DOI: 10.7554/eLife.55780).

[0951] In some cases, the ends of the donor DNA are protected (e.g., from exonucleolytic degradation) by any convenient method and such methods are known to those of skill in the art. For example, one or more dideoxynucleotide residues can be added to the 3′ terminus of a linear molecule and/or self complementary oligonucleotides can be ligated to one or both ends. See, for example, Chang et al. (1987) Proc. Natl. Acad Sci USA 84:4959-4963; Nehls et al. (1996) Science 272:886-889. Additional methods for protecting exogenous polynucleotides from degradation include, but are not limited to, addition of terminal amino group(s) and the use of modified internucleotide linkages such as, for example, phosphorothioates, phosphoramidates, and O-methyl ribose or deoxyribose residues. As an alternative to protecting the termini of a linear donor DNA, additional lengths of sequence may be included outside of the regions of homology that can be degraded without impacting recombination.

### HNS=Functional RNA Element

[0952] In certain embodiments, the donor/template comprises a coding sequence for a functional RNA element (ncRNAs, siRNA, shRNA, sgRNA, etc.).

[0953] In some embodiments, the heterologous nucleic acid sequences encode a functional non-translated RNA. In some embodiments, the functional non-translated RNA is an RNA aptamer or a ribozyme.

[0954] In some embodiments, the heterologous nucleic acid of the engineered retrons further includes a unique barcode to facilitate multiplexing. Barcodes may include one or more nucleotide sequences that are used to identify a nucleic acid or cell with which the barcode is associated. Such barcodes may be inserted for example, into the tip/loop region of the msd-encoded DNA. Barcodes can be 3-1000 or more nucleotides in length, 10-250 nucleotides in length, or 10-30 nucleotides in length, including any length within these ranges, such as 3, 4, 5, 6, 7, 8, 9, 10, 11, 12, 13, 14, 15, 16, 17, 18, 19, 20, 21, 22, 23, 24, 25, 26, 27, 28, 29, 30, 40, 50, 60, 70, 80, 90, 100, 200, 300, 400, 500, 600, 700, 800, 900, or 1000 nucleotides in length.

[0955] In some embodiments, barcodes are also used to identify the position (viz., positional barcode) of a cell, colony, or sample from which a retron originated, such as the position of a colony in a cellular array, the position of a well in a multi-well plate, the position of a tube in a rack, or the location of a sample in a laboratory. In particular, a barcode may be used to identify the position of a genetically modified cell containing a retron. The use of barcodes allows retrons from different cells to be pooled in a single reaction mixture for sequencing while still being able to trace a particular retron back to the colony from which it originated.

[0956] In addition, adapter sequences can be added to engineered retron to facilitate high-throughput amplification or sequencing. For example, a pair of adapter sequences can be added at the 5′ and 3′ ends of a retron construct to allow amplification or sequencing of multiple engineered retron simultaneously by the same set of primers.

### HNS=Guide RNA

[0957] In some embodiments, the functional non-translated RNA is a CRISPR/Cas guide RNA (gRNA) specific for a target sequence in the mammalian cell. FIG. 1G depicts various configurations of a recombinant retron ncRNA which is modified by inserting a guide RNA at the 5′ end or the 3′ of the ncRNA. The guide RNA also may be provided in trans as a separate construct. In addition, guide RNAs may be placed at both ends of a recombinant retron ncRNA.

[0958] The skilled person will understand that selection of an appropriate guide RNA is informed by which RNA-guided nuclease is utilized.

[0959] A guide RNA provides target specificity to the complex (the RNP complex) by including a targeting segment, which includes a guide sequence (also referred to herein as a targeting sequence), which is a nucleotide sequence that is complementary to a sequence of a target nucleic acid. The term “guide RNA”, as used herein, refers to an RNA that comprises: i) an “activator” nucleotide sequence that binds to a CRISPR/Cas effector polypeptide (e.g., a class 2 CRISPR/Cas effector polypeptide such as a type II, type V, or type VI CRISPR/Cas endonuclease) and activates the CRISPR/Cas effector polypeptide; and ii) a “targeter” nucleotide sequence that comprises a nucleotide sequence that hybridizes with a target nucleic acid. The “activator” nucleotide sequence and the “targeter” nucleotide sequence can be on separate RNA molecules (e.g., a “dual-guide RNA”); or can be on the same RNA molecule (a “single-guide RNA”). A guide nucleic acid in some cases includes only ribonucleotides. In some cases, a guide nucleic acid includes both ribonucleotides and deoxyribonucleotides.

[0960] In some cases, a CRISPR/Cas guide RNA comprises one or more modifications, e.g., a base modification, a backbone modification, a sugar modification, etc., to provide the nucleic acid with a new or enhanced feature (e.g., improved stability, such as improved in vivo stability). Suitable nucleic acid modifications include, but are not limited to: 2′O-methyl modified nucleotides, 2′ fluoro modified nucleotides, locked nucleic acid (LNA) modified nucleotides, peptide nucleic acid (PNA) modified nucleotides, nucleotides with phosphorothioate linkages, and a 5′ cap (e.g., a 7-methylguanylate cap (m7G)). Suitable modified nucleic acid backbones containing a phosphorus atom therein include, for example, phosphorothioates, chiral phosphorothioates, phosphorodithioates, phosphotriesters, aminoalkylphosphotriesters, methyl and other alkyl phosphonates including 3′-alkylene phosphonates, 5′-alkylene phosphonates and chiral phosphonates, phosphinates, phosphoramidates including 3′-amino phosphoramidate and aminoalkylphosphoramidates, phosphorodiamidates, thionophosphoramidates, thionoalkylphosphonates, thionoalkylphosphotriesters, selenophosphates and boranophosphates having normal 3′-5′ linkages, 2′-5′ linked analogs of these, and those having inverted polarity wherein one or more internucleotide linkages is a 3′ to 3′, 5′ to 5′ or 2′ to 2′ linkage. Suitable oligonucleotides having inverted polarity comprise a single 3′ to 3′ linkage at the 3′-most internucleotide linkage i.e. a single inverted nucleoside residue which may be a basic (the nucleobase is missing or has a hydroxyl group in place thereof). Various salts (such as, for example, potassium or sodium), mixed salts and free acid forms are also included. A CRISPR-Cas guide RNA can also include one or more substituted sugar moieties. Suitable polynucleotides comprise a sugar substituent group selected from: OH; F; O-, S-, or N-alkyl; O-, S-, or N-alkenyl; O-, S- or N-alkynyl; or O-alkyl-O-alkyl, wherein the alkyl, alkenyl and alkynyl may be substituted or unsubstituted Ci to Cio alkyl or C2 to C10 alkenyl and alkynyl. Particularly suitable are O((CH₂)ₙO)ₘCH₃, O(CH₂)ₙOCH₃, O(CH₂)ₙNH₂, O(CH₂)ₙCH₃, O(CH₂)ₙONH₂, and O(CH₂)ₙON((CH₂)ₙCH₃)₂, where n and m are from 1 to about 10. Other suitable polynucleotides comprise a sugar substituent group selected from: Ci to Cio lower alkyl, substituted lower alkyl, alkenyl, alkynyl, alkaryl, aralkyl, O-alkaryl or O-aralkyl, SH, SCH₃, OCN, Cl, Br, CN, CF₃, OCF₃, SOCH₃, SO₂CH₃, ONO₂, NO₂, N₃, NH₂, heterocycloalkyl, heterocycloalkaryl, aminoalkylamino, polyalkylamino, substituted silyl, an RNA cleaving group, a reporter group, an intercalator, a group for improving the pharmacokinetic properties of an oligonucleotide, or a group for improving the pharmacodynamic properties of an oligonucleotide, and other substituents having similar properties. A suitable modification includes 2′-methoxy ethoxy (2′-O—CH₂CH₂OCH₃, also known as 2′-O-(2-methoxyethyl) or 2′-MOE) (Martin et al., Helv. Chim. Acta, 1995, 78, 486-504) i.e., an alkoxyalkoxy group. A further suitable modification includes 2′-dimethylaminooxyethoxy, i.e., a O(CH₂)₂ON(CH₃)₂ group, also known as 2′-DMAOE, as described in examples herein below, and 2′-dimethylaminoethoxyethoxy (also known in the art as 2′-O-dimethyl-amino-ethoxy-ethyl or 2′-DMAEOE), i.e., 2′-O—CH₂—O—CH₂—N(CH₃)₂.

[0961] Examples of various CRISPR/Cas effector proteins and CRISPR/Cas guide RNAs (as well as information regarding requirements related to protospacer adjacent motif (PAM) sequences present in targeted nucleic acids) can be found in the art, for example, see Jinek et al., Science. 2012 Aug. 17; 337(6096):816-21; Chylinski et al., RNA Biol. 2013 May; 10(5):726-37; Ma et al., Biomed Res Int. 2013; 2013:270805; Hou et al., Proc Natl Acad Sci USA. 2013 Sep. 24; 110(39):15644-9; Jinek et al., Elife. 2013; 2:e00471; Pattanayak et al., Nat Biotechnol. 2013 September; 31(9):839-43; Qi et al., Cell. 2013 Feb. 28; 152(5): 1173-83; Wang et al., Cell. 2013 May 9; 153(4):910-8; Auer et al., Genome Res. 2013 Oct. 31; Chen et al., Nucleic Acids Res. 2013 Nov. 1; 41(20):e19; Cheng et al., Cell Res. 2013 October; 23(10):1163-71; Cho et al., Genetics. 2013 November; 195(3):1177-80; DiCarlo et al., Nucleic Acids Res. 2013 April; 41(7):4336-43; Dickinson et al., Nat Methods. 2013 October; 10(10):1028-34; Ebina et al., Sci Rep. 2013; 3:2510; Fujii et al., Nucleic Acids Res. 2013 Nov. 1; 41(20):e187; Hu et al., Cell Res. 2013 November; 23(11):1322-5; Jiang et al., Nucleic Acids Res. 2013 Nov. 1; 41(20):e188; Larson et al., Nat Protoc. 2013 November; 8(ll):2180-96; Mali et al., Nat Methods. 2013 October; 10(10):957-63; Nakayama et al., Genesis. 2013 December; 51(12):835-43; Ran et al., Nat Protoc. 2013 November; 8(ll):2281-308; Ran et al., Cell. 2013 Sep. 12; 154(6):1380-9; Upadhyay et al., G3 (Bethesda). 2013 Dec. 9; 3(12):2233-8; Walsh et al., Proc Natl Acad Sci USA. 2013 Sep. 24; 110(39):15514-5; Xie et al., Mol Plant. 2013 Oct. 9; Yang et al., Cell. 2013 Sep. 12; 154(6):1370-9; Briner et al., Mol Cell. 2014 Oct. 23; 56(2):333-9; and U.S. patents and patent applications: U.S. Pat. Nos. 8,906,616; 8,895,308; 8,889,418; 8,889,356; 8,871,445; 8,865,406; 8,795,965; 8,771,945; 8,697,359; 20140068797; 20140170753; 20140179006; 20140179770; 20140186843; 20140186919; 20140186958; 20140189896; 20140227787; 20140234972; 20140242664; 20140242699; 20140242700; 20140242702; 20140248702; 20140256046; 20140273037; 20140273226; 20140273230; 20140273231; 20140273232; 20140273233; 20140273234; 20140273235; 20140287938; 20140295556; 20140295557; 20140298547; 20140304853; 20140309487; 20140310828; 20140310830; 20140315985; 20140335063; 20140335620; 20140342456; 20140342457; 20140342458; 20140349400; 20140349405; 20140356867; 20140356956; 20140356958; 20140356959; 20140357523; 20140357530; 20140364333; and 20140377868; all of which are hereby incorporated by reference in their entirety.

[0962] Examples and guidance related to type V or type VI CRISPR/Cas endonucleases and guide RNAs (as well as information regarding requirements related to protospacer adjacent motif (PAM) sequences present in targeted nucleic acids) can be found in the art, for example, see Zetsche et al., Cell. 2015 Oct. 22; 163(3):759-71; Makarova et al., Nat Rev Microbiol. 2015 November; 13(11):722-36; and Shmakov et al., Mol Cell. 2015 Nov. 5; 60(3):385-97.

### C. Reverse Transcriptases (RTs)

[0963] Reverse transcriptases (RTs, also known as RNA-directed DNA polymerases) are enzymes present in all three domains of life, which are DNA polymerase using RNA as a template. Reverse transcriptases of the present disclosure are used to reverse transcribe template msd RNA into single-stranded msDNA.

[0964] The reverse transcriptase or a functional domain thereof that may be used in the instant invention includes prokaryotic and eukaryotic RT, provided that the RT functions within the host to generate a donor polynucleotide sequence from the RNA template (e.g., an RNA template from the retron transcript ncRNA).

[0965] In certain embodiments, suitable RT sequences (including amino acid sequences and the encoding polynucleotide sequences) are provided in Table A.

[0966] In certain embodiments, the nucleotide sequence of a native or wild-type RT is modified, for example, using known codon optimization techniques, so that expression within the desired host is optimized.

[0967] In certain embodiments, the RT domain of a reverse transcriptase is used in the present invention, so long as it is compatible with the engineered retron of the invention. The domain may include only the RNA-dependent DNA polymerase activity. In certain embodiments, the RT domain is non-mutagenic, i.e., does not cause mutation in the donor polynucleotide (e.g., during the reverse transcriptase process). In certain embodiments, the RT domain may be non-retron RT in origin, e.g., a viral RT or a human endogenous RTs. In certain embodiments, the RT domain is retron RT or DGRs RT. In certain embodiments, the RT may be less mutagenic than a counterpart wildtype RT. In certain embodiments, the RT is not mutagenic.

[0968] In some embodiments, a reverse transcriptase is encoded by a retron ret gene, which may accompany the cognate msr and msd loci and specifically recognize the secondary structure of the cognate ncRNA transcript.

[0969] In some embodiments, the RT may be obtained from prokaryotic or eukaryotic cells. Most reverse transcriptases (80%) can be phylogenetically clustered into three major lineages: group IT introns, diversity-generating retroelements (DGRs), and retrons. Other clades of RTs include abortive infection (Abi) RTs, CRISPR-Cas-associated RTs, Group II-like (G2L), the unknown groups (UG), and rvt elements.

[0970] In some embodiments, the RT gene is a cognate RT, a retron RT from a species within the same species or clade of the cognate RT, or a retron RT not within the same clade of the cognate RT such as an unrelated RT or an engineered RT. In some embodiments, the non-retron related RT are RTs from group II introns, diversity-generating retroelements (DGRs), abortive infection (Abi) RTs, CRISPR-Cas-associated RTs, Group II-like (G2L), the unknown groups (UG), and rvt elements. See Mestre et al., Nucleic Acids Research, Volume 48, Issue 22, 16 Dec. 2020, Pages 12632-12647; and Mestere et al., UG/Abi: “A Highly Diverse Family of Prokaryotic Reverse Transcriptases Associated With Defense Functions,” doi.org/10.1101/2021.12.02.470933 (incorporated herein by reference).

[0971] In some embodiments, the RT are from clades related to retron/retron-like sequences. In some embodiments, the RT are selected from RTs provided in Table A. In some embodiments, the RT is not an RT associated with the sequences identified in Table X.

[0972] In prokaryotic retron systems, the RT gene is typically located downstream from the ncRNA (msr and msd) locus. In the engineered retron, the RT position can differ from the natural or wild type retrons. In some embodiments, the RT gene can be provided in cis, such as either upstream or downstream of the msr locus or the msd locus. In certain embodiments, the RT gene is provided in trans, such as provided separately in a vector of the vector system described herein, wherein the ncRNA coding msr and msd sequences are provided in a different vector of the vector system described herein.

[0973] In some embodiments, the RT is modified (e.g., insertion, deletion, and/or substitution of one or more nucleotide(s)) or codon optimized to enhance activity or processivity.

[0974] In certain embodiments, a cryptic stop signal is removed from the RT thereby allowing generation of longer ssDNAs.

[0975] In certain embodiments, the RT is from a retron which encodes msDNA as described in U.S. Pat. Nos. 6,017,737; 5,849,563; 5,780,269; 5,436,141; 5,405,775; 5,320,958; CA2,075,515; all of which are incorporated by reference herein in their entireties.

[0976] In some embodiments, the engineered retron further comprises a polynucleotide (e.g., a DNA molecule) encoding a reverse transcriptase (RT) or a portion thereof. In some embodiments, the encoded RT or portion thereof is capable of synthesizing a DNA copy of at least a portion of the msd locus encoding the msDNA.

[0977] In some embodiments, the polynucleotide (e.g., a DNA molecule) encoding the RT comprises a polynucleotide listed in Table A, or a polynucleotide having at least 50%, at least 55%, at least 60%, at least 65%, at least 70%, at least 75%, at least 80%, at least 85%, at least 90%, at least 91%, at least 92%, at least 93%, at least 94%, at least 95%, at least 96%, at least 97%, at least 98%, at least 99%, at least 99.1%, at least 99.2%, at least 99.3%, at least 99.4%, at least 99.5%, at least 99.6%, at least 99.7%, at least 99.8% or at least 99.9% sequence identity to a polynucleotide listed in Table A.

[0978] In some embodiments, the polynucleotide encoding the RT encodes a polypeptide listed in Table A, or a polypeptide having at least 50%, at least 55%, at least 60%, at least 65%, at least 70%, at least 75%, at least 80%, at least 85%, at least 90%, at least 91%, at least 92%, at least 93%, at least 94%, at least 95%, at least 96%, at least 97%, at least 98%, at least 99%, at least 99.1%, at least 99.2%, at least 99.3%, at least 99.4%, at least 99.5%, at least 99.6%, at least 99.7%, at least 99.8% or at least 99.9% sequence identity to a polypeptide listed in Table A; and/or a polypeptide of Table C.

[0979] In some embodiments, the polynucleotide encoding the RT does not comprise a polynucleotide listed in Table X.

[0980] Once translated, the RT binds the ncRNA template downstream from the msd locus, forming an RT-RNA complex, and initiating reverse transcription of the RNA towards its 5′ end. Accordingly, in certain aspects the disclosure relates to an engineered nucleic acid-enzyme construct comprising: a. a non-coding RNA (ncRNA) comprising: i) an msr locus encoding the msr RNA portion of a multi-copy single-stranded DNA (msDNA); and ii) an msd locus encoding the msd RNA portion of the msDNA; b. a heterologous nucleic acid inserted at or within a location selected from: the msd locus, upstream of the msr locus, upstream of the msd locus, and downstream of the msd locus; and c. a reverse transcriptase (RT), or a domain thereof comprising: i) a polypeptide listed in Table A, or a polypeptide having at least 50%, at least 55%, at least 60%, at least 65%, at least 70%, at least 75%, at least 80%, at least 85%, at least 90%, at least 91%, at least 92%, at least 93%, at least 94%, at least 95%, at least 96%, at least 97%, at least 98%, at least 99%, at least 99.1%, at least 99.2%, at least 99.3%, at least 99.4%, at least 99.5%, at least 99.6%, at least 99.7%, at least 99.8% or at least 99.9% sequence identity to a polypeptide listed in Table A; and/or ii) a polypeptide listed in Table C. In some embodiments, the RT does not comprise a polypeptide listed in Table X.

[0981] In certain aspects, the disclosure relates to an engineered nucleic acid-enzyme construct comprising: a) a non-coding RNA (ncRNA) comprising: i) an msr locus encoding the msr RNA portion of a multi-copy single-stranded DNA (msDNA); and ii) an msd locus encoding the msd RNA portion of the msDNA, b) a heterologous nucleic acid inserted at or within a location selected from: the msd locus; upstream of the msr locus; upstream of the msd locus; and downstream of the msd locus; and c) a reverse transcriptase (RT), or a portion thereof, wherein the RT is capable of synthesizing a DNA copy of at least a portion of the msd locus encoding the msDNA, and wherein the ncRNA and/or the RT is any one of the invention described herein.

[0982] In certain aspects, the disclosure relates to an engineered nucleic acid-enzyme construct comprising: a) a non-coding RNA (ncRNA) comprising: i) an msr locus encoding the msr RNA portion of a multi-copy single-stranded DNA (msDNA); and ii) an msd locus encoding the msd RNA portion of the msDNA; b) a heterologous nucleic acid inserted at or within a location selected from: the msd locus, upstream of the msr locus, upstream of the msd locus, and downstream of the msd locus; and c) a reverse transcriptase (RT) or a domain thereof: wherein the RT comprises: i) an RT listed in Table A, or an RT having at least 50%, at least 55%, at least 60%, at least 65%, at least 70%, at least 75%, at least 80%, at least 85%, at least 90%, at least 91%, at least 92%, at least 93%, at least 94%, at least 95%, at least 96%, at least 97%, at least 98%, at least 99%, at least 99.1%, at least 99.2%, at least 99.3%, at least 99.4%, at least 99.5%, at least 99.6%, at least 99.7%, at least 99.8% or at least 99.9% sequence identity to an RT listed in Table A; and/or ii) a consensus sequence listed in Table C; and wherein, the RT does not comprise a sequence from Table X.

[0983] In some embodiments of the nucleic-acid enzyme constructs described herein, the ncRNA comprises: i) an ncRNA listed in Table B, or an ncRNA having at least 50%, at least 55%, at least 60%, at least 65%, at least 70%, at least 75%, at least 80%, at least 85%, at least 90%, at least 91%, at least 92%, at least 93%, at least 94%, at least 95%, at least 96%, at least 97%, at least 98%, at least 99%, at least 99.1%, at least 99.2%, at least 99.3%, at least 99.4%, at least 99.5%, at least 99.6%, at least 99.7%, at least 99.8% or at least 99.9% sequence identity to an ncRNA listed in Table B; and/or optionally wherein the ncRNA is not an ncRNA from the retons of Table X.

[0984] In some embodiments, the RT is linked to components such as RNA-guided and non-RNA guided nucleases. The linked maybe via s peptide bond or a short linker peptide in a fusion protein. Suitable linker peptides include flexible linkers such as those comprising G or S repeats, such as G₄S repeat units or GS repeat units, with 1-20 repeats, e.g., 1, 2, 3, 4, 5, 6, 7, or 8 repeats.

[0985] In certain embodiments, the RT is chemically linked or conjugated to the RNA-guided and non-RNA guided nucleases via non-peptide bonds. Such protein conjugates may be delivered directly to a host cell, either together with the nucleic acid component of the engineered retron described herein, or separately.

[0986] In some embodiments, the RT is linked to a DNA-repair modulating biomolecule (e.g., NHEJ peptide inhibitors.

### D. Programmable Nucleases (RNA-Guided Nucleases)

[0987] In certain embodiments, the engineered retron (e.g., an engineered nucleic acid construct or engineered nucleic acid-enzyme construct as described herein) may comprise or encode, as one heterologous nucleic acid, a guide RNA (gRNA) suitable for guiding a nuclease to target a particular genomic sequence to be modified. The gRNA includes sequences complementary to a genomic sequence, and therefore can mediate binding of the nuclease-gRNA complex to the genomic target site by hybridization between the guide sequence and the target site sequence.

[0988] In certain embodiments, the gRNA can be linked to the ncRNA and/or the msDNA encoded by the engineered retron described herein at the 5′ end of the ncRNA and/or the msDNA. In certain embodiments, the gRNA can be linked to the ncRNA and/or the msDNA encoded by the engineered retron described herein at the 3′ end of the RNA of the ncRNA and/or the msDNA after reverse transcription.

[0989] In some embodiments, the nuclease that can form a complex with the gRNA can be any one of the art-recognized clustered regularly interspersed short palindromic repeats (CRISPR) system Cas effector enzymes, which are useful for, e.g., genome editing, including genome editing in mammalian cells or human cells.

[0990] For example, a gRNA that can be loaded into a Cas9 or variant thereof may be encoded by the engineered retron, such that the gRNA is transcribed as part of the msDNA. In some embodiments, the gRNA may be linked to the 5′ end of the al region of the msr-encoded sequence in the retron ncRNA, as well as the msDNA after reverse transcription. In some embodiments, the gRNA may be part of the modified msr-region present in the ncRNA and the msDNA produced after reverse transcription (viz., the encoded gRNA is not degraded by the synthesis of the msDNA through reverse transcription of the ncRNA).

[0991] Any art recognized CRISPR/Cas effector enzymes or variants thereof (“Cas enzymes”) known to be useful for CRISPR-based genome editing can be used with the engineered retron, though such Cas enzymes may not necessarily be part of the engineered retron, and can (but is not required to) be provided separately. For example, the Cas enzymes can be provided as part of the vector system described herein. The coding sequence of the suitable Cas enzyme can be present on the same vector that provides the engineered retron, or on different vectors. When the engineered retron and the Cas enzymes are present on the same vector, they may be under the transcriptional control of the same promoter, enhancer, or other transcriptional regulatory elements, or may be separately regulated by different promoters, enhancers, and/or other transcriptional regulatory sequences in the vector system.

[0992] In some embodiments, the Cas enzyme is a Class 2, Type II CRISPR/Cas effector enzyme, such as Cas9. In some embodiments, the Cas9 is from Streptococcus pyogenes (SpCas9), and the gRNA encoded by the engineered retron comprises both the crisprRNA (crRNA) and the tracrRNA linked together as the single guide RNA (gRNA).

[0993] In some embodiments, the Cas9 is from Staphylococcus aureus Cas9 (SaCas9), or an engineered variant thereof such as SaCas9-HF (a high-fidelity variant with genome-wide activity), KKHSaCas9 (which recognizes a 5′-NNGRRT-3′ PAM, and has a 2-4× broader range of target sites in the human genome than the wildtype SaCas9), and microABE1744 (an engineered SaCas9 variant adapted for use in adenine base editing (ABE), with significantly improved on-target editing compared to other nucleases, with a reduced RNA off-target footprint).

[0994] In some embodiments, the Cas9 is from Streptococcus thermophilus (StCas9), Neisseria meningitidis (NmCas9), Francisella novicida (FnCas9), or Campylobacter jejuni (CjCas9).

[0995] In some embodiments, the Cas9 is from Streptococcus canis (ScCas9), with a less stringent PAM sequence requirement of 5′-NNG-3′ (instead of the more stringent 5′-NGG-3′ for SpCas9).

[0996] In some embodiments, the Cas9 is from Staphylococcus auricularis (SauriCas9) (which recognizes a 5′-NNGG-3′ PAM sequence, has high editing activity).

[0997] In some embodiments, the Cas enzyme is a Cas9 variant with mutated catalytic domain that retains cleavage specificity, but only nicks a single DNA strand at a desired target sequence instead of creating a double-strand break (DSB). Two such Cas9 nickase variants targeting different strands of the same target sequence may be used together to increase fidelity of creating the DSB, each using a different gRNA that can be provided by the engineered retron.

[0998] In some embodiments, the Cas enzyme is a high fidelity Cas9 variant with weakened DNA phosphate backbone interaction (such as SpCas9-IF1) that displays genome-wide specificity and undetectable off-target effects.

[0999] In some embodiments, the Cas enzyme is a Cas9 variant known as eSpCas9, which has weakened interactions between the eSpCas9 and its gRNAs with non-exact complementarity with the target DNA sequence, thus providing improved specificity and lower off-target editing rates.

[1000] In some embodiments, the Cas enzyme is a hyper-accurate Cas9 variant (HypaCas9), which improves proofreading before cleavage, and thus drastically reduces off-target cleavage.

[1001] In some embodiments, the Cas enzyme is a Cas9 variant (FokI-Fused dCas9), which combines the DNA recognition ability by dCas9 with the specificity of an active nuclease FokI. The resulting nuclease cuts the target sequence only after dimerization, which is more difficult to occur at off-target sites, thus resulting in enhanced specificity.

[1002] In some embodiments, the Cas enzyme is a Cas9 variant xCas9, which recognizes a broad range of PAM sequences, thus increasing the target sites to 1 in 4 in the genome. In addition, the xCas9 variant also exhibits lower off-target rates than the commonly used SpCas9.

[1003] In some embodiments, the Cas enzyme is a Cas9 variant with altered PAM sequence specificities, including the SpG variant with an expanded target range of PAM sequences, and the SpRY variant that can target almost all PAM sequences.

[1004] In some embodiments, the Cas enzyme is dCas9 having inactivated catalytic nuclease domains while maintaining the recognition domains that allow guide RNA-mediated targeting to specific DNA sequences. The dCas9 may be further linked to a functional domain with a distinct biological function, such as transcriptional activation/depression, DNA methylation, demethylation, endonuclease (such as FokI), or fluorescent dye. Representative (non-limiting) dCas9-linked functional domains include including dCas9-SAM, dCas9-SunTag, dCas9-VPR, and dCas9-KREB.

[1005] In some embodiments, the dCas9 is fused with a catalytic enzyme with cytidine deaminase activity, which converts GC basepair to AT basepair.

[1006] In some embodiments, the dCas9 is fused with an engineered RNA adenosine deaminase, which converts AT basepair to GC basepair.

[1007] In some embodiments, the Cas enzyme is a Class 2, Type V CRISPR/Cas effector enzyme, such as Cas12a (Cpf1) (Type V-A), Cas12b (C2c1) (Type V-B), Cas12c (C2c3) (Type V-C), Cas12d (CasY) (Type V-D), Cas12e (CasX) (Type V-E), Cas12f (Cas14, C2c10) (Type V-F), Cas12g (Type V-G), Cas12h (Type V-H), Cas12i (Type V-I), Cas12k (C2c5) (Type V-K), or C2c4/C2c8/C2c9 (Type V-U).

[1008] In some embodiments, the Cas enzyme is Cas12a or Cpf1 (CRISPR from Prevotella and Francisella 1). Unlike Cas9, Cas12a is well-suited for targeting AT-rich DNA sequences because of its AT-rich PAM sequences. In some embodiments, the Cas12a is FnCas12a (that recognizes PAM sequence 5′-TTN-3′), or AsCas12a or LbCas12a (that recognize 5′-TTTV-3′ PAM sequence), where V is A, G, or C nucleotide. Further, Cas12a creates staggered double-stranded breaks in the target DNA, rather than the blunt-ends generated by SpCas9, thus rendering it more useful for HDR repair. In this embodiment, the subject engineered retron encodes a gRNA suitable for use for Cas12a, in that the gRNA does not require a tracer RNA, and only requires the crRNA.

[1009] In some embodiments, the Cas enzyme is a Cas12a variant from Acidaminococcus sp. (enAsCas12a), which has an expanded target range of PAM sequences and significantly higher editing activity compared to wild type Cas12a.

[1010] In some embodiments, the Cas enzyme is a high-fidelity Cas12a variant (enAsCas12a-HF1) that reduces off-target editing.

[1011] In some embodiments, the Cas enzyme is Cas12b or C201. In some embodiments, the Cas12b is form Alicyclobacillus acidoterrestris (AacCas12b), or from Alicyclobacillus acidiphilus Cas12b (AapCas12b).

[1012] In some embodiments, the Cas enzyme is a Cas12b variant that functions at 37° C., such as one form Bacillus hisashii (BhCas12b).

[1013] In some embodiments, the Cas enzyme is a BhCas12b variant with higher specificity than SpCas9.

[1014] In some embodiments, the Cas enzyme is CasX or Cas12d.

[1015] In some embodiments, the Cas enzyme is CasY or Cas12e, and the subject engineered retron encodes a short-complementarity untranslated RNA (scoutRNA) together with crRNA (rather than tracrRNA used in other CRISPR-Cas systems).

[1016] In some embodiments, the Cas enzyme is Cas14, from archaea bacteria. Cas14 targets single-stranded (ss) DNA target sequences, does not require PAM sequence for activation, and has collateral activity (i.e., cuts other non-target ssDNA strands non-specifically upon binding the target sequence). Unlike Cas12a, Cas14a requires high fidelity complementarity to the target ssDNA, and is very sensitive to internal seed region mismatches of the ssDNA target substrate.

[1017] In some embodiments, the gRNA nuclease is an engineered RNA-guided Fokl nuclease. RNA-guided Fokl nucleases comprise fusions of inactive Cas9 (dCas9) and the Fokl endonuclease (FokI-dCas9), wherein the dCas9 portion confers guide RNA-dependent targeting on Fokl. For a description of engineered RNA-guided Fold nucleases, see, e.g., Havlicek et al. (2017) Mol. Ther. 25(2):342-355, Pan et al. (2016) Sci Rep. 6:35794, Tsai et al. (2014) Nat Biotechnol. 32(6):569-576; herein incorporated by reference.

[1018] In other embodiments, the RNA-guided nuclease can be a non-CRISPER/Cas related nuclease such as transposon-encoded nucleases, IscBs, IscR, or TnpBs.

[1019] In some embodiments, the Cas enzyme is a Cas9

[1020] In some embodiments, the retron-based editing systems described herein can include any Cas9 equivalent. A Cas9 equivalent is a Cas9-like protein that provides the same or substantially the same function as Cas9. For instance, if Cas9 refers to a type II enzyme of the CRISPR-Cas system, a Cas9 equivalent can refer to a type V or type VI enzyme of the CRISPR-Cas system.

[1021] For example, Cas12e (CasX) is a Cas9 equivalent that reportedly has the same function as Cas9 but which evolved through convergent evolution. Thus, the Cas12e (CasX) protein is contemplated to be used with the retron-based editor systems described herein. In addition, any variant or modification of Cas12e (CasX) is conceivable and within the scope of the present disclosure.

[1022] In some embodiments, Cas9 equivalents may refer to Cas12e (CasX) or Cas12d (CasY), which have been described in, for example, Burstein et al., “New CRISPR-Cas systems from uncultivated microbes.” Cell Res. 2017 Feb. 21. doi: 10.1038/cr.2017.21, the entire contents of which is hereby incorporated by reference. Using genome-resolved metagenomics, a number of CRISPR-Cas systems were identified, including the first reported Cas9 in the archaeal domain of life. This divergent Cas9 protein was found in little-studied nanoarchaea as part of an active CRISPR-Cas system. In bacteria, two previously unknown systems were discovered, CRISPR-Cas12e and CRISPR-Cas12d, which are among the most compact systems yet discovered. In some embodiments, Cas9 refers to Cas12e, or a variant of Cas12e. In some embodiments, Cas9 refers to a Cas12d, or a variant of Cas12d. It should be appreciated that other RNA-guided DNA binding proteins may be used as a nucleic acid programmable DNA binding protein (napDNAbp), and are within the scope of this disclosure.

[1023] In some embodiments, the Cas9 equivalent comprises an amino acid sequence that is at least 85%, at least 90%, at least 91%, at least 92%, at least 93%, at least 94%, at least 95%, at least 96%, at least 97%, at least 98%, at least 99%, or at least 99.5% identical to a naturally-occurring Cas12e (CasX) or Cas12d (CasY) protein. In some embodiments, the napDNAbp is a naturally-occurring Cas12e (CasX) or Cas12d (CasY) protein. In some embodiments, the napDNAbp comprises an amino acid sequence that is at least 85%, at least 90%, at least 91%, at least 92%, at least 93%, at least 94%, at least 95%, at least 96%, at least 97%, at least 98%, at least 99%, or at least 99.5% identical to a wild-type Cas moiety or any Cas moiety provided herein.

[1024] In various embodiments, the nucleic acid programmable DNA binding proteins include, without limitation, Cas9 (e.g., dCas9 and nCas9), Cas12e (CasX), Cas12d (CasY), Cas12a (Cpf1), Cas12b1 (C2c1), Cas13a (C2c2), Cas12c (C2c3), Argonaute, and Cas12b1. One example of a nucleic acid programmable DNA-binding protein that has different PAM specificity than Cas9 is Clustered Regularly Interspaced Short Palindromic Repeats from Prevotella and Francisella 1 (i.e, Cas12a (Cpf1)). Similar to Cas9, Cas12a (Cpf1) is also a Class 2 CRISPR effector, but it is a member of type V subgroup of enzymes, rather than the type II subgroup. It has been shown that Cas12a (Cpf1) mediates robust DNA interference with features distinct from Cas9. Cas12a (Cpf1) is a single RNA-guided endonuclease lacking tracrRNA, and it utilizes a T-rich protospacer-adjacent motif (TTN, TTTN, or YTN). Moreover, Cpf1 cleaves DNA via a staggered DNA double-stranded break. Out of 16 Cpf1-family proteins, two enzymes from Acidaminococcus and Lachnospiraceae are shown to have efficient genome-editing activity in human cells. Cpf1 proteins are known in the art and have been described previously, for example Yamano et al., “Crystal structure of Cpf1 in complex with guide RNA and target DNA.” Cell (165) 2016, p. 949-962; the entire contents of which is hereby incorporated by reference.

[1025] In still other embodiments, the Cas protein may include any CRISPR associated protein, including but not limited to, Cas12a, Cas12b1, Cas1, Cas1B, Cas2, Cas3, Cas4, Cas5, Cas6, Cas7, Cas8, Cas9 (also known as Csn1 and Csx12), Cas10, Csy1, Csy2, Csy3, Cse1, Cse2, Csc1, Csc2, Csa5, Csn2, Csm2, Csm3, Csm4, Csm5, Csm6, Cmr1, Cmr3, Cmr4, Cmr5, Cmr6, Csb1, Csb2, Csb3, Csx17, Csx14, Csx10, Csx16, CsaX, Csx3, Csx1, Csx15, Csf1, Cst2, Csf3, Csf4, homologs thereof, or modified versions thereof.

[1026] In various other embodiments, the RNA-guided nuclease can be any of the following proteins: a Cas9, a Cas12a (Cpf1), a Cas12e (CasX), a Cas12d (CasY), a Cas12b1 (C2c1), a Cas13a (C2c2), a Cas12c (C2c3), a GeoCas9, a CjCas9, a Cas12g, a Cas12h, a Cas12i, a Cas13b, a Cas13c, a Cas13d, a Cas14, a Csn2, an xCas9, an SpCas9-NG, or an Argonaute (Ago) domain, or a variant thereof.

[1027] Amino acid sequences of RNA-guided nucleases are readily available and known in the art. Exemplary RNA-guided nucleases and their amino acid sequences can be found, for example, in WO 2017/070633, US 2020/0010835, US 2022/0204975, U.S. Pat. No. 11,071,790, WO 2020/191233, U.S. Pat. Nos. 11,447,770, 10,858,639, and 10,947,530, each of which are incorporated herein by reference in their entireties.

### E. Programmable Nucleases (Other)

[1028] In addition to the CRISPR/Cas system, the subject engineered retron can also be used in combination with sequence-specific nucleases that do not use a guide RNA to recognize a target sequence, such as non-CRISPR/Cas sequence-specific nucleases including TALENs, ZFNs, meganucleases, and restriction enzymes, as well as other sequence-specific nucleases that use other RNA guides, such as transposon-encoded IscBs, IscR, or TnpBs.

[1029] For example, the subject engineered retron may encode or provide a msDNA that can serve as a donor or template sequence for HDR-mediated genome editing. Optionally, the RT of the engineered retron is fused to such sequence-specific nuclease, such that the msDNA, by way of being generated by the RT close to the site of HDR-mediated genome editing, can be more efficiently participate in the HDR-mediated genome editing.

[1030] In some embodiments, the non-CRISPR/Cas sequence-specific nuclease is or comprises a TALE Nuclease, a TALE nickase, Zinc Finger (ZF) Nuclease, ZF Nickase, meganuclease, or a combination thereof. In some embodiments, the non-CRISPR/Cas sequence-specific nuclease is or includes two, three, four, or more of an independently selected TALE Nuclease, TALE nickase, Zinc Finger (ZF) Nuclease, ZF Nickase, Meganuclease, restriction enzymes or a combination thereof. In some embodiments, the combination is or comprises a TALE Nuclease/a ZF Nuclease; a TALE Nickase/a ZF nickase.

[1031] In some embodiments, the non-CRISPR/Cas sequence-specific nuclease is or comprises a TALE Nuclease (Transcription Activator-Like Effector Nucleases (TALEN)). TALENs are restriction enzymes engineered to cut specific target DNA sequences. TALENs comprise a TAL effector (TALE) DNA-binding domain (which binds at or close to the target DNA), fused to a DNA cleavage domain which cuts target DNA. TALEs are engineered to bind to practically any desired DNA sequence. Thus in some embodiments, the TALEN comprises an N-terminal capping region, a DNA binding domain which may comprise at least one or more TALE monomers or half-monomers specifically ordered to target the genomic locus of interest, and a C-terminal capping region, wherein these three parts are arranged in a predetermined N-terminus to C-terminus orientation. Optionally, the TALEN includes at least one or more regulatory or functional protein domains.

[1032] In some embodiments, the TALE monomers or half monomers may be variant TALE monomers derived from natural or wild type TALE monomers but with altered amino acids at positions usually highly conserved in nature, and in particular have a combination of amino acids as RVDs that do not occur in nature, and which may recognize a nucleotide with a higher activity, specificity, and/or affinity than a naturally occurring RVD. The variants may include deletions, insertions and substitutions at the amino acid level, and transversions, transitions and inversions at the nucleic acid level at one or more locations. The variants may also include truncations.

[1033] In some embodiments, the TALE monomer/half monomer variants include homologous and functional derivatives of the parent molecules. In some embodiments, the variants are encoded by polynucleotides capable of hybridizing under high stringency conditions to the parent molecule-encoding wild-type nucleotide sequences.

[1034] In some embodiments, the DNA binding domain of the TALE has at least 5 of more TALE monomers and at least one or more half-monomers specifically ordered or arranged to target a genomic locus of interest. The construction and generation of TALEs or polypeptides of the invention may involve any of the methods known in the art.

[1035] Naturally occurring TALEs or “wild type TALEs” are nucleic acid binding proteins secreted by numerous species of proteobacteria. TALEs contain a nucleic acid binding domain composed of tandem repeats of highly conserved monomer polypeptides that are predominantly 33, 34 or 35 amino acids in length and that differ from each other mainly in amino acid positions 12 and 13. A general representation of a TALE monomer which is comprised within the DNA binding domain is X1-11-(X12X13)-X14-33 or 34 or 35, where the subscript indicates the amino acid position and X represents any amino acid. X12X13 indicate the RVDs. In some polypeptide monomers, the variable amino acid at position 13 is missing or absent and in such monomers, the RVD consists of a single amino acid. In such cases the RVD may be alternatively represented as X*, where X represents X12 and (*) indicates that X13 is absent. The DNA binding domain may comprise several repeats of TALE monomers and this may be represented as (X1-11-(X12X13)-X14-33 or 34 or 35)z, where z is optionally at least 5-40, such as 10-26.

[1036] The TALE monomers have a nucleotide binding affinity that is determined by the identity of the amino acids in its RVD. Polypeptide monomers with an RVD of NI preferentially bind to adenine (A), monomers with an RVD of NG preferentially bind to thymine (T), monomers with an RVD of HD preferentially bind to cytosine (C), monomers with an RVD of NN preferentially bind to both adenine (A) and guanine (G), monomers with an RVD of IG preferentially bind to T, monomers with an RVD of NS recognize all four base pairs and may bind to A, T, G or C. Thus, the number and order of the polypeptide monomer repeats in the nucleic acid binding domain of a TALE determines its nucleic acid target specificity. The structure and function of TALEs is further described in, for example, Moscou et al., Science 326:1501 (2009); Boch et al., Science 326:1509-1512 (2009); and Zhang et al., Nature Biotechnology 29:149-153 (2011), each of which is incorporated by reference in its entirety.

[1037] In some embodiments, the TALE is a dTALE (or designerTALE), see Zhang et al., Nature Biotechnology 29:149-153 (2011), incorporated herein by reference.

[1038] In some embodiments, the TALE monomer comprises an RVD of HN or NH that preferentially binds to guanine, and the TALEs have high binding specificity for guanine containing target nucleic acid sequences. In come embodiments, polypeptide monomers having RVDs RN, NN, NK, SN, NH, KN, HN, NQ, HH, RG, KH, RH and SS preferentially bind to guanine. In some embodiments, polypeptide monomers having RVDs RN, NK, NQ, HH, KH, RH, SS and SN preferentially bind to guanine. In some embodiments, polypeptide monomers having RVDs HH, KH, NH, NK, NQ, RH, RN and SS preferentially bind to guanine. In some embodiments, the RVDs that have high binding specificity for guanine are RN, NH RH and KH. In some embodiments, polypeptide monomers having an RVD of NV preferentially bind to adenine and guanine as do monomers having the RVD HN. Monomers having an RVD of NC preferentially bind to adenine, guanine and cytosine, and monomers having an RVD of S (or S*), bind to adenine, guanine, cytosine and thymine with comparable affinity. In more embodiments, monomers having RVDs of H*, HA, KA, N*, NA, NC, NS, RA, and S* bind to adenine, guanine, cytosine and thymine with comparable affinity. Such polypeptide monomers allow for the generation of degenerative TALEs able to bind to a repertoire of related, but not identical, target nucleic acid sequences.

[1039] In certain embodiments, the TALE polypeptide has a nucleic acid binding domain containing polypeptide monomers arranged in a predetermined N-terminus to C-terminus order such that each polypeptide monomer binds to a nucleotide of a predetermined target nucleic acid sequence, and where at least one of the polypeptide monomers has an RVD of HN or NH and preferentially binds to guanine, an RVD of NV and preferentially binds to adenine and guanine, an RVD of NC and preferentially binds to adenine, guanine and cytosine or an RVD of S and binds to adenine, guanine, cytosine and thymine.

[1040] In some embodiments, each polypeptide monomer of the nucleic acid binding domain that binds to adenine has an RVD of NI, NN, NV, NC or S.

[1041] In certain embodiments, each polypeptide monomer of the nucleic acid binding domain that binds to guanine has an RVD of HN, NH, NN, NV, NC or S.

[1042] In certain embodiments, each polypeptide monomer of the nucleic acid binding domain that binds to cytosine has an RVD of HD, NC or S.

[1043] In some embodiments, each polypeptide monomer that binds to thymine has an RVD of NG or S.

[1044] In some embodiments, each polypeptide monomer of the nucleic acid binding domain that binds to adenine has an RVD of NI.

[1045] In certain embodiments, each polypeptide monomer of the nucleic acid binding domain that binds to guanine has an RVD of HN or NH.

[1046] In certain embodiments, each polypeptide monomer of the nucleic acid binding domain that binds to cytosine has an RVD of HD.

[1047] In some embodiments, each polypeptide monomer that binds to thymine has an RVD of NG.

[1048] In certain embodiments, the RVDs that have a specificity for adenine are NI, RI, KI, HI, and SI.

[1049] In certain embodiments, the RVDs that have a specificity for adenine are HN, SI and RI, most preferably the RVD for adenine specificity is SI.

[1050] In certain embodiments, the RVDs that have a specificity for thymine are NG, HG, RG and KG.

[1051] In certain embodiments, the RVDs that have a specificity for thymine are KG, HG and RG, most preferably the RVD for thymine specificity is KG or RG.

[1052] In certain embodiments, the RVDs that have a specificity for cytosine are HD, ND, KD, RD, HH, YG and SD.

[1053] In certain embodiments, the RVDs that have a specificity for cytosine are SD and RD.

[1054] FIG. 4B of WO 2012/067428 provides representative RVDs and the nucleotides they target, the entire content of which is hereby incorporated herein by reference.

[1055] In certain embodiments, the variant TALE monomers may comprise any of the RVDs that exhibit specificity for a nucleotide as depicted in FIG. 4A of WO2012/067428. All such TALE monomers allow for the generation of degenerative TALEs able to bind to a repertoire of related, but not identical, target nucleic acid sequences.

[1056] In certain embodiments, the RVD SH may have a specificity for G, the RVD IS may have a specificity for A, and the RVD IG may have a specificity for T.

[1057] In certain embodiments, the RVD NT may bind to G and A. In certain embodiments, the RVD NP may bind to A, T and C. In certain embodiments, at least one selected RVD may be NI, HD, NG, NN, KN, RN, NH, NQ, SS, SN, NK, KH, RH, HH, KI, HI, RI, SI, KG, HG, RG, SD, ND, KD, RD, YG, HN, NV, NS, HA, S*, N*, KA, H*, RA, NA or NC.

[1058] The predetermined N-terminal to C-terminal order of the one or more polypeptide monomers of the nucleic acid or DNA binding domain determines the corresponding predetermined target nucleic acid sequence to which the TALE or polypeptides of the invention may bind.

[1059] As used herein the monomers and at least one or more half monomers are “specifically ordered to target” the genomic locus or gene of interest. In plant genomes, the natural TALE-binding sites always begin with a thymine (T), which may be specified by a cryptic signal within the non-repetitive N-terminus of the TALE polypeptide; in some cases this region may be referred to as repeat 0. In animal genomes, TALE binding sites do not necessarily have to begin with a thymine (T) and polypeptides of the invention may target DNA sequences that begin with T, A, G or C. The tandem repeat of TALE monomers always ends with a half-length repeat or a stretch of sequence that may share identity with only the first 20 amino acids of a repetitive full length TALE monomer and this half repeat may be referred to as a half-monomer (FIG. 8 of WO 2012/067428). Therefore, it follows that the length of the nucleic acid or DNA being targeted is equal to the number of full monomers plus two (see FIG. 44 of WO 2012/067428).

[1060] In certain embodiments, nucleic acid binding domains are engineered to contain 5, 6, 7, 8, 9, 10, 11, 12, 13, 14, 15, 16, 17, 18, 19, 20, 21, 22, 23, 24, 25, or more polypeptide monomers arranged in a N-terminal to C-terminal direction to bind to a predetermined 5, 6, 7, 8, 9, 10, 11, 12, 13, 14, 15, 16, 17, 18, 19, 20, 21, 22, 23, 24, 25 nucleotide length nucleic acid sequence.

[1061] In certain embodiments, nucleic acid binding domains are engineered to contain 5, 6, 7, 8, 9, 10, 11, 12, 13, 14, 15, 16, 17, 18, 19, 20, 21, 22, 23, 24, 25, 26 or more full length polypeptide monomers that are specifically ordered or arranged to target nucleic acid sequences of length 7, 8, 9, 10, 11, 12, 13, 14, 15, 16, 17, 18, 19, 20, 21, 22, 23, 24, 25, 26, 27 and 28 nucleotides, respectively. In certain embodiments, the polypeptide monomers are contiguous. In some embodiments, half-monomers may be used in the place of one or more monomers, particularly if they are present at the C-terminus of the TALE.

[1062] Polypeptide monomers are generally 33, 34 or 35 amino acids in length. With the exception of the RVD, the amino acid sequences of polypeptide monomers are highly conserved or as described herein, the amino acids in a polypeptide monomer, with the exception of the RVD, exhibit patterns that effect TALE activity, the identification of which may be used in preferred embodiments of the invention.

[1063] In certain embodiments, when the DNA binding domain may comprise (X1-11-X12X13-X14-33 or 34 or 35)z, wherein X1-11 is a chain of 11 contiguous amino acids, wherein X12X13 is a repeat variable diresidue (RVD), wherein X14-33 or 34 or 35 is a chain of 21, 22 or 23 contiguous amino acids, wherein z is at least 5 to 26, then the preferred combinations of amino acids are LTLD (SEQ ID NO:19936) or LTLA (SEQ ID NO:19937) or LTQV (SEQ ID NO:19938) at X1-4, or EQHG (SEQ ID NO:19939) or RDHG (SEQ ID NO:19940) at positions X30-33 or X31-34 or X32-35. Furthermore, other amino acid combinations of interest in the monomers are LTPD (SEQ ID NO:19941) at X1-4 and NQALE (SEQ ID NO:19942) at XI 6-20 and DHG at X32-34 when the monomer is 34 amino acids in length. When the monomer is 33 or 35 amino acids long, then the corresponding shift occurs in the positions of the contiguous amino acids NQALE (SEQ ID NO:19942) and DHG. In certain embodiments, NQALE (SEQ ID NO:19942) is at X15-19 or X17-21 and DHG is at X31-33 or X33-35.

[1064] In certain embodiments, amino acid combinations of interest in the monomers, are LTPD at X1-4 and KRALE (SEQ ID NO:19943) at X16-20 and AHG at X32-34 or LTPE (SEQ ID NO:19944) at X1-4 and KRALE (SEQ ID NO:19943) at XI 6-20 and DHG at X32-34 when the monomer is 34 amino acids in length. When the monomer is 33 or 35 amino acids long, the corresponding shift occurs in the positions of the contiguous amino acids KRALE (SEQ ID NO:19943), AHG and DHG. In certain embodiments, the positions of the contiguous amino acids may be (LTPD at X1-4 and KRALE (SEQ ID NO:19943) at X15-19 and AHG at X31-33) or (LTPE at X1-4 and KRALE (SEQ ID NO:19943) at X15-19 and DHG at X31-33) or (LTPD at X1-4 and KRALE at X17-21 and AHG at X33-35) or (LTPE at X1-4 and KRALE (SEQ ID NO:19943) at X17-21 and DHG at X33-35).

[1065] In certain embodiments, contiguous amino acids [NGKQALE](SEQ ID NO:19945) are present at positions X14-20 or X13-19 or X15-21. These representative positions put forward various embodiments of the invention and provide guidance to identify additional amino acids of interest or combinations of amino acids of interest in all the TALE monomers (see FIGS. 24A-24F, and 25 of WO 2012/067428).

[1066] Exemplary amino acid sequences of conserved portions of polypeptide monomers are provided below. The position of the RVD in each sequence is represented by XX or by X* (wherein (*) indicates that the RVD is a single amino acid and residue 13 (X13) is absent).

(SEQ ID NO: 19402)
LTPAQVVAIASXXGGKQALETVQRLLPVLCQDHG
(SEQ ID NO: 19403)
LTPAQVVAIASX*GGKQALETVQRLLPVLCQDHG
(SEQ ID NO: 19404)
LTPDQVVAIANXXGGKQALATVQRLLPVLCQDHG
(SEQ ID NO: 19405)
LTPDQVVAIANXXGGKQALETLQRLLPVLCQDHG
(SEQ ID NO: 19406)
LTPDQVVAIANXXGGKQALETVQRLLPVLCQDHG
(SEQ ID NO: 19407)
LTPDQVVAIASXXGGKQALATVQRLLPVLCQDHG
(SEQ ID NO: 19408)
LTPDQVVAIASXXGGKQALETVQRLLPVLCQDHG
(SEQ ID NO: 19409)
LTPDQVVAIASXXGGKQALETVQRVLPVLCQDHG
(SEQ ID NO: 19410)
LTPEQVVAIASXXGGKQALETVQRLLPVLCQAHG
(SEQ ID NO: 19411)
LTPYQVVAIASXXGSKQALETVQRLLPVLCQDHG
(SEQ ID NO: 19412)
LTREQVVAIASXXGGKQALETVQRLLPVLCQDHG
(SEQ ID NO: 19413)
LSTAQVVAIASXXGGKQALEGIGEQLLKLRTAPYG
(SEQ ID NO: 19414)
LSTAQVVAVASXXGGKPALEAVRAQLLALRAAPYG

[1067] A further listing of TALE monomers excluding the RVDs which may be denoted in a sequence (X1-11-X14-34 or X1-11-X14-35), wherein X is any amino acid and the subscript is the amino acid position is provided in FIG. 24A-F of WO 2012/067428, which is incorporated herein by reference.

[1068] In certain embodiments, TALE polypeptide binding efficiency is increased by including amino acid sequences from the “capping regions” that are directly N-terminal or C-terminal of the DNA binding region of naturally occurring TALEs into the engineered TALEs at positions N-terminal or C-terminal of the engineered TALE DNA binding region. Thus, in certain embodiments, the TALE polypeptides described herein further comprise an N-terminal capping region and/or a C-terminal capping region.

[1069] An exemplary amino acid sequence of a N-terminal capping region is:

(SEQ ID NO: 19415)
MDPIRSRTPSPARELLSGPQPDGVQPTADRGVSPPAGGPLDGLPARRTMS
RTRLPSPPAPSPAFSADSFSDLLRQFDPSLENTSLFDSLPPFGAHHTEAA
TGEWDEVQSGLRAADAPPPTMRVAVTAARPPRAKPAPRRRAAQPSDASPA
AQVDLRTLGYSQQQQEKIKPKVRSTVAQHHEALVGHGFTHAHIVALSQHP
AALGTVAVKYQDMIAALPEATHEAIVGVGKQWSGARALEALLTVAGELRG
PPLQLDTGQLLKIAKRGGVTAVEAVHAWRNALTGAPLN

[1070] An exemplary amino acid sequence of a C-terminal capping region is:

(SEQ ID NO: 19416)
RPALESIVAQLSRPDPALAALTNDHLVALACLGGRPALDAVKKGLPHAPA
LIKRTNRRIPERTSHRVADHAQVVRVLGFFQCHSHPAQAFDDAMTQFGMS
RHGLLQLFRRVGVTELEARSGTLPPASQRWDRILQASGMKRAKPSPTSTQ
TPDQASLHAFADSLERDLDAPSPMHEGDQTRAS

[1071] As used herein the predetermined “N-terminus” to “C terminus” orientation of the N-terminal capping region, the DNA binding domain comprising the repeat TALE monomers and the C-terminal capping region provide structural basis for the organization of different domains in the d-TALEs or polypeptides of the invention.

[1072] The entire N-terminal and/or C-terminal capping regions are not necessary to enhance the binding activity of the DNA binding region. Therefore, in certain embodiments, fragments of the N-terminal and/or C-terminal capping regions are included in the TALE polypeptides described herein.

[1073] In certain embodiments, the TALE (including TALEs) polypeptides described herein contain a N-terminal capping region fragment that included at least 10, 20, 30, 40, 50, 54, 60, 70, 80, 87, 90, 94, 100, 102, 110, 117, 120, 130, 140, 147, 150, 160, 170, 180, 190, 200, 210, 220, 230, 240, 250, 260 or 270 amino acids of an N-terminal capping region. In certain embodiments, the N-terminal capping region fragment amino acids are of the C-terminus (the DNA-binding region proximal end) of an N-terminal capping region. N-terminal capping region fragments that include the C-terminal 240 amino acids enhance binding activity equal to the full length capping region, while fragments that include the C-terminal 147 amino acids retain greater than 80% of the efficacy of the full length capping region, and fragments that include the C-terminal 117 amino acids retain greater than 50% of the activity of the full-length capping region.

[1074] In some embodiments, the TALE polypeptides described herein contain a C-terminal capping region fragment that included at least 6, 10, 20, 30, 37, 40, 50, 60, 68, 70, 80, 90, 100, 110, 120, 127, 130, 140, 150, 155, 160, 170, 180 amino acids of a C-terminal capping region. In certain embodiments, the C-terminal capping region fragment amino acids are of the N-terminus (the DNA-binding region proximal end) of a C-terminal capping region. In certain embodiments, C-terminal capping region fragments that include the C-terminal 68 amino acids enhance binding activity equal to the full length capping region, while fragments that include the C-terminal 20 amino acids retain greater than 50% of the efficacy of the full length capping region.

[1075] In certain embodiments, the capping regions of the TALE polypeptides described herein do not need to have identical sequences to the capping region sequences provided herein. Thus, in some embodiments, the capping region of the TALE polypeptides described herein have sequences that are at least 50%, 60%, 70%, 80%, 85%, 90%, 91%, 92%, 93%, 94%, 95%, 96%, 97%, 98% or 99% identical or share identity to the capping region amino acid sequences provided herein. Sequence identity is related to sequence homology. Homology comparisons may be conducted by eye, or more usually, with the aid of readily available sequence comparison programs. These commercially available computer programs may calculate percent (%) homology between two or more sequences and may also calculate the sequence identity shared by two or more amino acid or nucleic acid sequences. In some preferred embodiments, the capping region of the TALE polypeptides described herein have sequences that are at least 95% identical or share identity to the capping region amino acid sequences provided herein.

[1076] Sequence homologies may be generated by any of a number of computer programs known in the art, which include but are not limited to BLAST or FASTA. Suitable computer program for carrying out alignments like the GCG Wisconsin Bestfit package may also be used. Once the software has produced an optimal alignment, it is possible to calculate % homology, preferably % sequence identity. The software typically does this as part of the sequence comparison and generates a numerical result. % homology may be calculated over contiguous sequences, i.e., one sequence is aligned with the other sequence and each amino acid or nucleotide in one sequence is directly compared with the corresponding amino acid or nucleotide in the other sequence, one residue at a time. This is called an “ungapped” alignment. Typically, such ungapped alignments are performed only over a relatively short number of residues.

[1077] Additional sequences for the conserved portions of polypeptide monomers and for N-terminal and C-terminal capping regions are included in the sequences with the following gene accession numbers: AAW59491.1, AAQ79773.2, YP_450163.1, YP_001912778.1, ZP_02242672.1, AAW59493.1, AAY54170.1, ZP_02245314.1, ZP_02243372.1, AAT46123.1, AAW59492.1, YP 451030.1, YP 001915105.1, ZP_02242534.1, AAW77510.1, ACD11364.1, ZP 02245056.1, ZP_02245055.1, ZP 02242539.1, ZP 02241531.1, ZP_02243779.1, AAN01357.1, ZP 02245177.1, ZP 02243366.1, ZP_02241530.1, AAS58130.3, ZP 02242537.1, YP 200918.1, YP_200770.1, YP 451187.1, YP_451156.1, AAS58127.2, YP_451027.1, UR_451025.1, AAA92974.1, UR_001913755.1, ABB70183.1, UR_451893.1, UR_450167.1, ABY60855.1, UR_200767.1, ZR 02245186.1, ZR_02242931.1 ZR_02242535.1, AAU54169.1, UR 450165.1, UR_001913452.1, AAS58129.3, ACM44927.1, ZR_02244836.1, AAT46125.1, UR_450161.1 ZR_02242546.1, AAT46122.1, UR_451897.1, AAF98343.1, UR_001913484.1, AAY54166.1, UR_001915093.1, UR_001913457.1, ZR_02242538.1, UR_200766.1, UR_453043.1, UR_001915089.1, UR_001912981.1, ZR_02242929.1, UR_001911730.1, UR_201654.1, UR_199877.1, ABB70129.1, UR_451696.1, UR_199876.1, AAS75145.1, AAT46124.1, UR_200914.1, UR 001915101.1, ZR_02242540.1, AAG02079.2, UR_451895.1, YP 451189.1, UR_200915.1, AAS46027.1, UR_001913759.1, UR_001912987.1, AAS58128.2, AAS46026.1, UR_201653.1, UR 202894.1, UR 001913480.1, ZR_02242666.1, R_001912775.1, ZR_02242662.1, AAS46025.1, AAC43587.1, BAA37119.1, NPJ544725.1, AB077779.1, BAA37120.1, ACZ62652.1, BAF46271.1, ACZ62653.1, NPJ544793.1, AB077780.1, ZR 022437401 ZR_02242930.1, AAB69865.1, AAY54168.1, ZR_02245191.1, UR_001915097.1, ZR_02241539.1, UR_451158.1, BAA37121.1, UR_001913182.1, UR_200903.1, ZR_02242528.1, ZR 06705357.1, ZR_06706392.1, AD148328.1, ZR 06731493.1, AD148327.1, AB077782.1, ZR 06731656.1, NR_942641.1, AAY43360.1, ZR_06730254.1, ACN39605.1, UR_451894.1, UR 201652.1, UR_001965982.1, BAF46269.1, NPJ544708.1, ACN82432.1, AB077781.1, P14727.2, BAF46272.1, AAY43359.1, BAF46270.1, NR_644743.1, ABG37631.1, AAB00675.1, YP 199878.1, ZR_02242536.1, CAA48680.1, ADM80412.1, AAA27592.1, ABG37632.1, ABP97430.1, ZR_06733167.1, AAY43358.1, 2KQ5_A, BAD42396.1, AB027075.1, UR 002253357.1, UR_002252977.1, AB027074.1, AB027067.1, AB027072.1, AB027068.1, UR_003750492.1, AB027073.1, NR_519936.1, AB027071.1, AB027070.1, and AB027069.1, each of which is hereby incorporated by reference.

[1078] In some embodiments, the TALEs described herein also include a nuclear localization signal and/or cellular uptake signal. Such signals are known in the art and may target a TALE to the nucleus and/or intracellular compartment of a cell. Such cellular uptake signals include, but are not limited to, the minimal Tat protein transduction domain which spans residues 47-57 of the human immunodeficiency virus Tat protein: YGRKKRRQRRR (SEQ ID NO:19952).

[1079] In some embodiments, the TALEs described herein include a nucleic acid or DNA binding domain that is a non-TALE nucleic acid or a non-TALE DNA binding domain.

[1080] As used herein the term “non-TALE DNA binding domain” refers to a DNA binding domain that has a nucleic acid sequence corresponding to a nucleic acid sequence which is not substantially homologous to a nucleic acid that encodes for a TALE protein or fragment thereof, e.g., a nucleic acid sequence which is different from a nucleic acid that encodes for a TALE protein and which is derived from the same or a different organism.

[1081] In certain embodiments, the TALEs described herein include a nucleic acid or DNA binding domain that is linked to a non-TALE polypeptide.

[1082] A “non-TALE polypeptide” refers to a polypeptide having an amino acid sequence corresponding to a protein which is not substantially homologous to a TALE protein or fragment thereof, e.g., a protein which is different from a TALE protein and which is derived from the same or a different organism. In this context, the term “linked” is intended include any manner by which the nucleic acid binding domain and the non-TALE polypeptide could be connected to each other, including, for example, through peptide bonds by being part of the same polypeptide chain or through other covalent interactions, such as a chemical linker. The non-TALE polypeptide may be linked, for example to the N-terminus and/or C-terminus of the nucleic acid binding domain, may be linked to a C-terminal or N-terminal cap region, or may be connected to the nucleic acid binding domain indirectly.

[1083] In certain embodiments, the TALEs or polypeptides of the invention comprise chimeric DNA binding domains. Chimeric DNA binding domains may be generated by fusing a full TALE (including the N- and C-terminal capping regions) with another TALE or non-TALE DNA binding domain such as zinc finger (ZF), helix-loop-helix, or catalytically-inactivated DNA endonucleases (e.g., EcoRI, meganucleases, etc.), or parts of TALE may be fused to other DNA binding domains. The chimeric domain may have novel DNA binding specificity that combines the specificity of both domains.

[1084] In certain embodiments, the TALE polypeptides of the invention include a nucleic acid binding domain linked to the one or more effector domains. In certain embodiments, the effector domain is a nickase or nuclease.

[1085] In certain embodiments, the sequence-specific nuclease is a zinc finger nuclease (ZFN), such as an artificial zinc-finger nuclease having arrays of zinc-finger (ZF) modules to target new DNA-binding sites in a target sequence (e.g., target sequence or target site in the genome). Each zinc finger module in a ZF array targets three DNA bases. A customized array of individual zinc finger domains is assembled into a ZF protein (ZFP). The resulting ZFP can be linked to a functional domain such as a nuclease.

[1086] ZF nucleases (ZFN) may be used as alternative programmable nucleases for use in retron-based editing in place of RNA-guide nucleases. ZFN proteins have been extensively described in the art, for example, in Carroll et al., “Genome Engineering with Zinc-Finger Nucleases,” Genetics, August 2011, Vol. 188: 773-782; Durai et al., “Zinc finger nucleases: custom-designed molecular scissors for genome engineering of plant and mammalian cells,” Nucleic Acids Res, 2005, Vol. 33: 5978-90; and Gaj et al., “ZFN, TALEN, and CRISPR/Cas-based methods for genome engineering,” Trends Biotechnol. 2013, Vol. 31: 397-405, each of which are incorporated herein by reference in their entireties.

[1087] In certain embodiments, the ZF-linked nuclease is a catalytic domain of the Type IIS restriction enzyme FokI (see Kim et al., PNAS U.S.A. 91:883-887, 1994; Kim et al., PNAS U.S.A. 93:1156-1160, 1996, both incorporated herein by reference).

[1088] In certain embodiments, the ZFN comprises paired ZFN heterodimers, resulting in increased cleavage specificity and/or decreased off-target activity. In this embodiment, each ZFN in the heterodimer targets different nucleotide sequences separated by a short spacer (see Doyon et al., Nat. Methods 8:74-79, 2011, incorporated herein by reference).

[1089] In certain embodiments, the ZFN comprises a polynucleotide-binding domain (comprising multiple sequence-specific ZF modules) and a polynucleotide cleavage nickase domain.

[1090] In certain embodiments, the ZFs are engineered using libraries of two finger modules.

[1091] In certain embodiments, strings of two-finger units are used in ZFNs to improve DNA binding specificity from polyzinc finger peptides (see PNAS USA 98: 1437-1441, incorporated herein by reference).

[1092] In certain embodiments, the ZFN has more than 3 fingers. In certain embodiments, the ZFN has 4, 5, or 6 fingers. In certain embodiments, the ZF modules in the ZFN are separated by one or more linkers to improve specificity.

[1093] In certain embodiments, the ZF of the ZFN includes substitutions in the dimer interface of the cleavage domain that prevent homodimerization between ZFs, but allow heterodimers to form.

[1094] In certain embodiments, the ZF of the ZFN has a design that retains activity while suppressing homodimerization.

[1095] In certain embodiments, the ZFN is any one of the ZF nucleases in Table 1 of Carroll et al., Genetics 188(4):773-782, 2011, incorporated herein by reference.

[1096] General principles and guidance for generating ZF, ZF arrays, and ZFN can be found in the art, such as the modular design (where the different modules can be rearranged and assembled into new combinations for new targets) of the ZF or ZF arrays in the ZFN as taught in Carroll et al., Nat. Protoc. 1: 1329-1341, 2006 (incorporated herein by reference); the new three-finger sets for engineered ZFs generated by using partially randomized libraries; profiling the DNA-binding specificities of engineered Cys2His2 zinc finger domains using a rapid cell-based method (see Nucleic Acids Res. 35: e81, incorporated by reference). ZFs for certain DNA triplets that work well in neighbor combination are described in Sander et al., 2011. Selection-free zinc-finger-nuclease engineering by context-dependent assembly (CoDA) is taught in Nat. Methods 8: 67-69). ToolGen describes the individual fingers in their collection that are best behaved in modular assembly (Kim et al., 2011). Preassembled zinc-finger arrays for rapid construction of ZFNs are taught in Nat. Methods 8:7.

[1097] Additional, non-limiting ZFs and AFNz that can be adapted for use in the instant invention include those described in WO2010/065123, WO2000/041566, WO2003/080809, WO2015/143046, WO2016/183298, WO2013/044008, WO2015/031619, WO2017/136049, WO2016/014794, WO2017/091512, WO1995/009233, WO2000/023464, WO2000/042219, WO2002/026960, WO2001/083793; U.S. Pat. Nos. 9,428,756, 9,145,565, 8,846,578, 8,524,874, 6,777,185, 6,599,692, 7,235,354, 6,503,717, 7,491,531, 7,943,553, 7,262,054, 8,680,021, 7,705,139, 7,273,923, 6,780,590, 6,785,613, 7,788,044, 7,177,766, 6,453,242, 6,794,136, 7,358,085, 8,383,766, 7,030,215, 7,013,219, 7,361,635, 7,939,327, 8,772,453, 9,163,245, 7,045,304, 8,313,925, 9,260,726, 6,689,558, 8,466,267, 7,253,273, 7,947,873, 9,388,426, 8,153,399, 8,569,253, 8,524,221, 7,951,925, 9,115,409, 8,772,008, 9,121,072, 9,624,498, 6,979,539, 9,491,934, 6,933,113, 9,567,609, 7,070,934, 9,624,509, 8,735,153, 9,567,573, 6,919,204, US2002-0081614, US2004-0203064, US2006-0166263, US2006-0292621, US2003-0134318, US2006-0294617, US2007-0287189, US2007-0065931, US2003-0105593, US2003-0108880, US2009-0305402, US2008-0209587, US2013-0123484, US2004-0091991, US2009-0305977, US2008-0233641, US2014-0287500, US2011-0287512, US2009-0258363, US2013-0244332, US2007-0134796, US2010-0256221, US2005-0267061, US2012-0204282, US2012-0252122, US2010-0311124, US2016-0215298, US2008-0031109, US2014-0017214, US2015-0267205, US2004-0235002, US2004-0204345, US2015-0064789, US2006-0063231, US2011-0265198, US2017-0218349, all incorporated herein by reference.

[1098] Polynucleotides and vectors capable of expressing one or more of the ZFNs are also provided herein, which can be part of the vector system of the invention. The polynucleotides and vectors can be expressed in a cell, such as a eukaryotic cell, a mammalian cell, or a human cell. Suitable vectors, cells and expression systems are described in greater detail elsewhere herein, and can be suitable for use with the TALEs, the meganucleases, and the CRISPR-Cas nucleases.

[1099] In certain embodiments, the sequence-specific nuclease is a meganuclease.

[1100] Meganucleases are a class of sequence-specific endonucleases that recognize large DNA target sites (>12 bp). These proteins can cleave a unique chromosomal sequence without affecting overall genome integrity. Meganucleases create site specific DNA DSBs, and, in the presence of donor DNA, such as one present in the heterologous nucleic acid encompassed by or encoded by the engineered retron of the invention, promotes the integration of the donor DNA at the cleavage site through homologous recombination (HR).

[1101] In certain embodiments, the meganuclease is a homing endonuclease, which is a widespread class of proteins found in eukaryotes, bacteria and archaea. In certain embodiments, the meganuclease is of the LAGLIDADG (SEQ ID NO:19953) family of homing endonucleases.

[1102] In certain embodiments, the meganuclease is I-Scel, I-Cre-I, I-Dmol, or an engineered or a naturally occurring variant thereof. The hallmark of these proteins is a well conserved LAGLIDADG (SEQ ID NO:19953) peptide motif, termed (do)decapeptide, found in one or two copies. Homing endonucleases with only one such motif, such as I-Crel or I-Ceul, function as homodimers. In contrast, larger proteins bearing two (do)decapeptide motifs, such as I-Scel, Pl-Scel and I-Dmol are single chain proteins.

[1103] Additional homing nucleases are found at the website of homingendonuclease.net, which provides a database listing basic properties of known LAGLIDADG (SEQ ID NO:19953) homing endonucleases. See also Taylor et al., Nucleic Acids Research 40 (W1): W110-W116, 2012 (all incorporated herein by reference).

[1104] In certain embodiments, specificity (or polynucleotide recognition) of the meganuclease is modified by altering the amino acids within the meganuclease, and/or by fusing other effector domains with the meganuclease.

[1105] In certain embodiments, the meganuclease is a megaTAL, which includes a DNA binding domain from a TALE.

[1106] In certain embodiments, the meganuclease is engineered to have nickase activity.

[1107] Additional suitable natural and engineered meganucleases and megaTALs are described in WO2006/097853, WO2004/067736, WO2012/030747, WO2007/123636, WO2010/001189, WO2018/071565, WO2007/049095, WO2009/068937, WO2005/105989, WO2008/102198, WO2007/057781, WO2019/126558, WO2010/046786, US2010-0151556, US2014-0121115, US2011-0207199, US2012-0301456, US2013-0189759, US2011-0158974, US2010-0144012, US2014-0112904, US2013-0196320, US2010-0203031, US2010-0167357, US2012-0272348, US2012-0258537, US2011-0072527, US2013-0183282, US2014-0178942, US2012-0260356, US2013-0236946, US2010-0325745, US2011-0041194, US2014-0004608, US2011-0263028, US2011-0225664, US2013-0145487, US2013-0045539, US2012-0171191, US2015-0315557, US2014-0017731, US2011-0091441, US2014-0038239, US2010-0229252, US2009-0222937, US2010-0146651, US2013-0059387, US2011-0179507, US2013-0326644, US2006-0078552, US2004-0002092, US2012-0052582, US2009-0162937, US2010-0086533, US2009-0220476, U.S. Pat. Nos. 8,802,437, 7,842,489, 8,715,992, 8,426,177, 8,476,072, 9,365,864, 9,540,623, 9,273,296, 9,290,748, 8,163,514, 8,148,098, 8,143,016, 8,143,015, 8,133,697, 8,129,134, 8,124,369, 8,119,361, 7,897,372, 9,683,257, 10,287,626, 10,273,524, 10,000,746, 10,006,052, 7,919,605, 9,018,364, 10,407,672, 8,211,685, 9,365,864, 7,476,500, all incorporated herein by reference.

[1108] In certain embodiments, the sequence-specific nuclease is TnpB, which is a programmable RNA-guided DNA endonuclease. It is believed that TnpB is a functional progenitor of the CRISPR-Cas nucleases.

[1109] Transposons are mobile genetic elements that contain only the genes required for their transposition and its regulation. These elements encode the tnpA transposase, which is essential for mobilization, and often carry an accessory tnpB gene, which is dispensable for transposition. TnpB has been shown to be a nuclease that is guided by an RNA, derived from the right-end element of a transposon, to cleave DNA next to the 5′-TTGAT transposon-associated motif, and TnpB can be reprogrammed to cleave DNA target sites in human cells.

[1110] In certain embodiments, TnpB is from D. radiodurans ISDra2 of the IS200/1S605 family.

[1111] In certain embodiments, TnpB is from transposon PsiTn554.

[1112] In certain embodiments, the sequence-specific nuclease is a TnpB-like protein, such as Fanzor1 or Fanzor2. These proteins are widespread in diverse eukaryotic transposable elements (TEs), and in large double-stranded DNA (dsDNA) viruses infecting eukaryotes. Fanzor and TnpB proteins share the same conserved amino acid motif in their C-terminal half regions: D-X(125, 275)-[TS]-[TS]-X-X-[C4 zinc finger]-X(5,50)-RD, but are highly variable in their N-terminal regions. Fanzor1 proteins are frequently captured by DNA transposons from different superfamilies including Helitron, Mariner, IS4-like, Sola and MuDr. In contrast, Fanzor2 proteins appear only in some IS607-type elements.

[1113] In certain embodiments, the sequence-specific nuclease is IscB.

[1114] ISC (insertion sequences Cas9-like) is a novel group of bacterial and archaeal DNA transposons that encode Cas9 homologs. The ISC transposon-encoded two nuclease domain-containing proteins are the likely ancestors of the CRISPR-associated Cas9. The homology region includes the arginine-rich helix and the HNH nuclease domain that is inserted into the RuvC-like nuclease domain. ISC genes, however, are not linked to Cas genes or CRISPR. They represent a distinct group of nonautonomous transposons, with many diverse families of full-length ISC transposons. Their terminal sequences (particularly 3′ termini) are similar to those of IS605 superfamily transposons that are mobilized by the Y1 tyrosine transposase encoded by the TnpA gene, and often also encode the TnpB protein containing the RuvC-like endonuclease domain. The terminal regions of the ISC and IS605 transposons contain palindromic structures that are likely recognized by the Y1 transposase. The transposons from these two groups are inserted either exactly in the middle or upstream of specific 4-bp target sites, without target site duplication.

[1115] In certain embodiments, the sequence-specific nuclease is a restriction endonuclease (RE), such as an RE with stringent/long recognition sequence of at least 8 nts.

[1116] In certain embodiments, the RE is a rare-cutter RE with seven and eight base pair recognition sequences. Exemplary rare-cutter RE enzyme include NotI, which cuts after the first GC of a 5′-GCGGCCGC-3′ sequence (SEQ ID NO: 19417).

[1117] In certain embodiments, the components of the system—e.g., the retron encoded ncRNA or msDNA in complex with the RT, the sequence-specific nuclease, and the DNA-repair modulating biomolecule, may form multiple complexes in a so-called split complex configuration. The multiple complexes may be brought together to form a functional complex.

[1118] For example, in some embodiments, a first component in the system may be a split protein or domain. A fragment of the split protein or domain may associate with a second component of the system, while another fragment of the split protein or domain may associate with a third component of the system. The two fragments of the split protein or domain may be brought together (e.g., along with the other components of the system) to form a functional complex.

[1119] In certain embodiments, the split protein or domain is the sequence-specific nuclease, e.g., a CRISPR/Cas effector enzyme (e.g., Cas protein such as Cas9 or Cas12), a ZFN, a TALEN, a meganuclease, TnpB, IscB, or a restriction endonuclease (RE).

[1120] In certain embodiments, the split protein or domain is the reverse transcriptase domain.

[1121] In certain embodiments, the split protein or domain is the DNA-repair modulating biomolecule.

[1122] For example a first fragment of the sequence-specific nuclease may associate with the reverse transcriptase domain and a second fragment of the sequence-specific nuclease may associate with the DNA-repair modulating biomolecule. The two fragments of the split protein or domain may be brought together (e.g., along with the reverse transcriptase domain and the DNA-repair modulating biomolecule) to form a functional complex. The associations between the parts of the split protein or domain may be through adaptor proteins or linkers described herein (e.g., those used for associating Cas proteins with function domains).

[1123] In certain embodiments, the split protein or domain is split in the sense that the two parts of the split protein or domain substantially comprise a functioning split protein or domain. Ideally, the split should always be so that the catalytic domain(s) are unaffected. That split protein or domain may function as a sequence-specific nuclease or it may be a dead-Cas which is essentially an RNA-binding protein with very little or no catalytic activity, due to typically mutation(s) in its catalytic domains.

[1124] Each fragment of the split protein or domain may be fused to a dimerization partner. For example, rapamycin sensitive dimerization domains enables a chemically inducible split protein or domain for temporal control of the split protein or domain's activity. The split protein or domain can thus be rendered chemically inducible by being split into two fragments and that rapamycin-sensitive dimerization domains may be used for controlled reassembly of the split protein or domain. The two parts of the split protein or domain can be thought of as the N′ terminal part and the C′ terminal part of the split protein or domain. The fusion is typically at the split point of the split protein or domain. In other words, the C′ terminal of the N′ terminal part of the split protein or domain is fused to one of the dimer halves, whilst the N′ terminal of the C′ terminal part is fused to the other dimer half.

[1125] The split protein or domain does not have to be split in the sense that the break is newly created. The split point is typically designed in silico and cloned into the constructs. Together, the two parts of the split protein or domain, the N‘ terminal and C’ terminal parts, form a full split protein or domain, comprising preferably at least 70% or more of the wildtype amino acids (or nucleotides encoding them), at least 80% or more, at least 90% or more, at least 95% or more, and at least 99% or more of the wildtype amino acids (or nucleotides encoding them). When the two parts are brought together, the desired split protein or domain function is restored or reconstituted. The dimer may be a homodimer or a heterodimer.

[1126] In certain embodiments, the protein components of the system—e.g., the RT, the sequence-specific nuclease (a CRISPR/Cas effector enzyme, a ZFN, a TALEN, a meganuclease, TnpB, IscB, or a restriction endonuclease (RE)), and the DNA-repair modulating biomolecule, may further comprise one or more additional functional domains.

[1127] In certain embodiments, the functional domain comprises a nuclear localization signal (NLS). In certain embodiments, one or more C-terminal or N-terminal NLSs are attached. In certain embodiments, a C-terminal NLS is attached for expression and nuclear targeting in eukaryotic cells, e.g., human cells. In certain embodiments, the NLS(s) may be at a location that is not at the C-terminus or N-terminus, for example, the NLS(s) may be between two polypeptides.

[1128] Non-limiting examples of NLSs include an NLS sequence derived from: the NLS of the SV40 virus large T-antigen; the NLS from nucleoplasmin (e.g., the nucleoplasmin bipartite NLS); the c-myc NLS; the hRNPAl M9 NLS; the NLS of the IBB domain from importin-alpha; the NLS of the myoma T protein; the NLS of human p53; the NLS of mouse c-abl IV; the NLS of the influenza virus NS1; the NLS of the Hepatitis virus delta antigen; the NLS of the mouse Mxl protein; the NLS of the human poly(ADP-ribose) polymerase; and the NLS of the steroid hormone receptors (human) glucocorticoid. Exemplary NLS sequences include those described in paragraph [00106] of Feng Zhang et al. (WO2016/106236), all incorporated herein by reference.

[1129] In certain embodiments, the functional domain comprises at least two NLS domains. The one or more NLS domain(s) may be positioned at or near or in proximity to a terminus of a polypeptide and, if two or more NLSs, each of the two may be positioned at or near or in proximity to a terminus of the polypeptide.

[1130] In any of the fusion proteins, the fusion between the two domains (such as the RT and Cas enzyme, or the Cas and the DNA-repair modulating biomolecule) may be linked through a linker.

[1131] A “linker” as used herein includes a peptide which joins two proteins or domains to form a fusion protein. Generally, such molecules have no specific biological activity other than to join or to preserve some minimum distance or other spatial relationship between the proteins/domains. However, in certain embodiments, the linker may be selected to influence some property of the linker and/or the fusion protein such as the folding, net charge, or hydrophobicity of the linker. Suitable linkers for use in the present disclosure are well-known to those of skill in the art and include, but are not limited to, straight or branched-chain carbon linkers, heterocyclic carbon linkers, or peptide linkers. However, as used herein, the linker may also be a covalent bond (carbon-carbon bond or carbon-heteroatom bond).

[1132] In particular embodiments, the linker is used to separate the sequence-specific nuclease (a CRISPR/Cas effector enzyme, a ZFN, a TALEN, a meganuclease, TnpB, IscB, or a restriction endonuclease (RE)) and the RT and/or the DNA-repair modulating biomolecule by a distance sufficient to ensure that each protein domain retains its required functional property.

[1133] Preferred peptide linker sequences adopt a flexible extended conformation and do not exhibit a propensity for developing an ordered secondary structure. In certain embodiments, the linker can be a chemical moiety which can be monomeric, dimeric, multimeric or polymeric. In certain embodiments, the linker comprises amino acids. Typical amino acids in flexible linkers include Gly, Asn and Ser. Accordingly, in particular embodiments, the linker comprises a combination of one or more of Gly, Asn and Ser amino acids. Other near neutral amino acids, such as Thr and Ala, also may be used in the linker sequence.

[1134] In certain embodiments, the linker comprises a GlySer-rich sequence, such as a GₙS linker (n=1, 2, 3, 4, or 5, such as GS or G₄S) (SEQ ID NO:19946), or repeats thereof (such as 1, 2, 3, 4, 5, 6, 7, 8, 9, 10, 11, 12, 13, 14, 15, 16, 17, 18, 19, or 20 repeats, optionally with an overall length of about 4-30 residues, 4-20 residues, or 4-10 residues).

[1135] In certain embodiments, the linker comprises a G₄S linker with 3, 6, 9, or 12 repeats.

[1136] In certain embodiments, the linker is one disclosed in Maratea et al., Gene 40: 39-46, 1985; Murphy et al., PNAS USA 83: 8258-62, 1986; U.S. Pat. No. 4,935,233; or 4,751,180, all incorporated by reference.

[1137] In certain embodiments, the linker comprises a GlySer linker such as GGS, GGGS (SEQ ID NO:19947), GSG, GGGGS (SEQ ID NO:19948), optionally with repeats of 3 (such as (GGS)₃, (SEQ ID NO:19949) (GGGGS)₃) (SEQ ID NO:19950), 4, 5, 6, 7, 8, 9, 10, 11, or 12 or more, to provide suitable lengths.

[1138] In certain embodiments, the linker comprises (GGGGS)₃₋₁₅ (SEQ ID NO:19951), such as (GGGGS)₃₋₁₁ (SEQ ID NO:19951), e.g., GGGGS (SEQ ID NO:19951) with 1, 2, 3, 4, 5, 6, 7, 8, 9, 10, or 11 repeats.

[1139] In certain embodiments, the linker comprises LEPGEKPYKCPECGKSFSQSGALTRHQRTHTR (SEQ ID NO: 19418).

[1140] In yet an additional embodiment, the linker is an XTEN linker.

[1141] In certain embodiments, N- and/or C-terminal NLSs also function as linker (e.g., PKKKRKVEASSPKKRKVEAS (SEQ ID NO: 19420)).

[1142] The gRNA and the various nucleases and fusions thereof can be provided in the form of a protein, optionally where the nuclease is complexed with a gRNA, or provided by a nucleic acid encoding the RNA-guided nuclease, such as an RNA (e.g., messenger RNA) or DNA (expression vector). In some embodiments, the RNA-guided nuclease and the gRNA are both provided by vectors. Both can be expressed by a single vector or separately on different vectors. The vectors encoding the RNA-guided nuclease and gRNA may be included in the vector system comprising the engineered retron msr gene, msd gene and ret gene sequences.

[1143] Codon usage may be optimized to improve production of the engineered retron e.g., retron reverse transcriptase, ncRNA and/or RNA-guided nuclease in a particular cell or organism. For example, a nucleic acid encoding an ncRNA, RNA-guided nuclease or reverse transcriptase can be modified to substitute codons having a higher frequency of usage in a the particular cell such as a eukaryotic cell (e.g., yeast cell, a human cell, a non-human cell, a mammalian cell, a rodent cell, a mouse cell, a rat cell), or any other host cell of interest, as compared to the naturally occurring polynucleotide sequence. When a nucleic acid encoding the reverse transcriptase or ncRNA is introduced into cells, the protein can be transiently, conditionally, or constitutively expressed in the cell.

### F. RT-PN Fusion Proteins

[1144] The recombinant retron-based editing system described herein contemplates fusion proteins comprising a programmable nuclease (PN) and a RT, optionally joined by a linker. The application contemplates any suitable programmable nuclease and RT (e.g., retron RTs of Table A) to be combined in a single fusion protein. In one embodiment, the RT is joined to the N-terminus of the PN. In another embodiment, the RT is joined to the C-terminus of the PN. The Examples of PNs and RTs are each defined herein.

[1145] In various embodiments, the fusion proteins may comprise any suitable structural configuration. For example, the fusion protein may comprise from the N-terminus to the C-terminus direction, a PN fused to a RT. In other embodiments, the fusion protein may comprise from the N-terminus to the C-terminus direction, a RT fused to a NP. The fused domain may optionally be joined by a linker, e.g., an amino acid sequence.

### G. Retron-Based Gene Editing Systems

[1146] The present disclosure relates to novel genome editing systems that include retrons, including retron RT and ncRNAs. In exemplary embodiments, the editing systems comprise:
[1147] (a) one or more retron RT polypeptide sequences comprising at least 45%, 46%, 47%, 48%, 49%, 50%, 51%, 52%, 53%, 54%, 55%, 56%, 57%, 58%, 59%, 60%, 61%, 62%, 63%, 64%, or 65% sequence identity to any one of the amino acid sequences of Table A, or a polynucleotide sequence encoding same (as also provided in Table A);
[1148] (b) (a) one or more retron ncRNA polynucleotide sequences comprising at least 45%, 46%, 47%, 48%, 49%, 50%, 51%, 52%, 53%, 54%, 55%, 56%, 57%, 58%, 59%, 60%, 61%, 62%, 63%, 64%, or 65% sequence identity to any one of the amino acid sequences of Table B, wherein in one embodiment the retron RT and ncRNA are cognate pairs;
[1149] (c) one or more programmable nucleases (e.g., TnpB, Cas12a, or Cas9 as disclosed herein); and
[1150] (d) one or more polynucleotide sequences comprising a guide RNA, wherein the guide RNA comprises a complementary sequence to that of a targeted polynucleotide sequence and which binds to the programmable nuclease.

[1151] In other aspects, the retron-based gene editing systems may comprise one or more additional accessory proteins having genome modifying functions, including recombinases, invertases, nucleases, polymerases, ligases, deaminases, reverse transcriptases, or epigenetic modifying functions. In various embodiments, the accessory proteins may be provided separately. In other embodiments, the accessory proteins may be fused to a retron component (e.g., fused to a retron RT), optionally with a linker.

[1152] In various embodiments, the genome editing system may comprise a guide RNA, which hybridizes to one or more targeted polynucleotide sequence. In preferred embodiments, the guide RNA of the genome editing system comprises 12-40 nucleotides.

[1153] In various embodiments, the genome editing system comprises the targeted polynucleotide sequence comprises one or more protospacer adjacent motif (PAM) recognition domains selected from 5′-TTTN-3′, 5′-TTN-3′, 5′-TNN-3′, 5′-TTV-3′, or 5′-TTTV-3′, wherein N=A, T, C or G and V=A, C or G. In additional embodiments, the targeted polynucleotide sequence comprises one or more relaxed PAM recognition domains. Jacobsen, Thomas et al. “Characterization of Cas12a nucleases reveals diverse PAM profiles between closely-related orthologs.” Nucleic acids research vol. 48,10 (2020): 5624-5638. doi:10.1093/nar/gkaa272. Previous work has demonstrated to address the limitation for the requirement for an extended TTTV protospacer adjacent motif (PAM) by expanding the targeting range for non-canonical PAMs (such as ATTA, CTTA, GTTA, and TCTA) Kleinstiver, Benjamin P et al. “Engineered CRISPR-Cas12a variants with increased activities and improved targeting ranges for gene, epigenetic and base editing.” Nature biotechnology vol. 37,3 (2019): 276-282. doi:10.1038/s41587-018-0011-0. Most of the Cpf1 nucleases require thymine-rich PAM. Different studies have demonstrated an increased Cpf1 targeting range using in vitro and in vivo (E. co/i) PAM identification assays. Zhang, Xiaochun, et al. “Multiplex gene regulation by CRISPR-ddCpf1.” Cell discovery 3.1 (2017): 1-9. The two Cpf1 endonucleases, AsCpf1 and LbCpf1, require TTTV as a PAM sequence, where V can be A, C, or G nucleotides. Mutations at position S542R/K607R and S542R/K548V/N552R produced AsCpf1 variants, and these are able to recognize TYCV and TATV PAMs, respectively, where Y can be C or T. Gao, Linyi, et al. “Engineered Cpf1 variants with altered PAM specificities.” Nature biotechnology 35.8 (2017): 789-792. The AsCpf1 showed increased activity for TTTV PAMs and decreased activity with TTTT PAM Kim, Hui K., et al. “In vivo high-throughput profiling of CRISPR-Cpf1 activity.” Nature methods 14.2 (2017): 153-159.

[1154] Accordingly, it is within the scope of the disclosure to devise the editing system to recognize altered PAM recognition domains for genome editing. In preferred embodiments, the programmable polypeptide component recognizes one or more non-canonical PAM sequence in the targeted polynucleotide sequence, the PAM upstream of the crRNA-complementary DNA sequence on the non-target strand. In related embodiments, the gRNA has a seed sequence of eight nucleotides, located at the 5′ end of the spacer, and is proximal to the PAM sequence on the targeted polynucleotide sequence.

[1155] In further embodiments, the one or more polypeptide sequences and the one or more polynucleotide sequences comprising a cognate guide RNA of the genome editing system form a ribonucleoprotein complex.

[1156] In various embodiments wherein the programmable nuclease is a Type V enzyme (e.g., Cas12a), the one or more polypeptide sequences of the genome editing system comprise:
[1157] one or more α-helical recognition lobe (REC) and a nuclease lobe (NUC);
[1158] a Wedge (WED), α-helical recognition lobe (REC), PAM-interacting (PI),
[1159] RuvC nuclease, Bridge Helix (BH) and NUC domains; or
[1160] one or more domains selected from RuvC, REC, WED, BH, PI and NUC domains.

[1161] In various embodiments wherein the programmable nuclease is a Type II enzyme (e.g., Cas9), the one or more polypeptide sequences of the genome editing system comprise:
[1162] An alpha-helical lobe and
[1163] A nuclease lobe that comprises two nuclease domains (the RuvC domain which cleaves the non-target DNA strand and the HNH domain that cleaves the target strand).

[1164] In various embodiments, the molecular weight of the programmable nuclease component is characterized in its molecular weight to be about 50 kDa-100 kDa, 100 kDa-200 kDa, 200 kDa-500 kDa.

[1165] In additional embodiments, the polypeptide sequences comprise at least one activity selected from endonuclease activity; endoribonuclease activity, or RNA-guided DNase activity. In such embodiments, the cognate guide RNA and the Cas12a protein modifies the targeted polynucleotide sequence of a host cell genome. In certain instances, the targeted polynucleotide sequence is modified by an insertion, deletion or alteration of one or more base pairs at the targeted polynucleotide sequence in the host cell genome.

[1166] In related embodiments, the genome editing system is characterized in enhanced efficiency and precision of site-directed integration. Preferably, the efficiency and precision of site-directed integration enabled by genome editing system is enhanced by staggered overhangs on the donor nucleic acid sequence. In certain embodiments, the targeted polynucleotide sequence is double-stranded and contains a 5′ overhang wherein the overhang preferably comprises five nucleotides.

[1167] In various other embodiments, the polypeptide of the genome editing system comprises one or more mutations. More preferably, the mutation encodes a nuclease-deficient polypeptide. In various embodiments, the genome editing system comprises a fusion of one or more deaminases to the nuclease deficient polypeptide. Preferably, the one or more deaminases of the genome editing system is selected from adenine deaminase or cytosine deaminase. Use of cytidine deaminase and adenosine deaminase base editing is disclosed in U.S. Pat. No. 9,840,699. One approach is to produce an Cas12a fusion protein, preferably an inactive or nickase variant) and a base-editing enzyme or the active domain of a base editing enzyme. Cytidine deaminase and adenosine deaminase base editing is disclosed in U.S. Pat. No. 9,840,699. In various embodiments, the compositions comprise contacting a targeted polynucleotide sequence with a fusion protein comprising an Cas12a and one or more base-editing polypeptide such as a deaminase; and a gRNA targeting the fusion protein to the targeted polynucleotide sequence of the DNA strand. Accordingly, the fusion of one or more deaminases to the nuclease deficient polypeptide of the Cas12a genome editing system of enables base editing on DNA and/or RNA. In select embodiments, the system modifies one or more nucleobase on DNA and RNA. In related embodiments, the system enables multiplexed gene editing. Preferably, the genome editing system comprises a single crRNA. More preferably, the system enables targeting multiple genes simultaneously.

[1168] In yet other embodiments, the programmable polypeptide is operably linked to a nuclear localization signal (NLS). Preferably, the programmable polypeptide comprises an NLS on the N-terminus or the C-terminus or both or multiple NLS on the Cas12a polypeptide. In some embodiments, the polypeptide linked to the NLS further comprises crRNA to form a ribonucleoprotein complex. In some embodiments, polypeptide comprises one or more NLS repeats at either N- or C-terminus of the polypeptide.

[1169] In select embodiments, the one or more polypeptide sequences of the genome editing system comprises a modification, wherein the modification comprises a nuclease-deficient polypeptide (dCas). In related embodiments, the guide RNA of the genome editing system of comprises a prime editing guide RNA (pegRNA). Preferably, the pegRNA of the genome editing system hybridizes to a targeted polynucleotide sequence and acts as a primer to the one or more reverse transcriptases. More preferably, the pegRNA of the genome editing system binds to the nicked strand for initiation of repair through a reverse transcriptase using the repair template.

[1170] In various additional embodiments, the nuclease-deficient polypeptide of the genome editing system comprises a nickase activity. Preferably, the genome editing system comprises fusion of one or more reverse transcriptases to the nuclease deficient Cas (dCas). In certain examples, the fusion of one or more reverse transcriptases is selected from

### Optional Components/Modifications

### Donor Templates

[1171] In one embodiment, the compositions and systems herein may further comprise one or more donor templates for use in editing. In some cases, the donor template may comprise one or more polynucleotides. In certain cases, the donor template may comprise coding sequences for one or more polynucleotides. The donor template may be a DNA template. It may be single stranded or double stranded. It may also be circular single or double stranded. It may also be linear single stranded or double stranded. Without being bound by theory, the donor template may become integrated into the genome after a targeted cut by a programmable nuclease cutter described herein through cellular repair machinery including HDR and NHEJ. In various embodiments, the HDR donor is formed from reverse transcription of the ncRNA and forms the RT-DNA portion thereof.

[1172] The donor template, which may be integrated into a ncRNA and expressed as an RT-DNA product, may be used for editing the target polynucleotide. In some cases, the donor polynucleotide comprises one or more mutations to be introduced into the target polynucleotide. Examples of such mutations include substitutions, deletions, insertions, or a combination thereof. The mutations may cause a shift in an open reading frame on the target polynucleotide. In some cases, the donor template alters a stop codon in the target polynucleotide. For example, the donor template may correct a premature stop codon. The correction may be achieved by deleting the stop codon or introduces one or more mutations to the stop codon. In other example embodiments, the donor template addresses loss of function mutations, deletions, or translocations that may occur, for example, in certain disease contexts by inserting or restoring a functional copy of a gene, or functional fragment thereof, or a functional regulatory sequence or functional fragment of a regulatory sequence. A functional fragment refers to less than the entire copy of a gene by providing sufficient nucleotide sequence to restore the functionality of a wild type gene or non-coding regulatory sequence (e.g. sequences encoding long non-coding RNA). In certain example embodiments, the systems disclosed herein may be used to replace a single allele of a defective gene or defective fragment thereof. In another example embodiment, the systems disclosed herein may be used to replace both alleles of a defective gene or defective gene fragment. A “defective gene” or “defective gene fragment” is a gene or portion of a gene that when expressed fails to generate a functioning protein or non-coding RNA with functionality of a corresponding wild-type gene. In certain example embodiments, these defective genes may be associated with one or more disease phenotypes. In certain example embodiments, the defective gene or gene fragment is not replaced but the systems described herein are used to insert donor templates that encode gene or gene fragments that compensate for or override defective gene expression such that cell phenotypes associated with defective gene expression are eliminated or changed to a different or desired cellular phenotype.

[1173] In an embodiment of the invention, the donor template may include, but not be limited to, genes or gene fragments, encoding proteins or RNA transcripts to be expressed, regulatory elements, repair templates, and the like. According to the invention, the donor templates may comprise left end and right end sequence elements that function with transposition components that mediate insertion.

[1174] In certain cases, the donor template manipulates a splicing site on the target polynucleotide. In some examples, the donor template disrupts a splicing site. The disruption may be achieved by inserting the polynucleotide to a splicing site and/or introducing one or more mutations to the splicing site. In certain examples, the donor template may restore a splicing site. For example, the polynucleotide may comprise a splicing site sequence.

[1175] The donor template to be inserted may has a size from 10 base pair or nucleotides to 50 kb in length, e.g., from 50 to 40k, from 100 and 30 k, from 100 to 10000, from 100 to 300, from 200 to 400, from 300 to 500, from 400 to 600, from 500 to 700, from 600 to 800, from 700 to 900, from 800 to 1000, from 900 to from 1100, from 1000 to 1200, from 1100 to 1300, from 1200 to 1400, from 1300 to 1500, from 1400 to 1600, from 1500 to 1700, from 600 to 1800, from 1700 to 1900, from 1800 to 2000 base pairs (bp) or nucleotides in length.

[1176] In some embodiments, the heterologous nucleic acid sequence is a donor DNA template that can be integrated into a host genome via HDR. In other embodiments, the heterologous nucleic acid sequence is a donor DNA template that can be integrated into a host genome via NHEJ.

[1177] In certain embodiments, the heterologous nucleic acid comprises or encodes a donor/template sequence, wherein the donor/template corrects/repairs/removes a mutation at the target genome site. For example, the mutation may be a mutated exon in a disease gene.

[1178] In certain embodiments, the donor/template may encode or comprises a functional DNA element, such as a promoter, an enhancer, a protein binding sequence, a methylation site, or a homology region for assisting gene editing, etc.

[1179] By “donor DNA” or “donor DNA template” it is meant a DNA segment (can be single stranded or double stranded DNA) to be inserted at a site cleaved by a gene-editing nuclease (e.g., a Cas9 or Cas12a nuclease) (e.g., after dsDNA cleavage, after nicking a target DNA, after dual nicking a target DNA, and the like). The donor DNA template can contain sufficient homology to a genomic sequence at the target site, e.g., 70%, 80%, 85%, 90%, 95%, or 100% homology with the nucleotide sequences flanking the target site, e.g. within about 50 bases or less of the target site, e.g. within about 30 bases, within about 15 bases, within about 10 bases, within about 5 bases, or immediately flanking the target site, to support homology-directed repair between it and the genomic sequence to which it bears homology. In the case of repair by NHEJ, no homology is needed on the donor DNA template against the site to which it targets editing. The donor template can be integrated into a ncRNA of a retron and expressed as a RT product as an RT-DNA.

[1180] Approximately 25, 50, 100, or 200 nucleotides, or more than 200 nucleotides, of sequence homology between a donor DNA template and a genomic sequence (or any integral value between 10 and 200 nucleotides, or more) can support homology-directed repair. Donor DNA template can be of any length, e.g., 50 nucleotides or more, 100 nucleotides or more, 250 nucleotides or more, 500 nucleotides or more, 1000 nucleotides or more, 5000 nucleotides or more, etc. A suitable donor DNA template can be from 50 nucleotides to 100 nucleotides, from 100 nucleotides to 500 nucleotides, from 500 nucleotides to 1000 nucleotides, from 1000 nucleotides to 5000 nucleotides, or from 5000 nucleotides to 10,000 nucleotides, or more than 10,000 nucleotides, in length.

[1181] As noted above, in some embodiments, the donor DNA template comprises a first homology arm and a second homology arm. The first homology arm is at or near the 5′ end of the donor DNA; and comprises a nucleotide sequence that is at least partially complementary to a first nucleotide sequence in a target nucleic acid. The second homology arm is at or near the 3′ end of the donor DNA; and comprises a nucleotide sequence that is at least partially complementary to a second nucleotide sequence in the target nucleic acid. The first and second homology arms can each independently have a length of from about 10 nucleotides to 400 nucleotides; e.g., from 10 nucleotides (nt) to 15 nt, from 15 nt to 20 nt, from 20 nt to 25 nt, from 25 nt to 30 nt, from 30 nt to 35 nt, from 35 nt to 40 nt, from 40 nt to 45 nt, from 45 nt to 50 nt, from 50 nt to 75 nt, from 75 nt to 100 nt, from 100 nt to 125 nt, from 125 nt to 150 nt, from 150 nt to 175 nt, from 175 nt to 200 nt, from 200 nt to 225 nt, from 225 nt to 250 nt, from 250 nt to 275 nt, from 275 nt to 300 nt, from 325 nt to 350 nt, from 350 nt to 375 nt, or from 375 nt to 400 nt.

[1182] In certain embodiments, the donor DNA template is used for editing the target nucleotide sequence. In certain embodiments, the donor DNA template comprises one or more mutations to be introduced into the target polynucleotide. Examples of such mutations include substitutions, deletions, insertions, or a combination thereof. In certain embodiments, the mutation causes a shift in an open reading frame on the target polynucleotide. In certain embodiments, the donor polynucleotide alters a stop codon in the target polynucleotide. In certain embodiments, the donor polynucleotide corrects a premature stop codon. The correction can be achieved by deleting the stop codon, or by introducing one or more sequence changes to alter the stop codon to a codon. In certain embodiments, the donor polynucleotide addresses loss of function mutations, deletions, or translocations that may occur, for example, in certain disease contexts by inserting or restoring a functional copy of a gene, or functional fragment thereof, or a functional regulatory sequence or functional fragment of a regulatory sequence. A functional fragment includes a fragment less than the entire copy of a gene but otherwise provides sufficient nucleotide sequence to restore the functionality of a wild type gene or non-coding regulatory sequence (e.g., sequences encoding long non-coding RNA).

[1183] In certain embodiments, the donor DNA template may be used to replace a single allele of a defective gene or defective fragment thereof. In another embodiment, the donor DNA template is used to replace both alleles of a defective gene or defective gene fragment. A “defective gene” or “defective gene fragment” is a gene or portion of a gene that when expressed, fails to generate a functioning protein or non-coding RNA with functionality of the corresponding wild-type gene.

[1184] In certain example embodiments, these defective genes may be associated with one or more disease phenotypes. In certain example embodiments, the defective gene or gene fragment is not replaced but the heterologous nucleic acid is used to insert donor polynucleotides that encode gene or gene fragments that compensate for or override defective gene expression such that cell phenotypes associated with defective gene expression are eliminated or changed to a different or desired cellular phenotype. This can be achieved by including the coding sequence of a therapeutic protein, such as a therapeutic antibody or functional fragment thereof, or a wild-type version of a defective protein associated with one or more disease phenotypes.

[1185] In certain embodiments, the donor may include, but not be limited to, genes or gene fragments, encoding proteins or RNA transcripts to be expressed, regulatory elements, repair templates, and the like. According to the invention, the donor polynucleotides may comprise left end and right end sequence elements that function with transposition components that mediate insertion.

[1186] In certain embodiments, the donor DNA template manipulates a splicing site on the target polynucleotide. In certain embodiments, the donor DNA template disrupts a splicing site. The disruption may be achieved by inserting the polynucleotide to a splicing site and/or introducing one or more mutations to the splicing site. In certain embodiments, the donor polynucleotide may restore a splicing site. For example, the polynucleotide may comprise a splicing site sequence.

[1187] In certain embodiments, the donor DNA template to be inserted has a size from 10 bp to 50 kb in length, e.g., from 50 bp to ˜40 kb, from 100 bp to ˜30 kb, from 100 bp to ˜10 kb, from 100 bp to 300 bp, from 200 bp to 400 bp, from 300 bp to 500 bp, from 400 bp to 600 bp, from 500 bp to 700 bp, from 600 bp to 800 bp, from 700 bp to 900 bp, from 800 bp to 1000 bp, from 900 bp to 1100 bp, from 1000 bp to 1200 bp, from 1100 bp to 1300 bp, from 1200 bp to 1400 bp, from 1300 bp to 1500 bp, from 1400 bp to 1600 bp, from 1500 bp to 1700 bp, from 1600 bp to 1800 bp, from 1700 bp to 1900 bp, from 1800 bp to 2000 bp nucleotides in length.

[1188] In certain embodiments, the homologous arm on one or both ends of the sequence to be inserted is independently about 20 bp, 40 bp, 60 bp, 80 bp, 100 bp, 120 bp, or 150 bp.

[1189] The first homology arm and the second homology arm of the donor DNA flank a nucleotide sequence (“a nucleotide sequence of interest” or “an intervening nucleotide sequence”) that is to be introduced into a target nucleic acid. The nucleotide sequence of interest can comprise: i) a nucleotide sequence encoding a polypeptide of interest; ii) a nucleotide sequence encoding an exon of a gene; iii) a promoter sequence; iv) an enhancer sequence; v) a nucleotide sequence encoding a non-coding RNA; or vi) any combination of the foregoing.

[1190] The donor DNA can provide for gene correction, gene replacement, gene tagging, transgene insertion, nucleotide deletion, gene disruption, gene mutation, etc. For example, the donor DNA can be used to add, e.g., insert or replace, nucleic acid material to a target DNA (e.g. to “knock in” a nucleic acid that encodes a protein, an siRNA, an miRNA, etc.), to add a tag (e.g., 6× His, a fluorescent protein (e.g., a green fluorescent protein; a yellow fluorescent protein, etc.), hemagglutinin (HA), FLAG, etc.), to add a regulatory sequence to a gene (e.g. promoter, polyadenylation signal, internal ribosome entry sequence (IRES), 2A peptide, start codon, stop codon, splice signal, localization signal, enhancer, etc.), to modify a nucleic acid sequence (e.g., introduce a mutation), and the like. For example, the donor DNA can be used to modify DNA in a site-specific, i.e. “targeted”, way; for example gene knock-out, gene knock-in, gene editing, gene tagging, etc., as used in, for example, gene therapy, e.g. to treat a disease; or as an antiviral, antipathogenic, or anticancer therapeutic, the production of genetically modified organisms in agriculture, the large scale production of proteins by cells for therapeutic, diagnostic, or research purposes, the induction of pluripotent stem cells, biological research, the targeting of genes of pathogens for deletion or replacement, etc.

[1191] In some cases, the donor DNA comprises a nucleotide sequence encoding a polypeptide of interest. Polypeptides of interest include, e.g., a) functional versions of a polypeptide that comprises one or more amino acid substitutions, insertions, and/or deletions and that exhibits reduced function, e.g., where the reduced function is associated with or causes a pathological condition; b) fluorescent polypeptides; c) hormones; d) receptors for ligands; e) ion channels; f) neurotransmitters; g) and the like.

[1192] In some cases, the donor DNA comprises a nucleotide sequence that encodes a wild-type protein that is lacking in the recipient cell. In some cases, the donor DNA encodes a wild type factor (e.g. Factor VII, Factor VIII, Factor IX and the like) involved in coagulation. In some cases, the donor DNA comprises a nucleotide sequence that encodes a therapeutic antibody. In some cases, the donor DNA comprises a nucleotide sequence that encodes an engineered protein or receptor. In some cases, the engineered receptor is a T cell receptor (TCR), a natural killer (NK) receptor (NKR), or a B cell receptor (BCR). In some cases, the engineered TCR or NKR targets a cancer marker (e.g., a polypeptide that is expressed (e.g., over-expressed) on the surface of a cancer cell). In some cases, the donor DNA comprises a nucleotide sequence that encodes a chimeric antigen receptor (CAR). In some cases, the CAR targets a cancer marker. Donor DNAs encoding CAR, TCR, and/or NCR proteins may be folded into DNA origami structures (DNA nanostructures) and delivered into T cells or NK cells in vitro or in vivo.

[1193] Non-limiting examples of polypeptides that can be encoded by a donor DNA include, e.g., IL1B (interleukin 1, beta), XDH (xanthine dehydrogenase), TP53 (tumor protein p53), PTGIS (prostaglandin 12 (prostacyclin) synthase), MB (myoglobin), IL4 (interleukin 4), ANGPT1 (angiopoietin 1), ABCG8 (ATP-binding cassette, sub-family G (WHITE), member 8), CTSK (cathepsin K), PTGIR (prostaglandin 12 (prostacyclin) receptor (IP)), KCNJ11 (potassium inwardly-rectifying channel, subfamily J, member 11), INS (insulin), CRP (C-reactive protein, pentraxin-related), PDGFRB (platelet-derived growth factor receptor, beta polypeptide), CCNA2 (cyclin A2), PDGFB (platelet-derived growth factor beta polypeptide (simian sarcoma viral (v-sis) oncogene homolog)), KCNJ5 (potassium inwardly-rectifying channel, subfamily J, member 5), KCNN3 (potassium intermediate/small conductance calcium-activated channel, subfamily N, member 3), CAPN10 (calpain 10), PTGES (prostaglandin E synthase), ADRA2B (adrenergic, alpha-2B-, receptor), ABCG5 (ATP-binding cassette, sub-family G (WHITE), member 5), PRDX2 (peroxiredoxin 2), CAPN5 (calpain 5), PARP14 (poly (ADP-ribose) polymerase family, member 14), MEX3C (mex-3 homolog C (C. elegans)), ACE angiotensin I converting enzyme (peptidyl-dipeptidase A) 1), TNF (tumor necrosis factor (TNF superfamily, member 2)), IL6 (interleukin 6 (interferon, beta 2)), STN (statin), SERPINE1 (serpin peptidase inhibitor, clade E (nexin, plasminogen activator inhibitor type 1), member 1), ALB (albumin), ADIPOQ (adiponectin, C1Q and collagen domain containing), APOB (apolipoprotein B (including Ag(x) antigen)), APOE (apolipoprotein E), LEP (leptin), MTHFR (5,10-methylenetetrahydrofolate reductase (NADPH)), APOA1 (apolipoprotein A-I), EDN1 (endothelin 1), NPPB (natriuretic peptide precursor B), NOS3 (nitric oxide synthase 3 (endothelial cell)), PPARG (peroxisome proliferator-activated receptor gamma), PLAT (plasminogen activator, tissue), PTGS2 (prostaglandin-endoperoxide synthase 2 (prostaglandin G/H synthase and cyclooxygenase)), CETP (cholesteryl ester transfer protein, plasma), AGTR1 (angiotensin II receptor, type 1), HMGCR (3-hydroxy-3-methylglutaryl-Coenzyme A reductase), IGF1 (insulin-like growth factor 1 (somatomedin C)), SELE (selectin E), REN (renin), PPARA (peroxisome proliferator-activated receptor alpha), PON1 (paraoxonase 1), KNG1 (kininogen 1), CCL2 (chemokine (C-C motif) ligand 2), LPL (lipoprotein lipase), vWF (von Willebrand factor), F2 (coagulation factor II (thrombin)), ICAM1 (intercellular adhesion molecule 1), TGFB1 (transforming growth factor, beta 1), NPPA (natriuretic peptide precursor A), IL10 (interleukin 10), EPO (erythropoietin), SOD1 (superoxide dismutase 1, soluble), VCAM1 (vascular cell adhesion molecule 1), IFNG (interferon, gamma), LPA (lipoprotein, Lp(a)), MPO (myeloperoxidase), ESR1 (estrogen receptor 1), MAPK1 (mitogen-activated protein kinase 1), HP (haptoglobin), F3 (coagulation factor III (thromboplastin, tissue factor)), CST3 (cystatin C), COG2 (component of oligomeric Golgi complex 2), MMP9 (matrix metallopeptidase 9 (gelatinase B, 92 kDa gelatinase, 92 kDa type IV collagenase)), SERPINC1 (serpin peptidase inhibitor, clade C (antithrombin), member 1), F8 (coagulation factor VIII, procoagulant component), HMOX1 (heme oxygenase (decycling) 1), APOC3 (apolipoprotein C-III), IL8 (interleukin 8), PROK1 (prokineticin 1), CBS (cystathionine-beta-synthase), NOS2 (nitric oxide synthase 2, inducible), TLR4 (toll-like receptor 4), SELP (selectin P (granule membrane protein 140 kDa, antigen CD62)), ABCA1 (ATP-binding cassette, sub-family A (ABC1), member 1), AGT (angiotensinogen (serpin peptidase inhibitor, clade A, member 8)), LDLR (low density lipoprotein receptor), GPT (glutamic-pyruvate transaminase (alanine aminotransferase)), VEGFA (vascular endothelial growth factor A), NR3C2 (nuclear receptor subfamily 3, group C, member 2), IL18 (interleukin 18 (interferon-gamma-inducing factor)), NOS1 (nitric oxide synthase 1 (neuronal)), NR3C1 (nuclear receptor subfamily 3, group C, member 1 (glucocorticoid receptor)), FGB (fibrinogen beta chain), HGF (hepatocyte growth factor (hepapoietin A; scatter factor)), ILIA (interleukin 1, alpha), RETN (resistin), AKT1 (v-akt murine thymoma viral oncogene homolog 1), LIPC (lipase, hepatic), HSPD1 (heat shock 60 kDa protein 1 (chaperonin)), MAPK14 (mitogen-activated protein kinase 14), SPP1 (secreted phosphoprotein 1), ITGB3 (integrin, beta 3 (platelet glycoprotein 111a, antigen CD61)), CAT (catalase), UTS2 (urotensin 2), THBD (thrombomodulin), F10 (coagulation factor X), CP (ceruloplasmin (ferroxidase)), TNFRSF11B (tumor necrosis factor receptor superfamily, member lib), EDNRA (endothelin receptor type A), EGFR (epidermal growth factor receptor (erythroblastic leukemia viral (v-erb-b) oncogene homolog, avian)), MMP2 (matrix metallopeptidase 2 (gelatinase A, 72 kDa gelatinase, 72 kDa type IV collagenase)), PLG (plasminogen), NPY (neuropeptide Y), RHOD (ras homolog gene family, member D), MAPK8 (mitogen-activated protein kinase 8), MYC (v-myc myelocytomatosis viral oncogene homolog (avian)), FN1 (fibronectin 1), CMA1 (chymase 1, mast cell), PLAU (plasminogen activator, urokinase), GNB3 (guanine nucleotide binding protein (G protein), beta polypeptide 3), ADRB2 (adrenergic, beta-2-, receptor, surface), APOA5 (apolipoprotein A-V), SOD2 (superoxide dismutase 2, mitochondrial), F5 (coagulation factor V (proaccelerin, labile factor)), VDR (vitamin D (1,25-dihydroxyvitamin D3) receptor), ALOX5 (arachidonate 5-lipoxygenase), HLA-DRB1 (major histocompatibility complex, class II, DR beta 1), PARP1 (poly (ADP-ribose) polymerase 1), CD40LG (CD40 ligand), PON2 (paraoxonase 2), AGER (advanced glycosylation end product-specific receptor), IRS1 (insulin receptor substrate 1), PTGS1 (prostaglandin-endoperoxide synthase 1 (prostaglandin G/H synthase and cyclooxygenase)), ECE1 (endothelin converting enzyme 1), F7 (coagulation factor VII (serum prothrombin conversion accelerator)), URN (interleukin 1 receptor antagonist), EPHX2 (epoxide hydrolase 2, cytoplasmic), IGFBP1 (insulin-like growth factor binding protein 1), MAPK10 (mitogen-activated protein kinase 10), FAS (Fas (TNF receptor superfamily, member 6)), ABCB1 (ATP-binding cassette, sub-family B (MDR/TAP), member 1), JUN (jun oncogene), IGFBP3 (insulin-like growth factor binding protein 3), CD14 (CD14 molecule), PDE5A (phosphodiesterase 5A, cGMP-specific), AGTR2 (angiotensin II receptor, type 2), CD40 (CD40 molecule, TNF receptor superfamily member 5), LCAT (lecithin-cholesterol acyltransferase), CCR5 (chemokine (C-C motif) receptor 5), MMP1 (matrix metallopeptidase 1 (interstitial collagenase)), TIMP1 (TIMP metallopeptidase inhibitor 1), ADM (adrenomedullin), DYT10 (dystonia 10), STAT3 (signal transducer and activator of transcription 3 (acute-phase response factor)), MMP3 (matrix metallopeptidase 3 (stromelysin 1, progelatinase)), ELN (elastin), USF1 (upstream transcription factor 1), CFH (complement factor H), HSPA4 (heat shock 70 kDa protein 4), MMP12 (matrix metallopeptidase 12 (macrophage elastase)), MME (membrane metallo-endopeptidase), F2R (coagulation factor II (thrombin) receptor), SELL (selectin L), CTSB (cathepsin B), ANXA5 (annexin A5), ADRB1 (adrenergic, beta-1-, receptor), CYBA (cytochrome b-245, alpha polypeptide), FGA (fibrinogen alpha chain), GGT1 (gamma-glutamyltransferase 1), LIPG (lipase, endothelial), HIF1A (hypoxia inducible factor 1, alpha subunit (basic helix-loop-helix transcription factor)), CXCR4 (chemokine (C-X-C motif) receptor 4), PROC (protein C (inactivator of coagulation factors Va and Villa)), SCARB1 (scavenger receptor class B, member 1), CD79A (CD79a molecule, immunoglobulin-associated alpha), PLTP (phospholipid transfer protein), ADD1 (adducin 1 (alpha)), FGG (fibrinogen gamma chain), SAA1 (serum amyloid Al), KCNH2 (potassium voltage-gated channel, subfamily H (eag-related), member 2), DPP4 (dipeptidyl-peptidase 4), G6PD (glucose-6-phosphate dehydrogenase), NPR1 (natriuretic peptide receptor A/guanylate cyclase A (atrionatriuretic peptide receptor A)), VTN (vitronectin), KIAA0101 (KIAA0101), FOS (FBJ murine osteosarcoma viral oncogene homolog), TLR2 (toll-like receptor 2), PPIG (peptidylprolyl isomer ase G (cyclophilin G)), IL1R1 (interleukin 1 receptor, type I), AR (androgen receptor), CYP1A1 (cytochrome P450, family 1, subfamily A, polypeptide 1), SERPINA1 (serpin peptidase inhibitor, clade A (alpha-1 antiproteinase, antitrypsin), member 1), MTR (5-methyltetrahydrofolate-homocysteine methyltransferase), RBP4 (retinol binding protein 4, plasma), APOA4 (apolipoprotein A-IV), CDKN2A (cyclin-dependent kinase inhibitor 2A (melanoma, p16, inhibits CDK4)), FGF2 (fibroblast growth factor 2 (basic)), EDNRB (endothelin receptor type B), ITGA2 (integrin, alpha 2 (CD49B, alpha 2 subunit of VLA-2 receptor)), CAB INI (calcineurin binding protein 1), SHBG (sex hormone-binding globulin), HMGB1 (high-mobility group box 1), HSP90B2P (heat shock protein 90 kDa beta (Grp94), member 2 (pseudogene)), CYP3A4 (cytochrome P450, family 3, subfamily A, polypeptide 4), GJA1 (gap junction protein, alpha 1, 43 kDa), CAV1 (caveolin 1, caveolae protein, 22 kDa), ESR2 (estrogen receptor 2 (ER beta)), LTA (lymphotoxin alpha (TNF superfamily, member 1)), GDF15 (growth differentiation factor 15), BDNF (brain-derived neurotrophic factor), CYP2D6 (cytochrome P450, family 2, subfamily D, polypeptide 6), NGF (nerve growth factor (beta polypeptide)), SP1 (Sp 1 transcription factor), TGIF1 (TGFB-induced factor homeobox 1), SRC (v-src sarcoma (Schmidt-Ruppin A-2) viral oncogene homolog (avian)), EGF (epidermal growth factor (beta-urogastrone)), PIK3CG (phosphoinositide-3-kinase, catalytic, gamma polypeptide), HLA-A (major histocompatibility complex, class I, A), KCNQ1 (potassium voltage-gated channel, KQT-like subfamily, member 1), CNR1 (cannabinoid receptor 1 (brain)), FBN1 (fibrillin 1), CHKA (choline kinase alpha), BEST1 (bestrophin 1), APP (amyloid beta (A4) precursor protein), CTNNB1 (catenin (cadherin-associated protein), beta 1, 88 kDa), IL2 (interleukin 2), CD36 (CD36 molecule (thrombospondin receptor)), PRKAB1 (protein kinase, AMP-activated, beta 1 non-catalytic subunit), TPO (thyroid peroxidase), ALDH7A1 (aldehyde dehydrogenase 7 family, member Al), CX3CR1 (chemokine (C-X3-C motif) receptor 1), TH (tyrosine hydroxylase), F9 (coagulation factor IX), GH1 (growth hormone 1), TF (transferrin), HFE (hemochromatosis), IE17A (interleukin 17A), PTEN (phosphatase and tensin homolog), GSTM1 (glutathione S-transferase mu 1), DMD (dystrophin), GATA4 (GATA binding protein 4), F13A1 (coagulation factor XIII, Al polypeptide), TTR (transthyretin), FABP4 (fatty acid binding protein 4, adipocyte), PON3 (paraoxonase 3), APOC1 (apolipoprotein C-I), INSR (insulin receptor), TNFRSF1B (tumor necrosis factor receptor superfamily, member IB), HTR2A (5-hydroxytryptamine (serotonin) receptor 2A), CSF3 (colony stimulating factor 3 (granulocyte)), CYP2C9 (cytochrome P450, family 2, subfamily C, polypeptide 9), TXN (thioredoxin), CYP11B2 (cytochrome P450, family 11, subfamily B, polypeptide 2), PTH (parathyroid hormone), CSF2 (colony stimulating factor 2 (granulocyte-macrophage)), KDR (kinase insert domain receptor (a type III receptor tyrosine kinase)), PLA2G2A (phospholipase A2, group IIA (platelets, synovial fluid)), B2M (beta-2-microglobulin), THBS1 (thrombospondin 1), GCG (glucagon), RHOA (ras homolog gene family, member A), ALDH2 (aldehyde dehydrogenase 2 family (mitochondrial)), TCF7L2 (transcription factor 7-like 2 (T-cell specific, HMG-box)), BDKRB2 (bradykinin receptor B2), NFE2L2 (nuclear factor (erythroid-derived 2)-like 2), NOTCH1 (Notch homolog 1, translocation-associated (Drosophila)), UGT1A1 (UDP glucuronosyltransferase 1 family, polypeptide Al), IFNA1 (interferon, alpha 1), PPARD (peroxisome proliferator-activated receptor delta), SIRT1 (sirtuin (silent mating type information regulation 2 homolog) 1 (S. cerevisiae)), GNRH1 (gonadotropin-releasing hormone 1 (luteinizing-releasing hormone)), PAPPA (pregnancy-associated plasma protein A, pappalysin 1), ARR3 (arrestin 3, retinal (X-arrestin)), NPPC (natriuretic peptide precursor C), AHSP (alpha hemoglobin stabilizing protein), PTK2 (PTK2 protein tyrosine kinase 2), IL13 (interleukin 13), MTOR (mechanistic target of rapamycin (serine/threonine kinase)), ITGB2 (integrin, beta 2 (complement component 3 receptor 3 and 4 subunit)), GSTT1 (glutathione S-transferase theta 1), IL6ST (interleukin 6 signal transducer (gpl30, oncostatin M receptor)), CPB2 (carboxypeptidase B2 (plasma)), CYP1A2 (cytochrome P450, family 1, subfamily A, polypeptide 2), HNF4A (hepatocyte nuclear factor 4, alpha), SLC6A4 (solute carrier family 6 (neurotransmitter transporter, serotonin), member 4), PLA2G6 (phospholipase A2, group VI (cytosolic, calcium-independent)), TNFSF11 (tumor necrosis factor (ligand) superfamily, member 11), SLC8A1 (solute carrier family 8 (sodium/calcium exchanger), member 1), F2RL1 (coagulation factor II (thrombin) receptor-like 1), AKR1A1 (aldo-keto reductase family 1, member A1 (aldehyde reductase)), ALDH9A1 (aldehyde dehydrogenase 9 family, member Al), BGLAP (bone gamma-carboxyglutamate (gla) protein), MTTP (microsomal triglyceride transfer protein), MTRR (5-methyltetrahydrofolate-homocysteine methyltransferase reductase), SULT1A3 (sulfotransferase family, cytosolic, 1A, phenol-preferring, member 3), RAGE (renal tumor antigen), C4B (complement component 4B (Chido blood group), P2RY12 (purinergic receptor P2Y, G-protein coupled, 12), RNLS (renalase, FAD-dependent amine oxidase), CREBI (cAMP responsive element binding protein 1), POMC (proopiomelanocortin), RAC1 (ras-related C3 botulinum toxin substrate 1 (rho family, small GTP binding protein Racl)), LMNA (lamin NC), CD59 (CD59 molecule, complement regulatory protein), SCN5A (sodium channel, voltage-gated, type V, alpha subunit), CYP1B1 (cytochrome P450, family 1, subfamily B, polypeptide 1), MIF (macrophage migration inhibitory factor (glycosylation-inhibiting factor)), MMP13 (matrix metallopeptidase 13 (collagenase 3)), TIM P2 (TIMP metallopeptidase inhibitor 2), CYP19A1 (cytochrome P450, family 19, subfamily A, polypeptide 1), CYP21A2 (cytochrome P450, family 21, subfamily A, polypeptide 2), PTPN22 (protein tyrosine phosphatase, non-receptor type 22 (lymphoid)), MYH14 (myosin, heavy chain 14, non-muscle), MBL2 (mannose-binding lectin (protein C) 2, soluble (opsonic defect)), SELPLG (selectin P ligand), AOC3 (amine oxidase, copper containing 3 (vascular adhesion protein 1)), CTSL1 (cathepsin LI), PCNA (proliferating cell nuclear antigen), IGF2 (insulin like growth factor 2 (somatomedin A)), ITGB1 (integrin, beta 1 (fibronectin receptor, beta polypeptide, antigen CD29 includes MDF2, MSK12)), CAST (calpastatin), CXCL12 (chemokine (C-X-C motif) ligand 12 (stromal cell-derived factor 1)), IGHE (immunoglobulin heavy constant epsilon), KCNE1 (potassium voltage-gated channel, Isk-related family, member 1), TFRC (transferrin receptor (p90, CD71)), COL1A1 (collagen, type I, alpha 1), COL1A2 (collagen, type I, alpha 2), IL2RB (interleukin 2 receptor, beta), PLA2G10 (phospholipase A2, group X), ANGPT2 (angiopoietin 2), PROCR (protein C receptor, endothelial (EPCR)), NOX4 (NADPH oxidase 4), HAMP (hepcidin antimicrobial peptide), PTPN11 (protein tyrosine phosphatase, non-receptor type 11), SLC2A1 (solute carrier family 2 (facilitated glucose transporter), member 1), IL2RA (interleukin 2 receptor, alpha), CCL5 (chemokine (C-C motif) ligand 5), IRF1 (interferon regulatory factor 1), CFLAR (CASP8 and FADD-like apoptosis regulator), CALC A (calcitonin-related polypeptide alpha), EIF4E (eukaryotic translation initiation factor 4E), GSTP1 (glutathione S-transferase pi 1), JAK2 (Janus kinase 2), CYP3A5 (cytochrome P450, family 3, subfamily A, polypeptide 5), HSPG2 (heparan sulfate proteoglycan 2), CCL3 (chemokine (C-C motif) ligand 3), MYD88 (myeloid differentiation primary response gene (88)), VIP (vasoactive intestinal peptide), SOAT1 (sterol O-acyltransferase 1), ADRBK1 (adrenergic, beta, receptor kinase 1), NR4A2 (nuclear receptor subfamily 4, group A, member 2), MMP8 (matrix metallopeptidase 8 (neutrophil collagenase)), NPR2 (natriuretic peptide receptor B/guanylate cyclase B (atrionatriuretic peptide receptor B)), GCH1 (GTP cyclohydrolase 1), EPRS (glutamyl-prolyl-tRNA synthetase), PPARGC1A (peroxisome proliferator-activated receptor gamma, coactivator 1 alpha), F12 (coagulation factor XII (Hageman factor)), PEC AMI (platelet/endothelial cell adhesion molecule), CCL4 (chemokine (C-C motif) ligand 4), SERPINA3 (serpin peptidase inhibitor, clade A (alpha-1 antiproteinase, antitrypsin), member 3), CASR (calcium-sensing receptor), GJA5 (gap junction protein, alpha 5, 40 kDa), FABP2 (fatty acid binding protein 2, intestinal), TTF2 (transcription termination factor, RNA polymerase II), PROS1 (protein S (alpha)), CTF1 (cardiotrophin 1), SGCB (sarcoglycan, beta (43 kDa dystrophin-associated glycoprotein)), YME1L1 (YMEl-like 1 (S. cerevisiae)), CAMP (cathelicidin antimicrobial peptide), ZC3H12A (zinc finger CCCH-type containing 12A), AKR1B1 (aldo-keto reductase family 1, member B1 (aldose reductase)), DES (desmin), MMP7 (matrix metallopeptidase 7 (matrilysin, uterine)), AHR (aryl hydrocarbon receptor), CSF1 (colony stimulating factor 1 (macrophage)), HDAC9 (histone deacetylase 9), CTGF (connective tissue growth factor), KCNMA1 (potassium large conductance calcium-activated channel, subfamily M, alpha member 1), UGT1A (UDP glucuronosyltransferase 1 family, polypeptide A complex locus), PRKCA (protein kinase C, alpha), COMT (catechol-b-methyltransf erase), S100B (S100 calcium binding protein B), EGR1 (early growth response 1), PRL (prolactin), IL15 (interleukin 15), DRD4 (dopamine receptor D4), CAMK2G (calcium/calmodulin-dependent protein kinase II gamma), SLC22A2 (solute carrier family 22 (organic cation transporter), member 2), CCL11 (chemokine (C-C motif) ligand 11), PGF (placental growth factor), THPO (thrombopoietin), GP6 (glycoprotein VI (platelet)), TACR1 (tachykinin receptor 1), NTS (neurotensin), HNF1A (HNF1 homeobox A), SST (somatostatin), KCND1 (potassium voltage-gated channel, Shal-related subfamily, member 1), LOC646627 (phospholipase inhibitor), TBXAS1 (thromboxane A synthase 1 (platelet)), CYP2J2 (cytochrome P450, family 2, subfamily J, polypeptide 2), TBXA2R (thromboxane A2 receptor), ADH1C (alcohol dehydrogenase 1C (class I), gamma polypeptide), ALOX12 (arachidonate 12-lipoxygenase), AHSG (alpha-2-HS-glycoprotein), BHMT (betaine-homocysteine methyltransferase), GJA4 (gap junction protein, alpha 4, 37 kDa), SLC25A4 (solute carrier family 25 (mitochondrial carrier; adenine nucleotide translocator), member 4), ACLY (ATP citrate lyase), ALOX5AP (arachidonate 5-lipoxygenase-activating protein), NUMA1 (nuclear mitotic apparatus protein 1), CYP27B1 (cytochrome P450, family 27, subfamily B, polypeptide 1), CYSLTR2 (cysteinyl leukotriene receptor 2), SOD3 (superoxide dismutase 3, extracellular), LTC4S (leukotriene C4 synthase), UCN (urocortin), GHRL (ghrelin/obestatin prepropeptide), APOC2 (apolipoprotein C-II), CLEC4A (C-type lectin domain family 4, member A), KBTBD10 (kelch repeat and BTB (POZ) domain containing 10), INC (tenascin C), TYMS (thymidylate synthetase), SHC1 (SHC (Src homology 2 domain containing) transforming protein 1), LRP1 (low density lipoprotein receptor-related protein 1), SOCS3 (suppressor of cytokine signaling 3), ADH1B (alcohol dehydrogenase IB (class I), beta polypeptide), KLK3 (kallikrein-related peptidase 3), HSD11B1 (hydroxysteroid (11-beta) dehydrogenase 1), VKORC1 (vitamin K epoxide reductase complex, subunit 1), SERPINB2 (serpin peptidase inhibitor, clade B (ovalbumin), member 2), TNS1 (tensin 1), RNF19A (ring finger protein 19A), EPOR (erythropoietin receptor), ITGAM (integrin, alpha M (complement component 3 receptor 3 subunit)), PITX2 (paired-like homeodomain 2), MAPK7 (mitogen-activated protein kinase 7), FCGR3A (Fc fragment of IgG, low affinity 111a, receptor (CD16a)), LEPR (leptin receptor), ENG (endoglin), GPX1 (glutathione peroxidase 1), GOT2 (glutamic-oxaloacetic transaminase 2, mitochondrial (aspartate aminotransferase 2)), HRH1 (histamine receptor HI), NR112 (nuclear receptor subfamily 1, group I, member 2), CRH (corticotropin releasing hormone), HTR1A (5-hydroxytryptamine (serotonin) receptor 1A), VDAC1 (voltage-dependent anion channel 1), HPSE (heparanase), SFTPD (surfactant protein D), TAP2 (transporter 2, ATP-binding cassette, sub-family B (MDR/TAP)), RNF123 (ring finger protein 123), PTK2B (PTK2B protein tyrosine kinase 2 beta), NTRK2 (neurotrophic tyrosine kinase, receptor, type 2), IL6R (interleukin 6 receptor), ACHE (acetylcholinesterase (Yt blood group)), GLP1R (glucagon-like peptide 1 receptor), GHR (growth hormone receptor), GSR (glutathione reductase), NQOl (NAD(P)H dehydrogenase, quinone 1), NR5A1 (nuclear receptor subfamily 5, group A, member 1), GJB2 (gap junction protein, beta 2, 26 kDa), SLC9A1 (solute carrier family 9 (sodium/hydrogen exchanger), member 1), MAOA (monoamine oxidase A), PCSK9 (proprotein convertase subtilisin/kexin type 9), FCGR2A (Fc fragment of IgG, low affinity Ila, receptor (CD32)), SERPINF1 (serpin peptidase inhibitor, clade F (alpha-2 antiplasmin, pigment epithelium derived factor), member 1), EDN3 (endothelin 3), DHFR (dihydrofolate reductase), GAS6 (growth arrest-specific 6), SMPD1 (sphingomyelin phosphodiesterase 1, acid lysosomal), UCP2 (uncoupling protein 2 (mitochondrial, proton carrier)), TFAP2A (transcription factor AP-2 alpha (activating enhancer binding protein 2 alpha)), C4BPA (complement component 4 binding protein, alpha), SERPINF2 (serpin peptidase inhibitor, clade F (alpha-2 antiplasmin, pigment epithelium derived factor), member 2), TYMP (thymidine phosphorylase), ALPP (alkaline phosphatase, placental (Regan isozyme)), CXCR2 (chemokine (C-X-C motif) receptor 2), SLC39A3 (solute carrier family 39 (zinc transporter), member 3), ABCG2 (ATP-binding cassette, sub-family G (WHITE), member 2), ADA (adenosine deaminase), JAK3 (Janus kinase 3), HSPA1A (heat shock 70 kDa protein 1A), FASN (fatty acid synthase), FGF1 (fibroblast growth factor 1 (acidic)), Fll (coagulation factor XI), ATP7A (ATPase, Cu++ transporting, alpha polypeptide), CR1 (complement component (3b/4b) receptor 1 (Knops blood group)), GFAP (glial fibrillary acidic protein), ROCK1 (Rho-associated, coiled-coil containing protein kinase 1), MECP2 (methyl CpG binding protein 2 (Rett syndrome)), MYLK (myosin light chain kinase), BCFlE (butyrylcholinesterase), LIPE (lipase, hormone-sensitive), PRDX5 (peroxiredoxin 5), ADORA1 (adenosine A1 receptor), WRN (Werner syndrome, RecQ helicase-like), CXCR3 (chemokine (C-X-C motif) receptor 3), CD81 (CD81 molecule), SMAD7 (SMAD family member 7), LAMC2 (laminin, gamma 2), MAP3K5 (mitogen-activated protein kinase kinase kinase 5), CF1GA (chromogranin A (parathyroid secretory protein 1)), IAPP (islet amyloid polypeptide), RFIO (rhodopsin), ENPP1 (ectonucleotide pyrophosphatase/phosphodiesterase 1), PTF1LF1 (parathyroid hormone-like hormone), NRG1 (neuregulin 1), VEGFC (vascular endothelial growth factor C), ENPEP (glutamyl aminopeptidase (aminopeptidase A)), CEBPB (CCAAT/enhancer binding protein (C/EBP), beta), NAGLU (N-acetylglucosaminidase, alpha), F2RL3 (coagulation factor II (thrombin) receptor-like 3), CX3CL1 (chemokine (C-X3-C motif) ligand 1), BDKRB1 (bradykinin receptor Bl), ADAMTS13 (ADAM metallopeptidase with thrombospondin type 1 motif, 13), ELANE (elastase, neutrophil expressed), ENPP2 (ectonucleotide pyrophosphatase/phosphodiesterase 2), CISFI (cytokine inducible SF12-containing protein), GAST (gastrin), MYOC (myocilin, trabecular mesh work inducible glucocorticoid response), ATP1A2 (ATPase, Na+/K+ transporting, alpha 2 polypeptide), NF1 (neurofibromin 1), GJB1 (gap junction protein, beta 1, 32 kDa), MEF2A (myocyte enhancer factor 2A), VCL (vinculin), BMPR2 (bone morphogenetic protein receptor, type II (serine/threonine kinase)), TUBB (tubulin, beta), CDC42 (cell division cycle 42 (GTP binding protein, 25 kDa)), KRT18 (keratin 18), F1SF1 (heat shock transcription factor 1), MYB (v-myb myeloblastosis viral oncogene homolog (avian)), PRKAA2 (protein kinase, AMP-activated, alpha 2 catalytic subunit), ROCK2 (Rho-associated, coiled-coil containing protein kinase 2), TFPI (tissue factor pathway inhibitor (lipoprotein-associated coagulation inhibitor)), PRKG1 (protein kinase, cGMP-dependent, type I), BMP2 (bone morphogenetic protein 2), CTNND1 (catenin (cadherin-associated protein), delta 1), CTF1 (cystathionase (cystathionine gamma-lyase)), CTSS (cathepsin S), VAV2 (vav 2 guanine nucleotide exchange factor), NPY2R (neuropeptide Y receptor Y2), IGFBP2 (insulin-like growth factor binding protein 2, 36 kDa), CD28 (CD28 molecule), GSTA1 (glutathione S-transferase alpha 1), PPIA (peptidylprolyl isomerase A (cyclophilin A)), APOF1 (apolipoprotein FI (beta-2-glycoprotein I)), S100A8 (S100 calcium binding protein A8), IL11 (interleukin 11), ALOX15 (arachidonate 15-lipoxygenase), FBLN1 (fibulin 1), NR1F13 (nuclear receptor subfamily 1, group FI, member 3), SCD (stearoyl-CoA desaturase (delta-9-desaturase)), GIP (gastric inhibitory polypeptide), CF1 GB (chromogranin B (secretogranin 1)), PRKCB (protein kinase C, beta), SRD5A1 (steroid-5-alpha-reductase, alpha polypeptide 1 (3-oxo-5 alpha-steroid delta 4-dehydrogenase alpha 1)), F1SD11B2 (hydroxy steroid (11-beta) dehydrogenase 2), CALCRL (calcitonin receptor-like), GALNT2 (UDP-N-acetyl-alpha-D-galactosamine.polypeptide N-acetylgalactosaminyltransferase 2 (GalNAc-T2)), ANGPTL4 (angiopoietin-like 4), KCNN4 (potassium intermediate/small conductance calcium-activated channel, subfamily N, member 4), PIK3C2A (phosphoinositide-3-kinase, class 2, alpha polypeptide), HBEGF (heparin-binding EGF-like growth factor), CYP7A1 (cytochrome P450, family 7, subfamily A, polypeptide 1), HLA-DRB5 (major histocompatibility complex, class II, DR beta 5), BNIP3 (BCL2/adeno virus E1B 19 kDa interacting protein 3), GCKR (glucokinase (hexokinase 4) regulator), S100A12 (S100 calcium binding protein A 12), PADI4 (peptidyl arginine deaminase, type IV), HSPA14 (heat shock 70 kDa protein 14), CXCR1 (chemokine (C-X-C motif) receptor 1), H19 (H19, imprinted maternally expressed transcript (non-protein coding)), KRTAP19-3 (keratin associated protein 19-3), insulin, RAC2 (ras-related C3 botulinum toxin substrate 2 (rho family, small GTP binding protein Rac2)), RYR1 (ryanodine receptor 1 (skeletal)), CLOCK (clock homolog (mouse)), NGFR (nerve growth factor receptor (TNFR superfamily, member 16)), DBH (dopamine beta-hydroxylase (dopamine beta-monooxygenase)), CHRNA4 (cholinergic receptor, nicotinic, alpha 4), CACNAlC (calcium channel, voltage-dependent, L type, alpha 1C subunit), PRKAG2 (protein kinase, AMP-activated, gamma 2 non-catalytic subunit), CHAT (choline acetyltransferase), PTGDS (prostaglandin D2 synthase 21 kDa (brain)), NR1H2 (nuclear receptor subfamily 1, group H, member 2), TEK (TEK tyrosine kinase, endothelial), VEGFB (vascular endothelial growth factor B), MEF2C (myocyte enhancer factor 2C), MAPKAPK2 (mitogen-activated protein kinase-activated protein kinase 2), TNFRSF11 A (tumor necrosis factor receptor superfamily, member 11a, NFKB activator), HSPA9 (heat shock 70 kDa protein 9 (mortalin)), CYSLTR1 (cysteinyl leukotriene receptor 1), MAT1A (methionine adenosyltransferase 1, alpha), OPRL1 (opiate receptor-like 1), IMPA1 (inositol(myo)-l(or 4)-monophosphatase 1), CLCN2 (chloride channel 2), DLD (dihydrolipoamide dehydrogenase), PSMA6 (proteasome (prosome, macropain) subunit, alpha type, 6), PSMB8 (proteasome (prosome, macropain) subunit, beta type, 8 (large multifunctional peptidase 7)), CHI3L1 (chitinase 3-like 1 (cartilage glycoprotein-39)), ALDH1B1 (aldehyde dehydrogenase 1 family, member Bl), PARP2 (poly (ADP-ribose) polymerase 2), STAR (steroidogenic acute regulatory protein), LBP (lipopolysaccharide binding protein), ABCC6 (ATP-binding cassette, sub-family C(CFTR/MRP), member 6), RGS2 (regulator of G-protein signaling 2, 24 kDa), EFNB2 (ephrin-B2), cystic fibrosis transmembrane conductance regulator (CFTR), GJB6 (gap junction protein, beta 6, 30 kDa), APOA2 (apolipoprotein A-II), AMPD1 (adenosine monophosphate deaminase 1), DYSF (dysferlin, limb girdle muscular dystrophy 2B (autosomal recessive)), FDFT1 (farnesyl-diphosphate farnesyltransferase 1), EDN2 (endothelin 2), CCR6 (chemokine (C-C motif) receptor 6), GJB3 (gap junction protein, beta 3, 31 kDa), IL1RL1 (interleukin 1 receptor-like 1), ENTPD1 (ectonucleoside triphosphate diphosphohydrolase 1), BBS4 (Bardet-Biedl syndrome 4), CELSR2 (cadherin, EGF LAG seven-pass G-type receptor 2 (flamingo homolog, Drosophila)), F1IR (Fll receptor), RAPGEF3 (Rap guanine nucleotide exchange factor (GEF) 3), HYAL1 (hyaluronoglucosaminidase 1), ZNF259 (zinc finger protein 259), ATOX1 (ATX1 antioxidant protein 1 homolog (yeast)), ATF6 (activating transcription factor 6), K¹HK (ketohexokinase (fructokinase)), SAT1 (spermidine/spermine Nl-acetyltransferase 1), GGFI (gamma-glutamyl hydrolase (conjugase, folylpolygammaglutamyl hydrolase)), TIMP4 (TIMP metallopeptidase inhibitor 4), SLC4A4 (solute carrier family 4, sodium bicarbonate cotransporter, member 4), PDE2A (phosphodiesterase 2 A, cGMP-stimulated), PDE3B (phosphodiesterase 3B, cGMP-inhibited), FADS1 (fatty acid desaturase 1), FADS2 (fatty acid desaturase 2), TMSB4X (thymosin beta 4, X-linked), TXNIP (thioredoxin interacting protein), LIMS1 (LIM and senescent cell antigen-like domains 1), RFIOB (ras homolog gene family, member B), LY96 (lymphocyte antigen 96), FOXOl (forkhead box 01), PNPLA2 (patatin-like phospholipase domain containing 2), TRH (thyrotropin-releasing hormone), GJC1 (gap junction protein, gamma 1, 45 kDa), SLC17A5 (solute carrier family 17 (anion/sugar transporter), member 5), FTO (fat mass and obesity associated), GJD2 (gap junction protein, delta 2, 36 kDa), PSRC1 (proline/serine-rich coiled-coil 1), CASP12 (caspase 12 (gene/pseudogene)), GPBAR1 (G protein-coupled bile acid receptor 1), PXK (PX domain containing serine/threonine kinase), IL33 (interleukin 33), TRIB1 (tribbles homolog 1 (Drosophila)), PBX4 (pre-B-cell leukemia homeobox 4), NUPRI (nuclear protein, transcriptional regulator, 1), 15-Sep(15 kDa selenoprotein), CILP2 (cartilage intermediate layer protein 2), TERC (telomerase RNA component), GGT2 (gamma-glutamyltransf erase 2), MT-COl (mitochondrially encoded cytochrome c oxidase I), UOX (urate oxidase, pseudogene), a CRISPR/Cas effector polypeptide, an enzymatically active CRISPR/Cas effector polypeptide (e.g., is capable of cleaving a target nucleic acid) and a CRISPR/Cas effector polypeptide that is not enzymatically active (e.g., does not cleave a target nucleic acid, but retains binding to the target nucleic acid). In some cases, the donor DNA encodes a wild-type version of any of the foregoing polypeptides; i.e., the donor DNA can encode a “normal” version that does not include a mutation(s) that results in reduced function, lack of function, or pathogenesis.

[1194] In some cases, the donor DNA comprises a nucleotide sequence encoding a fluorescent polypeptide. Suitable fluorescent proteins include, but are not limited to, green fluorescent protein (GFP) or variants thereof, blue fluorescent variant of GFP (BFP), cyan fluorescent variant of GFP (CFP), yellow fluorescent variant of GFP (YFP), enhanced GFP (EGFP), enhanced CFP (ECFP), enhanced YFP (EYFP), GFPS65T, Emerald, Topaz (TYFP), Venus, Citrine, mCitrine, GFPuv, destabilized EGFP (dEGFP), destabilized ECFP (dECFP), destabilised EYFP (dEYFP), mCFPm, Cerulean, T-Sapphire, CyPet, YPet, mKO, HcRed, t-HcRed, DsRed, DsRed2, DsRed-monomer, J-Red, dimer2, t-dimer2(12), mRFPl, pocilloporin, Renilla GFP, Monster GFP, paGFP, Kaede protein and kindling protein, Phycobiliproteins and Phycobiliprotein conjugates including B-Phycoerythrin, R-Phycoerythrin and Allophycocyanin. Other examples of fluorescent proteins include mHoneydew, mBanana, mOrange, dTomato, tdTomato, mTangerine, mStrawberry, mCherry, mGrapel, mRaspberry, mGrape2, m PI urn (Shaner et al. (2005) Nat. Methods 2:905-909), and the like. Any of a variety of fluorescent and colored proteins from Anthozoan species, as described in, e.g., Matz et al. (1999) Nature Biotechnol. 17:969-973, can be encoded.

[1195] In some cases, the donor DNA encodes an RNA, e.g., an siRNA, a microRNA, a short hairpin RNA (shRNA), an anti-sense RNA, a riboswitch, a ribozyme, an aptamer, a ribosomal RNA, a transfer RNA, and the like.

[1196] A donor DNA can include, in addition to a nucleotide sequence encoding one or more gene products (e.g., an RNA and/or a polypeptide), one or more transcriptional control elements, e.g., a promoter, an enhancer, and the like. In some cases, the transcriptional control element is inducible. In some cases, the promoter is reversible. In some cases, the transcriptional control element is constitutive. In some cases, the promoter is functional in a eukaryotic cell. In some cases, the promoter is a cell type-specific promoter. In some cases, the promoter is a tissue-specific promoter.

[1197] The nucleotide sequence of the donor DNA is typically not identical to the target nucleic acid (e.g., genomic sequence) that it replaces. Rather, the donor DNA may contain at least one or more single base changes, insertions, deletions, inversions or rearrangements with respect to the target nucleic acid (e.g., genomic sequence), so long as sufficient homology is present to support homology-directed repair (e.g., for gene correction, e.g., to convert a disease-causing base pair or a non-disease-causing base pair). In some cases, the donor DNA comprises a non-homologous sequence flanked by two regions of homology, such that homology-directed repair between the target DNA region and the two flanking sequences results in insertion of the non-homologous sequence at the target region. Donor DNA may also comprise a vector backbone containing sequences that are not homologous to the DNA region of interest (the target nucleic acid) and that are not intended for insertion into the DNA region of interest (the target nucleic acid). Generally, the homologous region(s) of a donor sequence will have at least 50% sequence identity to a target nucleic acid (e.g., a genomic sequence) with which recombination is desired. In certain cases, 60%, 70%, 80%, 90%, 95%, 98%, 99%, or 99.9% sequence identity is present. Any value between 1% and 100% sequence identity can be present, depending upon the length of the donor polynucleotide.

[1198] The donor DNA may comprise certain nucleotide sequence differences as compared to the target nucleic acid (e.g., genomic sequence), where such difference include, e.g. restriction sites, nucleotide polymorphisms, selectable markers (e.g., drug resistance genes, fluorescent proteins, enzymes etc.), etc., which may be used to assess for successful insertion of the donor DNA at the cleavage site or in some cases may be used for other purposes (e.g., to signify expression at the targeted genomic locus). In some cases, if located in a coding region, such nucleotide sequence differences will not change the amino acid sequence, or will make silent amino acid changes (i.e., changes which do not affect the structure or function of the protein). Alternatively, these sequences differences may include flanking recombination sequences such as FLPs, loxP sequences, or the like, that can be activated at a later time for removal of the marker sequence. In some cases, the donor DNA will include one or more nucleotide sequences to aid in localization of the donor to the nucleus of the recipient cell or to aid in the integration of the donor DNA into the target nucleic acid. For example, in some case, the donor DNA may comprise one or more nucleotide sequences encoding one or more nuclear localization signals and the like (Frietas et al (2009) Cun-Genomics 10:550-7). In some cases, the donor DNA will include nucleotide sequences to recruit DNA repair enzymes to increase insertion efficiency. Fiuman enzymes involved in homology directed repair include MRN-CtIP, BLM-DNA2, Exol, ERCC1, Rad51, Rad52, Ligase 1, RoIQ, PARP1, Ligase 3, BRCA2, RecQ/BLM-ToroIIIa, RTEL, Roid, and Roih (Verma and Greenburg (2016) Genes Dev. 30 (10): 1138-1154). In some cases, the donor DNA is delivered as reconstituted chromatin (Cruz-Becerra and Kadonaga (2020) eLife 2020; 9:e55780 DOI: 10.7554/eLife.55780).

[1199] In some cases, the ends of the donor DNA are protected (e.g., from exonucleolytic degradation) by any convenient method and such methods are known to those of skill in the art. For example, one or more dideoxynucleotide residues can be added to the 3′ terminus of a linear molecule and/or self complementary oligonucleotides can be ligated to one or both ends. See, for example, Chang et al. (1987) Proc. Natl. Acad Sci USA 84:4959-4963; Nehls et al. (1996) Science 272:886-889. Additional methods for protecting exogenous polynucleotides from degradation include, but are not limited to, addition of terminal amino group(s) and the use of modified internucleotide linkages such as, for example, phosphorothioates, phosphoramidates, and O-methyl ribose or deoxyribose residues. As an alternative to protecting the termini of a linear donor DNA, additional lengths of sequence may be included outside of the regions of homology that can be degraded without impacting recombination.

### Linkers

[1200] In some embodiments, the polypeptides of the retron-based gene editing system are coupled to one another other to one or more accessory functions by a linker. Such accessory functions can include deaminases, nucleases, reverse transcriptases, and recombinases. For example, a retron RT may be linked to a programmable nuclease, such as, a Type II or Type V CRISPR nuclease. The term linker as used in reference to a fusion protein refers to a molecule which joins the proteins to form a fusion protein. Generally, such molecules have no specific biological activity other than to join or to preserve some minimum distance or other spatial relationship between the proteins. However, in one embodiment, the linker may be selected to influence some property of the linker and/or the fusion protein such as the folding, net charge, or hydrophobicity of the linker.

[1201] Suitable linkers for use in the methods of the present invention are well known to those of skill in the art and include, but are not limited to, straight or branched-chain carbon linkers, heterocyclic carbon linkers, or peptide linkers. Preferred peptide linker sequences adopt a flexible extended conformation and do not exhibit a propensity for developing an ordered secondary structure. In one embodiment, the linker can be a chemical moiety which can be monomeric, dimeric, multimeric or polymeric. Preferably, the linker comprises amino acids. Typical amino acids in flexible linkers include Gly, Asn and Ser.

[1202] Accordingly, in particular embodiments, the linker comprises a combination of one or more of Gly, Asn and Ser amino acids. Other near neutral amino acids, such as Thr and Ala, also may be used in the linker sequence. Exemplary linkers are disclosed in Maratea et al. (1985), Gene 40: 39-46; Murphy et al. (1986) Proc. Nat'l. Acad. Sci. USA 83: 8258-62; U.S. Pat. Nos. 4,935,233; and 4,751,180. For example, GlySer linkers may be based on repeating units of GGS, i.e., up to 2, 3, 4, 5, 6, 7, 8, 9, 10, 11 or even 12 or more repeating units, including but not limited to:

| SEQ ID | Description | Sequence |
|---|---|---|
| | GlySer linker based | GGS |
| | on GGS repeating | |
| | unit | |
| 19469 | GlySer linker based | GGS GGS |
| | on GGS repeating | |
| | unit | |
| 19470 | GlySer linker based | GGS GGS GGS |
| | on GGS repeating | |
| | unit | |
| 19471 | GlySer linker based | GGS GGS GGS GGS |
| | on GGS repeating | |
| | unit | |
| 19472 | GlySer linker based | GGS GGS GGS GGS GGS |
| | on GGS repeating | |
| | unit | |
| 19473 | GlySer linker based | GGS GGS GGS GGS GGS GGS |
| | on GGS repeating | |
| | unit | |
| 19474 | GlySer linker based | GGS GGS GGS GGS GGS GGS GGS |
| | on GGS repeating | |
| | unit | |
| 19475 | GlySer linker based | GGS GGS GGS GGS GGS GGS GGS GGS |
| | on GGS repeating | |
| | unit | |
| 19476 | GlySer linker based | GGS GGS GGS GGS GGS GGS GGS GGS GGS |
| | on GGS repeating | |
| | unit | |
| 19477 | GlySer linker based | GGS GGS GGS GGS GGS GGS GGS GGS GGS GGS |
| | on GGS repeating | |
| | unit | |
| 19478 | GlySer linker based | GGS GGS GGS GGS GGS GGS GGS GGS GGS GGS GGS |
| | on GGS repeating | |
| | unit | |
| 19479 | GlySer linker based | GGS GGS GGS GGS GGS GGS GGS GGS GGS GGS GGS GGS |
| | on GGS repeating | |
| | unit | |
| 19480 | GlySer linker based | GGS GGS GGS GGS GGS GGS GGS GGS GGS GGS GGS GGS |
| | on GGS repeating | GGS |
| | unit | |
| 19481 | GlySer linker based | GGS GGS GGS GGS GGS GGS GGS GGS GGS GGS GGS GGS |
| | on GGS repeating | GGS GGS |
| | unit | |
| 19482 | GlySer linker based | GGS GGS GGS GGS GGS GGS GGS GGS GGS GGS GGS GGS |
| | on GGS repeating | GGS GGS GGS |
| | unit | |

[1203] In another example, GlySer linkers may be based on repeating units of GSG, i.e., up to 2, 3, 4, 5, 6, 7, 8, 9, 10, 11 or even 12 or more repeating units, including but not limited to:

| SEQ | | |
|---|---|---|
| ID | Description | Sequence |
| | GlySer linker | GSG |
| | based on GSG | |
| | repeating unit | |
| 19483 | GlySer linker | GSG GSG |
| | based on GSG | |
| | repeating unit | |
| 19484 | GlySer linker | GSG GSG GSG |
| | based on GSG | |
| | repeating unit | |
| 19485 | GlySer linker | GSG GSG GSG GSG |
| | based on GSG | |
| | repeating unit | |
| 19486 | GlySer linker | GSG GSG GSG GSG GSG |
| | based on GSG | |
| | repeating unit | |
| 19487 | GlySer linker | GSG GSG GSG GSG GSG GSG |
| | based on GSG | |
| | repeating unit | |
| 19488 | GlySer linker | GSG GSG GSG GSG GSG GSG GSG GSG |
| | based on GSG | |
| | repeating unit | |
| 19489 | GlySer linker | GSG GSG GSG GSG GSG GSG GSG GSG GSG |
| | based on GSG | |
| | repeating unit | |
| 19490 | GlySer linker | GSG GSG GSG GSG GSG GSG GSG GSG GSG GSG |
| | based on GSG | |
| | repeating unit | |
| 19491 | GlySer linker | GSG GSG GSG GSG GSG GSG GSG GSG GSG GSG GSG |
| | based on GSG | |
| | repeating unit | |
| 19492 | GlySer linker | GSG GSG GSG GSG GSG GSG GSG GSG GSG GSG GSG GSG |
| | based on GSG | |
| | repeating unit | |
| 19493 | GlySer linker | GSG GSG GSG GSG GSG GSG GSG GSG GSG GSG GSG GSG GSG |
| | based on GSG | |
| | repeating unit | |
| 19494 | GlySer linker | GSG GSG GSG GSG GSG GSG GSG GSG GSG GSG GSG GSG GSG |
| | based on GSG | GSG |
| | repeating unit | |
| 19495 | GlySer linker | GSG GSG GSG GSG GSG GSG GSG GSG GSG GSG GSG GSG GSG |
| | based on GSG | GSG GSG |
| | repeating unit | |

[1204] In yet another example, GlySer linkers may be based on repeating units of GGGS, i.e., up to 2, 3, 4, 5, 6, 7, 8, 9, 10, 11 or even 12 or more repeating units, including but not limited to:

| SEQ | | |
|---|---|---|
| ID | Description | Sequence |
| 19496 | GlySer linker | GGGS |
| | based on GGGS | |
| | repeating unit | |
| 19497 | GlySer linker | GGGS GGGS |
| | based on GGGS | |
| | repeating unit | |
| 19498 | GlySer linker | GGGS GGGS GGGS |
| | based on GGGS | |
| | repeating unit | |
| 19499 | GlySer linker | GGGS GGGS GGGS GGGS |
| | based on GGGS | |
| | repeating unit | |
| 19500 | GlySer linker | GGGS GGGS GGGS GGGS GGGS |
| | based on GGGS | |
| | repeating unit | |
| 19501 | GlySer linker | GGGS GGGS GGGS GGGS GGGS GGGS |
| | based on GGGS | |
| | repeating unit | |
| 19502 | GlySer linker | GGGS GGGS GGGS GGGS GGGS GGGS GGGS |
| | based on GGGS | |
| | repeating unit | |
| 19503 | GlySer linker | GGGS GGGS GGGS GGGS GGGS GGGS GGGS GGGS |
| | based on GGGS | |
| | repeating unit | |
| 19504 | GlySer linker | GGGS GGGS GGGS GGGS GGGS GGGS GGGS GGGS GGGS |
| | based on GGGS | |
| | repeating unit | |
| 19505 | GlySer linker | GGGS GGGS GGGS GGGS GGGS GGGS GGGS GGGS GGGS GGGS |
| | based on GGGS | |
| | repeating unit | |
| 19506 | GlySer linker | GGGS GGGS GGGS GGGS GGGS GGGS GGGS GGGS GGGS GGGS |
| | based on GGGS | GGGS |
| | repeating unit | |
| 19507 | GlySer linker | GGGS GGGS GGGS GGGS GGGS GGGS GGGS GGGS GGGS GGGS |
| | based on GGGS | GGGS GGGS |
| | repeating unit | |
| 19508 | GlySer linker | GGGS GGGS GGGS GGGS GGGS GGGS GGGS GGGS GGGS GGGS |
| | based on GGGS | GGGS GGGS GGGS |
| | repeating unit | |
| 19509 | GlySer linker | GGGS GGGS GGGS GGGS GGGS GGGS GGGS GGGS GGGS GGGS |
| | based on GGGS | GGGS GGGS GGGS GGGS |
| | repeating unit | |
| 19510 | GlySer linker | GGGS GGGS GGGS GGGS GGGS GGGS GGGS GGGS GGGS GGGS |
| | based on GGGS | GGGS GGGS GGGS GGGS GGGS |
| | repeating unit | |

[1205] In still another example, GlySer linkers may be based on repeating units of GGGGS, i.e., up to 2, 3, 4, 5, 6, 7, 8, 9, 10, 11 or even 12 or more repeating units, including but not limited to:

| SEQ | | |
|---|---|---|
| ID | Description | Sequence |
| 19511 | GlySer linker | GGGGS |
| | based on | |
| | GGGGS | |
| | repeating unit | |
| 19512 | GlySer linker | GGGGS GGGGS |
| | based on | |
| | GGGGS | |
| | repeating unit | |
| 19513 | GlySer linker | GGGGS GGGGS GGGGS |
| | based on | |
| | GGGGS | |
| | repeating unit | |
| 19514 | GlySer linker | GGGGS GGGGS GGGGS GGGGS |
| | based on | |
| | GGGGS | |
| | repeating unit | |
| 19515 | GlySer linker | GGGGS GGGGS GGGGS GGGGS GGGGS |
| | based on | |
| | GGGGS | |
| | repeating unit | |
| 19516 | GlySer linker | GGGGS GGGGS GGGGS GGGGS GGGGS GGGGS |
| | based on | |
| | GGGGS | |
| | repeating unit | |
| 19517 | GlySer linker | GGGGS GGGGS GGGGS GGGGS GGGGS GGGGS GGGGS |
| | based on | |
| | GGGGS | |
| | repeating unit | |
| 19518 | GlySer linker | GGGGS GGGGS GGGGS GGGGS GGGGS GGGGS GGGGS GGGGS |
| | based on | |
| | GGGGS | |
| | repeating unit | |
| 19519 | GlySer linker | GGGGS GGGGS GGGGS GGGGS GGGGS GGGGS GGGGS GGGGS |
| | based on | GGGGS |
| | GGGGS | |
| | repeating unit | |
| 19520 | GlySer linker | GGGGS GGGGS GGGGS GGGGS GGGGS GGGGS GGGGS GGGGS |
| | based on | GGGGS GGGGS |
| | GGGGS | |
| | repeating unit | |
| 19521 | GlySer linker | GGGGS GGGGS GGGGS GGGGS GGGGS GGGGS GGGGS GGGGS |
| | based on | GGGGS GGGGS GGGGS |
| | GGGGS | |
| | repeating unit | |
| 19522 | GlySer linker | GGGGS GGGGS GGGGS GGGGS GGGGS GGGGS GGGGS GGGGS |
| | based on | GGGGS GGGGS GGGGS GGGGS |
| | GGGGS | |
| | repeating unit | |
| 19523 | GlySer linker | GGGGS GGGGS GGGGS GGGGS GGGGS GGGGS GGGGS GGGGS |
| | based on | GGGGS GGGGS GGGGS GGGGS GGGGS |
| | GGGGS | |
| | repeating unit | |
| 19524 | GlySer linker | GGGGS GGGGS GGGGS GGGGS GGGGS GGGGS GGGGS GGGGS |
| | based on | GGGGS GGGGS GGGGS GGGGS GGGGS GGGGS |
| | GGGGS | |
| | repeating unit | |
| 19525 | GlySer linker | GGGGS GGGGS GGGGS GGGGS GGGGS GGGGS GGGGS GGGGS |
| | based on | GGGGS GGGGS GGGGS GGGGS GGGGS GGGGS GGGGS |
| | GGGGS | |
| | repeating unit | |

[1206] In yet a further embodiment, LEPGEKPYKCPECGKSFSQSGALTRHQRTHTR (SEQ ID NO: 19526) is used as a linker.

[1207] In yet an additional embodiment, the linker is an XTEN linker, which is TCGGGATCTGAGACGCCTGGGACCTCGGAATCGGCTACGCCCGAAAGT (SEQ ID NO: 19527). In further particular embodiments, Cas12a polypeptide is linked C-terminally to the N-terminus of a deaminase protein or its catalytic domain by means of an LEPGEKPYKCPECGKSFSQSGALTRHQRTHTRLEPGEKPYKCPECGKSFSQSGALTRHQR THTRLEPGEKPYKCPECGKSFSQSGALTRHQRTHTR (SEQ ID NO: 19528) linker. In addition, N- and C-terminal NLSs can also function as linker (e.g., PKKKRKVEASSPKKRKVEAS (SEQ ID NO: 19420)).

[1208] The above description of linkers is intended to be non-limiting and includes any combinations of the above linkers or heterologous combinations of repeating GlySer linkers.

[1209] The linker may be as simple as a covalent bond, or it may be a polymeric linker many atoms in length. In certain embodiments, the linker is a polypeptide or based on amino acids. In other embodiments, the linker is not peptide-like. In certain embodiments, the linker is a covalent bond (e.g., a carbon-carbon bond, disulfide bond, carbon-heteroatom bond, etc.). In certain embodiments, the linker is a carbon-nitrogen bond of an amide linkage. In certain embodiments, the linker is a cyclic or acyclic, substituted or unsubstituted, branched or unbranched aliphatic or heteroaliphatic linker. In certain embodiments, the linker is polymeric (e.g., polyethylene, polyethylene glycol, polyamide, polyester, etc.). In certain embodiments, the linker comprises a monomer, dimer, or polymer of aminoalkanoic acid. In certain embodiments, the linker comprises an aminoalkanoic acid (e.g., glycine, ethanoic acid, alanine, beta-alanine, 3-aminopropanoic acid, 4-aminobutanoic acid, 5-pentanoic acid, etc.). In certain embodiments, the linker comprises a monomer, dimer, or polymer of aminoHEXAnoic acid (Ahx). In certain embodiments, the linker is based on a carbocyclic moiety (e.g., cyclopentane, cycloHEXAne). In other embodiments, the linker comprises a polyethylene glycol moiety (PEG). In other embodiments, the linker comprises amino acids. In certain embodiments, the linker comprises a peptide. In certain embodiments, the linker comprises an aryl or heteroaryl moiety. In certain embodiments, the linker is based on a phenyl ring. The linker may included functionalized moieties to facilitate attachment of a nucleophile (e.g., thiol, amino) from the peptide to the linker. Any electrophile may be used as part of the linker. Exemplary electrophiles include, but are not limited to, activated esters, activated amides, Michael acceptors, alkyl halides, aryl halides, acyl halides, and isothiocyanates.

[1210] The linker can be, for example, a cleavable linker or protease-sensitive linker. In some embodiments, the linker is selected from the group consisting of F2A linker, P2A linker, T2A linker, E2A linker, and combinations thereof. This family of self-cleaving peptide linkers, referred to as 2A peptides, has been described in the art (see for example, Kim, J. H. et al. (2011) PLoS ONE 6:e18556). In some embodiments, the linker is an F2A linker. In some embodiments, the linker is a GGGS linker. In some embodiments, the fusion protein contains three domains with intervening linkers, having the structure: domain-linker-domain-linker-domain.

[1211] Cleavable linkers known in the art may be used in connection with the disclosure. Exemplary such linkers include: F2A linkers, T2A linkers, P2A linkers, E2A linkers (See, e.g., WO2017127750). The skilled artisan will appreciate that other art-recognized linkers may be suitable for use in the constructs of the disclosure (e.g., encoded by the nucleic acids of the disclosure). The skilled artisan will likewise appreciate that other polycistronic constructs (mRNA encoding more than one nucleobase editing system component/polypeptide separately within the same molecule) may be suitable for use as provided herein.

### Nuclear Localization Domains

[1212] In various embodiments, the gene editing systems or any of the components thereof may fused to one or more nuclear localization sequences (NLSs), such as about or more than about 1, 2, 3, 4, 5, 6, 7, 8, 9, 10, or more NLSs. In one embodiment, a gene editor component (e.g., a nucleic acid programmable DNA binding protein or an editing accessory protein) comprises about or more than about 1, 2, 3, 4, 5, 6, 7, 8, 9, 10, or more NLSs at or near the amino-terminus, about or more than about 1, 2, 3, 4, 5, 6, 7, 8, 9, 10, or more NLSs at or near the carboxy-terminus, or a combination of these (e.g., zero or at least one or more NLS at the amino-terminus and zero or at one or more NLS at the carboxy terminus). When more than one NLS is present, each may be selected independently of the others, such that a single NLS may be present in more than one copy and/or in combination with one or more other NLSs present in one or more copies. In an embodiment of the invention, an editor component polypeptide comprises at most 6 NLSs. In one embodiment, an NLS is considered near the N- or C-terminus when the nearest amino acid of the NLS is within about 1, 2, 3, 4, 5, 10, 15, 20, 25, 30, 40, 50, or more amino acids along the polypeptide chain from the N- or C-terminus. Nonlimiting examples of NLSs include an NLS sequence derived from: the NLS of the SV40 virus large T-antigen, having the amino acid sequence PKKKRKV (SEQ ID NO: 19399); the NLS from nucleoplasmin (e.g. the nucleoplasmin bipartite NLS with the sequence KRPAATKKAGQAKKKK (SEQ ID NO: 19529); the c-myc NLS having the amino acid sequence PAAKRVKLD (SEQ ID NO: 19530) or RQRRNELKRSP (SEQ ID NO: 19531); the hRNPAl M9 NLS having the sequence NQSSNFGPMKGGNFGGRSSGPYGGGGQYFAKPRNQGGY (SEQ ID NO: 19532); the sequence RMRIZFKNKGKDTAELRRRRVEVSVELRKAKKDEQILKRRNV (SEQ ID NO: 19533) of the IBB domain from importin-alpha; the sequences VSRKRPRP (SEQ ID NO: 19400) and PPKKARED (SEQ ID NO: 19534) of the myoma T protein; the sequence PQPKKKPL (SEQ ID NO: 19535) of human p53; the sequence SALIKKKKKMAP (SEQ ID NO: 19536) of mouse c-abl IV; the sequences DRLRR (SEQ ID NO: 19537) and PKQKKRK (SEQ ID NO: 19538) of the influenza virus NS 1; the sequence RKLKKKIKKL (SEQ ID NO: 19539) of the Hepatitis virus delta antigen; the sequence REKKKFLKRR (SEQ ID NO: 19540) of the mouse Mxl protein; the sequence KRKGDEVDGVDEVAKKKSKK (SEQ ID NO: 19541) of the human poly(ADP-ribose) polymerase; and the sequence RI<CLQAGMNLEARI<TI<I<(SEQ ID NO: 19542) of the steroid hormone receptors (human) glucocorticoid.

[1213] In general, the one or more NLSs are of sufficient strength to drive accumulation of a polypeptide of interest (e.g., retron RT) in a detectable amount in the nucleus of a eukaryotic cell. In general, strength of nuclear localization activity may derive from the number of NLSs in the polypeptide of interest (e.g., retron RT), the particular NLS(s) used, or a combination of these factors. Detection of accumulation in the nucleus may be performed by any suitable technique.

[1214] For example, a detectable marker may be fused to a polypeptide of interest (e.g., retron RT), such that location within a cell may be visualized, such as in combination with a means for detecting the location of the nucleus (e.g., a stain specific for the nucleus such as DAPI). Cell nuclei may also be isolated from cells, the contents of which may then be analyzed by any suitable process for detecting protein, such as immunohistochemistry, Western blot, or enzyme activity assay. Accumulation in the nucleus may also be determined indirectly, such as by an assay for the effect of complex formation (e.g., assay for DNA cleavage or mutation at the target sequence, or assay for altered gene expression activity affected by complex formation and/or polypeptide activity), as compared to a control no exposed to the polypeptide or complex, or exposed to a polypeptide lacking the one or more NLSs. In one embodiment of the herein described polypeptide protein complexes and systems the codon optimized polypeptide proteins comprise an NLS attached to the C-terminal of the protein. In one embodiment, other localization tags may be fused to the polypeptide, such as without limitation for localizing the polypeptide to particular sites in a cell, such as organelles, such as mitochondria, plastids, chloroplast, vesicles, golgi, (nuclear or cellular) membranes, ribosomes, nucleolus, ER, cytoskeleton, vacuoles, centrosome, nucleosome, granules, centrioles, etc.

[1215] In one embodiment of the invention, at least one nuclear localization signal (NLS) is attached to the nucleic acid sequences encoding the polypeptide of interest (e.g., a retron RT). In preferred embodiments at least one or more C-terminal or N-terminal NLSs are attached (and hence nucleic acid molecule(s) coding for the polypeptide can include coding for NLS(s) so that the expressed product has the NLS(s) attached or connected). In a preferred embodiment a C-terminal NLS is attached for optimal expression and nuclear targeting in eukaryotic cells, preferably human cells. The invention also encompasses methods for delivering multiple nucleic acid components, wherein each nucleic acid component is specific for a different target locus of interest thereby modifying multiple target loci of interest. The nucleic acid component of the complex may comprise one or more protein-binding RNA aptamers. The one or more aptamers may be capable of binding a bacteriophage coat protein.

[1216] In other examples, the fusion proteins comprising a polypeptide of interest (e.g., retron RT) and another accessory protein (e.g., nuclease) contains one or more nuclear localization signals is selected or derived from SV40, c-Myc or NLP-1.

[1217] The NLS examples above are non-limiting. The proteins and/or fusions contemplated herein may comprise any known NLS sequence, including any of those described in Cokol et al., “Finding nuclear localization signals,” EMBO Rep., 2000, 1(5): 411-415 and Freitas et al., “Mechanisms and Signals for the Nuclear Import of Proteins,” Current Genomics, 2009, 10(8): 550-7, each of which are incorporated herein by reference.

[1218] In various embodiments, any of the polypeptide components of the retron-based editing systems may be engineered with one or more nuclear localization signals, which help promote translocation of a protein into the cell nucleus. The polypeptides of the retron-based editing system may comprise any known NLS sequence, including any of those described in Cokol et al., “Finding nuclear localization signals,” EMBO Rep., 2000, 1(5): 411-415 and Freitas et al., “Mechanisms and Signals for the Nuclear Import of Proteins,” Current Genomics, 2009, 10(8): 550-7, each of which are incorporated herein by reference.

[1219] In various embodiments, the polypeptides disclosed herein may include one or more, preferably, at least two nuclear localization signals. The NLSs may be any known NLS sequence in the art. The NLSs may also be any future-discovered NLSs for nuclear localization. The NLSs also may be any naturally-occurring NLS, or any non-naturally occurring NLS (e.g., an NLS with one or more desired mutations). The term“nuclear localization sequence” or “NLS” refers to an amino acid sequence that promotes import of a protein into the cell nucleus, for example, by nuclear transport. Nuclear localization sequences are known in the art and would be apparent to the skilled artisan. For example, NLS sequences are described in Plank et al., International PCT application PCT/EP2000/011690, filed Nov. 23, 2000, published as WO/2001/038547 on May 31, 2001, the contents of which are incorporated herein by reference. In some embodiments, an NLS comprises the amino acid sequence PKKKRKV (SEQ ID NO: 19399).

[1220] Another representative nuclear localization signal is a peptide sequence that directs the protein to the nucleus of the cell in which the sequence is expressed. A nuclear localization signal is predominantly basic, can be positioned almost anywhere in a protein's amino acid sequence, generally comprises a short sequence of four amino acids (Autieri & Agrawal, (1998) J. Biol. Chem. 273: 14731-37, incorporated herein by reference) to eight amino acids, and is typically rich in lysine and arginine residues (Magin et al., (2000) Virology 274: 11-16, incorporated herein by reference). Nuclear localization signals often comprise proline residues. A variety of nuclear localization signals have been identified and have been used to effect transport of biological molecules from the cytoplasm to the nucleus of a cell. See, e.g., Tinland et al., (1992) Proc. Natl. Acad. Sci. U.S.A. 89:7442-46; Moede et al., (1999) FEBS Lett.461:229-34, which is incorporated by reference. Translocation is currently thought to involve nuclear pore proteins.

[1221] Most NLSs can be classified in three general groups: (i) a monopartite NLS exemplified by the SV40 large T antigen NLS (PKKKRKV) (SEQ ID NO: 19399); (ii) a bipartite motif consisting of two basic domains separated by a variable number of spacer amino acids and exemplified by the Xenopus nucleoplasmin NLS (KRXXXXXXXXXXKKKL) (SEQ ID NO: 19419); and (iii) noncanonical sequences such as M9 of the hnRNP A1 protein, the influenza virus nucleoprotein NLS, and the yeast Gal4 protein NLS (Dingwall and Laskey 1991). Nuclear localization signals appear at various points in the amino acid sequences of proteins. NLS's have been identified at the N-terminus, the C-terminus and in the central region of proteins. Thus, the disclosure provides polypeptides that may be modified with one or more NLSs at the C-terminus, the N-terminus, as well as at in internal region of a polypeptide (including a fusion protein).

[1222] The present disclosure contemplates any suitable means by which to modify a polypeptide to include one or more NLSs. In one aspect, a polypeptide (e.g., a programmable nuclease) may be engineered to express with a translationally fused NLS at its N-terminus or its C-terminus (or both), i.e., to form a polypeptide-NLS fusion construct. In addition, the NLSs may include various amino acid linkers or spacer regions encoded between a polypeptide and the N-terminally, C-terminally, or internally-attached NLS amino acid sequence, e.g, and in the central region of proteins.

[1223] Thus, the present disclosure also provides for nucleotide constructs, vectors, and host cells for expressing fusion proteins that comprise a polypeptide and one or more NLSs.

### Tag Domains

[1224] In some embodiments, the retron-based editing system or a component thereof may comprise a polypeptide tag, such as an affinity tag (chitin binding protein (CBP), maltose binding protein (MBP), glutathione-S-transferase (GST), SBP-tag, Strep-tag, AviTag, Calmodulin-tag); solubilization tag; chromatography tag (polyanionic amino acid tag, such as FLAG-tag); epitope tag (short peptide sequences that bind to high-affinity antibodies, such as V5-tag, Myc-tag, VSV-tag, Xpress tag, E-tag, S-tag, and HA-tag); fluorescence tag (e.g., GFP). In some embodiments, the retron-based editing system peptide may comprise an amino acid tag, such as one or more lysines, histidines, or glutamates, which can be added to the polypeptide sequences (e.g., at the N-terminal or C-terminal ends). Lysines can be used to increase peptide solubility or to allow for biotinylation. Protein and amino acid tags are peptide sequences genetically grafted onto a recombinant protein. Sequence tags are attached to proteins for various purposes, such as peptide purification, identification, or localization, for use in various applications including, for example, affinity purification, protein array, western blotting, immunofluorescence, and immunoprecipitation. Such tags are subsequently removable by chemical agents or by enzymatic means, such as by specific proteolysis or intein splicing.

[1225] Alternatively, amino acid residues located at the carboxy and amino terminal regions of the amino acid sequence of a peptide or protein may optionally be deleted providing for truncated sequences. Certain amino acids (e.g., C-terminal or N-terminal residues) may alternatively be deleted depending on the use of the sequence, as for example, expression of the sequence as part of a larger sequence which is soluble, or linked to a solid support.

### Aptamers

[1226] In particular embodiments, the nucleic acid components (e.g., guide RNAs or retron ncRNAs) of the retron-based editing systems may further comprise a functional structure designed to improve nucleic acid component molecule structure, architecture, stability, genetic expression, or any combination thereof. Such a structure can include an aptamer.

[1227] Aptamers are biomolecules that can be designed or selected to bind tightly to other ligands, for example using a technique called systematic evolution of ligands by exponential enrichment (SELEX; Tuerk C, Gold L: “Systematic evolution of ligands by exponential enrichment: RNA ligands to bacteriophage T4 DNA polymerase.” Science 1990, 249:505-510). Nucleic acid aptamers can for example be selected from pools of random-sequence oligonucleotides, with high binding affinities and specificities for a wide range of biomedically relevant targets, suggesting a wide range of therapeutic utilities for aptamers (Keefe, Anthony D., Supriya Pai, and Andrew Ellington. “Aptamers as therapeutics.” Nature Reviews Drug Discovery 9.7 (2010): 537-550). These characteristics also suggest a wide range of uses for aptamers as drug delivery vehicles (Levy-Nissenbaum, Etgar, et al. “Nanotechnology and aptamers: applications in drug delivery.” Trends in biotechnology 26.8 (2008): 442-449; and, Hicke B J, Stephens A W. “Escort aptamers: a delivery service for diagnosis and therapy.” J Clin Invest 2000, 106:923-928.). Aptamers may also be constructed that function as molecular switches, responding to a que by changing properties, such as RNA aptamers that bind fluorophores to mimic the activity of green fluorescent protein (Paige, Jeremy S., Karen Y. Wu, and Sarnie R. Jaffrey. “RNA mimics of green fluorescent protein.” Science 333.6042 (2011): 642-646). It has also been suggested that aptamers may be used as components of targeted siRNA therapeutic delivery systems, for example targeting cell surface proteins (Zhou, Jiehua, and John J. Rossi. “Aptamer-targeted cell-specific RNA interference.” Silence 1.1 (2010): 4).

[1228] Accordingly, in particular embodiments, a retron-based gene editing nucleic acid component is modified, e.g., by one or more aptamer(s) designed to improve RNA or DNA component molecule delivery, including delivery across the cellular membrane, to intracellular compartments, or into the nucleus. Such a structure can include, either in addition to the one or more aptamer(s) or without such one or more aptamer(s), moiety(ies) so as to render the nucleic acid component molecule deliverable, inducible or responsive to a selected effector. The invention accordingly comprehends a reRNA component molecule that responds to normal or pathological physiological conditions, including without limitation pH, hypoxia, oxygen concentration, temperature, protein concentration, enzymatic concentration, lipid structure, light exposure, mechanical disruption (e.g. ultrasound waves), magnetic fields, electric fields, or electromagnetic radiation.

Agents that Modulate DNA-Repair

[1229] In certain embodiments, the retron-based gene editing systems described herein further comprises or encodes a DNA-repair modulating biomolecule, which may further enhance the efficiency of integration of a repair outcome.

[1230] In certain embodiments, the DNA-repair modulating biomolecule comprises a Nonhomologous end joining (NHEJ) inhibitor.

[1231] In certain embodiments, the DNA-repair modulating biomolecule comprises a homologous directed repair (HDR) promoter.

[1232] In certain embodiments, the DNA-repair modulating biomolecule comprises a NHEJ inhibitor and an HDR promoter.

[1233] In certain embodiments, the DNA-repair modulating biomolecule enhances or improves more precise genome editing and/or the efficiency of homologous recombination, compared to the otherwise identical embodiment without the DNA-repair modulating biomolecule.

[1234] HDR promoters and/or NHEJ inhibitors can, in some embodiments, comprise one or more small molecules. Systems bearing recombination enhancers such as small molecules that activate HDR and suppress NHEJ locally at the genomic site of the DNA damage can be tailored in their placement on the engineered systems to further enhance their efficiency. In general, the small molecule recombination enhancers can be synthesized to bear linkers and a functional group, such as maleimide for reacting with a thiol group on a Cys residue of a protein, for chemical conjugation to the engineered systems. Use of commercially available functionalized PEG linkers (alkyne, azide, cyclooctyne etc.) can also be employed for conjugation, and orthogonal conjugation chemistries can be utilized for the multivalent display.

[1235] Conjugation sites can be readily identified where modifications do not affect the potency of the recombination enhancers selected.

[1236] In certain embodiments, multivalent display of one or more DNA-repair modulating biomolecule can be effected, including multiple moieties of NHEJ inhibitors, HDR promoters, or a combination thereof. See, for example, “Genomic targeting of epigenetic probes using a chemically tailored Cas9 system” by Liszczak et al., Proc Natl Acad Sci U.S.A. 114: 681-686, 2017 (incorporated herein by reference). In certain embodiments, multivalent display of small molecule compounds can be achieved through sortase loop proteins used as a scaffold for their display.

[1237] In some embodiments, the DNA-repair modulating biomolecule may comprise an HDR promoter. The HDR promoter may comprise small molecules, such as RSI or analogs thereof. In certain embodiments, the HDR promoter stimulates RAD51 activity or RAD52 motif protein 1 (RDM1) activity. In certain embodiments, the HDR promoter comprises Nocodazole, which can result in higher HDR selection.

[1238] In certain embodiments, the HDR promoter may be administered prior to the delivery of the retron-based editing systems described herein.

[1239] In certain embodiments, the HDR promoter locally enhances HDR without NHEJ inhibition. For example, RAD5l is a protein involved in strand exchange and the search for homology regions during HDR repair. In certain embodiments, the HDR promoter is phenylbenzamide RSI, identified as a small-molecule RAD51-stimulator (see WO2019/135816 at [0200]-[0204], specifically incorporated herein by reference).

[1240] In certain embodiments, the DNA-repair modulating biomolecule comprises C-terminal binding protein interacting protein (CtIP) or a functional fragment or homolog thereof. CtIP is a key protein in early steps of homologous recombination. According to this embodiment, the CtIP or the functional fragment or homolog thereof can be linked (e.g., fused) to the RT or the sequence-specific nuclease (e.g., a CRISPR/Cas effector enzyme, a ZFN, a TALEN, a meganuclease, TnpB, IscB, or a restriction endonuclease (RE)), and stimulates transgene integration by HDR.

[1241] In certain embodiments, the CtIP fragment is a minimal N-terminal fragment of the wild-type CtIP, such as the N-terminal fragment comprising residues 1-296 of the full-length CtIP (the HE for HDR enhancer), as described in Charpentier et al. (Nature Comm., DOI: 10.1038/s41467-018-03475-7, incorporated herein by reference), shown to be sufficient to stimulate HDR. The activity of the fragment depends on CDK phosphorylation sites (e.g., S233, T245, and S276) and the multimerization domain essential for CtIP activity in homologous recombination. Thus alternative fragments comprising the CDK phosphorylation sites and the multimerization domain essential for CtIP activity are also within the scope of the invention.

[1242] In certain embodiments, the DNA-repair modulating biomolecule comprises a dominant negative 53BP1.

[1243] In certain embodiments, the DNA-repair modulating biomolecule comprises a cell cycle-specific degradation tag, such as the degradation domain of the (human) Geminin, and the (murine) CyclinB2.

[1244] In certain embodiments, the DNA-repair modulating biomolecule comprises CyclinB2, a member of the B-type cyclins that associate with p34cdc2, and an essential component of the cell cycle regulatory machinery. CRISPR-mediated knock-in efficiency may be increased by promoting the relative increase in Cas9 activity in G2 phase of the cell cycle, when HDR is more active. In certain embodiments, the degradation domains of the (human) Geminin and (murine) CyclinB2 can be used as either N- or C-terminal fusion to serve as the DNA-repair modulating biomolecule. These domains are known to determine a cell-cycle specific profile of chimeric proteins, namely an increase in their relative concentration in S and G2 compared to G1, high-jacking the conventional CyclinB2 and Geminin degradation pathways. This produces active Geminin-Cas9 and CyclinB2-Cas9 chimeric proteins, which are degraded in a cell-cycle-dependent manner. Such chimeras shift the repair of the DSBs to the HDR repair pathway compared to the commonly used Cas9.

[1245] While not wishing to be bound by particular theory, it is believed that the application of such cell cycle-specific degradation tags permits/promotes more efficient/secure gene editing.

[1246] In certain embodiments, the DNA-repair modulating biomolecule comprises a Rad family member protein, such as Rad50, Rad51, Rad52, etc., which functions to promote foreign DNA integration into a host chromosome. Specifically, Rad52 is an important homologous recombinant protein, and its complex with Rad51 plays a key role in HDR, mainly involved in the regulation of foreign DNA in eukaryotes. Key steps in the process of HR include repair mediated by Rad51 and strand exchange. Co-expression of Rad52 as a DNA-repair modulating biomolecule significantly enhances the likelihood of HDR by, e.g., three-fold.

[1247] In certain embodiments, the DNA-repair modulating biomolecule comprises a RAD52 protein as, e.g., either an N- or a C-terminal fusion.

[1248] In certain embodiments, the DNA-repair modulating biomolecule comprises a RAD52 motif protein 1 (RDM1) that functions similarly as RAD52. RDM1 has been shown to be able to repair DSBs caused by DNA replication, prevent G2 or M cell cycle arrest, and improve HDR selection.

[1249] In certain embodiments, the DNA-repair modulating biomolecule comprises a dominant negative version of the tumor suppressor p53-binding protein 1 (53BP1). The wild-type protein 53BP1 is a key regulator of the choice between NHEJ and HDR—it is a pro-NHEJ factor which limits HDR by blocking DNA end resection, and also by inhibiting BRCA1 recruitment to DSB sites. It has been shown that global inhibition of 53BP1 by a ubiquitin variant significantly improves Cas9-mediated HDR frequency in non-hematopoietic and hematopoietic cells with single-strand oligonucleotide delivery or double-strand donor in AAV.

[1250] In certain embodiments, the dominant negative (DN) version of the 53BP1 comprises the minimal focus forming region, but lacks domains outside this region, e.g., towards the N-terminus and tandem C-terminal BRCT repeats that recruit key effectors involved in NHEJ, such as RIF1-PTIP and EXPAND, respectively. The 53BP1 adapter protein is recruited to specific histone marks at sites of DSBs via this minimal focus forming region, which comprises several conserved domains including an oligomerization domain (OD), a glycine-arginine rich (GAR) motif, a Tudor domain, and an adjacent ubiquitin-dependent recruitment (UDR) motif. The Tudor domain mediates interactions with histone H4 dimethylated at K2023.

[1251] In certain embodiments, a dominant negative version of 53BP1 (DN1S) suppresses the accumulation of endogenous 53BP1 and downstream NHEJ proteins at sites of DNA damage, while upregulating the recruitment of the BRCA1 HDR protein. Such a DN version of the 53BP1 can be used as the DNA-repair modulating biomolecule, either as an N- or a C-terminal fusion (such as a Cas9 fusion, to locally inhibit NHEJ at the Cas9-target site defined by its gRNA, while promoting an increase in HDR, and does not globally affect NHEJ, thereby improving cell viability).

[1252] In certain embodiments, the DNA-repair modulating biomolecule comprises an NHEJ inhibitor, such as an inhibitor of DNA ligase IV, a KU inhibitor (e.g., KU70 or KU80), a DNA-PKc inhibitor, or an artemis inhibitor.

[1253] In certain embodiments, the NHEJ inhibitor inhibits the NHEJ pathway, enhances HDR, or modulates both. In certain embodiments, the NHEJ inhibitor is a small molecule inhibitor.

[1254] In certain embodiments, the small molecule inhibitor of the NHEJ pathway comprises an SCR7 analog, for example, PK66, PK76, PK409.

[1255] In certain embodiments, the NHEJ inhibitor comprises a KU inhibitor, for example, KU5788, and KU0060648.

[1256] In certain embodiments, a small molecule NHEJ inhibitor is linked to a polyglycine tripeptide through PEG for sortase-mediated ligation, as described in WO2019/135816, Guimaraes et al., Nat Protoc 8:1787-99, 2013; Theile et al., Nat Protoc 8:1800-7, 2013; and Schmohl et al., Curr Opin Chem Biol 22:122-8, 2014 (all incorporated herein by reference). The same means can also be used for attaching small molecule HDR enhancers to protein.

[1257] An exemplary method for conjugating a small molecule DNA-repair modulating biomolecule without loss of activity is described in WO2019135816, where SCR-7 conjugation of a poly-glycine peptide with the para-carboxylic moiety at ring 4 retained activity of the inhibitor, with rings 1, 2 and 3 of the molecule having involvement in the target-engagement, providing a simple and effective strategy to ligate a small molecule NHEJ inhibitor to the system described herein (e.g., to the sequence-specific nuclease including Cas enzymes, or to the RT) to precisely enhance HDR pathway near a nucleic acid target site.

[1258] In certain embodiments, a nucleic acid targeting moiety conjugates based on small molecule inhibitor of DNA-dependent protein kinase (DNA-PK) or heterodimeric Ku (KU70/KU80) can be utilized. KU-0060648 is one potent KU-inhibitors, which can also be functionalized with poly-glycine and used for recombination enhancement.

[1259] In certain embodiments, the DNA-repair modulating biomolecule comprises the Tumor Suppressor p53. p53 plays a direct role in DNA repair, including HR regulation, where it affects the extension of new DNA, thereby affecting HDR selection. In vivo, p53 binds to the nuclear matrix and is a rate-limiting factor in repairing DNA structure. p53 regulates DNA repair processes in almost all eukaryotes via transactivation-dependent and -independent pathways, but only the transactivation-independent function of p53 is involved in HR regulation. Wild-type p53 protein can link double stranded breaks to form intact DNA, as well as also playing a role in inhibiting NHEJ. p53 interacts with HR-related proteins, including Rad51, where it controls HR through direct interaction with Rad51.

### Accessory Domains

[1260] In other aspects, the retron-based gene editing systems may comprise one or more additional accessory proteins having genome modifying functions, including recombinases, invertases, nucleases, polymerases, ligases, deaminases, reverse transcriptases, or epigenetic modifying functions. In various embodiments, the accessory proteins may be provided separately. In other embodiments, the accessory proteins may be fused to a polypeptide component of the retron-based editing systems, optionally with a linker.

[1261] The retron-based gene editing systems may further comprise additional polypeptides, proteins and/or peptides known in the art. Non-limiting categories of polypeptides include antigens, antibodies, antibody fragments, cytokines, peptides, hormones, enzymes, oxidants, antioxidants, synthetic polypeptides, and chimeric polypeptides, receptor, enzymes, hormones, transcription factors, ligands, membrane transporters, structural proteins, nucleases, or a component, variant or fragment (e.g., a biologically active fragment) thereof.

[1262] As used herein, the term “peptide” generally refers to shorter polypeptides of about 50 amino acids or less. Peptides with only two amino acids may be referred to as “dipeptides.” Peptides with only three amino acids may be referred to as “tripeptides.” Polypeptides generally refer to polypeptides with from about 4 to about 50 amino acids. Peptides may be obtained via any method known to those skilled in the art. In some embodiments, peptides may be expressed in culture. In some embodiments, peptides may be obtained via chemical synthesis (e.g., solid phase peptide synthesis).

[1263] In some embodiments, the RNA payloads (e.g., linear and/or circular mRNA payloads encoding one or more encoded products of interest or the non-coding RNAs such as guide RNAs) may encode a user-programmable DNA binding protein, or a gene editor accessory proteins, such as, but not limited to a deaminases, nucleases, transposases, polymerases, and reverse transcriptases, etc.

[1264] In some embodiments, the RNA payloads (e.g., linear and/or circular mRNA payloads encoding one or more encoded products of interest), e.g., the originator constructs and benchmark constructs described herein, may encode a simple protein associated with a non-protein. Non-limiting examples of conjugated proteins include, glycoproteins, hemoglobins, lecithoproteins, nucleoproteins, and phosphoproteins.

[1265] In some embodiments, the RNA payloads (e.g., linear and/or circular mRNA payloads encoding one or more encoded products of interest), e.g., the originator constructs and benchmark constructs described herein, may encode a protein that is derived from a simple or conjugated protein by chemical or physical means. Non-limiting examples of derived proteins include denatured proteins and peptides.

[1266] In some embodiments, the polypeptide, protein or peptide may be unmodified.

[1267] In some embodiments, the polypeptide, protein or peptide may be modified. Types of modifications include, but are not limited to, phosphorylation, glycosylation, acetylation, ubiquitylation/sumoylation, methylation, palmitoylation, quinone, amidation, myristoylation, pyrrolidone carboxylic acid, hydroxylation, phosphopantetheine, prenylation, GPI anchoring, oxidation, ADP-ribosylation, sulfation, S-nitrosylation, citrullination, nitration, gamma-carboxyglutamic acid, formylation, hypusine, topaquinone (TPQ), bromination, lysine topaquinone (LTQ), tryptophan tryptophylquinone (TTQ), iodination, and cysteine tryptophylquinone (CTQ). In some aspects, the polypeptide, protein or peptide may be modified by a post-transcriptional modification which can affect its structure, subcellular localization, and/or function.

[1268] In some embodiments, the polypeptide, protein or peptide may be modified using phosphorylation. Phosphorylation, or the addition of a phosphate group to serine, threonine, or tyrosine residues, is one of most common forms of protein modification. Protein phosphorylation plays an important role in fine tuning the signal in the intracellular signaling cascades.

[1269] In some embodiments, the polypeptide, protein or peptide may be modified using ubiquitination which is the covalent attachment of ubiquitin to target proteins. Ubiquitination-mediated protein turnover has been shown to play a role in driving the cell cycle as well as in protein-degradation-independent intracellular signaling pathways.

[1270] In some embodiments, the polypeptide, protein or peptide may be modified using acetylation and methylation which can play a role in regulating gene expression. As a non-limiting example, the acetylation and methylation could mediate the formation of chromatin domains (e.g., euchromatin and heterochromatin) which could have an impact on mediating gene silencing.

[1271] In some embodiments, the polypeptide, protein or peptide may be modified using glycosylation. Glycosylation is the attachment of one of a large number of glycan groups and is a modification that occurs in about half of all proteins and plays a role in biological processes including, but not limited to, embryonic development, cell division, and regulation of protein structure. The two main types of protein glycosylation are N-glycosylation and O-glycosylation. For N-glycosylation the glycan is attached to an asparagine and for O-glycosylation the glycan is attached to a serine or threonine.

[1272] In some embodiments, the polypeptide, protein or peptide may be modified using sumoylation. Sumoylation is the addition of SUMOs (small ubiquitin-like modifiers) to proteins and is a post-translational modification similar to ubiquitination.

[1273] In other embodiments, the RNA payloads (e.g., linear and/or circular mRNA payloads encoding one or more encoded products of interest), e.g., the originator constructs and benchmark constructs described herein, may encode a therapeutic protein, such as those exemplified below.

[1274] In other embodiments, the RNA payloads (e.g., linear and/or circular mRNA payloads encoding one or more products of interest), e.g., the originator constructs and benchmark constructs described herein, may encode a gene editing system, such as those exemplified herein. As used herein, a “nucleobase editing system” is a protein, DNA, or RNA composition capable of making edits, modifications or alterations to one or more targeted genes of interest. According to the present invention, one or more nucleobase editing system currently being marketed or in development may be encoded by the RNA payloads (e.g., linear and/or circular mRNA payloads encoding one or more encoded products of interest) described herein of the present invention.

### Inducibility Modifications

[1275] In one embodiment, a retron-based editing system may be configured as an inducible gene editing system. The inducible nature of the system would allow for spatiotemporal control of gene editing or gene expression using a form of energy. The form of energy may include but is not limited to electromagnetic radiation, sound energy, chemical energy and thermal energy. Examples of inducible system include tetracycline inducible promoters (Tet-On or Tet-Off), small molecule two-hybrid transcription activations systems (FKBP, ABA, etc.), or light inducible systems (Phytochrome, LOV domains, or cryptochrome). In one embodiment, the retron-based editing system or component thereof may include a Light Inducible Transcriptional Effector (LITE) to direct changes in transcriptional activity in a sequence-specific manner. The components of a light may include a retron-editing system component, a light-responsive cytochrome heterodimer (e.g. from Arabidopsis thaliana), and a transcriptional activation/repression domain. Further examples of inducible DNA binding proteins and methods for their use are provided in US Provisional Application Nos. 61/736,465 and U.S. 61/721,283, and International Patent Publication No. WO 2014/018423 A2 which is hereby incorporated by reference in its entirety.

[1276] Once all copies of a gene in the genome of a cell have been edited, continued expression of the system in that cell is no longer necessary. Indeed, sustained expression would be undesirable in case of off-target effects at unintended genomic sites, etc. Thus time-limited expression would be useful. Inducible expression offers one approach, but in addition Applicants have engineered a self-inactivating system that relies on the use of a non-coding nucleic acid component molecule target sequence within the vector itself. Thus, after expression begins, the system will lead to its own destruction, but before destruction is complete it will have time to edit the genomic copies of the target gene (which, with a normal point mutation in a diploid cell, requires at most two edits). Simply, the self-inactivating system includes additional RNA (e.g., nucleic acid component molecule) that targets the coding sequence for the Cas12a polypeptide itself or that targets one or more non-coding nucleic acid component molecule target sequences complementary to unique sequences present in one or more of the following: (a) within the promoter driving expression of the non-coding RNA elements, (b) within the promoter driving expression of the Cas12a polypeptide gene, (c) within 100 bp of the ATG translational start codon in the Cas12a polypeptide coding sequence, (d) within the inverted terminal repeat (iTR) of a viral delivery vector, e.g., in the AAV genome.

[1277] In some aspects, a single nucleic acid component molecule is provided that is capable of hybridization to a sequence downstream of a Cas12a polypeptide start codon, whereby after a period of time there is a loss of the Cas12a polypeptide expression. In some aspects, one or more nucleic acid component molecule(s) are provided that are capable of hybridization to one or more coding or non-coding regions of the polynucleotide encoding the system, whereby after a period of time there is a inactivation of one or more, or in some cases all, of the system. In some aspects of the system, and not to be limited by theory, the cell may comprise a plurality of complexes, wherein a first subset of complexes comprise a first nucleic acid component molecule capable of targeting a genomic locus or loci to be edited, and a second subset of complexes comprise at least one second nucleic acid component molecule capable of targeting the polynucleotide encoding the system, wherein the first subset of complexes mediate editing of the targeted genomic locus or loci and the second subset of complexes eventually inactivate the system, thereby inactivating further expression in the cell.

[1278] The various coding sequences (Cas12a polypeptide and nucleic acid component molecule) can be included on a single vector or on multiple vectors. For instance, it is possible to encode the enzyme on one vector and the various RNA sequences on another vector, or to encode the enzyme and one nucleic acid component molecule on one vector, and the remaining nucleic acid component molecule on another vector, or any other permutation. In general, a system using a total of one or two different vectors is preferred.

### H. Vectors for Expression of Engineered Retrons

[1279] Delivery of an engineered retron to a cell can generally be accomplished with or without vectors. Delivery of the ncRNA encoded by the engineered retron generally does not require a vector used to produce the ncRNA from the engineered retron. For example, the ncRNA can be packaged directly into a delivery vehicle such as a lipid nanoparticle and delivered into a host cell, as described in other sections.

[1280] The engineered retrons (or vectors containing them) may be introduced into any type of cell, including any cell from a prokaryotic, eukaryotic, or archaeon organism, including bacteria, archaea, fungi, protists, plants (e.g., monocotyledonous and dicotyledonous plants); and animals (e.g., vertebrates and invertebrates). Examples of animals that may be transfected with an engineered retron include, without limitation, vertebrates such as fish, birds, mammals (e.g., human and non-human primates, farm animals, pets, and laboratory animals), reptiles, and amphibians.

[1281] The engineered retrons can be introduced into a single cell or a population of cells. Cells from tissues, organs, and biopsies, as well as recombinant cells, genetically modified cells, cells from cell lines cultured in vitro, and artificial cells (e.g., nanoparticles, liposomes, polymersomes, or microcapsules encapsulating nucleic acids) may all be transfected with the engineered retrons.

[1282] The engineered retrons can be introduced into cellular fragments, cell components, or organelles (e.g., mitochondria in animal and plant cells, plastids (e.g., chloroplasts) in plant cells and algae).

[1283] Cells may be cultured or expanded after transfection with the engineered retron.

[1284] Methods of introducing nucleic acids into a host cell are well known in the art. Commonly used methods include chemically induced transformation, typically using divalent cations (e.g., CaCl₂)), dextran-mediated transfection, polybrene mediated transfection, lipofectamine and LT-1 mediated transfection, electroporation, protoplast fusion, encapsulation of nucleic acids in liposomes, and direct microinjection of the nucleic acids comprising engineered retrons into nuclei. See, e.g., Sambrook et al. (2001) Molecular Cloning, a laboratory manual, 3rd edition, Cold Spring Harbor Laboratories, New York, Davis et al. (1995) Basic Methods in Molecular Biology, 2nd edition, McGraw-Hill, and Chu et al. (1981) Gene 13:197; herein incorporated by reference in their entireties.

[1285] Methods for genetic transformation of plant cells are known in the art and include those set forth in US2022/0145296, and U.S. Pat. Nos. 8,575,425; 7,692,068; 8,802,934; 7,541,517; each of which is herein incorporated by reference in its entirety. See, also, Rakoczy-Trojanowska, M. (2002) Cell Mol Biol Lett. 7:849-858; Jones et al. (2005) Plant Methods 1:5; Rivera et al. (2012) Physics of Life Reviews 9:308-345; Bartlett et al. (2008) Plant Methods 4:1-12; Bates, G. W. (1999) Methods in Molecular Biology 111:359-366; Binns and Thomashow (1988) Annual Reviews in Microbiology 42:575-606; Christou, P. (1992) The Plant Journal 2:275-281; Christou, P. (1995) Euphytica 85:13-27; Tzfira et al. (2004) TRENDS in Genetics 20:375-383; Yao et al. (2006) Journal of Experimental Botany 57:3737-3746; Zupan and Zambryski (1995) Plant Physiology 107:1041-1047; and Jones et al. (2005) Plant Methods 1:5.

[1286] The plant cells that have been transformed may be grown into a transgenic organism, such as a plant, in accordance with conventional methods. See, for example, McCormick et al. (1986) Plant Cell Reports 5:81-84.

[1287] Plant material that may be transformed with the engineered retrons described herein includes plant cells, plant protoplasts, plant cell tissue cultures from which plants can be regenerated, plant calli, plant clumps, and plant cells that are intact in plants or parts of plants such as embryos, pollen, ovules, seeds, leaves, flowers, branches, fruit, kernels, ears, cobs, husks, stalks, roots, root tips, anthers, and the like. Progeny, variants, and mutants of the regenerated plants are also included within the scope of the disclosure, provided that these parts comprise the genetic modification introduced by the engineered retron. Further provided is a processed plant product or byproduct that retains the genetic modification introduced by the engineered retron.

[1288] The engineered retrons described herein may be used to produce transgenic plants with desired phenotypes, including but not limited to, increased disease resistance (e.g., increased viral, bacterial of fungal resistance), increased insect resistance, increased drought resistance, increased yield, and altered fruit ripening characteristics, sugar and oil composition, and color.

[1289] In some embodiments, the retron msr gene, msd gene, and/or ret gene are expressed in vitro from a vector, such as in an in vitro transcription system. The resulting ncRNA or msDNA can be isolated before being packaged and/or formulated for direct delivery into a host cell. For example, the isolated ncRNA or msDNA can be packaged/formulated in a delivery vehicle such as lipid nanoparticles as described in other sections.

[1290] In some embodiments, the retron msr gene, msd gene, and/or ret gene are expressed in vivo from a vector within a cell. The retron msr gene, msd gene, and/or ret gene can be introduced into a cell with a single vector or in multiple separate vectors to produce msDNA in a host subject.

[1291] In other embodiments, the retron msr gene, msd gene, and/or ret gene, and any other components of the retron-based genome editing systems described herein (e.g., guide RNA in trans, programmable nuclease (e.g., in trans)) may be expressed in vivo from RNA delivered to the cell. The retron msr gene, msd gene, and/or ret gene can be introduced into a cell with a single vector or in multiple separate vectors to produce msDNA in a host subject.

[1292] Vectors and/or nucleic acid molecules encoding the recombinant retron-based genome editing system or components thereof can include control elements operably linked to the retron sequences, which allow for the production of msDNA either in vitro, or in vivo in the subject species. For example, the retron msr gene, msd gene, and/or ret gene can be operably linked to a promoter to allow expression of the retron reverse transcriptase and/or the msDNA product. In some embodiments, heterologous sequences encoding desired products of interest (e.g., polynucleotide encoding polypeptide or regulatory RNA, donor polynucleotide for gene editing, or protospacer DNA for molecular recording) may be inserted in the msr gene and/or msd gene.

[1293] Any eukaryotic, archaeal, or prokaryotic cell, capable of being transfected with a vector or retron delivery system comprising the engineered retron sequences, may be used to produce the msDNA in vivo. The ability of constructs to produce the msDNA along with other retron-encoded products can be empirically determined. For example the transfected cell can be assayed either through phenotypic changes that occur due to the introduced sequences or by direct DNA sequencing.

[1294] In some embodiments, the engineered retron is produced by a vector system comprising one or more vectors. In the vector system, the msr gene, the msd gene, and/or the ret gene may be provided by the same vector (i.e., cis arrangement of all such retron elements), wherein the vector comprises a promoter operably linked to the msr gene and/or the msd gene. In some embodiments, the promoter is further operably linked to the ret gene. In other embodiments, the vector further comprises a second promoter operably linked to the ret gene. Alternatively, the ret gene may be provided by a second vector that does not include the msr gene and/or the msd gene (i.e., trans arrangement of msr-msd and ret). In yet other embodiments, the msr gene, the msd gene, and the ret gene are each provided by different vectors (i.e., trans arrangement of all retron elements).

[1295] Numerous vectors are available for use in the vector or vector system, including but not limited to, linear polynucleotides, polynucleotides associated with ionic or amphiphilic compounds, plasmids, and viruses.

[1296] Examples of viral vectors include, but are not limited to, adenoviral vectors, adeno-associated virus (AAV) vectors, retroviral vectors, lentiviral vectors, and the like. An expression construct can be replicated in a living cell, or it can be made synthetically.

[1297] In some embodiments, the nucleic acid comprising an engineered retron sequence is under transcriptional control of a promoter. In some embodiments, the promoter is competent for initiating transcription of an operably linked coding sequence by a RNA polymerase 1, 11, or III.

[1298] Exemplary promoters for mammalian cell expression include the SV40 early promoter, a CMV promoter such as the CMV immediate early promoter (see, U.S. Pat. Nos. 5,168,062 and 5,385,839, incorporated herein by reference in their entireties), the mouse mammary tumor virus LTR promoter, the adenovirus major late promoter (Ad MLP), and the herpes simplex virus promoter, among others. Other nonviral promoters, such as a promoter derived from the murine metallothionein gene, will also find use for mammalian expression.

[1299] Exemplary promoters for plant cell expression include the CaMV 35S promoter (Odell et al., 1985, Nature 313:810-812); the rice actin promoter (McElroy et al., 1990, Plant Cell 2:163-171); the ubiquitin promoter (Christensen et al., 1989, Plant Mol. Biol. 12:619-632; and Christensen et al., 1992, Plant Mol. Biol. 18:675-689); the pEMU promoter (Last et al., 1991, Theor. Appl. Genet. 81:581-588); and the MAS promoter (Velten et al., 1984, EMBO J. 3:2723-2730).

[1300] In additional embodiments, the retron-based vectors may also comprise tissue-specific promoters to start expression only after it is delivered into a specific tissue. Non-limiting exemplary tissue-specific promoters include B29 promoter, CD14 promoter, CD43 promoter, CD45 promoter, CD68 promoter, desmin promoter, elastase-1 promoter, endoglin promoter, fibronectin promoter, Flt-1 promoter, GFAP promoter, GPIIb promoter, ICAM-2 promoter, INF-b promoter, Mb promoter, Nphsl promoter, OG-2 promoter, SP-B promoter, SYN1 promoter, and WASP promoter.

[1301] These and other promoters can be obtained from or incorporated into commercially available plasmids, using techniques well known in the art. See, e.g., Sambrook et al., supra.

[1302] In some embodiments, one or more enhancer elements is/are used in association with the promoter to increase expression levels of the constructs. Examples include the SV40 early gene enhancer, as described in Dijkema et al., EMBOJ (1985) 4:761, the enhancer/promoter derived from the long terminal repeat (LTR) of the Rous Sarcoma Virus, as described in Gorman et al., Proc. Natl. Acad. Sci. USA (1982b) 79:6777, and elements derived from human CMV, as described in Boshart et al., Cell (1985) 41:521, such as elements included in the CMV intron A sequence. All such sequences are incorporated herein by reference.

[1303] In one embodiment, an expression vector for expressing an engineered retron, including the msr gene, msd gene, and/or ret gene comprises a promoter operably linked to a polynucleotide encoding the msr gene, msd gene, and/or ret gene.

[1304] In some embodiments, the vector or vector system also comprises a transcription terminator/polyadenylation signal. Examples of such sequences include, but are not limited to, those derived from SV40, as described in Sambrook et al., supra, as well as a bovine growth hormone terminator sequence (see, e.g., U.S. Pat. No. 5,122,458).

[1305] Additionally, 5′-UTR sequences can be placed adjacent to the coding sequence to further enhance the expression. Such sequences may include UTRs comprising an internal ribosome entry site (IRES). Inclusion of an IRES permits the translation of one or more open reading frames from a vector. The IRES element attracts a eukaryotic ribosomal translation initiation complex and promotes translation initiation. See, e.g., Kaufman et al., Nuc. Acids Res. (1991) 19:4485-4490; Gurtu et al., Biochem. Biophys. Res. Comm. (1996) 229:295-298: Rees et al., BioTechniques (1996) 20:102-110; Kobayashi et al., BioTechniques (1996) 21:399-402; and Mosser et al., BioTechniques (199722 ISO-161)c. A multitude of IRES sequences are known and include sequences derived from a wide variety of viruses, such as from leader sequences of picomaviruses such as the encephalomyocarditis virus (EMCV) UTR (Jang et al. Virol. (1989) 63:1651-1660). the polio leader sequence, the hepatitis A virus leader, the hepatitis C virus TRES, human rhinovirus type 2 IRES (Dobrikova et al., Proc. Natl. Acad. Sci. (2003) 100(251:15125-151301)). an IRES element from the foot and mouth disease virus (Ramesh et al., Nucl. Acid Res. (1996) 24:2697-2700), a giardiavirus IRES (Garlapati et al., J Biol. Chem. (2004) 279(51):3389-33971) and the like. A variety of nonviral IRES sequences will also find use herein, including, but not limited to IRES sequences from yeast, as well as the human angiotensin 11 type 1 receptor IRES (Martin et al., Mol. Cell Endocrinol. (2003) 212:51-61), fibroblast growth factor IRESs (FGF-1 IRES and FGF-2 IRES, Martineau et al. (2004) Mol. Cell. Biol. 24(17): 7622-7635), vascular endothelial growth factor IRES (Baranick et al. (2008) Proc. Natl. Acad Sci. U.S.A. 105(12):4733-4738, Stein et al. (1998) Mol. Cell. Biol. 18(6):3112-3119, Bert et al. (2006) RNA 12(6): 1074-1083), and insulin-like growth factor 2 IRES (Pedersen et al. (2002) Biochem. J. 363(Pt 1):37-44).

[1306] These elements are commercially available in plasmids sold, e.g., by Clontech (Mountain View, CA), Invivogen (San Diego, CA), Addgene (Cambridge, MA) and GeneCopoeia (Rockville, MD). See also IRESite: The database of experimentally verified IRES structures (iresite.org). An IRES sequence may be included in a vector, for example, to express multiple bacteriophage recombination proteins for recombineering or an RNA-guided nuclease (e.g., Cas9) for HDR in combination with a retron reverse transcriptase from an expression cassette.

[1307] In some embodiments, a polynucleotide encoding a viral self-cleaving 2A peptide, such as a T2A peptide, can be used to allow production of multiple protein products (e.g., Cas9, bacteriophage recombination proteins, retron reverse transcriptase) from a single vector or a single transcription unit under one promoter. One or more 2A linker peptides can be inserted between the coding sequences in the multicistronic construct. The 2A peptide, which is self-cleaving, allows co-expressed proteins from the multicistronic construct to be produced at equimolar levels. 2A peptides from various viruses may be used, including, but not limited to 2A peptides derived from the foot-and-mouth disease virus, equine rhinitis A virus, Jhosea asigna virus and porcine teschovirus-1. See, e.g., Kim et al. (2011) PLoS One 6(4): e18556, Trichas et al. (2008) BMC Biol. 6:40, Provost et al. (2007) Genesis 45(10): 625-629, Furler et al. (2001) Gene Ther. 8(11):864-873; herein incorporated by reference in their entireties.

[1308] In some embodiments, the expression construct comprises a plasmid suitable for transforming a bacterial host. Numerous bacterial expression vectors are known to those of skill in the art, and the selection of an appropriate vector is a matter of choice. Bacterial expression vectors include, but are not limited to, pACYC177, pASK75, pBAD, pBADM, pBAT, pCal, pET, pETM, pGAT, pGEX, pHAT, pKK223, pMal, pProEx, pQE, and pZA31 Bacterial plasmids may contain antibiotic selection markers (e.g., ampicillin, kanamycin, erythromycin, carbenicillin, streptomycin, or tetracycline resistance), a lacZ gene (b-galactosidase produces blue pigment from x-gal substrate), fluorescent markers (e.g., GFP. mCherry), or other markers for selection of transformed bacteria. See, e.g., Sambrook et al., supra.

[1309] In other embodiments, the expression construct comprises a plasmid suitable for transforming a yeast cell. Yeast expression plasmids typically contain a yeast-specific origin of replication (ORI) and nutritional selection markers (e.g., HIS3, URA3, LYS2, LEU2, TRP1, METIS, ura4+, leul+, ade6+), antibiotic selection markers (e.g., kanamycin resistance), fluorescent markers (e.g., mCherry), or other markers for selection of transformed yeast cells. The yeast plasmid may further contain components to allow shuttling between a bacterial host (e.g., E coif) and yeast cells. A number of different types of yeast plasmids are available including yeast integrating plasmids (Yip), which lack an ORI and are integrated into host chromosomes by homologous recombination; yeast replicating plasmids (YRp), which contain an autonomously replicating sequence (ARS) and can replicate independently; yeast centromere plasmids (YCp), which are low copy vectors containing a part of an ARS and part of a centromere sequence (CEN); and yeast episomal plasmids (YEp), which are high copy number plasmids comprising a fragment from a 2 micron circle (a natural yeast plasmid) that allows for 50 or more copies to be stably propagated per cell.

[1310] In other embodiments, the expression construct does not comprise a plasmid suitable for transforming a yeast cell.

[1311] In other embodiments, the expression construct comprises a virus or engineered construct derived from a viral genome. A number of viral based systems have been developed for gene transfer into mammalian cells. These include adenoviruses, retroviruses (g-retroviruses and lentiviruses), poxviruses, adeno-associated viruses, baculoviruses, and herpes simplex viruses (see e.g., Wamock et al. (2011) Methods Mol. Biol. 737:1-25; Walther et al. (2000) Drugs 60(2):249-271; and Lundstrom (2003) Trends Biotechnol. 21(3): 117-122; herein incorporated by reference in their entireties). The ability of certain viruses to enter cells via receptor-mediated endocytosis, to integrate into host cell genomes and express viral genes stably and efficiently have made them attractive candidates for the transfer of foreign genes into mammalian cells.

[1312] For example, retroviruses provide a convenient platform for gene delivery systems. Selected sequences can be inserted into a vector and packaged in retroviral particles using techniques known in the art. The recombinant virus can then be isolated and delivered to cells of the subject either in vivo or ex vivo. A number of retroviral systems have been described (U.S. Pat. No. 5,219,740; Miller and Rosman (1989) BioTechniques 7:980-990; Miller, A. D. (1990) Human Gene Therapy 1:5-14; Scarpa et al. (1991) Virology 180:849-852; Bums et al. (1993) Proc. Natl. Acad. Sci. USA 90:8033-8037; Boris-Lawrie and Temin (1993) Cur. Opin. Genet. Develop. 3:102-109; and Ferry et al. (2011) Curr. Pharm. Des. 17(24): 2516-2527). Lentiviruses are a class of retroviruses that are particularly useful for delivering polynucleotides to mammalian cells because they are able to infect both dividing and nondividing cells (see e.g., Lois et al. (2002) Science 295:868-872; Durand et al. (2011) Viruses 3(2): 132-159; herein incorporated by reference).

[1313] A number of adenoviral vectors have also been described. Unlike retroviruses which integrate into the host genome, adenoviruses persist extrachromosomally thus minimizing the risks associated with insertional mutagenesis.

[1314] Additionally, various adeno-associated vims (AAV) vector systems have been developed for gene delivery. AAV vectors can be readily constructed using techniques well known in the art. See, e.g., U.S. Pat. Nos. 5,173,414 and 5,139,941; International Publication Nos. WO 92/01070 (published 23 Jan. 1992) and WO 93/03769 (published 4 Mar. 1993); Lebkowski et al., Molec. Cell. Biol. (1988) 8:3988-3996; Vincent et al., Vaccines 90 (1990) (Cold Spring Harbor LaboratoryPress); Carter, B. J. Current Opinion in Biotechnology (1992) 3:533-539; Muzyczka, N. Current Topics in Microbiol and Immunol. (1992) 158:97-129; Kotin, R. M. Human Gene Therapy (1994) 5:793-801; Shelling and Smith, Gene Therapy (1994) 1:165-169; and Zhou et al., J. Exp. Med. (1994) 179:1867-1875.

[1315] Another vector system useful for delivering nucleic acids encoding the engineered retrons is the enterically administered recombinant poxvirus vaccines described by Small, Jr., P. A., et al. (U.S. Pat. No. 5,676,950, issued Oct. 14, 1997, herein incorporated by reference).

[1316] Other viral vectors include those derived from the pox family of viruses, including vaccinia virus and avian poxvirus. By way of example, vaccinia virus recombinants expressing a nucleic acid molecule of interest (e.g., engineered retron) can be constructed as follows. The DNA encoding the particular nucleic acid sequence is first inserted into an appropriate vector so that it is adjacent to a vaccinia promoter and flanking vaccinia DNA sequences, such as the sequence encoding thymidine kinase (TK). This vector is then used to transfect cells which are simultaneously infected with vaccinia. Homologous recombination serves to insert the vaccinia promoter plus the gene encoding the sequences of interest into the viral genome. The resulting TK-recombinant can be selected by culturing the cells in the presence of 5-bromodeoxyuridine and picking viral plaques resistant thereto.

[1317] In some embodiments, avipoxviruses, such as the fowlpox and canarypox viruses, can also be used to deliver the nucleic acid molecules of interest. The use of an avipox vector is particularly desirable in human and other mammalian species since members of the avipox genus can only productively replicate in susceptible avian species and therefore are not infective in mammalian cells. Methods for producing recombinant avipoxviruses are known in the art and employ genetic recombination, as described above with respect to the production of vaccinia viruses. See, e.g., WO 91/12882; WO 89/03429; and WO 92/03545.

[1318] Molecular conjugate vectors, such as the adenovirus chimeric vectors described in Michael et al., J. Biol. Chem. (1993) 268:6866-6869 and Wagner et al., Proc. Natl. Acad. Sci. USA (1992) 89:6099-6103, can also be used for gene delivery.

[1319] Members of the alphavirus genus, such as, but not limited to, vectors derived from the Sindbis virus (SIN), Semliki Forest virus (SFV), and Venezuelan Equine Encephalitis virus (VEE), will also find use as viral vectors for delivering the polynucleotides of the present invention. For a description of Sindbis-virus derived vectors useful for the practice of the instant methods, see, Dubensky et al. (1996) J. Virol. 70:508-519; and International Publication Nos. WO 95/07995, WO 96/17072; as well as, Dubensky, Jr., T. W., et al., U.S. Pat. No. 5,843,723, issued Dec. 1, 1998, and Dubensky, Jr., T. W., U.S. Pat. No. 5,789,245, issued Aug. 4, 1998, both herein incorporated by reference. Particularly preferred are chimeric alphavirus vectors comprised of sequences derived from Sindbis virus and Venezuelan equine encephalitis virus. See, e.g., Perri et al. (2003) J. Virol. 77: 10394-10403 and International Publication Nos. WO 02/099035, WO 02/080982, WO 01/81609, and WO 00/61772; herein incorporated by reference in their entireties.

[1320] A vaccinia-based infection/transfection system can be conveniently used to provide for inducible, transient expression of the nucleic acids of interest (e.g., engineered retron) in a host cell. In this system, cells are first infected in vitro with a vaccinia virus recombinant that encodes the bacteriophage T7 RNA polymerase. This polymerase displays exquisite specificity in that it only transcribes templates bearing T7 promoters. Following infection, cells are transfected with the nucleic acid of interest, driven by a T7 promoter. The polymerase expressed in the cytoplasm from the vaccinia virus recombinant transcribes the transfected DNA into RNA. The method provides for high level, transient, cytoplasmic production of large quantities of RNA. See, e.g., Elroy-Stein and Moss, Proc. Natl. Acad. Sci. USA (1990) 87:6743-6747; Fuerst et al., Proc. Natl. Acad. Sci. USA (1986) 83:8122-8126.

[1321] In other approaches to infection with vaccinia or avipox virus recombinants, or to the delivery of nucleic acids using other viral vectors, an amplification system can be used that will lead to high level expression following introduction into host cells. Specifically, a T7 RNA polymerase promoter preceding the coding region for T7 RNA polymerase can be engineered. Translation of RNA derived from this template will generate T7 RNA polymerase which in turn will transcribe more templates. Concomitantly, there will be a cDNA whose expression is under the control of the T7 promoter. Thus, some of the T7 RNA polymerase generated from translation of the amplification template RNA will lead to transcription of the desired gene. Because some T7 RNA polymerase is required to initiate the amplification, T7 RNA polymerase can be introduced into cells along with the template(s) to prime the transcription reaction. The polymerase can be introduced as a protein or on a plasmid encoding the RNA polymerase. For a further discussion of T7 systems and their use for transforming cells, see, e.g., International Publication No. WO 94/26911; Studier and Moffatt, J. Mol. Biol. (1986) 189:113-130; Deng and Wolff, Gene (1994) 143:245-249; Gao et al., Biochem. Biophys. Res. Commun. (1994) 200:1201-1206; Gao and Huang, Nuc. Acids Res. (1993) 21:2867-2872; Chen et al., Nuc. Acids Res. (1994) 22:2114-2120; and U.S. Pat. No. 5,135,855.

[1322] Insect cell expression systems, such as baculovirus systems, can also be used and are known to those of skill in the art and described in, e.g., Baculovirus and Insect Cell Expression Protocols (Methods in Molecular Biology, D. W. Murhammer ed., Humana Press, 2nd edition, 2007) and L. King The Baculovirus Expression System: A laboratory guide (Springer, 1992). Materials and methods for baculovirus/insect cell expression systems are commercially available in kit form from, inter alia, Thermo Fisher Scientific (Waltham, MA) and Clontech (Mountain View, CA).

[1323] Plant expression systems can also be used for transforming plant cells. Generally, such systems use virus-based vectors to transfect plant cells with heterologous genes. For a description of such systems see, e.g., Porta et al., Mol. Biotech. (1996) 5:209-221; and Hackland et al., Arch. Virol. (1994) 139:1-22.

[1324] To obtain expression of the engineered retron or the ncRNA encoded thereby, the expression construct or the ncRNA must be delivered into a cell. This delivery may be accomplished in vitro, as in laboratory procedures for transforming cells lines, or in vivo or ex vivo, as in the treatment of certain disease states. One mechanism for delivery is via viral infection where the expression construct is encapsulated in an infectious viral particle.

[1325] Several non-viral methods for the transfer of expression constructs into cultured cells also are contemplated. These include the use of calcium phosphate precipitation, DEAE-dextran, electroporation, direct microinjection, DNA-loaded liposomes, lipofectamine-DNA complexes, cell sonication, gene bombardment using high velocity microprojectiles, and receptor-mediated transfection (see, e.g., Graham and Van Der Eb (1973) Virology 52:456-467; Chen and Okayama (1987) Mol. Cell Biol. 7:2745-2752; Rippe et al. (1990) Mol. Cell Biol. 10:689-695; Gopal (1985) Mol. Cell Biol. 5:1188-1190; Tur-Kaspa et al. (1986) Mol. Cell. Biol. 6:716-718; Potter et al. (1984) Proc. Natl. Acad. Sci. USA 81:7161-7165); Harland and Weintraub (1985) J. Cell Biol. 101:1094-1099); Nicolau & Sene (1982) Biochim. Biophys. Acta 721:185-190; Fraley et al. (1979) Proc. Natl. Acad. Sci. USA 76:3348-3352; Fechheimer et al. (1987) Proc Natl. Acad. Sci. USA 84:8463-8467; Yang et al. (1990) Proc. Natl. Acad. Sci. USA 87:9568-9572; Wu and Wu (1987) J. Biol. Chem. 262:4429-4432; Wu and Wu (1988) Biochemistry 27:887-892; herein incorporated by reference). Some of these techniques may be successfully adapted for in vivo or ex vivo use.

[1326] Once the expression construct has been delivered into the cell the nucleic acid comprising the engineered retron sequence may be positioned and expressed at different sites. In some embodiments, the nucleic acid comprising the engineered retron sequence may be stably integrated into the genome of the cell. This integration may be in the cognate location and orientation via homologous recombination (gene replacement) or it may be integrated in a random, non-specific location (gene augmentation). In yet further embodiments, the nucleic acid may be stably maintained in the cell as a separate, episomal segment of DNA. Such nucleic acid segments or episomes encode sequences sufficient to permit maintenance and replication independent of or in synchronization with the host cell cycle. How the expression construct is delivered to a cell and where in the cell the nucleic acid remains is dependent on the type of expression construct employed.

[1327] In some embodiments, the expression construct may simply consist of naked recombinant DNA or plasmids comprising the engineered retron. Transfer of the construct may be performed by any of the methods mentioned above which physically or chemically permeabilize the cell membrane. This is particularly applicable for transfer in vitro but it may be applied to in vivo use as well. Dubensky et al. (Proc. Natl. Acad. Sci. USA (1984) 81:7529-7533) successfully injected polyomavirus DNA in the form of calcium phosphate precipitates into liver and spleen of adult and newborn mice demonstrating active viral replication and acute infection. Benvenisty & Neshif (Proc. Natl. Acad. Sci. USA (1986) 83:9551-9555) also demonstrated that direct intraperitoneal injection of calcium phosphate-precipitated plasmids results in expression of the transfected genes. It is envisioned that DNA encoding an engineered retron of interest may also be transferred in a similar manner in vivo and express retron products.

[1328] In still another embodiment, a naked DNA expression construct may be transferred into cells by particle bombardment. This method depends on the ability to accelerate DNA-coated microprojectiles to a high velocity allowing them to pierce cell membranes and enter cells without killing them (Klein et al. (1987) Nature 327:70-73). Several devices for accelerating small particles have been developed. One such device relies on a high voltage discharge to generate an electrical current, which in turn provides the motive force (Yang et al. (1990) Proc. Natl. Acad. Sci. USA 87:9568-9572). The microprojectiles may consist of biologically inert substances, such as tungsten or gold beads.

[1329] In a further embodiment, the expression construct may be delivered using liposomes. Liposomes are vesicular structures characterized by a phospholipid bilayer membrane and an inner aqueous medium. Multilamellar liposomes have multiple lipid layers separated by aqueous medium. They form spontaneously when phospholipids are suspended in an excess of aqueous solution. The lipid components undergo self-rearrangement before the formation of closed structures and entrap water and dissolved solutes between the lipid bilayers (Ghosh & Bachhawat (1991) Liver Diseases, Targeted Diagnosis and Therapy Using Specific Receptors and Ligands, Wu et al. (Eds.), Marcel Dekker, NY, 87-104). Also contemplated is the use of lipofectamine-DNA complexes.

[1330] In some embodiments, the liposome may be complexed with a hemagglutinating virus (HVJ). This has been shown to facilitate fusion with the cell membrane and promote cell entry of liposome-encapsulated DNA (Kaneda et al. (1989) Science 243:375-378). In other embodiments, the liposome may be complexed or employed in conjunction with nuclear non-histone chromosomal proteins (HMG-I) (Kato et al. (1991) J. Biol. Chem. 266(6):3361-3364).

[1331] In yet further embodiments, the liposome may be complexed or employed in conjunction with both HVJ and HMG-I. Where a bacterial promoter is employed in the DNA construct, it also will be desirable to include within the liposome an appropriate bacterial polymerase.

[1332] Other expression constructs which can be employed to deliver a nucleic acid into cells are receptor-mediated delivery vehicles. These take advantage of the selective uptake of macromolecules by receptor-mediated endocytosis in almost all eukaryotic cells. Because of the cell type-specific distribution of various receptors, the delivery can be highly specific (Wu and Wu (1993) Adv. Drug Delivery Rev. 12:159-167). Receptor-mediated gene targeting vehicles generally consist of two components: a cell receptor-specific ligand and a DNA-binding agent. Several ligands have been used for receptor-mediated gene transfer. The most extensively characterized ligands are asialoorosomucoid (ASOR) and transferrin (see, e.g., Wu and Wu (1987), supra; Wagner et al. (1990) Proc. Natl. Acad. Sci. USA 87(9):3410-3414). A synthetic neoglycoprotein, which recognizes the same receptor as ASOR, has been used as a gene delivery vehicle (Ferkol et al. (1993) FASEB J. 7:1081-1091; Perales et al. (1994) Proc. Natl. Acad. Sci. USA 91(9):4086-4090), and epidermal growth factor (EGF) has also been used to deliver genes to squamous carcinoma cells (Myers, EPO 0273085).

[1333] In other embodiments, the delivery vehicle may comprise a ligand and a liposome. For example, Nicolau et al. (Methods Enzymol. (1987) 149:157-176) employed lactosy 1-ceramide, a galactose-terminal asialoganglioside, incorporated into liposomes and observed an increase in the uptake of the insulin gene by hepatocytes. Thus, it is feasible that a nucleic acid encoding a particular gene also may be specifically delivered into a cell by any number of receptor-ligand systems with or without liposomes. Also, antibodies to surface antigens on cells can similarly be used as targeting moieties.

[1334] In some embodiments, the promoters that may be used in the retron delivery systems described herein may be constitutive, inducible, or tissue-specific. In some embodiments, the promoters may be a constitutive promoters. Non-limiting exemplary constitutive promoters include cytomegalovirus immediate early promoter (CMV), simian virus (SV40) promoter, adenovirus major late (MLP) promoter, Rous sarcoma virus (RSV) promoter, mouse mammary tumor virus (MMTV) promoter, phosphoglycerate kinase (PGK) promoter, elongation factor-alpha (EFla) promoter, ubiquitin promoters, actin promoters, tubulin promoters, immunoglobulin promoters, a functional fragment thereof, or a combination of any of the foregoing. In some embodiments, the promoter may be a CMV promoter. In some embodiments, the promoter may be a truncated CMV promoter. In other embodiments, the promoter may be an EFla promoter. In some embodiments, the promoter may be an inducible promoter. Non-limiting exemplary inducible promoters include those inducible by heat shock, light, chemicals, peptides, metals, steroids, antibiotics, or alcohol. In some embodiments, the inducible promoter may be one that has a low basal (non-induced) expression level, such as, e.g., the Tet-On® promoter (Clontech). In some embodiments, the promoter may be a tissue-specific promoter. In some embodiments, the tissue-specific promoter is exclusively or predominantly expressed in liver tissue. Non-limiting exemplary tissue-specific promoters include B29 promoter, CD14 promoter, CD43 promoter, CD45 promoter, CD68 promoter, desmin promoter, elastase-1 promoter, endoglin promoter, fibronectin promoter, Flt-1 promoter, GFAP promoter, GPIIb promoter, ICAM-2 promoter, INF-b promoter, Mb promoter, Nphsl promoter, OG-2 promoter, SP-B promoter, SYN1 promoter, and WASP promoter.

### 1. Delivery Systems and Methods of Delivery

### Overview

[1335] In yet another aspect, the disclosure provides vectors for transferring and/or expressing said retron-based gene editing systems, e.g., under in vitro, ex vivo, and in vivo conditions. In still another aspect, the disclosure provides cell-delivery compositions and methods, including compositions for passive and/or active transport to cells (e.g., plasmids), delivery by virus-based recombinant vectors (e.g., AAV and/or lentivirus vectors), delivery by non-virus-based systems (e.g., liposomes and LNPs), and delivery by virus-like particles of the retron-based gene editing systems described herein. Depending on the delivery system employed, the retron-based gene editing systems described herein may be delivered in the form of DNA (e.g., plasmids or DNA-based virus vectors), RNA (e.g., guide RNA and mRNA delivered by LNPs), a mixture of DNA and RNA, protein (e.g., virus-like particles), and ribonucleoprotein (RNP) complexes. Any suitable combinations of approaches for delivering the components of the herein disclosed retron-based gene editing systems may be employed.

[1336] The retron-based gene editing systems and/or components thereof can be delivered by any known delivery system such as those described above, including (a) without vectors (e.g., electroporation), (b) viral delivery systems and (c) non-viral delivery systems. Viral delivery systems include expression vectors, adeno-associated virus (AAV) vectors, retroviral vectors, lentiviral vectors, and the like. An expression construct can be replicated in a living cell, or it can be made synthetically. Non-viral delivery systems include without limitation lipid particles (e.g. Lipid nanoparticles (LNPs)), non-lipid nanoparticles, exosomes, liposomes, micelles, viral particles, stable nucleic-acid-lipid particles (SNALPs), lipoplexes/polyplexes, DNA nanoclews, Gold nanoparticles, iTOP, Streptolysin O (SLO), multifunctional envelope-type nanodevice (MEND), lipid-coated mesoporous silica particles, inorganic nanoparticles, and polymeric delivery technology (e.g., polymer-based particles).

[1337] Delivery of nucleic acid modalities, including RNA therapeutics, is described further in Paunovska K, Loughrey D, Dahlman J E. Drug delivery systems for RNA therapeutics. Nat Rev Genet. 2022 May; 23(5):265-280. doi: 10.1038/s41576-021-00439-4. Epub 2022 Jan. 4. PMID: 34983972; PMCID: PMC8724758; Hong C A, Nam Y S. Functional nanostructures for effective delivery of small interfering RNA therapeutics. Theranostics. 2014 Sep. 19; 4(12):1211-32. doi: 10.7150/thno.8491. PMID: 25285170; PMCID: PMC4183999; Liu F, Wang C, Gao Y, Li X, Tian F, Zhang Y, Fu M, Li P, Wang Y, Wang F. Current Transport Systems and Clinical Applications for Small Interfering RNA (siRNA) Drugs. Mol Diagn Ther. 2018 October; 22(5):551-569. doi: 10.1007/s40291-018-0338-8. PMID: 29926308; Zhang Y, Almazi J G, Ong H X, Johansen M D, Ledger S, Traini D, Hansbro P M, Kelleher A D, Ahlenstiel C L. Nanoparticle Delivery Platforms for RNAi Therapeutics Targeting COVID-19 Disease in the Respiratory Tract. Int J Mol Sci. 2022 Feb. 22; 23(5):2408. doi: 10.3390/ijms23052408. PMID: 35269550; PMCID: PMC8909959; Zhang M, Hu S, Liu L, Dang P, Liu Y, Sun Z, Qiao B, Wang C. Engineered exosomes from different sources for cancer-targeted therapy. Signal Transduct Target Ther. 2023 Mar. 15; 8(1):124. doi: 10.1038/s41392-023-01382-y. PMID: 36922504; PMCID: PMC10017761; Hastings M L, Krainer A R. RNA therapeutics. RNA. 2023 April; 29(4):393-395. doi: 10.1261/rna.079626.123. PMID: 36928165; PMCID: PMC10019368; Miele E, Spinelli G P, Miele E, Di Fabrizio E, Ferretti E, Tomao S, Gulino A. Nanoparticle-based delivery of small interfering RNA: challenges for cancer therapy. Int J Nanomedicine. 2012; 7:3637-57. doi: 10.2147/IJN.S23696. Epub 2012 Jul. 20. PMID: 22915840; PMCID: PMC3418108, each of which are incorporated by reference in their entireties.

[1338] The engineered retron-based gene editing systems (or vectors containing them) may be introduced into any type of cell, including any cell from a prokaryotic, eukaryotic, or archaeon organism, including bacteria, archaea, fungi, protists, plants (e.g., monocotyledonous and dicotyledonous plants); and animals (e.g., vertebrates and invertebrates). Examples of animals that may be transfected with an engineered retron-based gene editing systems include, without limitation, vertebrates such as fish, birds, mammals (e.g., human and non-human primates, farm animals, pets, and laboratory animals), reptiles, and amphibians.

[1339] The engineered retron-based gene editing systems (or components thereof) can be introduced into a single cell or a population of cells. Cells from tissues, organs, and biopsies, as well as recombinant cells, genetically modified cells, cells from cell lines cultured in vitro, and artificial cells (e.g., nanoparticles, liposomes, polymersomes, or microcapsules encapsulating nucleic acids) may all be transfected with the engineered retron-based gene editing systems.

[1340] The engineered retron-based gene editing systems (or components thereof) can be introduced into cellular fragments, cell components, or organelles (e.g., mitochondria in animal and plant cells, plastids (e.g., chloroplasts) in plant cells and algae).

[1341] Cells may be cultured or expanded after transfection with the engineered retron-based gene editing systems.

[1342] Methods of introducing nucleic acids into a host cell are well known in the art. Commonly used methods include chemically induced transformation, typically using divalent cations (e.g., CaCl₂), dextran-mediated transfection, polybrene mediated transfection, lipofectamine and LT-1 mediated transfection, electroporation, protoplast fusion, encapsulation of nucleic acids in liposomes, and direct microinjection of the nucleic acids comprising Cas12a editing systems into nuclei. See, e.g., Sambrook et al. (2001) Molecular Cloning, a laboratory manual, 3rd edition, Cold Spring Harbor Laboratories, New York, Davis et al. (1995) Basic Methods in Molecular Biology, 2nd edition, McGraw-Hill, and Chu et al. (1981) Gene 13:197; herein incorporated by reference in their entireties.

[1343] Plant cells may also be targeted by the retron-based gene editing systems (or components thereof) disclosed herein. Methods for genetic transformation of plant cells are known in the art and include those set forth in US2022/0145296, and U.S. Pat. Nos. 8,575,425; 7,692,068; 8,802,934; 7,541,517; each of which is herein incorporated by reference in its entirety. See, also, Rakoczy-Trojanowska, M. (2002) Cell Mol Biol Lett. 7:849-858; Jones et al. (2005) Plant Methods 1:5; Rivera et al. (2012) Physics of Life Reviews 9:308-345; Bartlett et al. (2008) Plant Methods 4:1-12; Bates, G. W. (1999) Methods in Molecular Biology 111:359-366; Binns and Thomashow (1988) Annual Reviews in Microbiology 42:575-606; Christou, P. (1992) The Plant Journal 2:275-281; Christou, P. (1995) Euphytica 85:13-27; Tzfira et al. (2004) TRENDS in Genetics 20:375-383; Yao et al. (2006) Journal of Experimental Botany 57:3737-3746; Zupan and Zambryski (1995) Plant Physiology 107:1041-1047; and Jones et al. (2005) Plant Methods 1:5.

[1344] The plant cells that have been transformed may be grown into a transgenic organism, such as a plant, in accordance with conventional methods. See, for example, McCormick et al. (1986) Plant Cell Reports 5:81-84.

[1345] Plant material that may be transformed with the retron-based gene editing systems (or components thereof) described herein includes plant cells, plant protoplasts, plant cell tissue cultures from which plants can be regenerated, plant calli, plant clumps, and plant cells that are intact in plants or parts of plants such as embryos, pollen, ovules, seeds, leaves, flowers, branches, fruit, kernels, ears, cobs, husks, stalks, roots, root tips, anthers, and the like. Progeny, variants, and mutants of the regenerated plants are also included within the scope of the disclosure, provided that these parts comprise the genetic modification introduced by the retron-based gene editing systems. Further provided is a processed plant product or byproduct that retains the genetic modification introduced by the retron-based gene editing systems.

[1346] The retron-based gene editing systems described herein may be used to produce transgenic plants with desired phenotypes, including but not limited to, increased disease resistance (e.g., increased viral, bacterial of fungal resistance), increased insect resistance, increased drought resistance, increased yield, and altered fruit ripening characteristics, sugar and oil composition, and color.

[1347] In some embodiments involving retron-based gene editing systems, the retron msr gene, msd gene, and/or ret gene can be expressed in vitro from a vector, such as in an in vitro transcription system. The resulting ncRNA or msDNA can be isolated before being packaged and/or formulated for direct delivery into a host cell. For example, the isolated ncRNA or msDNA can be packaged/formulated in a delivery vehicle such as lipid nanoparticles as described in other sections.

[1348] In some embodiments involving retron-based gene editing systems, the retron msr gene, msd gene, and/or ret gene are expressed in vivo from a vector within a cell. The retron msr gene, msd gene, and/or ret gene can be introduced into a cell with a single vector or in multiple separate vectors to produce msDNA in a host subject.

[1349] In other embodiments, the retron msr gene, msd gene, and/or ret gene, and any other components of the retron-based genome editing systems described herein (e.g., guide RNA in trans, programmable nuclease (e.g., in trans)) may be expressed in vivo from RNA delivered to the cell. The retron msr gene, msd gene, and/or ret gene can be introduced into a cell with a single vector or in multiple separate vectors to produce msDNA in a host subject.

[1350] Vectors and/or nucleic acid molecules encoding the recombinant retron-based genome editing system or components thereof can include control elements operably linked to the retron sequences, which allow for the production of msDNA either in vitro, or in vivo in the subject species. For example, in embodiments relating to retron-based gene editing systems, the retron msr gene, msd gene, and/or ret gene can be operably linked to a promoter to allow expression of the retron reverse transcriptase and/or the msDNA product. In some embodiments, heterologous sequences encoding desired products of interest (e.g., polynucleotide encoding polypeptide or regulatory RNA, donor polynucleotide for gene editing, or protospacer DNA for molecular recording) may be inserted in the msr gene and/or msd gene.

[1351] In some embodiments, the retron-based gene editing systems are produced by a vector system comprising one or more vectors.

[1352] Numerous vectors are available for use in the vector or vector system, including but not limited to, linear polynucleotides, polynucleotides associated with ionic or amphiphilic compounds, plasmids, and viruses.

### All-RNA Format

[1353] In various embodiments, the retron-based gene editing systems (or components thereof) disclosed herein may be delivered in an “all-RNA” format. As used herein, the term “all-RNA” format refers to the fact that each of the components of a retron editing system (e.g., the retron RT, the programmable nuclease, the sgRNA, and the ncRNA) are delivered and/or administered as RNA (e.g., coding RNA or non-coding RNA). In some embodiments, the RNA components may be delivered to cells and/or tissues by direct means, such as electroporation or transfection. In other embodiments, the RNA components may be delivered to cells and/or tissues by way of a delivery vehicle, such as an LNP or liposome.

[1354] In various embodiments, the retron editing systems described herein may comprise a coding RNA (e.g., linear or circular mRNA) that encodes a retron reverse transcriptase (e.g., any RT from Table X or Table A), a coding RNA (e.g., linear or circular mRNA) that encodes a programmable nuclease (e.g., a Cas9, Cas12a, or TnpB nuclease), a retron ncRNA (e.g., a ncRNA from Table B), and a guide RNA for targeting the programmable nuclease to a particular desired target sequence.

[1355] In some embodiments, RT and nuclease components may be encoded on the same coding RNA molecule. The proteins may also be expressed from separate coding RNA molecules. In still other embodiments, the RT and the nuclease components can be fused together as a singular fusion polypeptide having an RT domain and a nuclease domain optionally joined by a linker.

[1356] In addition, in some embodiments, the ncRNA and the guide RNA may be fused together as a single RNA molecule. For example, the guide RNA may be located at the 5′ end of the ncRNA. In other embodiments, the guide RNA may be located at the 3′ end of the ncRNA. In some embodiments, the ncRNA may comprise a guide RNA at both the 3′ and the 5′ ends of the ncRNA.

[1357] In still other embodiments, the ncRNA and the guide RNA may be separate molecules, i.e., delivered separately.

[1358] In still other embodiments, the retron editing system may include both a ncRNA-guide RNA fusion and an additional guide RNA provided as a separate molecule.

[1359] In various embodiments, the different RNA components of the all-RNA retron editing system can be combined and administered (e.g., directly or within a delivery vehicle) in different ratios. In some embodiments, the ratios of such RNA components or species can be expressed as molar ratios.

[1360] For example, the molar ratio of RT coding RNA to nuclease coding RNA can be about 1:1, about 1:1.5, about 1:2, about 1:2.5, about 1:3, about 1:4, about 1:5, about 1:6, about 1:7, about 1:8, about 1:9, about 1:10, about 1:12, about 1:15, about 1:20. Useful ranges include from 1:1 to 1:2, from 1:1.5 to 1:4, from 1:2 to 1:4, from 1:2 to 1:8, from 1:2 to 1:10, from 1:3 to 1:9, from 1:3 to 1:12, from 1:3 to 1:15, from 1:4 to 1:8, from 1:4 to 1:12, from 1:4 to 1:20, from 1:5 to 1:10, from 1:5 to 1:15, from 1:5 to 1:20, from 1:10 to 1:20, or from 1:10 to 1:40.

[1361] In another example, the molar ratio of nuclease coding RNA to RT coding RNA can be about 1:1, about 1:1.5, about 1:2, about 1:2.5, about 1:3, about 1:4, about 1:5, about 1:6, about 1:7, about 1:8, about 1:9, about 1:10, about 1:12, about 1:15, about 1:20. Useful ranges include from 1:1 to 1:2, from 1:1.5 to 1:4, from 1:2 to 1:4, from 1:2 to 1:8, from 1:2 to 1:10, from 1:3 to 1:9, from 1:3 to 1:12, from 1:3 to 1:15, from 1:4 to 1:8, from 1:4 to 1:12, from 1:4 to 1:20, from 1:5 to 1:10, from 1:5 to 1:15, from 1:5 to 1:20, from 1:10 to 1:20, or from 1:10 to 1:40.

[1362] In still another example, the molar ratio of ncRNA or ncRNA-guide RNA fusion to separate guide RNA can be about 1:1, about 1:1.5, about 1:2, about 1:2.5, about 1:3, about 1:4, about 1:5, about 1:6, about 1:7, about 1:8, about 1:9, about 1:10, about 1:12, about 1:15, about 1:20. Useful ranges include from 1:1 to 1:2, from 1:1.5 to 1:4, from 1:2 to 1:4, from 1:2 to 1:8, from 1:2 to 1:10, from 1:3 to 1:9, from 1:3 to 1:12, from 1:3 to 1:15, from 1:4 to 1:8, from 1:4 to 1:12, from 1:4 to 1:20, from 1:5 to 1:10, from 1:5 to 1:15, from 1:5 to 1:20, from 1:10 to 1:20, or from 1:10 to 1:40.

[1363] In still another example, the molar ratio of separate guide RNA to ncRNA or ncRNA-guide RNA fusion can be about 1:1, about 1:1.5, about 1:2, about 1:2.5, about 1:3, about 1:4, about 1:5, about 1:6, about 1:7, about 1:8, about 1:9, about 1:10, about 1:12, about 1:15, about 1:20. Useful ranges include from 1:1 to 1:2, from 1:1.5 to 1:4, from 1:2 to 1:4, from 1:2 to 1:8, from 1:2 to 1:10, from 1:3 to 1:9, from 1:3 to 1:12, from 1:3 to 1:15, from 1:4 to 1:8, from 1:4 to 1:12, from 1:4 to 1:20, from 1:5 to 1:10, from 1:5 to 1:15, from 1:5 to 1:20, from 1:10 to 1:20, or from 1:10 to 1:40.

[1364] In still another example, the molar ratio of ncRNA to separate guide RNA can be about 1:1, about 1:1.5, about 1:2, about 1:2.5, about 1:3, about 1:4, about 1:5, about 1:6, about 1:7, about 1:8, about 1:9, about 1:10, about 1:12, about 1:15, about 1:20. Useful ranges include from 1:1 to 1:2, from 1:1.5 to 1:4, from 1:2 to 1:4, from 1:2 to 1:8, from 1:2 to 1:10, from 1:3 to 1:9, from 1:3 to 1:12, from 1:3 to 1:15, from 1:4 to 1:8, from 1:4 to 1:12, from 1:4 to 1:20, from 1:5 to 1:10, from 1:5 to 1:15, from 1:5 to 1:20, from 1:10 to 1:20, or from 1:10 to 1:40.

[1365] In still another example, the molar ratio of separate guide RNA to ncRNA can be about 1:1, about 1:1.5, about 1:2, about 1:2.5, about 1:3, about 1:4, about 1:5, about 1:6, about 1:7, about 1:8, about 1:9, about 1:10, about 1:12, about 1:15, about 1:20. Useful ranges include from 1:1 to 1:2, from 1:1.5 to 1:4, from 1:2 to 1:4, from 1:2 to 1:8, from 1:2 to 1:10, from 1:3 to 1:9, from 1:3 to 1:12, from 1:3 to 1:15, from 1:4 to 1:8, from 1:4 to 1:12, from 1:4 to 1:20, from 1:5 to 1:10, from 1:5 to 1:15, from 1:5 to 1:20, from 1:10 to 1:20, or from 1:10 to 1:40.

[1366] In still another example, the molar ratio of a coding RNA (e.g., encoding RT and/or nuclease) to ncRNA or ncRNA-guide RNA fusion, as the case may be, can be about 1:1, about 1:1.5, about 1:2, about 1:2.5, about 1:3, about 1:4, about 1:5, about 1:6, about 1:7, about 1:8, about 1:9, about 1:10, about 1:12, about 1:15, about 1:20. Useful ranges include from 1:1 to 1:2, from 1:1.5 to 1:4, from 1:2 to 1:4, from 1:2 to 1:8, from 1:2 to 1:10, from 1:3 to 1:9, from 1:3 to 1:12, from 1:3 to 1:15, from 1:4 to 1:8, from 1:4 to 1:12, from 1:4 to 1:20, from 1:5 to 1:10, from 1:5 to 1:15, from 1:5 to 1:20, from 1:10 to 1:20, or from 1:10 to 1:40.

[1367] In still another example, the molar ratio of a coding RNA encoding a retron RT to ncRNA or ncRNA-guide RNA fusion, as the case may be, can be about 1:1, about 1:1.5, about 1:2, about 1:2.5, about 1:3, about 1:4, about 1:5, about 1:6, about 1:7, about 1:8, about 1:9, about 1:10, about 1:12, about 1:15, about 1:20. Useful ranges include from 1:1 to 1:2, from 1:1.5 to 1:4, from 1:2 to 1:4, from 1:2 to 1:8, from 1:2 to 1:10, from 1:3 to 1:9, from 1:3 to 1:12, from 1:3 to 1:15, from 1:4 to 1:8, from 1:4 to 1:12, from 1:4 to 1:20, from 1:5 to 1:10, from 1:5 to 1:15, from 1:5 to 1:20, from 1:10 to 1:20, or from 1:10 to 1:40.

[1368] In still another example, the molar ratio of a coding RNA encoding a programmable nuclease to ncRNA or ncRNA-guide RNA fusion, as the case may be, can be about 1:1, about 1:1.5, about 1:2, about 1:2.5, about 1:3, about 1:4, about 1:5, about 1:6, about 1:7, about 1:8, about 1:9, about 1:10, about 1:12, about 1:15, about 1:20. Useful ranges include from 1:1 to 1:2, from 1:1.5 to 1:4, from 1:2 to 1:4, from 1:2 to 1:8, from 1:2 to 1:10, from 1:3 to 1:9, from 1:3 to 1:12, from 1:3 to 1:15, from 1:4 to 1:8, from 1:4 to 1:12, from 1:4 to 1:20, from 1:5 to 1:10, from 1:5 to 1:15, from 1:5 to 1:20, from 1:10 to 1:20, or from 1:10 to 1:40.

[1369] In still another example, the molar ratio of a coding RNA encoding a retron RT or a nuclease to a separate guide RNA can be about 1:1, about 1:1.5, about 1:2, about 1:2.5, about 1:3, about 1:4, about 1:5, about 1:6, about 1:7, about 1:8, about 1:9, about 1:10, about 1:12, about 1:15, about 1:20. Useful ranges include from 1:1 to 1:2, from 1:1.5 to 1:4, from 1:2 to 1:4, from 1:2 to 1:8, from 1:2 to 1:10, from 1:3 to 1:9, from 1:3 to 1:12, from 1:3 to 1:15, from 1:4 to 1:8, from 1:4 to 1:12, from 1:4 to 1:20, from 1:5 to 1:10, from 1:5 to 1:15, from 1:5 to 1:20, from 1:10 to 1:20, or from 1:10 to 1:40.

[1370] In still another example, the molar ratio of a separate guide RNA to a coding RNA encoding a retron RT or a nuclease can be about 1:1, about 1:1.5, about 1:2, about 1:2.5, about 1:3, about 1:4, about 1:5, about 1:6, about 1:7, about 1:8, about 1:9, about 1:10, about 1:12, about 1:15, about 1:20. Useful ranges include from 1:1 to 1:2, from 1:1.5 to 1:4, from 1:2 to 1:4, from 1:2 to 1:8, from 1:2 to 1:10, from 1:3 to 1:9, from 1:3 to 1:12, from 1:3 to 1:15, from 1:4 to 1:8, from 1:4 to 1:12, from 1:4 to 1:20, from 1:5 to 1:10, from 1:5 to 1:15, from 1:5 to 1:20, from 1:10 to 1:20, or from 1:10 to 1:40.

[1371] In certain embodiments, the amount of ncRNA-sgRNA relative to RT mRNA is augmented. In certain embodiments the RT mRNA: ncRNA-sgRNA ratio is about 1:1.5, about 1:2, about 1:2.5, about 1:3, about 1:4, about 1:5, about 1:6, about 1:7, about 1:8, about 1:9, about 1:10, about 1:12, about 1:15, about 1:20. Useful ranges include from 1:1 to 1:2, from 1:1.5 to 1:4, from 1:2 to 1:4, from 1:2 to 1:8, from 1:2 to 1:10, from 1:3 to 1:9, from 1:3 to 1:12, from 1:3 to 1:15, from 1:4 to 1:8, from 1:4 to 1:12, from 1:4 to 1:20, from 1:5 to 1:10, from 1:5 to 1:15, from 1:5 to 1:20, from 1:10 to 1:20, or from 1:10 to 1:40. In certain embodiments, an RT-Cas9 (or Cas9-RT) fusion is encoded by an mRNA. In certain embodiments, the RT-Cas9 mRNA: ncRNA-sgRNA ratio is about 1:1.5, about 1:2, about 1:2.5, about 1:3, about 1:4, about 1:5, about 1:6, about 1:7, about 1:8, about 1:9, about 1:10, about 1:12, about 1:15, about 1:20. Useful ranges include from 1:1 to 1:2, from 1:1.5 to 1:4, from 1:2 to 1:4, from 1:2 to 1:8, from 1:2 to 1:10, from 1:3 to 1:9, from 1:3 to 1:12, from 1:3 to 1:15, from 1:4 to 1:8, from 1:4 to 1:12, from 1:4 to 1:20, from 1:5 to 1:10, from 1:5 to 1:15, from 1:5 to 1:20, from 1:10 to 1:20, or from 1:10 to 1:40. In certain embodiments, multiple genetic loci are targeted hence the ncRNA-sgRNA includes a mixture of ncRNA-sgRNA species and the same ratios and ranges are applicable.

### Viral Vector Delivery

[1372] In various embodiments, the retron-based gene editing systems described herein may be delivered in viral vectors.

[1373] Examples of viral vectors include, but are not limited to, adenoviral vectors, adeno-associated virus (AAV) vectors, retroviral vectors, lentiviral vectors, and the like. An expression construct can be replicated in a living cell, or it can be made synthetically.

[1374] In some embodiments, the nucleic acid comprising an retron-based gene editing system (or component thereof) is under transcriptional control of a promoter. In some embodiments, the promoter is competent for initiating transcription of an operably linked coding sequence by a RNA polymerase I, II, or III.

[1375] Exemplary promoters for mammalian cell expression include the SV40 early promoter, a CMV promoter such as the CMV immediate early promoter (see, U.S. Pat. Nos. 5,168,062 and 5,385,839, incorporated herein by reference in their entireties), the mouse mammary tumor virus LTR promoter, the adenovirus major late promoter (Ad MLP), and the herpes simplex virus promoter, among others. Other nonviral promoters, such as a promoter derived from the murine metallothionein gene, will also find use for mammalian expression.

[1376] Exemplary promoters for plant cell expression include the CaMV 35S promoter (Odell et al., 1985, Nature 313:810-812); the rice actin promoter (McElroy et al., 1990, Plant Cell 2:163-171); the ubiquitin promoter (Christensen et al., 1989, Plant Mol. Biol. 12:619-632; and Christensen et al., 1992, Plant Mol. Biol. 18:675-689); the pEMU promoter (Last et al., 1991, Theor. Appl. Genet. 81:581-588); and the MAS promoter (Velten et al., 1984, EMBO J. 3:2723-2730).

[1377] In additional embodiments, the retron-based vectors may also comprise tissue-specific promoters to start expression only after it is delivered into a specific tissue. Non-limiting exemplary tissue-specific promoters include B29 promoter, CD14 promoter, CD43 promoter, CD45 promoter, CD68 promoter, desmin promoter, elastase-1 promoter, endoglin promoter, fibronectin promoter, Flt-1 promoter, GFAP promoter, GPIIb promoter, ICAM-2 promoter, INF-b promoter, Mb promoter, Nphsl promoter, OG-2 promoter, SP-B promoter, SYN1 promoter, and WASP promoter.

[1378] These and other promoters can be obtained from or incorporated into commercially available plasmids, using techniques well known in the art. See, e.g., Sambrook et al., supra.

[1379] In some embodiments, one or more enhancer elements is/are used in association with the promoter to increase expression levels of the constructs. Examples include the SV40 early gene enhancer, as described in Dijkema et al., EMBOJ (1985) 4:761, the enhancer/promoter derived from the long terminal repeat (LTR) of the Rous Sarcoma Virus, as described in Gorman et al., Proc. Natl. Acad. Sci. USA (1982b) 79:6777, and elements derived from human CMV, as described in Boshart et al., Cell (1985) 41:521, such as elements included in the CMV intron A sequence. All such sequences are incorporated herein by reference.

[1380] In one embodiment, an expression vector for expressing a retron-based gene editing system (or component thereof) comprises a promoter operably linked to a polynucleotide encoding the components. The components of the retron-based gene editing system may be configured as individual gene transcripts or as fused constructs. For example, the nuclease component may be fused with the reverse transcriptase component. In another example, the ncRNA component may be fused with the guide RNA component. In another example, the nuclease component may be fused with the reverse transcriptase component, but the guide RNA and the ncRNA are separate. In other embodiments, the guide RNA and ncRNA components may be fused, but the reverse transcriptase and nuclease components are separately provided. Any functional combinations of fused components and non-fused components are contemplated.

[1381] In some embodiments, the vector or vector system also comprises a transcription terminator/polyadenylation signal. Examples of such sequences include, but are not limited to, those derived from SV40, as described in Sambrook et al., supra, as well as a bovine growth hormone terminator sequence (see, e.g., U.S. Pat. No. 5,122,458).

[1382] Additionally, 5′-UTR sequences can be placed adjacent to the coding sequence to further enhance the expression. Such sequences may include UTRs comprising an internal ribosome entry site (IRES). Inclusion of an IRES permits the translation of one or more open reading frames from a vector. The IRES element attracts a eukaryotic ribosomal translation initiation complex and promotes translation initiation. See, e.g., Kaufman et al., Nuc. Acids Res. (1991) 19:4485-4490; Gurtu et al., Biochem. Biophys. Res. Comm. (1996) 229:295-298: Rees et al., BioTechniques (1996) 20:102-110; Kobayashi et al., BioTechniques (1996) 21:399-402; and Mosser et al., BioTechniques (199722 ISO-161)c. A multitude of IRES sequences are known and include sequences derived from a wide variety of viruses, such as from leader sequences of picomaviruses such as the encephalomyocarditis virus (EMCV) UTR (Jang et al. Virol. (1989) 63:1651-1660). the polio leader sequence, the hepatitis A virus leader, the hepatitis C virus IRES, human rhinovirus type 2 IRES (Dobrikova et al., Proc. Natl. Acad. Sci. (2003) 100(251:15125-151301)). an IRES element from the foot and mouth disease virus (Ramesh et al., Nucl. Acid Res. (1996) 24:2697-2700), a giardiavirus IRES (Garlapati et al., J Biol. Chem. (2004) 279(51):3389-33971) and the like. A variety of nonviral IRES sequences will also find use herein, including, but not limited to IRES sequences from yeast, as well as the human angiotensin II type 1 receptor IRES (Martin et al., Mol. Cell Endocrinol. (2003) 212:51-61), fibroblast growth factor IRESs (FGF-1 IRES and FGF-2 IRES, Martineau et al. (2004) Mol. Cell. Biol. 24(17): 7622-7635), vascular endothelial growth factor IRES (Baranick et al. (2008) Proc. Natl. Acad Sci. U.S.A. 105(12):4733-4738, Stein et al. (1998) Mol. Cell. Biol. 18(6):3112-3119, Bert et al. (2006) RNA 12(6): 1074-1083), and insulin-like growth factor 2 IRES (Pedersen et al. (2002) Biochem. J. 363(Pt 1):37-44).

[1383] These elements are commercially available in plasmids sold, e.g., by Clontech (Mountain View, CA), Invivogen (San Diego, CA), Addgene (Cambridge, MA) and GeneCopoeia (Rockville, MD). See also IRESite: The database of experimentally verified IRES structures (iresite.org). An IRES sequence may be included in a vector, for example, to express multiple bacteriophage recombination proteins for recombineering or an RNA-guided nuclease (e.g., Cas9) for HDR in combination with a retron reverse transcriptase from an expression cassette.

[1384] In some embodiments, a polynucleotide encoding a viral self-cleaving 2A peptide, such as a T2A peptide, can be used to allow production of multiple protein products (e.g., Cas9, bacteriophage recombination proteins, retron reverse transcriptase) from a single vector or a single transcription unit under one promoter. One or more 2A linker peptides can be inserted between the coding sequences in the multicistronic construct. The 2A peptide, which is self-cleaving, allows co-expressed proteins from the multicistronic construct to be produced at equimolar levels. 2A peptides from various viruses may be used, including, but not limited to 2A peptides derived from the foot-and-mouth disease virus, equine rhinitis A virus, Jhosea asigna virus and porcine teschovirus-1. See, e.g., Kim et al. (2011) PLoS One 6(4): e18556, Trichas et al. (2008) BMC Biol. 6:40, Provost et al. (2007) Genesis 45(10): 625-629, Furler et al. (2001) Gene Ther. 8(11):864-873; herein incorporated by reference in their entireties.

[1385] In some embodiments, the expression construct comprises a plasmid suitable for transforming a bacterial host. Numerous bacterial expression vectors are known to those of skill in the art, and the selection of an appropriate vector is a matter of choice. Bacterial expression vectors include, but are not limited to, pACYC177, pASK75, pBAD, pBADM, pBAT, pCal, pET, pETM, pGAT, pGEX, pHAT, pKK223, pMal, pProEx, pQE, and pZA31 Bacterial plasmids may contain antibiotic selection markers (e.g., ampicillin, kanamycin, erythromycin, carbenicillin, streptomycin, or tetracycline resistance), a lacZ gene (b-galactosidase produces blue pigment from x-gal substrate), fluorescent markers (e.g., GFP. mCherry), or other markers for selection of transformed bacteria. See, e.g., Sambrook et al., supra.

[1386] In other embodiments, the expression construct comprises a plasmid suitable for transforming a yeast cell. Yeast expression plasmids typically contain a yeast-specific origin of replication (ORI) and nutritional selection markers (e.g., HIS3, URA3, LYS2, LEU2, TRP1, METIS, ura4+, leul+, ade6+), antibiotic selection markers (e.g., kanamycin resistance), fluorescent markers (e.g., mCherry), or other markers for selection of transformed yeast cells. The yeast plasmid may further contain components to allow shuttling between a bacterial host (e.g., E coif) and yeast cells. A number of different types of yeast plasmids are available including yeast integrating plasmids (Yip), which lack an ORI and are integrated into host chromosomes by homologous recombination; yeast replicating plasmids (YRp), which contain an autonomously replicating sequence (ARS) and can replicate independently; yeast centromere plasmids (YCp), which are low copy vectors containing a part of an ARS and part of a centromere sequence (CEN); and yeast episomal plasmids (YEp), which are high copy number plasmids comprising a fragment from a 2 micron circle (a natural yeast plasmid) that allows for 50 or more copies to be stably propagated per cell.

[1387] In other embodiments, the expression construct does not comprise a plasmid suitable for transforming a yeast cell.

[1388] In other embodiments, the expression construct comprises a virus or engineered construct derived from a viral genome. A number of viral based systems have been developed for gene transfer into mammalian cells. These include adenoviruses, retroviruses (g-retroviruses and lentiviruses), poxviruses, adeno-associated viruses, baculoviruses, and herpes simplex viruses (see e.g., Wamock et al. (2011) Methods Mol. Biol. 737:1-25; Walther et al. (2000) Drugs 60(2):249-271; and Lundstrom (2003) Trends Biotechnol. 21(3): 117-122; herein incorporated by reference in their entireties). The ability of certain viruses to enter cells via receptor-mediated endocytosis, to integrate into host cell genomes and express viral genes stably and efficiently have made them attractive candidates for the transfer of foreign genes into mammalian cells.

[1389] For example, retroviruses provide a convenient platform for gene delivery systems. Selected sequences can be inserted into a vector and packaged in retroviral particles using techniques known in the art. The recombinant virus can then be isolated and delivered to cells of the subject either in vivo or ex vivo. A number of retroviral systems have been described (U.S. Pat. No. 5,219,740; Miller and Rosman (1989) BioTechniques 7:980-990; Miller, A. D. (1990) Human Gene Therapy 1:5-14; Scarpa et al. (1991) Virology 180:849-852; Bums et al. (1993) Proc. Natl. Acad. Sci. USA 90:8033-8037; Boris-Lawrie and Temin (1993) Cur. Opin. Genet. Develop. 3:102-109; and Ferry et al. (2011) Curr. Pharm. Des. 17(24): 2516-2527). Lentiviruses are a class of retroviruses that are particularly useful for delivering polynucleotides to mammalian cells because they are able to infect both dividing and nondividing cells (see e.g., Lois et al. (2002) Science 295:868-872; Durand et al. (2011) Viruses 3(2): 132-159; herein incorporated by reference).

[1390] A number of adenoviral vectors have also been described. Unlike retroviruses which integrate into the host genome, adenoviruses persist extrachromosomally thus minimizing the risks associated with insertional mutagenesis.

[1391] Additionally, various adeno-associated vims (AAV) vector systems have been developed for gene delivery. AAV vectors can be readily constructed using techniques well known in the art. See, e.g., U.S. Pat. Nos. 5,173,414 and 5,139,941; International Publication Nos. WO 92/01070 (published 23 Jan. 1992) and WO 93/03769 (published 4 Mar. 1993); Lebkowski et al., Molec. Cell. Biol. (1988) 8:3988-3996; Vincent et al., Vaccines 90 (1990) (Cold Spring Harbor LaboratoryPress); Carter, B. J. Current Opinion in Biotechnology (1992) 3:533-539; Muzyczka, N. Current Topics in Microbiol and Immunol. (1992) 158:97-129; Kotin, R. M. Human Gene Therapy (1994) 5:793-801; Shelling and Smith, Gene Therapy (1994) 1:165-169; and Zhou et al., J. Exp. Med. (1994) 179:1867-1875.

[1392] Another vector system useful for delivering nucleic acids encoding the Cas12a editing system components is the enterically administered recombinant poxvirus vaccines described by Small, Jr., P. A., et al. (U.S. Pat. No. 5,676,950, issued Oct. 14, 1997, herein incorporated by reference).

[1393] Other viral vectors include those derived from the pox family of viruses, including vaccinia virus and avian poxvirus. By way of example, vaccinia virus recombinants expressing a nucleic acid molecule of interest (e.g., Cas12a editing system) can be constructed as follows. The DNA encoding the particular nucleic acid sequence is first inserted into an appropriate vector so that it is adjacent to a vaccinia promoter and flanking vaccinia DNA sequences, such as the sequence encoding thymidine kinase (TK). This vector is then used to transfect cells which are simultaneously infected with vaccinia. Homologous recombination serves to insert the vaccinia promoter plus the gene encoding the sequences of interest into the viral genome. The resulting TK-recombinant can be selected by culturing the cells in the presence of 5-bromodeoxyuridine and picking viral plaques resistant thereto.

[1394] In some embodiments, avipoxviruses, such as the fowlpox and canarypox viruses, can also be used to deliver the nucleic acid molecules of interest. The use of an avipox vector is particularly desirable in human and other mammalian species since members of the avipox genus can only productively replicate in susceptible avian species and therefore are not infective in mammalian cells. Methods for producing recombinant avipoxviruses are known in the art and employ genetic recombination, as described above with respect to the production of vaccinia viruses. See, e.g., WO 91/12882; WO 89/03429; and WO 92/03545.

[1395] Molecular conjugate vectors, such as the adenovirus chimeric vectors described in Michael et al., J. Biol. Chem. (1993) 268:6866-6869 and Wagner et al., Proc. Natl. Acad. Sci. USA (1992) 89:6099-6103, can also be used for gene delivery.

[1396] Members of the alphavirus genus, such as, but not limited to, vectors derived from the Sindbis virus (SIN), Semliki Forest virus (SFV), and Venezuelan Equine Encephalitis virus (VEE), will also find use as viral vectors for delivering the polynucleotides of the present invention. For a description of Sindbis-virus derived vectors useful for the practice of the instant methods, see, Dubensky et al. (1996) J. Virol. 70:508-519; and International Publication Nos. WO 95/07995, WO 96/17072; as well as, Dubensky, Jr., T. W., et al., U.S. Pat. No. 5,843,723, issued Dec. 1, 1998, and Dubensky, Jr., T. W., U.S. Pat. No. 5,789,245, issued Aug. 4, 1998, both herein incorporated by reference. Particularly preferred are chimeric alphavirus vectors comprised of sequences derived from Sindbis virus and Venezuelan equine encephalitis virus. See, e.g., Perri et al. (2003) J. Virol. 77: 10394-10403 and International Publication Nos. WO 02/099035, WO 02/080982, WO 01/81609, and WO 00/61772; herein incorporated by reference in their entireties.

[1397] A vaccinia-based infection/transfection system can be conveniently used to provide for inducible, transient expression of the nucleic acids of interest (e.g., Cas12a editing system) in a host cell. In this system, cells are first infected in vitro with a vaccinia virus recombinant that encodes the bacteriophage T7 RNA polymerase. This polymerase displays exquisite specificity in that it only transcribes templates bearing T7 promoters. Following infection, cells are transfected with the nucleic acid of interest, driven by a T7 promoter. The polymerase expressed in the cytoplasm from the vaccinia virus recombinant transcribes the transfected DNA into RNA. The method provides for high level, transient, cytoplasmic production of large quantities of RNA. See, e.g., Elroy-Stein and Moss, Proc. Natl. Acad. Sci. USA (1990) 87:6743-6747; Fuerst et al., Proc. Natl. Acad. Sci. USA (1986) 83:8122-8126.

[1398] In other approaches to infection with vaccinia or avipox virus recombinants, or to the delivery of nucleic acids using other viral vectors, an amplification system can be used that will lead to high level expression following introduction into host cells. Specifically, a T7 RNA polymerase promoter preceding the coding region for T7 RNA polymerase can be engineered. Translation of RNA derived from this template will generate T7 RNA polymerase which in turn will transcribe more templates. Concomitantly, there will be a cDNA whose expression is under the control of the T7 promoter. Thus, some of the T7 RNA polymerase generated from translation of the amplification template RNA will lead to transcription of the desired gene. Because some T7 RNA polymerase is required to initiate the amplification, T7 RNA polymerase can be introduced into cells along with the template(s) to prime the transcription reaction. The polymerase can be introduced as a protein or on a plasmid encoding the RNA polymerase. For a further discussion of T7 systems and their use for transforming cells, see, e.g., International Publication No. WO 94/26911; Studier and Moffatt, J. Mol. Biol. (1986) 189:113-130; Deng and Wolff, Gene (1994) 143:245-249; Gao et al., Biochem. Biophys. Res. Commun. (1994) 200:1201-1206; Gao and Huang, Nuc. Acids Res. (1993) 21:2867-2872; Chen et al., Nuc. Acids Res. (1994) 22:2114-2120; and U.S. Pat. No. 5,135,855.

[1399] Insect cell expression systems, such as baculovirus systems, can also be used and are known to those of skill in the art and described in, e.g., Baculovirus and Insect Cell Expression Protocols (Methods in Molecular Biology, D. W. Murhammer ed., Humana Press, 2nd edition, 2007) and L. King The Baculovirus Expression System: A laboratory guide (Springer, 1992). Materials and methods for baculovirus/insect cell expression systems are commercially available in kit form from, inter alia, Thermo Fisher Scientific (Waltham, MA) and Clontech (Mountain View, CA).

[1400] Plant expression systems can also be used for transforming plant cells. Generally, such systems use virus-based vectors to transfect plant cells with heterologous genes. For a description of such systems see, e.g., Porta et al., Mol. Biotech. (1996) 5:209-221; and Hackland et al., Arch. Virol. (1994) 139:1-22.

[1401] To obtain expression of the retron-based editing systems (or components thereof), the expression constructs and/or RNA components must be delivered into a cell. This delivery may be accomplished in vitro, as in laboratory procedures for transforming cells lines, or in vivo or ex vivo, as in the treatment of certain disease states. One mechanism for delivery is via viral infection where the expression construct is encapsulated in an infectious viral particle.

### Non-Viral Delivery Methods

[1402] Several non-viral methods for the transfer of expression constructs are available for delivering the retron-based editing systems or components thereof into cells also are contemplated. These include the use of calcium phosphate precipitation, DEAE-dextran, electroporation, direct microinjection, DNA-loaded liposomes, lipofectamine-DNA complexes, cell sonication, gene bombardment using high velocity microprojectiles, and receptor-mediated transfection (see, e.g., Graham and Van Der Eb (1973) Virology 52:456-467; Chen and Okayama (1987) Mol. Cell Biol. 7:2745-2752; Rippe et al. (1990) Mol. Cell Biol. 10:689-695; Gopal (1985) Mol. Cell Biol. 5:1188-1190; Tur-Kaspa et al. (1986) Mol. Cell. Biol. 6:716-718; Potter et al. (1984) Proc. Natl. Acad. Sci. USA 81:7161-7165); Harland and Weintraub (1985) J. Cell Biol. 101:1094-1099); Nicolau & Sene (1982) Biochim. Biophys. Acta 721:185-190; Fraley et al. (1979) Proc. Natl. Acad. Sci. USA 76:3348-3352; Fechheimer et al. (1987) Proc Natl. Acad. Sci. USA 84:8463-8467; Yang et al. (1990) Proc. Natl. Acad. Sci. USA 87:9568-9572; Wu and Wu (1987) J. Biol. Chem. 262:4429-4432; Wu and Wu (1988) Biochemistry 27:887-892; herein incorporated by reference). Some of these techniques may be successfully adapted for in vivo or ex vivo use.

[1403] In some embodiments, nucleic acid molecules encoding the retron-based editing systems or components thereof may be stably integrated into the genome of the cell. This integration may be in the cognate location and orientation via homologous recombination (gene replacement) or it may be integrated in a random, non-specific location (gene augmentation). In yet further embodiments, the nucleic acid may be stably maintained in the cell as a separate, episomal segment of DNA. Such nucleic acid segments or episomes encode sequences sufficient to permit maintenance and replication independent of or in synchronization with the host cell cycle. How the expression construct is delivered to a cell and where in the cell the nucleic acid remains is dependent on the type of expression construct employed.

[1404] In some embodiments, expression constructs encoding the retron-based editing systems or components thereof may simply consist of naked recombinant DNA or plasmids comprising nucleotide sequences encoding said retron-based editing systems or components thereof. Transfer of the construct may be performed by any of the methods mentioned above which physically or chemically permeabilize the cell membrane. This is particularly applicable for transfer in vitro but it may be applied to in vivo use as well. Dubensky et al. (Proc. Natl. Acad. Sci. USA (1984) 81:7529-7533) successfully injected polyomavirus DNA in the form of calcium phosphate precipitates into liver and spleen of adult and newborn mice demonstrating active viral replication and acute infection. Benvenisty & Neshif (Proc. Natl. Acad. Sci. USA (1986) 83:9551-9555) also demonstrated that direct intraperitoneal injection of calcium phosphate-precipitated plasmids results in expression of the transfected genes. It is envisioned that DNA encoding a retron-based editing system or components thereof of interest may also be transferred in a similar manner in vivo and express retron products.

[1405] In still another embodiment, DNA expression constructs encoding the retron-based editing systems or components thereof may be transferred into cells by particle bombardment. This method depends on the ability to accelerate DNA-coated microprojectiles to a high velocity allowing them to pierce cell membranes and enter cells without killing them (Klein et al. (1987) Nature 327:70-73). Several devices for accelerating small particles have been developed. One such device relies on a high voltage discharge to generate an electrical current, which in turn provides the motive force (Yang et al. (1990) Proc. Natl. Acad. Sci. USA 87:9568-9572). The microprojectiles may consist of biologically inert substances, such as tungsten or gold beads.

### Liposomes

[1406] In a further embodiment, constructs encoding the retron-based editing systems or components thereof may be delivered using liposomes. Liposomes are vesicular structures characterized by a phospholipid bilayer membrane and an inner aqueous medium. Multilamellar liposomes have multiple lipid layers separated by aqueous medium. They form spontaneously when phospholipids are suspended in an excess of aqueous solution. The lipid components undergo self-rearrangement before the formation of closed structures and entrap water and dissolved solutes between the lipid bilayers (Ghosh & Bachhawat (1991) Liver Diseases, Targeted Diagnosis and Therapy Using Specific Receptors and Ligands, Wu et al. (Eds.), Marcel Dekker, NY, 87-104). Also contemplated is the use of lipofectamine-DNA complexes.

[1407] In some embodiments, the liposome may be complexed with a hemagglutinating virus (HVJ). This has been shown to facilitate fusion with the cell membrane and promote cell entry of liposome-encapsulated DNA (Kaneda et al. (1989) Science 243:375-378). In other embodiments, the liposome may be complexed or employed in conjunction with nuclear non-histone chromosomal proteins (HMG-I) (Kato et al. (1991) J. Biol. Chem. 266(6):3361-3364).

[1408] In yet further embodiments, the liposome may be complexed or employed in conjunction with both HVJ and HMG-I. Where a bacterial promoter is employed in the DNA construct, it also will be desirable to include within the liposome an appropriate bacterial polymerase.

[1409] Liposomes can be made from several different types of lipids, e.g., phospholipids. A liposome may comprise natural phospholipids and lipids such as 1,2-distearoryl-sn-glycero-3-phosphatidyl choline (DSPC), sphingomyelin, egg phosphatidylcholines, monosialoganglioside, or any combination thereof.

[1410] Several other additives may be added to liposomes in order to modify their structure and properties. For instance, liposomes may further comprise cholesterol, sphingomyelin, and/or 1,2-dioleoyl-sn-glycero-3-phosphoethanolamine (DOPE), e.g., to increase stability and/or to prevent the leakage of the liposomal inner cargo.

[1411] In one embodiment, the liposome comprises a transport polymer, which may optionally be branched, comprising at least 10 amino acids and a ratio of histidine to non-histidine amino acids greater than 1.5 and less than 10. The branched transport polymer can comprise one or more backbones, one or more terminal branches, and optionally, one or more non-terminal branches. See, U.S. Pat. No. 7,070,807, incorporated herein by reference in its entirety. In one embodiment, the transport polymer is a Histidine-Lysine co-polymer (HKP) used to package and deliver mRNA and other cargos. See, U.S. Pat. Nos. 7,163,695, and 7,772,201, incorporated herein by reference in their entireties,

[1412] In one embodiment, the lipid particles may be stable nucleic acid lipid particles (SNALPs). SNALPs may comprise an ionizable lipid (DLinDMA) (e.g., cationic at low pH), a neutral helper lipid, cholesterol, a diffusible polyethylene glycol (PEG)-lipid, or any combination thereof. In some examples, SNALPs may comprise synthetic cholesterol, dipalmitoylphosphatidylcholine, 3-N-[(w-methoxy polyethylene glycol)2000)carbamoyl]-1,2-dimyrestyloxypropylamine, and cationic 1,2-dilinoleyloxy-3-N,Ndimethylaminopropane. In some examples, SNALPs may comprise synthetic cholesterol, 1,2-distearoyl-sn-glycero-3-phosphocholine, PEG-eDMA, and 1,2-dilinoleyloxy-3-(N;N-dimethyl)aminopropane (DLinDMA).

### Polymer Based Vehicles

[1413] In one embodiment, the retron-based editing systems or components thereof may be encapsulated by delivery vehicles that comprise polymer-based particles (e.g., nanoparticles). In one embodiment, the polymer-based particles may mimic a viral mechanism of membrane fusion. The polymer-based particles may be a synthetic copy of Influenza virus machinery and form transfection complexes with various types of nucleic acids ((siRNA, miRNA, plasmid DNA or snucleic acid component, mRNA) that cells take up via the endocytosis pathway, a process that involves the formation of an acidic compartment. The low pH in late endosomes acts as a chemical switch that renders the particle surface hydrophobic and facilitates membrane crossing. Once in the cytosol, the particle releases its payload for cellular action. This Active Endosome Escape technology is safe and maximizes transfection efficiency as it is using a natural uptake pathway. In one embodiment, the polymer-based particles may comprise alkylated and carboxyalkylated branched polyethylenimine. In some examples, the polymer-based particles are VIROMER, e.g., VIROMER RNAi, VIROMER RED, VIROMER mRNA. Example methods of delivering the systems and compositions herein include those described in Bawage S S et al., Synthetic mRNA expressed Cast 3a mitigates RNA virus infections, biorxiv.org/content/10.1101/370460v1. full doi: doi.org/10.1101/370460, Viromer® RED, a powerful tool for transfection of keratinocytes. doi: 10.13140/RG.2.2.16993.61281, Viromer® Transfection—Factbook 2018: technology, product overview, users' data., doi: 10.13140/RG.2.2.23912.16642.

### Exosomes

[1414] The delivery vehicles may comprise exosomes. Exosomes include membrane bound extracellular vesicles, which can be used to contain and delivery various types of biomolecules, such as proteins, carbohydrates, lipids, and nucleic acids, and complexes thereof (e.g., RNPs). Examples of exosomes include those described in Schroeder A, et al., J Intern Med. 2010 January; 267(1):9-21; El-Andaloussi S, et al., Nat Protoc. 2012 December; 7(12):2112-26; Uno Y, et al., Hum

[1415] Gene Ther. 2011 June; 22(6):711-9; Zou W, et al., Hum Gene Then 2011 April; 22(4):465-75. Exemplary exosomes can be generated from 293F cells, with mRNA-loaded exosomes driving higher mRNA expression than mRNA loaded LNPs in some instances. See, e.g. J. Biol. Chem. (2021) 297(5) 101266

[1416] In some examples, the exosome may form a complex (e.g., by binding directly or indirectly) to one or more components of the cargo. In certain examples, a molecule of an exosome may be fused with first adapter protein and a component of the cargo may be fused with a second adapter protein. The first and the second adapter protein may specifically bind each other, thus associating the cargo with the exosome. Examples of such exosomes include those described in Ye Y, et al., Biomater Sci. 2020 Apr. 28. doi: 10.1039/dObm00427h.

### Receptor-Mediated Delivery

[1417] Other expression constructs encoding the retron-based editing systems or components thereof are receptor-mediated delivery vehicles. These take advantage of the selective uptake of macromolecules by receptor-mediated endocytosis in almost all eukaryotic cells. Because of the cell type-specific distribution of various receptors, the delivery can be highly specific (Wu and Wu (1993) Adv. Drug Delivery Rev. 12:159-167). Receptor-mediated gene targeting vehicles generally consist of two components: a cell receptor-specific ligand and a DNA-binding agent. Several ligands have been used for receptor-mediated gene transfer. The most extensively characterized ligands are asialoorosomucoid (ASOR) and transferrin (see, e.g., Wu and Wu (1987), supra; Wagner et al. (1990) Proc. Natl. Acad. Sci. USA 87(9):3410-3414). A synthetic neoglycoprotein, which recognizes the same receptor as ASOR, has been used as a gene delivery vehicle (Ferkol et al. (1993) FASEB J. 7:1081-1091; Perales et al. (1994) Proc. Natl. Acad. Sci. USA 91(9):4086-4090), and epidermal growth factor (EGF) has also been used to deliver genes to squamous carcinoma cells (Myers, EPO 0273085).

[1418] In other embodiments, delivery vehicle comprising one or more expression constructs encoding the retron-based editing systems or components thereof may comprise a ligand and a liposome. For example, Nicolau et al. (Methods Enzymol. (1987) 149:157-176) employed lactosy 1-ceramide, a galactose-terminal asialoganglioside, incorporated into liposomes and observed an increase in the uptake of the insulin gene by hepatocytes. Thus, it is feasible that a nucleic acid encoding a particular gene also may be specifically delivered into a cell by any number of receptor-ligand systems with or without liposomes. Also, antibodies to surface antigens on cells can similarly be used as targeting moieties.

[1419] In some embodiments, the promoters that may be used in the retron-based editing systems or components thereof described herein may be constitutive, inducible, or tissue-specific. In some embodiments, the promoters may be a constitutive promoters. Non-limiting exemplary constitutive promoters include cytomegalovirus immediate early promoter (CMV), simian virus (SV40) promoter, adenovirus major late (MLP) promoter, Rous sarcoma virus (RSV) promoter, mouse mammary tumor virus (MMTV) promoter, phosphoglycerate kinase (PGK) promoter, elongation factor-alpha (EFla) promoter, ubiquitin promoters, actin promoters, tubulin promoters, immunoglobulin promoters, a functional fragment thereof, or a combination of any of the foregoing. In some embodiments, the promoter may be a CMV promoter. In some embodiments, the promoter may be a truncated CMV promoter. In other embodiments, the promoter may be an EFla promoter. In some embodiments, the promoter may be an inducible promoter. Non-limiting exemplary inducible promoters include those inducible by heat shock, light, chemicals, peptides, metals, steroids, antibiotics, or alcohol. In some embodiments, the inducible promoter may be one that has a low basal (non-induced) expression level, such as, e.g., the Tet-On® promoter (Clontech). In some embodiments, the promoter may be a tissue-specific promoter. In some embodiments, the tissue-specific promoter is exclusively or predominantly expressed in liver tissue. Non-limiting exemplary tissue-specific promoters include B29 promoter, CD14 promoter, CD43 promoter, CD45 promoter, CD68 promoter, desmin promoter, elastase-1 promoter, endoglin promoter, fibronectin promoter, Flt-1 promoter, GFAP promoter, GPIIb promoter, ICAM-2 promoter, INF-b promoter, Mb promoter, Nphsl promoter, OG-2 promoter, SP-B promoter, SYN1 promoter, and WASP promoter.

### Lipid Nanoparticles (LNPs)

[1420] The retron-based editing systems or components thereof (e.g., linear and circular mRNAs; nucleobase editing systems and/or components thereof) described herein may be encapsulated and delivered by lipid nanoparticles (LNPs) and compositions and/or formulations comprising RNA-encapsulated LNPs.

[1421] Below describes LNPs that may be used as the payload delivery vehicles contemplated herein, as well as the various ionizable lipids, structural lipids, PEGylated lipids, and phospholipids that may be used to make the herein LNPs for delivery payloads to cells. In addition, below describes additional LNP components that are contemplated, such as targeting moieties and other lipid components.

[1422] In one aspect, the present disclosure further provides delivery systems for delivery of a therapeutic payload (e.g., the RNA payloads described herein which may encode a polypeptide of interest, e.g., a nucleobase editing system or a therapeutic protein) disclosed herein. In some embodiments, a delivery system suitable for delivery of the therapeutic payload disclosed herein comprises a lipid nanoparticle (LNP) formulation.

[1423] In some embodiments, an LNP of the present disclosure comprises an ionizable lipid, a structural lipid, a PEGylated lipid (aka PEG lipid), and a phospholipid. In alternative embodiments, an LNP comprises an ionizable lipid, a structural lipid, a PEGylated lipid (aka PEG lipid), and a zwitterionic amino acid lipid. In some embodiments, an LNP further comprises a 5th lipid, besides any of the aforementioned lipid components. In some embodiments, the LNP encapsulates one or more elements of the active agent of the present disclosure. In some embodiments, an LNP further comprises a targeting moiety covalently or non-covalently bound to the outer surface of the LNP. In some embodiments, the targeting moiety is a targeting moiety that binds to, or otherwise facilitates uptake by, cells of a particular organ system.

[1424] In some embodiments, an LNP has a diameter of at least about 20 nm, 30 nm, 40 nm, 50 nm, 60 nm, 70 nm, 80 nm, or 90 nm. In some embodiments, an LNP has a diameter of less than about 100 nm, 110 nm, 120 nm, 130 nm, 140 nm, 150 nm, or 160 nm. In some embodiments, an LNP has a diameter of less than about 100 nm. In some embodiments, an LNP has a diameter of less than about 90 nm. In some embodiments, an LNP has a diameter of less than about 80 nm. In some embodiments, an LNP has a diameter of about 60-100 nm. In some embodiments, an LNP has a diameter of about 75-80 nm.

[1425] In some embodiments, the lipid nanoparticle compositions of the present disclosure are described according to the respective molar ratios of the component lipids in the formulation. As a non-limiting example, the mol-% of the ionizable lipid may be from about 10 mol-% to about 80 mol-%. As a non-limiting example, the mol-% of the ionizable lipid may be from about 20 mol-% to about 70 mol-%. As a non-limiting example, the mol-% of the ionizable lipid may be from about 30 mol-% to about 60 mol-%. As a non-limiting example, the mol-% of the ionizable lipid may be from about 35 mol-% to about 55 mol-%. As a non-limiting example, the mol-% of the ionizable lipid may be from about 40 mol-% to about 50 mol-%.

[1426] In some embodiments, the mol-% of the phospholipid may be from about 1 mol-% to about 50 mol-%. In some embodiments, the mol-% of the phospholipid may be from about 2 mol-% to about 45 mol-%. In some embodiments, the mol-% of the phospholipid may be from about 3 mol-% to about 40 mol-%. In some embodiments, the mol-% of the phospholipid may be from about 4 mol-% to about 35 mol-%. In some embodiments, the mol-% of the phospholipid may be from about 5 mol-% to about 30 mol-%. In some embodiments, the mol-% of the phospholipid may be from about 10 mol-% to about 20 mol-%. In some embodiments, the mol-% of the phospholipid may be from about 5 mol-% to about 20 mol-%.

[1427] In some embodiments, the mol-% of the structural lipid may be from about 10 mol-% to about 80 mol-%. In some embodiments, the mol-% of the structural lipid may be from about 20 mol-% to about 70 mol-%. In some embodiments, the mol-% of the structural lipid may be from about 30 mol-% to about 60 mol-%. In some embodiments, the mol-% of the structural lipid may be from about 35 mol-% to about 55 mol-%. In some embodiments, the mol-% of the structural lipid may be from about 40 mol-% to about 50 mol-%.

[1428] In some embodiments, the mol-% of the PEG lipid may be from about 0.1 mol-% to about 10 mol-%. In some embodiments, the mol-% of the PEG lipid may be from about 0.2 mol-% to about 5 mol-%. In some embodiments, the mol-% of the PEG lipid may be from about 0.5 mol-% to about 3 mol-%. In some embodiments, the mol-% of the PEG lipid may be from about 1 mol-% to about 2 mol-%. In some embodiments, the mol-% of the PEG lipid may be about 1.5 mol-%. In some embodiments, the mol-% of the PEG lipid may be about 2.5 mol-%.

i. Ionizable Lipids

[1429] In some embodiments, an LNP disclosed herein comprises an ionizable lipid. In some embodiments, an LNP comprises two or more ionizable lipids.

[1430] Described below are a number of exemplary ionizable lipids of the present disclosure.

[1431] In some embodiments, an LNP of the present disclosure comprises an ionizable lipid disclosed in one of US 2023/0053437; US 2019/0240354; US 2010/0130588; US 2021/0087135; WO 2021/204179; US 2021/0128488; US 2020/0121809; US 2017/0119904; US 2013/0108685; US 2013/0195920; US 2015/0005363; US 2014/0308304; US 2013/0053572; WO 2019/232095A1; WO 2021/077067; WO 2019/152557; US 2017/0210697; or WO 2019/089828A1, each of which is incorporated by reference herein in their entirety.

[1432] In some embodiments, an LNP described herein comprises a lipid, e.g., an ionizable lipid, disclosed in US Application publication US2017/0119904, which is incorporated by reference herein, in its entirety.

[1433] In some embodiments, an LNP described herein comprises a lipid, e.g., an ionizable lipid, disclosed in PCT Application publication WO2021/204179, which is incorporated by reference herein, in its entirety.

[1434] In some embodiments, an LNP described herein comprises a lipid, e.g., an ionizable lipid, disclosed in PCT Application WO2022/251665A1, which is incorporated by reference herein, in its entirety. In some embodiments, an LNP described herein comprises an ionizable lipid of Table Z:

TABLE Z
Exemplary Ionizable Lipids

| Compound # | Structure |
|---|---|
| L-1 | [chemical structure] |
| L-2 | [chemical structure] |
| L-3 | [chemical structure] |
| L-4 | [chemical structure] |
| L-5 | [chemical structure] |
| L-6 | [chemical structure] |
| L-7 | [chemical structure] |
| L-8 | [chemical structure] |
| L-9 | [chemical structure] |
| L-10 | [chemical structure] |

[1435] In some embodiments, the ionizable lipid is MC3.

[1436] In some embodiments, an LNIP of the present disclosure comprises an ionizable lipid disclosed in PCT Application Publication WO2023044343A1, which is incorporated by reference herein, in its entirety.

### Formula VII-A)

[1437] In some embodiments, Lipids of the Disclosure have a structure of Formula (VII-A):

[chemical structure]

or a pharmaceutically acceptable salt thereof, wherein:
[1438] A is —N(—X¹R¹)—, —C(R′)(-L¹-N(R″)R⁶)—, —C(R′)(—OR^{7a})—, —C(R′)(—N(R″)R^{8a})—, —C(R′)(—C(═O)OR^{9a})—, —C(R′)(—C(═O)N(R″)R^{10a})—, or —C(═N—R^{11a})—;
[1439] T is —X^{2a}—Y^{1a}-Q^{1a} or —X³—C(═O)OR⁴;
[1440] X¹ is optionally substituted C₂-C₆ alkylenyl;
[1441] R¹ is —OH, —R^{1a},

[chemical structure]

[1442] Z¹ is optionally substituted C₁-C₆ alkyl;
[1443] Z^{1a} is hydrogen or optionally substituted C₁-C₆ alkyl;
[1444] X² and X^{2a} are independently optionally substituted C₂-C₁₄ alkylenyl or optionally substituted C₂-C₁₄ alkenylenyl;
[1445] X³ is optionally substituted C₂-C₁₄ alkylenyl or optionally substituted C₂-C₁₄ alkenylenyl;
[1446] (i) Y¹ is

[chemical structure]

wherein the bond marked with an “*” is attached to X2
   [1447] Y^{1a} is

[chemical structure]

wherein the bond marked with an “*” is attached to X^{2a};
[1448] each Z² is independently H or optionally substituted C₁-C₈ alkyl;
[1449] each Z³ is independently optionally substituted C₁-C₆ alkylenyl;
[1450] Q¹ is —NR²R³, —CH(OR²)(OR³), —CR²═C(R³)(R¹²), or —C(R²)(R³)(R²);
[1451] Q^{1a} is —NR²R^{3′}, —CH(OR²)(OR^{3′}), —CR²═C(R³)(R²), or —C(R^{2′})(R^{3′})(R^{12′}); or
[1452] (ii) Y¹ is

[chemical structure]

wherein the bond marked with an “*” is attached to X2
[1453] Y^{1a} is

[chemical structure]

wherein the bond marked with an “*” is attached to X^{2a};
[1454] each Z² is independently H or optionally substituted C₁-C₈ alkyl;
[1455] each Z³ is independently optionally substituted C₁-C₆ alkylenyl;
[1456] Q¹ is —NR²R³;
[1457] Q^{1a} is —NR²R^{3′};
[1458] R², R³, and R¹² are independently hydrogen, optionally substituted C₁-C₁₄ alkyl, optionally substituted C₂-C₁₄ alkenylenyl, or —(CH₂)ₘ-G-(CH₂)ₙH;
[1459] R^{2′}, R^{3′}, and R^{12′} are independently hydrogen, optionally substituted C₁-C₁₄ alkyl, optionally substituted C₂-C₁₄ alkenylenyl, or —(CH₂)ₘ-G-(CH₂)ₙH;
[1460] G is a C₃-C₈ cycloalkylenyl;
[1461] each m is independently 0, 1, 2, 3, 4, 5, 6, 7, 8, 9, 10, 11, or 12;
[1462] each n is independently 0, 1, 2, 3, 4, 5, 6, 7, 8, 9, 10, 11, or 12;
[1463] X³ is optionally substituted C₂-C₁₄ alkylenyl;
[1464] R⁴ is optionally substituted C₄-C₁₄ alkyl;
[1465] L¹ is C₁-C₈ alkylenyl;
[1466] R⁶ is C₁-C₆ alkyl, (hydroxy)C₁-C₆ alkyl, or (amino)C₁-C₆ alkyl
[1467] R^{7a} is —C(═O)N(R′″)R^{7b}, —C(═S)N(R′″)R^{7b}, —N═C(R^{7b})(R^{7c}), or

[chemical structure]

[1468] R^{7b} is C₁-C₆ alkyl, (hydroxy)C₁-C₆ alkyl, or (amino)C₁-C₆ alkyl;
[1469] R^{7c} is hydrogen or C₁-C₆ alkyl;
[1470] R^{8a} is —C(═O)N(R′″)R^{8b}, —C(═S)N(R′″)R^{8b}, —N═C(R^{8b})(R^{8c}), or

[chemical structure]

[1471] R^{8b} is C₁-C₆ alkyl, (hydroxy)C₁-C₆ alkyl, or (amino)C₁-C₆ alkyl;
[1472] R^{8c} is hydrogen or C₁-C₆ alkyl;
[1473] R^{9a} is —N═C(R^{9b})(R^{9c});
[1474] R^{9b} is C₁-C₆ alkyl, (hydroxy)C₁-C₆ alkyl, or (amino)C₁-C₆ alkyl;
[1475] R^{9c} is hydrogen or C₁-C₆ alkyl;
[1476] R^{10a} is —N═C(R^{10b})(R^{10c})
[1477] R^{10b} is C₁-C₆ alkyl, (hydroxy)C₁-C₆ alkyl, or (amino)C₁-C₆ alkyl;
[1478] R^{10c} is hydrogen or C₁-C₆ alkyl;
[1479] R^{11a} is —OR^{11b}, —N(R″)R^{11b}, —OC(═O)R^{11b} or —N(R″)C(═O)R^{11b};
[1480] R^{11b} is C₁-C₆ alkyl, (hydroxy)C₁-C₆ alkyl, or (amino)C₁-C₆ alkyl;
[1481] R′ is hydrogen or C₁-C₆ alkyl;
[1482] R″ is hydrogen or C₁-C₆ alkyl; and
[1483] R′″ is hydrogen or C₁-C₆ alkyl.

### Formula VIII-A)

[1484] In some embodiments, Lipids of the Disclosure have a structure of Formula (VII-A), wherein the Lipids of the Disclosure have a structure of Formula (VIII-A):

[chemical structure]

or a pharmaceutically acceptable salt thereof.

### Formula VII-B)

[1485] In some embodiments, Lipids of the Disclosure have a structure of Formula (VII-B):

[chemical structure]

or a pharmaceutically acceptable salt thereof, wherein:
[1486] A is —C(R′)(-L¹-N(R″)R⁶)—, —C(R′)(—OR^{7a})—, —C(R′)(—N(R″)R^{8a})—, —C(R′)(—C(═O)OR^{9a})—, —C(R′)(—C(═O)N(R″)R^{10a})—, or —C(═N—R^{11a})—;
[1487] T is —X^{2a}—Y^{1a}-Q^{1a} or —X³—C(═O)OR⁴;
[1488] X² and X^{2a} are independently optionally substituted C₂-C₁₄ alkylenyl or optionally substituted C₂-C₁₄ alkenylenyl;
[1489] X³ is optionally substituted C₁-C₁₄ alkylenyl or optionally substituted C₂-C₁₄ alkenylenyl;
[1490] Y¹ is

[chemical structure]

wherein the bond marked with an “*” is attached to X²;
[1491] Y^{1a} is

[chemical structure]

wherein the bond marked with an “*” is attached to X^{2a};
[1492] each Z³ is independently optionally substituted C₁-C₆ alkylenyl or optionally substituted C₂-C₁₄ alkenylenyl;
[1493] Q¹ is —NR²R³, —CH(OR²)(OR³), —CR²═C(R³)(R¹²), or —C(R²)(R³)(R²);
[1494] Q^{1a} is —NR^{2′}R^{3′}, —CH(OR^{2′})(OR³), —CR²═C(R³)(R²), or —C(Rz)(R^{3′})(R^{12′});
[1495] R², R³, and R¹² are independently hydrogen, optionally substituted C₁-C₁₄ alkyl, optionally substituted C₂-C₁₄ alkenylenyl, or —(CH₂)ₘ-G-(CH₂)ₙH;
[1496] R^{2′}, R^{3′}, and R^{12′} are independently hydrogen, optionally substituted C₁-C₁₄ alkyl, optionally substituted C₂-C₁₄ alkenylenyl, or —(CH₂)ₘ-G-(CH₂)ₙH;
[1497] G is a C₃-C₈ cycloalkylenyl;
[1498] each m is independently 0, 1, 2, 3, 4, 5, 6, 7, 8, 9, 10, 11, or 12;
[1499] each n is independently 0, 1, 2, 3, 4, 5, 6, 7, 8, 9, 10, 11, or 12;
[1500] X³ is optionally substituted C₂-C₁₄ alkylenyl;
[1501] R⁴ is optionally substituted C₄-C₁₄ alkyl;
[1502] L¹ is C₁-C₈ alkylenyl;
[1503] R⁶ is (hydroxy)C₁-C₆ alkyl, or (amino)C₁-C₆ alkyl.
[1504] R^{7a} is —C(═O)N(R′″)R^{7b}, —C(═S)N(R′″)R^{7b}, —N═C(R^{7b})(R^{7c}),

[chemical structure]

[1505] Z¹ is optionally substituted C₁-C₆ alkyl;
[1506] R¹⁰ is C₁-C₆ alkylenyl;
[1507] R^{7b} is C₁-C₆ alkyl, (hydroxy)C₁-C₆ alkyl, or (amino)C₁-C₆ alkyl;
[1508] R^{7c} is hydrogen or C₁-C₆ alkyl;
[1509] R^{8a} is —C(═O)N(R′″)R^{8b}, —C(═S)N(R′″)R^{8b}, —N═C(R^{8b})(R^{8c}),

[chemical structure]

[1510] R^{8b} is C₁-C₆ alkyl, (hydroxy)C₁-C₆ alkyl, or (amino)C₁-C₆ alkyl;
[1511] R^{8c} is hydrogen or C₁-C₆ alkyl;
[1512] R^{9a} is —N═C(R^{9b})(R^{9c});
[1513] R^{9b} is C₁-C₆ alkyl, (hydroxy)C₁-C₆ alkyl, or (amino)C₁-C₆ alkyl;
[1514] R^{9c} is hydrogen or C₁-C₆ alkyl;
[1515] R^{10a} is —N═C(R^{10b})(R^{10c}),
[1516] R^{10b} is C₁-C₆ alkyl, (hydroxy)C₁-C₆ alkyl, or (amino)C₁-C₆ alkyl;
[1517] R^{10c} is hydrogen or C₁-C₆ alkyl;
[1518] R^{11a} is —OR^{11b}, —N(R″)R^{11b}, —OC(═O)R^{11b} or —N(R″)C(═O)R^{11b};
[1519] R^{11b} is C₁-C₆ alkyl, (hydroxy)C₁-C₆ alkyl, or (amino)C₁-C₆ alkyl;
[1520] R′ is hydrogen or C₁-C₆ alkyl;
[1521] R″ is hydrogen or C₁-C₆ alkyl; and
[1522] R′″ is hydrogen or C₁-C₆ alkyl.

[1523] In some embodiments, Lipids of the Disclosure have a structure of Formula (VII-B), wherein A is —C(R′)(-L¹-N(R″)R⁶)—.

[1524] In some embodiments, Lipids of the Disclosure have a structure of Formula (VII-B), wherein A is —C(R′)(—OR^{7a})—.

[1525] In some embodiments, Lipids of the Disclosure have a structure of Formula (VII-B), wherein A is —C(R′)(—N(R″)R^{8a}).

[1526] In some embodiments, Lipids of the Disclosure have a structure of Formula (VII-B), wherein A is —C(R′)(—C(═O)OR^{9a}).

[1527] In some embodiments, Lipids of the Disclosure have a structure of Formula (VII-B), wherein A is —C(R′)(—C(═O)N(R″)R^{10a})—.

[1528] In some embodiments, Lipids of the Disclosure have a structure of Formula (VII-B), wherein A is —C(═N—R^{11a})—.

[1529] In some embodiments, Lipids of the Disclosure have a structure of Formula (VII-B), wherein T is —X^{2a}—Y^{1a}-Q^{1a}.

[1530] In some embodiments, Lipids of the Disclosure have a structure of Formula (VII-B), wherein T is —X³—C(═O)OR⁴.

[1531] In some embodiments, Lipids of the Disclosure have a structure of Formula (VII-B), wherein X² and/or X^{2a} are/is optionally substituted C₂-C₁₄ alkylenyl (e.g., C₂-C₁₀ alkylenyl, C₂-C₈ alkylenyl, C₂, C₃, C₄, C₅, C₆, C₇, or C₈ alkylenyl). In some embodiments, Lipids of the Disclosure have a structure of Formula (VII-B), wherein X² is C₂-C₁₄ alkylenyl. In some embodiments, Lipids of the Disclosure have a structure of Formula (VII-B), wherein X^{2a} is C₂-C₁₄alkylenyl

[1532] In some embodiments, Lipids of the Disclosure have a structure of Formula (VII-B), wherein Y¹ and/or Y^{1a} are/is

[chemical structure]

[1533] In some embodiments, Lipids of the Disclosure have a structure of Formula (VII-B), wherein Y¹ is

[chemical structure]

[1534] In some embodiments, Lipids of the Disclosure have a structure of Formula (VII-B), wherein Y^{1a} is

[chemical structure]

[1535] In some embodiments, Lipids of the Disclosure have a structure of Formula (VII-B), wherein Y¹ and/or Y^{1a} are/is

[chemical structure]

[1536] In some embodiments, Lipids of the Disclosure have a structure of Formula (VII-B), wherein Y¹ is

[chemical structure]

[1537] In some embodiments, Lipids of the Disclosure have a structure of Formula (VII-B), wherein Y^{1a} is

[chemical structure]

[1538] In some embodiments, Lipids of the Disclosure have a structure of Formula (VII-B), wherein Y¹ and/or Y^{1a} are/is

[chemical structure]

[1539] In some embodiments, Lipids of the Disclosure have a structure of Formula (VII-B), wherein Y¹ is

[chemical structure]

[1540] In some embodiments, Lipids of the Disclosure have a structure of Formula (VII-B), wherein Y^{1a} is

[chemical structure]

[1541] In some embodiments, Lipids of the Disclosure have a structure of Formula (VII-B), wherein Y¹ and/or Y^{1a} are/is

[chemical structure]

[1542] In some embodiments, Lipids of the Disclosure have a structure of Formula (VII-B), wherein Y¹ is

[chemical structure]

[1543] In some embodiments, Lipids of the Disclosure have a structure of Formula (VII-B), wherein Y^{1a} is

[chemical structure]

[1544] In some embodiments, Lipids of the Disclosure have a structure of Formula (VII-B), wherein Q¹ and/or Q^{1a} are/is —C(R″)(R³)(R^{12′}). In some embodiments, Lipids of the Disclosure have a structure of Formula (VII-B), wherein Q¹ is —C(R²)(R³)(R^{12′}). In some embodiments, Lipids of the Disclosure have a structure of Formula (VII-B), wherein Q^{1a} is —C(R^{2′})(R^{3′})(R^{12′}).

[1545] In some embodiments, Lipids of the Disclosure have a structure of Formula (VII-B), wherein X³ is optionally substituted C₁-C₁₄ alkylenyl (e.g., C₁-C₆, C₁-C₄ alkylenyl). In some embodiments, Lipids of the Disclosure have a structure of Formula (VII-B), wherein X³ is C₁-C₁₄ alkylenyl.

[1546] In some embodiments, Lipids of the Disclosure have a structure of Formula (VII-B), wherein R², R³, R¹², R^{2′}, R^{3′}, and/or R^{12′} are hydrogen. In some embodiments, Lipids of the Disclosure have a structure of Formula (VII-B), wherein R² is hydrogen. In some embodiments, Lipids of the Disclosure have a structure of Formula (VII-B), wherein R³ is hydrogen. In some embodiments, Lipids of the Disclosure have a structure of Formula (VII-B), wherein R¹² is hydrogen. In some embodiments, Lipids of the Disclosure have a structure of Formula (VII-B), wherein R^{2″} is hydrogen. In some embodiments, Lipids of the Disclosure have a structure of Formula (VII-B), wherein R^{3′} is hydrogen. In some embodiments, Lipids of the Disclosure have a structure of Formula (VII-B), wherein R^{12′} is hydrogen.

[1547] In some embodiments, Lipids of the Disclosure have a structure of Formula (VII-B), wherein R², R³, R¹², R^{2′}, R^{3′}, and/or R^{12′} are optionally substituted C₁-C₁₄ alkyl (e.g., C₄-C₁₀ alkyl, C₅, C₆. C₇. C₈, C₉ alkyl). In some embodiments, Lipids of the Disclosure have a structure of Formula (VII-B), wherein R² is C₄-C₁₀ alkyl. In some embodiments, Lipids of the Disclosure have a structure of Formula (VII-B), wherein R³ is C₄-C₁₀ alkyl. In some embodiments, Lipids of the Disclosure have a structure of Formula (VII-B), wherein R¹² is C₄-C₁₀ alkyl. In some embodiments, Lipids of the Disclosure have a structure of Formula (VII-B), wherein R^{2′} is C₄-C₁₀ alkyl. In some embodiments, Lipids of the Disclosure have a structure of Formula (VII-B), wherein R^{3′} is C₄-C₁₀ alkyl. In some embodiments, Lipids of the Disclosure have a structure of Formula (VII-B), wherein R^{12′} is C₄-C₁₀ alkyl.

[1548] In some embodiments, Lipids of the Disclosure have a structure of Formula (VII-B), wherein R⁴ is optionally substituted C₄-C₁₄ alkyl (e.g., C₈-C₁₄ alkyl, linear C₈-C₁₄ alkyl, C₈, C₉, C₁₀, C₁₁, C₁₂, C₁₃, or C₁₄ alkyl). In some embodiments, Lipids of the Disclosure have a structure of Formula (VII-B), wherein R⁴ is linear C₈-C₁₄ alkyl. In some embodiments, Lipids of the Disclosure have a structure of Formula (VII-B), wherein R⁴ is linear Cu alkyl.

[1549] In some embodiments, Lipids of the Disclosure have a structure of Formula (VII-B), wherein L¹ is C₁-C₃ alkylenyl.

[1550] In some embodiments, Lipids of the Disclosure have a structure of Formula (VII-B), wherein R⁶is (hydroxy)C₁-C₆ alkyl.

[1551] In some embodiments, Lipids of the Disclosure have a structure of Formula (VII-B), wherein R^{7a} is

[chemical structure]

In some embodiments, Lipids of the Disclosure have a structure of Formula (VII-B), wherein R^{7a} is

[chemical structure]

In some embodiments, Lipids of the Disclosure have a structure of Formula (VII-B), wherein R^{7a} is

[chemical structure]

[1552] In some embodiments, Lipids of the Disclosure have a structure of Formula (VII-B), wherein R^{7a} is selected from the group consisting of —C(═O)N(R′)R^{7b}, —C(═S)N(R′″)R^{7b}, and —N═C(R^{7b})(R^{7c}). In some embodiments, Lipids of the Disclosure have a structure of Formula (VII-B), wherein R^{7a} is —C(═O)N(R′)R^{7b}. In some embodiments, Lipids of the Disclosure have a structure of Formula (VII-B), wherein R^{7a} is —C(═S)N(R′)R⁷¹. In some embodiments, Lipids of the Disclosure have a structure of Formula (VII-B), wherein R^{7a} is —N═C(R^{7b})(R^{7c}).

[1553] In some embodiments, Lipids of the Disclosure have a structure of Formula (VII-B), wherein R^{8a} is selected from the group consisting of —C(═O)N(R′)R^{8b}, —C(═S)N(R′)R^{8b}, and —N═C(R^{8b})(R^{8c}). In some embodiments, Lipids of the Disclosure have a structure of Formula (VII-B), wherein R^{8a} is —C(═O)N(R′)R^{8b}. In some embodiments, Lipids of the Disclosure have a structure of Formula (VII-B), wherein R^{8a} is —C(═S)N(R′)R^{8b}. In some embodiments, Lipids of the Disclosure have a structure of Formula (VII-B), wherein R^{8a} is —N═C(R^{8b})(R^{8c}).

[1554] In some embodiments, Lipids of the Disclosure have a structure of Formula (VII-B), wherein R^{8a} is

[chemical structure]

[1555] In some embodiments, Lipids of the Disclosure have a structure of Formula (VII-B), wherein R^{9a} is (hydroxy)C₁-C₆ alkyl.

[1556] In some embodiments, Lipids of the Disclosure have a structure of Formula (VII-B), wherein R^{10b} is (amino)C₁-C₆ alkyl.

[1557] In some embodiments, Lipids of the Disclosure have a structure of Formula (VII-B), wherein R^{11a} is —OR^{11b} or —OC(═O)R^{11b}. In some embodiments, Lipids of the Disclosure have a structure of Formula (VII-B), wherein R^{11a} is —OR^{11b}. In some embodiments, Lipids of the Disclosure have a structure of Formula (VII-B), wherein R^{11a} is —OC(═O)R^{11b}.

[1558] In some embodiments, Lipids of the Disclosure have a structure of Formula (VII-B), wherein R^{11a} is —N(R″)R^{11b} or —N(R″)C(═O)R^{11b}. In some embodiments, Lipids of the Disclosure have a structure of Formula (VII-B), wherein R^{11a} is —N(R″)R^{11b}. In some embodiments, Lipids of the Disclosure have a structure of Formula (VII-B), wherein R^{11a} is —N(R″)C(═O)R^{11b}.

[1559] In some embodiments, Lipids of the Disclosure have a structure of Formula (VII-B), wherein R^{11b} is (amino)C₁-C₆ alkyl.

### Formula III-C)

[1560] In some embodiments, Lipids of the Disclosure have a structure of Formula (III-C):

[chemical structure]

or a pharmaceutically acceptable salt thereof, wherein
[1561] R²⁰ is C₁-C₆ alkylenyl-NR^{20′}C(O)OR^{20″};
[1562] R^{20′} is hydrogen or optionally substituted C₁-C₆ alkyl;
[1563] R^{20″} is optionally substituted C₁-C₆ alkyl, phenyl, or benzyl;
[1564] Z¹ is optionally substituted C₁-C₆ alkyl;
[1565] X² and X^{2a} are independently optionally substituted C₂-C₁₄ alkylenyl;
[1566] Y¹ and Y^{1a} are independently

[chemical structure]

wherein the bond marked with an “*” is attached to X² or X^{2a};
[1567] Z³ is independently optionally substituted C₂-C₆ alkylenyl;
[1568] R² and R³ are independently optionally substituted C₄-C₁₄ alkyl; and
[1569] R² and R^{3′} are independently optionally substituted C₄-C₁₄ alkyl.

[1570] In some embodiments, Lipids of the Disclosure have a structure of Formula (III-C), wherein R²⁰ is —CH₂CH₂CH₂NHC(O)O-t-butyl or —CH₂CH₂CH₂NHC(O)O-benzyl. In some embodiments, Lipids of the Disclosure have a structure of Formula (III-C), wherein R²⁰ is —CH₂CH₂CH₂NHC(O)O-t-butyl. In some embodiments, Lipids of the Disclosure have a structure of Formula (III-C), wherein R²⁰ is —CH₂CH₂CH₂NHC(O)O-benzyl.

[1571] In some embodiments, Lipids of the Disclosure have a structure of Formula (III-C), wherein X² and X^{2a} are independently C₄-C₈ alkylenyl (e.g., C₅, C₆, C₇ alkylenyl). In some embodiments, Lipids of the Disclosure have a structure of Formula (III-C), wherein X² is C₆ alkyl. In some embodiments, Lipids of the Disclosure have a structure of Formula (III-C), wherein X^{2a} is C₆ alkyl

[1572] In some embodiments, Lipids of the Disclosure have a structure of Formula (III-C), wherein Y¹ and Y^{1a} are

[chemical structure]

wherein Z³ is C₂-C₄alkylenyl (e.g., C₂ alkylenyl). In some embodiments, Lipids of the Disclosure have a structure of Formula (III-C), wherein Y¹ is

[chemical structure]

wherein Z³ is C₂-C₄alkylenyl (e.g., C₂ alkylenyl). In some embodiments, Lipids of the Disclosure have a structure of Formula (III-C), wherein Y^{1a} is

[chemical structure]

wherein Z³ is C₂-C₄alkylenyl (e.g., C2 alkylenyl).

[1573] In some embodiments, Lipids of the Disclosure have a structure of Formula (III-C), wherein R2, R3, R2′ and R3′ are independently optionally substituted C4-C10 alkyl (e.g., C6-C9alkyl, C6, C7, C8, C9 alkyl). In some embodiments, Lipids of the Disclosure have a structure of Formula (III-C), wherein R2 is C6-C9alkyl. In some embodiments, Lipids of the Disclosure have a structure of Formula (III-C), wherein R3 is C6-C9alkyl. In some embodiments, Lipids of the Disclosure have a structure of Formula (III-C), wherein R2′ is C6-C9alkyl. In some embodiments, Lipids of the Disclosure have a structure of Formula (III-C), wherein R^{3′} is C₆-C₉alkyl.

### Formula (III-D)

[1574] In some embodiments, Lipids of the Disclosure have a structure of Formula (III-D):

[chemical structure]

or a pharmaceutically acceptable salt thereof, wherein
[1575] R¹ is —OH;
[1576] X¹ is optionally substituted C₄ alkylenyl;
[1577] X² and X^{2a} are independently optionally substituted C₂-C₁₄ alkylenyl;
[1578] Y¹ and Y^{1a} are independently

[chemical structure]

[1579] Z³ is independently optionally substituted C₂-C₆ alkylenyl;
[1580] R² and R³ are independently optionally substituted C₄-C₁₄ alkyl or C₁-C₂ alkyl substituted with optionally substituted cyclopropyl; or
[1581] R², and R³, are independently optionally substituted C₄-C₁₄ alkyl or C₁-C₂ alkyl substituted with optionally substituted cyclopropyl.

[1582] In some embodiments, Lipids of the Disclosure have a structure of Formula (III-D), wherein X¹ is C₄ alkylenyl.

[1583] In some embodiments, Lipids of the Disclosure have a structure of Formula (III-D), wherein X² and X^{2a} are independently optionally substituted C₄-C₁₀ alkylenyl (e.g., C₅, C₆, C₇, C₈, C₉, or C₁₀ alkylenyl). In some embodiments, Lipids of the Disclosure have a structure of Formula (III-D), wherein X² is C₄-C₁₀ alkylenyl. In some embodiments, Lipids of the Disclosure have a structure of Formula (III-D), wherein X^{2a} is C₄-C₁₀ alkylenyl.

[1584] In some embodiments, Lipids of the Disclosure have a structure of Formula (III-D), wherein Y¹ and Y^{1a} are independently

[chemical structure]

wherein Z³ is independently C₂-C₄ alkylenyl (e.g., C₂, C₄ alkylenyl).

[1585] In some embodiments, Lipids of the Disclosure have a structure of Formula (III-D), wherein R², R³, R^{2′} and R³, are independently C₆-C₁₄ alkyl (e.g., C₆, C₇, C₈, C₉, C₁₀, C₁₁, C₁₂, C₁₃, or C₁₄ alkyl) or C₁-C₂ alkyl substituted with optionally substituted cyclopropyl. In some embodiments, Lipids of the Disclosure have a structure of Formula (III-D), wherein R², R³, R^{2′} and R³, are independently C₆-C₁₄ alkyl (e.g., C₆, C₇, C₈, C₉, C₁₀, C₁₁, C₁₂, C₁₃, or C₁₄ alkyl). In some embodiments, Lipids of the Disclosure have a structure of Formula (III-D), wherein R² is C₆-C₁₄ alkyl. In some embodiments, Lipids of the Disclosure have a structure of Formula (III-D), wherein R³ is C₆-C₁₄ alkyl. In some embodiments, Lipids of the Disclosure have a structure of Formula (III-D), wherein R^{2′} is C₆-C₁₄ alkyl. In some embodiments, Lipids of the Disclosure have a structure of Formula (III-D), wherein R³ is C₆-C₁₄ alkyl. In some embodiments, Lipids of the Disclosure have a structure of Formula (III-D), wherein R² is C₁-C₂ alkyl substituted with substituted cyclopropyl. In some embodiments, Lipids of the Disclosure have a structure of Formula (III-D), wherein R³ is C_{L}-C₂ alkyl substituted with substituted cyclopropyl. In some embodiments, Lipids of the Disclosure have a structure of Formula (III-D), wherein R^{2′} is C₁-C₂ alkyl substituted with substituted cyclopropyl. In some embodiments, Lipids of the Disclosure have a structure of Formula (III-D), wherein R^{3′} is C₁-C₂ alkyl substituted with substituted cyclopropyl

[1586] In some embodiments, Lipids of the Disclosure have a structure of Formula (III-D), wherein R², R³, R^{2′} and R^{3′} are independently C₁-C₂ alkyl substituted with cyclopropylene-(C₁-C⁶alkylenyl optionally substituted with cyclopropylene substituted with C₁-C₆alkyl). In some embodiments, Lipids of the Disclosure have a structure of Formula (III-D), wherein R² is C₁-C₂ alkyl substituted with cyclopropylene-(C₁-C₆alkylenyl optionally substituted with cyclopropylene substituted with C₁-C₆alkyl). In some embodiments, Lipids of the Disclosure have a structure of Formula (III-D), wherein R³ is C₁-C₂ alkyl substituted with cyclopropylene-(C₁-C⁶alkylenyl optionally substituted with cyclopropylene substituted with C₁-C₆alkyl). In some embodiments, Lipids of the Disclosure have a structure of Formula (III-D), wherein R^{2′} is C₁-C₂ alkyl substituted with cyclopropylene-(C₁-C⁶alkylenyl optionally substituted with cyclopropylene substituted with C₁-C₆alkyl). In some embodiments, Lipids of the Disclosure have a structure of Formula (III-D), wherein R^{3′} is C₁-C₂ alkyl substituted with cyclopropylene-(C₁-C⁶alkylenyl optionally substituted with cyclopropylene substituted with C₁-C₆alkyl).

### Formula (III-E)

[1587] In some embodiments, Lipids of the Disclosure have a structure of Formula (III-E):

[chemical structure]

or a pharmaceutically acceptable salt thereof, wherein
[1588] R¹ is —OH;
[1589] X¹ is branched C₂-C₈ alkylenyl
[1590] X² and X^{2a} are independently optionally substituted C₂-C₁₄ alkylenyl;
[1591] Y¹ and Y^{1a} are independently

[chemical structure]

[1592] Z³ is independently optionally substituted C₂-C₆ alkylenyl;
[1593] R² and R³ are independently optionally substituted C₄-C₁₄ alkyl;
[1594] R^{2′} and R³ are independently optionally substituted C₄-C₁₄ alkyl.

[1595] In some embodiments, Lipids of the Disclosure have a structure of Formula (III-E), wherein X¹ is branched C₆ alkylenyl.

[1596] In some embodiments, Lipids of the Disclosure have a structure of Formula (III-E), wherein X² and X^{2a} are independently C₄-C₁₀ alkylenyl (e.g., C₆, C₇, C₈ alkylenyl). In some embodiments, Lipids of the Disclosure have a structure of Formula (III-E), wherein X² is C₄-C₁₀ alkylenyl. In some embodiments, Lipids of the Disclosure have a structure of Formula (III-E), wherein X^{2a} is C₄-C₁₀ alkylenyl

[1597] In some embodiments, Lipids of the Disclosure have a structure of Formula (III-E), wherein Y¹ and Y^{1a} are

[chemical structure]

wherein Z³ is independently optionally substituted C₂ alkylenyl. In some embodiments, Lipids of the Disclosure have a structure of Formula (III-E), wherein Y¹ is

[chemical structure]

wherein Z³ is independently optionally substituted C₂ alkylenyl. In some embodiments, Lipids of the Disclosure have a structure of Formula (III-E), wherein Y^{1a} is

[chemical structure]

wherein Z³ is independently optionally substituted C₂ alkylenyl.

[1598] In some embodiments, Lipids of the Disclosure have a structure of Formula (III-E), wherein R², R³, R^{2′} and R^{3′} are independently C₆-C₁₂ alkyl (e.g., C₉ alkyl) or C₄-C₁₀ alkyl (e.g., C₄, C₆ alkyl) optionally substituted with C₂-C₈alkenylene (e.g., C₄, C₆ alkenylene). In some embodiments, Lipids of the Disclosure have a structure of Formula (III-E), wherein R² is C₆-C₁₂ alkyl. In some embodiments, Lipids of the Disclosure have a structure of Formula (III-E), wherein R³ is C₆-C₁₂ alkyl. In some embodiments, Lipids of the Disclosure have a structure of Formula (III-E), wherein R² is C₆-C₁₂ alkyl. In some embodiments, Lipids of the Disclosure have a structure of Formula (III-E), wherein R^{3′} is C₆-C₁₂ alkyl. In some embodiments, Lipids of the Disclosure have a structure of Formula (III-E), wherein R² is C₄-C₁₀ alkyl optionally substituted with C₂-C₈alkenylene. In some embodiments, Lipids of the Disclosure have a structure of Formula (III-E), wherein R³ is C₄-C₁₀ alkyl optionally substituted with C₂-C₈alkenylene. In some embodiments, Lipids of the Disclosure have a structure of Formula (III-E), wherein R^{2′} is C₄-C₁₀ alkyl optionally substituted with C₂-C₈alkenylene. In some embodiments, Lipids of the Disclosure have a structure of Formula (III-E), wherein R^{3′} is C₄-C₁₀ alkyl optionally substituted with C₂-C₈alkenylene.

### Formula III-F)

[1599] In some embodiments, Lipids of the Disclosure have a structure of Formula (III-F):

[chemical structure]

or a pharmaceutically acceptable salt thereof, wherein
[1600] R¹ is —OH;
[1601] X¹ is optionally substituted C₂-C₆ alkylenyl;
[1602] X² and X^{2a} are independently optionally substituted C₂-C₁₄ alkylenyl;
[1603] each of Y¹ and Y^{1a} is a bond;
[1604] R² and R³ are independently optionally substituted C₄-C₁₄ alkyl; and
[1605] R^{2′} and R^{3′} are independently optionally substituted C₄-C₁₄ alkyl.

[1606] In some embodiments, Lipids of the Disclosure have a structure of Formula (III-E), wherein X¹ is C₄ alkylenyl.

[1607] In some embodiments, Lipids of the Disclosure have a structure of Formula (III-E), wherein X² and X^{2a} are independently C₄-C₁₀ alkylenyl (e.g., C₆-C₈ alkylenyl, C₆, C₇, C₈ alkylenyl). In some embodiments, Lipids of the Disclosure have a structure of Formula (III-E), wherein X² is C₄-C₁₀ alkylenyl. In some embodiments, Lipids of the Disclosure have a structure of Formula (III-E), wherein X^{2a} is C₄-C₁₀ alkylenyl.

[1608] In some embodiments, Lipids of the Disclosure have a structure of Formula (III-E), wherein R², R³, R^{2′} and R^{3′} are independently C₆-C₁₀ alkyl (e.g., C₇, C₈ alkyl). In some embodiments, Lipids of the Disclosure have a structure of Formula (III-E), wherein R² is C₆-C₁₀ alkyl. In some embodiments, Lipids of the Disclosure have a structure of Formula (III-E), wherein R³ is C₆-C₁₀ alkyl. In some embodiments, Lipids of the Disclosure have a structure of Formula (III-E), wherein R^{2′} is C₆-C₁₀ alkyl. In some embodiments, Lipids of the Disclosure have a structure of Formula (III-E), wherein R^{3′} is C₆-C₁₀ alkyl.

### Formula VIII-B)

[1609] In some embodiments, Lipids of the Disclosure have a structure of Formula (VIII-B):

[chemical structure]

or a pharmaceutically acceptable salt thereof, wherein:
[1610] X¹ is a bond,
[1611] R¹ is C₁-C₆ alkyl,
[1612] X² is C₂-C₆ alkylenyl,
[1613] X^{2a} is C₂-C₁₄ alkylenyl,
[1614] wherein X² or X^{2a} is substituted with OH or C₁₋₄alkylenyl-OH,
[1615] Y¹ is

[chemical structure]

wherein the bond marked with an “*” is attached to X²;
[1616] Y^{1a} is

[chemical structure]

wherein the bond marked with an “*” is attached to X^{2a};
[1617] each Z³ is independently optionally substituted C₁-C₆ alkylenyl or optionally substituted C₂-C₁₄ alkenylenyl;
[1618] Q¹ is —C(R²)(R³)(R¹²);
[1619] Q^{1a} is —C(R^{2′})(R″)(R^{12′});
[1620] R², R³, and R¹² are independently hydrogen, optionally substituted C₁-C₁₄ alkyl, or optionally substituted C₂-C₁₄ alkenylenyl, and
[1621] R^{2′}, R^{3′}, and R^{12′} are independently hydrogen, optionally substituted C₁-C₁₄ alkyl, or optionally substituted C₂-C₁₄ alkenylenyl.

[1622] In some embodiments, Lipids of the Disclosure have a structure of Formula (VIII-B), wherein R¹ is methyl.

[1623] In some embodiments, Lipids of the Disclosure have a structure of Formula (VIII-B), wherein X² is C₄, C₅, or C₆ alkylenyl.

[1624] In some embodiments, Lipids of the Disclosure have a structure of Formula (VIII-B), wherein X^{2a} is C₄-C₈ alkylenyl (e.g., C₅, C₆, or C₇ alkylenyl).

[1625] In some embodiments, Lipids of the Disclosure have a structure of Formula (VIII-B), wherein Y¹ is

[chemical structure]

### and Y^{1a} is

[chemical structure]

In some embodiments, Lipids of the Disclosure have a structure of Formula (VIII-B), wherein Y¹ is

[chemical structure]

In some embodiments, Lipids of the Disclosure have a structure of Formula (VIII-B), wherein Y¹ is

[chemical structure]

In some embodiments, Lipids of the Disclosure have a structure of Formula (VIII-B), wherein Y^{1a} is

[chemical structure]

In some embodiments, Lipids of the Disclosure have a structure of Formula (VIII-B), wherein Y^{1a} is

[chemical structure]

[1626] In some embodiments, Lipids of the Disclosure have a structure of Formula (VIII-B), wherein R², R³, R¹², R^{2′}, R^{3′}, and R^{12′} are independently hydrogen or C₅-C₁₂ alkyl (e.g., C₆, C₇, C₈, C₉, C₁₀, C₁₁ alkyl). In some embodiments, Lipids of the Disclosure have a structure of Formula (VIII-B), wherein R² is hydrogen. In some embodiments, Lipids of the Disclosure have a structure of Formula (VIII-B), wherein R³ is hydrogen. In some embodiments, Lipids of the Disclosure have a structure of Formula (VIII-B), wherein R^{2′} is hydrogen. In some embodiments, Lipids of the Disclosure have a structure of Formula (VIII-B), wherein R^{3′} is hydrogen. In some embodiments, Lipids of the Disclosure have a structure of Formula (VIII-B), wherein R² is C₅-C₁₂ alkyl. In some embodiments, Lipids of the Disclosure have a structure of Formula (VIII-B), wherein R³ is C₅-C₁₂ alkyl. In some embodiments, Lipids of the Disclosure have a structure of Formula (VIII-B), wherein R^{2′} is C₅-C₁₂ alkyl. In some embodiments, Lipids of the Disclosure have a structure of Formula (VIII-B), wherein R^{3′} is C₅-C₁₂ alkyl.

### Formula (X)

[1627] In some embodiments, Lipids of the Disclosure have a structure of Formula (X):

[chemical structure]

or a pharmaceutically acceptable salt thereof, wherein
[1628] each cc is independently selected from 3 to 9;
   [1629] R^{xx} is selected from hydrogen and optionally substituted C₁-C₆ alkyl; and
   [1630] (i) ee is 1,
      [1631] each dd is independently selected from 1 to 4; and
   [1632] each R^{ww} is independently selected from the group consisting of C₄-C₁₄ alkyl, branched C₄-C₁₂ alkenyl, C₄-C₁₂ alkenyl comprising at least two double bonds, and C₉-C₁₂ alkenyl, wherein any —(CH₂)₂— of the C₄-C₁₄ alkyl can be optionally replaced with C₂-C₆ cycloalkylenyl;
   [1633] (ii) ee is 0,
      [1634] each dd is 1; and
      [1635] each R^{ww} is linear C₄-C₁₂ alkyl.

[1636] In some embodiments, Lipids of the Disclosure have a structure of Formula (X), wherein R^{xx} is H. In some embodiments, Lipids of the Disclosure have a structure of Formula (X), wherein R^{xx} is optionally substituted C₁-C₆ alkyl. In some embodiments, Lipids of the Disclosure have a structure of Formula (X), wherein R^{xx} is C₁ alkyl. In some embodiments, Lipids of the Disclosure have a structure of Formula (X), wherein R^{xx} is C₂ alkyl. In some embodiments, Lipids of the Disclosure have a structure of Formula (X), wherein R^{xx} is C₃ alkyl. In some embodiments, Lipids of the Disclosure have a structure of Formula (X), wherein R^{xx} is C₄ alkyl. In some embodiments, Lipids of the Disclosure have a structure of Formula (X), wherein R^{xx} is C₅ alkyl. In some embodiments, Lipids of the Disclosure have a structure of Formula (X), wherein R^{xx} is C₆ alkyl.

[1637] In some embodiments, Lipids of the Disclosure have a structure of Formula (X), wherein each R^{ww} is independently selected from the group consisting of C₄-C₁₄ alkyl, branched C₄-C₁₂ alkenyl, C₄-C₁₂ alkenyl comprising at least two double bonds, and C₉-C₁₂ alkenyl, wherein any —(CH₂)₂— of the C₄-C₁₄ alkyl can be optionally replaced with C₂-C₆ cycloalkylenyl. In some embodiments, Lipids of the Disclosure have a structure of Formula (X), wherein each R^{ww} is C₄-C₁₄ alkyl, wherein any —(CH₂)₂— of the C₄-C₁₄ alkyl can be optionally replaced with C₂-C₆ cycloalkylenyl. In some embodiments, Lipids of the Disclosure have a structure of Formula (X), wherein each R^{ww} is C₄-C₁₄ alkyl, wherein any —(CH₂)₂— of the C₄-C₁₄ alkyl can be optionally replaced with cyclopropylene. In some embodiments, Lipids of the Disclosure have a structure of Formula (X), wherein each R^{ww} is branched C₄-C₁₂ alkenyl. In some embodiments, Lipids of the Disclosure have a structure of Formula (X), wherein each R^{ww} is C₄-C₁₂ alkenyl comprising at least two double bonds. In some embodiments, Lipids of the Disclosure have a structure of Formula (X), wherein each R^{ww} is C₉-C₁₂ alkenyl. In some embodiments, Lipids of the Disclosure have a structure of Formula (X), wherein each R^{ww} is linear C₄-C₁₂ alkyl. In some embodiments, Lipids of the Disclosure have a structure of Formula (X), wherein each R^{ww} is independently selected from the group consisting of C₆-C₁₄ alkyl, branched C₈-C₁₂ alkenyl, C₈-C₁₂ alkenyl comprising at least two double bonds, and C₉-C₁₂ alkenyl, wherein any —(CH₂)₂— of the C₆-C₁₄ alkyl can be optionally replaced with cyclopropylene. In some embodiments, Lipids of the Disclosure have a structure of Formula (X), wherein each R^{ww} is C₆-C₁₄ alkyl, wherein any —(CH₂)₂— of the C₆-C₁₄ alkyl can be optionally replaced with cyclopropylene. In some embodiments, Lipids of the Disclosure have a structure of Formula (X), wherein each R^{ww} is branched C₈-C₁₂ alkenyl, e.g., (linear or branched C₃-C₆ alkylenyl)-(branched C₅-C₇alkenyl), e.g., (branched C₅ alkylenyl)-(branched C₅alkenyl), e.g.,

[chemical structure]

[1638] In some embodiments, Lipids of the Disclosure have a structure of Formula (X), wherein each R^{ww} is C₈-C₁₂ alkenyl comprising at least two double bonds. In some embodiments, Lipids of the Disclosure have a structure of Formula (X), wherein each R^{ww} is C₉-C₁₂ alkenyl.

[1639] In some embodiments, Lipids of the Disclosure have a structure of Formula (X), wherein each R^{ww} is independently selected from the group consisting of C₆-C₁₄ alkyl (e.g., C₆, C₈, C₉, C₁₀, C₁₁, C₁₃ alkyl), wherein any —(CH₂)₂— of the C₆-C₁₄ alkyl can be optionally replaced with cyclopropylene.

[1640] In some embodiments, Lipids of the Disclosure have a structure of Formula (X), wherein each R′ is independently branched C₈-C₁₂ alkenyl (e.g., branched C₁₀ alkenyl).

[1641] In some embodiments, Lipids of the Disclosure have a structure of Formula (X), wherein each R^{ww} is independently C₈-C₁₂ alkenyl comprising at least two double bonds (e.g., C₉ or C₁₀ alkenyl comprising two double bonds).

[1642] In some embodiments, Lipids of the Disclosure have a structure of Formula (X), wherein each R^{ww} is independently (C₁ alkylenyl)-(cyclopropylene-C₆ alkyl) or (C₂ alkylenyl)-(cyclopropylene-C₂ alkyl). In some embodiments, Lipids of the Disclosure have a structure of Formula (X), wherein each R″ is independently (C₁ alkylenyl)-(cyclopropylene-C₆ alkyl). In some embodiments, Lipids of the Disclosure have a structure of Formula (X), wherein each R^{ww} is independently (C₂ alkylenyl)-(cyclopropylene-C₂ alkyl).

[1643] In some embodiments, Lipids of the Disclosure have a structure of Formula (X), wherein each R^{ww} is C₄ alkyl. In some embodiments, Lipids of the Disclosure have a structure of Formula (X), wherein each R^{ww} is C₅ alkyl. In some embodiments, Lipids of the Disclosure have a structure of Formula (X), wherein each R^{ww} is C₆ alkyl. In some embodiments, Lipids of the Disclosure have a structure of Formula (X), wherein each R^{ww} is C₇ alkyl. In some embodiments, Lipids of the Disclosure have a structure of Formula (X), wherein each R^{ww} is C₈ alkyl. In some embodiments, Lipids of the Disclosure have a structure of Formula (X), wherein each R^{ww} is C₉ alkyl. In some embodiments, Lipids of the Disclosure have a structure of Formula (X), wherein each R^{ww} is C₁₀ alkyl. In some embodiments, Lipids of the Disclosure have a structure of Formula (X), wherein each R^{ww} is C₁₁ alkyl. In some embodiments, Lipids of the Disclosure have a structure of Formula (X), wherein each R^{ww} is C₁₂ alkyl. In some embodiments, Lipids of the Disclosure have a structure of Formula (X), wherein each R^{ww} is C₁₃ alkyl. In some embodiments, Lipids of the Disclosure have a structure of Formula (X), wherein each R^{ww} is C₁₄ alkyl.

[1644] In some embodiments, Lipids of the Disclosure have a structure of Formula (X), wherein each R^{ww} is C₉ alkenyl. In some embodiments, Lipids of the Disclosure have a structure of Formula (X), wherein each R^{ww} is C₁₀ alkenyl. In some embodiments, Lipids of the Disclosure have a structure of Formula (X), wherein each R^{ww} is C₁₁ alkenyl. In some embodiments, Lipids of the Disclosure have a structure of Formula (X), wherein each R^{ww} is C₁₂ alkenyl.

[1645] In some embodiments, Lipids of the Disclosure have a structure of Formula (X), wherein each R^{ww} is C₈ alkenyl comprising at least two double bonds. In some embodiments, Lipids of the Disclosure have a structure of Formula (X), wherein each R^{ww} is C₉ alkenyl comprising at least two double bonds. In some embodiments, Lipids of the Disclosure have a structure of Formula (X), wherein each R^{ww} is C₁₀ alkenyl comprising at least two double bonds. In some embodiments, Lipids of the Disclosure have a structure of Formula (X), wherein each R^{ww} is C₁₁ alkenyl comprising at least two double bonds. In some embodiments, Lipids of the Disclosure have a structure of Formula (X), wherein each R^{ww} is C₁₂ alkenyl comprising at least two double bonds. In some embodiments, Lipids of the Disclosure have a structure of Formula (X), wherein each R^{ww} is C₁₃ alkenyl comprising at least two double bonds. In some embodiments, Lipids of the Disclosure have a structure of Formula (X), wherein each R^{ww} is C₁₄ alkenyl comprising at least two double bonds.

[1646] In some embodiments, Lipids of the Disclosure have a structure of Formula (X), wherein each R^{ww} is C₉ alkyl, wherein one —(CH₂)₂— of the C₉ alkyl is replaced with C₂-C₆ cycloalkylenyl. In some embodiments, Lipids of the Disclosure have a structure of Formula (X), wherein each R^{ww} is C₉ alkyl, wherein one —(CH₂)₂— of the C₉ alkyl is replaced with cyclopropylene. In some embodiments, Lipids of the Disclosure have a structure of Formula (X), wherein each R^{ww} is C₉ alkyl, wherein two —(CH₂)₂— of the C₉ alkyl are replaced with C₂-C₆ cycloalkylenyl. In some embodiments, Lipids of the Disclosure have a structure of Formula (X), wherein each R^{ww} is C₉ alkyl, wherein two —(CH₂)₂— of the C₉ alkyl are replaced with cyclopropylene.

[1647] In some embodiments, Lipids of the Disclosure have a structure of Formula (X), wherein each R^{ww} is linear C₄ alkyl. In some embodiments, Lipids of the Disclosure have a structure of Formula (X), wherein each R^{ww} is linear C₅ alkyl. In some embodiments, Lipids of the Disclosure have a structure of Formula (X), wherein each R^{ww} is linear C₆ alkyl. In some embodiments, Lipids of the Disclosure have a structure of Formula (X), wherein each R^{ww} is linear C₇ alkyl. In some embodiments, Lipids of the Disclosure have a structure of Formula (X), wherein each R^{ww} is linear C₈ alkyl. In some embodiments, Lipids of the Disclosure have a structure of Formula (X), wherein each R^{ww} is linear C9 alkyl. In some embodiments, Lipids of the Disclosure have a structure of Formula (X), wherein each R^{ww} is linear C₁₀ alkyl. In some embodiments, Lipids of the Disclosure have a structure of Formula (X), wherein each R^{ww} is linear C₁₁ alkyl. In some embodiments, Lipids of the Disclosure have a structure of Formula (X), wherein each R^{ww} is linear C₁₂ alkyl. In some embodiments, Lipids of the Disclosure have a structure of Formula (X), wherein each R^{ww} is linear C₁₃ alkyl. In some embodiments, Lipids of the Disclosure have a structure of Formula (X), wherein each R^{ww} is linear C₁₄ alkyl.

[1648] In some embodiments, Lipids of the Disclosure have a structure of Formula (X), wherein each R^{ww} is branched C₈ alkenyl. In some embodiments, Lipids of the Disclosure have a structure of Formula (X), wherein each R^{ww} is branched C_{q} alkenyl. In some embodiments, Lipids of the Disclosure have a structure of Formula (X), wherein each R^{ww} is branched C₁₀ alkenyl. In some embodiments, Lipids of the Disclosure have a structure of Formula (X), wherein each R^{ww} is branched C₁₁ alkenyl. In some embodiments, Lipids of the Disclosure have a structure of Formula (X), wherein each R^{ww} is branched C₁₂ alkenyl.

[1649] In some embodiments, Lipids of the Disclosure have a structure of Formula (X), wherein each cc is independently selected from 3 to 7. In some embodiments, Lipids of the Disclosure have a structure of Formula (X), wherein each cc is 3. In some embodiments, Lipids of the Disclosure have a structure of Formula (X), wherein each cc is 4. In some embodiments, Lipids of the Disclosure have a structure of Formula (X), wherein each cc is 5. In some embodiments, Lipids of the Disclosure have a structure of Formula (X), wherein each cc is 6. In some embodiments, Lipids of the Disclosure have a structure of Formula (X), wherein each cc is 7. In some embodiments, Lipids of the Disclosure have a structure of Formula (X), wherein each cc is 8. In some embodiments, Lipids of the Disclosure have a structure of Formula (X), wherein each cc is 9.

[1650] In some embodiments, Lipids of the Disclosure have a structure of Formula (X), wherein each dd is independently selected from 1 to 4. In some embodiments, Lipids of the Disclosure have a structure of Formula (X), wherein each dd is 1. In some embodiments, Lipids of the Disclosure have a structure of Formula (X), wherein each dd is 2. In some embodiments, Lipids of the Disclosure have a structure of Formula (X), wherein each dd is 3. In some embodiments, Lipids of the Disclosure have a structure of Formula (X), wherein each dd is 4.

[1651] In some embodiments, Lipids of the Disclosure have a structure of Formula (X), wherein ee is 1.

[1652] In some embodiments, Lipids of the Disclosure have a structure of Formula (X), wherein ee is 0.

### Formula (X-A)

[1653] In some embodiments, Lipids of the Disclosure have a structure of Formula (X), wherein the Lipids of the Disclosure have a structure of Formula (X-A):

[chemical structure]

or a pharmaceutically acceptable salt thereof, wherein
[1654] each cc is independently selected from 3 to 7;
   [1655] each dd is independently selected from 1 to 4;
   [1656] R^{ww} is selected from hydrogen and optionally substituted C₁-C₆ alkyl; and
   [1657] each R^{ww} is independently selected from the group consisting of C₄-C₁₄ alkyl or (linear or branched C₃-C₅ alkylenyl)-(branched C₅-C₇alkenyl).

[1658] In some embodiments, Lipids of the Disclosure have a structure of Formula (X-A), wherein R^{xx} is hydrogen. In some embodiments, Lipids of the Disclosure have a structure of Formula (X-A), wherein R^{xx} is C₁ alkyl. In some embodiments, Lipids of the Disclosure have a structure of Formula (X-A), wherein R^{xx} is C₂ alkyl. In some embodiments, Lipids of the Disclosure have a structure of Formula (X-A), wherein R^{xx} is C₃ alkyl. In some embodiments, Lipids of the Disclosure have a structure of Formula (X-A), wherein R^{xx} is C₄ alkyl. In some embodiments, Lipids of the Disclosure have a structure of Formula (X-A), wherein R^{xx} is C₅ alkyl. In some embodiments, Lipids of the Disclosure have a structure of Formula (X-A), wherein R^{xx} is C₆ alkyl.

[1659] In some embodiments, Lipids of the Disclosure have a structure of Formula (X-A), wherein each cc is 4, 5, 6, or 7. In some embodiments, Lipids of the Disclosure have a structure of Formula (X-A), wherein each cc is 3. In some embodiments, Lipids of the Disclosure have a structure of Formula (X-A), wherein each cc is 4. In some embodiments, Lipids of the Disclosure have a structure of Formula (X-A), wherein each cc is 5. In some embodiments, Lipids of the Disclosure have a structure of Formula (X-A), wherein each cc is 6. In some embodiments, Lipids of the Disclosure have a structure of Formula (X-A), wherein each cc is 7.

[1660] In some embodiments, Lipids of the Disclosure have a structure of Formula (X-A), wherein each dd is 1 or 3. In some embodiments, Lipids of the Disclosure have a structure of Formula (X-A), wherein each dd is 1. In some embodiments, Lipids of the Disclosure have a structure of Formula (X-A), wherein each dd is 2. In some embodiments, Lipids of the Disclosure have a structure of Formula (X-A), wherein each dd is 3. In some embodiments, Lipids of the Disclosure have a structure of Formula (X-A), wherein each dd is 4.

[1661] In some embodiments, Lipids of the Disclosure have a structure of Formula (X-A), wherein each R^{ww} is C₄-C₁₄ alkyl. In some embodiments, Lipids of the Disclosure have a structure of Formula (X-A), wherein each R^{ww} is C₄ alkyl. In some embodiments, Lipids of the Disclosure have a structure of Formula (X-A), wherein each R^{ww} is C₅ alkyl. In some embodiments, Lipids of the Disclosure have a structure of Formula (X-A), wherein each R^{ww} is C₆ alkyl. In some embodiments, Lipids of the Disclosure have a structure of Formula (X-A), wherein each R^{ww} is C₇ alkyl. In some embodiments, Lipids of the Disclosure have a structure of Formula (X-A), wherein each R^{ww} is C₈ alkyl. In some embodiments, Lipids of the Disclosure have a structure of Formula (X-A), wherein each R^{ww} is C₉ alkyl. In some embodiments, Lipids of the Disclosure have a structure of Formula (X-A), wherein each R^{ww} is C₁₀ alkyl. In some embodiments, Lipids of the Disclosure have a structure of Formula (X-A), wherein each R^{ww} is C₁₁ alkyl. In some embodiments, Lipids of the Disclosure have a structure of Formula (X-A), wherein each R^{ww} is C₁₂ alkyl. In some embodiments, Lipids of the Disclosure have a structure of Formula (X-A), wherein each R^{ww} is C₁₃ alkyl. In some embodiments, Lipids of the Disclosure have a structure of Formula (X-A), wherein each R^{ww} is C₁₄ alkyl.

[1662] In some embodiments, Lipids of the Disclosure have a structure of Formula (X-A), wherein each R^{ww} is (linear or branched C₃-C₅ alkylenyl)-(branched C₅-C₇alkenyl), e.g., (branched C₅ alkylenyl)-(branched C₅alkenyl), e.g.,

[chemical structure]

[1663] In some embodiments, Lipids of the Disclosure comprise an acyclic core. In some embodiments, Lipids of the Disclosure are selected from any lipid in Table (I) below or a pharmaceutically acceptable salt thereof:

TABLE (I)
Non-Limiting Examples of Ionizable Lipids with an Acyclic Core

| | Com- |
|---|---|
| | pound |
| Structure | No. |
| [chemical structure] | 1 |
| [chemical structure] | 2 |
| [chemical structure] | 3 |
| [chemical structure] | 4 |
| [chemical structure] | 5 |
| [chemical structure] | 6 |
| [chemical structure] | 7 |
| [chemical structure] | 8 |
| [chemical structure] | 9 |
| [chemical structure] | 10 |
| [chemical structure] | 11 |
| [chemical structure] | 13 |
| [chemical structure] | 14 |
| [chemical structure] | 15 |
| [chemical structure] | 16 |
| [chemical structure] | 17 |
| [chemical structure] | 18 |
| [chemical structure] | 19 |
| [chemical structure] | 20 |
| [chemical structure] | 21 |
| [chemical structure] | 22 |
| [chemical structure] | 23 |
| [chemical structure] | 24 |
| [chemical structure] | 25 |
| [chemical structure] | 26 |
| [chemical structure] | 27 |
| [chemical structure] | 28 |
| [chemical structure] | 29 |
| [chemical structure] | 30 |
| [chemical structure] | 31 |
| [chemical structure] | 32 |
| [chemical structure] | 33 |
| [chemical structure] | 34 |
| [chemical structure] | 35 |
| [chemical structure] | 36 |
| [chemical structure] | 37 |
| [chemical structure] | 38 |
| [chemical structure] | 39 |
| [chemical structure] | 40 |
| [chemical structure] | 41 |
| [chemical structure] | 42 |
| [chemical structure] | 43 |
| [chemical structure] | 44 |
| [chemical structure] | 45 |
| [chemical structure] | 46 |
| [chemical structure] | 47 |
| [chemical structure] | 48 |
| [chemical structure] | 49 |
| [chemical structure] | 50 |
| [chemical structure] | 51 |
| [chemical structure] | 52 |
| [chemical structure] | 53 |
| [chemical structure] | 54 |
| [chemical structure] | 55 |
| [chemical structure] | 56 |
| [chemical structure] | 57 |
| [chemical structure] | 58 |
| [chemical structure] | 59 |
| [chemical structure] | 60 |
| [chemical structure] | 61 |
| [chemical structure] | 62 |
| [chemical structure] | 64 |
| [chemical structure] | 65 |
| [chemical structure] | 66 |
| [chemical structure] | 67 |
| [chemical structure] | 68 |
| [chemical structure] | 69 |
| [chemical structure] | 70 |
| [chemical structure] | 71 |
| [chemical structure] | 72 |
| [chemical structure] | 73 |
| [chemical structure] | 74 |
| [chemical structure] | 75 |
| [chemical structure] | 76 |
| [chemical structure] | 77 |
| [chemical structure] | 78 |
| [chemical structure] | 79 |
| [chemical structure] | 80 |
| [chemical structure] | 81 |
| [chemical structure] | 82 |
| [chemical structure] | 83 |
| [chemical structure] | 84 |
| [chemical structure] | 85 |
| [chemical structure] | 86 |
| [chemical structure] | 87 |
| [chemical structure] | 88 |
| [chemical structure] | 89 |

[1664] In some embodiments, an LNP of the present disclosure comprises an ionizable lipid disclosed in PCT Application Publication WO2023044333A1, which is incorporated by reference herein, in its entirety.

### Formula (CY)

[1665] In some embodiments, an LNP disclosed herein comprises an ionizable lipid of Formula (CY)

[chemical structure]

or a pharmaceutically acceptable salt thereof,
[1666] wherein:
[1667] R is selected from the group consisting of —OH, —OAc, R^{1a},

[chemical structure]

[1668] Z¹ is optionally substituted C₁-C₆ alkyl;
[1669] X¹ is optionally substituted C₂-C₆ alkylenyl;
[1670] X² is selected from the group consisting of a bond, —CH₂— and —CH₂CH₂—;
[1671] X^{2′} is selected from the group consisting of a bond, —CH₂— and —CH₂CH₂—;
[1672] X³ is selected from the group consisting of a bond, —CH₂— and —CH₂CH₂—;
[1673] X^{3′} is selected from the group consisting of a bond, —CH₂— and —CH₂CH₂—;
[1674] X⁴ and X⁵ are independently optionally substituted C₂-C₁₄ alkylenyl or optionally substituted C₂-C₁₄ alkenylenyl;
[1675] Y¹ and Y² are independently selected from the group consisting of

[chemical structure]

[1676] wherein the bond marked with an “*” is attached to X⁴ or X;
[1677] each Z² is independently H or optionally substituted C₁-C₈ alkyl;
[1678] each Z³ is independently optionally substituted C₁-C₆ alkylenyl;
[1679] R² is selected from the group consisting of optionally substituted C₄-C₂₀ alkyl, optionally substituted C₂-C₁₄ alkenyl, and —(CH₂)ₚCH(OR⁶)(OR⁷);
[1680] R³ is selected from the group consisting of optionally substituted C₄-C₂₀ alkyl, optionally substituted C₂-C₁₄ alkenyl, or —(CH₂)CH(OR⁸)(OR⁹);
[1681] R¹¹ is:

[chemical structure]

[1682] R^{2a}, R^{2b}, and R^{2c} are independently hydrogen and C₁-C₆ alkyl;
[1683] R^{3a}, R^{3b}, and R^{3c} are independently hydrogen and C₁-C₆ alkyl;
[1684] R^{4a}, R^{4b}, and R^{4c} are independently hydrogen and C₁-C₆ alkyl;
[1685] R^{5a}, R^{5b}, and R^{5c} are independently hydrogen and C₁-C₆ alkyl;
[1686] R⁶, R⁷, R⁸, and R⁹ are independently optionally substituted C₁-C₁₄ alkyl, optionally substituted C₂-C₁₄ alkenyl, or —(CH₂)ₘ-A-(CH₂)ₙH;
[1687] each A is independently a C₃-C₈ cycloalkylenyl;
[1688] each m is independently 0, 1, 2, 3, 4, 5, 6, 7, 8, 9, 10, 11, or 12;
[1689] each n is independently 0, 1, 2, 3, 4, 5, 6, 7, 8, 9, 10, 11, or 12;
[1690] p is selected from the group consisting of 0, 1, 2, 3, 4, 5, 6, and 7; and
[1691] q is selected from the group consisting of 0, 1, 2, 3, 4, 5, 6, and 7.

### Formulas (CY-I), (CY-II), (CY-III), (CY-IV), and (CY-V)

[1692] In some embodiments, the present disclosure includes a compound of Formula (CY-I), (CY-II), (CY-III), (CY-IV), or (CY-V):

[chemical structure]

or a pharmaceutically acceptable salt thereof,
[1693] wherein X¹, X², X², X³, X^{3′}, X⁴, X⁵, Y¹, Y², R, R², and R³ are defined herein.

### Formulas (CY-VI) and (CY-VII)

[1694] In some embodiments, the present disclosure includes a compound of Formula (CY-VI) or (CY-VII):

[chemical structure]

or a pharmaceutically acceptable salt thereof,
[1695] wherein X¹, X⁴, X⁵, R¹, R², and R³ are defined herein.

### Formulas (CY-VIII) and (CY-IX)

[1696] In some embodiments, the present disclosure includes a compound of Formula (CY-VIII) or (CY-IX):

[chemical structure]

or pharmaceutically acceptable salt thereof
[1697] wherein X¹, X⁴, X⁵, R¹, R², and R³ are defined herein.

### Formulas (CY-IV-a), (CY-IV-b), and (CY-IV-c)

[1698] In some embodiments, the present disclosure includes a compound of Formula (CY-IV-a), (CY-IV-b), or (CY-IV-c)

[chemical structure]

or pharmaceutically acceptable salt thereof.
[1699] wherein X¹, X⁴, X⁵, R², and R³ are defined herein. Formulas (CY-IV-d), (CY-IV-e), and (CY-IV-f)

[1700] In some embodiments, the present disclosure includes a compound of Formula (CY-IV-d), (CY-IV-e), or (CY-IV-f)

[chemical structure]

or pharmaceutically acceptable salt thereof.
[1701] wherein X¹, X⁴, X⁵, R², and R³ are defined herein.

### Formula CY-IV

[1702] In some embodiments, Lipids of the Disclosure have a structure of Formula (CY-IV′):

[chemical structure]

or a pharmaceutically acceptable salt thereof, wherein R¹, R², R³, X¹, X², X³, X⁴, X⁵, Y¹, and Y² are as defined in connection with Formula (CY-I′).

[1703] In some embodiments, Lipids of the Disclosure have a structure of Formula (CY-IV′), wherein:

[chemical structure]

wherein Z¹ is optionally substituted C₁-C₆ alkyl;
[1704] X¹ is optionally substituted C₂-C₆ alkylenyl;
[1705] X² and X³ are independently a bond, —CH₂—, or —CH₂CH₂—;
[1706] X⁴ and X are independently optionally substituted C₂-C₁₄ alkylenyl;
[1707] Y¹ and Y² are independently

[chemical structure]

[1708] R² and R³ are independently optionally substituted C₄-C₂₀ alkyl;
[1709] R^{1a} is:

[chemical structure]

[1710] R^{2a}, R^{2b}, and R^{2c} are independently hydrogen and C₁-C₆ alkyl;
[1711] R^{3a}, R^{3b}, and R^{3c} are independently hydrogen and C₁-C₆ alkyl;
[1712] R^{4a}, R^{4b}, and R^{4c} are independently hydrogen and C₁-C₆ alkyl; and
[1713] R^{5a}, R^{5b}, and R^{5c} are independently hydrogen and C₁-C₆ alkyl

[1714] In some embodiments, Lipids of the Disclosure have a structure of Formula (CY-IV′), wherein R¹ is —OH,

[chemical structure]

[1715] In some embodiments, Lipids of the Disclosure have a structure of Formula (CY-IV′), wherein Y¹ and Y² are independently:

[chemical structure]

[1716] In some embodiments, Lipids of the Disclosure have a structure of Formula (CY-IV′), wherein R² is —CH(OR⁶)(OR⁷).

[1717] In some embodiments, Lipids of the Disclosure have a structure of Formula (CY-IV′), wherein R³ is —CH(OR⁸)(OR⁹).

[1718] Non-limiting examples of lipids having a structure of Formula (CY-IV′) include compounds CY7, CY8, CY19, CY20, CY21, CY28, CY29, CY40, CY41, CY42, CY48, CY49, CY58, CY59, and CY60.

### Formula (CY-VI′)

[1719] In some embodiments, Lipids of the Disclosure have a structure of Formula (CY-VI′):

[chemical structure]

or a pharmaceutically acceptable salt thereof, wherein R¹, R⁶, R⁷, R⁸, R⁹, X¹, X², X³, X⁴, X⁵, Y¹, and Y² are as defined in connection with Formula (CY-I′).

[1720] In some embodiments, Lipids of the Disclosure have a structure of Formula (CY-VI′), or a pharmaceutically acceptable salt thereof, wherein R¹ is —OH.

[1721] In some embodiments, Lipids of the Disclosure have a structure of Formula (CY-VI′), or a pharmaceutically acceptable salt thereof, wherein X¹ is C₂-C₆ alkylenyl.

[1722] In some embodiments, Lipids of the Disclosure have a structure of Formula (CY-VI′), or a pharmaceutically acceptable salt thereof, wherein X² is —CH₂CH₂—.

[1723] In some embodiments, Lipids of the Disclosure have a structure of Formula (CY-VI′), or a pharmaceutically acceptable salt thereof, wherein X⁴ is C₂-C₆ alkylenyl.

[1724] In some embodiments, Lipids of the Disclosure have a structure of Formula (CY-VI′), or a pharmaceutically acceptable salt thereof, wherein X⁵ is C₂-C₆ alkylenyl.

[1725] In some embodiments, Lipids of the Disclosure have a structure of Formula (CY-VI′), or a pharmaceutically acceptable salt thereof, wherein Y¹ is:

[chemical structure]

[1726] In some embodiments, Lipids of the Disclosure have a structure of Formula (CY-VI′), or a pharmaceutically acceptable salt thereof, wherein Y² is:

[chemical structure]

[1727] In some embodiments, Lipids of the Disclosure have a structure of Formula (CY-VI′), or a pharmaceutically acceptable salt thereof, wherein each Z³ is independently optionally substituted C₁-C₆ alkylenyl.

[1728] In some embodiments, Lipids of the Disclosure have a structure of Formula (CY-VI′), or a pharmaceutically acceptable salt thereof, wherein each Z³ is —CH₂CH₂—.

[1729] In some embodiments, Lipids of the Disclosure have a structure of Formula (CY-VI′), or a pharmaceutically acceptable salt thereof, wherein R⁶ is C₅-C₁₄ alkyl.

[1730] In some embodiments, Lipids of the Disclosure have a structure of Formula (CY-VI′), or a pharmaceutically acceptable salt thereof, wherein R⁷ is C₅-C₁₄ alkyl.

[1731] In some embodiments, Lipids of the Disclosure have a structure of Formula (CY-VI′), or a pharmaceutically acceptable salt thereof, wherein R⁶ is C₆-C₁₄ alkenyl.

[1732] In some embodiments, Lipids of the Disclosure have a structure of Formula (CY-VI′), or a pharmaceutically acceptable salt thereof, wherein R⁷ is C₆-C₁₄ alkenyl.

[1733] In some embodiments, Lipids of the Disclosure have a structure of Formula (CY-VI′), or a pharmaceutically acceptable salt thereof, wherein R⁸ is C₅-C₁₆ alkyl.

[1734] In some embodiments, Lipids of the Disclosure have a structure of Formula (CY-VI′), or a pharmaceutically acceptable salt thereof, wherein R⁹ is C₅-C₁₄ alkyl.

[1735] In some embodiments, Lipids of the Disclosure have a structure of Formula (CY-VI′), or a pharmaceutically acceptable salt thereof, wherein R⁸ is C₆-C₁₄ alkenyl.

[1736] In some embodiments, Lipids of the Disclosure have a structure of Formula (CY-VI′), or a pharmaceutically acceptable salt thereof, wherein R⁹ is C₆-C₁₄ alkenyl.

[1737] In some embodiments, Lipids of the Disclosure comprise a heterocyclic core, wherein the heteroatom is nitrogen. In some embodiments, the heterocyclic core comprises pyrrolidine or a derivative thereof. In some embodiments, the heterocyclic core comprises piperidine or a derivative thereof. In some embodiments, Lipids of the Disclosure are selected from any lipid in Table (II) below or a pharmaceutically acceptable salt thereof:

### R¹

[1738] In some embodiments, R′ is selected from the group consisting of —OH, —OAc, R^{1a},

[chemical structure]

[1739] In some embodiments, R¹ is —OH or —OAc. In some embodiments, R¹ is OH. In some embodiments, R¹ is —OAc. In some embodiments, R¹ is R^{1a}. In some embodiments, R¹ is imidazolyl.

[1740] In some embodiments, R¹ is

[chemical structure]

### R²

[1741] In some embodiments, R² is selected from the group consisting of optionally substituted C₄-C₂₀ alkyl, optionally substituted C₂-C₁₄ alkenyl, and —(CH₂)ₚCH(OR⁶)(OR⁷).

[1742] In some embodiments, R² is optionally substituted C₄-C₂₀ alkyl. In some embodiments, R² is optionally substituted C₈-C₁₇ alkyl. In some embodiments, R² is optionally substituted C₉-C₁₆ alkyl. In some embodiments, R² is optionally substituted C₈-C₁₀ alkyl. In some embodiments, R² is optionally substituted C₁₁-C₁₃ alkyl. In some embodiments, R² is optionally substituted C14-C₁₆ alkyl. In some embodiments, R² is optionally substituted C₉ alkyl. In some embodiments, R² is optionally substituted C₁₀ alkyl. In some embodiments, R² is optionally substituted C₁₁ alkyl. In some embodiments, R² is optionally substituted C₁₂ alkyl. In some embodiments, R² is optionally substituted C₁₃ alkyl. In some embodiments, R² is optionally substituted C14 alkyl. In some embodiments, R² is optionally substituted C₁₅ alkyl. In some embodiments, R² is optionally substituted C₁₆ alkyl.

[1743] In some embodiments, R² is optionally substituted C₂-C₁₄ alkenyl. In some embodiments, R² is optionally substituted C₅-C₁₄ alkenyl. In some embodiments, R² is optionally substituted C₇-C₁₄ alkenyl. In some embodiments, R² is optionally substituted C₉-C₁₄ alkenyl. In some embodiments, R² is optionally substituted C₁₀-C₁₄ alkenyl. In some embodiments, R² is optionally substituted C₁₂-C₁₄ alkenyl.

[1744] In some embodiments, R² is —(CH₂)ₚCH(OR⁶)(OR⁷). In some embodiments, R² is —CH(OR⁶)(OR⁷). In some embodiments, R² is —CH₂CH(OR⁶)(OR⁷). In some embodiments, R² is —(CH₂)₂CH(OR⁶)(OR⁷). In some embodiments, R² is —(CH₂)₃CH(OR⁶)(OR⁷). In some embodiments, R² is —(CH₂)₄CH(OR⁶)(OR⁷).

[1745] In some embodiments, R² is selected from the group consisting of

[chemical structure]

### R³

[1746] In some embodiments, R³ is selected from the group consisting of optionally substituted C₄-C₂₀ alkyl, optionally substituted C₂-C₁₄ alkenyl, and —(CH₂)_{q}CH(OR⁶)(OR⁷).

[1747] In some embodiments, R³ is optionally substituted C₄-C₂₀ alkyl. In some embodiments, R³ is optionally substituted C₈-C₁₇ alkyl. In some embodiments, R³ is optionally substituted C₉-C₁₆ alkyl. In some embodiments, R³ is optionally substituted C₈-C₁₀ alkyl. In some embodiments, R³ is optionally substituted C₁₁-C₁₃ alkyl. In some embodiments, R³ is optionally substituted C₁₄-C₁₆ alkyl. In some embodiments, R³ is optionally substituted C₉ alkyl. In some embodiments, R³ is optionally substituted C₁₀ alkyl. In some embodiments, R³ is optionally substituted C₁₁ alkyl. In some embodiments, R³ is optionally substituted C12 alkyl. In some embodiments, R³ is optionally substituted C₁₃ alkyl. In some embodiments, R³ is optionally substituted C₁₄ alkyl. In some embodiments, R³ is optionally substituted C₁₅ alkyl. In some embodiments, R³ is optionally substituted C₁₆ alkyl.

[1748] In some embodiments, R³ is optionally substituted C₂-C₁₄ alkenyl. In some embodiments, R³ is optionally substituted C₅-C₁₄ alkenyl. In some embodiments, R³ is optionally substituted C₇-C₁₄ alkenyl. In some embodiments, R³ is optionally substituted C₉-C₁₄ alkenyl. In some embodiments, R³ is optionally substituted C₁₀-C₁₄ alkenyl. In some embodiments, R³ is optionally substituted C₁₂-C₁₄ alkenyl.

[1749] In some embodiments, R³ is —(CH₂)_{q}CH(OR⁸)(OR⁹). In some embodiments, R³ is —CH(OR⁸)(OR⁹). In some embodiments, R³ is —CH₂CH(OR⁸)(OR⁹). In some embodiments, R³ is —(CH₂)₂CH(OR⁸)(OR⁹). In some embodiments, R³ is —(CH₂)₃CH(OR⁸)(OR⁹). In some embodiments, R³ is —(CH₂)₄CH(OR⁸)(OR⁹).

[1750] In some embodiments, R³ is selected from the group consisting of

[chemical structure]

R⁶, R⁷, R⁸, R⁹

[1751] In some embodiments, R⁶, R⁷, R⁸, and R⁹ are independently optionally substituted C₁-C₁₄ alkyl, optionally substituted C₂-C₁₄ alkenyl, or —(CH₂)ₘ-A-(CH₂)ₙH. In some embodiments, R⁶, R⁷, R⁸, and R⁹ are independently optionally substituted C₁-C₁₄ alkyl. In some embodiments, R⁶, R⁷, R⁸, and R⁹ are independently optionally substituted C₂-C₁₄ alkenyl. In some embodiments, R⁶, R⁷, R⁸, and R⁹ are independently —(CH₂)ₘ-A-(CH₂)ₙH.

[1752] In some embodiments, R⁶ is optionally substituted C₁-C₁₄ alkyl, optionally substituted C₂-C₁₄ alkenyl, or —(CH₂)ₘ-A-(CH₂)ₙH. In some embodiments, R⁶ is optionally substituted C₃-C₁₀ alkyl. In some embodiments, R⁶ is optionally substituted C₄-C₁₀ alkyl. In some embodiments, R⁶ is independently optionally substituted C₅-C₁₀ alkyl. In some embodiments, R⁶ is optionally substituted C₉-C₁₀ alkyl. In some embodiments, R⁶ is optionally substituted C₁-C₁₄ alkyl. In some embodiments, R⁶ is optionally substituted C₂-C₁₄ alkenyl. In some embodiments, R⁶ is —(CH₂)ₘ-A-(CH₂)ₙH.

[1753] In some embodiments, R⁷ is optionally substituted C₁-C₁₄ alkyl, optionally substituted C₂-C₁₄ alkenyl, or —(CH₂)ₘ-A-(CH₂)ₙH. In some embodiments, R⁷ is optionally substituted C₃-C₁₀ alkyl. In some embodiments, R⁷ is optionally substituted C₄-C₁₀ alkyl. In some embodiments, R⁷ is optionally substituted C₅-C₁₀ alkyl. In some embodiments, R⁷ is optionally substituted C₉-C₁₀ alkyl. In some embodiments, R⁷ is optionally substituted C₁-C₁₄ alkyl. In some embodiments, R⁷ is optionally substituted optionally substituted C₂-C₁₄ alkenyl. In some embodiments, R⁷ is —(CH₂)ₘ-A-(CH₂)ₙH.

[1754] In some embodiments, R⁸ is optionally substituted C₁-C₁₄ alkyl, optionally substituted C₂-C₁₄ alkenyl, or (CH₂)ₘ-A-(CH₂)ₙH. In some embodiments, R⁸ is optionally substituted C₃-C₁₀ alkyl. In some embodiments, R⁸ is optionally substituted C₄-C₁₀ alkyl. In some embodiments, R⁸ is optionally substituted C₅-C₁₀ alkyl. In some embodiments, R⁸ is optionally substituted C₉-C₁₀ alkyl. In some embodiments, R⁸ is optionally substituted C₁-C₁₄ alkyl. In some embodiments, R′ is optionally substituted C₂-C₁₄ alkenyl. In some embodiments, R⁸ is —(CH₂)ₘ-A-(CH₂)ₙH.

[1755] In some embodiments, R⁹ is optionally substituted C₁-C₁₄ alkyl, optionally substituted C₂-C₁₄ alkenyl, or —(CH₂)ₘ-A-(CH₂)ₙH. In some embodiments, R⁹ is optionally substituted C₃-C₁₀ alkyl. In some embodiments, R⁹ is optionally substituted C₄-C₁₀ alkyl. In some embodiments, R⁹ is optionally substituted C₅-C₁₀ alkyl. In some embodiments, R⁹ is optionally substituted C₉-C₁₀ alkyl. In some embodiments, R⁹ is optionally substituted C₁-C₁₄ alkyl. In some embodiments, R⁹ is optionally substituted C₂-C₁₄ alkenyl. In some embodiments, R⁹ is —(CH₂)ₘ-A-(CH₂)ₙH.

[1756] In some embodiments, each m is independently 0, 1, 2, 3, 4, 5, 6, 7, 8, 9, 10, 11, or 12. In some embodiments, each m is 0. In some embodiments, each m is 1. In some embodiments, each m is 2. In some embodiments, each m is 3. In some embodiments, each m is 4. In some embodiments, each m is 5. In some embodiments, each m is 6. In some embodiments, each m is 7. In some embodiments, each m is 8. In some embodiments, each m is 9. In some embodiments, each m is 10. In some embodiments, each m is 11. In some embodiments, each m is 12.

[1757] In some embodiments, each n is independently 0, 1, 2, 3, 4, 5, 6, 7, 8, 9, 10, 11, or 12. In some embodiments, each n is 0. In some embodiments, each n is 1. In some embodiments, each n is 2. In some embodiments, each n is 3. In some embodiments, each n is 4. In some embodiments, each n is 5. In some embodiments, each n is 6. In some embodiments, each n is 7. In some embodiments, each n is 8. In some embodiments, each n is 9. In some embodiments, each n is 10. In some embodiments, each n is 11. In some embodiments, each n is 12.

[1758] In some embodiments, each A is independently a C₃-C₈ cycloalkylenyl. In some embodiments, each A is cyclopropylenyl.

### X¹

[1759] In some embodiments, X1 is optionally substituted C2-C6 alkylenyl. In some embodiments, X1 is optionally substituted C2-C5 alkylenyl. In some embodiments, X1 is optionally substituted C2-C4 alkylenyl. In some embodiments, X1 is optionally substituted C2-C3 alkylenyl. In some embodiments, X1 is optionally substituted C2 alkylenyl. In some embodiments, X1 is optionally substituted C3 alkylenyl. In some embodiments, X1 is optionally substituted C4 alkylenyl. In some embodiments, X1 is optionally substituted C5 alkylenyl. In some embodiments, X1 is optionally substituted C6 alkylenyl. In some embodiments, X1 is optionally substituted —(CH2)2-. In some embodiments, X1 is optionally substituted —(CH2)3-. In some embodiments, XI is optionally substituted —(CH2)4-. In some embodiments, X1 is optionally substituted —(CH2)5-. In some embodiments, X1 is optionally substituted —(CH₂)₆—.

### X²

[1760] In some embodiments, X2 is selected from the group consisting of a bond, —CH2- and —CH2CH2-. In some embodiments, X2 is a bond. In some embodiments, X2 is —CH2-. In some embodiments, X2 is —CH2CH2-.

### X^{2′}

[1761] In some embodiments, X^{2′} is selected from the group consisting of a bond, —CH₂— and —CH₂CH₂—. In some embodiments, X^{2′} is a bond. In some embodiments, X^{2′} is —CH₂—. In some embodiments, X^{2′} is —CH₂CH₂—.

### X³

[1762] In some embodiments, X³ is selected from the group consisting of a bond, —CH₂— and —CH₂CH₂—. In some embodiments, X³ is a bond. In some embodiments, X³ is —CH₂—. In some embodiments, X³ is —CH₂CH₂—.

### X^{3′}

[1763] In some embodiments, X^{3′} is selected from the group consisting of a bond, —CH₂— and —CH₂CH₂—. In some embodiments, X^{3′} is a bond. In some embodiments, X^{3′} is —CH₂—. In some embodiments, X^{3′} is —CH₂CH₂—.

### X⁴

[1764] In some embodiments, X⁴ is selected from the group consisting of optionally substituted C₂-C₁₄ alkylenyl and optionally substituted C₂-C₁₄ alkenylenyl. In some embodiments, X⁴ is optionally substituted C₂-C₁₄ alkylenyl. In some embodiments, X⁴ is optionally substituted C₂-C₁₀ alkylenyl. In some embodiments, X⁴ is optionally substituted C₂-C₈ alkylenyl. In some embodiments, X⁴ is optionally substituted C₂-C₆ alkylenyl. In some embodiments, X⁴ is optionally substituted C₃-C₆ alkylenyl. In some embodiments, X⁴ is optionally substituted C₃ alkylenyl. In some embodiments, X⁴ is optionally substituted C₄ alkylenyl. In some embodiments, X⁴ is optionally substituted C₅ alkylenyl. In some embodiments, X⁴ is optionally substituted C₆ alkylenyl. In some embodiments, X⁴ is optionally substituted —(CH₂)₂—. In some embodiments, X⁴ is optionally substituted —(CH₂)₃—. In some embodiments, X⁴ is optionally substituted —(CH₂)₄—. In some embodiments, X⁴ is optionally substituted —(CH₂)₅—. In some embodiments, X⁴ is optionally substituted —(CH₂)₆—.

### X⁵

[1765] In some embodiments, X⁵ is selected from the group consisting of optionally substituted C₂-C₁₄ alkylenyl and optionally substituted C₂-C₁₄ alkenylenyl. In some embodiments, X⁵ is optionally substituted C₂-C₁₄ alkylenyl. In some embodiments, X⁵ is optionally substituted C₂-C₁₀ alkylenyl. In some embodiments, X⁵ is optionally substituted C₂-C₈ alkylenyl. In some embodiments, X⁵ is optionally substituted C₂-C₆ alkylenyl. In some embodiments, X⁵ is optionally substituted C₃-C₆ alkylenyl. In some embodiments, X⁵ is optionally substituted C₃ alkylenyl. In some embodiments, X⁵ is optionally substituted C₄ alkylenyl. In some embodiments, X⁵ is optionally substituted C₅ alkylenyl. In some embodiments, X⁵ is optionally substituted C₆ alkylenyl. In some embodiments, X⁵ is optionally substituted —(CH₂)₂—. In some embodiments, X⁵ is optionally substituted —(CH₂)₃—. In some embodiments, X⁵ is optionally substituted —(CH₂)₄—. In some embodiments, X⁵ is optionally substituted —(CH₂)₅—. In some embodiments, X⁵ is optionally substituted —(CH₂)₆—.

### Y¹

[1766] In some embodiments, Y¹ is selected from the group consisting of

[chemical structure]

[1767] In some embodiments, Y¹ is

[chemical structure]

### Y²

[1768] In some embodiments, Y² is selected from the group consisting of

[chemical structure]

[1769] In some embodiments, Y² is

[chemical structure]

TABLE (II)
Non-Limiting Examples of Ionizable Lipids with a Cyclic Core

| | Compound |
|---|---|
| Structure | No. |
| [chemical structure] | CY1 |
| [chemical structure] | CY2 |
| [chemical structure] | CY3 |
| [chemical structure] | CY4 |
| [chemical structure] | CY5 |
| [chemical structure] | CY6 |
| [chemical structure] | CY7 |
| [chemical structure] | CY8 |
| [chemical structure] | CY9 |
| [chemical structure] | CY10 |
| [chemical structure] | CY11 |
| [chemical structure] | CY12 |
| [chemical structure] | CY13 |
| [chemical structure] | CY14 |
| [chemical structure] | CY15 |
| [chemical structure] | CY16 |
| [chemical structure] | CY17 |
| [chemical structure] | CY18 |
| [chemical structure] | CY19 |
| [chemical structure] | CY20 |
| [chemical structure] | CY21 |
| [chemical structure] | CY22 |
| [chemical structure] | CY23 |
| [chemical structure] | CY24 |
| [chemical structure] | CY25 |
| [chemical structure] | CY26 |
| [chemical structure] | CY27 |
| [chemical structure] | CY28 |
| [chemical structure] | CY29 |
| [chemical structure] | CY30 |
| [chemical structure] | CY31 |
| [chemical structure] | CY32 |
| [chemical structure] | CY33 |
| [chemical structure] | CY34 |
| [chemical structure] | CY35 |
| [chemical structure] | CY36 |
| [chemical structure] | CY37 |
| [chemical structure] | CY38 |
| [chemical structure] | CY39 |
| [chemical structure] | CY40 |
| [chemical structure] | CY41 |
| [chemical structure] | CY42 |
| [chemical structure] | CY43 |
| [chemical structure] | CY44 |
| [chemical structure] | CY45 |
| [chemical structure] | CY46 |
| [chemical structure] | CY47 |
| [chemical structure] | CY48 |
| [chemical structure] | CY49 |
| [chemical structure] | CY50 |
| [chemical structure] | CY51 |
| [chemical structure] | CY52 |
| [chemical structure] | CY53 |
| [chemical structure] | CY54 |
| [chemical structure] | CY55 |
| [chemical structure] | CY56 |
| [chemical structure] | CY57 |
| [chemical structure] | CY58 |
| [chemical structure] | CY59 |
| [chemical structure] | CY60 |
| [chemical structure] | CY61 |
| [chemical structure] | CY62 |
| [chemical structure] | CY63 |
| [chemical structure] | CY64 |
| [chemical structure] | CY65 |
| [chemical structure] | CY66 |
| [chemical structure] | CY67 |
| [chemical structure] | CY68 |
| [chemical structure] | CY69 |
| [chemical structure] | CY70 |
| [chemical structure] | CY71 |

[1770] In some embodiments, an LNP of the present disclosure comprises an ionizable lipid disclosed in PCT Application PCT/US2022/082276 (WO2023122752), which is incorporated by reference herein, in its entirety.

[1771] In one embodiment, the disclosure provides a compound of Formula IA:

[chemical structure]

or a pharmaceutically acceptable salt or solvate thereof, wherein:
[1772] A is selected from the group consisting of —N(R^{1a})— and —C(R′)—OC(═O)(R^{8a})—;
[1773] R^{1a} is -L¹-R¹;
[1774] L¹ is C₂-C₆ alkylenyl or —(CH₂)₂₋₆—OC(═O)—;
[1775] R¹ is selected from the group consisting of —OH,

[chemical structure]

[1776] R^{2a}, R^{2b}, and R^{2c} are independently selected from the group consisting of hydrogen and C₁-C₆ alkyl;
[1777] R^{3a}, R^{3b}, and R^{3c} are independently selected from the group consisting of hydrogen and C₁-C₆ alkyl;
[1778] R^{4a}, R^{4b}, and R^{4c} are independently selected from the group consisting of hydrogen and C₁-C₆ alkyl;
[1779] R^{5a}, R^{5b}, and R^{5c} are independently selected from the group consisting of hydrogen and C₁-C₆ alkyl;
[1780] R^{6a}, R^{6b}, and R^{6c} are independently selected from the group consisting of hydrogen and C₁-C₆ alkyl; or
[1781] R^{6a} and R^{6b} taken together with the nitrogen atom to which they are attached form a 4- to 8-membered heterocyclo; and R^{6c} is selected from the group consisting of hydrogen and C₁-C₆ alkyl;
[1782] R^{7a}, R^{7b}, and R^{7c} are independently selected from the group consisting of hydrogen and C₁-C₆ alkyl; or
[1783] R^{7a} and R^{7b} taken together with the nitrogen atom to which they are attached form a 4- to 8-membered heterocyclo; and R^{7c} is selected from the group consisting of hydrogen and C₁-C₆ alkyl;
[1784] R′ is selected from the group consisting of hydrogen and C₁-C₆ alkyl;
[1785] R^{8a} is -L²-R⁸;
[1786] L² is C₂-C₆ alkylenyl;
[1787] R⁸ is selected from the group consisting of —NR^{9a}R^{9b},

[chemical structure]

[1788] R^{9a} and R^{9b} are independently selected from the group consisting of hydrogen and C₁-C₆ alkyl; or
[1789] R^{9a} and R^{9b} taken together with the nitrogen atom to which they are attached form a 4- to 8-membered heterocyclo;
[1790] Q¹ is C₁-C₂n alkylenyl;
[1791] W¹ is selected from the group consisting of —C(═O)O—, —OC(═O)—, —C(═O)N(R^{12a})—, —N(R^{12a})C(═O)—, —OC(═O)N(R^{12a})—, —N(R^{12a})C(═O)O—, and —OC(═O)O—;
[1792] R^{12a} is selected from the group consisting of hydrogen and C₁-C₆ alkyl;
[1793] X¹ is optionally substituted C₁-C₁₅ alkylenyl; or
[1794] X¹ is a bond;
[1795] Y¹ is selected from the group consisting of —(CH₂)ₘ—, —O—, —S—, and —S—S—;
[1796] m is 0, 1, 2, 3, 4, 5, or 6;
[1797] Z¹ is selected from the group consisting of optionally substituted C₄-C₁₂ cycloalkylenyl,

[chemical structure]

[1798] R¹⁰ is selected from the group consisting of hydrogen, C₁-C₂₀ alkyl, and C₂-C₂₀ alkenyl;
[1799] Q² is C₁-C₂₀ alkylenyl;
[1800] W² is selected from the group consisting of —C(═O)O—, —C(═O)N(R^{12b})—, —OC(═O)N(R^{12b})—, and —OC(═O)O—;
[1801] R^{12b} is selected from the group consisting of hydrogen and C₁-C₆ alkyl;
[1802] X²is optionally substituted C₁-C₁₅ alkylenyl; or
[1803] X² is a bond;
[1804] Y² is selected from the group consisting of —(CH₂)ₙ—, —O—, —S—, and —S—S—;
[1805] n is 0, 1, 2, 3, 4, 5, or 6;
[1806] Z² is selected from the group consisting of —(CH₂)ₚ—, optionally substituted C₄-C₁₂ cycloalkylenyl.

[chemical structure]

[1807] p is 0 or 1; and
[1808] R¹¹ is selected from the group consisting of hydrogen, C₁-C₁₀ alkyl, and C₂-C₁₀ alkenyl;
[1809] wherein one or more methylene linkages of X¹, X², Y¹, Y², Z¹, Z², R¹⁰, and R¹¹, are optionally and independently replaced with a group selected from —O—, —CH═CH—, —S— and C₃-C₆ cycloalkylenyl.

[1810] In one embodiment, the disclosure provides a compound of Formula IB:

[chemical structure]

or a pharmaceutically acceptable salt or solvate thereof, wherein:
[1811] A is selected from the group consisting of —N(R^{1a})— and —C(R′)—OC(═O)(R^{8a})—;
[1812] R^{1a} is -L¹-R¹;
[1813] L¹ is C₂-C₆ alkylenyl or —(CH₂)₂₋₆—OC(═O)—;
[1814] R¹ is selected from the group consisting of —OH,

[chemical structure]

[1815] R^{2a}, R^{2b}, and R^{2c} are independently selected from the group consisting of hydrogen and C₁-C₆ alkyl;
[1816] R^{3a}, R^{3b}, and R^{3c} are independently selected from the group consisting of hydrogen and C₁-C₆ alkyl;
[1817] R^{4a}, R^{4b}, and R^{4c} are independently selected from the group consisting of hydrogen and C₁-C₆ alkyl,
[1818] R^{5a}, R^{5b}, and R^{5c} are independently selected from the group consisting of hydrogen and C₁-C₆ alkyl;
[1819] R^{6a}, R^{6b}, and R^{6c} are independently selected from the group consisting of hydrogen and C₁-C₆ alkyl; or
[1820] R^{6a} and R^{6b} taken together with the nitrogen atom to which they are attached form a 4- to 8-membered heterocyclo; and R^{6c} is selected from the group consisting of hydrogen and C₁-C₆ alkyl;
[1821] R^{7a}, R^{7b}, and R^{7c} are independently selected from the group consisting of hydrogen and C₁-C₆ alkyl; or
[1822] R^{7a} and R^{7b} taken together with the nitrogen atom to which they are attached form a 4- to 8-membered heterocyclo; and R^{7c} is selected from the group consisting of hydrogen and C₁-C₆ alkyl;
[1823] R′ is selected from the group consisting of hydrogen and C₁-C₆ alkyl;
[1824] R^{8a} is -L²-R⁸;
[1825] L² is C₂-C₆ alkylenyl;
[1826] R⁸ is selected from the group consisting of —NR^{9a}R^{9b},

[chemical structure]

[1827] R^{9a} and R^{9b} are independently selected from the group consisting of hydrogen and C₁-C₆ alkyl; or
[1828] R^{9a} and R^{9b} taken together with the nitrogen atom to which they are attached form a 4- to 8-membered heterocyclo;
[1829] Q¹ is C₁-C₂₀ alkylenyl;
[1830] W¹ is selected from the group consisting of —C(═O)O—, —OC(═O)—, —C(═O)N(R^{12a})—, —N(R^{12a})C(═O)—, —OC(═O)N(R^{12a})—, —N(R^{12a})C(═O)O—, and —OC(═O)O—;
[1831] R^{12a} is selected from the group consisting of hydrogen and C₁-C₆ alkyl;
[1832] X¹ is optionally substituted C₁-C₁₅ alkylenyl; or
[1833] X¹ is a bond;
[1834] Y¹ is selected from the group consisting of —(CH₂)ₘ—, —O—, —S—, and —S—S—;
[1835] m is 0, 1, 2, 3, 4, 5, or 6;
[1836] Z¹ is selected from the group consisting of optionally substituted C₅-C₁₂ bridged cycloalkylenyl,

[chemical structure]

[1837] R¹⁰ is selected from the group consisting of hydrogen, C₁-C₂₀ alkyl, and C₂-C₂₀ alkenyl;
[1838] Q² is C₁-C₂₀ alkylenyl;
[1839] W² is selected from the group consisting of —C(═O)O—, —C(═O)N(R^{12b})—, —OC(═O)N(R^{12b})—, and —OC(═O)O—;
[1840] R^{12b} is selected from the group consisting of hydrogen and C₁-C₆ alkyl;
[1841] X²is optionally substituted C₁-C₁₅ alkylenyl; or
[1842] X² is a bond;
[1843] Y² is selected from the group consisting of —(CH₂)ₙ—, —O—, —S—, and —S—S—;
[1844] n is 0, 1, 2, 3, 4, 5, or 6;
[1845] Z² is selected from the group consisting of —(CH₂)ₚ—, optionally substituted C₄-C₁₂ cycloalkylenyl,

[chemical structure]

[1846] p is 0 or 1; and
[1847] R¹¹ is selected from the group consisting of hydrogen, C₁-C₁₀ alkyl, and C₂-C₁₀ alkenyl;
[1848] wherein one or more methylene linkages of X¹, X², Y¹, Y², Z¹, Z², R¹⁰, and R¹¹, are optionally and independently replaced with a group selected from —O—, —CH═CH—, —S— and C₃-C₆ cycloalkylenyl.

[1849] In one embodiment, the disclosure provides a compound of Formula IC:

[chemical structure]

or a pharmaceutically acceptable salt or solvate thereof, wherein:
[1850] A is selected from the group consisting of —N(R^{1a})— and —C(R′)—OC(═O)(R^{8a})—;
[1851] R^{1a} is -L¹-R¹;
[1852] L¹ is C₂-C₆ alkylenyl or —(CH₂)₂₋₆—OC(═O)—,
[1853] R¹ is selected from the group consisting of —OH,

[chemical structure]

[1854] R^{2a}, R², and R^{2c} are independently selected from the group consisting of hydrogen and C₁-C₆ alkyl;
[1855] R^{3a}, R^{3b}, and R^{3c} are independently selected from the group consisting of hydrogen and C₁-C₆ alkyl;
[1856] R^{4a}, R^{4b}, and R^{4c} are independently selected from the group consisting of hydrogen and C₁-C₆ alkyl;
[1857] R^{5a}, R^{5b}, and R^{5c} are independently selected from the group consisting of hydrogen and C₁-C₆ alkyl;
[1858] R^{6a}, R^{6b}, and R^{6c} are independently selected from the group consisting of hydrogen and C₁-C₆ alkyl; or
[1859] R^{6a} and R^{6b} taken together with the nitrogen atom to which they are attached form a 4- to 8-membered heterocyclo; and R^{6c} is selected from the group consisting of hydrogen and C₁-C₆ alkyl;
[1860] R^{7a}, R^{7b}, and R^{7c} are independently selected from the group consisting of hydrogen and C₁-C₆ alkyl; or
[1861] R^{7a} and R^{7b} taken together with the nitrogen atom to which they are attached form a 4- to 8-membered heterocyclo; and R^{7c} is selected from the group consisting of hydrogen and C₁-C₆ alkyl;
[1862] R′ is selected from the group consisting of hydrogen and C₁-C₆ alkyl;
[1863] R^{8a} is -L²-R⁸;
[1864] L² is C₂-C₂₀ alkylenyl;
[1865] R⁸ is selected from the group consisting of —NRR^{9a}R^{9b},

[chemical structure]

[1866] R^{9a} and R^{9b} are independently selected from the group consisting of hydrogen and C₁-C₆ alkyl; or
[1867] R^{9a} and R^{9b} taken together with the nitrogen atom to which they are attached form a 4- to 8-membered heterocyclo;
[1868] Q¹ is C₁-C₂₀ alkylenyl;
[1869] W¹ is selected from the group consisting of —C(═O)O—, —OC(═O)—, —C(═O)N(R^{12a})—, —N(R^{12a})C(═O)—, —OC(═O)N(R^{12a})—, —N(R^{2a})C(═O)O—, and —OC(═O)O—;
[1870] R^{12a} is selected from the group consisting of hydrogen and C₁-C₆ alkyl;
[1871] X¹ is optionally substituted branched C₁-C₁₅ alkylenyl; or
[1872] X¹ is a bond;
[1873] Y¹ is selected from the group consisting of —(CH₂)ₘ—, —O—, —S—, and —S—S—;
[1874] m is 0, 1, 2, 3, 4, 5, or 6;
[1875] Z¹ is selected from the group consisting of optionally substituted C₄-C₁₂ cycloalkylenyl,

[chemical structure]

[1876] R¹⁰ is selected from the group consisting of hydrogen, C₁-C₂₀ alkyl, and C₂-C₂₀ alkenyl;
[1877] Q² is C₁-C₂₀ alkylenyl;
[1878] W² is selected from the group consisting of —C(═O)O—, —C(═O)N(R^{12b})—, —OC(═O)N(R^{12b})—, and —OC(═O)O—;
[1879] R^{12b} is selected from the group consisting of hydrogen and C₁-C₆ alkyl;
[1880] X² is optionally substituted C₁-C₁₅ alkylenyl; or
[1881] Y² is selected from the group consisting of —(CH₂)ₙ—, —O—, —S—, and —S—S—;
[1882] n is 0, 1, 2, 3, 4, 5, or 6;
[1883] Z² is of —(CH₂)ₚ—:
[1884] p is 0 or 1; and
[1885] R¹¹ is C₁-C₂₀ branched alkyl;
[1886] wherein one or more methylene linkages of X¹, X², Y¹, Y², Z¹, Z², R¹⁰, and R¹¹, are optionally and independently replaced with a group selected from —O—, —CH═CH—, —S— and C₃-C₆ cycloalkylenyl.

[1887] In some embodiments, the disclosure provides a compound of any one of Formulae IA, IB, IC, or a pharmaceutically acceptable salt or solvate thereof, wherein Z¹ is optionally substituted C₅-C₁₂ bridged cycloalkylenyl.

[1888] In some embodiments, the disclosure provides a compound of any one of Formulae IA, IB, IC, or a pharmaceutically acceptable salt or solvate thereof, wherein Z¹ is not adamantyl.

[1889] In one embodiment, the disclosure provides a compound of Formula ID:

[chemical structure]

or a pharmaceutically acceptable salt or solvate thereof, wherein:
[1890] A is selected from the group consisting of —N(R^{1a})— and —C(R′)—OC(═O)(R^{8a})—;
[1891] R^{1a} is -L¹-R¹;
[1892] L¹ is C₂-C₆ alkylenyl or —(CH₂)₂₋₆—OC(═O)—;
[1893] R¹ is selected from the group consisting of —OH,

[chemical structure]

[1894] R^{2a}, R^{2b}, and R^{2c} are independently selected from the group consisting of hydrogen and C₁-C₆ alkyl;
[1895] R^{3a}, R^{3b}, and R^{3c} are independently selected from the group consisting of hydrogen and C₁-C₆ alkyl;
[1896] R^{4a}, R^{4b}, and R^{4c} are independently selected from the group consisting of hydrogen and C₁-C₆ alkyl;
[1897] R^{5a}, R^{5b}, and R^{5c} are independently selected from the group consisting of hydrogen and C₁-C₆ alkyl;
[1898] R^{6a}, R^{6b}, and R^{6c} are independently selected from the group consisting of hydrogen and C₁-C₆ alkyl; or
[1899] R^{6a} and R^{6b} taken together with the nitrogen atom to which they are attached form a 4- to 8-membered heterocyclo; and R^{6c} is selected from the group consisting of hydrogen and C₁-C₆ alkyl;
[1900] R^{7a}, R^{7b}, and R^{7c} are independently selected from the group consisting of hydrogen and C₁-C₆ alkyl; or
[1901] R^{7a} and R^{7b} taken together with the nitrogen atom to which they are attached form a 4- to 8-membered heterocyclo; and R^{7c} is selected from the group consisting of hydrogen and C₁-C₆ alkyl;
[1902] R′ is selected from the group consisting of hydrogen and C₁-C₆ alkyl;
[1903] R^{8a} is -L²-R⁸;
[1904] L² is C₂-C₆ alkylenyl;
[1905] R⁸ is selected from the group consisting of —NR^{9a}R^{9b},

[chemical structure]

[1906] R^{9a} and R^{9b} are independently selected from the group consisting of hydrogen and C₁-C₆ alkyl; or
[1907] R^{9a} and R^{9b} taken together with the nitrogen atom to which they are attached form a 4- to 8-membered heterocyclo;
[1908] Q¹ is C₁-C₂₀ alkylenyl;
[1909] W¹ is selected from the group consisting of —C(═O)O—, —OC(═O)—, —C(═O)N(R^{12a})—, —N(R^{12a})C(═O)—, —OC(═O)N(R^{12a})—, —N(R^{12a})C(═O)O—, and —OC(═O)O—;
[1910] R^{12a} is selected from the group consisting of hydrogen and C₁-C₆ alkyl;
[1911] X¹ is optionally substituted branched C₁-C₁₅ alkylenyl; or
[1912] X¹ is a bond;
[1913] Y¹ is selected from the group consisting of —(CH₂)ₘ—, —O—, —S—, and —S—S—;
[1914] m is 0, 1, 2, 3, 4, 5, or 6;
[1915] Z¹ is optionally substituted C₅-C₁₂ bridged cycloalkylenyl;
[1916] R¹⁰ is selected from the group consisting of hydrogen, C₁-C₂₀ alkyl, and C₂-C₂₀ alkenyl;
[1917] Q² is C₁-C₂₀ alkylenyl;
[1918] W² is selected from the group consisting of —C(═O)O—, —C(═O)N(R^{12b})—, —OC(═O)N(R^{12b})—, and —OC(═O)O—;
[1919] R^{12b} is selected from the group consisting of hydrogen and C₁-C₆ alkyl;
[1920] X² is optionally substituted C₁-C₁₅ alkylenyl; or
[1921] Y² is —(CH₂)ₙ—;
[1922] n is 0, 1, 2, 3, 4, 5, or 6;
[1923] Z² is of —(CH₂)ₚ—;
[1924] p is 0 or 1; and
[1925] R¹¹ is C₁-C₂₀ branched alkyl.

[1926] In some embodiments, the disclosure provides a compound of Formula ID or a pharmaceutically acceptable salt or solvate thereof, wherein Z¹ is not adamantyl.

[1927] In one embodiment, the disclosure provides a compound of Formula I:

[chemical structure]

or a pharmaceutically acceptable salt or solvate thereof, wherein:
[1928] A is selected from the group consisting of —N(R^{1a})— and —C(R′)—OC(═O)(R^{8a})—;
[1929] R^{1a} is -L¹-R¹;
[1930] L¹ is C₂-C₆ alkylenyl;
[1931] R¹ is selected from the group consisting of —OH,

[chemical structure]

[1932] R^{2a}, R^{2b}, and R^{2c} are independently selected from the group consisting of hydrogen and C₁-C₆ alkyl;
[1933] R^{3a}, R^{3b}, and R^{3c} are independently selected from the group consisting of hydrogen and C₁-C₆ alkyl;
[1934] R^{4a}, R^{4b}, and R^{4c} are independently selected from the group consisting of hydrogen and C₁-C₆ alkyl;
[1935] R^{5a}, R^{5b}, and R^{5c} are independently selected from the group consisting of hydrogen and C₁-C₆ alkyl;
[1936] R^{6a}, R^{6b}, and R^{6c} are independently selected from the group consisting of hydrogen and C₁-C₆ alkyl; or
[1937] R^{6a} and R^{6b} taken together with the nitrogen atom to which they are attached form a 4- to 8-membered heterocyclo; and R^{6c} is selected from the group consisting of hydrogen and C₁-C₆ alkyl;
[1938] R^{7a}, R^{7b}, and R^{7c} are independently selected from the group consisting of hydrogen and C₁-C₆ alkyl; or
[1939] R^{7a} and R^{7b} taken together with the nitrogen atom to which they are attached form a 4- to 8-membered heterocyclo; and R^{7c} is selected from the group consisting of hydrogen and C₁-C₆ alkyl;
[1940] R′ is selected from the group consisting of hydrogen and C₁-C₆ alkyl;
[1941] R^{8a} is -L²-R⁸;
[1942] L² is C₂-C₆ alkylenyl;
[1943] R⁸ is —NR^{9a}R^{9b};
[1944] R^{9a} and R^{9b} are independently selected from the group consisting of hydrogen and C₁-C₆ alkyl; or
[1945] R^{9a} and R^{9b} taken together with the nitrogen atom to which they are attached form a 4- to 8-membered heterocyclo;
[1946] Q¹ is C₁-C₂₀ alkylenyl;
[1947] W¹ is selected from the group consisting of —C(═O)O—, —OC(═O)—, —C(═O)N(R^{2a})—, —(R^{12a})C(═O)—, —OC(═O)N(R^{12a})—, —N(R^{12a})C(═O)O—, and —OC(═O)O—;
[1948] R^{12a} is selected from the group consisting of hydrogen and C₁-C₆ alkyl;
[1949] X¹ is C₁-C₁₅ alkylenyl; or
[1950] X¹ is a bond;
[1951] Y¹ is selected from the group consisting of —(CH₂)ₘ—, —O—, —S—, and —S—S—;
[1952] m is 0, 1, 2, 3, 4, 5, or 6, Z¹ is selected from the group consisting of C₄-C₁₂ cycloalkylenyl,

[chemical structure]

[1953] R¹⁰ is selected from the group consisting of hydrogen, C₁-C₂₀ alkyl, and C₂-C₂₀ alkenyl;
[1954] Q² is C₁-C₂₀ alkylenyl;
[1955] W² is selected from the group consisting of —C(═O)O—, —C(═O)N(R^{12b})—, —OC(═O)N(R^{12b})—, and —OC(═O)O—;
[1956] R^{12b} is selected from the group consisting of hydrogen and C₁-C₆ alkyl;
[1957] X² is C₁-C₁₅ alkylenyl; or
[1958] X² is a bond;
[1959] Y² is selected from the group consisting of —(CH₂)ₙ—, —O—, —S—, and —S—S—;
[1960] n is 0, 1, 2, 3, 4, 5, or 6;
[1961] Z² is selected from the group consisting of —(CH₂)—, C₄-C₁₂ cycloalkylenyl,

[chemical structure]

[1962] p is 0 or 1; and
[1963] R″ is selected from the group consisting of hydrogen, C₁-C₁₀ alkyl, and C₂-C₁₀ alkenyl.

[1964] In another embodiment, the disclosure provides a compound of Formula II:

[chemical structure]

or a pharmaceutically acceptable salt or solvate thereof, wherein R¹, R¹⁰, R″, Q¹, Q², W¹, W², X¹, X², Y¹, Y², Z¹, and Z² are as defined herein in Formula IA, Formula IB, Formula IC, Formula ID, Formula I, or below

[1965] In another embodiment, the disclosure provides a compound of Formula III:

[chemical structure]

or a pharmaceutically acceptable salt or solvate thereof, wherein R′, R^{9a}, R^{9b}, R¹⁰, R¹¹, L², Q¹, Q², W¹, W², X¹, X², Y¹, Y², Z¹, and Z² are as defined herein in Formula IA, Formula IB, Formula IC, Formula ID, Formula I, or below.

[1966] In another embodiment, the disclosure provides a compound of Formula IV:

[chemical structure]

or a pharmaceutically acceptable salt or solvate thereof, wherein R^{9a}, R^{9b}, L², Q¹, Q², X¹, X², Y¹, Y², Z¹, Z², R¹⁰, an R¹¹ are as defined herein in Formula IA, Formula IB, Formula IC, Formula ID, Formula I, or below

[1967] In another embodiment, the disclosure provides a compound of Formula VI′:

[chemical structure]

or a pharmaceutically acceptable salt or solvate thereof, wherein R^{9a}, R^{9b}, L², Q¹, Q², X¹, X², Y¹, Y², Z¹, Z², R¹⁰, an R¹¹ are as defined herein in Formula IA, Formula IB, Formula IC, Formula ID, Formula I, or below

[1968] In another embodiment, the disclosure provides a compound of Formula VI″:

[chemical structure]

or a pharmaceutically acceptable salt or solvate thereof, wherein R^{9a}, R^{9b}, L², Q¹, Q², X¹, X², Y¹, Y², Z¹, Z², R¹⁰, an R¹¹ are as defined herein in Formula IA, Formula IB, Formula IC, Formula ID, Formula I, or below

[1969] In another embodiment, the disclosure provides a compound of Formula VI′″:

[chemical structure]

or a pharmaceutically acceptable salt or solvate thereof, wherein R^{9a}, R⁹, L², Q¹, Q², X², Y¹, Y², Z¹, Z², R¹⁰, an R¹¹ are as defined herein in Formula IA, Formula IB, Formula IC, Formula ID, Formula I, or below

[1970] In another embodiment, the disclosure provides a compound of Formula VII:

[chemical structure]

or a pharmaceutically acceptable salt or solvate thereof, wherein R¹, L¹, Q¹, Q², X¹, X², Y¹, Y², Z¹, Z², R¹⁰, an R¹¹ are as defined herein in Formula IA, Formula IB, Formula IC, Formula ID, Formula I, or below.

[1971] In another embodiment, the disclosure provides a compound of Formula VII′:

[chemical structure]

or a pharmaceutically acceptable salt or solvate thereof, wherein R¹, L¹, Q¹, Q², X¹, X², Y¹, Y², Z¹, Z², R¹⁰, an R¹¹ are as defined herein in Formula IA, Formula IB, Formula IC, Formula ID, Formula I, or below.

[1972] In another embodiment, the disclosure provides a compound of Formula VII″:

[chemical structure]

or a pharmaceutically acceptable salt or solvate thereof, wherein R¹, L¹, Q¹, Q², X¹, X², Y¹, Y², Z¹, Z², R¹⁰, an R¹¹ are as defined herein in Formula IA, Formula IB, Formula IC, Formula ID, Formula I, or below.

[1973] In another embodiment, the disclosure provides a compound of Formula VII′″:

[chemical structure]

or a pharmaceutically acceptable salt or solvate thereof, wherein R¹, L¹, Q¹, Q², X¹, X², Y¹, Y², Z¹, Z², R¹⁰, an R¹¹ are as defined herein in Formula IA, Formula IB, Formula IC, Formula ID, Formula I, or below.

[1974] Formula IA, Formula IB, Formula IC, Formula I, In another embodiment, the disclosure provides a compound of Formula VIII:

[chemical structure]

or a pharmaceutically acceptable salt or solvate thereof,
[1975] wherein
[1976] q¹ is 0, 1, 2, or 3;
[1977] q² is 0, 1, 2, or 3;
[1978] A, X¹, X², Y¹, Y², Z¹, Z², R¹⁰, an R¹¹ are as defined herein in Formula IA, Formula IB, Formula IC, Formula ID, Formula I, or below.

[1979] In certain embodiments, the compound is a compound of Formula VIII, wherein Z¹ is an optionally substituted C₅-C₁₂ bridged cycloalkylenyl.

[1980] In another embodiment, the disclosure provides a compound of Formula VIII′:

[chemical structure]

or a pharmaceutically acceptable salt or solvate thereof,
[1981] wherein
[1982] q¹ is 0, 1, 2, or 3;
[1983] q² is 0, 1, 2, or 3;
[1984] A, X¹, X², Y¹, Y², Z¹, Z², R¹⁰, an R¹¹ are as defined herein in Formula IA, Formula IB, Formula IC, Formula ID, Formula I, or below.

[1985] In certain embodiments, the compound is a compound of Formula VIII′, wherein Z¹ is an optionally substituted C₅-C₁₂ bridged cycloalkylenyl.

[1986] In another embodiment, the disclosure provides a compound of Formula VIII″:

[chemical structure]

or a pharmaceutically acceptable salt or solvate thereof,
[1987] wherein
[1988] q¹ is 0, 1, 2, or 3;
[1989] q² is 0, 1, 2, or 3;
[1990] A, X¹, X², Y¹, Y², Z¹, Z², R¹⁰, an R¹¹ are as defined herein in Formula IA, Formula IB, Formula IC, Formula ID, Formula I, or below.

[1991] In certain embodiments, the compound is a compound of Formula VIII″, wherein Z¹ is an optionally substituted C₅-C₁₂ bridged cycloalkylenyl.

[1992] In another embodiment, the disclosure provides a compound of Formula VIII′″:

[chemical structure]

or a pharmaceutically acceptable salt or solvate thereof,
[1993] wherein
[1994] q¹ is 0, 1, 2, or 3:
[1995] q² is 0, 1, 2, or 3;
[1996] A, X¹, X², Y¹, Y², Z¹, Z², R¹⁰, an R¹¹ are as defined herein in Formula IA, Formula IB, Formula IC, Formula ID, Formula I, or below.

[1997] In certain embodiments, the compound is a compound of Formula VIII′″, wherein Z¹ is an optionally substituted C₅-C₁₂ bridged cycloalkylenyl.

[1998] In another embodiment, the disclosure provides a compound of Formula IX:

[chemical structure]

or a pharmaceutically acceptable salt or solvate thereof,
[1999] wherein
[2000] q¹ is 0, 1, 2, or 3;
[2001] q² is 0, 1, 2, or 3;
[2002] L¹, X¹, X², Y¹, Y², Z¹, Z², R¹⁰, an R¹¹ are as defined herein in Formula IA, Formula IB, Formula IC, Formula ID, Formula I, or below.

[2003] In certain embodiments, the compound is a compound of Formula IX, wherein Z¹ is an optionally substituted C₅-C₁₂ bridged cycloalkylenyl.

[2004] In another embodiment, the disclosure provides a compound of Formula IX′:

[chemical structure]

or a pharmaceutically acceptable salt or solvate thereof,
[2005] wherein
[2006] q¹ is 0, 1, 2, or 3;
[2007] q² is 0, 1, 2, or 3;
[2008] L¹, X¹, X², Y¹, Y², Z¹, Z², R¹⁰, an R¹¹ are as defined herein in Formula IA, Formula IB, Formula IC, Formula ID, Formula I, or below.

[2009] In certain embodiments, the compound is a compound of Formula IX′, wherein Z¹ is an optionally substituted C₅-C₁₂ bridged cycloalkylenyl.

[2010] In another embodiment, the disclosure provides a compound of Formula IX″:

[chemical structure]

or a pharmaceutically acceptable salt or solvate thereof,
[2011] wherein
[2012] q¹ is 0, 1, 2, or 3;
[2013] q² is 0, 1, 2, or 3:
[2014] L¹, X¹, X², Y¹, Y², Z¹, Z², R¹⁰, an R¹¹ are as defined herein in Formula IA, Formula IB, Formula IC, Formula ID, Formula I, or below.

[2015] In certain embodiments, the compound is a compound of Formula IX″, wherein Z¹ is an optionally substituted C₅-C₁₂ bridged cycloalkylenyl.

[2016] In another embodiment, the disclosure provides a compound of Formula IX′″:

[chemical structure]

or a pharmaceutically acceptable salt or solvate thereof,
[2017] wherein
[2018] q¹ is 0, 1, 2, or 3;
[2019] q² is 0, 1, 2, or 3;
[2020] L¹, X¹, X², Y¹, Y², Z¹, Z², R¹⁰, an R¹¹ are as defined herein in Formula IA, Formula IB, Formula IC, Formula ID, Formula I, or below.

[2021] In certain embodiments, the compound is a compound of Formula IX′″, wherein Z¹ is an optionally substituted C₅-C₁₂ bridged cycloalkylenyl.

[2022] In another embodiment, the disclosure provides a compound of Formula X:

[chemical structure]

or a pharmaceutically acceptable salt or solvate thereof,
[2023] wherein
[2024] q¹ is 0, 1, 2, or 3,
[2025] q² is 0, 1, 2, or 3;
[2026] L¹, X¹, X², Y¹, Y², Z¹, Z², R^{9a}, R^{9b}, R¹⁰, an R¹¹ are as defined herein in Formula IA, Formula IB, Formula IC, Formula ID, Formula I or below.

[2027] In certain embodiments, the compound is a compound of Formula X, wherein Z¹ is an optionally substituted C₅-C₁₂ bridged cycloalkylenyl.

[2028] In another embodiment, the disclosure provides a compound of Formula X′:

[chemical structure]

or a pharmaceutically acceptable salt or solvate thereof,
[2029] wherein
[2030] q¹ is 0, 1, 2, or 3:
[2031] q² is 0, 1, 2, or 3;
[2032] L¹, X¹, X², Y¹, Y², Z¹, Z², R^{9a}, R^{9b}, R¹⁰, an R¹¹ are as defined herein in Formula IA, Formula IB, Formula IC, Formula ID, Formula I or below.

[2033] In certain embodiments, the compound is a compound of Formula X′, wherein Z¹ is an optionally substituted C₅-C₁₂ bridged cycloalkylenyl.

[2034] In another embodiment, the disclosure provides a compound of Formula X″:

[chemical structure]

or a pharmaceutically acceptable salt or solvate thereof,
[2035] wherein
[2036] q¹ is 0, 1, 2, or 3;
[2037] q² is 0, 1, 2, or 3;
[2038] L¹, X¹, X², Y¹, Y², Z¹, Z², R^{9a}, R^{9b}, R¹⁰, an R¹¹ are as defined herein in Formula IA, Formula IB, Formula IC, Formula ID, Formula I or below.

[2039] In certain embodiments, the compound is a compound of Formula X″, wherein Z¹ is an optionally substituted C₅-C₁₂ bridged cycloalkylenyl.

[2040] In another embodiment, the disclosure provides a compound of Formula X′″:

[chemical structure]

or a pharmaceutically acceptable salt or solvate thereof,
[2041] wherein
[2042] q¹ is 0, 1, 2, or 3:
[2043] q² is 0, 1, 2, or 3;
[2044] L¹, X¹, X², Y¹, Y², Z¹, Z², R^{9a}, R %, R¹⁰, an R¹¹ are as defined herein in Formula IA, Formula IB, Formula IC, Formula ID, Formula I or below.

[2045] In certain embodiments, the compound is a compound of Formula X′″, wherein Z¹ is an optionally substituted C₅-C₁₂ bridged cycloalkylenyl.

[2046] In another embodiment, the disclosure provides a compound of Formula XI:

[chemical structure]

or a pharmaceutically acceptable salt or solvate thereof,
[2047] wherein
[2048] q¹ is 0, 1, 2, or 3;
[2049] q² is 0, 1, 2, or 3;
[2050] r² is 0, 1, or 2;
[2051] s² is 0, 1, 2, 3, 4, 5, 6; and
[2052] A, X¹, Y¹, Z¹, R¹⁰, and R¹¹ are as defined herein in Formula IA, Formula IB, Formula IC, Formula ID, Formula I, or below.

[2053] In certain embodiments, the compound is a compound of Formula XI, wherein Z¹ is an optionally substituted C₅-C₁₂ bridged cycloalkylenyl.

[2054] In another embodiment, the disclosure provides a compound of Formula XI′:

[chemical structure]

or a pharmaceutically acceptable salt or solvate thereof,
[2055] wherein
[2056] q¹ is 0, 1, 2, or 3:
[2057] q² is 0, 1, 2, or 3;
[2058] r² is 0, 1, or 2;
[2059] s² is 0, 1, 2, 3, 4, 5, 6; and
[2060] A, X¹, Y¹, Z¹, R¹⁰, and R¹¹ are as defined herein in Formula IA, Formula IB, Formula IC, Formula ID, Formula I, or below.

[2061] In certain embodiments, the compound is a compound of Formula XI′, wherein Z¹ is an optionally substituted C₅-C₁₂ bridged cycloalkylenyl.

[2062] In another embodiment, the disclosure provides a compound of Formula XI″:

[chemical structure]

or a pharmaceutically acceptable salt or solvate thereof,
[2063] wherein
[2064] q¹ is 0, 1, 2, or 3;
[2065] q² is 0, 1, 2, or 3;
[2066] r² is 0, 1, or 2;
[2067] s² is 0, 1, 2, 3, 4, 5, 6; and
[2068] A, X¹, Y¹, Z¹, R¹⁰, and R¹¹ are as defined herein in Formula IA, Formula IB, Formula IC, Formula ID, Formula I, or below.

[2069] In certain embodiments, the compound is a compound of Formula XI″, wherein Z¹ is an optionally substituted C₅-C₁₂ bridged cycloalkylenyl.

[2070] In another embodiment, the disclosure provides a compound of Formula XI′″:

[chemical structure]

or a pharmaceutically acceptable salt or solvate thereof,
[2071] wherein
[2072] q¹ is 0, 1, 2, or 3;
[2073] q² is 0, 1, 2, or 3;
[2074] r² is 0, 1, or 2;
[2075] s² is 0, 1, 2, 3, 4, 5, 6; and
[2076] A, X¹, Y¹, Z¹, R¹⁰, and R¹¹ are as defined herein in Formula IA, Formula IB, Formula IC, Formula ID, Formula I, or below.

[2077] In certain embodiments, the compound is a compound of Formula XI′″, wherein Z¹ is an optionally substituted C₅-C₁₂ bridged cycloalkylenyl.

[2078] In another embodiment, the disclosure provides a compound of Formula XII:

[chemical structure]

or a pharmaceutically acceptable salt or solvate thereof,
[2079] wherein
[2080] q¹ is 0, 1, 2, or 3;
[2081] q² is 0, 1, 2, or 3;
[2082] r² is 0, 1, or 2;
[2083] s² is 0, 1, 2, 3, 4, 5, 6; and
[2084] L¹, X¹, Y¹, Z¹, R¹⁰ and R¹¹ are as defined herein in Formula IA, Formula IB, Formula IC, Formula ID, Formula I, or below.

[2085] In certain embodiments, the compound is a compound of Formula XII, wherein Z¹ is an optionally substituted C₅-C₁₂ bridged cycloalkylenyl.

[2086] In another embodiment, the disclosure provides a compound of Formula XII′:

[chemical structure]

or a pharmaceutically acceptable salt or solvate thereof,
[2087] wherein
[2088] q¹ is 0, 1, 2, or 3;
[2089] q² is 0, 1, 2, or 3;
[2090] r² is 0, 1, or 2;
[2091] s² is 0, 1, 2, 3, 4, 5, 6; and
[2092] L¹, X¹, Y¹, Z¹, R¹⁰ and R¹¹ are as defined herein in Formula IA, Formula IB, Formula IC, Formula ID, Formula I, or below.

[2093] In certain embodiments, the compound is a compound of Formula XII′, wherein Z¹ is an optionally substituted C₅-C₁₂ bridged cycloalkylenyl.

[2094] In another embodiment, the disclosure provides a compound of Formula XII″:

[chemical structure]

or a pharmaceutically acceptable salt or solvate thereof,
[2095] wherein
[2096] q¹ is 0, 1, 2, or 3;
[2097] q² is 0, 1, 2, or 3;
[2098] r² is 0, 1, or 2;
[2099] s² is 0, 1, 2, 3, 4, 5, 6; and
[2100] L¹, X¹, Y¹, Z¹, R¹⁰ and R¹¹ are as defined herein in Formula IA, Formula IB, Formula IC, Formula ID, Formula I or below.

[2101] In certain embodiments, the compound is a compound of Formula XII″, wherein Z¹ is an optionally substituted C₅-C₁₂ bridged cycloalkylenyl.

[2102] In another embodiment, the disclosure provides a compound of Formula XII′″:

[chemical structure]

or a pharmaceutically acceptable salt or solvate thereof,
[2103] wherein
[2104] q¹ is 0, 1, 2, or 3;
[2105] q² is 0, 1, 2, or 3;
[2106] r² is 0, 1, or 2;
[2107] s² is 0, 1, 2, 3, 4, 5, 6; and
[2108] L¹, X¹, Y¹, Z¹, R¹⁰ and R¹¹ are as defined herein in Formula IA, Formula IB, Formula IC, Formula ID, Formula I or below.

[2109] In certain embodiments, the compound is a compound of Formula XII′″, wherein Z¹ is an optionally substituted C₅-C₂ bridged cycloalkylenyl.

[2110] In another embodiment, the disclosure provides a compound of Formula XIII:

[chemical structure]

or a pharmaceutically acceptable salt or solvate thereof,
[2111] wherein
[2112] q¹ is 0, 1, 2, or 3;
[2113] q² is 0, 1, 2, or 3;
[2114] r² is 0, 1, or 2;
[2115] s² is 0, 1, 2, 3, 4, 5, 6; and
[2116] L¹, X¹, Y¹, Z¹, R^{9a}, R^{9b}, R¹⁰ and R¹¹ are as defined herein in Formula IA, Formula IB, Formula IC, Formula I or below.

[2117] In certain embodiments, the compound is a compound of Formula XIII, wherein Z¹ is an optionally substituted C₅-C₁₂ bridged cycloalkylenyl.

[2118] In another embodiment, the disclosure provides a compound of Formula XIII′:

[chemical structure]

or a pharmaceutically acceptable salt or solvate thereof,
[2119] wherein
[2120] q¹ is 0, 1, 2, or 3;
[2121] q² is 0, 1, 2, or 3;
[2122] r² is 0, 1, or 2;
[2123] s² is 0, 1, 2, 3, 4, 5, 6; and
[2124] L¹, X¹, Y¹, Z¹, R^{9a}, R^{9b}, R¹⁰ and R¹¹ are as defined herein in Formula IA, Formula IB, Formula IC, Formula ID, Formula I, or below.

[2125] In certain embodiments, the compound is a compound of Formula XIII′, wherein Z¹ is an optionally substituted C₅-C₁₂ bridged cycloalkylenyl.

[2126] In another embodiment, the disclosure provides a compound of Formula XIII″:

[chemical structure]

or a pharmaceutically acceptable salt or solvate thereof,
[2127] wherein
[2128] q¹ is 0, 1, 2, or 3;
[2129] q² is 0, 1, 2, or 3;
[2130] r² is 0, 1, or 2;
[2131] s² is 0, 1, 2, 3, 4, 5, 6; and
[2132] L¹, X¹, Y¹, Z¹, R^{9a}, R^{9b}, R¹⁰ and R¹¹ are as defined herein in Formula IA, Formula IB, Formula IC, Formula ID, Formula I, or below.

[2133] In certain embodiments, the compound is a compound of Formula XIII″, wherein Z¹ is an optionally substituted C₅-C₁₂ bridged cycloalkylenyl.

[2134] In another embodiment, the disclosure provides a compound of Formula XIII′″:

[chemical structure]

or a pharmaceutically acceptable salt or solvate thereof,
[2135] wherein
[2136] q¹ is 0, 1, 2, or 3;
[2137] q² is 0, 1, 2, or 3;
[2138] r² is 0, 1, or 2;
[2139] s² is 0, 1, 2, 3, 4, 5, 6; and
[2140] L¹, X¹, Y¹, Z¹, R^{9a}, R^{9b}, R¹⁰ and R¹¹ are as defined herein in Formula IA, Formula IB, Formula IC, Formula ID, Formula I or below.

[2141] In certain embodiments, the compound is a compound of Formula XIII′″, wherein Z¹ is an optionally substituted C₅-C₁₂ bridged cycloalkylenyl.

[2142] In another embodiment, the disclosure provides a compound of Formula XIV:

[chemical structure]

or a pharmaceutically acceptable salt or solvate thereof,
[2143] wherein
[2144] R^{11′} is selected from the group consisting of hydrogen, C₁-C₁₀ alkyl, and C₂-C₁₀ alkenyl;
[2145] q¹ is 0, 1, 2, or 3;
[2146] q² is 0, 1, 2, or 3;
[2147] r² is 0, 1, or 2;
[2148] s² is 0, 1, 2, 3, 4, 5, 6; and
[2149] A, X¹, Y¹, Z¹, R¹⁰, and R¹¹ are as defined herein in Formula IA, Formula IB, Formula IC, Formula ID, Formula I, or below.

[2150] In certain embodiments, the compound is a compound of Formula XIV, wherein Z¹ is an optionally substituted C₅-C₁₂ bridged cycloalkylenyl. In certain embodiments, Z¹ is not adamantyl.

[2151] In another embodiment, the disclosure provides a compound of Formula XIV′:

[chemical structure]

or a pharmaceutically acceptable salt or solvate thereof,
[2152] wherein
[2153] R^{11′} is selected from the group consisting of hydrogen, C₁-C₁₀ alkyl, and C₂-C₁₀ alkenyl;
[2154] q¹ is 0, 1, 2, or 3;
[2155] q² is 0, 1, 2, or 3;
[2156] r² is 0, 1, or 2;
[2157] s² is 0, 1, 2, 3, 4, 5, 6; and
[2158] A, X¹, Y¹, Z¹, R¹⁰, and R¹¹ are as defined herein in Formula IA, Formula IB, Formula IC, Formula ID, Formula I, or below.

[2159] In certain embodiments, the compound is a compound of Formula XIV′, wherein Z¹ is an optionally substituted C₅-C₁₂ bridged cycloalkylenyl. In certain embodiments, Z¹ is not adamantyl.

[2160] In another embodiment, the disclosure provides a compound of Formula XIV″:

[chemical structure]

or a pharmaceutically acceptable salt or solvate thereof,
[2161] wherein
[2162] R^{11′} is selected from the group consisting of hydrogen, C₁-C₁₀ alkyl, and C₂-C₁₀ alkenyl;
[2163] q¹ is 0, 1, 2, or 3;
[2164] q² is 0, 1, 2, or 3;
[2165] r² is 0, 1, or 2;
[2166] s² is 0, 1, 2, 3, 4, 5, 6; and
[2167] A, X¹, Y¹, Z¹, R¹⁰, and R¹¹ are as defined herein in Formula IA, Formula IB, Formula IC, Formula ID, Formula I or below.

[2168] In certain embodiments, the compound is a compound of Formula XIV″, wherein Z¹ is an optionally substituted C₅-C₁₂ bridged cycloalkylenyl. In certain embodiments, Z¹ is not adamantyl.

[2169] In another embodiment, the disclosure provides a compound of Formula XIV′″:

[chemical structure]

or a pharmaceutically acceptable salt or solvate thereof,
[2170] wherein
[2171] R^{11′} is selected from the group consisting of hydrogen, C₁-C₁₀ alkyl, and C₂-C₁₀ alkenyl;
[2172] q¹ is 0, 1, 2, or 3;
[2173] q² is 0, 1, 2, or 3;
[2174] r² is 0, 1, or 2;
[2175] s² is 0, 1, 2, 3, 4, 5, 6; and
[2176] A, X¹, Y¹, Z¹, R¹⁰, and R¹¹ are as defined herein in Formula IA, Formula IB, Formula IC, Formula ID, Formula I or below.

[2177] In certain embodiments, the compound is a compound of Formula XIV′″, wherein Z¹ is an optionally substituted C₅-C₂ bridged cycloalkylenyl. In certain embodiments, Z¹ is not adamantyl.

[2178] In another embodiment, the disclosure provides a compound of Formula XV:

[chemical structure]

or a pharmaceutically acceptable salt or solvate thereof,
[2179] wherein
[2180] R^{11′} is selected from the group consisting of hydrogen, C₁-C₁₀ alkyl, and C₂-C₁₀ alkenyl;
[2181] q¹ is 0, 1, 2, or 3;
[2182] q² is 0, 1, 2, or 3;
[2183] r² is 0, 1, or 2;
[2184] s² is 0, 1, 2, 3, 4, 5, 6; and
[2185] L¹, X¹, Y¹, Z¹, R¹⁰ and R¹¹ are as defined herein in Formula IA, Formula IB, Formula, IC, Formula I or below;
[2186] wherein Z¹ is not adamantyl.

[2187] In another embodiment, the disclosure provides a compound of Formula XV′:

[chemical structure]

or a pharmaceutically acceptable salt or solvate thereof,
[2188] wherein
[2189] R^{11′} is selected from the group consisting of hydrogen, C₁-C₁₀ alkyl, and C₂-C₁₀ alkenyl;
[2190] q¹ is 0, 1, 2, or 3;
[2191] q² is 0, 1, 2, or 3;
[2192] r² is 0, 1, or 2;
[2193] s² is 0, 1, 2, 3, 4, 5, 6; and
[2194] L¹, X¹, Y¹, Z¹, R¹⁰ and R¹¹ are as defined herein in Formula IA, Formula IB, Formula, IC, Formula I or below;
[2195] wherein Z¹ is not adamantyl.

[2196] In another embodiment, the disclosure provides a compound of Formula XV″:

[chemical structure]

or a pharmaceutically acceptable salt or solvate thereof,
[2197] wherein
[2198] R^{11′} is selected from the group consisting of hydrogen, C₁-C₁₀ alkyl, and C₂-C₁₀ alkenyl;
[2199] q¹ is 0, 1, 2, or 3;
[2200] q² is 0, 1, 2, or 3;
[2201] r² is 0, 1, or 2;
[2202] s² is 0, 1, 2, 3, 4, 5, 6; and
[2203] L¹, X¹, Y¹, Z¹, R¹⁰ and R¹¹ are as defined herein in Formula IA, Formula IB, Formula, IC, Formula I or below;
[2204] wherein Z¹ is not adamantyl.

[2205] In another embodiment, the disclosure provides a compound of Formula XV′″:

[chemical structure]

or a pharmaceutically acceptable salt or solvate thereof,
[2206] wherein
[2207] R^{11′} is selected from the group consisting of hydrogen, C₁-C₁₀ alkyl, and C₂-C₁₀ alkenyl; q¹ is 0, 1, 2, or 3;
[2208] q² is 0, 1, 2, or 3;
[2209] r² is 0, 1, or 2;
[2210] s² is 0, 1, 2, 3, 4, 5, 6; and
[2211] L¹, X¹, Y¹, Z¹, R¹⁰ and R¹¹ are as defined herein in Formula IA, Formula IB, Formula, IC, Formula I or below;
[2212] wherein Z¹ is not adamantyl.

[2213] In another embodiment, the disclosure provides a compound of Formula XVI:

[chemical structure]

or a pharmaceutically acceptable salt or solvate thereof,
[2214] wherein
[2215] R^{11′} is selected from the group consisting of hydrogen, C₁-C₁₀ alkyl, and C₂-C₁₀ alkenyl;
[2216] q¹ is 0, 1, 2, or 3;
[2217] q² is 0, 1, 2, or 3;
[2218] r² is 0, 1, or 2;
[2219] s² is 0, 1, 2, 3, 4, 5, 6; and
[2220] L¹, X¹, Y¹, Z¹, R^{9a}, R^{9b}, R¹⁰ and R¹¹ are as defined herein in Formula IA, Formula IB, Formula IC, Formula ID, Formula I, or below.

[2221] In another embodiment, the disclosure provides a compound of Formula XVI′:

[chemical structure]

or a pharmaceutically acceptable salt or solvate thereof,
[2222] wherein
[2223] R^{11′} is selected from the group consisting of hydrogen, C₁-C₁₀ alkyl, and C₂-C₁₀ alkenyl;
[2224] q¹ is 0, 1, 2, or 3;
[2225] q² is 0, 1, 2, or 3;
[2226] r² is 0, 1, or 2;
[2227] s² is 0, 1, 2, 3, 4, 5, 6; and
[2228] L¹, X¹, Y¹, Z¹, R^{9a}, R^{9b}, R¹⁰ and R¹¹ are as defined herein in Formula IA, Formula IB, Formula IC, Formula ID, Formula I, or below.

[2229] In another embodiment, the disclosure provides a compound of Formula XVI″:

[chemical structure]

or a pharmaceutically acceptable salt or solvate thereof,
[2230] wherein
[2231] R^{11′} is selected from the group consisting of hydrogen. C₁-C₁₀ alkyl, and C₂-C₁₀ alkenyl;
[2232] q¹ is 0, 1, 2, or 3;
[2233] q² is 0, 1, 2, or 3;
[2234] r² is 0, 1, or 2;
[2235] s² is 0, 1, 2, 3, 4, 5, 6; and
[2236] L¹, X¹, Y¹, Z¹, R^{9a}, R^{9b}, R¹⁰ and R¹¹ are as defined herein in Formula IA, Formula IB, Formula IC, Formula ID, Formula I, or below.

[2237] In another embodiment, the disclosure provides a compound of Formula XVI′″:

[chemical structure]

or a pharmaceutically acceptable salt or solvate thereof,
[2238] wherein
[2239] R^{11′} is selected from the group consisting of hydrogen, C₁-C₁₀ alkyl, and C₂-C₁₀ alkenyl;
[2240] q¹ is 0, 1, 2, or 3;
[2241] q² is 0, 1, 2, or 3;
[2242] r² is 0, 1, or 2;
[2243] s² is 0, 1, 2, 3, 4, 5, 6; and
[2244] L¹, X¹, Y¹, Z¹, R^{9a}, R^{9b}, R¹⁰ and R¹¹ are as defined herein in Formula IA, Formula IB, Formula IC, Formula ID, Formula I, or below.

[2245] In another embodiment, the disclosure provides a compound of Formula XVII:

[chemical structure]

or a pharmaceutically acceptable salt or solvate thereof,
[2246] wherein
[2247] q¹ is 0, 1, 2, or 3;
[2248] q² is 0, 1, 2, or 3;
[2249] A, X¹, X², Y¹, Y², Z¹, Z², R¹⁰, an R¹¹ are as defined herein in Formula IA, Formula IB, Formula IC, Formula ID, Formula I, or below.

[2250] In certain embodiments, the compound is a compound of Formula XVII, wherein one or more methylene linkages of X², Y², Z², and R¹¹, are not replaced with a group selected from —O—, —CH═CH—, —S— and C₃-C₆ cycloalkylenyl.

[2251] In another embodiment, the disclosure provides a compound of Formula XVIII:

[chemical structure]

or a pharmaceutically acceptable salt or solvate thereof,
[2252] wherein
[2253] q¹ is 0, 1, 2, or 3;
[2254] q² is 0, 1, 2, or 3;
[2255] L¹, X¹, X², Y¹, Y², Z², an R¹¹ are as defined herein in Formula IA, Formula IB, Formula IC, Formula ID, Formula I, or below.

[2256] In certain embodiments, the compound is a compound of Formula XVIII, wherein one or more methylene linkages of X², Y², Z², and R″, are not replaced with a group selected from —O—, —CH═CH—, —S— and C₃-C₆ cycloalkylenyl.

[2257] In another embodiment, the disclosure provides a compound of Formula XVIII′:

[chemical structure]

or a pharmaceutically acceptable salt or solvate thereof,
[2258] wherein
[2259] q¹ is 0, 1, 2, or 3;
[2260] q² is 0, 1, 2, or 3;
[2261] A, X¹, X², Y¹, Y², Z¹, Z², R¹⁰, an R¹¹ are as defined herein in Formula IA. Formula IB, Formula IC, Formula ID, Formula I, or below.

[2262] In another embodiment, the disclosure provides a compound of Formula XIX:

[chemical structure]

or a pharmaceutically acceptable salt or solvate thereof,
[2263] wherein
[2264] q¹ is 0, 1, 2, or 3;
[2265] q² is 0, 1, 2, or 3;
[2266] A, X¹, X², Y¹, Y², Z¹, Z², R¹⁰, an R¹¹ are as defined herein in Formula IA, Formula IB, Formula IC, Formula ID, Formula I, or below.

[2267] In another embodiment, the disclosure provides a compound of Formula XX:

[chemical structure]

or a pharmaceutically acceptable salt or solvate thereof,
[2268] wherein
[2269] q¹ is 0, 1, 2, or 3;
[2270] q² is 0, 1, 2, or 3:
[2271] L¹, X¹, X², Y¹, Y², Z², an R¹¹ are as defined herein in Formula IA, Formula IB, Formula IC, Formula ID, Formula I, or below.

[2272] In another embodiment, the disclosure provides a compound of Formula XXI:

[chemical structure]

or a pharmaceutically acceptable salt or solvate thereof,
[2273] wherein
[2274] q¹ is 0, 1, 2, or 3;
[2275] q² is 0, 1, 2, or 3;
[2276] A, X¹, X², Y¹, Y², Z¹, Z², R¹⁰, an R¹¹ are as defined herein in Formula IA, Formula IB, Formula IC, Formula ID, Formula I, or below.

### L¹

[2277] In another embodiment, L1 is selected from the group consisting of —CH2CH2-, —CH2CH2CH2-, and —CH2CH2CH2CH2-. In another embodiment, L1 is —CH2CH2-. In another embodiment, L1 is —CH2CH2CH2-. In another embodiment, L¹ is —CH₂CH₂CH₂CH₂—. In certain embodiments, L¹ is —(CH₂)₂₋₆—OC(═O)—. In some embodiments, L¹ is —(CH₂)₂—OC(═O)—.

### R¹

[2278] In some embodiments, R¹ is

[chemical structure]

In another embodiment, R¹ is —OH. In some embodiments, R¹ is —N(R^{9a})(R^{9b}). In some embodiments, R¹ is —NMe₂. In some embodiments, R¹ is —NEt₂. In another embodiment, R¹ is

[chemical structure]

In another embodiment, R¹ is

[chemical structure]

### L²

[2279] In another embodiment, L² is selected from the group consisting of —CH₂CH₂—, —CH₂CH₂CH₂—, and —CH₂CH₂CH₂CH₂—. In another embodiment, L² is —CH₂CH₂—. In another embodiment, L² is —CH₂CH₂CH₂—. In another embodiment, L² is —CH₂CH₂CH₂CH₂—.

### R⁸

[2280] In some embodiments, R⁸ is

[chemical structure]

In another embodiment, R⁸ is —NR^{9a}R^{9b}. In some embodiments, R⁸ is —NMe₂. In some embodiments, R⁸ is —NEt₂. In another embodiment, R⁸ is —OH.
R^{9a}, R^{9b}

[2281] In another embodiment, R^{9a} and R^{9b} are independently selected from the group consisting of hydrogen and C₁-C₄ alkyl. In another embodiment, R^{9a} and R^{9b} are each methyl. In another embodiment, R^{9a} and R^{9b} are each ethyl.

### R′

[2282] In another embodiment, R′ is hydrogen. In some embodiments, R′ is C₁-C₆ alkyl.

[2283] In another embodiment, Q¹ is straight chain C₁-C₂₀ alkylenyl. In another embodiment, Q¹ is straight chain C₁-C₁₀ alkylenyl. In another embodiment, Q¹ is C₁-C₁₀ alkylenyl. In another embodiment, Q¹ is C₂-C₅ alkylenyl. Q¹ is C₆-C₉ alkylenyl. In another embodiment, Q¹ is selected from the group consisting of —CH₂CH₂—, —CH₂CH₂CH₂—, —CH₂(CH₂)₂CH₂—, —CH₂(CH₂)₃CH₂—, —CH₂(CH₂)₄CH₂—, —CH₂(CH₂)₅CH₂—, —CH₂(CH₂)₆CH₂—, —CH₂(CH₂)₇CH₂—, and —CH₂(CH₂)₈CH₂—. In another embodiment, Q¹ is —CH₂CH₂—. In another embodiment, Q¹ is —CH₂CH₂CH₂—. In another embodiment, Q¹ is —CH₂(CH₂)₂CH₂—. In another embodiment, Q¹ is —CH₂(CH₂)₃CH₂—. In another embodiment, Q¹ is —CH₂CH₂—. In another embodiment, Q¹ is —CH₂(CH₂)₄CH₂—. In another embodiment, Q¹ is —CH₂(CH₂)₅CH₂—. In another embodiment, Q¹ is —CH₂(CH₂)₆CH₂—. In another embodiment, Q¹ is —CH₂(CH₂)₇CH₂—. In another embodiment, Q¹ is —CH₂(CH₂)₈CH₂—.

### W¹

[2284] In another embodiment, W¹ is selected from the group consisting of —C(═O)O—, —OC(═O)—, —C(═O)N(R^{12a})—, —N(R^{12a})C(═O)—, —OC(═O)N(R^{12a})—, —N(R^{12a})C(═O)O—, and —OC(═O)O—. In another embodiment, W¹ is —C(═O)O—. In another embodiment, W¹ is —OC(═O)—. In another embodiment, W¹ is —C(═O)N(R^{12a})—. In another embodiment, W¹ is —N(R^{12a})C(═O)—. In another embodiment, W¹ is —OC(═O)N(R^{12a})—. In another embodiment, W¹ is —N(R^{12a})C(═O)O—. In another embodiment, W¹ is —OC(═O)O—.

### X¹

[2285] In another embodiment, X²is optionally substituted C₁-C₁₅ alkylenyl. In another embodiment, X²is branched C₁-C₁₅ alkylenyl. In another embodiment, X¹ is a bond or C₁-C₁₅ alkylenyl. In another embodiment, X¹ is a bond. In another embodiment, X is C₂-C₅ alkylenyl. In another embodiment, X¹ is C₆-C₉ alkylenyl. In another embodiment, X¹ is —CH₂—. In another embodiment, X² is —CH₂CH₂—. In another embodiment, X² is —CH₂CH₂CH₂—. In another embodiment, X² is —CH₂CH₂CH₂CH₂—. In another embodiment, X² is —CH₂CH₂CH₂CH₂CH₂—.

### Y¹

[2286] In another embodiment, Y¹ is selected from the group consisting of —(CH₂)ₘ—, —O—, —S—, and —S—S—. In another embodiment, Y¹ is —(CH₂)ₘ—. In some embodiments, Y¹ is —O—. In some embodiments, Y¹ is —S—. In another embodiment, Y¹ is —CH₂—. In another embodiment, Y² is —CH₂CH₂—.

m

[2287] In another embodiment, m is 0. In another embodiment, m is 1. In another embodiment, m is 2. In another embodiment, m is 3. In another embodiment, m is 4. In another embodiment, m is 5. In another embodiment, m is 6.

n

[2288] In another embodiment, n is 0. In another embodiment, n is 1. In another embodiment, n is 2. In another embodiment, n is 3. In another embodiment, n is 4. In another embodiment, n is 5. In another embodiment, n is 6.

### P

[2289] In another embodiment, p is 0. In another embodiment, p is 1.

### Z¹

[2290] In another embodiment, Z¹ is selected from the group consisting of C₄-C₁₂ cycloalkylenyl,

[chemical structure]

In certain embodiments, Z¹ is optionally substituted.

[2291] In another embodiment, Z¹ is

[chemical structure]

[2292] In another embodiment, Z¹ is C₄-C₁₂ cycloalkylenyl. In another embodiment, Z¹ is a monocyclic C₄-C₈ cycloalkylenyl. In another embodiment, Z¹ is a monocyclic C₄-C₆ cycloalkylenyl. In another embodiment, Z¹ is a monocyclic C₄ cycloalkylenyl. In another embodiment, Z¹ is a monocyclic C₅ cycloalkylenyl. In another embodiment, Z¹ is a monocyclic C₆ cycloalkylenyl.

[2293] In another embodiment, Z¹ is an optionally substituted bridged bicyclic or multicyclic cycloalkylenyl. In some embodiments, Z¹ is optionally substituted C₅-C₁₂ bridged cycloalkylenyl. In some embodiments, Z¹ is optionally substituted C₆-C₁₀ bridged cycloalkylenyl. In some embodiments, Z¹ is a optionally substituted C₅-C₁₀ bridged cycloalkylenyl. selected from the group consisting of adamantyl, cubanyl, bicyclo[2.2.1]heptyl, bicyclo[2.2.2]octyl, bicyclo[1.1.1]pentyl, bicyclo[3.2.1]octyl, and bicyclo[3.1.1]heptyl.

[2294] In another embodiment, Z¹ is selected from the group consisting of:

[chemical structure]

[2295] In another embodiment, Z¹ is selected from the group consisting of:

[chemical structure]

[2296] In another embodiment, R¹⁰ is hydrogen.

[2297] In another embodiment, R¹⁰ is C₁-C₁₀ alkyl. In another embodiment, R¹⁰ is C₃-C₇ alkyl. In another embodiment, R¹⁰ is C₄-C₆ alkyl. In another embodiment, R¹⁰ is C₄. In another embodiment, R¹⁰ is C₅. In another embodiment, R¹⁰ is C₆.

[2298] In another embodiment, R¹⁰ is C₂-C₁₂ alkenyl. In another embodiment, R¹⁰ is C₆-C₁₂ alkenyl. In another embodiment, R¹⁰ is C₂-C₈ alkenyl.

### R¹¹

[2299] In another embodiment, R¹¹ is C₁-C₁₀ alkyl. In another embodiment, R¹¹ is optionally substituted C₁-C₂₀ alkyl. In another embodiment, R¹¹ is optionally substituted branched C₁-C₂₀ alkyl. In another embodiment, R¹¹ is optionally substituted C₁-C₁₅ alkyl. In another embodiment, R¹¹ is optionally substituted C₁-C₁₅ branched alkyl. In another embodiment, R¹¹ is optionally substituted C₁₀-C₁₅ alkyl. In another embodiment, R¹¹ is optionally substituted C₁₀-C₁₅ branched alkyl. In another embodiment, R¹¹ is selected from the group consisting of —CH₃, —CH₂CH₃, and —CH₂CH₂CH₃. In another embodiment, R¹¹ is selected from the group consisting of —CH₂(CH₂)₂CH₃, —CH₂(CH₂)₃CH₃, —CH₂(CH₂)₄CH₃, —CH₂(CH₂)₅CH₃, —CH₂(CH₂)₆CH₃, —CH₂(CH₂)₇CH₃, and —CH₂(CH₂)₈CH₃. In another embodiment, R¹¹ is —CH₃. In another embodiment, R¹¹ is —CH₂CH₃. In another embodiment, R¹¹ is —CH₂CH₂CH₃. In another embodiment, R¹¹ is —CH₂(CH₂)₂CH₃. In another embodiment, R¹¹ is —CH₂(CH₂)₃CH₃. In another embodiment, R¹¹ is —CH₂(CH₂)₄CH₃. In another embodiment, R¹¹ is —CH₂(CH₂)₅CH₃. In another embodiment, R¹¹ is CH₂(CH₂)₆CH₃. In another embodiment, R¹¹ is —CH₂(CH₂)₇CH₃. In another embodiment, R¹¹ is —CH₂(CH₂)₈CH₃.

[2300] In another embodiment, R¹¹ is C₂-C₁₀ alkenyl. In another embodiment, R¹¹ is C₂-C₁₂ alkenyl. In another embodiment, R¹¹ is C₆-C₁₂ alkenyl. In another embodiment, R¹¹ is C₂-C₈ alkenyl.

[2301] In another embodiment, the disclosure provides a compound of any one of Formulae IA, IB, IC, or I-XXI or a pharmaceutically acceptable salt or solvate thereof, wherein R¹¹ is hydrogen.

### Q²

[2302] In another embodiment, Q² is straight chain C₁-C₂₀ alkylenyl. In another embodiment, Q² is straight chain C₁-C₁₀ alkylenyl. In another embodiment, Q² is C₂-C₁₀ alkylenyl. In another embodiment, Q² is selected from the group consisting of —CH₂CH₂—, —CH₂CH₂CH₂—, —CH₂(CH₂)₂CH₂—, —CH₂(CH₂)₃CH₂—, —CH₂(CH₂)₄CH₂—, —CH₂(CH₂)₅CH₂—, —CH₂(CH₂)₆CH₂—, —CH₂(CH₂)₇CH₂—, and —CH₂(CH₂)₈.CH₂—. In another embodiment, Q² is —CH₂CH₂—. In another embodiment, Q² is —CH₂CH₂CH₂—. In another embodiment, Q² is —CH₂(CH₂)₃CH₂—. In another embodiment, Q² is —CH₂(CH₂)₄CH₂—. In another embodiment, Q² is —CH₂(CH₂)₅CH₂—. In another embodiment, Q² is —CH₂(CH₂)₆CH₂—. In another embodiment, Q² is —CH₂(CH₂)₇CH₂—. In another embodiment, Q² is —CH₂(CH₂)₈CH₂—.

### W²

[2303] In another embodiment, W² is selected from the group consisting of —C(═O)O— and —OC(═O)—. In another embodiment, W² is —C(═O)O—. In another embodiment, W² is —OC(═O)—.

### X²

[2304] In another embodiment, X²is optionally substituted C₁-C₁₅ alkylenyl. In another embodiment, X²is C₁-C₁₅ branched alkylenyl. In another embodiment, X² is C₁-C₆ alkylenyl or a bond. In another embodiment, X² is C₂-C₄ alkylenyl. In another embodiment, X² is C₃-C₅ alkylenyl. In another embodiment, X² is selected from the group consisting of —CH₂CH₂—, —CH₂CH₂CH₂—, —CH₂(CH₂)₂CH₂—, —CH₂(CH₂)₃CH₂—, and —CH₂(CH₂)₄CH₂—. In another embodiment, X² is —CH₂—. In another embodiment, X² is a bond. In another embodiment, X² is branched C₁-C₁₅ alkylenyl, wherein one or more methylene linkages of X² are optionally and independently replaced with a group selected from —O—, —CH═CH—, —S— and C₃-C₆ cycloalkylenyl.

### Y²

[2305] In another embodiment, Y² is selected from the group consisting of —(CH₂)ₘ— and —S—. In another embodiment, Y² is —(CH₂)ₘ—. In another embodiment, Y² is —S—.

### Z²

[2306] In another embodiment, Z² is —(CH₂)ₚ—. In another embodiment, Z² is —CH₂—. In another embodiment, Z² is —CH₂CH₂—. In another embodiment, Z² is C₄-C₁₂ cycloalkylenyl. In another embodiment, Z² is a monocyclic C₄-C₈ cycloalkylenyl. In certain embodiments, Z² is optionally substituted.

[2307] In another embodiment, Z² is an optionally substituted bridged bicyclic or multicyclic cycloalkylenyl. In some embodiments, Z² is optionally substituted C₅-C₁₂ bridged cycloalkylenyl. In some embodiments, Z² is optionally substituted C₆-C₁₀ bridged cycloalkylenyl. In some embodiments, Z² is a optionally substituted C₅-C₁₀ bridged cycloalkylenyl. selected from the group consisting of adamantyl, cubanyl, bicyclo[2.2.1]heptyl, bicyclo[2.2.2]octyl, bicyclo[1.1.1]pentyl, bicyclo[3.2.1]octyl, and bicyclo[3.1.1]heptyl.

[2308] In another embodiment, Z² is selected from the group consisting of:

[chemical structure]

[2309] In another embodiment, Z² is selected from the group consisting of:

[chemical structure]

[2310] In another embodiment, the disclosure provides a compound selected from any one of more of the compounds of Table (III), or a pharmaceutically acceptable salt or solvate thereof.

TABLE (III)
Non-Limiting Examples of Ionizable Lipids with a Constrained Arm

| Compound | |
|---|---|
| No. | Structure |
| C1 | [chemical structure] |
| C2 | [chemical structure] |
| C3 | [chemical structure] |
| C4 | [chemical structure] |
| C5 | [chemical structure] |
| C6 | [chemical structure] |
| C7 | [chemical structure] |
| C8 | [chemical structure] |
| C9 | [chemical structure] |
| C10 | [chemical structure] |
| C11 | [chemical structure] |
| C12 | [chemical structure] |
| C13 | [chemical structure] |
| C14 | [chemical structure] |
| C15 | [chemical structure] |
| C16 | [chemical structure] |
| C17 | [chemical structure] |
| C18 | [chemical structure] |
| C19 | [chemical structure] |
| C20 | [chemical structure] |
| C21 | [chemical structure] |
| C22 | [chemical structure] |
| C23 | [chemical structure] |
| C24 | [chemical structure] |
| C25 | [chemical structure] |
| C26 | [chemical structure] |
| C27 | [chemical structure] |
| | / |
| C28 | [chemical structure] |
| C29 | [chemical structure] |
| C30 | [chemical structure] |
| C31 | [chemical structure] |
| C32 | [chemical structure] |
| C33 | [chemical structure] |
| C34 | [chemical structure] |
| C35 | [chemical structure] |
| C36 | [chemical structure] |
| C37 | [chemical structure] |
| C38 | [chemical structure] |
| C39 | [chemical structure] |
| C40 | [chemical structure] |
| C41 | [chemical structure] |
| C42 | [chemical structure] |
| C43 | [chemical structure] |
| C44 | [chemical structure] |
| C45 | [chemical structure] |
| C46 | [chemical structure] |
| C47 | [chemical structure] |
| C48 | [chemical structure] |
| C49 | [chemical structure] |
| C50 | [chemical structure] |
| C51 | [chemical structure] |
| C52 | [chemical structure] |
| C53 | [chemical structure] |
| C54 | [chemical structure] |
| C55 | [chemical structure] |
| C56 | [chemical structure] |
| C57 | [chemical structure] |
| C58 | [chemical structure] |
| C59 | [chemical structure] |
| C60 | [chemical structure] |
| C61 | [chemical structure] |
| C62 | [chemical structure] |
| C63 | [chemical structure] |
| C64 | [chemical structure] |
| C65 | [chemical structure] |
| C66 | [chemical structure] |
| C67 | [chemical structure] |
| C68 | [chemical structure] |
| C69 | [chemical structure] |
| C70 | [chemical structure] |
| C71 | [chemical structure] |
| C72 | [chemical structure] |
| C73 | [chemical structure] |
| C74 | [chemical structure] |
| C75 | [chemical structure] |
| C76 | [chemical structure] |
| C77 | [chemical structure] |
| C78 | [chemical structure] |
| C79 | [chemical structure] |
| C80 | [chemical structure] |
| C81 | [chemical structure] |

[2311] In some embodiments, an LNP of the present disclosure comprises an ionizable lipid disclosed in PCT Application PCT/US2023/065477, which is incorporated by reference herein, in its entirety.

[2312] In some embodiments, lipids of the present disclosure comprise a heterocyclic core, wherein the heteroatom is nitrogen. In some embodiments, the heterocyclic core comprises pyrrolidine or a derivative thereof. In some embodiments, the heterocyclic core comprises piperidine or a derivative thereof.

[2313] In some embodiments, a compound of the present disclosure is represented by Formula (CX-I):

[chemical structure]

or a pharmaceutically acceptable salt thereof, wherein

[2314] Z is selected from the group consisting of a bond,

[chemical structure]

each Y is independently selected from the group consisting of

[chemical structure]

[2315] R¹ is —(CH₂)₁₋₆N(R^{a})₂ or —(CH₂)₁₋₆OH;
[2316] R² is optionally substituted C₁-C₃₆ alkyl or optionally substituted C₂-C₃₆ alkenyl, wherein 1-6 methylene units of R² are optionally replaced with a group each independently selected from cyclopropylene, —O—, —OC(O)—, and —C(O)O—;
[2317] R^{2′} is optionally substituted C₁-C₃₆ alkyl or optionally substituted C₂-C₃₆ alkenyl, wherein 1-6 methylene units of R² are optionally replaced with a group each independently selected from cyclopropylene, —O—, —OC(O)—, and —C(O)O—; each R^{a} is independently optionally substituted C₁-C₆ alkyl; or
   [2318] two R^{a} are taken together, with the nitrogen on which they are attached, to form an optionally substituted 4-7 membered heterocyclyl ring;
[2319] m is 0, 1, or 2;
[2320] n is 1 or 2; and
[2321] p is 1 or 2.

[2322] In some embodiments, a compound of the present disclosure is represented by Formula (CX-i):

[chemical structure]

or a pharmaceutically acceptable salt thereof,
[2323] wherein
[2324] Z is selected from the group consisting of a bond,

[chemical structure]

[2325] each Y is independently selected from the group consisting of

[chemical structure]

[2326] R¹ is —(CH₂)₁₋₆N(R^{a})₂;
[2327] R² is optionally substituted C₁-C₃₆ alkyl or optionally substituted C₂-C₃₆ alkenyl, wherein 1-6 methylene units of R² are optionally replaced with a group each independently selected from cyclopropylene, —O—, —OC(O)—, and —C(O)O—;
[2328] each R^{a} is independently optionally substituted C₁-C₆ alkyl; or
   [2329] two R^{a} are taken together, with the nitrogen on which they are attached, to form an optionally substituted 4-7 membered heterocyclyl ring;
[2330] in is 0, 1, or 2;
[2331] n is 1 or 2; and
[2332] p is 1 or 2.

[2333] In some embodiments, a compound of the present disclosure is represented by Formula (CX-I′), (CX-I″), (CX-I′″),

[chemical structure]

or a pharmaceutically acceptable salt thereof.

[2334] In some embodiments, a compound of the present disclosure is represented by Formula (CX-I-a), (CX-I-b), (CX-I-c), or (CX-I-d):

[chemical structure]

or a pharmaceutically acceptable salt thereof.

[2335] In some embodiments, a compound of the present disclosure is represented by Formula (CX-I-a′), (CX-I-b′), (CX-I-c′), or (CX-I-d′):

[chemical structure]

or a pharmaceutically acceptable salt thereof.

[2336] In some embodiments, a compound of the present disclosure is represented by Formula (CX-I-a″), (CX-I-b″), (CX-I-c″), or (CX-I-d″):

[chemical structure]

or a pharmaceutically acceptable salt thereof.

[2337] In some embodiments, a compound of the present disclosure is represented by Formula (CX-1-a′″), (CX-1-b′″), (CX-1-c′″), or (CX-1-d′″):

[chemical structure]

or a pharmaceutically acceptable salt thereof.

[2338] In some embodiments, a compound of the present disclosure is represented by Formula (CX-I-e) or (CX-I-f):

[chemical structure]

or a pharmaceutically acceptable salt thereof.

[2339] In some embodiments, a compound of the present disclosure is represented by Formula (CX-I-e′) or (CX-I-f′):

[chemical structure]

or a pharmaceutically acceptable salt thereof.

[2340] In some embodiments, a compound of the present disclosure is represented by Formula (CX-I-e″) or (CX-I-f″):

[chemical structure]

or a pharmaceutically acceptable salt thereof.

[2341] In some embodiments, a compound of the present disclosure is represented by Formula (CX-I-e′″) or (CX-I-f′″):

[chemical structure]

or a pharmaceutically acceptable salt thereof.

[2342] In some embodiments, a compound of the present disclosure is represented by Formula (CX-II):

[chemical structure]

or a pharmaceutically acceptable salt thereof,
[2343] wherein
[2344] Z is selected from the group consisting of a bond,

[chemical structure]

[2345] each Y is independently selected from the group consisting of

[chemical structure]

[2346] R¹ is —(CH₂)₁₋₆N(R^{a})₂ or —(CH₂)₁₋₆OH;
[2347] R² is optionally substituted C₅-C₃₆ alkyl or optionally substituted C₅-C₃₆ alkenyl, wherein 2 methylene units of R² are replaced with —O— to form an acetal within R², and wherein 1-6 methylene units of R² are optionally replaced with a group each independently selected from cyclopropylene, —O—, —OC(O)—, and —C(O)O—;
[2348] R^{2′} is optionally substituted C₁-C₃₆ alkyl or optionally substituted C₅-C₃₆ alkenyl, wherein 1-6 methylene units of R^{2′} are optionally replaced with a group each independently selected from cyclopropylene, —O—, —OC(O)—, and —C(O)O—;
[2349] each R^{a} is independently optionally substituted C₁-C₆ alkyl; or
   [2350] two R^{a} are taken together, with the nitrogen on which they are attached, to form an optionally substituted 4-7 membered heterocyclyl ring;
[2351] m is 0, 1, or 2;
[2352] n is 1 or 2; and
[2353] p is 1 or 2.

[2354] In some embodiments, a compound of the present disclosure is represented by Formula (CX-ii):

[chemical structure]

or a pharmaceutically acceptable salt thereof,
[2355] wherein
[2356] Z is selected from the group consisting of a bond,

[chemical structure]

[2357] each Y is independently selected from the group consisting of

[chemical structure]

[2358] R¹ is —(CH₂)₁₋₆N(R^{a})₂;
[2359] R² is optionally substituted C₁-C₃₆ alkyl or optionally substituted C₂-C₃₆ alkenyl, wherein 1-6 methylene units of R² are optionally replaced with a group each independently selected from cyclopropylene, —O—, —OC(O)—, and —C(O)O—;
[2360] R^{2′} is optionally substituted C₁-C₃₆ alkyl, wherein 1-6 methylene units of R^{2′} are optionally replaced with a group each independently selected from cyclopropylene, —O—, —OC(O)—, and —C(O)O—;
[2361] each R^{a} is independently optionally substituted C₁-C₆ alkyl; or
   [2362] two R^{a} are taken together, with the nitrogen on which they are attached, to form an optionally substituted 4-7 membered heterocyclyl ring;
[2363] m is 0, 1, or 2;
[2364] n is 1 or 2; and
[2365] p is 1 or 2.

[2366] In some embodiments, a compound of the present disclosure is represented by

[chemical structure]

or a pharmaceutically acceptable salt thereof.

[2367] In some embodiments, a compound of the present disclosure is represented by Formula (CX-II-a)

[chemical structure]

or a pharmaceutically acceptable salt thereof.

[2368] In some embodiments, a compound of the present disclosure is represented by Formula (CX-II-a′), (CX-II-a″), or (CX-II-a′″),

[chemical structure]

or a pharmaceutically acceptable salt thereof.

[2369] In some embodiments, a compound of the present disclosure is represented by Formula (CX-II-b), (CX-II-c), or (CX-II-d)

[chemical structure]

or a pharmaceutically acceptable salt thereof.

[2370] In some embodiments, a compound of the present disclosure is represented by Formula (CX-II-b′), (CX-II-c′), or (CX-II-d′)

[chemical structure]

or a pharmaceutically acceptable salt thereof.

[2371] In some embodiments, a compound of the present disclosure is represented by Formula (CX-II-b″), (CX-II-c″), or (CX-II-d″)

[chemical structure]

or a pharmaceutically acceptable salt thereof.

[2372] In some embodiments, a compound of the present disclosure is represented by Formula (CX-II-b′″), (CX-II-c′″), or (CX-II-d′″)

[chemical structure]

or a pharmaceutically acceptable salt thereof.

[2373] In some embodiments, a compound of the present disclosure is represented by is represented by formula (CX-II-e):

[chemical structure]

or a pharmaceutically acceptable salt thereof.

[2374] In some embodiments, a compound of the present disclosure is represented by Formula (CX-III)

[chemical structure]

or a pharmaceutically acceptable salt thereof,
[2375] wherein
[2376] Z is selected from the group consisting of a bond,

[chemical structure]

[2377] each Y is independently selected from the group consisting of

[chemical structure]

[2378] R¹ is —(CH₂)₁₋₆N(R^{a})₂ or —(CH₂)₁₋₆OH;
[2379] R² is optionally substituted C₅-C₃₆ alkyl or optionally substituted C₅-C₃₆ alkenyl, wherein 2 methylene units of R² are replaced with —O— to form an acetal within R², and wherein 1-6 methylene units of R² are optionally replaced with a group each independently selected from cyclopropylene, —O—, —OC(O)—, and —C(O)O—;
[2380] R^{2′} is optionally substituted C₁-C₃₆ alkyl or optionally substituted C₂-C₃₆ alkenyl, wherein 1-6 methylene units of R² are optionally replaced with a group each independently selected from cyclopropylene, —O—, —OC(O)—, and —C(O)O—;
[2381] each R^{a} is independently optionally substituted C₁-C₆ alkyl; or
   [2382] two R^{a} are taken together, with the nitrogen on which they are attached, to form an optionally substituted 4-7 membered heterocyclyl ring;
[2383] m is 0, 1, or 2; and
[2384] n is 1 or 2.

[2385] In some embodiments, a compound of the present disclosure is represented by Formula (CX-iii)

[chemical structure]

or a pharmaceutically acceptable salt thereof,
[2386] wherein
[2387] Z is selected from the group consisting of a bond,

[chemical structure]

[2388] each Y is independently selected from the group consisting of

[chemical structure]

[2389] R¹ is —(CH₂)₁₋₆N(R^{a})₂;
[2390] each R² is independently optionally substituted C₁-C₃₆ alkyl or optionally substituted C₂-C₃₆ alkenyl, wherein 1-6 methylene units of R² are optionally replaced with a group each independently selected from cyclopropylene, —O—, —OC(O)—, and —C(O)O—;
[2391] each R^{a} is independently optionally substituted C₁-C₆ alkyl; or
   [2392] two R^{a} are taken together, with the nitrogen on which they are attached, to form an optionally substituted 4-7 membered heterocyclyl ring;
[2393] m is 0, 1, or 2; and
[2394] n is 1 or 2.

[2395] In some embodiments, a compound of the present disclosure is represented by Formula (CX-III-a), (CX-III-b), or (CX-III-c):

[chemical structure]

or a pharmaceutically acceptable salt thereof.

[2396] In some embodiments, a compound of the present disclosure is represented by Formula (CX-III-d) or (CX-III-e)

[chemical structure]

or a pharmaceutically acceptable salt thereof.

[2397] In some embodiments, a compound of the present disclosure is represented by Formula (CX-IV)

[chemical structure]

or a pharmaceutically acceptable salt thereof,
[2398] wherein
[2399] Z is selected from the group consisting of a bond,

[chemical structure]

[2400] each Y is independently selected from the group consisting of

[chemical structure]

[2401] R¹ is —(CH₂)₁₋₆N(R^{a})₂ or —(CH₂)₁₋₆OH;
[2402] R² is C₃-C₃₆ branched alkyl or optionally substituted C₃-C₃₆ branched alkenyl, wherein 1-6 methylene units of R² are optionally replaced with a group each independently selected from cyclopropylene and —O—;
[2403] R^{2′} is optionally substituted C₁-C₃₆ alkyl or optionally substituted C₂-C₃₆ alkenyl, wherein 1-6 methylene units of R² are optionally replaced with a group each independently selected from cyclopropylene, —O—, —OC(O)—, and —C(O)O—;
[2404] each R^{a} is independently optionally substituted C₁-C₆ alkyl; or
   [2405] two R^{a} are taken together, with the nitrogen on which they are attached, to form an optionally substituted 4-7 membered heterocyclyl ring;
[2406] m is 0, 1, or 2; and
[2407] n is 1 or 2.

[2408] In some embodiments, a compound is represented by formula (CX-IV-a), (CX-IV-b), or (CX-IV-c):

[chemical structure]

or a pharmaceutically acceptable salt thereof.

[2409] In some embodiments, a compound of the present disclosure compound is represented by formula (CX-IV-d) or (CX-IV-e):

[chemical structure]

or a pharmaceutically acceptable salt thereof.

### Z

[2410] In some embodiments, Z is selected from the group consisting of a bond,

[chemical structure]

[2411] In some embodiments, Z is selected from the group consisting of,

[chemical structure]

In some embodiments, Z is

[chemical structure]

[2412] In some embodiments, Z is selected from the group consisting of a bond,

[chemical structure]

wherein R¹ is attached at the position denoted by *.

[2413] In some embodiments, Z is selected from the group consisting of

[chemical structure]

wherein R¹ is attached at the position denoted by *.

[2414] In some embodiments, Z is

[chemical structure]

In some embodiments, Z is

[chemical structure]

wherein R¹ is attached at the position denoted by *. In some embodiments, Z is

[chemical structure]

wherein R¹ is attached at the position denoted by *. In some embodiments, Z is

[chemical structure]

wherein R¹ is attached at the position denoted by *.

### Y

[2415] In some embodiments, each Y is independently selected from the group consisting

[chemical structure]

[2416] In some embodiments, Y is selected from the group consisting of

[chemical structure]

[2417] In some embodiments, Y is selected from the group consisting of

[chemical structure]

wherein R² is attached at the position denoted by *.

[2418] In some embodiments, Y is

[chemical structure]

wherein R² is attached at the position denoted by *.

[2419] In some embodiments, Y is

[chemical structure]

wherein R² is attached at the position denoted by *.

[2420] In some embodiments, Y is

[chemical structure]

wherein R² is attached at the position denoted by *.

[2421] In some embodiments, Y is

[chemical structure]

wherein R² is attached at the position denoted by *.

[2422] In some embodiments, Y is

[chemical structure]

[2423] In some embodiments, Y is

[chemical structure]

[2424] In some embodiments, Y is

[chemical structure]

[2425] In some embodiments, Y is

[chemical structure]

### R¹

[2426] In some embodiments, R¹ is —(CH₂)₁₋₆N(R^{a})₂ or —(CH₂)₁₋₆OH. In some embodiments, R¹ is —(CH₂)₁₋₆OH. In some embodiments, R¹ is —(CH₂)₁₋₆N(R^{a})₂. In some embodiments, R¹ is —(CH₂)₂N(R^{a})₂. In some embodiments, R¹ is —(CH₂)₃N(R^{a})₂. In some embodiments, R¹ is —(CH₂)₄N(R^{a})₂. In some embodiments, R¹ is —(CH₂)₁₋₆N(Me)₂. In some embodiments, R¹ is —(CH₂)₁₋₆N(Et)₂. In some embodiments, R¹ is —(CH₂)₁₋₆N(n-Pr)₂. In some embodiments, R¹ is —(CH₂)₁₋₆N(i-Pr)₂. In some embodiments, R¹ is —(CH₂)₂N(Me)₂. In some embodiments, R¹ is —(CH₂)₃N(Me)₂. In some embodiments, R¹ is —(CH₂)₄N(Me)₂. In some embodiments, R¹ is —(CH₂)₂N(Et)₂. In some embodiments, R¹ is —(CH₂)₃N(Et)₂. In some embodiments, R¹ is —(CH₂)₄N(Et)₂.

[2427] In some embodiments, R¹ is selected from the group consisting of

[chemical structure]

[2428] In some embodiments, R¹ is selected from the group consisting of

[chemical structure]

[2429] In some embodiments, R¹ is selected from the group consisting of

[chemical structure]

R² and R^{2′}

[2430] In some embodiments, R² is optionally substituted C₁-C₃₆ alkyl or optionally substituted C₂-C₃₆ alkenyl, wherein 1-6 methylene units of R² are optionally replaced with a group each independently selected from cyclopropylene, —O—, —OC(O)—, and —C(O)O—. In some embodiments, R² is optionally substituted C₁-C₃₂ alkyl or optionally substituted C₂-C₃₂ alkenyl, wherein 1-6 methylene units of R² are optionally replaced with a group each independently selected from cyclopropylene, —O—, —OC(O)—, and —C(O)O—. In some embodiments, R² is optionally substituted C₁-C₃₀ alkyl or optionally substituted C₂-C₃₀ alkenyl, wherein 1-6 methylene units of R² are optionally replaced with a group each independently selected from cyclopropylene, —O—, —OC(O)—, and —C(O)O—. In some embodiments, R² is optionally substituted C₁-C₂₄ alkyl or optionally substituted C₂-C₂₄ alkenyl, wherein 1-6 methylene units of R² are optionally replaced with a group each independently selected from cyclopropylene, —O—, —OC(O)—, and —C(O)O—. In some embodiments, R² is optionally substituted C₁-C₂₄ alkyl or optionally substituted C₂-C₂₄ alkenyl, wherein 1-6 methylene units of R² are replaced with a group each independently selected from cyclopropylene, —O—, —OC(O)—, and —C(O)O—. In some embodiments, R² is optionally substituted C₁-C₂₄ alkyl or optionally substituted C₂-C₂₄ alkenyl. In some embodiments, R² is optionally substituted C₁₀-C₂₄ alkyl or optionally substituted C₁₀-C₂₄ alkenyl, wherein 1-6 methylene units of R² are replaced with —O—.

[2431] In some embodiments, R² is optionally substituted C₅-C₃₆ alkyl or optionally substituted C₅-C₃₆ alkenyl, wherein 2 methylene units of R² are replaced with —O— to form an acetal within R², and wherein 1-6 methylene units of R² are optionally replaced with a group each independently selected from cyclopropylene, —O—, —OC(O)—, and —C(O)O—; and R^{2′} is optionally substituted C₁-C₃₆ alkyl or optionally substituted C₂-C₃₆ alkenyl, wherein 1-6 methylene units of R² are optionally replaced with a group each independently selected from cyclopropylene, —O—, —OC(O)—, and —C(O)O—.

[2432] In some embodiments, R² is optionally substituted C₁₀-C₂₄ alkyl or optionally substituted C₁₀-C₂₄ alkenyl, wherein 2 methylene units of R² are replaced with —O— to form an acetal within R² and wherein 1-6 methylene units of R² are optionally replaced with a group each independently selected from cyclopropylene, —O—, —OC(O)—, and —C(O)O—; and R^{2′} is optionally substituted C₁₀-C₃₆ branched alkyl or optionally substituted C₁₀-C₃₆ alkenyl, wherein 1-6 methylene units of R² are optionally replaced with a group each independently selected from cyclopropylene, —O—, —OC(O)—, and —C(O)O—.

[2433] In some embodiments, R² is C₃-C₃₆ branched alkyl or optionally substituted C₃-C₃₆ branched alkenyl, wherein 1-6 methylene units of R² are optionally replaced with a group each independently selected from cyclopropylene and —O—; and R^{2′} is optionally substituted C₁-C₃₆ alkyl or optionally substituted C₂-C₃₆ alkenyl, wherein 1-6 methylene units of R² are optionally replaced with a group each independently selected from cyclopropylene, —O—, —OC(O)— and —C(O)O—. In some embodiments, R² is optionally substituted C₁₀-C₂₄ branched alkyl or optionally substituted C₁₀-C₂₄ branched alkenyl, wherein 1-3 methylene units of R² are optionally replaced with —O—; and R^{2′} is optionally substituted C₁₀-C₃₆ alkyl or optionally substituted C₁₀-C₃₆ alkenyl, wherein 1-6 methylene units of R² are optionally replaced with a group each independently selected from cyclopropylene, —O—, —OC(O)—, and —C(O)O—.

[2434] In some embodiments, R² and/or R^{2′} is

[chemical structure]

wherein each q is independently selected from 0-12 and each Rº is independently selected, and is as described and defined herein.

[2435] In some embodiments, R² and/or R^{2′} is

[chemical structure]

wherein each q is independently selected from 0-12.

[2436] In some embodiments, R² is optionally substituted C₅-C₃₆ alkyl or optionally substituted C₅-C₃₆ alkenyl, wherein 2 methylene units of R² are replaced with —O— to form an acetal within R², and wherein 1-6 methylene units of R² are optionally replaced with a group each independently selected from cyclopropylene, —O—, —OC(O)—, and —C(O)O—; R² is optionally substituted C₁-C₃₆ alkyl or optionally substituted C₅-C₃₆ alkenyl, wherein 1-6 methylene units of R^{2′} are optionally replaced with a group each independently selected from cyclopropylene, —O—, —OC(O)—, and —C(O)O—.

[2437] In some embodiments, R² is optionally substituted C₁₀-C₂₄ alkyl, wherein 2 methylene units of R² are replaced with —O— to form an acetal within R²; and R^{2′} is optionally substituted C₁₀-C₂₄ alkyl, wherein 2 methylene units of R² are replaced with —O— to form an acetal within R^{2′}.

[2438] In some embodiments, each q is independently selected from 0-6. In some embodiments, each q is independently selected from 0-8. In some embodiments, each q is independently selected from 0-10. In some embodiments, each q is independently selected from 0-12.

[2439] In some embodiments, R² is optionally substituted C₁₀-C₂₄ alkyl or optionally substituted C₁₀-C₂₄ alkenyl, wherein 2 methylene units of R² are replaced with —O— to form an acetal within R² and wherein 1-6 methylene units of R² are optionally replaced with a group each independently selected from cyclopropylene, —O—, —OC(O)—, and —C(O)O—; and R^{2′} is optionally substituted C₁₀-C₂₄ alkenyl, wherein 1-3 methylene units of R² are optionally replaced with —O—.

[2440] In some embodiments, R² is selected from the group consisting of

[chemical structure]

[chemical structure]

[2441] In some embodiments, R² is

[chemical structure]

[2442] In some embodiments R² is

[chemical structure]

[2443] In some embodiments, R² is

[chemical structure]

[2444] In some embodiments, R² is selected from the group consisting of

[chemical structure]

[2445] In some embodiments, R^{2′} is optionally substituted C₁-C₃₆ alkyl, wherein 1-6 methylene units of R^{2′} are optionally replaced with a group each independently selected from cyclopropylene, —O—, —OC(O)—, and —C(O)O—. In some embodiments, R^{2′} is optionally substituted C₁-C₃₂ alkyl, wherein 1-6 methylene units of R^{2′} are optionally replaced with a group each independently selected from cyclopropylene, —O—, —OC(O)—, and —C(O)O—. In some embodiments, R^{2′} is optionally substituted C₁-C₃₀ alkyl, wherein 1-6 methylene units of R² are optionally replaced with a group each independently selected from cyclopropylene, —O—, —OC(O)—, and —C(O)O—. In some embodiments, R² is optionally substituted C₁-C₂₄ alkyl, wherein 1-6 methylene units of R^{2′} are optionally replaced with a group each independently selected from cyclopropylene, —O—, —OC(O)—, and —C(O)O—. In some embodiments, R^{2′} is optionally substituted C₁-C₂₄ alkyl, wherein 1-6 methylene units of R^{2′} are replaced with a group each independently selected from —O—, —OC(O)—, and —C(O)O—. In some embodiments, R² is optionally substituted C₁-C₂₄ alkyl. In some embodiments, R^{2′} is optionally substituted C₁₀-C₂₄ alkyl, wherein 1-6 methylene units of R^{2′} are replaced with —O—.

[2446] In some embodiments, R^{2′} is selected from the group consisting of

[chemical structure]

[chemical structure]

[2447] In some embodiments, R² and R^{2′} are each independently selected from the group consisting of

[chemical structure]

[2448] In some embodiments, R² is selected from the group consisting of

[chemical structure]

[2449] In some embodiments, R² is

[chemical structure]

[2450] In some embodiments, R² is

[chemical structure]

[2451] In some embodiments, R² is selected from the group consisting of

[chemical structure]

[2452] In some embodiments, R² is selected from the group consisting of

[chemical structure]

[2453] In some embodiments, R² is selected from the group consisting of

[chemical structure]

[2454] In some embodiments, the present disclosure includes a compound selected from any lipid in Table (IV) below or a pharmaceutically acceptable salt thereof:

Table (IV)
Non-Limiting Examples of Ionizable Lipids

| | Compound |
|---|---|
| Structure | No. |
| [chemical structure] | CX-1 |
| [chemical structure] | CX-2 |
| [chemical structure] | CX-3 |
| [chemical structure] | CX-4 |
| [chemical structure] | CX-5 |
| [chemical structure] | CX-6 |
| [chemical structure] | CX-7 |
| [chemical structure] | CX-8 |
| [chemical structure] | CX-8a |
| [chemical structure] | CX-8b |
| [chemical structure] | CX-8c |
| [chemical structure] | CX-9 |
| [chemical structure] | CX-10 |
| [chemical structure] | CX-11 |
| [chemical structure] | CX-12 |
| [chemical structure] | CX-13 |
| [chemical structure] | CX-14 |
| [chemical structure] | CX-15 |
| [chemical structure] | CX-16 |
| [chemical structure] | CX-17 |
| [chemical structure] | CX-18 |
| [chemical structure] | CX-19 |
| [chemical structure] | CX-20 |
| [chemical structure] | CX-21 |
| [chemical structure] | CX-22 |
| [chemical structure] | CX-23 |
| [chemical structure] | CX-24 |
| [chemical structure] | CX-25 |
| [chemical structure] | CX-26 |
| [chemical structure] | CX-27 |
| [chemical structure] | CX-28 |
| [chemical structure] | CX-29 |
| [chemical structure] | CX-30 |
| [chemical structure] | CX-30a |
| [chemical structure] | CX-30b |
| [chemical structure] | CX-30c |

[2455] In some embodiments, lipids of the present disclosure comprise a heterocyclic core, wherein the heteroatom is nitrogen. In some embodiments, the heterocyclic core comprises pyrrolidine or a derivative thereof. In some embodiments, the heterocyclic core comprises piperidine or a derivative thereof.

[2456] In some embodiments, a compound of the present disclosure is represented by Formula (CZ-T)

[chemical structure]

or a pharmaceutically acceptable salt thereof,
[2457] wherein
[2458] Z is selected from the group consisting of a bond,

[chemical structure]

[2459] each Y is independently selected from the group consisting of,

[chemical structure]

[2460] R¹ is —(CH₂)₁₋₆N(R^{a})₂;
[2461] each R² is independently optionally substituted C₁-C₃₆ alkyl or optionally substituted C₂-C₃₆ alkenyl, wherein 1-6 methylene units of R² are optionally replaced with a group each independently selected from cyclopropylene, —O—, —OC(O)—, and —C(O)O—;
[2462] each R^{a} is independently optionally substituted C₁-C₆ alkyl; or
[2463] two R^{a} are taken together, with the nitrogen on which they are attached, to form an optionally substituted 4-7 membered heterocyclyl ring;
[2464] m is 0, 1, or 2;
[2465] n is 1 or 2; and
[2466] p is 1 or 2.

[2467] In some embodiments, a compound of the present disclosure is represented by Formula (CZ-I-a), (CZ-I-b), (CZ-I-c), or (CZ-I-d)

[chemical structure]

or a pharmaceutically acceptable salt thereof.

[2468] In some embodiments, a compound of the present disclosure is represented by Formula (CZ-I-e) or (CZ-I-f)

[chemical structure]

or a pharmaceutically acceptable salt thereof.

[2469] In some embodiments, a compound of the present disclosure is represented by Formula (CZ-I-g)

[chemical structure]

or a pharmaceutically acceptable salt thereof.

[2470] In some embodiments, a compound of the present disclosure is represented by Formula (CZ-II)

[chemical structure]

or a pharmaceutically acceptable salt thereof,
[2471] wherein
[2472] Z is selected from the group consisting of a bond,

[chemical structure]

[2473] each Y is independently selected from the group consisting of,

[chemical structure]

[2474] R¹ is —(CH₂)₁₋₆N(R^{a})₂;
[2475] each R² is independently optionally substituted C₁-C₃₆ alkyl or optionally substituted C₂-C₃₆ alkenyl, wherein 1-6 methylene units of R² are optionally replaced with a group each independently selected from cyclopropylene, —O—, —OC(O)—, and —C(O)O—;
[2476] each R^{a} is independently optionally substituted C₁-C₆ alkyl; or
   [2477] two R^{a} are taken together, with the nitrogen on which they are attached, to form an optionally substituted 4-7 membered heterocyclyl ring;
[2478] m is 0, 1, or 2;
[2479] n is 1 or 2; and
[2480] p is 1 or 2.
   or a pharmaceutically acceptable salt thereof.

[2481] In some embodiments, a compound of the present disclosure is represented by Formula (CZ-II-a), (CZ-II-b), (CZ-II-c) or (CZ-II-d):

[chemical structure]

or a pharmaceutically acceptable salt thereof.

[2482] In some embodiments, a compound of the present disclosure is represented by Formula (CZ-II-e)

[chemical structure]

or a pharmaceutically acceptable salt thereof.

### Z

[2483] In some embodiments, Z is selected from the group consisting of a bond,

[chemical structure]

[2484] In some embodiments, Z is selected from the group consisting of

[chemical structure]

In some embodiments, Z is

[chemical structure]

[2485] In some embodiments, Z is selected from the group consisting of a bond,

[chemical structure]

wherein R¹ is attached at the position denoted by *.

[2486] In some embodiments, Z is selected from the group consisting of

[chemical structure]

wherein R¹ is attached at the position denoted by *.

[2487] In some embodiments, Z is

[chemical structure]

[2488] In some embodiments, Z is

[chemical structure]

wherein R¹ is attached at the position denoted by *.

[2489] In some embodiments, Z is

[chemical structure]

wherein R¹ is attached at the position denoted by *.

[2490] In some embodiments, Z is

[chemical structure]

wherein R¹ is attached at the position denoted by *.

[2491] In some embodiments, Z is

[chemical structure]

wherein R¹ is attached at the position denoted by *.

### Y

[2492] In some embodiments, Y is selected from the group consisting of,

[chemical structure]

In some embodiments, Y is

[chemical structure]

or.

[2493] In some embodiments, Y is selected from the group consisting of, H

[chemical structure]

wherein R² is attached at the position denoted by *.

[2494] In some embodiments, Y is, wherein R² is attached at the position denoted by *. In some embodiments, Y is, wherein R² is attached at the position denoted by *.

[2495] In some embodiments, Y is

[chemical structure]

wherein R² is attached at the position denoted by *.

[2496] In some embodiments, Y is

[chemical structure]

wherein R² is attached at the position denoted by *.

[2497] In some embodiments, Y is

[chemical structure]

[2498] In some embodiments, Y is

[chemical structure]

[2499] In some embodiments, Y is

[chemical structure]

[2500] In some embodiments, Y is

[chemical structure]

### R¹

[2501] In some embodiments, R¹ is —(CH₂)₁₋₆N(R^{a})₂. In some embodiments, R¹ is —(CH₂)₂N(R^{a})₂. In some embodiments, R¹ is —(CH₂)₃N(R^{a})₂. In some embodiments, R¹ is —(CH₂)₄N(R^{a})₂. In some embodiments, R¹ is —(CH₂)₁₋₆N(Me)₂. In some embodiments, R¹ is —(CH₂)₁₋₆N(Et)₂. In some embodiments, R¹ is —(CH₂)₁₋₆N(n-Pr)₂. In some embodiments, R¹ is —(CH₂)₁₋₆N(CZ—I—Pr)₂. In some embodiments, R¹ is —(CH₂)₂N(Me)₂. In some embodiments, R¹ is —(CH₂)₃N(Me)₂. In some embodiments, R¹ is —(CH₂)₄N(Me)₂. In some embodiments, R¹ is —(CH₂)₂N(Et)₂. In some embodiments, R¹ is —(CH₂)₃N(Et)₂. In some embodiments, R¹ is —(CH₂)₄N(Et)₂.

[2502] In some embodiments, R¹ is selected from the group consisting of

[chemical structure]

[2503] In some embodiments, R¹ is selected from the group consisting of

[chemical structure]

[2504] In some embodiments, R¹ is selected from the group consisting of

[chemical structure]

### R²

[2505] In some embodiments, R² is optionally substituted C₁-C₃₆ alkyl or optionally substituted C₂-C₃₆ alkenyl, wherein 1-6 methylene units of R² are optionally replaced with a group each independently selected from cyclopropylene, —O—, —OC(O)—, and —C(O)O—. In some embodiments, R² is optionally substituted C₁-C₃₂ alkyl or optionally substituted C₂-C₃₂ alkenyl, wherein 1-6 methylene units of R² are optionally replaced with a group each independently selected from cyclopropylene, —O—, —OC(O)—, and —C(O)O—. In some embodiments, R² is optionally substituted C₁-C₃₀ alkyl or optionally substituted C₂-C₃₀ alkenyl, wherein 1-6 methylene units of R² are optionally replaced with a group each independently selected from cyclopropylene, —O—, —OC(O)—, and —C(O)O—. In some embodiments, R² is optionally substituted C₁-C₂₄ alkyl or optionally substituted C₂-C₂₄ alkenyl, wherein 1-6 methylene units of R² are optionally replaced with a group each independently selected from cyclopropylene, —O—, —OC(O)—, and —C(O)O—. In some embodiments, R² is optionally substituted C₁-C₂₄ alkyl or optionally substituted C₂-C₂₄ alkenyl, wherein 1-6 methylene units of R² are replaced with a group each independently selected from —O—, —OC(O)—, and —C(O)O—. In some embodiments, R² is optionally substituted C₁-C₂₄ alkyl or optionally substituted C₂-C₂₄ alkenyl. In some embodiments, R² is optionally substituted C₁₀-C₂₄ alkyl or optionally substituted C₁₀-C₂₄ alkenyl, wherein 1-6 methylene units of R² are replaced with —O—.

[2506] In some embodiments, R² is

[chemical structure]

wherein each q is independently selected from 0-12 and each Rº is independently selected and defined herein.

[2507] In some embodiments, R² is

[chemical structure]

wherein each q is independently selected from 0-12.

[2508] In some embodiments, each q is independently selected from 0-6. In some embodiments, each q is independently selected from 0-8. In some embodiments, each q is independently selected from 0-10. In some embodiments, each q is independently selected from 0-12.

[2509] In some embodiments, R² is selected from the group consisting of

[chemical structure]

[chemical structure]

[2510] In some embodiments, R² is selected from the group consisting of

[chemical structure]

[2511] In some embodiments, the present disclosure includes a compound selected from any lipid in Table (V) below or a pharmaceutically acceptable salt thereof:

TABLE (V)
Non-Limiting Examples of Ionizable Lipids

| | Compound |
|---|---|
| Structure | No. |
| [chemical structure] | CZ-1 |
| [chemical structure] | CZ-2 |
| [chemical structure] | CZ-3 |
| [chemical structure] | CZ-4 |
| [chemical structure] | CZ-5 |
| [chemical structure] | CZ-6 |
| [chemical structure] | CZ-7 |
| [chemical structure] | CZ-8 |
| [chemical structure] | CZ-9 |
| [chemical structure] | CZ-10 |
| [chemical structure] | CZ-11 |
| [chemical structure] | CZ-12 |
| [chemical structure] | CZ-13 |
| [chemical structure] | CZ-14 |
| [chemical structure] | CZ-15 |
| [chemical structure] | CZ-16 |
| [chemical structure] | CZ-17 |
| [chemical structure] | CZ-18 |

ii. Structural Lipids

[2512] In some embodiments, an LNP comprises a structural lipid. Structural lipids can be selected from the group consisting of, but are not limited to, cholesterol, fecosterol, fucosterol, beta sitosterol, sitosterol, ergosterol, campesterol, stigmasterol, brassicasterol, tomatidine, cholic acid, sitostanol, litocholic acid, tomatine, ursolic acid, alpha-tocopherol, Vitamin D3, Vitamin D2, Calcipotriol, botulin, lupeol, oleanolic acid, beta-sitosterol-acetate and mixtures thereof. In some embodiments, the structural lipid is cholesterol. In some embodiments, the structural lipid is a cholesterol analogue disclosed by Patel, et al., Nat Commun., 11, 983 (2020), which is incorporated herein by reference in its entirety. In some embodiments, the structural lipid includes cholesterol and a corticosteroid (such as prednisolone, dexamethasone, prednisone, and hydrocortisone), or any combinations thereof. In some embodiments, a structural lipid is described in international patent application WO2019152557A1, which is incorporated herein by reference in its entirety.

[2513] In some embodiments, a structural lipid is a cholesterol analog. Using a cholesterol analog may enhance endosomal escape as described in Patel et al., Naturally-occurring cholesterol analogues in lipid nanoparticles induce polymorphic shape and enhance intracellular delivery of mRNA, Nature Communications (2020), which is incorporated herein by reference.

[2514] In some embodiments, a structural lipid is a phytosterol. Using a phytosterol may enhance endosomal escape as described in Herrera et al., Illuminating endosomal escape of polymorphic lipid nanoparticles that boost mRNA delivery, Biomaterials Science (2020), which is incorporated herein by reference.

[2515] In some embodiments, a structural lipid contains plant sterol mimetics for enhanced endosomal release.

iii. PEGylated Lipids

[2516] A PEGylated lipid is a lipid modified with polyethylene glycol.

[2517] In some embodiments, an LNP comprises one, two or more PEGylated lipid or PEG-modified lipid. A PEGylated lipid may be selected from the non-limiting group consisting of PEG-modified phosphatidylethanolamines, PEG-modified phosphatidic acids, PEG-modified ceramides, PEG-modified dialkylamines, PEG-modified diacylglycerols, PEG-modified dialkylglycerols, and mixtures thereof. For example, a PEG lipid may be PEG-c-DOMG, PEG-DMG, PEG-DLPE, PEG-DMPE, PEG-DPPC, or a PEG-DSPE lipid.

[2518] In some embodiments, the PEGylated lipid is selected from (R)-2,3-bis(octadecyloxy)propyl-1-(methoxypoly(ethyleneglycol)2000)propylcarbamate, PEG-S-DSG, PEG-S-DMG, PEG-PE, PEG-PAA, PEG-OH DSPE C18, PEG-DSPE, PEG-DSG, PEG-DPG, PEG-DOMG, PEG-DMPE Na, PEG-DMPE, PEG-DMG2000, PEG-DMG C14, PEG-DMG 2000, PEG-DMG, PEG-DMA, PEG-Ceramide C16, PEG-C-DOMG, PEG-c-DMOG, PEG-c-DMA, PEG-cDMA, PEGA, PEG750-C-DMA, PEG400, PEG2k-DMG, PEG2k-C11, PEG2000-PE, PEG2000P, PEG2000-DSPE, PEG2000-DOMG, PEG2000-DMG, PEG2000-C-DMA, PEG2000, PEG200, PEG(2k)-DMG, PEG DSPE C18, PEG DMPE C14, PEG DLPE C12, PEG Click DMG C14, PEG Click C12, PEG Click C10, N(Carbonyl-methoxypolyethylenglycol-2000)-1,2-distearoyl-sn-glycero3-phosphoethanolamine, Myrj52, mPEG-PLA, MPEG-DSPE, mPEG3000-DMPE, MPEG-2000-DSPE, MPEG2000-DSPE, mPEG2000-DPPE, mPEG2000-DMPE, mPEG2000-DMG, mDPPE-PEG2000, 1,2-distearoyl-sn-glycero-3-phosphoethanolamine-PEG2000, HPEG-2K-LIPD, Folate PEG-DSPE, DSPE-PEGMA 500, DSPE-PEGMA, DSPE-PEG6000, DSPE-PEG5000, DSPE-PEG2K-NAG, DSPE-PEG2k, DSPE-PEG2000maleimide, DSPE-PEG2000, DSPE-PEG, DSG-PEGMA, DSG-PEG5000, DPPE-PEG-2K, DPPE-PEG, DPPE-mPEG2000, DPPE-mPEG, DPG-PEGMA, DOPE-PEG2000, DMPE-PEGMA, DMPE-PEG2000, DMPE-Peg, DMPE-mPEG2000, DMG-PEGMA, DMG-PEG2000, DMG-PEG, distearoyl-glycerol-polyethyleneglycol, C18PEG750, C18PEG5000, C18PEG3000, C18PEG2000, C16PEG2000, C14PEG2000, C18-PEG5000, C18PEG, C16PEG, C16 mPEG (polyethylene glycol) 2000 Ceramide, C14-PEG-DSPE200, C14-PEG2000, C14PEG2000, C14-PEG 2000, C14-PEG, C14PEG, 14.0-PEG2KPE, 1,2-distearoyl-sn-glycero-3-phosphoethanolamine-PEG2000, (R)-2,3-bis(octadecyloxy)propyl-1-(methoxypoly(ethyleneglycol)2000)propylcarbamate, (PEG)-C-DOMG, PEG-C-DMA, and DSPE-PEG-X.

[2519] In some embodiments, the LNP comprises a PEGylated lipid disclosed in one of US 2019/0240354; US 2010/0130588; US 2021/0087135; WO 2021/204179; US 2021/0128488; US 2020/0121809; US 2017/0119904; US 2013/0108685; US 2013/0195920; US 2015/0005363; US 2014/0308304; US 2013/0053572; WO 2019/232095A1; WO 2021/077067; WO 2019/152557; US 2015/0203446; US 2017/0210697; US 2014/0200257; or WO 2019/089828A1, each of which is incorporated by reference herein in their entirety.

[2520] In some embodiments, the LNP comprises a PEGylated lipid substitute in place of the PEGylated lipid. All embodiments disclosed herein that contemplate a PEGylated lipid should be understood to also apply to PEGylated lipid substitutes. In some embodiments, the LNP comprises a polysarcosine-lipid conjugate, such as those disclosed in US 2022/0001025 A1, which is incorporated by reference herein in its entirety.

iv. Phospholipids

[2521] In some embodiments, an LNP of the present disclosure comprises a phospholipid. Phospholipids useful in the compositions and methods may be selected from the non-limiting group consisting of 1,2-distearoyl-sn-glycero-3-phosphocholine (DSPC), 1,2-dioleoyl-sn-glycero-3-phosphoethanolamine (DOPE), 1,2-dilinoleoyl-sn-glycero-3-phosphocholine (DLPC), 1,2-dimyristoyl-sn-glycero-phosphocholine (DMPC), 1.2-dioleoyl-sn-glycero-3-phosphocholine (DOPC), 1,2-dipalmitoyl-sn-glycero-3-phosphocholine (DPPC), 1,2-diundecanoyl-sn-glycero-phosphocholine (DUPC), 1-palmitoyl-2-oleoyl-sn-glycero-3-phosphocho line (POPC), 1,2-di-O-octadecenyl-sn-glycero-3-phosphocholine (18:0 Diether PC), 1-oleoyl-2-cholesterylhemisuccinoyl-sn-glycero-3-phosphocholine (OChemsPC), 1-hexadecyl-sn-glycero-3-phosphocholine (C16 Lyso PC), 1,2-dilinolenoyl-sn-glycero-3-phosphocholine, 1,2-diarachidonoyl-sn-glycero-3-phosphocholine, 1,2-didocosahexaenoyl-sn-glycero-3-phosphocholine, 1,2-diphytanoylsn-glycero-3-phosphoethanolamine (ME 16.0 PE), 1,2-distearoyl-sn-glycero-3-phosphoethanolamine, 1,2-dilinoleoyl-sn-glycero-3-phosphoethanolamine, 1,2-dilinolenoyl-sn-glycero-3-phosphoethanolamine, 1,2-diarachidonoyl-sn-glycero-3-phosphoethanolamine, 1,2-didocosahexaenoyl-sn-glycero-3-phosphoethanolamine, 1,2-dioleoyl-sn-glycero-3-phospho-rac-(1-glycerol) sodium salt (DOPG), sodium (S)-2-ammonio-3-((((R)-2-(oleoyloxy)-3-(stearoyloxy)propoxy)oxidophosphoryl)oxy)propanoate (L-α-phosphatidylserine; Brain PS), dimyristoyl phosphatidylcholine (DMPC), dimyristoyl phosphoethanolamine (DMPE), dimyristoylphosphatidylglycerol (DMPG), dioleoyl-phosphatidylethanolamine4-(N-maleimidomethyl)-cyclohexane-1-carboxylate (DOPE-mal), dioleoylphosphatidylglycerol (DOPG), 1,2-dioleoyl-sn-glycero-3-(phospho-L-serine) (DOPS), acell-fusogenicphospholipid (DPhPE), dipalmitoylphosphatidylethanolamine (DPPE), 1,2-Dielaidoyl-sn-phosphatidylethanolamine (DEPE), dipalmitoylphosphatidylglycerol (DPPG), dipalmitoylphosphatidylserine (DPPS), distearoylphosphatidylcholine (DSPC), distearoyl-phosphatidyl-ethanolamine (DSPE), distearoyl phosphoethanolamineimidazole (DSPEI), 1,2-diundecanoyl-sn-glycero-phosphocholine (DUPC), egg phosphatidylcholine (EPC), 1,2-dioleoyl-sn-glycero-3-phosphate (18:1 PA; DOPA), ammonium bis((S)-2-hydroxy-3-(oleoyloxy)propyl) phosphate (18:1 DMP; LBPA), 1,2-dioleoyl-sn-glycero-3-phospho-(1′-myo-inositol) (DOPI; 18:1 PI), 1,2-distearoyl-sn-glycero-3-phospho-L-serine (18:0 PS), 1,2-dilinoleoyl-sn-glycero-3-phospho-L-serine (18:2 PS), 1-palmitoyl-2-oleoyl-sn-glycero-3-phospho-L-serine (16:0-18:1 PS; POPS), 1-stearoyl-2-oleoyl-sn-glycero-3-phospho-L-serine (18:0-18:1 PS), 1-stearoyl-2-linoleoyl-sn-glycero-3-phospho-L-serine (18:0-18:2 PS), 1-oleoyl-2-hydroxy-sn-glycero-3-phospho-L-serine (18:1 Lyso PS), 1-stearoyl-2-hydroxy-sn-glycero-3-phospho-L-serine (18:0 Lyso PS), and sphingomyelin. In some embodiments, an LNP includes DSPC. In certain embodiments, an LNP includes DOPE. In some embodiments, an LNP includes both DSPC and DOPE.

[2522] In some embodiments, an LNP comprises a phospholipid selected from 1-pentadecanoyl-2-oleoyl-sn-glycero-3-phosphocholine, 1-myristoyl-2-palmitoyl-sn-glycero-3-phosphocholine, 1-myristoyl-2-stearoyl-sn-glycero-3-phosphocholine, 1-palmitoyl-2-myristoyl-sn-glycero-3-phosphocholine, 1-palmitoyl-2-stearoyl-sn-glycero-3-phosphocholine, 1-palmitoyl-2-oleoyl-glycero-3-phosphocholine, 1-palmitoyl-2-linoleoyl-sn-glycero-3-phosphocholine, 1-palmitoyl-2-arachidonoyl-sn-glycero-3-phosphocholine, 1-palmitoyl-2-docosahexaenoyl-sn-glycero-3-phosphocholine, 1-stearoyl-2-myristoyl-sn-glycero-3-phosphocholine, 1-stearoyl-2-palmitoyl-sn-glycero-3-phosphocholine, 1-stearoyl-2-oleoyl-sn-glycero-3-phosphocholine, 1-stearoyl-2-linoleoyl-sn-glycero-3-phosphocholine, 1-stearoyl-2-arachidonoyl-sn-glycero-3-phosphocholine, 1-stearoyl-2-docosahexaenoyl-sn-glycero-3-phosphocholine, 1-oleoyl-2-myristoyl-sn-glycero-3-phosphocholine, 1-oleoyl-2-palmitoyl-sn-glycero-3-phosphocholine, 1-oleoyl-2-stearoyl-sn-glycero-3-phosphocholine, 1-palmitoyl-2-acetyl-sn-glycero-3-phosphocholine, 1,2-dioleoyl-sn-glycero-3-phospho-(1′-myo-inositol-3′,4′-bisphosphate), 1,2-dioleoyl-sn-glycero-3-phospho-(1′-myo-inositol-3′,5′-bisphosphate), 1,2-dioleoyl-sn-glycero-3-phospho-(1′-myo-inositol-4′,5′-bisphosphate), 1,2-dioleoyl-sn-glycero-3-phospho-(1′-myo-inositol-3′,4′,5′-trisphosphate), 1,2-dioleoyl-sn-glycero-3-phospho-(1′-myo-inositol-3′-phosphate), 1,2-dioleoyl-sn-glycero-3-phospho-(1′-myo-inositol-4′-phosphate), 1,2-dioleoyl-sn-glycero-3-phospho-(1′-myo-inositol-5′-phosphate), 1,2-dioleoyl-sn-glycero-3-phospho-(1′-myo-inositol), 1,2-dioleoyl-sn-glycero-3-phospho-L-serine, and 1-(8Z-octadecenoyl)-2-palmitoyl-sn-glycero-3-phosphocholine.

[2523] In some embodiments, a phospholipid tail may be modified in order to promote endosomal escape as described in U.S. Application Publication 2021/0121411, which is incorporated herein by reference.

[2524] In some embodiments, the LNP comprises a phospholipid disclosed in one of US 2019/0240354; US 2010/0130588; US 2021/0087135; WO 2021/204179; US 2021/0128488; US 2020/0121809; US 2017/0119904; US 2013/0108685; US 2013/0195920; US 2015/0005363; US 2014/0308304; US 2013/0053572; WO 2019/232095A1; WO 2021/077067; WO 2019/152557; US 2017/0210697; or WO 2019/089828A1, each of which is incorporated by reference herein in their entirety.

[2525] In some embodiments, phospholipids disclosed in US 2020/0121809 have the following structure:

[chemical structure]

wherein R¹ and R² are each independently a branched or straight, saturated or unsaturated carbon chain (e.g., alkyl, alkenyl, alkynyl).
vi. Targeting Moieties

[2526] In some embodiments, the lipid nanoparticle further comprises a targeting moiety. The targeting moiety may be an antibody or a fragment thereof. The targeting moiety may be capable of binding to a target antigen.

[2527] In some embodiments, the pharmaceutical composition comprises a targeting moiety that is operably connected to a lipid nanoparticle. In some embodiments, the targeting moiety is capable of binding to a target antigen. In some embodiments, the target antigen is expressed in a target organ. In some embodiments, the target antigen is expressed more in the target organ than it is in the liver.

[2528] In some embodiments, the targeting moiety is an antibody as described in WO2016189532A1, which is incorporated herein by reference. For example, in some embodiments, the targeted particles are conjugated to a specific anti-CD38 monoclonal antibody (mAb), which allows specific delivery of the siRNAs encapsulated within the particles at a greater percentage to B-cell lymphocytes malignancies (such as MCL) than to other subtypes of leukocytes.

[2529] In some embodiments, the lipid nanoparticles may be targeted when conjugated/attached/associated with a targeting moiety such as an antibody.

vii. Zwitterionic Amino Lipids

[2530] In some embodiments, an LNP comprises a zwitterionic lipid. In some embodiments, an LNP comprising a zwitterionic lipid does not comprise a phospholipid.

[2531] Zwitterionic amino lipids have been shown to be able to self-assemble into LNPs without phospholipids to load, stabilize, and release mRNAs intracellularly as described in U.S. Patent Application 20210121411, which is incorporated herein by reference in its entirety. Zwitterionic, ionizable cationic and permanently cationic helper lipids enable tissue-selective mRNA delivery and CRISPR-Cas9 gene editing in spleen, liver and lungs as described in Liu et al., Membrane-destabilizing ionizable phospholipids for organ-selective mRNA delivery and CRISPR-Cas gene editing, Nat Mater. (2021), which is incorporated herein by reference in its entirety.

[2532] The zwitterionic lipids may have head groups containing a cationic amine and an anionic carboxylate as described in Walsh et al., Synthesis, Characterization and Evaluation of Ionizable Lysine-Based Lipids for siRNA Delivery, Bioconjug Chem. (2013), which is incorporated herein by reference in its entirety. Ionizable lysine-based lipids containing a lysine head group linked to a long-chain dialkylamine through an amide linkage at the lysine α-amine may reduce immunogenicity as described in Walsh et al., Synthesis, Characterization and Evaluation of Ionizable Lysine-Based Lipids for siRNA Delivery, Bioconjug Chem. (2013).

viii. Additional Lipid Components

[2533] In some embodiments, the LNP compositions of the present disclosure further comprise one or more additional lipid components capable of influencing the tropism of the LNP. In some embodiments, the LNP further comprises at least one lipid selected from DDAB, EPC, 14PA, 18BMP, DODAP, DOTAP, and C12-200 (see Cheng, et al. Nat Nanotechnol. 2020 April; 15(4): 313-320.; Dillard, et al. PNAS 2021 Vol. 118 No. 52.).

[2534] In some embodiments, the LNP compositions of the present disclosure comprise, or further comprise one or more lipids selected from 1,2-di-O-octadecenyl-sn-glycero-3-phosphocholine (18:0 Diether PC), 1,2-dilinolenoyl-sn-glycero-3-phosphocholine (18:3 PC), Acylcarnosine (AC), 1-hexadecyl-sn-glycero-3-phosphocholine (C16 Lyso PC), N-oleoyl-sphingomyelin (SPM) (C18:1), N-lignoceryl SPM (C24:0), N-nervonoylshphingomyelin (C24:1), Cardiolipin (CL), 1,2-bis(tricosa-10,12-diynoyl)-sn-glycero-3-phosphocholine (DC8-9PC), dicetyl phosphate (DCP), dihexadecyl phosphate (DCP1), 1,2-Dipalmitoylglycerol-3-hemisuccinate (DGSucc), short-chain bis-n-heptadecanoyl phosphatidylcholine (DHPC), dihexadecoyl-phosphoethanolamine (DHPE), 1,2-dilinoleoyl-sn-glycero-3-phosphocholine (DLPC), 1,2-dilauroyl-sn-glycero-3-PE (DLPE), dimyristoyl glycerol hemisuccinate (DMGS), dimyristoyl phosphatidylcholine (DMPC), dimyristoyl phosphoethanolamine (DMPE), dimyristoylphosphatidylglycerol (DMPG), dioleyloxybenzylalcohol (DOBA), 1,2-dioleoylglyceryl-3-hemisuccinate (DOGHEMS), N-[2-(2-{2-[2-(2,3-Bis-octadec-9-enyloxy-propoxy)-ethoxy]-ethoxy}-ethoxy)-ethyl]-3-(3,4,5-1rihydroxy-6-hydroxymethyl-1etrahydro-pyran-2-ylsulfanyl)-propionamide (DOGP4αMan), dioleoylphosphatidylcholine (DOPC), dioleoylphosphatidylethanolamine (DOPE), dioleoyl-phosphatidylethanolamine4-(N-maleimidomethyl)-cyclohexane-1-carboxylate (DOPE-mal), dioleoylphosphatidylglycerol (DOPG), 1,2-dioleoyl-sn-glycero-3-(phospho-L-serine) (DOPS), acell-fusogenicphospholipid (DPhPE), dipalmitoylphosphatidylethanolamine (DPPE), dipalmitoylphosphatidylglycerol (DPPG), dipalmitoylphosphatidylserine (DPPS), distearoylphosphatidylcholine (DSPC), distearoyl-phosphatidyl-ethanolamine (DSPE), distearoyl phosphoethanolamineimidazole (DSPEI), 1,2-diundecanoyl-sn-glycero-phosphocholine (DUPC), egg phosphatidylcholine (EPC), histaminedistearoylglycerol (HDSG), 1,2-Dipalmitoylglycerol-hemisuccinate-Nα-Histidinyl-Hemisuccinate (HistSuccDG), N-(5′-hydroxy-3′-oxypentyl)-10-12-pentacosadiynamide (h-Pegi-PCDA), 2-[1-hexyloxyethyl]-2-devinylpyropheophorbide-a (HPPH), hydrogenatedsoybeanphosphatidylcholine (HSPC), 1,2-Dipalmitoylglycerol-O-α-histidinyl-Na-hemisuccinate (IsohistsuccDG), mannosialized dipalmitoylphosphatidylethanolamine (ManDOG), 1,2-Dioleoyl-sn-Glycero-3-Phosphoethanolamine-N-[4-(p-maleimidomethyl)cyclohexane-carboxamide](MCC-PE), 1,2-diphytanoyl-sn-glycero-3-phosphoethanolamine (ME 16:0 PE), 1-myristoyl-2-hydroxy-sn-glycero-phosphocholine (MHPC), a thiol-reactive maleimide headgroup lipid e.g. 1,2-dioleoyl-sn-glycero-3-phosphoethanolamine-N-[4-(p-maleimidophenyl)but-yramid (MPB-PE), Nervonic Acid (NA), sodium cholate (NaChol), 1,2-dioleoyl-sn-glycero-3-[phosphoethanolamine-N-dodecanoyl (NC12-DOPE), 1-oleoyl-2-cholesteryl hemisuccinoyl-sn-glycero-3-phosphocholine (OChemsPC), phosphatidylethanolamine lipid (PE), PE lipid conjugated with polyethylene glycol (PEG) (e.g., polyethylene glycol-distearoylphosphatidylethanolamine lipid (PEG-PE)), phosphatidylglycerol (PG), partially hydrogenated soy phosphatidylchloline (PHSPC), phosphatidylinositol lipid (PI), phosphotidylinositol-4-phosphate (PIP), palmitoyloleoylphosphatidylcholine (POPC), phosphatidylethanolamine (POPE), palmitoyloleyolphosphatidylglycerol (POPG), phosphatidylserine (PS), lissamine rhodamine B-phosphatidylethanolamine lipid (Rh-PE), purified soy-derived mixture of phospholipids (SIOO), phosphatidylcholine (SM), 18-1-trans-PE,1-stearoyl-2-oleoyl-phosphatidyethanolamine (SOPE), soybean phosphatidylcholine (SPC), sphingomyelins (SPM), alpha,alpha-trehalose-6,6′-dibehenate (TDB), 1,2-dielaidoyl-sn-glycero-3-phophoethanolamine (transDOPE), ((23S,5R)-3-(bis(hexadecyloxy)methoxy)-5-(5-methyl-2,4-dioxo-3,4-dihydropyrimidin-1(2H)-yl)tetrahydrofuran-2-yl)methylmethylphosphate, 1,2-diarachidonoyl-sn-glycero-3-phosphocholine, 1,2-diarachidonoyl-sn-glycero-3-phosphoethanolamine, 1,2-didocosahexaenoyl-sn-glycero-3-phosphocholine, 1,2-didocosahexaenoyl-sn-glycero-3-phosphoethanolamine, 1,2-dilinolenoyl-sn-glycero-3-phosphocholine, 1,2-dilinolenoyl-sn-glycero-3-phosphoethanolamine, 1,2-dilinoleoyl-sn-glycero-3-phosphoethanolamine, 1,2-dioleyl-sn-glycero-3-phosphoethanolamine, 1,2-distearoyl-sn-glycero-3-phosphoethanolamine, 16-O-monomethyl PE, 16-O-dimethyl PE, and dioleylphosphatidylethanolamine.

viii. LNP Pharmaceutical Compositions

[2535] In some embodiments, a nanoparticle includes an ionizable lipid, a phospholipid, a PEG lipid, and a structural lipid. In certain embodiments, the lipid component of the nanoparticle composition includes about 30 mol % to about 60 mol % ionizable lipid, about 0 mol % to about 30 mol % phospholipid, about 18.5 mol % to about 48.5 mol % structural lipid, and about 0 mol % to about 10 mol % of PEG lipid, provided that the total mol % does not exceed 100%. In some embodiments, the lipid component of the nanoparticle composition includes about 35 mol % to about 55 mol % ionizable lipid, about 5 mol % to about 25 mol % phospholipid, about 30 mol % to about 40 mol % structural lipid, and about 0 mol % to about 10 mol % of PEG lipid. In a particular embodiment, the lipid component includes about 50 mol % ionizable lipid, about 10 mol % phospholipid, about 38.5 mol % structural lipid, and about 1.5 mol % of PEG lipid. In another particular embodiment, the lipid component includes about 40 mol % ionizable lipid, about 20 mol % phospholipid, about 38.5 mol % structural lipid, and about 1.5 mol % of PEG lipid. In another particular embodiment, the lipid component includes about 48.5 mol % ionizable lipid, about 10 mol % phospholipid, about 40 mol % structural lipid, and about 1.5 mol % of PEG lipid. In another particular embodiment, the lipid component includes about 48.5 mol % ionizable lipid, about 10 mol % phospholipid, about 39 mol % structural lipid, and about 2.5 mol % of PEG lipid. In some embodiments, the phospholipid may be DOPE or DSPC. In other embodiments, the PEG lipid may be PEG-DMG and/or the structural lipid may be cholesterol. The amount of active agent in a nanoparticle composition may depend on the size, composition, desired target and/or application, or other properties of the nanoparticle composition as well as on the properties of the active agent. For example, the amount of active agent useful in a nanoparticle composition may depend on the size, sequence, and other characteristics of the active agent. The relative amounts of active agent and other elements (e.g., lipids) in a nanoparticle composition may also vary. In some embodiments, the wt/wt ratio of the lipid component to an enzyme in a nanoparticle composition may be from about 5:1 to about 60:1, such as 5:1, 6:1, 7:1, 8:1, 9:1, 10:1, 11:1, 12:1, 13:1, 14:1, 15:1, 16:1, 17:1, 18:1, 19:1, 20:1, 25:1, 30:1, 35:1, 40:1, 45:1, 50:1, and 60:1. The amount of a enzyme in a nanoparticle composition may, for example, be measured using absorption spectroscopy (e.g., ultraviolet-visible spectroscopy).

[2536] In some embodiments, a nanoparticle composition comprising an active agent of the present disclosure is formulated to provide a specific E:P ratio. The E:P ratio of the composition refers to the molar ratio of nitrogen atoms in one or more lipids to the number of phosphate groups in an RNA active agent. In general, a lower E:P ratio is preferred. The one or more enzymes, lipids, and amounts thereof may be selected to provide an E:P ratio from about 2:1 to about 30:1, such as 2:1, 3:1, 4:1, 5:1, 6:1, 7:1, 8:1, 9:1, 10:1, 12:1, 14:1, 16:1, 18:1, 20:1, 22:1, 24:1, 26:1, 28:1, or 30:1. In certain embodiments, the E:P ratio may be from about 2:1 to about 8:1. In other embodiments, the E:P ratio is from about 5:1 to about 8:1. For example, the E:P ratio may be about 5.0:1, about 5.5:1, about 5.67:1, about 6.0:1, about 6.5:1, or about 7.0:1.

[2537] The characteristics of a nanoparticle composition may depend on the components thereof. For example, a nanoparticle composition including cholesterol as a structural lipid may have different characteristics than a nanoparticle composition that includes a different structural lipid. Similarly, the characteristics of a nanoparticle composition may depend on the absolute or relative amounts of its components. For instance, a nanoparticle composition including a higher molar fraction of a phospholipid may have different characteristics than a nanoparticle composition including a lower molar fraction of a phospholipid. Characteristics may also vary depending on the method and conditions of preparation of the nanoparticle composition. Nanoparticle compositions may be characterized by a variety of methods. For example, microscopy (e.g., transmission electron microscopy or scanning electron microscopy) may be used to examine the morphology and size distribution of a nanoparticle composition. Dynamic light scattering or potentiometry (e.g., potentiometric titrations) may be used to measure Zeta potentials. Dynamic light scattering may also be utilized to determine particle sizes. Instruments such as the Zetasizer Nano ZS (Malvern Instruments Ltd, Malvern, Worcestershire, UK) may also be used to measure multiple characteristics of a nanoparticle composition, Such as particle size, polydispersity index, and Zeta potential.

[2538] The mean size of a nanoparticle composition may be between 10s of nm and 100s of nm, e.g., measured by dynamic light scattering (DLS). For example, the mean size may be from about 40 nm to about 150 nm, such as about 40 nm, 45 nm, 50 nm, 55 nm, 60 nm, 65 nm, 70 nm, 75 nm, 80 nm, 85 nm, 90 nm, 95 nm, 100 nm, 105 nm, 110 nm, 115 nm, 120 nm, 125 nm, 130 nm, 135 nm, 140 nm, 145 nm, or 150 nm. In some embodiments, the mean size of a nanoparticle composition may be from about 50 nm to about 100 nm, from about 50 nm to about 90 nm, from about 50 nm to about 80 nm, from about 50 nm to about 70 nm, from about 50 nm to about 60 nm, from about 60 nm to about 100 nm, from about 60 nm to about 90 nm, from about 60 nm to about 80 nm, from about 60 nm to about 70 nm, from about 70 nm to about 100 nm, from about 70 nm to about 90 nm, from about 70 nm to about 80 nm, from about 80 nm to about 100 nm, from about 80 nm to about 90 nm, or from about 90 nm to about 100 nm. In certain embodiments, the mean size of a nanoparticle composition may be from about 70 nm to about 100 nm. In a particular embodiment, the mean size may be about 80 nm. In other embodiments, the mean size may be about 100 nm.

[2539] A nanoparticle composition may be relatively homogenous. A polydispersity index may be used to indicate the homogeneity of a nanoparticle composition, e.g., the particle size distribution of the nanoparticle compositions. A small (e.g., less than 0.3) polydispersity index generally indicates a narrow particle size distribution. A nanoparticle composition may have a polydispersity index from about 0 to about 0.25, such as 0.01, 0.02, 0.03, 0.04, 0.05, 0.06, 0.07, 0.08, 0.09, 0.10, 0.11, 0.12, 0.13, 0.14, 0.15, 0.16, 0.17, 0.18, 0.19, 0.20, 0.21, 0.22, 0.23, 0.24, or 0.25.

[2540] The Zeta potential of a nanoparticle composition may be used to indicate the electrokinetic potential of the composition. For example, the Zeta potential may describe the surface charge of a nanoparticle composition. Nanoparticle compositions with relatively low charges, positive or negative, are generally desirable, as more highly charged species may interact undesirably with cells, tissues, and other elements in the body. In some embodiments, the Zeta potential of a nanoparticle composition may be from about −10 mV to about +20 mV, from about −10 mV to about +15 mV, from about −10 mV to about +10 mV, from about −10 mV to about +5 mV, from about −10 mV to about 0 mV, from about −10 mV to about −5 mV, from about −5 mV to about +20 mV, from about −5 mV to about +15 mV, from about −5 mV to about +10 mV, from about −5 mV to about +5 mV, from about −5 mV to about 0 mV, from about 0 mV, to about +20 mV, from about 0 mV to about +15 mV, from about 0 mV to about +10 mV, from about 0 mV to about +5 mV, from about +5 mV to about +20 mV, from about +5 mV, to about +15 mV, or from about +5 mV to about +10 mV.

[2541] The efficiency of encapsulation of a payload describes the amount of payload that is encapsulated or otherwise associated with a nanoparticle composition after preparation, relative to the initial amount provided. The encapsulation efficiency is desirably high (e.g., close to 100%). The encapsulation efficiency may be measured, for example, by comparing the amount of payload in a solution containing the nanoparticle composition before and after breaking up the nanoparticle composition with one or more organic solvents or detergents. Fluorescence may be used to measure the amount of free payload in a solution. For the nanoparticle compositions described herein, the encapsulation efficiency of a therapeutic and/or prophylactic may be at least 50%, for example 50%, 55%, 60%, 65%, 70%, 75%, 80%, 85%, 90%, 91%, 92%, 93%, 94%, 95%, 96%, 97%, 98%, 99%, or 100%. In some embodiments, the encapsulation efficiency may be at least 80%. In certain embodiments, the encapsulation efficiency may be at least 90%.

[2542] Lipids and their method of preparation are disclosed in, e.g., U.S. Pat. Nos. 8,569,256, 5,965,542 and U.S. Patent Publication Nos. 2016/0199485, 2016/0009637, 2015/0273068, 2015/0265708, 2015/0203446, 2015/0005363, 2014/0308304, 2014/0200257, 2013/086373, 2013/0338210, 2013/0323269, 2013/0245107, 2013/0195920, 2013/0123338, 2013/0022649, 2013/0017223, 2012/0295832, 2012/0183581, 2012/0172411, 2012/0027803, 2012/0058188, 2011/0311583, 2011/0311582, 2011/0262527, 2011/0216622, 2011/0117125, 2011/0091525, 2011/0076335, 2011/0060032, 2010/0130588, 2007/0042031, 2006/0240093, 2006/0083780, 2006/0008910, 2005/0175682, 2005/017054, 2005/0118253, 2005/0064595, 2004/0142025, 2007/0042031, 1999/009076 and PCT Pub. Nos. WO 99/39741, WO 2017/117528, WO 2017/004143, WO 2017/075531, WO 2015/199952, WO 2014/008334, WO 2013/086373, WO 2013/086322, WO 2013/016058, WO 2013/086373, WO2011/141705, and WO 2001/07548 and Semple et. al, Nature Biotechnology, 2010, 28, 172-176, the full disclosures of which are herein incorporated by reference in their entirety for all purposes.

[2543] A nanoparticle composition may include any substance useful in pharmaceutical compositions. For example, the nanoparticle composition may include one or more pharmaceutically acceptable excipients or accessory ingredients such as, but not limited to, one or more solvents, dispersion media, diluents, dispersion aids, suspension aids, granulating aids, disintegrants, fillers, glidants, liquid vehicles, binders, surface active agents, isotonic agents, thickening or emulsifying agents, buffering agents, lubricating agents, oils, preservatives, and other species. Excipients such as waxes, butters, coloring agents, coating agents, flavorings, and perfuming agents may also be included. Pharmaceutically acceptable excipients are well known in the art (see for example Remington's The Science and Practice of Pharmacy, 21^{st} Edition, A. R. Gennaro: Lippincott, Williams & Wilkins, Baltimore, Md., 2006). Other different lipids or liposomal formulations including nanoparticles and methods of administration include, but are not limited to, U.S. Patent Publication 20030203865, 20020150626, 20030032615, and 20040048787, which are specifically incorporated by reference to the extent they disclose formulations and other related aspects of administration and delivery of nucleic acids. Methods used for forming particles are also disclosed in U.S. Pat. Nos. 5,844,107, 5,877,302, 6,008,336, 6,077,835, 5,972,901, 6,200,801, and 5,972,900, which are incorporated by reference for those aspects.

[2544] In some embodiments, the LNP encapsulates the engineered retron, e.g., an engineered nucleic acid construct, ncRNA, vector system, RNA molecule, and/or engineered nucleic acid-enzyme construct as described herein.

[2545] In some embodiments, the lipid nanoparticle comprises: one or more ionizable lipids; one or more structural lipids; one or more PEGylated lipids; and one or more phospholipids. In some embodiments, the one or more ionizable lipids is selected from the group consisting of those disclosed in Table X.

[2546] In some embodiments, the one or more structural lipids are selected from the group consisting of cholesterol, fecosterol, beta sitosterol, sitosterol, ergosterol, campesterol, stigmasterol, brassicasterol, tomatidine, tomatine, ursolic acid, alpha-tocopherol, prednisolone, dexamethasone, prednisone, and hydrocortisone. In some embodiments, the one or more PEGylated lipids are selected from the group consisting of PEG-c-DOMG, PEG-DMG, PEG-DLPE, PEG-DMPE, PEG-DPPC, and PEG-DSPE.

[2547] In some embodiments, the one or more phospholipids are selected from the group consisting of 1,2-distearoyl-sn-glycero-3-phosphocholine (DSPC), 1,2-dioleoyl-sn-glycero-3-phosphoethanolamine (DOPE), 1,2-dilinoleoyl-sn-glycero-3-phosphocholine (DLPC), 1,2-dimyristoyl-sn-glycero-phosphocholine (DMPC), 1.2-dioleoyl-sn-glycero-3-phosphocholine (DOPC), 1,2-dipalmitoyl-sn-glycero-3-phosphocholine (DPPC), 1,2-diundecanoyl-sn-glycero-phosphocholine (DUPC), 1-palmitoyl-2-oleoyl-sn-glycero-3-phosphocho line (POPC), 1,2-di-O-octadecenyl-sn-glycero-3-phosphocholine (18:0 Diether PC), 1-oleoyl-2-cholesterylhemisuccinoyl-sn-glycero-3-phosphocholine (OChemsPC), 1-hexadecyl-sn-glycero-3-phosphocholine (C16 Lyso PC), 1,2-dilinolenoyl-sn-glycero-3-phosphocholine, 1,2-diarachidonoyl-sn-glycero-3-phosphocholine, 1,2-didocosahexaenoyl-sn-glycero-3-phosphocholine, 1,2-diphytanoylsn-glycero-3-phosphoethanolamine (ME 16.0 PE), 1,2-distearoyl-sn-glycero-3-phosphoethanolamine, 1,2-dilinoleoyl-sn-glycero-3-phosphoethanolamine, 1,2-dilinolenoyl-sn-glycero-3-phosphoethanolamine, 1,2-diarachidonoyl-sn-glycero-3-phosphoethanolamine, 1,2-didocosahexaenoyl-sn-glycero-3-phosphoethanolamine, 1,2-dioleoyl-sn-glycero-3-phospho-rac-(1-glycerol) sodium salt (DOPG), and sphingomyelin.

[2548] In some embodiments, the lipid nanoparticle comprises about 48.5 mol % ionizable lipid, about 10 mol % phospholipid, about 40 mol % structural lipid, and about 1.5 mol % of PEG lipid.

[2549] In some embodiments, the lipid nanoparticle comprises about 48.5 mol % ionizable lipid, about 10 mol % phospholipid, about 39 mol % structural lipid, and about 2.5 mol % of PEG lipid. In some embodiments, the LNP further comprises a targeting moiety operably connected to the LNP. In some embodiments, the LNP further comprises one or more additional components selected from the group consisting of DDAB, EPC, 14PA, 18BMP, DODAP, DOTAP, and C12-200.

[2550] In some embodiments, the engineered retron can be used for gene transfer, which may be performed under ex vivo or in vivo conditions. Ex vivo gene therapy refers to the isolation of cells from a subject, the delivery of a nucleic acid into cells in vitro, and the return of the modified cells back into the subject. This may involve the collection of a biological sample comprising cells from the subject. For example, blood can be obtained by venipuncture, and solid tissue samples can be obtained by surgical techniques according to methods well known in the art.

[2551] Usually, but not always, the subject who receives the cells (e.g., the recipient) is also the subject from whom the cells are harvested or obtained, which provides the advantage that the donated cells are autologous. However, cells can be obtained from another subject (e.g., a donor), a culture of cells from a donor, or from established cell culture lines. Accordingly, in some embodiments the cells are allogeneic to the recipient. Cells may be obtained from the same or a different species than the subject to be treated, but preferably are of the same species, and more preferably of the same immunological profile as the subject. Such cells can be obtained, for example, from a biological sample comprising cells from a close relative or matched donor, then transfected with nucleic acids (e.g., comprising an engineered retron), and administered to a subject in need of genome modification, for example, for treatment of a disease or condition.

[2552] In other embodiments, the engineered retron can be introduced in vivo (e.g., used in gene therapy) by physically delivering the engineered retron to a subject. Examples of physically introducing the engineered retron includes via injections, electroporation and transfection (e.g., calcium-mediated or liposome transfection, or the like).

### J. PAYLOADS

[2553] The retron-based gene editing systems and/or components thereof may be delivered by way of LNPs as described here. In various embodiments, the retron-based gene editing systems may be delivered by LNPs into cells, tissues, organs, or organisms. Depending on the chosen format, the retron-based gene editing systems and/or the individual or combined components thereof may be delivered as DNA molecules (e.g., encoded on one or more plasmids), RNA molecules (e.g., guide RNAs for targeting a programmable nuclease or linear or circular mRNAs coding for the retron RTs or programmable nuclease components of the retron-based gene editing systems), proteins (e.g., retron polypeptides, accessory proteins having other functions (e.g., recombinases, nucleases, polymerases, ligases, deaminases, or reverse transcriptases), or protein-nucleic acid complexes (e.g., complexes between a guide RNA and a programmable nuclease protein or fusion protein comprising a retron RT). These DNA, RNA, protein, or nucleoprotein corresponding to and/or encoding the retron-based gene editing systems or components thereof comprise the LNP cargo or payloads. In various embodiments, the LNP cargo or payloads may comprise nucleic acid payloads, including coding payloads such as linear and circular mRNA for encoding the various components of the retron-based editing system.

### 1. Nucleic Acid Payloads

[2554] In various embodiments, the LNP compositions described herein can be used to deliver a nucleic acid or polynucleotide payload, e.g., a linear or circular mRNA.

[2555] In various embodiments, the retron-based editing compositions described herein can include a nucleic acid or polynucleotide payload, e.g., a linear or circular mRNA. For example, the retron gene editing systems may comprise one or more coding mRNA (circular or linear) for encoding retron RT and other accessory proteins (e.g., programmable nuclease) and these RNA components may be delivered by LNPs.

[2556] In some embodiments, a LNP is capable of delivering a polynucleotide to a target cell, tissue, or organ. A polynucleotide, in its broadest sense of the term, includes any compound and/or substance that is or can be incorporated into an oligonucleotide chain. Exemplary polynucleotides for use in accordance with the present disclosure include, but are not limited to, one or more of deoxyribonucleic acid (DNA), ribonucleic acid (RNA) including messenger mRNA (mRNA), hybrids thereof, RNAi-inducing agents, RNAi agents, siRNAs, shRNAs, miRNAs, antisense RNAs, ribozymes, catalytic DNA, RNAs that induce triple helix formation, aptamers, vectors, etc. RNAs useful in the compositions and methods described herein can be selected from the group consisting of but are not limited to, shortimers, antagomirs, antisense, ribozymes, short interfering RNA (siRNA), asymmetrical interfering RNA (aiRNA), microRNA (miRNA), Dicer substrate RNA (dsRNA), short hairpin RNA (shRNA), transfer RNA (tRNA), messenger RNA (mRNA), and mixtures thereof. In some embodiments, a polynucleotide is mRNA. In some embodiments, a polynucleotide is circular RNA. In some embodiments, a polynucleotide encodes a protein, e.g., a nucleobase editing enzyme. A polynucleotide may encode any polypeptide of interest, including any naturally or non-naturally occurring or otherwise modified polypeptide. A polypeptide may be of any size and may have any secondary structure or activity. In some embodiments, a polypeptide encoded by an mRNA may have a therapeutic effect when expressed in a cell.

[2557] In other embodiments, a polynucleotide is an siRNA. An siRNA may be capable of selectively knocking down or down regulating expression of a gene of interest. For example, an siRNA could be selected to silence a gene associated with a particular disease, disorder, or condition upon administration to a subject in need thereof of a nanoparticle composition including the siRNA. An siRNA may comprise a sequence that is complementary to an mRNA sequence that encodes a gene or protein of interest. In some embodiments, the siRNA may be an immunomodulatory siRNA.

[2558] In some embodiments, a polynucleotide is an shRNA or a vector or plasmid encoding the same. An shRNA may be produced inside a target cell upon delivery of an appropriate construct to the nucleus. Constructs and mechanisms relating to shRNA are well known in the relevant arts.

[2559] A polynucleotide may include a first region of linked nucleosides encoding a polypeptide of interest (e.g., a coding region), a first flanking region located at the 5′-terminus of the first region (e.g., a 5′-UTR), a second flanking region located at the 3-terminus of the first region (e.g., a 3′-UTR), at least one 5′-cap region, and a 3-stabilizing region. In some embodiments, a polynucleotide further includes a poly-A region or a Kozak sequence (e.g., in the 5′-UTR). In some cases, polynucleotides may contain one or more intronic nucleotide sequences capable of being excised from the polynucleotide. In some embodiments, a polynucleotide (e.g., an mRNA) may include a 5′cap structure, a chain terminating nucleotide, a stem loop, a polyA sequence, and/or a polyadenylation signal. Any one of the regions of a nucleic acid may include one or more alternative components (e.g., an alternative nucleoside). For example, the 3′-stabilizing region may contain an alternative nucleoside such as an L-nucleoside, an inverted thymidine, or a 2′-O-methyl nucleoside and/or the coding region, 5′-UTR, 3′-UTR, or cap region may include an alternative nucleoside such as a 5-substituted uridine (e.g., 5-methoxyuridine), a 1-substituted pseudouridine (e.g., 1-methyl pseudouridine or 1-ethyl-pseudouridine), and/or a 5-substituted cytidine (e.g., 5-methyl-cytidine). In some embodiments, a polynucleotide contains only naturally occurring nucleosides.

[2560] In some cases, a polynucleotide is greater than 30 nucleotides in length. In another embodiment, the poly nucleotide molecule is greater than 35 nucleotides in length. In another embodiment, the length is at least 40 nucleotides. In another embodiment, the length is at least 45 nucleotides. In another embodiment, the length is at least 55 nucleotides. In another embodiment, the length is at least 50 nucleotides. In another embodiment, the length is at least 60 nucleotides. In another embodiment, the length is at least 80 nucleotides. In another embodiment, the length is at least 90 nucleotides. In another embodiment, the length is at least 100 nucleotides. In another embodiment, the length is at least 120 nucleotides. In another embodiment, the length is at least 140 nucleotides. In another embodiment, the length is at least 160 nucleotides. In another embodiment, the length is at least 180 nucleotides. In another embodiment, the length is at least 200 nucleotides. In another embodiment, the length is at least 250 nucleotides. In another embodiment, the length is at least 300 nucleotides. In another embodiment, the length is at least 350 nucleotides. In another embodiment, the length is at least 400 nucleotides. In another embodiment, the length is at least 450 nucleotides. In another embodiment, the length is at least 500 nucleotides. In another embodiment, the length is at least 600 nucleotides. In another embodiment, the length is at least 700 nucleotides. In another embodiment, the length is at least 800 nucleotides. In another embodiment, the length is at least 900 nucleotides. In another embodiment, the length is at least 1000 nucleotides. In another embodiment, the length is at least 1100 nucleotides. In another embodiment, the length is at least 1200 nucleotides. In another embodiment, the length is at least 1300 nucleotides. In another embodiment, the length is at least 1400 nucleotides. In another embodiment, the length is at least 1500 nucleotides. In another embodiment, the length is at least 1600 nucleotides. In another embodiment, the length is at least 1800 nucleotides. In another embodiment, the length is at least 2000 nucleotides. In another embodiment, the length is at least 2500 nucleotides. In another embodiment, the length is at least 3000 nucleotides. In another embodiment, the length is at least 4000 nucleotides. In another embodiment, the length is at least 5000 nucleotides, or greater than 5000 nucleotides.

[2561] In some embodiments, a polynucleotide molecule, formula, composition or method associated therewith comprises one or more polynucleotides comprising features as described in WO2002/098443, WO2003/051401, WO2008/052770, WO2009/127230, WO2006/122828, WO2008/083949, WO2010/088927, WO2010/037539, WO2004/004743, WO2005/016376, WO2006/024518, WO2007/095976, WO2008/014979, WO2008/077592, WO2009/030481, WO2009/095226, WO2011/069586, WO2011/026641, WO2011/144358, WO2012/019780, WO2012/013326, WO2012/089338, WO2012/113513, WO2012/116811, WO2012/116810, WO2013/113502, WO2013/113501, WO2013/113736, WO2013/143698, WO2013/143699, WO2013/143700, WO2013/120626, WO2013/120627, WO2013/120628, WO2013/120629, WO2013/174409, WO2014/127917, WO2015/024669, WO2015/024668, WO2015/024667, WO2015/024665, WO2015/024666, WO2015/024664, WO2015/101415, WO2015/101414, WO2015/024667, WO2015/062738, WO2015/101416, all of which are incorporated by reference herein.

[2562] In some embodiments, a polynucleotide comprises one or more microRNA binding sites. In some embodiments, a microRNA binding site is recognized by a microRNA in a non-target organ. In some embodiments, a microRNA binding site is recognized by a microRNA in the liver. In some embodiments, a microRNA binding site is recognized by a microRNA in hepatic cells.

[2563] In certain embodiments, an RNA of the present disclosure comprises one or more phosphonate modifications selected from a phosphorothioate linkage (PS), phosphorodithioate linkage (PS2), methylphosphonate linkage (MP), methoxypropylphosphonate linkage (MOP), 5′-(E)-vinylphosphonate linkage (5′-(E)-VP), 5′-Methyl Phosphonate linkage (5′-MP), (S)-5′-C-methyl with phosphate linkage, 5′-phosphorothioate linkage (5′-PS), and a peptide nucleic acid linkage (PNA). In certain embodiments, an RNA of the present disclosure comprises one or more ribose modifications selected from a 2′-O-methyl (2′-OMe), 2′-O-methoxyethyl (2′-O-MOE), 2′-deoxy-2′-fluoro (2′-F), 2′-arabino-fluoro (2′-Ara-F), 2′-O-benzyl, 2′-O-methyl-4-pyridine (2′-O-CH2Py(4)), Locked nucleic acid (LNA), (S)-cET-BNA, tricyclo-DNA (tcDNA), PMO, Unlocked Nucleic Acid (UNA) and glycol nucleic acid (GNA). In certain embodiments, the RNA comprises a Locked Nucleic Acid (LNA) comprising a methyl bridge, an ethyl bridge, a propyl bridge, a butyl bridge or an optionally substituted variant of any of the aforementioned. In certain embodiments, an RNA of the present disclosure comprises one or more modified bases selected from a pseudouridine (y), 2′thiouridine (s2U), N6′-methyladenosine (m⁶A), 5′methylcytidine (m⁵C), 5′fluoro2′-deoxyuridine, N-ethylpiperidine 7′-EAA triazole modified adenine, N-ethylpiperidine 6′triazole modified adenine, 6′pheynlpyrrolo-cytosine (PhpC), 2′,4′-difluorotoluyl ribonucleoside (rF), and 5′-nitroindole.

### 2. Single-Stranded DNA Payloads

[2564] In various embodiments, the LNPs of the present disclosure may comprise a payload having at least one single stranded DNA. In certain embodiments, the single stranded DNA is a linear single stranded DNA. In certain embodiments, the single stranded DNA is a circular single stranded DNA. In certain embodiments, the payload further comprises a nucleobase editing system, such as an enzyme or polynucleotide encoding an enzyme capable of independently or co-dependently editing, modifying, or altering a target polynucleotide sequence or a target transcript comprising a nucleic acid sequence.

[2565] In certain embodiments, the circular single stranded DNA (CiSSD) payload is one described in PCT Publication WO2020142730A1, which is incorporated by reference herein in its entirety. In certain embodiments, the CiSSD is a donor template for use as part of a nucleobase editing system for targeted genome modification. In certain embodiments, the CiSSD comprises a DNA insert, a 5′ homology arm, and a 3′ homology arm. In some embodiments, the DNA insert is located between the 5′ homology arm and the 3′ homology arm. Homology arms as used herein refer to a series of nucleotides that are complementary to a series of nucleotides in an endogenous DNA sequence in the target region. The homology arms flanking the DNA insert allow for specific insertion of the DNA insert in the target region. A target region is a nucleic acid sequence where a desired insertion or modification occurs.

[2566] In certain embodiments, the DNA insert is at least 1 nucleotide. In certain embodiments, the DNA insert is at least about 0.5 kb, 2 kb, 2.5 kb, 5 kb, 10 kb, 20 kb, 40 kb, 80 kb, 100 kb, 150 kb, or 200 kb. In certain embodiments, the length of the DNA insert is about 0.5 kb to 5 kb, about 1 kb to 5 kb, about 1 kb to 10 kb, about 1.6 kb to 5 kb, about 1.6 kb to 10 kb, about 2 kb to 5 kb, about 2 kb to 20 kb, about 2.5 kb to 5 kb, about 2.5 kb to 10 kb, about 2.5 kb to 20 kb, and about 5 kb to 100 kb. In some embodiments, the DNA insert size may range from about 1 kb to about 3 kb, about 3 kb to about 6 kb, about 6 kb to about 9 kb, about 9 kb to about 12 kb, about 12 kb to about 15 kb, about 15 kb to about 18 kb, or about 18 kb to about 21 kb.

[2567] In some embodiments, the DNA insert may comprise a nucleotide sequence that encodes a maker or a reporter, e.g., a fluorescent marker, an antibiotic marker, or any suitable marker. A “marker” or “reporter” as used herein means a feature that allows for identification and selection of a desired cell, e.g., by fluorescence or antibiotic resistance. For example, the insert may include a nucleotide sequence encoding a reporter (e.g, GFP, RFP, or any suitable reporter) or a recombinase. For example, the reporter is an N-terminal GFP fusion reporter.

[2568] In some embodiments, the DNA insert may comprise a nucleotide sequence that encodes a transcription unit, wherein each transcription unit can produce a cellular product (e.g, protein or RNA). In some embodiments, the DNA insert may comprise a nucleotide sequence that encodes a protein, e.g, an immunomodulatory protein (e.g, a cytokine), an antibody, a chimeric antigen receptor (CAR), a growth factor, a T cell receptor, or another protein.

[2569] In certain embodiments, the CiSSD comprises a DNA insert that can be inserted at a nucleotide break in a target region of genomic DNA. In some embodiments, the break is a double stranded break (DSB). In certain embodiments, the break is a single stranded DNA break or a nick. Precision gene editing techniques, e.g, CRISPR, create a break near a desired sequence change (target sequence). CRISPR can be applied to produce deletions, disruptions, insertions, replacements, and repairs. The components of template donors for these different modifications is generally the same, consisting of three basic elements: a 5′ homology arm, a DNA insert, and a 3′ homology arm. CRISPR-based gene editing can generate gene knockouts by disrupting the gene sequence, however, efficiency for inserting exogenous DNA (knock-in) or replacement of genomic sequences is very poor using current methods. In certain embodiments, CiSSDs may be used with CRISPR by generating a knock-in modification. Double-stranded breaks can be introduced by any suitable mechanism, including, for example, by gene-editing systems using CRISPR, zinc finger nuclease, TALEN nuclease (Transcription Activator-Like Effector Nuclease), or meganuclease as described previously. Briefly, the CRISPR genome editing system generates a targeted DSB using the CRISPR programmable DNA endonuclease that can be targeted to a specific DNA sequence (target sequence) by a small “guide” RNA (crRNA). Guide RNAs for use in CRISPR-based modification (z.e., crRNAs and tracrRNAs) may be generated by any suitable method. In certain embodiments, crRNAs and tracrRNAs may be chemically synthesized. In other embodiments, a single guide RNA (sgRNA) may be constructed and synthesized by in vitro transcription.

[2570] In certain embodiments, an LNP of the present disclosure comprises a CiSSD disclosed herein and further comprises a precision gene editing system component such as a CRISPR, zinc finger nuclease, TALEN nuclease (Transcription Activator-Like Effector Nuclease), or meganuclease, or any other nucleobase editing system known in the art.

[2571] In certain embodiments, the single stranded DNA (SSD) payload is one described in PCT Publication WO2020232286A1, which is incorporated by reference herein in its entirety.

[2572] In certain embodiments, the SSD comprises an engineered initiator sequence and an engineered terminator sequence from a filamentous bacteriophage, and a DNA sequence of interest, wherein the DNA sequence of interest is located 3′ to the engineered initiator sequence and 5′ to the engineered terminator sequence. In certain embodiments, the SSD comprises a selectable marker.

[2573] In certain embodiments, the single stranded DNA (SSD) payload is made by a method described in PCT Publication WO2020232286A1. In certain embodiments, the SSD is made by a method comprising: (a) culturing a host cell of claim 11 under conditions suitable for producing a ssDNA from the DNA sequence of interest in the engineered nucleic acid and the plurality of bacteriophage proteins from the nucleic acid helper plasmid; (b) allowing the ssDNA and the plurality of bacteriophage proteins to assemble into an engineered phage; and (c) collecting the engineered phage. In certain embodiments, the method further comprises extracting the SSD from the engineered phage.

[2574] In certain embodiments, at least 90% of the SSD is the same length as the DNA sequence of interest. In certain embodiments, at least 95% of the ssDNA is the same length as the DNA sequence of interest. In certain embodiments, the SSD is between 100 and 20,000 nucleotides in length. In certain embodiments, the ssDNA is circular.

[2575] In certain embodiments, the single stranded DNA (SSD) payload is one described in PCT Publication WO2022011082A1, which is incorporated by reference herein in its entirety. In certain embodiments, the SSD comprises a first sequence from a filamentous bacteriophage, the first sequence having both initiator and terminator functions; a second sequence that is identical to the first sequence; and a single-strand DNA sequence of interest that is located between the first sequence and the second sequence. In certain embodiments, the SSD further comprises a selectable marker. In certain embodiments, the SSD is circular. In certain embodiments, the SSD is linear.

[2576] In certain embodiments, the single stranded DNA (SSD) payload is made by a method described in PCT Publication WO2022011082A1. In certain embodiments, the method comprises culturing a host cell under conditions suitable for producing the single-stranded DNA from the single-strand DNA sequence of interest in the isolated nucleic acid and producing the bacteriophage proteins from the nucleic acid helper plasmid; allowing the single-stranded DNA and bacteriophage proteins to assemble into an engineered phage; and collecting the engineered phage. In certain embodiments, the host cell comprises an isolated nucleic acid that includes: a first sequence from a filamentous bacteriophage, the first sequence having both initiator and terminator functions; a second sequence that is identical to the first sequence; and a single-strand DNA sequence of interest that is located between the first sequence and the second sequence, and a nucleic acid helper plasmid for expressing bacteriophage proteins capable of assembling a single-strand DNA into a bacteriophage. In certain embodiments, the method further comprises extracting the SSD from the engineered phage.

[2577] In certain embodiments, at least 90% of the SSD is the same length as the DNA sequence of interest. In certain embodiments, at least 95% of the ssDNA is the same length as the DNA sequence of interest. In certain embodiments, the SSD is between 100 and 20,000 nucleotides in length. In certain embodiments, the SSD is circular.

[2578] In certain embodiments, the single stranded DNA (SSD) payload is one described in PCT Publication WO2021055616A1, which is incorporated by reference herein in its entirety.

3. Linear mRNA Payloads

[2579] In various embodiments, the LNP-based pharmaceutical compositions described herein, e.g., LNP-based gene editing systems, may include one or more linear mRNA molecules or linear mRNA payloads. In various embodiments, the mRNA payloads may encode one or more components of the herein described gene editing systems. For example, an mRNA payload may encode an amino acid sequence-programmable DNA binding domain (e.g., retron RTs or programmable nucleases) or a nucleic acid sequence-programmable DNA binding domain (e.g., CRISPR Cas9, CRISPR Cas12a, CRISPR Cas12f, CRISPR Cas13a, CRISPR Cas13b, or TnpB).

[2580] mRNA payloads may also encode, depending upon the nature of the gene editing system, one or more effector domains that provide various functionalities that facilitate changes in nucleotide sequence and/or gene expression, such as, but not limited to, single-strand DNA binding proteins, nucleases, endonucleases, exonucleases, deaminases (e.g., cytidine deaminases or adenosine deaminases), polymerases (e.g., reverse transcriptases), integrases, recombinases, etc., and fusion proteins comprising one or more functional domains linked together.

[2581] Ribonucleic acid (RNA) is a molecule that is made up of nucleotides, which are ribose sugars attached to nitrogenous bases and phosphate groups. The nitrogenous bases include adenine (A), guanine (G), uracil (U), and cytosine (C). Generally, RNA mostly exists in the single-stranded form but can also exists double-stranded in certain circumstances. The length, form and structure of RNA is diverse depending on the purpose of the RNA. For example, the length of an RNA can vary from a short sequence (e.g., siRNA) to a long sequences (e.g., lncRNA), can be linear (e.g., mRNA) or circular (e.g., oRNA), and can either be a coding (e.g., mRNA) or a non-coding (e.g., lncRNA) sequence.

[2582] In various embodiments, the LNP-based gene editing systems, RNA therapeutics and pharmaceutical compositions thereof described herein can be used to deliver a mRNA payload that is a linear mRNA molecule. In embodiments, the mRNA payload may comprise one or more nucleotide sequences that encode a product of interest, such as, but not limited to a component of a gene editing system (e.g., an endonuclease, a prime editor, etc.) and/or a therapeutic protein.

[2583] In some embodiments, the RNA payload may be a linear mRNA. As used herein, the term “messenger RNA” (mRNA) refers to any polynucleotide which encodes a protein of interest and which is capable of being translated to produce the encoded protein of interest in vitro, in vivo, in situ or ex vivo.

[2584] Generally, a mRNA molecule comprises at least a coding region, a 5′ untranslated region (UTR), a 3′ UTR, a 5′ cap and a poly-A tail. In some aspects, one or more structural and/or chemical modifications or alterations may be included in the RNA which can reduce the innate immune response of a cell in which the mRNA is introduced. As used herein, a “structural” feature or modification is one in which two or more linked nucleotides are inserted, deleted, duplicated, inverted or randomized in a nucleic acid without significant chemical modification to the nucleotides themselves. Because chemical bonds will necessarily be broken and reformed to affect a structural modification, structural modifications are of a chemical nature and hence are chemical modifications. However, structural modifications will result in a different sequence of nucleotides. For example, the polynucleotide “ATCG” may be chemically modified to “AT-5meC-G”.

[2585] Generally, a coding region of interest in an mRNA used herein may encode a dipeptide, a tripeptide, a tetrapeptide, a pentapeptide, a hexapeptide, a heptapeptide, an octapeptide, a nonapeptide, or a decapeptide. In another embodiment, the mRNA may encode a peptide of 2-30 amino acids, e.g. 5-30, 10-30, 2-25, 5-25, 10-25, or 10-20 amino acids. The mRNA may encode a peptide of at least 10, 11, 12, 13, 14, 15, 17, 20, 25, 26, 27, 28, 29, 30, 31, 32, 33, 34, 35, 36, 37, 38, 39, or 40 amino acids, or a peptide that is no longer than 10, 11, 12, 13, 14, 15, 17, 20, 25, 26, 27, 28, 29, 30, 31, 32, 33, 34, 35, 36, 37, 38, 39, or 40 amino acids.

[2586] Generally, the length of the region of the mRNA encoding a product of interest is greater than about 30 nucleotides in length (e.g., at least or greater than about 35, 40, 45, 50, 55, 60, 70, 80, 90, 100, 120, 140, 160, 180, 200, 250, 300, 350, 400, 450, 500, 600, 700, 800, 900, 1000, 1,100, 1,200, 1,300, 1,400, 1,500, 1,600, 1,700, 1,800, 1,900, 2,000, 2,500, and 3,000, 4,000, 5,000, 6,000, 7,000, 8,000, 9,000, 10,000, 20,000, 30,000, 40,000, 50,000, 60,000, 70,000, 80,000, 90,000 or up to and including 100,000 nucleotides).

[2587] In some embodiments, the mRNA has a total length that spans from about 30 to about 100,000 nucleotides (e.g., from 30 to 50, from 30 to 100, from 30 to 250, from 30 to 500, from 30 to 1,000, from 30 to 1,500, from 30 to 3,000, from 30 to 5,000, from 30 to 7,000, from 30 to 10,000, from 30 to 25,000, from 30 to 50,000, from 30 to 70,000, from 100 to 250, from 100 to 500, from 100 to 1,000, from 100 to 1,500, from 100 to 3,000, from 100 to 5,000, from 100 to 7,000, from 100 to 10,000, from 100 to 25,000, from 100 to 50,000, from 100 to 70,000, from 100 to 100,000, from 500 to 1,000, from 500 to 1,500, from 500 to 2,000, from 500 to 3,000, from 500 to 5,000, from 500 to 7,000, from 500 to 10,000, from 500 to 25,000, from 500 to 50,000, from 500 to 70,000, from 500 to 100,000, from 1,000 to 1,500, from 1,000 to 2,000, from 1,000 to 3,000, from 1,000 to 5,000, from 1,000 to 7,000, from 1,000 to 10,000, from 1,000 to 25,000, from 1,000 to 50,000, from 1,000 to 70,000, from 1,000 to 100,000, from 1,500 to 3,000, from 1,500 to 5,000, from 1,500 to 7,000, from 1,500 to 10,000, from 1,500 to 25,000, from 1,500 to 50,000, from 1,500 to 70,000, from 1,500 to 100,000, from 2,000 to 3,000, from 2,000 to 5,000, from 2,000 to 7,000, from 2,000 to 10,000, from 2,000 to 25,000, from 2,000 to 50,000, from 2,000 to 70,000, and from 2,000 to 100,000 nucleotides).

[2588] In some embodiments, the region or regions flanking the region encoding the product of interest may range independently from 15-1,000 nucleotides in length (e.g., greater than 30, 40, 45, 50, 55, 60, 70, 80, 90, 100, 120, 140, 160, 180, 200, 250, 300, 350, 400, 450, 500, 600, 700, 800, and 900 nucleotides or at least 30, 40, 45, 50, 55, 60, 70, 80, 90, 100, 120, 140, 160, 180, 200, 250, 300, 350, 400, 450, 500, 600, 700, 800, 900, and 1,000 nucleotides).

[2589] In some embodiments, the mRNA comprises a tailing sequence which can range from absent to 500 nucleotides in length (e.g., at least 60, 70, 80, 90, 120, 140, 160, 180, 200, 250, 300, 350, 400, 450, or 500 nucleotides). Where the tailing region is a polyA tail, the length may be determined in units of or as a function of polyA Binding Protein binding. In this embodiment, the polyA tail is long enough to bind at least 4 monomers of PolyA Binding Protein. PolyA Binding Protein monomers bind to stretches of approximately 38 nucleotides. As such, it has been observed that polyA tails of about 80 nucleotides and 160 nucleotides are functional.

[2590] In some embodiments, the mRNA comprises a capping sequence which comprises a single cap or a series of nucleotides forming the cap. The capping sequence may be from 1 to 10, e.g. 2-9, 3-8, 4-7, 1-5, 5-10, or at least 2, or 10 or fewer nucleotides in length. In some embodiments, the caping sequence is absent.

[2591] In some embodiments, the mRNA comprises a region comprising a start codon. The region comprising the start codon may range from 3 to 40, e.g., 5-30, 10-20, 15, or at least 4, or 30 or fewer nucleotides in length.

[2592] In some embodiments, the mRNA comprises a region comprising a stop codon. The region comprising the stop codon may range from 3 to 40, e.g., 5-30, 10-20, 15, or at least 4, or 30 or fewer nucleotides in length.

[2593] In some embodiments, the mRNA comprises a region comprising a restriction sequence. The region comprising the restriction sequence may range from 3 to 40, e.g., 5-30, 10-20, 15, or at least 4, or 30 or fewer nucleotides in length.

### Untranslated Regions (UTRs)

[2594] In various embodiments, the mRNA payloads of the LNP-based nucleobase editing systems, RNA therapeutics and pharmaceutical compositions thereof described herein, may comprise at least one untranslated region (UTR) which flanks the region encoding the product of interest and/or is incorporated within the mRNA molecule. UTRs are transcribed by not translated. The mRNA payloads can include 5′ UTR sequences and 3′ UTR sequences, as well as internal UTRs.

[2595] The RNA payloads of the present disclosure may comprise one or more regions or parts which act or function as an untranslated region. Where nucleic acids are designed to encode at least one polypeptide of interest, the nucleic acid may comprise one or more of these untranslated regions (UTRs). Wild-type untranslated regions of a nucleic acid are transcribed but not translated. In mRNA, the 5′ UTR starts at the transcription start site and continues to the start codon but does not include the start codon; whereas, the 3′ UTR starts immediately following the stop codon and continues until the transcriptional termination signal. There is growing body of evidence about the regulatory roles played by the UTRs in terms of stability of the nucleic acid molecule and translation. The regulatory features of a UTR can be incorporated into the RNA payload molecules (e.g., linear and circular mRNA molecules) of the present disclosure to, among other things, enhance the stability of the molecule. The specific features can also be incorporated to ensure controlled down-regulation of the transcript in case they are misdirected to undesired organs sites. A variety of 5′UTR and 3′UTR sequences are known and available in the art.

[2596] In various embodiments, the mRNA payloads of the LNP-based nucleobase editing systems, RNA therapeutics and pharmaceutical compositions thereof described herein, may comprise at least one UTR that may be selected from any UTR sequence listed in Tables 19 or 20 of U.S. Pat. No. 10,709,779, which is incorporated herein by reference.

### 5′ UTR Regions

[2597] In various embodiments, the mRNA payloads of the LNP-based gene editing systems, RNA therapeutics and pharmaceutical compositions thereof described herein, may comprise at least one 5′ UTR.

[2598] A 5′ UTR is region of an mRNA that is directly upstream (5′) from the start codon (the first codon of an mRNA transcript translated by a ribosome). A 5′ UTR does not encode a protein (is non-coding). Natural 5′UTRs have features that play roles in translation initiation. They harbor signatures like Kozak sequences which are commonly known to be involved in the process by which the ribosome initiates translation of many genes. Kozak sequences have the consensus CCR(A/G)CCAUGG (SEQ ID NO: 19421), where R is a purine (adenine or guanine) three bases upstream of the start codon (AUG), which is followed by another ‘G’. 5′UTR also have been known to form secondary structures which are involved in elongation factor binding. 5′ UTR sequences are also known to be important for ribosome recruitment to the mRNA and have been reported to play a role in translation (Hinnebusch A, et al., (2016) Science, 352:6292: 1413-6). In addition, 5′ UTR sequences may confer increased half-life, increased expression and/or increased activity of a polypeptide encoded by the RNA payload described herein.

[2599] In various embodiments, the RNA payload constructs contemplated herein may include 5′UTRs that are found in nature and those that are not. For example, the 5′UTRs can be synthetic and/or can be altered in sequence with respect to a naturally occurring 5′UTR. Such altered 5′UTRs can include one or more modifications relative to a naturally occurring 5′UTR, such as, for example, an insertion, deletion, or an altered sequence, or the substitution of one or more nucleotide analogs in place of a naturally occurring nucleotide.

[2600] The 5′ UTR starts at the transcription start site and continues to the start codon but does not include the start codon; whereas, the 3′UTR starts immediately following the stop codon and continues until the transcriptional termination signal. While not wishing to be bound by theory, the UTRs may have a regulatory role in terms of translation and stability of the nucleic acid.

[2601] Natural 5′ UTRs usually include features which have a role in translation initiation as they tend to include Kozak sequences which are commonly known to be involved in the process by which the ribosome initiates translation of many genes. Kozak sequences have the consensus CCR(AuG)CCAUGG (SEQ TD NO: 19421), where R is a purine (adenine or guanine) three bases upstream of the start codon (AUG), which is followed by another ‘G’. 5′UTR also have been known to form secondary structures which are involved in elongation factor binding.

[2602] In an embodiment, the 5′ UTR comprises a sequence provided in Table X or a sequence having at least 80%, 85%, 90%, 95%, 96%, 97%, 98%, 99% or 100% sequence identity to a 5′ UTR sequence provided in Table Y or a variant or a fragment thereof (e.g., a fragment that lacks the first one, two, three, four, five, or six nucleotides of the 5′ UTR sequence provided in Table Y). In an embodiment, the 5′ UTR comprises a sequence with at least 80%, 85%, 90%, 95% 96%, 97%, 98%, 99% or 100% identity to any one of the sequences of Table Y.

TABLE Y
Exemplary nucleotide sequences of 5′ UTRs

| 5′ UTR Nucleotide Sequence | Sequence Identifier |
|---|---|
| ggaaaucgca aaauuugcuc uucgcguuag auuucuuuua guuuucucgc | SEQ ID NO: 19422 |
| aacuagcaag cuuuuuguuc ucgccgccgc c | |
| ggaaaucgca aaauuugcuc uucgcguuag auuucuuuua guuuucucgc | SEQ ID NO: 19423 |
| aacuagcaag cuuuuuguuc ucgccgccgc c | |
| ggaaaucgca aaauuugcuc uucgcguuag auuucuuuua guuuucuuuc | SEQ ID NO: 19424 |
| aacuagcaag cuuuuuguuc ucgccgccgc c | |
| ggaaaucgca aaauuugcuc ucuuuuucgc guuagauuuc uuuuaguuuu | SEQ ID NO: 19425 |
| cuykcaacua gcaagcuuuu uguucucgcc rcc | |
| ggaaaucccc acaaccgccu cauauccagg cucaagaaua gagcucagug | SEQ ID NO: 19426 |
| uuuuguuguu uaaucauucc gacguguuuu gcgauauucg cgcaaagcag | |
| ccagucgcgc gcuugcuuuu aaguagaguu guuuuuccac ccguuugcca | |
| ggcaucuuua auuuaacaua uuuuuuuuu ucagguaac cuacgccgcc | |
| acc | |
| ggaaauaaga gagaaaagaa gaguaagaag aaauauaaga ucucccugag | SEQ ID NO: 19427 |
| cuucagggag ccccggcgcc gccacc | |
| ggaaaccccc cacccccgua agagagaaaa gaagaguaag aagaaauaua | SEQ ID NO: 19428 |
| agaucucccu gagcuucagg gagccccggc gccgccacc | |
| ggagaacuuc cgcuuccguu gggcaagg cuuuuuuuuuuu uucugcuacc | SEQ ID NO: 19429 |
| gugacuaag | |
| ggaaauaaga gagaaaagaa gaguaagaag aaauauaaga gccacc | SEQ ID NO: 19430 |
| ggaaauaaga gagaaaagaa gaguaagaag aaauauaaga ccccggcgcc | SEQ ID NO: 19431 |
| gccacc | |
| ggaaacuuua uuuaguguua cuuuauuuuc uguuuauuug uguuucuuca | SEQ ID NO: 19432 |
| guggguuugu ucuaauuucc uuggccgcc | |
| ggaaaaucug uauuagguug gcguguucuu uggucgguug ggaguauugu | SEQ ID NO: 19433 |
| uguugauucg uuuguggucg guugccgcc | |
| ggaaaauuau uaacaucuug guauucucga uaaccauucg uuggauuuua | SEQ ID NO: 19434 |
| uuguauucgu aguuuggguu ccugccgcc | |
| ggaaauuauu auuauuucua guacaauuu aucauuguau uuuuuacu | SEQ ID NO: 19435 |
| auucaucauu auuuacuugg ugaucaaca | |
| ggaaauaggu uguuaaccaa guucaagccu aauaagcuug gauucuggug | SEQ ID NO: 19436 |
| acuugcuuca ccguuggogg gcaccgauc | |
| ggaaaucgua gagagucgua cuuaguacau aucgacuauc gguggacacc | SEQ ID NO: 19437 |
| aucaagauua uaaaccaggc caga | |
| ggaaacccgc ccaagcgacc ccaacauauc agcaguugcc caaucccaac | SEQ ID NO: 19438 |
| ucccaacaca auccccaagc aacgccgcc | |
| ggaaagcgau ugaaggcguc uuuucaacua cucgauuaag guuggguauc | SEQ ID NO: 19439 |
| gucgugggac uuggaaauuu guuguuucc | |
| ggaaacuaau cgaaauaaaa gagccccgua cucuuuuauu ucuauuaggu | SEQ ID NO: 19440 |
| uaggagccuu agcauuugua ucuuaggua | |
| ggaaauguga uuuccagcaa cuucuuuuga auauauugaa uuccuaauuc | SEQ ID NO: 19441 |
| aaagcgaaca aaucuacaag ccauauacc | |
| ggaaaucgua gagagucgua cuuacguggu cgccauugca uagcgcgcga | SEQ ID NO: 19442 |
| aagcaacagg aacaagaacg cgcc | |
| ggaaaucgua gagagucgua cuuagaauaa acagagucgg gucgacuugu | SEQ ID NO: 19443 |
| cucugauacu acgacgucac aauc | |
| ggaaaauuug ccuucggagu ugcguauccu gaacugccca gccuccugau | SEQ ID NO: 19444 |
| auacaacugu uccgcuuauu cgggccgcc | |
| ggaaaucuga gcaggaaucc uuugugcauu gaagacuuua gauuccucuc | SEQ ID NO: 19445 |
| ugogguagac gugcacuuau aaguauuug | |
| ggaaagcgau ugaaggcguc uuuucaacua cucgauuaag guuggguauc | SEQ ID NO: 19446 |
| gucgugggac uuggaaauuu guugccacc | |
| ggaaaauuuu agccuggaac guuagauaac uguccuguug ucuuuauaua | SEQ ID NO: 19447 |
| cuuggucccc aaguaguuug ucuuccaaa | |
| ggaaauuuuu uuuugauauu auaagaguuu uuuuuugaua uuaagaaaau | SEQ ID NO: 19448 |
| uuuuuuuuga uauuagaaga guaagaagaa auauaagacc ccggcgccgc | |
| cacc | |
| ggaaauaaga gagaaaagaa gaguaagaag aaauauaaga gccaaaaaaa | SEQ ID NO: 19449 |
| aaaaacc | |
| ggaaaucucc cugagcuuca gggaguaaga gagaaaagaa gaguaagaag | SEQ ID NO: 19450 |
| aaauauaaga ccccggcgcc gccacc | |

[2603] In some embodiments of the disclosure, a 5′ UTR is a heterologous UTR, i.e., is a UTR found in nature associated with a different mRNA. In another embodiment, a 5′ UTR is a synthetic UTR, i.e., does not occur in nature. Synthetic UTRs include UTRs that have been mutated to improve their properties, e.g., which increase gene expression as well as those which are completely synthetic. Exemplary 5′ UTRs include Xenopus or human derived alpha-globin or beta-globin (e.g., U.S. Pat. Nos. 8,278,063 and 9,012,219), human cytochrome b-245 polypeptide, and hydroxysteroid (17b) dehydrogenase, and Tobacco etch virus. CMV immediate-early 1 (IE1) gene (see US20140206753 and WO2013/185069), the sequence GGGAUCCUACC (SEQ ID NO: 19451) (WO2014144196) may also be used. In another embodiment, 5′ UTR of a TOP gene is a 5′ UTR of a TOP gene lacking the 5′ TOP motif (the oligopyrimidine tract) (e.g., WO/2015101414, WO2015101415, WO/2015/062738, WO2015024667, WO2015024667; 5′ UTR element derived from ribosomal protein Large 32 (L32) gene (WO/2015101414, WO2015101415, WO/2015/062738)), 5′ UTR element derived from the 5′UTR of an hydroxysteroid (17-β) dehydrogenase 4 gene (HSD17B4) (WO2015024667), or a 5′ UTR element derived from the 5′ UTR of ATP5A1 (WO2015024667) can be used. In one embodiment, an internal ribosome entry site (IRES) is used as a substitute for a 5′ UTR.

[2604] In some embodiments, a 5′ UTR of the present disclosure comprises a sequence selected from SEQ ID NO:19452 (GGGAAAUAAG AGAGAAAAGA AGAGUAAGAA GAAAUAUAAG AGCCACC), and SEQ ID NO: 19453 (GGGAAATAAG AGAGAAAAGA AGAGTAAGAA GAAATATAAG AGCCACC).

### 3′ UTR Regions

[2605] In various embodiments, the mRNA payloads of the LNP-based base editing systems, RNA therapeutics and pharmaceutical compositions thereof described herein, may comprise at least one 3′ UTR. 3′ UTRs may be heterologous or synthetic.

[2606] A 3′ UTR is region of an mRNA that is directly downstream (3′) from the stop codon (the codon of an mRNA transcript that signals a termination of translation). A 3′ UTR does not encode a protein (is non-coding). Natural or wild type 3′ UTRs are known to have stretches of adenosines and uridines embedded in them. These AU rich signatures are particularly prevalent in genes with high rates of turnover. Based on their sequence features and functional properties, the AU rich elements (AREs) can be separated into three classes (Chen et al, 1995): Class I AREs contain several dispersed copies of an AUUUA motif within U-rich regions. C-Myc and MyoD contain class I AREs. Class II AREs possess two or more overlapping UUAUUUA(U/A)(U/A) nonamers. Molecules containing this type of AREs include GM-CSF and TNF-α. Class III ARES are less well defined. These U rich regions do not contain an AUUUA motif c-Jun and Myogenin are two well-studied examples of this class. Most proteins binding to the AREs are known to destabilize the messenger, whereas members of the ELAV family, most notably HuR, have been documented to increase the stability of mRNA. HuR binds to AREs of all the three classes. Engineering the HuR specific binding sites into the 3′ UTR of nucleic acid molecules will lead to HuR binding and thus, stabilization of the message in vivo.

[2607] 3′ UTRs are known to have stretches of adenosines and uridines embedded in them. These AU rich signatures are particularly prevalent in genes with high rates of turnover. Based on their sequence features and functional properties, the AU rich elements (AREs) can be separated into three classes (Chen et al., 1995): Class I AREs contain several dispersed copies of an AUUUA motif within U-rich regions. C-Myc and MyoD contain class I AREs. Class II AREs possess two or more overlapping UUAUUUA(U/A)(U/A) nonamers. Molecules containing this type of AREs include GM-CSF and TNF-α. Class III ARES are less well defined. These U rich regions do not contain an AUUUA motif. c-Jun and Myogenin are two well-studied examples of this class. Most proteins binding to the AREs are known to destabilize the messenger, whereas members of the ELAV family, most notably HuR, have been documented to increase the stability of mRNA. HuR binds to AREs of all the three classes. Engineering the HuR specific binding sites into the 3′ UTR of nucleic acid molecules will lead to HuR binding and thus, stabilization of the message in vivo.

[2608] Introduction, removal or modification of 3′ UTR AU rich elements (AREs) can be used to modulate the stability of the mRNA payloads described herein. For example, one or more copies of an ARE can be introduced to make mRNA less stable and thereby curtail translation and decrease production of the resultant protein. Alternatively, AREs can be identified and removed or mutated to increase the intracellular stability and thus increase translation and production of the resultant protein.

[2609] In some embodiments, the introduction of features often expressed in genes of target organs the stability and protein production of the mRNA can be enhanced in a specific organ and/or tissue. As a non-limiting example, the feature can be a UTR. As another example, the feature can be introns or portions of introns sequences.

[2610] Those of ordinary skill in the art will understand that 5′ UTRs that are heterologous or synthetic may be used with any desired 3′ UTR sequence. For example, a heterologous 5′ UTR may be used with a synthetic 3′ UTR with a heterologous 3′ UTR.

[2611] Non-UTR sequences may also be used as regions or subregions within an RNA payload construct. For example, introns or portions of introns sequences may be incorporated into regions of nucleic acid of the disclosure. Incorporation of intronic sequences may increase protein production as well as nucleic acid levels.

[2612] Combinations of features may be included in flanking regions and may be contained within other features. For example, the polypeptide coding region of interest in an mRNA payload may be flanked by a 5′ UTR which may contain a strong Kozak translational initiation signal and/or a 3′ UTR which may include an oligo(dT) sequence for templated addition of a poly-A tail. 5′ UTR may comprise a first polynucleotide fragment and a second polynucleotide fragment from the same and/or different genes such as the 5′ UTRs described in US Patent Application Publication No. 20100293625 and PCT/US2014/069155, herein incorporated by reference in its entirety

[2613] It should be understood that any UTR from any gene may be incorporated into the regions of an RNA payload molecule (e.g., a linear mRNA). Furthermore, multiple wild-type UTRs of any known gene may be utilized. It is also within the scope of the present disclosure to provide artificial UTRs which are not variants of wild type regions. These UTRs or portions thereof may be placed in the same orientation as in the transcript from which they were selected or may be altered in orientation or location. Hence a 5′ or 3′ UTR may be inverted, shortened, lengthened, made with one or more other 5′ UTRs or 3′ UTRs. As used herein, the term “altered” as it relates to a UTR sequence, means that the UTR has been changed in some way in relation to a reference sequence. For example, a 3′ UTR or 5′ UTR may be altered relative to a wild-type or native UTR by the change in orientation or location as taught above or may be altered by the inclusion of additional nucleotides, deletion of nucleotides, swapping or transposition of nucleotides. Any of these changes producing an “altered” UTR (whether 3′ or 5′) comprise a variant UTR.

[2614] In some embodiments, a double, triple or quadruple UTR such as a 5′ UTR or 3′ UTR may be used. As used herein, a “double” UTR is one in which two copies of the same UTR are encoded either in series or substantially in series. For example, a double beta-globin 3′ UTR may be used as described in US Patent publication 20100129877, the contents of which are incorporated herein by reference in its entirety.

[2615] It is also within the scope of the present disclosure to have patterned UTRs. As used herein “patterned UTRs” are those UTRs which reflect a repeating or alternating pattern, such as ABABAB or AABBAABBAABB or ABCABCABC or variants thereof repeated once, twice, or more than 3 times. In these patterns, each letter, A, B, or C represent a different UTR at the nucleotide level.

[2616] In some embodiments, flanking regions are selected from a family of transcripts whose proteins share a common function, structure, feature or property. For example, polypeptides of interest may belong to a family of proteins which are expressed in a particular cell, tissue or at some time during development. The UTRs from any of these genes may be swapped for any other UTR of the same or different family of proteins to create a new polynucleotide. As used herein, a “family of proteins” is used in the broadest sense to refer to a group of two or more polypeptides of interest which share at least one function, structure, feature, localization, origin, or expression pattern.

[2617] The untranslated region may also include translation enhancer elements (TEE). As a non-limiting example, the TEE may include those described in US Application No. 20090226470, herein incorporated by reference in its entirety, and those known in the art.

### 5′ Capping

[2618] In various embodiments, the mRNA payloads of the LNP-based base editing systems, RNA therapeutics and pharmaceutical compositions thereof described herein, may comprise a 5′ cap structure.

[2619] The 5′ cap structure of an mRNA is involved in nuclear export, increasing mRNA stability and binds the mRNA Cap Binding Protein (CBP), which is responsible for mRNA stability in the cell and translation competency through the association of CBP with poly(A) binding protein to form the mature cyclic mRNA species. The cap further assists the removal of 5′ proximal introns removal during mRNA splicing.

[2620] Endogenous mRNA molecules may be 5′-end capped generating a 5′-ppp-5′-triphosphate linkage between a terminal guanosine cap residue and the 5′-terminal transcribed sense nucleotide of the mRNA molecule. This 5′-guanylate cap may then be methylated to generate an N7-methyl-guanylate residue. The ribose sugars of the terminal and/or anteterminal transcribed nucleotides of the 5′ end of the mRNA may optionally also be 2′-O-methylated. 5′-decapping through hydrolysis and cleavage of the guanylate cap structure may target a nucleic acid molecule, such as an mRNA molecule, for degradation.

[2621] Modifications to mRNA may generate a non-hydrolyzable cap structure preventing decapping and thus increasing mRNA half-life. Because cap structure hydrolysis requires cleavage of 5′-ppp-5′ phosphorodiester linkages, modified nucleotides may be used during the capping reaction. For example, a Vaccinia Capping Enzyme from New England Biolabs (Ipswich, MA) may be used with a-thio-guanosine nucleotides according to the manufacturer's instructions to create a phosphorothioate linkage in the 5′-ppp-5′ cap.

[2622] Additional modified guanosine nucleotides may be used such as a-methylphosphonate and seleno-phosphate nucleotides.

[2623] Additional modifications include, but are not limited to, 2-O-methylation of the ribose sugars of 5′-terminal and/or 5′-anteterminal nucleotides of the mRNA (as mentioned above) on the 2′-hydroxyl group of the sugar ring. Multiple distinct 5′-cap structures can be used to generate the 5′-cap of a nucleic acid molecule, such as an mRNA molecule.

[2624] Cap analogs, which herein are also referred to as synthetic cap analogs, chemical caps, chemical cap analogs, or structural or functional cap analogs, differ from natural (i.e. endogenous, wild-type or physiological) 5-caps in their chemical structure, while retaining cap function. Cap analogs may be chemically (i.e. non-enzymatically) or enzymatically synthesized and/or linked to a nucleic acid molecule.

[2625] For example, the Anti-Reverse Cap Analog (ARCA) cap contains two guanines linked by a 5′-5′-triphosphate group, wherein one guanine contains an N7 methyl group as well as a 3′-O-methyl group (i.e., N7,3′-O-dimethyl-guanosine-5′-triphosphate-5′-guanosine (m⁷G-3′mppp-G; which may equivalently be designated 3′ O-Me-m7G(5′)ppp(5′)G). The 3′-0 atom of the other, unmodified, guanine becomes linked to the 5-terminal nucleotide of the capped nucleic acid molecule (e.g. an mRNA). The N7- and 3′-O-methylated guanine provides the terminal moiety of the capped nucleic acid molecule (e.g. mRNA).

[2626] Another exemplary cap is mCAP, which is similar to ARCA but has a 2-O-methyl group on guanosine (i.e., N7,2′-O-dimethyl-guanosine-5′-triphosphate-5′-guanosine, m⁷Gm-ppp-G).

[2627] While cap analogs allow for the concomitant capping of a nucleic acid molecule in an in vitro transcription reaction, up to 20% of transcripts can remain uncapped. This, as well as the structural differences of a cap analog from an endogenous 5′-cap structures of nucleic acids produced by the endogenous, cellular transcription machinery, may lead to reduced translational competency and reduced cellular stability.

[2628] mRNA may also be capped post-transcriptionally, using enzymes, in order to generate more authentic 5′-cap structures. As used herein, the phrase “more authentic” refers to a feature that closely mirrors or mimics, either structurally or functionally, an endogenous or wild type feature. That is, a “more authentic” feature is better representative of an endogenous, wild-type, natural or physiological cellular function and/or structure as compared to synthetic features or analogs, etc., of the prior art, or which outperforms the corresponding endogenous, wild-type, natural or physiological feature in one or more respects. Non-limiting examples of more authentic 5′cap structures are those which, among other things, have enhanced binding of cap binding proteins, increased half-life, reduced susceptibility to 5′ endonucleases and/or reduced 5′decapping, as compared to synthetic 5′cap structures known in the art (or to a wild-type, natural or physiological 5′cap structure). For example, recombinant Vaccinia Virus Capping Enzyme and recombinant 2′-O-methyltransferase enzyme can create a canonical 5′-5′-triphosphate linkage between the 5′-terminal nucleotide of an mRNA and a guanine cap nucleotide wherein the cap guanine contains an N7 methylation and the 5′-terminal nucleotide of the mRNA contains a 2-O-methyl. Such a structure is termed the Cap1 structure. This cap results in a higher translational-competency and cellular stability and a reduced activation of cellular pro-inflammatory cytokines, as compared, e.g., to other 5′cap analog structures known in the art. Cap structures include, but are not limited to, 7mG(5*)ppp(5*)N, pN2p (cap 0), 7mG(5*)ppp(5*)NlmpNp (cap 1), and 7mG(5*)-ppp(5′)NlmpN2mp (cap 2).

[2629] In some embodiments, the 5′ terminal caps may include endogenous caps or cap analogs.

[2630] In some embodiments, a 5′ terminal cap may comprise a guanine analog. Useful guanine analogs include, but are not limited to, inosine, Nl-methyl-guanosine, 2′fluoro-guanosine, 7-deaza-guanosine, 8-oxo-guanosine, 2-amino-guanosine, LNA-guanosine, and 2-azido-guanosine.

### IRES Sequences

[2631] In various embodiments, the mRNA payloads of the LNP-based gene editing systems, RNA therapeutics and pharmaceutical compositions thereof described herein, may comprise one or more IRES sequences.

[2632] In some embodiments, the mRNA may contain an internal ribosome entry site (IRES). First identified as a feature Picorna virus RNA, IRES plays an important role in initiating protein synthesis in absence of the 5′ cap structure. An IRES may act as the sole ribosome binding site, or may serve as one of multiple ribosome binding sites of an mRNA. An mRNA that contains more than one functional ribosome binding site may encode several peptides or polypeptides that are translated independently by the ribosomes. Non-limiting examples of IRES sequences that can be used include without limitation, those from picornaviruses (e.g. FMDV), pest viruses (CFFV), polio viruses (PV), encephalomyocarditis viruses (ECMV), foot-and-mouth disease viruses (FMDV), hepatitis C viruses (HCV), classical swine fever viruses (CSFV), murine leukemia virus (MLV), simian immune deficiency viruses (SIV) or cricket paralysis viruses (CrPV).

[2633] In some embodiments, the TRES is from Taura syndrome virus, Triatoma virus, Theiler's encephalomyelitis virus, Simian Virus 40, Solenopsis invicta virus 1, Rhopalosiphum padi virus, Reticuloendotheliosis virus, Human poliovirus 1, Plautia stali intestine virus, Kashmir bee virus, Human rhinovirus 2, Homalodisca coagulata virus-1, Human Immunodeficiency Virus type 1, Homalodisca coagulata virus-1, Himetobi P virus, Hepatitis C virus, Hepatitis A virus, Hepatitis GB virus, Foot and mouth disease virus, Human enterovirus 71, Equine rhinitis virus, Ectropis obliqua picorna-like virus, Encephalomyocarditis virus, Drosophila C Virus, Human coxsackievirus B3, Crucifer tobamovirus, Cricket paralysis virus, Bovine viral diarrhea virus 1, Black Queen Cell Virus, Aphid lethal paralysis virus, Avian encephalomyelitis virus, Acute bee paralysis virus, Hibiscus chlorotic ringspot virus, Classical swine fever virus, Human FGF2, Human SFTPA1, Human AML1/RUNX1, Drosophila antennapedia, Human AQP4, Human ATIR, Human BAG-1, Human BCL2, Human BiP, Human c-IAP1, Human c-myc, Human eIF4G, MouseNDST4L, Human LEF1, Mouse HIF1 alpha, Human n.myc, Mouse Gtx, Human p27kip1, Human PDGF2/c-sis, Human p53, Human Pim-1, Mouse Rbm3, Drosophila reaper, Canine Scamper, Drosophila Ubx, Human UNR, Mouse UtrA, Human VEGF-A, Human XIAP, Drosophila hairless, S. cerevisiae TFIID, S. cerevisiae YAP1, tobacco etch virus, turnip crinkle virus, EMCV-A, EMCV-B, EMCV-Bf, EMCV-Cf, EMCV pEC9, Picobirnavirus, HCV QC64, Human Cosavirus E/D, Human Cosavirus F, Human Cosavirus JMY, Rhinovirus NATOO, HRV14, HRV89, HRVC-02, HRV-A21, Salivirus A SHI, Salivirus FHB, Salivirus NG-JI, Human Parechovirus 1, Crohivirus B, Yc-3, Rosavirus M-7, Shanbavirus A, Pasivirus A, Pasivirus A 2, Echovirus E14, Human Parechovirus 5, Aichi Virus, Hepatitis A Virus HA16, Phopivirus, CVA10, Enterovirus C, Enterovirus D, Enterovirus J, Human Pegivirus 2, GBV-C GT110, GBV-C K1737, GBV-C Iowa, Pegivirus A 1220, Pasivirus A 3, Sapelovirus, Rosavirus B, Bakunsa Virus, Tremovirus A, Swine Pasivirus 1, PLV-CHN, Pasivirus A, Sicinivirus, Hepacivirus K, Hepacivirus A, BVDV1, Border Disease Virus, BVDV2, CSFV—PK15C, SF573 Dicistrovirus, Hubei Picorna-like Virus, CRPV, Salivirus A BNS, Salivirus A BN2, Salivirus A 02394, Salivirus A GUT, Salivirus A CH, Salivirus A SZ1, Salivirus FHB, CVB3, CVB1, Echovirus 7, CVBS, EVA71, CVA3, CVA12, EV24 or an aptamerto eIF4G.

### Poly-A Tails and 3′ Stabilizing Regions

[2634] In various embodiments, the mRNA payloads of the LNP-based gene editing systems, RNA therapeutics and pharmaceutical compositions thereof described herein, may comprise a poly-A tail.

[2635] During RNA processing, a long chain of adenine nucleotides (poly-A tail) may be added to a polynucleotide such as an mRNA molecules in order to increase stability. Immediately after transcription, the 3′ end of the transcript may be cleaved to free a 3′ hydroxyl. Then poly-A polymerase adds a chain of adenine nucleotides to the free 3′ hydroxyl end. The process, called polyadenylation, adds a poly-A tail of a certain length.

[2636] In some embodiments, the length of a poly-A tail is greater than 30 nucleotides in length. In another embodiment, the poly-A tail is greater than 35 nucleotides in length (e.g., at least or greater than about 35, 40, 45, 50, 55, 60, 70, 80, 90, 100, 120, 140, 160, 180, 200, 250, 300, 350, 400, 450, 500, 600, 700, 800, 900, 1,000, 1,100, 1,200, 1,300, 1,400, 1,500, 1,600, 1,700, 1,800, 1,900, 2,000, 2,500, and 3,000 nucleotides) and no more than about 50, 100, 200, 300, 400, 500, 600, 700, 800, 900, 1000, 2000, or 3000 nucleotides in length. In some embodiments, the mRNA includes a poly-A tail from about 30 to about 3,000 nucleotides (e.g., from 30 to 50, from 30 to 100, from 30 to 250, from 30 to 500, from 30 to 750, from 30 to 1,000, from 30 to 1,500, from 30 to 2,000, from 30 to 2,500, from 50 to 100, from 50 to 250, from 50 to 500, from 50 to 750, from 50 to 1,000, from 50 to 1,500, from 50 to 2,000, from 50 to 2,500, from 50 to 3,000, from 100 to 500, from 100 to 750, from 100 to 1,000, from 100 to 1,500, from 100 to 2,000, from 100 to 2,500, from 100 to 3,000, from 500 to 750, from 500 to 1,000, from 500 to 1,500, from 500 to 2,000, from 500 to 2,500, from 500 to 3,000, from 1,000 to 1,500, from 1,000 to 2,000, from 1,000 to 2,500, from 1,000 to 3,000, from 1,500 to 2,000, from 1,500 to 2,500, from 1,500 to 3,000, from 2,000 to 3,000, from 2,000 to 2,500, and from 2,500 to 3,000).

[2637] In some embodiments, the poly-A tail is designed relative to the length of the overall mRNA. This design may be based on the length of the region coding for a target of interest, the length of a particular feature or region (such as a flanking region), or based on the length of the ultimate product expressed from the mRNA.

[2638] In this context the poly-A tail may be 10, 20, 30, 40, 50, 60, 70, 80, 90, or 100% greater in length than the mRNA or feature thereof. The poly-A tail may also be designed as a fraction of mRNA to which it belongs. In this context, the poly-A tail may be 10, 20, 30, 40, 50, 60, 70, 80, or 90% or more of the total length of the construct or the total length of the construct minus the poly-A tail. Further, engineered binding sites and conjugation of mRNA for poly-A binding protein may enhance expression.

[2639] Additionally, multiple distinct mRNA may be linked together to the PABP (Poly-A binding protein) through the 3′-end using modified nucleotides at the 3′-terminus of the poly-A tail. Transfection experiments can be conducted in relevant cell lines at and protein production can be assayed by ELISA at 12 hr, 24 hr, 48 hr, 72 hr and day 7 post-transfection.

[2640] In some embodiments, the mRNA are designed to include a polyA-G Quartet. The G-quartet is a cyclic hydrogen bonded array of four guanine nucleotides that can be formed by G-rich sequences in both DNA and RNA. In this embodiment, the G-quartet is incorporated at the end of the poly-A tail.

### Stop Codons

[2641] In various embodiments, the mRNA payloads of the LNP-based gene editing systems, RNA therapeutics and pharmaceutical compositions thereof described herein, may comprise one or more translation stop codons. Translational stop codons, UAA, UAG, and UGA, are an important component of the genetic code and signal the termination of translation of an mRNA. During protein synthesis, stop codons interact with protein release factors and this interaction can modulate ribosomal activity thus having an impact translation (Tate W P, et al., (2018) Biochem Soc Trans, 46(6):1615-162).

[2642] A stop element as used herein, refers to a nucleic acid sequence comprising a stop codon. The stop codon can be selected from TGA, TAA and TAG in the case of DNA, or from UGA, UAA and UAG in the case of RNA. In an embodiment, a stop element comprises two consecutive stop codons. In an embodiment, a stop element comprises three consecutive stop codons. In an embodiment, a stop element comprises four consecutive stop codons. In an embodiment, a stop element comprises five consecutive stop codons.

[2643] In some embodiments, the mRNA may include one stop codon. In some embodiments, the mRNA may include two stop codons. In some embodiments, the mRNA may include three stop codons. In some embodiments, the mRNA may include at least one stop codon. In some embodiments, the mRNA may include at least two stop codons. In some embodiments, the mRNA may include at least three stop codons. As non-limiting examples, the stop codon may be selected from TGA, TAA and TAG.

[2644] In other embodiments, the stop codon may be selected from one or more of the following stop elements of Table Z:

TABLE Z
Additional stop elements of linear mRNA

| Nucleotide sequence | |
|---|---|
| (5′ to 3′) | Sequence Identifier |
| UGAUAAUAG | SEQ ID NO: 19454 |
| UAAUAGUAA | SEQ ID NO: 19455 |
| UAAGUCUAA | SEQ ID NO: 19456 |
| UAAAGCUAA | SEQ ID NO: 19457 |
| UAAGUCUCC | SEQ ID NO: 19458 |
| UAAGGCUAA | SEQ ID NO: 19459 |
| UAAGCCCCUCCGGGG | SEQ ID NO: 19460 |
| UAAAGCUCCCCGGGG | SEQ ID NO: 19461 |
| UAAGCCCCU | SEQ ID NO: 19462 |
| UAAAGCUCC | SEQ ID NO: 19463 |
| UAAAGCUCC | SEQ ID NO: 19464 |
| UAGGGUUAA | SEQ ID NO: 19465 |
| UAAGCACCC | SEQ ID NO: 19466 |
| UGAUAGUAA | SEQ ID NO: 19467 |
| UAAAGCGCU | SEQ ID NO: 19468 |

[2645] In some embodiments, the mRNA includes the stop codon TGA and one additional stop codon. In a further embodiment the addition stop codon may be TAA.

### MicroRNA Binding Sites and Other Regulatory Elements

[2646] In various embodiments, the mRNA payloads of the LNP-based gene editing systems, RNA therapeutics and pharmaceutical compositions thereof described herein, may comprise one or more regulatory elements, including, but not limited to microRNA (miRNA) binding sites, structured mRNA sequences and/or motifs, artificial binding sites to bind to endogenous nucleic acid binding molecules, and combinations thereof.

### Chemically Unmodified Nucleotides

[2647] In some embodiments, the mRNA payloads of the LNP-based gene editing systems, RNA therapeutics and pharmaceutical compositions thereof described herein are not chemically modified and comprises the standard ribonucleotides consisting of adenosine, guanosine, cytosine and uridine. In some embodiments, nucleotides and nucleosides of the present disclosure comprise standard nucleoside residues such as those present in transcribed RNA (e.g. A, G, C, or U). In some embodiments, nucleotides and nucleosides of the present disclosure comprise standard deoxyribonucleosides such as those present in DNA (e.g. dA, dG, dC, or dT).

### Chemically Modified Nucleotides

[2648] In some embodiments, the mRNA payloads of the LNP-based gene editing systems, RNA therapeutics and pharmaceutical compositions thereof described herein comprise, in some embodiments, comprises at least one chemical modification.

[2649] The terms “chemical modification” and “chemically modified” refer to modification with respect to adenosine (A), guanosine (G), uridine (U), thymidine (T) or cytidine (C) ribonucleosides or deoxyribonucleosides in at least one of their position, pattern, percent or population. Generally, these terms do not refer to the ribonucleotide modifications in naturally occurring 5′-terminal mRNA cap moieties. With respect to a polypeptide, the term “modification” refers to a modification relative to the canonical set 20 amino acids. Polypeptides, as provided herein, are also considered “modified” if they contain amino acid substitutions, insertions or a combination of substitutions and insertions.

[2650] Polynucleotides (e.g., RNA polynucleotides, such as mRNA polynucleotides), in some embodiments, comprise various (more than one) different modifications. In some embodiments, a particular region of a polynucleotide contains one, two or more (optionally different) nucleoside or nucleotide modifications. In some embodiments, a modified RNA polynucleotide (e.g., a modified mRNA polynucleotide), introduced to a cell or organism, exhibits reduced degradation in the cell or organism, respectively, relative to an unmodified polynucleotide. In some embodiments, a modified RNA polynucleotide (e.g., a modified mRNA polynucleotide), introduced into a cell or organism, may exhibit reduced immunogenicity in the cell or organism, respectively (e.g., a reduced innate response).

[2651] Modifications of polynucleotides include, without limitation, those described herein. Polynucleotides (e.g., RNA polynucleotides, such as mRNA polynucleotides) may comprise modifications that are naturally-occurring, non-naturally-occurring or the polynucleotide may comprise a combination of naturally-occurring and non-naturally-occurring modifications. Polynucleotides may include any useful modification, for example, of a sugar, a nucleobase, or an internucleoside linkage (e.g., to a linking phosphate, to a phosphodiester linkage or to the phosphodiester backbone).

[2652] Polynucleotides (e.g., RNA polynucleotides, such as mRNA polynucleotides), in some embodiments, comprise non-natural modified nucleotides that are introduced during synthesis or post-synthesis of the polynucleotides to achieve desired functions or properties. The modifications may be present on an internucleotide linkages, purine or pyrimidine bases, or sugars. The modification may be introduced with chemical synthesis or with a polymerase enzyme at the terminal of a chain or anywhere else in the chain. Any of the regions of a polynucleotide may be chemically modified.

[2653] The present disclosure provides for modified nucleosides and nucleotides of a polynucleotide (e.g., RNA polynucleotides, such as mRNA polynucleotides). A “nucleoside” refers to a compound containing a sugar molecule (e.g., a pentose or ribose) or a derivative thereof in combination with an organic base (e.g., a purine or pyrimidine) or a derivative thereof (also referred to herein as “nucleobase”). A “nucleotide” refers to a nucleoside, including a phosphate group. Modified nucleotides may by synthesized by any useful method, such as, for example, chemically, enzymatically, or recombinantly, to include one or more modified or non-natural nucleosides. Polynucleotides may comprise a region or regions of linked nucleosides. Such regions may have variable backbone linkages. The linkages may be standard phosphodiester linkages, in which case the polynucleotides would comprise regions of nucleotides.

[2654] Modified nucleotide base pairing encompasses not only the standard adenosine-thymine, adenosine-uracil, or guanosine-cytosine base pairs, but also base pairs formed between nucleotides and/or modified nucleotides comprising non-standard or modified bases, wherein the arrangement of hydrogen bond donors and hydrogen bond acceptors permits hydrogen bonding between a non-standard base and a standard base or between two complementary non-standard base structures. One example of such non-standard base pairing is the base pairing between the modified nucleotide inosine and adenine, cytosine or uracil. Any combination of base/sugar or linker may be incorporated into polynucleotides of the present disclosure.

[2655] In some embodiments, polynucleotides (e.g., RNA polynucleotides, such as mRNA polynucleotides) include a combination of at least two (e.g., 2, 3, 4 or more) of the aforementioned modified nucleobases.

[2656] In some embodiments, modified nucleobases in polynucleotides (e.g., RNA polynucleotides, such as mRNA polynucleotides) are selected from the group consisting of pseudouridine (ψ), N1-methylpseudouridine (m¹ψy), N1-ethylpseudouridine, 2-thiouridine, 4′-thiouridine, 5-methylcytosine, 2-thio-1-methyl-1-deaza-pseudouridine, 2-thio-1-methyl-pseudouridine, 2-thio-5-aza-uridine, 2-thio-dihydropseudouridine, 2-thio-dihydrouridine, 2-thio-pseudouridine, 4-methoxy-2-thio-pseudouridine, 4-methoxy-pseudouridine, 4-thio-1-methyl-pseudouridine, 4-thio-pseudouridine, 5-aza-uridine, dihydropseudouridine, 5-methoxyuridine and 2′-O-methyl uridine. In some embodiments, polynucleotides (e.g., RNA polynucleotides, such as mRNA polynucleotides) include a combination of at least two (e.g., 2, 3, 4 or more) of the aforementioned modified nucleobases.

[2657] In some embodiments, modified nucleobases in polynucleotides (e.g., RNA polynucleotides, such as mRNA polynucleotides) are selected from the group consisting of 1-methyl-pseudouridine (m^{1ψ),} 5-methoxy-uridine (mo⁵U), 5-methyl-cytidine (m⁵C), pseudouridine (ψ), α-thio-guanosine and α-thio-adenosine. In some embodiments, polynucleotides includes a combination of at least two (e.g., 2, 3, 4 or more) of the aforementioned modified nucleobases.

[2658] In some embodiments, polynucleotides (e.g., RNA polynucleotides, such as mRNA polynucleotides) comprise pseudouridine (W) and 5-methyl-cytidine (m⁵C). In some embodiments, polynucleotides (e.g., RNA polynucleotides, such as mRNA polynucleotides) comprise 1-methyl-pseudouridine (m¹ψ). In some embodiments, polynucleotides (e.g., RNA polynucleotides, such as mRNA polynucleotides) comprise 1-methyl-pseudouridine (m¹ψ) and 5-methyl-cytidine (m⁵C). In some embodiments, polynucleotides (e.g., RNA polynucleotides, such as mRNA polynucleotides) comprise 2-thiouridine (s²U). In some embodiments, polynucleotides (e.g., RNA polynucleotides, such as mRNA polynucleotides) comprise 2-thiouridine and 5-methyl-cytidine (m⁵C). In some embodiments, polynucleotides (e.g., RNA polynucleotides, such as mRNA polynucleotides) comprise methoxy-uridine (mo⁵U). In some embodiments, polynucleotides (e.g., RNA polynucleotides, such as mRNA polynucleotides) comprise 5-methoxy-uridine (mo⁵U) and 5-methyl-cytidine (m⁵C). In some embodiments, polynucleotides (e.g., RNA polynucleotides, such as mRNA polynucleotides) comprise 2′-O-methyl uridine. In some embodiments polynucleotides (e.g., RNA polynucleotides, such as mRNA polynucleotides) comprise 2′-O-methyl uridine and 5-methyl-cytidine (m⁵C). In some embodiments, polynucleotides (e.g., RNA polynucleotides, such as mRNA polynucleotides) comprise N6-methyl-adenosine (m⁶A). In some embodiments, polynucleotides (e.g., RNA polynucleotides, such as mRNA polynucleotides) comprise N6-methyl-adenosine (m⁶A) and 5-methyl-cytidine (mC).

[2659] In some embodiments, polynucleotides (e.g., RNA polynucleotides, such as mRNA polynucleotides) are uniformly modified (e.g., fully modified, modified throughout the entire sequence) for a particular modification. For example, a polynucleotide can be uniformly modified with 5-methyl-cytidine (m⁵C), meaning that all cytosine residues in the mRNA sequence are replaced with 5-methyl-cytidine (m⁵C). Similarly, a polynucleotide can be uniformly modified for any type of nucleoside residue present in the sequence by replacement with a modified residue such as those set forth above.

[2660] Exemplary nucleobases and nucleosides having a modified cytosine include N4-acetyl-cytidine (ac4C), 5-methyl-cytidine (m5C), 5-halo-cytidine (e.g., 5-iodo-cytidine), 5-hydroxymethyl-cytidine (hm5C), 1-methyl-pseudoisocytidine, 2-thio-cytidine (s2C), and 2-thio-5-methyl-cytidine.

[2661] In some embodiments, a modified nucleobase is a modified uridine. Exemplary nucleobases and In some embodiments, a modified nucleobase is a modified cytosine. nucleosides having a modified uridine include 5-cyano uridine, and 4′-thio uridine.

[2662] The polynucleotides of the present disclosure may be partially or fully modified along the entire length of the molecule. For example, one or more or all or a given type of nucleotide (e.g., purine or pyrimidine, or any one or more or all of A, G, U, C) may be uniformly modified in a polynucleotide of the invention, or in a given predetermined sequence region thereof (e.g., in the mRNA including or excluding the polyA tail). In some embodiments, all nucleotides X in a polynucleotide of the present disclosure (or in a given sequence region thereof) are modified nucleotides, wherein X may any one of nucleotides A, G, U, C, or any one of the combinations A+G, A+U, A+C, G+U, G+C, U+C, A+G+U, A+G+C, G+U+C or A+G+C.

[2663] The polynucleotide may contain from about 1% to about 100% modified nucleotides (either in relation to overall nucleotide content, or in relation to one or more types of nucleotide, i.e., any one or more of A, G, U or C) or any intervening percentage (e.g., from 1% to 20%, from 1% to 25%, from 1% to 50%, from 1% to 60%, from 1% to 70%, from 1% to 80%, from 1% to 90%, from 1% to 95%, from 10% to 20%, from 10% to 25%, from 10% to 50%, from 10% to 60%, from 10% to 70%, from 10% to 80%, from 10% to 90%, from 10% to 95%, from 10% to 100%, from 20% to 25%, from 20% to 50%, from 20% to 60%, from 20% to 70%, from 20% to 80%, from 20% to 90%, from 20% to 95%, from 20% to 100%, from 50% to 60%, from 50% to 70%, from 50% to 80%, from 50% to 90%, from 50% to 95%, from 50% to 100%, from 70% to 80%, from 70% to 90%, from 70% to 95%, from 70% to 100%, from 80% to 90%, from 80% to 95%, from 80% to 100%, from 90% to 95%, from 90% to 100%, and from 95% to 100%). It will be understood that any remaining percentage is accounted for by the presence of unmodified A, G, U, or C.

[2664] The polynucleotides may contain at a minimum 1% and at maximum 100% modified nucleotides, or any intervening percentage, such as at least 5% modified nucleotides, at least 10% modified nucleotides, at least 25% modified nucleotides, at least 50% modified nucleotides, at least 80% modified nucleotides, or at least 90% modified nucleotides. For example, the polynucleotides may contain a modified pyrimidine such as a modified uracil or cytosine. In some embodiments, at least 5%, at least 10%, at least 25%, at least 50%, at least 80%, at least 90% or 100% of the uracil in the polynucleotide is replaced with a modified uracil (e.g., a 5-substituted uracil). The modified uracil can be replaced by a compound having a single unique structure, or can be replaced by a plurality of compounds having different structures (e.g., 2, 3, 4 or more unique structures). In some embodiments, at least 5%, at least 10%, at least 25%, at least 50%, at least 80%, at least 90% or 100% of the cytosine in the polynucleotide is replaced with a modified cytosine (e.g., a 5-substituted cytosine). The modified cytosine can be replaced by a compound having a single unique structure, or can be replaced by a plurality of compounds having different structures (e.g., 2, 3, 4 or more unique structures).

4. Circular mRNA Payloads

[2665] In various embodiments, the LNP-based pharmaceutical compositions described herein, e.g., LNP-based gene editing systems, may include one or more circular mRNA molecules or “oRNAs.” In various embodiments, the circular mRNA payloads may encode one or more components of the herein described gene editing systems or other therapeutic protein of interest. For example, a circular mRNA payload may encode an amino acid sequence-programmable DNA binding domain (e.g., retron RTs, CRISPR nucleases, TALENS and zinc finger-binding domains) or a nucleic acid sequence-programmable DNA binding domain (e.g., CRISPR Cas9, CRISPR Cas12a, CRISPR Cas12f, CRISPR Cas13a, CRISPR Cas13b, or TnpB).

[2666] The circular mRNA payloads may also encode, depending upon the nature of the gene editing system, one or more effector domains that provide various functionalities that facilitate changes in nucleotide sequence and/or gene expression, such as, but not limited to, single-strand DNA binding proteins, nucleases, endonucleases, exonucleases, deaminases (e.g., cytidine deaminases or adenosine deaminases), polymerases (e.g., reverse transcriptases), integrases, recombinases, etc., and fusion proteins comprising one or more functional domains linked together.

[2667] Circular RNA described herein are polyribonucleotides that form a continuous structure through covalent or non-covalent bonds. Due to the circular structure, oRNAs have improved stability, increased half-life, reduced immunogenicity, and/or improved functionality (e.g., of a function described herein) compared to a corresponding linear RNA.

[2668] In some embodiments, an oRNA binds a target. In some embodiments, an oRNA binds a substrate. In some embodiments, an oRNA binds a target and binds a substrate of the target. In some embodiments, an oRNA binds a target and mediates modulation of a substrate of the target. In some embodiments, an oRNA brings together a target and its substrate to mediate modification of the substrate, e.g., post-translational modification. In some embodiments, an oRNA brings together a target and its substrate to mediate a cellular process (e.g., alters protein degradation or signal transduction) involving the substrate. In some embodiments, a target is a target protein and a substrate is a substrate protein.

[2669] In some embodiments, an oRNA comprises a conjugation moiety for binding to chemical compound. The conjugation moiety can be a modified polyribonucleotide. The chemical compound can be conjugated to the oRNA by the conjugation moiety. In some embodiments, the chemical compound binds to a target and mediates modulation of a substrate of the target. In some embodiments, an oRNA binds a substrate of a target and a chemical compound conjugated to the oRNA by the conjugation moiety binds the target to bring together the target and its substrate to mediate modification of the substrate, e.g., post-translational modification. In some embodiments, an oRNA binds a substrate of a target and a chemical compound conjugated to the oRNA by the conjugation moiety binds the target to bring together the target and its substrate to mediate modification of the substrate to mediate a cellular process (e.g., alters protein degradation or signal transduction) involving the substrate. In some embodiments, a target is a target protein and a substrate is a substrate protein.

[2670] In some embodiments, the oRNA may be non-immunogenic in a mammal (e.g., a human, non-human primate, rabbit, rat, and mouse).

[2671] In some embodiments, the oRNA may be capable of replicating or replicates in a cell from an aquaculture animal (e.g., fish, crabs, shrimp, oysters etc.), a mammalian cell, a cell from a pet or zoo animal (e.g., cats, dogs, lizards, birds, lions, tigers and bears etc.), a cell from a farm or working animal (e.g., horses, cows, pigs, chickens etc.), a human cell, cultured cells, primary cells or cell lines, stem cells, progenitor cells, differentiated cells, germ cells, cancer cells (e.g., tumorigenic, metastatic), non-tumorigenic cells (e.g., normal cells), fetal cells, embryonic cells, adult cells, mitotic cells, non-mitotic cells, or any combination thereof.

[2672] In one aspect, provided herein is a pharmaceutical composition comprising: a circular RNA comprising, in the following order, a 3′ group I intron fragment, an Internal Ribosome Entry Site (IRES), an expression sequence encoding a polypeptide (e.g., a nucleobase editing system or component thereof), and a 5′ group I intron fragment, and a transfer vehicle comprising at least one of (i) an ionizable lipid, (ii) a structural lipid, and (iii) a PEG-modified lipid, wherein the transfer vehicle is capable of delivering the circular RNA polynucleotide to a cell (e.g., a human cell, such as an immune cell present in a human subject), such that the polypeptide is translated in the cell. In some embodiments, the pharmaceutical composition is formulated for intravenous administration to the human subject in need thereof. In some embodiments, the 3′ group I intron fragment and 5′ group I intron fragment are Anabaena group I intron fragments.

[2673] In certain embodiments, the 3′ intron fragment and 5′ intron fragment are defined by the L9a-5 permutation site in the intact intron. In certain embodiments, the 3′ intron fragment and 5′ intron fragment are defined by the L8-2 permutation site in the intact intron.

[2674] In some embodiments, the TRES is from Taura syndrome virus, Triatoma virus, Theiler's encephalomyelitis virus, Simian Virus 40, Solenopsis invicta virus 1, Rhopalosiphum padi virus, Reticuloendotheliosis virus, Human poliovirus 1, Plautia stall intestine virus, Kashmir bee virus, Human rhinovirus 2, Homalodisca coagulata virus-1, Human Immunodeficiency Virus type 1, Homalodisca coagulata virus-1, Himetobi P virus, Hepatitis C virus, Hepatitis A virus, Hepatitis GB virus, Foot and mouth disease virus, Human enterovirus 71, Equine rhinitis virus, Ectropis obliqua picoma-like virus, Encephalomyocarditis virus, Drosophila C Virus, Human coxsackievirus B3, Crucifer tobamovirus, Cricket paralysis virus, Bovine viral diarrhea virus 1, Black Queen Cell Virus, Aphid lethal paralysis virus, Avian encephalomyelitis virus, Acute bee paralysis virus, Hibiscus chlorotic ringspot virus, Classical swine fever virus, Human FGF2, Human SFTPA1, Human AML1/RUNX1, Drosophila antennapedia, Human AQP4, Human ATIR, Human BAG-1, Human BCL2, Human BiP, Human c-IAP1, Human c-myc, Human eIF4G, Mouse NDST4L, Human LEF1, Mouse HIF1 alpha, Human n.myc, Mouse Gtx, Human p27kipl, Human PDGF2/c-sis, Human p53, Human Pim-1, Mouse Rbm3, Drosophila reaper, Canine Scamper, Drosophila Ubx, Human UNR, Mouse UtrA, Human VEGF-A, Human XIAP, Drosophila hairless, S. cerevisiae TFIID, S. cerevisiae YAP1, tobacco etch virus, turnip crinkle virus, EMCV-A, EMCV-B, EMCV-Bf, EMCV-Cf, EMCV pEC9, Picobirnavirus, HCV QC64, Human Cosavirus E/D, Human Cosavirus F, Human Cosavirus JMY, Rhinovirus NAT001, HRV14, HRV89, HRVC-02, HRV-A21, Salivirus A SHI, Salivirus FHB, Salivirus NG-JJ, Human Parechovirus 1, Crohivirus B, Yc-3, Rosavirus M-7, Shanbavirus A, Pasivirus A, Pasivirus A 2, Echovirus E14, Human Parechovirus 5, Aichi Virus, Hepatitis A Virus HA 16, Phopivirus, CVA10, Enterovirus C, Enterovirus D, Enterovirus J, Human Pegivirus 2, GBV-C GT110, GBV-C K1737, GBV-C Iowa, Pegivirus A 1220, Pasivirus A 3, Sapelovirus, Rosavirus B, Bakunsa Virus, Tremovirus A, Swine Pasivirus 1, PLV-CHN, Pasivirus A, Sicinivirus, Hepacivirus K, Hepacivirus A, BVDV1, Border Disease Virus, BVDV2, CSFV—PK15C, SF573 Dicistravirus, Hubei Picoma-like Virus, CRPV, Salivirus A BN5, Salivirus A BN2, Salivirus A 02394, Salivirus A GUT, Salivirus A CH, Salivirus A SZ1, Salivirus FHB, CVB3, CVB1, Echovirus 7, CVB5, EVA71, CVA3, CVA12, EV24 or an aptamer to eIF4G.

[2675] In some embodiments, the IRES comprises a CVB3 IRES or a fragment or variant thereof. In some embodiments, the pharmaceutical composition comprises a first internal spacer between the 3′ group I intron fragment and the TRES, and a second internal spacer between the expression sequence and the 5′ group I intron fragment. In certain embodiments, the first and second internal spacers each have a length of about 10 to about 60 nucleotides.

[2676] In some embodiments, the circular mRNA comprises a nucleotide sequence encoding a polypeptide of interest, such as a nucleobase editing system or therapeutic protein (e.g., a CAR or TCR complex protein).

[2677] In some embodiments, the LNP-based nucleobase editing systems, RNA therapeutics and pharmaceutical compositions described herein further comprise a targeting moiety. In certain embodiments, the targeting moiety mediates receptor-mediated endocytosis or direct fusion of the delivery vehicle (LNPs) into selected cells of a selected cell population or tissue in the absence of cell isolation or purification. In certain embodiments, the targeting moiety is capable of binding to a protein selected from the group CD3, CD4, CD8, CDS, CD7, PD-1, 4-1BB, CD28, Clq, and CD2. In certain embodiments, the targeting moiety comprises an antibody specific for a macrophage, dendritic cell, NK cell, NKT, or T cell antigen. In certain embodiments, the targeting moiety comprises a scFv, nanobody, peptide, minibody, polynucleotide aptamer, heavy chain variable region, light chain variable region or fragment thereof.

[2678] In some embodiments, the LNP-based nucleobase editing systems, RNA therapeutics and pharmaceutical compositions described herein are administered in an amount effective to treat a disease in the human subject (e.g., wherein the disease can be cancer, muscle disorder, or CNS disorder, etc.). In some embodiments, the LNP-based nucleobase editing systems, RNA therapeutics and pharmaceutical compositions have an enhanced safety profile when compared to a pharmaceutical composition comprising T cells or vectors comprising exogenous DNA encoding the same polypeptide.

[2679] In some embodiments, the LNP-based nucleobase editing systems and pharmaceutical compositions thereof are administered in an amount effective to induce a desire precise edit in a genome. In some embodiments, the LNP-based nucleobase editing systems and pharmaceutical compositions have an enhanced safety profile when compared to state of the art gene editing delivery compositions.

[2680] In another aspect, the present disclosure provides a circular RNA comprising, in the following order, a 3′ group I intron fragment, an Internal Ribosome Entry Site (IRES), an expression sequence encoding a polypeptide (e.g., a nucleobase editing system or component thereof), and a 5′ group I intron fragment.

[2681] In some embodiments, the 3′ group I intron fragment and 5′ group I intron fragment are Anabaena group I intron fragments. In certain embodiments, the 3′ intron fragment and 5′ intron fragment are defined by the L9a-5 permutation site in the intact intron. In certain embodiments, the 3′ intron fragment and 5′ intron fragment are defined by the L8-2 permutation site in the intact intron. In certain embodiments, the IRES comprises a CVB3 IRES or a fragment or variant thereof.

[2682] In some embodiments, the circular RNA comprises a first internal spacer between the 3′ group I intron fragment and the IRES, and a second internal spacer between the expression sequence and the 5′ group I intron fragment.

[2683] In certain embodiments, the first and second internal spacers each have a length of about 10 to about 60 nucleotides.

[2684] In some embodiments, the circular RNA payload of the LNP-based nucleobase editing systems, RNA therapeutics and pharmaceutical compositions described herein consists of natural nucleotides. In some embodiments, the circular RNA further comprises a second expression sequence encoding a therapeutic protein. In some embodiments, the therapeutic protein comprises a checkpoint inhibitor. In certain embodiments, the therapeutic protein comprises a cytokine.

[2685] In some embodiments, the circular RNA payload of the LNP-based nucleobase editing systems, RNA therapeutics and pharmaceutical compositions described herein consists of natural nucleotides.

[2686] In some embodiments, the circular RNA payload LNP-based nucleobase editing systems, RNA therapeutics and pharmaceutical compositions described herein comprises a nucleotide sequence that is codon optimized, either partially or fully. In some embodiments, the circular RNA is optimized to lack at least one microRNA binding site present in an equivalent pre-optimized polynucleotide. In some embodiments, the circular RNA is optimized to lack at least one endonuclease susceptible site present in an equivalent pre-optimized polynucleotide. In some embodiments, the circular RNA is optimized to lack at least one RNA-editing susceptible site present in an equivalent pre-optimized polynucleotide.

[2687] In some embodiments, the circular RNA payload of the LNP-based nucleobase editing systems, RNA therapeutics and pharmaceutical compositions described herein has an in vivo functional half-life in humans greater than that of an equivalent linear RNA having the same expression sequence. In some embodiments, the circular RNA has a length of about 100 nucleotides to about 10 kilobases. In some embodiments, the circular RNA has a functional half-life of at least about 20 hours. In some embodiments, the circular RNA has a duration of therapeutic effect in a human cell of at least about 20 hours. In some embodiments, the circular RNA has a duration of therapeutic effect in a human cell greater than or equal to that of an equivalent linear RNA comprising the same expression sequence. In some embodiments, the circular RNA has a functional half-life in a human cell greater than or equal to that of an equivalent linear RNA comprising the same expression sequence.

[2688] In some embodiments, the circular RNA payload of the LNP-based nucleobase editing systems, RNA therapeutics and pharmaceutical compositions described herein has a half-life of at least that of a linear counterpart. In some embodiments, the oRNA has a half-life that is increased over that of a linear counterpart. In some embodiments, the half-life is increased by about 5%, 10%, 15%, 20%, 25%, 30%, 35%, 40%, 45%, 50%, or greater. In some embodiments, the oRNA has a half-life or persistence in a cell for at least about 1 hour to about 30 days, or at least about 2 hours, 6 hours, 12 hours, 18 hours, 24 hours (1 day), 2 days, 3, days, 4 days, 5 days, 6 days, 7 days, 8 days, 9 days, 10 days, 11 days, 12 days, 13 days, 14 days, 15 days, 16 days, 17 days, 18 days, 19 days, 20 days, 21 days, 22 days, 23 days, 24 days, 25 days, 26 days, 27 days, 28 days, 29 days, 30 days, 60 days, or longer or any time therebetween. In some embodiments, the oRNA has a half-life or persistence in a cell for no more than about 10 mins to about 7 days, or no more than about 1 hour, 2 hours, 3 hours, 4 hours, 5 hours, 6 hours, 7 hours, 8 hours, 9 hours, 10 hours, 11 hours, 12 hours, 13 hours, 14 hours, 15 hours, 16 hours, 17 hours, 18 hours, 19 hours, 20 hours, 21 hours, 22 hours, 24 hours (1 day), 36 hours (1.5 days), 48 hours (2 days), 60 hours (2.5 days), 72 hours (3 days), 4 days, 5 days, 6 days, or 7 days.

[2689] In some embodiments, the circular RNA payload of the LNP-based nucleobase editing systems, RNA therapeutics and pharmaceutical compositions described herein has a half-life or persistence in a cell while the cell is dividing. In some embodiments, the oRNA has a half-life or persistence in a cell post division.

[2690] In certain embodiments, the circular RNA payload of the LNP-based nucleobase editing systems, RNA therapeutics and pharmaceutical compositions described herein has a half-life or persistence in a dividing cell for greater than about 10 minutes to about 30 days, or at least about 10 minutes, 15 minutes, 30 minutes, 45 minutes, 1 hour, 2 hours, 3 hours, 4 hours, 5 hours, 6 hours, 7 hours, 8 hours, 9 hours, 10 hours, 11 hours, 12 hours, 13 hours, 14 hours, 15 hours, 16 hours, 17 hours, 18 hours, 24 hours (1 day), 2 days, 3, days, 4 days, 5 days, 6 days, 7 days, 8 days, 9 days, 10 days, 11 days, 12 days, 13 days, 14 days, 15 days, 16 days, 17 days, 18 days, 19 days, 20 days, 21 days, 22 days, 23 days, 24 days, 25 days, 26 days, 27 days, 28 days, 29 days, 30 days, 60 days, or longer or any time therebetween.

[2691] In some embodiments, the circular RNA payload of the LNP-based nucleobase editing systems, RNA therapeutics and pharmaceutical compositions described herein modulates a cellular function, e.g., transiently or long term. In certain embodiments, the cellular function is stably altered, such as a modulation that persists for at least about 1 hour to about 30 days, or at least about 2 hours, 6 hours, 12 hours, 18 hours, 24 hours (1 day), 2 days, 3, days, 4 days, 5 days, 6 days, 7 days, 8 days, 9 days, 10 days, 11 days, 12 days, 13 days, 14 days, 15 days, 16 days, 17 days, 18 days, 19 days, 20 days, 21 days, 22 days, 23 days, 24 days, 25 days, 26 days, 27 days, 28 days, 29 days, 30 days, 60 days, or longer. In certain embodiments, the cellular function is transiently altered, e.g., such as a modulation that persists for no more than about 30 mins to about 7 days, or no more than about 30 minutes, 45 minutes, 1 hour, 2 hours, 3 hours, 4 hours, 5 hours, 6 hours, 7 hours, 8 hours, 9 hours, 10 hours, 11 hours, 12 hours, 13 hours, 14 hours, 15 hours, 16 hours, 17 hours, 18 hours, 19 hours, 20 hours, 21 hours, 22 hours, 23 hours, 24 hours (1 day), 36 hours (1.5 days), 48 hours (2 days), 60 hours (2.5 days), 72 hours (3 days), 4 days, 5 days, 6 days, or 7 days.

[2692] In some embodiments, the circular RNA payload of the LNP-based nucleobase editing systems, RNA therapeutics and pharmaceutical compositions described herein is at least about 20 nucleotides, at least about 30 nucleotides, at least about 40 nucleotides, at least about 50 nucleotides, at least about 75 nucleotides, at least about 100 nucleotides, at least about 200 nucleotides, at least about 300 nucleotides, at least about 400 nucleotides, at least about 500 nucleotides, at least about 1,000 nucleotides, at least about 2,000 nucleotides, at least about 5,000 nucleotides, at least about 6,000 nucleotides, at least about 7,000 nucleotides, at least about 8,000 nucleotides, at least about 9,000 nucleotides, at least about 10,000 nucleotides, at least about 12,000 nucleotides, at least about 14,000 nucleotides, at least about 15,000 nucleotides, at least about 16,000 nucleotides, at least about 17,000 nucleotides, at least about 18,000 nucleotides, at least about 19,000 nucleotides, or at least about 20,000 nucleotides. In some embodiments, the oRNA may be of a sufficient size to accommodate a binding site for a ribosome.

[2693] In some embodiments, the maximum size of the circular RNA payload of the LNP-based nucleobase editing systems, RNA therapeutics and pharmaceutical compositions described herein may be limited by the ability of packaging and delivering the RNA to a target. In some embodiments, the size of the oRNA is a length sufficient to encode polypeptides, and thus, lengths of at least 20,000 nucleotides, at least 15,000 nucleotides, at least 10,000 nucleotides, at least 7,500 nucleotides, or at least 5,000 nucleotides, at least 4,000 nucleotides, at least 3,000 nucleotides, at least 2,000 nucleotides, at least 1,000 nucleotides, at least 500 nucleotides, at least 400 nucleotides, at least 300 nucleotides, at least 200 nucleotides, at least 100 nucleotides may be useful.

[2694] In some embodiments, the circular RNA payload of the LNP-based nucleobase editing systems, RNA therapeutics and pharmaceutical compositions described herein comprises one or more elements described elsewhere herein. In some embodiments, the elements may be separated from one another by a spacer sequence or linker. In some embodiments, the elements may be separated from one another by 1 nucleotide, 2 nucleotides, about 5 nucleotides, about 10 nucleotides, about 15 nucleotides, about 20 nucleotides, about 30 nucleotides, about 40 nucleotides, about 50 nucleotides, about 60 nucleotides, about 80 nucleotides, about 100 nucleotides, about 150 nucleotides, about 200 nucleotides, about 250 nucleotides, about 300 nucleotides, about 400 nucleotides, about 500 nucleotides, about 600 nucleotides, about 700 nucleotides, about 800 nucleotides, about 900 nucleotides, about 1000 nucleotides, up to about 1 kb, at least about 1000 nucleotides.

[2695] In some embodiments, one or more elements are contiguous with one another, e.g., lacking a spacer element.

[2696] In some embodiments, one or more elements is conformationally flexible. In some embodiments, the conformational flexibility is due to the sequence being substantially free of a secondary structure.

[2697] In some embodiments, the circular RNA payload of the LNP-based nucleobase editing systems, RNA therapeutics and pharmaceutical compositions described herein comprises a secondary or tertiary structure that accommodates a binding site for a ribosome, translation, or rolling circle translation.

[2698] In some embodiments, the circular RNA payload of the LNP-based nucleobase editing systems, RNA therapeutics and pharmaceutical compositions described herein comprises particular sequence characteristics. For example, the oRNA may comprise a particular nucleotide composition. In some such embodiments, the oRNA may include one or more purine rich regions (adenine or guanosine). In some such embodiments, the oRNA may include one or more purine rich regions (adenine or guanosine). In some embodiments, the oRNA may include one or more AU rich regions or elements (AREs). In some embodiments, the oRNA may include one or more adenine rich regions.

[2699] In some embodiments, the circular RNA payload of the LNP-based nucleobase editing systems, RNA therapeutics and pharmaceutical compositions described herein comprises one or more modifications described elsewhere herein.

[2700] In some embodiments, the circular RNA payload of the LNP-based nucleobase editing systems, RNA therapeutics and pharmaceutical compositions described herein comprises one or more expression sequences and is configured for persistent expression in a cell of a subject in vivo. In some embodiments, the oRNA is configured such that expression of the one or more expression sequences in the cell at a later time point is equal to or higher than an earlier time point. In such embodiments, the expression of the one or more expression sequences can be either maintained at a relatively stable level or can increase over time. The expression of the expression sequences can be relatively stable for an extended period of time. For instance, in some cases, the expression of the one or more expression sequences in the cell over a time period of at least 7, 8, 9, 10, 12, 14, 16, 18, 20, 22, 23 or more days does not decrease by 50%, 45%, 40%, 35%, 30%, 25%, 20%, 15%, 10%, or 5%. In some cases, in some cases, the expression of the one or more expression sequences in the cell is maintained at a level that does not vary by more than 50%, 45%, 40%, 35%, 30%, 25%, 20%, 15%, 10%, or 5% for at least 7, 8, 9, 10, 12, 14, 16, 18, 20, 22, 23 or more days.

### Regulatory Elements

[2701] In some embodiments, the circular RNA payload of the LNP-based nucleobase editing systems, RNA therapeutics and pharmaceutical compositions described herein comprises one or more regulatory elements. As used herein, a “regulatory element” is a sequence that modifies expression of an expression sequence, e.g., a nucleotide sequence encoding a nucleobase editing system or a therapeutic protein, i.e., a coding region of interest (CROI). The regulatory element may include a sequence that is located adjacent to a coding region of interest encoded on the circular RNA payload. The regulatory element may be operatively linked to a nucleotide sequence of the circular RNA that encodes a coding region of interest (e.g., a nucleobase editing system or therapeutic polypeptide).

[2702] In some embodiments, a regulatory element may increase an amount of expression of a coding region of interest encoded on the circular RNA payload as compared to an amount expressed when no regulatory element exists.

[2703] In some embodiments, a regulatory element may comprise a sequence to selectively initiates or activates translation of a coding sequence of interest encoded on the circular RNA payload.

[2704] In some embodiments, a regulatory element may comprise a sequence to initiate degradation of the oRNA or the payload or cargo. Non-limiting examples of the sequence to initiate degradation includes, but is not limited to, riboswitch aptazyme and miRNA binding sites.

[2705] In some embodiments, a regulatory element can modulate translation of a coding region of interest encoded on the oRNA. The modulation can create an increase (enhancer) or decrease (suppressor) in the expression of the coding region of interest. The regulatory element may be located adjacent to the CROI (e.g., on one side or both sides of the CROI).

### Translation Initiation Sequence

[2706] In some embodiments, a translation initiation sequence functions as a regulatory element. In some embodiments, the translation initiation sequence comprises an AUG/ATG codon. In some embodiments, a translation initiation sequence comprises any eukaryotic start codon such as, but not limited to, AUG/ATG, CUG/CTG, GUG/GTG, UUG/TTG, ACG, AUC/ATC, AUU, AAG, AUA/ATA, or AGG. In some embodiments, a translation initiation sequence comprises a Kozak sequence. In some embodiments, translation begins at an alternative translation initiation sequence, e.g., translation initiation sequence other than AUG/ATG codon, under selective conditions, e.g., stress induced conditions. As a non-limiting example, the translation of the circular polyribonucleotide may begin at alternative translation initiation sequence, such as ACG. As another non-limiting example, the circular polyribonucleotide translation may begin at alternative translation initiation sequence, CUG/CTG. As another non-limiting example, the translation may begin at alternative translation initiation sequence, GUG/GTG. As yet another non-limiting example, the translation may begin at a repeat-associated non-AUG (RAN) sequence such as an alternative translation initiation sequence that includes short stretches of repetitive RNA e.g. CGG, GGGGCC, CAG, or CTG.

[2707] In some embodiments, the oRNA encodes a polypeptide or peptide and may comprise a translation initiation sequence. The translation initiation sequence may comprise, but is not limited to a start codon, a non-coding start codon, a Kozak sequence or a Shine-Dalgarno sequence. The translation initiation sequence may be located adjacent to the payload or cargo (e.g., on one side or both sides of the coding region of interest).

[2708] In some embodiments, the translation initiation sequence provides conformational flexibility to the oRNA. In some embodiments, the translation initiation sequence is within a substantially single stranded region of the oRNA.

[2709] The oRNA may include more than 1 start codon such as, but not limited to, at least 2, at least 3, at least 4, at least 5, at least 6, at least 7, at least 8, at least 9, at least 10, at least 11, at least 12, at least 13, at least 14, at least 15 or more than 15 start codons. Translation may initiate on the first start codon or may initiate downstream of the first start codon.

[2710] In some embodiments, the oRNA may initiate at a codon which is not the first start codon, e.g., AUG. Translation of the circular polyribonucleotide may initiate at an alternative translation initiation sequence, such as, but not limited to, ACG, AGG, AAG, CUG/CTG, GUG/GTG, AUA/ATA, AUU/ATT, UUG/TTG. In some embodiments, translation begins at an alternative translation initiation sequence under selective conditions, e.g., stress induced conditions. As a non-limiting example, the translation of the oRNA may begin at alternative translation initiation sequence, such as ACG. As another non-limiting example, the oRNA translation may begin at alternative translation initiation sequence, CUG/CTG. As yet another non-limiting example, the oRNA translation may begin at alternative translation initiation sequence, GTG/GUG. As yet another non-limiting example, the oRNA may begin translation at a repeat-associated non-AUG (RAN) sequence, such as an alternative translation initiation sequence that includes short stretches of repetitive RNA e.g. CGG, GGGGCC, CAG, CTG.

### IRES Sequences

[2711] In some embodiments, the oRNA described herein comprises an internal ribosome entry site (IRES) element capable of engaging an eukaryotic ribosome. In some embodiments, the TRES element is at least about 5 nucleotides, at least about 8 nucleotides, at least about 9 nucleotides, at least about 10 nucleotides, at least about 15 nucleotides, at least about 20 nucleotides, at least about 25 nucleotides, at least about 30 nucleotides, at least about 40 nucleotides, at least about 50 nucleotides, at least about 100 nucleotides, at least about 200 nucleotides, at least about 250 nucleotides, at least about 350 nucleotides, or at least about 500 nucleotides. In one embodiment, the IRES element is derived from the DNA of an organism including, but not limited to, a virus, a mammal, and a Drosophila. Such viral DNA may be derived from, but is not limited to, picornavirus complementary DNA (cDNA), with encephalomyocarditis virus (EMCV) cDNA and poliovirus cDNA. In one embodiment, Drosophila DNA from which an TIRES element is derived includes, but is not limited to, an Antennapedia gene from Drosophila melanogaster.

[2712] In some embodiments, the IRES element is at least partially derived from a virus, for instance, it can be derived from a viral IRES element, such as ABPV_IGRpred, AEV, ALPV IGRpred, BQCV IGRpred, BVDV1_1-385, BVDV1_29-391, CrPV_5NCR, CrPV_IGR, crTMV_REScp, crTMV_IRESmp75, crTMV_IRESmp228, crTMV_IREScp, crTMV_IREScp, CSFV, CVB3, DCV_IGR, EMCV-R, EoPV_5NTR, ERAV 245-961, ERBV 162-920, EV71_1-748, FeLV-Notch2, FMDV type_C, GBV-A, GBV-B, GBV-C, gypsy_env, gypsyD5, gypsyD2, HAV_HM175, HCV type_la, HiPV_IGRpred, HIV-1, HoCV1_IGRpred, HRV-2, IAPV_IGRpred, idefix, KBV_IGRpred, LINE-1_ORF1_-101_to_-1, LINE-1_ORF1-302_to_-202, LINE-1_ORF2-138_to_-86, LINE-1_ORF1_-44to_-1, PSIV_IGR, PV_typel_Mahoney, PV_type3_Leon, REV-A, RhPV_5NCR, RhPV_IGR, SINV1_IGRpred, SV40_661-830, TMEV, TMV_UI_IRESmp228, TRV_5NTR, TrV_IGR, or TSV_IGR. In some embodiments, the IRES element is at least partially derived from a cellular TRES, such as AML1/RUNX1, Antp-D, Antp-DE, Antp-CDE, Apaf-1, Apaf-1, AQP4, AT1R_var1, ATIR_var2, AT1R_var3, AT1R_var4, BAG1_p36delta236 nt, BAG1_p36, BCL2, BiP_-222_-3, c-IAP1_285-1399, c-IAP1_1313-1462, c-jun, c-myc, Cat-1224, CCND1, DAPS, eIF4G, eIF4GI-ext, eIF4GII, eIF4GII-long, ELG1, ELH, FGF1A, FMR1, Gtx-133-141, Gtx-1-166, Gtx-1-120, Gtx-1-196, hairless, HAP4, HIFla, hSNM1, Hspl01, hsp70, hsp70, Hsp90, IGF2_leader2, Kv1.4_1.2, L-myc, LamB1_-335_-1, LEF1, MNT_75-267, MNT_36-160, MTG8a, MYB, MYT2_997-1152, n-MYC, NDST1, NDST2, NDST3, NDST4L, NDST4S, NRF_-653_-17, NtHSF1, ODC1, p27kip1, 03_128-269, PDGF2/c-sis, Pim-1, PITSLRE_p58, Rbm3, reaper, Scamper, TFIID, TIF4631, Ubx_1-966, Ubx_373-961, UNR, Ure2, UtrA, VEGF-A-133-1, XIAP 5-464, XIAP 305-466, or YAP1.

[2713] In another embodiment, the TRES is an IRES sequence from Coxsackievirus B3 (CVB3), the protein coding region encodes Guassia luciferase (Gluc) and the spacer sequences are polyA-C.

[2714] In some embodiments, the TRES, if present, is at least about 50 nucleotides in length. In one embodiment, the vector comprises an IRES that comprises a natural sequence. In one embodiment, the vector comprises an IRES that comprises a synthetic sequence.

[2715] An IRES may act as the sole ribosome binding site, or may serve as one of multiple ribosome binding sites of an mRNA. A polynucleotide containing more than one functional ribosome binding site may encode several peptides or polypeptides that are translated independently by the ribosomes (e.g., multicistronic mRNA). When polynucleotides are provided with an IRES, further optionally provided is a second translatable region. Examples of IRES sequences that can be used according to the present disclosure include without limitation, those from picornaviruses (e.g., FMDV), pest viruses (CFFV), polio viruses (PV), encephalomyocarditis viruses (ECMV), foot-and mouth disease viruses (FMDV), hepatitis C viruses (HCV), classical Swine fever viruses (CSFV), murine leukemia virus (MLV), simian immune deficiency viruses (SIV) or cricket paralysis viruses (CrPV).

### Termination Element

[2716] In some embodiments, the oRNA includes one or more coding regions of interest (i.e., also referred to as product expression sequences) which encode polypeptides of interest, including but not limited to nucleobase editing system and therapeutic proteins. In various embodiments, the product expression sequences may or may not have a termination element.

[2717] In some embodiments, the oRNA includes one or more product expression sequences that lack a termination element, such that the oRNA is continuously translated.

[2718] Exclusion of a termination element may result in rolling circle translation or continuous expression of the encoded peptides or polypeptides as the ribosome will not stall or fall-off. In such an embodiment, rolling circle translation expresses continuously through the product expression sequence.

[2719] In some embodiments, one or more product expression sequences in the oRNA comprise a termination element.

[2720] In some embodiments, not all of the product expression sequences in the oRNA comprise a termination element. In such instances, the product expression sequence may fall off the ribosome when the ribosome encounters the termination element and terminates translation.

### Rolling Circle Translation

[2721] In some embodiments, once translation of the oRNA is initiated, the ribosome bound to the oRNA does not disengage from the oRNA before finishing at least one round of translation of the oRNA. In some embodiments, the oRNA as described herein is competent for rolling circle translation. In some embodiments, during rolling circle translation, once translation of the oRNA is initiated, the ribosome bound to the oRNA does not disengage from the oRNA before finishing at least 2 rounds, at least 3 rounds, at least 4 rounds, at least 5 rounds, at least 6 rounds, at least 7 rounds, at least 8 rounds, at least 9 rounds, at least 10 rounds, at least 11 rounds, at least 12 rounds, at least 13 rounds, at least 14 rounds, at least 15 rounds, at least 20 rounds, at least 30 rounds, at least 40 rounds, at least 50 rounds, at least 60 rounds, at least 70 rounds, at least 80 rounds, at least 90 rounds, at least 100 rounds, at least 150 rounds, at least 200 rounds, at least 250 rounds, at least 500 rounds, at least 1000 rounds, at least 1500 rounds, at least 2000 rounds, at least 5000 rounds, at least 10000 rounds, at least 10⁵ rounds, or at least 10⁶ rounds of translation of the oRNA.

[2722] In some embodiments, the rolling circle translation of the oRNA leads to generation of polypeptide that is translated from more than one round of translation of the oRNA. In some embodiments, the oRNA comprises a stagger element, and rolling circle translation of the oRNA leads to generation of polypeptide product that is generated from a single round of translation or less than a single round of translation of the oRNA.

### Circularization

[2723] In one embodiment, a linear RNA may be cyclized, or concatemerized. In some embodiments, the linear RNA may be cyclized in vitro prior to formulation and/or delivery. In some embodiments, the linear RNA may be cyclized within a cell.

[2724] In some embodiments, the mechanism of cyclization or concatemerization may occur through at least 3 different routes: 1) chemical, 2) enzymatic, and 3) ribozyme catalyzed. The newly formed 5′-/3′-linkage may be intramolecular or intermolecular.

[2725] In the first route, the 5′-end and the 3′-end of the nucleic acid contain chemically reactive groups that, when close together, form a new covalent linkage between the 5′-end and the 3′-end of the molecule. The 5′-end may contain an NHS-ester reactive group and the 3′-end may contain a 3′-amino-terminated nucleotide such that in an organic solvent the 3′-amino-terminated nucleotide on the 3′-end of a synthetic mRNA molecule will undergo a nucleophilic attack on the 5′-NHS-ester moiety forming a new 5′-/3′-amide bond.

[2726] In the second route, T4 RNA ligase may be used to enzymatically link a 5′-phosphorylated nucleic acid molecule to the 3′-hydroxyl group of a nucleic acid forming a new phosphorodiester linkage. In an example reaction, \hat{ }g of a nucleic acid molecule is incubated at 37° C. for 1 hour with 1-10 units of T4 RNA ligase (New England Biolabs, Ipswich, MA) according to the manufacturer's protocol. The ligation reaction may occur in the presence of a split oligonucleotide capable of base-pairing with both the 5′- and 3′-region in juxtaposition to assist the enzymatic ligation reaction.

[2727] In the third route, either the 5′- or 3′-end of the cDNA template encodes a ligase ribozyme sequence such that during in vitro transcription, the resultant nucleic acid molecule can contain an active ribozyme sequence capable of ligating the 5′-end of a nucleic acid molecule to the 3′-end of a nucleic acid molecule. The ligase ribozyme may be derived from the Group I Intron, Group I Intron, Hepatitis Delta Virus, Hairpin ribozyme or may be selected by SELEX (systematic evolution of ligands by exponential enrichment). The ribozyme ligase reaction may take 1 to 24 hours at temperatures between 0 and 37° C.

[2728] In some embodiments, the oRNA is made via circularization of a linear RNA.

[2729] In some embodiments, the following elements are operably connected to each other and, in some embodiments, arranged in the following sequence: a) a 5′ homology arm, b) a 3′ group I intron fragment containing a 3′ splice site dinucleotide, c) a protein coding or noncoding region, d) a 5′ group I intron fragment containing a 5′ splice site dinucleotide, and e) a 3′ homology arm. In certain embodiments said vector allows production of a circular RNA that is translatable and/or biologically active inside eukaryotic cells. In some embodiments, the biologically active RNA is, for example, an miRNA sponge, or long noncoding RNA.

[2730] In some embodiments, the following elements are operably connected to each other and arranged in the following sequence: a) a 5′ homology arm, b) a 3′ group I intron fragment containing a 3′ splice site dinucleotide, c) optionally, a 5′ spacer sequence, d) optionally, an internal ribosome entry site (TRES), e) a protein coding or noncoding region, f) optionally, a 3′ spacer sequence, g) a 5′ group I intron fragment containing a 5′ splice site dinucleotide, and h) a 3′ homology arm. In certain embodiments, said vector allows production of a circular RNA that is translatable and/or biologically active inside eukaryotic cells.

[2731] In some embodiments, the following elements are operably connected to each other and arranged in the following sequence: a) a 5′ homology arm, b) a 3′ group I intron fragment containing a 3′ splice site dinucleotide, c) a 5′ spacer sequence, d) an internal ribosome entry site (IRES), e) a protein coding or noncoding region, f) a 5′ group I intron fragment containing a 5′ splice site dinucleotide, and g) a 3′ homology arm. In some embodiments, said vector allows production of a circular RNA that is translatable and/or biologically active inside eukaryotic cells.

[2732] In some embodiments, the following elements are operably connected to each other and arranged in the following sequence: a) a 5′ homology arm, b) a 3′ group I intron fragment containing a 3′ splice site dinucleotide, c) a 5′ spacer sequence, d) a protein coding or noncoding region, e) a 3′ spacer sequence, f) a 5′ group I intron fragment containing a 5′ splice site dinucleotide, and g) a 3′ homology arm. In some embodiments, said vector allows production of a circular RNA that is translatable and/or biologically active inside eukaryotic cells.

[2733] In some embodiments, the following elements are operably connected to each other and arranged in the following sequence: a) a 5′ homology arm, b) a 3′ group I intron fragment containing a 3′ splice site dinucleotide, c) an internal ribosome entry site (IRES), d) a protein coding or noncoding region, e) a 3′ spacer sequence, f) a 5′ group I intron fragment containing a 5′ splice site dinucleotide, and g) a 3′ homology arm. In some embodiments, said vector allows production of a circular RNA that is translatable and/or biologically active inside eukaryotic cells.

[2734] In some embodiments, the following elements are operably connected to each other and arranged in the following sequence: a) a 5′ homology arm, b) a 3′ group I intron fragment containing a 3′ splice site dinucleotide, c) a protein coding or noncoding region, d) a 3′ spacer sequence, e) a 5′ group I intron fragment containing a 5′ splice site dinucleotide, and f) a 3′ homology arm. In some embodiments, said vector allows production of a circular RNA that is translatable and/or biologically active inside eukaryotic cells.

[2735] In some embodiments, the following elements are operably connected to each other and arranged in the following sequence: a) a 5′ homology arm, b) a 3′ group I intron fragment containing a 3′ splice site dinucleotide, c) a 5′ spacer sequence, d) a protein coding or noncoding region, e) a 5′ group I intron fragment containing a 5′ splice site dinucleotide, and f) a 3′ homology arm. In some embodiments, said vector allows production of a circular RNA that is translatable and/or biologically active inside eukaryotic cells.

[2736] In some embodiments, the following elements are operably connected to each other and arranged in the following sequence: a) a 5′ homology arm, b) a 3′ group I intron fragment containing a 3′ splice site dinucleotide, c) an internal ribosome entry site (IRES), d) a protein coding or noncoding region, e) a 5′ group I intron fragment containing a 5′ splice site dinucleotide, and f) a 3′ homology arm. In some embodiments, said vector allows production of a circular RNA that is translatable and/or biologically active inside eukaryotic cells.

[2737] In some embodiments, the following elements are operably connected to each other and arranged in the following sequence: a) a 5′ homology arm, b) a 3′ group I intron fragment containing a 3′ splice site dinucleotide, c) a 5′ spacer sequence, d) an internal ribosome entry site (IRES), e) a protein coding or noncoding region, f) a 3′ spacer sequence, g) a 5′ group I intron fragment containing a 5′ splice site dinucleotide, and h) a 3′ homology arm. In some embodiments, said vector allowing production of a circular RNA that is translatable and/or biologically active inside eukaryotic cells.

[2738] In one embodiment, the 3′ group I intron fragment and/or the 5′ group I intron fragment is from a Cyanobacterium Anabaena sp. pre-tRNA-Leu gene or T4 phage Td gene.

[2739] In one embodiment, the 3′ group I intron fragment and/or the 5′ group I intron fragment is from a Cyanobacterium Anabaena sp. pre-tRNA-Leu gene.

[2740] In one embodiment, the protein coding region encodes a protein of eukaryotic or prokaryotic origin. In another embodiment, the protein coding region encodes human protein or non-human protein. In some embodiments, the protein coding region encodes one or more antibodies. For example, in some embodiments, the protein coding region encodes human antibodies. In one embodiment, the protein coding region encodes a protein selected from hFIX, SP-B, VEGF-A, human methylmalonyl-CoA mutase (hMVUT), CFTR, cancer self-antigens, and additional gene editing enzymes like Cpf1, zinc finger nucleases (ZFNs) and transcription activator-like effector nucleases (TALENs). In another embodiment, the protein coding region encodes a protein for therapeutic use. In one embodiment, the human antibody encoded by the protein coding region is an anti-HIV antibody. In one embodiment, the antibody encoded by the protein coding region is a bispecific antibody. In one embodiment, the bispecific antibody is specific for CD19 and CD22. In another embodiment, the bispecific antibody is specific for CD3 and CLDN6. In one embodiment, the protein coding region encodes a protein for diagnostic use. In one embodiment, the protein coding region encodes Gaussia luciferase (Gluc), Firefly luciferase (Fluc), enhanced green fluorescent protein (eGFP), human erythropoietin (hEPO), or Cas9 endonuclease.

[2741] In one embodiment, the 5′ homology arm is about 5-50 nucleotides in length. In another embodiment, the 5′ homology arm is about 9-19 nucleotides in length. In some embodiments, the 5′ homology arm is at least 5, 6, 7, 8, 9, 10, 11, 12, 13, 14, 15, 16, 17, 18 or 19 nucleotides in length. In some embodiments, the 5′ homology arm is no more than 50, 45, 40, 35, 30, 25 or 20 nucleotides in length. In some embodiments, the 5′ homology arm is 5, 6, 7, 8, 9, 10, 11, 12, 13, 14, 15, 16, 17, 18 or 19 nucleotides in length.

[2742] In one embodiment, the 3′ homology arm is about 5-50 nucleotides in length. In another embodiment, the 3′ homology arm is about 9-19 nucleotides in length. In some embodiments, the 3′ homology arm is at least 5, 6, 7, 8, 9, 10, 11, 12, 13, 14, 15, 16, 17, 18 or 19 nucleotides in length. In some embodiments, the 3′ homology arm is no more than 50, 45, 40, 35, 30, 25 or 20 nucleotides in length. In some embodiments, the 3′ homology arm is 5, 6, 7, 8, 9, 10, 11, 12, 13, 14, 15, 16, 17, 18 or 19 nucleotides in length.

[2743] In one embodiment, the 5′ spacer sequence is at least 10 nucleotides in length. In another embodiment, the 5′ spacer sequence is at least 15 nucleotides in length. In a further embodiment, the 5′ spacer sequence is at least 30 nucleotides in length. In some embodiments, the 5′ spacer sequence is at least 7, 8, 9, 10, 11, 12, 13, 14, 15, 16, 17, 18, 19, 20, 25 or 30 nucleotides in length. In some embodiments, the 5′ spacer sequence is no more than 100, 90, 80, 70, 60, 50, 45, 40, 35 or 30 nucleotides in length. In some embodiments the 5′ spacer sequence is between 20 and 50 nucleotides in length. In certain embodiments, the 5′ spacer sequence is 10, 11, 12, 13, 14, 15, 16, 17, 18, 19, 20, 21, 22, 23, 24, 25, 26, 27, 28, 29, 30, 31, 32, 33, 34, 35, 36, 37, 38, 39, 40, 41, 42, 43, 44, 45, 46, 47, 48, 49 or 50 nucleotides in length. In one embodiment, the 5′ spacer sequence is a polyA sequence. In another embodiment, the 5′ spacer sequence is a polyA-C sequence.

[2744] In one embodiment, the 3′ spacer sequence is at least 10 nucleotides in length. In another embodiment, the 3′ spacer sequence is at least 15 nucleotides in length. In a further embodiment, the 3′ spacer sequence is at least 30 nucleotides in length. In some embodiments, the 3′ spacer sequence is at least 7, 8, 9, 10, 11, 12, 13, 14, 15, 16, 17, 18, 19, 20, 25 or 30 nucleotides in length. In some embodiments, the 3′ spacer sequence is no more than 100, 90, 80, 70, 60, 50, 45, 40, 35 or 30 nucleotides in length. In some embodiments the 3′ spacer sequence is between 20 and 50 nucleotides in length. In certain embodiments, the 3′ spacer sequence is 10, 11, 12, 13, 14, 15, 16, 17, 18, 19, 20, 21, 22, 23, 24, 25, 26, 27, 28, 29, 30, 31, 32, 33, 34, 35, 36, 37, 38, 39, 40, 41, 42, 43, 44, 45, 46, 47, 48, 49 or 50 nucleotides in length. In one embodiment, the 3′ spacer sequence is a polyA sequence. In another embodiment, the 5′ spacer sequence is a polyA-C sequence.

### Extracellular Circularization

[2745] In some embodiments, the linear RNA is cyclized, or concatemerized using a chemical method to form an oRNA. In some chemical methods, the 5′-end and the 3′-end of the nucleic acid (e.g., a linear RNA) includes chemically reactive groups that, when close together, may form a new covalent linkage between the 5′-end and the 3′-end of the molecule. The 5′-end may contain an NHS-ester reactive group and the 3′-end may contain a 3′-amino-terminated nucleotide such that in an organic solvent the 3′-amino-terminated nucleotide on the 3′-end of a linear RNA will undergo a nucleophilic attack on the 5′-NHS-ester moiety forming a new 5′-/3′-amide bond.

[2746] In one embodiment, a DNA or RNA ligase may be used to enzymatically link a 5′-phosphorylated nucleic acid molecule (e.g., a linear RNA) to the 3′-hydroxyl group of a nucleic acid (e.g., a linear nucleic acid) forming a new phosphorodiester linkage. In an example reaction, a linear RNA is incubated at 37C for 1 hour with 1-10 units of T4 RNA ligase according to the manufacturer's protocol. The ligation reaction may occur in the presence of a linear nucleic acid capable of base-pairing with both the 5′- and 3′-region in juxtaposition to assist the enzymatic ligation reaction. In one embodiment, the ligation is splint ligation where a single stranded polynucleotide (splint), like a single stranded RNA, can be designed to hybridize with both termini of a linear RNA, so that the two termini can be juxtaposed upon hybridization with the single-stranded splint. Splint ligase can thus catalyze the ligation of the juxtaposed two termini of the linear RNA, generating an oRNA.

[2747] In one embodiment, a DNA or RNA ligase may be used in the synthesis of the oRNA. As a non-limiting example, the ligase may be a circ ligase or circular ligase.

[2748] In one embodiment, either the 5′- or 3′-end of the linear RNA can encode a ligase ribozyme sequence such that during in vitro transcription, the resultant linear RNA includes an active ribozyme sequence capable of ligating the 5′-end of the linear RNA to the 3′-end of the linear RNA. The ligase ribozyme may be derived from the Group I Intron, Hepatitis Delta Virus, Hairpin ribozyme or may be selected by SELEX (systematic evolution of ligands by exponential enrichment).

[2749] In one embodiment, a linear RNA may be cyclized or concatemerized by using at least one non-nucleic acid moiety. In one aspect, the at least one non-nucleic acid moiety may react with regions or features near the 5′ terminus and/or near the 3′ terminus of the linear RNA in order to cyclize or concatermerize the linear RNA. In another aspect, the at least one non-nucleic acid moiety may be located in or linked to or near the 5′ terminus and/or the 3′ terminus of the linear RNA. The non-nucleic acid moieties contemplated may be homologous or heterologous. As a non-limiting example, the non-nucleic acid moiety may be a linkage such as a hydrophobic linkage, ionic linkage, a biodegradable linkage and/or a cleavable linkage. As another non-limiting example, the non-nucleic acid moiety is a ligation moiety. As yet another non-limiting example, the non-nucleic acid moiety may be an oligonucleotide or a peptide moiety, such as an aptamer or a non-nucleic acid linker as described herein.

[2750] In one embodiment, a linear RNA may be cyclized or concatemerized due to a non-nucleic acid moiety that causes an attraction between atoms, molecular surfaces at, near or linked to the 5′ and 3′ ends of the linear RNA. As a non-limiting example, one or more linear RNA may be cyclized or concatemerized by intermolecular forces or intramolecular forces. Non-limiting examples of intermolecular forces include dipole-dipole forces, dipole-induced dipole forces, induced dipole-induced dipole forces, Van der Waals forces, and London dispersion forces. Non-limiting examples of intramolecular forces include covalent bonds, metallic bonds, ionic bonds, resonant bonds, agnostic bonds, dipolar bonds, conjugation, hyperconjugation and antibonding.

[2751] In one embodiment, the linear RNA may comprise a ribozyme RNA sequence near the 5′ terminus and near the 3′ terminus. The ribozyme RNA sequence may covalently link to a peptide when the sequence is exposed to the remainder of the ribozyme. In one aspect, the peptides covalently linked to the ribozyme RNA sequence near the 5′ terminus and the 3′ terminus may associate with each other causing a linear RNA to cyclize or concatemerize. In another aspect, the peptides covalently linked to the ribozyme RNA near the 5′ terminus and the 3′ terminus may cause the linear RNA to cyclize or concatemerize after being subjected to ligated using various methods known in the art such as, but not limited to, protein ligation.

[2752] In some embodiments, the linear RNA may include a 5′ triphosphate of the nucleic acid converted into a 5′ monophosphate, e.g., by contacting the 5′ triphosphate with RNA 5′ pyrophosphohydrolase (RppH) or an ATP diphosphohydrolase (apyrase). Alternately, converting the 5′ triphosphate of the linear RNA into a 5′ monophosphate may occur by a two-step reaction comprising: (a) contacting the 5′ nucleotide of the linear RNA with a phosphatase (e.g., Antarctic Phosphatase, Shrimp Alkaline Phosphatase, or Calf Intestinal Phosphatase) to remove all three phosphates; and (b) contacting the 5′ nucleotide after step (a) with a kinase (e.g., Polynucleotide Kinase) that adds a single phosphate.

[2753] In some embodiments, RNA may be circularized using the methods described in WO2017222911 and WO2016197121, the contents of each of which are herein incorporated by reference in their entirety.

[2754] In some embodiments, RNA may be circularized, for example, by back splicing of a non-mammalian exogenous intron or splint ligation of the 5′ and 3′ends of a linear RNA. In one embodiment, the circular RNA is produced from a recombinant nucleic acid encoding the target RNA to be made circular. As a non-limiting example, the method comprises: a) producing a recombinant nucleic acid encoding the target RNA to be made circular, wherein the recombinant nucleic acid comprises in 5′ to 3′order: i) a 3′portion of an exogenous intron comprising a 3′ splice site, ii) a nucleic acid sequence encoding the target RNA, and iii) a 5′ portion of an exogenous intron comprising a 5′ splice site; b) performing transcription, whereby RNA is produced from the recombinant nucleic acid; and c) performing splicing of the RNA, whereby the RNA circularizes to produce a oRNA.

[2755] While not wishing to be bound by theory, circular RNAs generated with exogenous introns are recognized by the immune system as “non-self” and trigger an innate immune response. On the other hand, circular RNAs generated with endogenous introns are recognized by the immune system as “self” and generally do not provoke an innate immune response, even if carrying an exon comprising foreign RNA.

[2756] Accordingly, circular RNAs can be generated with either an endogenous or exogenous intron to control immunological self/non-self discrimination as desired. Numerous intron sequences from a wide variety of organisms and viruses are known and include sequences derived from genes encoding proteins, ribosomal RNA (rRNA), or transfer RNA (tRNA).

[2757] Circular RNAs can be produced from linear RNAs in a number of ways. In some embodiments, circular RNAs are produced from a linear RNA by backsplicing of a downstream 5′ splice site (splice donor) to an upstream 3′ splice site (splice acceptor). Circular RNAs can be generated in this manner by any nonmammalian splicing method. For example, linear RNAs containing various types of introns, including self-splicing group I introns, self-splicing group II introns, spliceosomal introns, and tRNA introns can be circularized. In particular, group I and group II introns have the advantage that they can be readily used for production of circular RNAs in vitro as well as in vivo because of their ability to undergo self-splicing due to their autocatalytic ribozyme activity.

[2758] In some embodiments, circular RNAs can be produced in vitro from a linear RNA by chemical or enzymatic ligation of the 5′ and 3′ ends of the RNA. Chemical ligation can be performed, for example, using cyanogen bromide (BrCN) or ethyl-3-(3′-dimethylaminopropyl) carbodiimide (EDC) for activation of a nucleotide phosphomonoester group to allow phosphodiester bond formation. See e.g., Sokolova (1988) FEBS Lett 232: 153-155; Dolinnaya et al. (1991) Nucleic Acids Res., 19:3067-3072; Fedorova (1996) Nucleosides Nucleotides Nucleic Acids 15: 1 137-1 147; herein incorporated by reference. Alternatively, enzymatic ligation can be used to circularize RNA. Exemplary ligases that can be used include T4 DNA ligase (T4 Dnl), T4 RNA ligase 1 (T4 Rnl 1), and T4 RNA ligase 2 (T4 Rnl 2).

[2759] In some embodiments, splint ligation using an oligonucleotide splint that hybridizes with the two ends of a linear RNA can be used to bring the ends of the linear RNA together for ligation. Hybridization of the splint, which can be either a DNA or a RNA, orientates the 5′-phosphate and 3′-OH of the RNA ends for ligation. Subsequent ligation can be performed using either chemical or enzymatic techniques, as described above. Enzymatic ligation can be performed, for example, with T4 DNA ligase (DNA splint required), T4 RNA ligase 1 (RNA splint required) or T4 RNA ligase 2 (DNA or RNA splint). Chemical ligation, such as with BrCN or EDC, in some cases is more efficient than enzymatic ligation if the structure of the hybridized splint-RNA complex interferes with enzymatic activity.

[2760] In some embodiments, the oRNA may further comprise an internal ribosome entry site (IRES) operably linked to an RNA sequence encoding a polypeptide. Inclusion of an IRES permits the translation of one or more open reading frames from a circular RNA. The IRES element attracts a eukaryotic ribosomal translation initiation complex and promotes translation initiation. See, e.g., Kaufman et al., Nuc. Acids Res. (1991) 19:4485-4490; Gurtu et al., Biochem. Biophys. Res. Comm. (1996) 229:295-298; Rees et al., BioTechniques (1996) 20: 102-110; Kobayashi et al., BioTechniques (1996) 21:399-402; and Mosser et al., BioTechniques 1997 22 150-161).

[2761] In some embodiments, the circularization efficiency of the circularization methods provided herein is at least about 10%, at least about 15%, at least about 20%, at least about 25%, at least about 30%, at least about 35%, at least about 40%, at least about 45%, at least about 50%, at least about 60%, at least about 70%, at least about 80%, at least about 90%, at least about 95%, or 100%. In some embodiments, the circularization efficiency of the circularization methods provided herein is at least about 40%.

### Splicing Element

[2762] In some embodiments, the oRNA includes at least one splicing element. The splicing element can be a complete splicing element that can mediate splicing of the oRNA or the spicing element can be a residual splicing element from a completed splicing event. For instance, in some cases, a splicing element of a linear RNA can mediate a splicing event that results in circularization of the linear RNA, thereby the resultant oRNA comprises a residual splicing element from such splicing-mediated circularization event. In some cases, the residual splicing element is not able to mediate any splicing. In other cases, the residual splicing element can still mediate splicing under certain circumstances. In some embodiments, the splicing element is adjacent to at least one expression sequence. In some embodiments, the oRNA includes a splicing element adjacent each expression sequence. In some embodiments, the splicing element is on one or both sides of each expression sequence, leading to separation of the expression products, e.g., peptide(s) and or polypeptide(s).

[2763] In some embodiments, the oRNA includes an internal splicing element that when replicated the spliced ends are joined together. Some examples may include miniature introns (<100 nt) with splice site sequences and short inverted repeats (30-40 nt) such as AluSq2, AluJr, and AluSz, inverted sequences in flanking introns, Alu elements in flanking introns, and motifs found in (suptable4 enriched motifs) cis-sequence elements proximal to backsplice events such as sequences in the 200 bp preceding (upstream of) or following (downstream from) a backsplice site with flanking exons. In some embodiments, the oRNA includes at least one repetitive nucleotide sequence described elsewhere herein as an internal splicing element. In such embodiments, the repetitive nucleotide sequence may include repeated sequences from the Alu family of introns. See, e.g., U.S. Pat. No. 11,058,706.

[2764] In some embodiments, the oRNA may include canonical splice sites that flank head-to-tail junctions of the oRNA.

[2765] In some embodiments, the oRNA may include a bulge-helix-bulge motif, comprising a 4-base pair stem flanked by two 3-nucleotide bulges. Cleavage occurs at a site in the bulge region, generating characteristic fragments with terminal 5′-hydroxyl group and 2′,3′-cyclic phosphate. Circularization proceeds by nucleophilic attack of the 5′-OH group onto the 2′, 3′-cyclic phosphate of the same molecule forming a 3′, 5′-phosphodiester bridge.

[2766] In some embodiments, the oRNA may include a sequence that mediates self-ligation. Non-limiting examples of sequences that can mediate self-ligation include a self-circularizing intron, e.g., a 5′ and 3′ slice junction, or a self-circularizing catalytic intron such as a Group I, Group II or Group III Introns. Non-limiting examples of group I intron self-splicing sequences may include self-splicing permuted intron-exon sequences derived from T4 bacteriophage gene td, and the intervening sequence (IVS) rRNA of Tetrahymena.

### Other Circularization Methods

[2767] In some embodiments, linear RNA may include complementary sequences, including either repetitive or nonrepetitive nucleic acid sequences within individual introns or across flanking introns. In some embodiments, the oRNA includes a repetitive nucleic acid sequence. In some embodiments, the repetitive nucleotide sequence includes poly CA or poly UG sequences. In some embodiments, the oRNA includes at least one repetitive nucleic acid sequence that hybridizes to a complementary repetitive nucleic acid sequence in another segment of the oRNA, with the hybridized segment forming an internal double strand. In some embodiments, repetitive nucleic acid sequences and complementary repetitive nucleic acid sequences from two separate oRNA that hybridize to generate a single oRNA, with the hybridized segments forming internal double strands. In some embodiments, the complementary sequences are found at the 5′ and 3′ ends of the linear RNA. In some embodiments, the complementary sequences include about 3, 4, 5, 6, 7, 8, 9, 10, 11, 12, 13, 14, 15, 16, 17, 18, 19, 20, 21, 22, 23, 24, 25, 26, 27, 28, 29, 30, 35, 40, 45, 50, 55, 60, 65, 70, 75, 80, 85, 90, 95, 100, or more paired nucleotides.

[2768] In some embodiments, chemical methods of circularization may be used to generate the oRNA. Such methods may include, but are not limited to click chemistry (e.g., alkyne- and azide-based methods, or clickable bases), olefin metathesis, phosphoramidate ligation, hemiaminal-imine crosslinking, base modification, and any combination thereof. In some embodiments, enzymatic methods of circularization may be used to generate the oRNA. In some embodiments, a ligation enzyme, e.g., DNA or RNA ligase, may be used to generate a template of the oRNA or complement, a complementary strand of the oRNA, or the oRNA.

[2769] Any of the circular polynucleotides as taught in for example U.S. Provisional Application No. 61/873,010 filed Sep. 3, 2013 or U.S. Pat. No. 10,709,779, may be used herein. The contents of these references are incorporated herein by reference in their entirety. In addition, any of the circular RNAs, methods for making circular RNAs, circular RNA compositions that are described in the following publications are contemplated herein and are incorporated by reference in their entireties are part of the instant specification: U.S. Pat. Nos. 11,352,640, 11,352,641, 11,203,767, 10,683,498, 5,773,244, and 5,766,903; US Application Publications US 2022/0177540, US 2021/0371494, US 2022/0090137, US 2019/0345503, and US 2015/0299702; and PCT Application Publications WO 2021/226597, WO 2019/236673, WO 2017/222911, WO2016/187583, WO2014/082644 and WO 1997/007825.

### K. KITS

[2770] Also provided are kits comprising engineered retrons (e.g., engineered nucleic acid constructs, or engineered nucleic acid-enzyme constructs) as described herein.

[2771] In some embodiments, the kit provides an engineered retron construct or a vector system comprising such a retron construct. In some embodiments, the engineered retron construct, included in the kit, comprises a heterologous sequence capable of providing a cell with a nucleic acid encoding a protein or regulatory RNA of interest, a cellular barcode, a donor polynucleotide suitable for use in gene editing, e.g., by homology directed repair (HDR) or recombination-mediated genetic engineering (recombineering), or a CRISPR protospacer DNA sequence for use in molecular recording. Other agents may also be included in the kit such as transfection agents, host cells, suitable media for culturing cells, buffers, and the like.

[2772] In the context of a kit, agents can be provided in liquid or solid form in any convenient packaging (e.g., stick pack, dose pack, etc.). The agents of a kit can be present in the same or separate containers. The kits may contain any one or more of the components described herein in one or more containers. The components may be prepared sterilely, packaged in a syringe and shipped refrigerated. Alternatively it may be housed in a vial or other container for storage. A second container may have other components prepared sterilely. Alternatively the kits may include the active agents premixed and shipped in a vial, tube, or other container.

[2773] The kits may have a variety of forms, such as a blister pouch, a shrink wrapped pouch, a vacuum sealable pouch, a sealable thermoformed tray, or a similar pouch or tray form, with the accessories loosely packed within the pouch, one or more tubes, containers, a box or a bag. The kits may be sterilized after the accessories are added, thereby allowing the individual accessories in the container to be otherwise unwrapped. The kits can be sterilized using any appropriate sterilization techniques, such as radiation sterilization, heat sterilization, or other sterilization methods known in the art. The kits may also include other components, depending on the specific application, for example, containers, cell media, salts, buffers, reagents, syringes, needles, a fabric, such as gauze, for applying or removing a disinfecting agent, disposable gloves, a support for the agents prior to administration, etc. Some aspects of this disclosure provide kits comprising a nucleic acid construct comprising a nucleotide sequence encoding the various components of the retron-based editing system described herein.

[2774] In addition to the above components, the subject kits may further include (in some embodiments) instructions for practicing the subject methods. These instructions may be present in the subject kits in a variety of forms, one or more of which may be present in the kit. One form in which these instructions may be present is as printed information on a suitable medium or substrate, e.g., a piece or pieces of paper on which the information is printed, in the packaging of the kit, in a package insert, and the like. Yet another form of these instructions is a computer readable medium, e.g., diskette, compact disk (CD), flash drive, and the like, on which the information has been recorded. Yet another form of these instructions that may be present is a website address which may be used via the internet to access the information at a remote site. In some embodiments, information provided on the website is periodically updated to provide, for example, the most up-to-date information. The written instructions may be in a form prescribed by a governmental agency regulating the manufacture, use, or sale of pharmaceuticals or biological products, which can also reflect approval by the agency of manufacture, use or sale for animal administration. As used herein, “promoted” includes all methods of doing business including methods of education, hospital and other clinical instruction, scientific inquiry, drug discovery or development, academic research, pharmaceutical industry activity including pharmaceutical sales, and any advertising or other promotional activity including written, oral and electronic communication of any form, associated with the disclosure.

[2775] Other aspects of this disclosure provide kits comprising one or more nucleic acid constructs (e.g., one or more mRNA or circular RNA molecules encoding the components of the retron-based genome editing system) In various embodiments, all nucleic acid constructs can be based on RNA molecules, i.e., and “all-RNA system.” For example, each of the components of the editing system could be expressed from a mRNA molecule, which would be delivered to a target cell by one or more delivery methods (e.g., LNP delivery).

### L. CELLS

[2776] One aspect of the disclosure provides an isolated host cell that includes one or more of the compositions described herein, including, but not limited to, engineered retrons and/or retron components, engineered ncRNAs, engineered msDNA, engineered RT, nucleic acid molecules encoding the engineered retrons and/or retron components, and vector or vector systems encoding the engineered retrons and/or retron components, and any combinations thereof. In some embodiments, the host cell is a prokaryotic cell, an archaeal cell, or a eukaryotic host cell. In some embodiments, the eukaryotic host cell is a mammalian cell, such as a human cell, a non-human cell, or a non-human mammalian cell. In some embodiments, the host cell is an artificial cell or genetically modified cell. In some embodiments, the host cell is in vitro, such as a tissue culture cell. In some embodiments, the host cell is within a living host organism.

[2777] Cells that may contain any of the compositions described herein. The methods described herein are used to deliver recombinant retrons or components thereof into a eukaryotic cell (e.g., a mammalian cell, such as a human cell). In some embodiments, the cell is in vitro (e.g., cultured cell. In some embodiments, the cell is in vivo (e.g., in a subject such as a human subject). In some embodiments, the cell is ex vivo (e.g., isolated from a subject and may be administered back to the same or a different subject).

[2778] The present disclosure contemplates the use of any suitable host cell. For example, the cell host can be a mammalian cell. Mammalian cells of the present disclosure include human cells, primate cells (e.g., vero cells), rat cells (e.g., GH3 cells, OC23 cells) or mouse cells (e.g., MC3T3 cells). There are a variety of human cell lines, including, without limitation, human embryonic kidney (HEK) cells, HeLa cells, cancer cells from the National Cancer Institute's 60 cancer cell lines (NCI60), DU145 (prostate cancer) cells, Lncap (prostate cancer) cells, MCF-7 (breast cancer) cells, MDA-MB-438 (breast cancer) cells, PC3 (prostate cancer) cells, T47D (breast cancer) cells, THP-1 (acute myeloid leukemia) cells, U87 (glioblastoma) cells, SHSY5Y human neuroblastoma cells (cloned from a myeloma) and Saos-2 (bone cancer) cells. In some embodiments, the cells can be human embryonic kidney (HEK) cells (e.g., HEK 293 or HEK 293T cells). In some embodiments, the cells can be stem cells (e.g., human stem cells) such as, for example, pluripotent stem cells (e.g., human pluripotent stem cells including human induced pluripotent stem cells (hiPSCs)). A stem cell refers to a cell with the ability to divide for indefinite periods in culture and to give rise to specialized cells. A pluripotent stem cell refers to a type of stem cell that is capable of differentiating into all tissues of an organism, but not alone capable of sustaining full organismal development. A human induced pluripotent stem cell refers to a somatic (e.g., mature or adult) cell that has been reprogrammed to an embryonic stem cell-like state by being forced to express genes and factors important for maintaining the defining properties of embryonic stem cells (see, e.g., Takahashi and Yamanaka, Cell 126 (4): 663-76, 2006, incorporated by reference herein). Human induced pluripotent stem cells express stem cell markers and are capable of generating cells characteristic of all three germ layers (ectoderm, endoderm, mesoderm).

[2779] Some aspects of this disclosure provide cells comprising any of the compositions disclosed herein, including, but not limited to, engineered retrons and/or retron components, engineered ncRNAs, engineered msDNA, engineered RT, nucleic acid molecules encoding the engineered retrons and/or retron components, and vector or vector systems encoding the engineered retrons and/or retron components, and any combinations thereof. In some embodiments, a host cell is transiently or non-transiently transfected with one or more delivery systems described herein, including virus-based systems, virus-like particle systems, and non-virus-base delivery, including LNPs and liposomes. In some embodiments, a cell is transfected as it naturally occurs in a subject. In some embodiments, a cell that is transfected is taken from a subject, i.e., ex vivo transfection. In some embodiments, the cell is derived from cells taken from a subject, such as a cell line. A wide variety of cell lines for tissue culture are known in the art. Examples of cell lines include, but are not limited to, C8161, CCRF-CEM, MOLT, mTMCD-3, NHDF, HeLa—S3, Huh1, Huh4, Huh7, HUVEC, HASMC, HEKn, HEKa, MiaPaCell, Panc1, PC-3, TFI, CTLL-2, C1R, Rat6, CV1, RPTE, A10, T24, J82, A375, ARH-77, Calul, SW480, SW620, SKOV3, SK-UT, CaCo2, P388D1, SEM-K2, WEHI-231, HB56, TIB55, Jurkat, J45.01, LRMB, Bcl-1, BC-3, IC21, DLD2, Raw264.7, NRK, NRK-52E, MRC5, MEF, Hep G2, HeLa B, HeLa T4, COS, COS-1, COS-6, COS-M6A, BS—C-1 monkey kidney epithelial, BALB/3T3 mouse embryo fibroblast, 3T3 Swiss, 3T3-L1, 132-d5 human fetal fibroblasts; 10.1 mouse fibroblasts, 293-T, 3T3, 721, 9L, A2780, A2780ADR, A2780cis, A 172, A20, A253, A431, A-549, ALC, B16, B35, BCP-1 cells, BEAS-2B, bEnd.3, BHK-21, BR 293. BxPC3. C3H-10T1/2, C6/36, Cal-27, CHO, CHO-7, CHO—IR, CHO-K1, CHO-K2, CHO-T, CHO Dhfr −/−, COR-L23, COR-L23/CPR, COR-L23/5010, COR-L23/R23, COS-7, COV-434, CML T1, CMT, CT26, D17, DH82, DU145, DuCaP, EL4, EM2, EM3, EMT6/AR1, EMT6/AR10.0, FM3, H1299, H69, HB54, H1B55, HCA2, HEK-293, HeLa, Hepalclc7, HL-60, HMEC, HT-29, Jurkat, JY cells, K562 cells, Ku812, KCL22, KG1, KYO1, LNCap, Ma-Mel 1-48, MC-38, MCF-7, MCF-10A, MDA-MB-231, MDA-MB-468, MDA-MB-435, MDCK II, MDCK 11, MOR/0.2R, MONO-MAC 6, MTD-1A, MyEnd, NCI—H69/CPR, NCI-H69/LX10, NCI-H69/LX20, NCI-H69/LX4, NIH-3T3, NALM-1, NW-145, OPCN/OPCT cell lines, Peer, PNT-1A/PNT 2, RenCa, RIN-5F, RMA/RMAS, Saos-2 cells, Sf-9, SkBr3, T2, T-47D, T84, THP1 cell line, U373, U87, U937, VCaP, Vero cells, WM39, WT-49, X63, YAC-1, YAR, and transgenic varieties thereof.

[2780] Cell lines are available from a variety of sources known to those with skill in the art (see, e.g., the American Type Culture Collection (ATCC) (Manassas, Va.)). In some embodiments, a cell transfected with one or more retron delivery systems described herein is used to establish a new cell line comprising one or more nucleic acid molecules encoding the recombinant retron-based gene editing systems described herein, or encoding at last a component of said systems (e.g., a recombinant ncRNA or a recombinant retron RT).

### M. PHARMACEUTICAL COMPOSITIONS

[2781] The engineered retron-based genome editing systems described herein, or one or more components thereof (e.g., engineered ncRNAs, engineered msDNA, engineered RT, nucleic acid molecules encoding the engineered retrons and/or retron components, guide RNAs, programmable nucleases) may be provided as pharmaceutical compositions. For example, one or more LNPs or other non-virus-based delivery system comprising one or more circular or linear RNA molecules encoding each of the components of the retron-based genome editing system may be formulated as a pharmaceutical composition for administering to a subject in need (e.g., a human in need of gene editing).

[2782] Formulations can include, without limitation, saline, liposomes, lipid nanoparticles, polymers, peptides, proteins, cells transfected with viral vectors (e.g., for transfer or transplantation into a subject) and combinations thereof.

[2783] Formulations of the pharmaceutical compositions described herein may be prepared by any method known or hereafter developed in the art of pharmacology. As used herein the term “pharmaceutical composition” refers to compositions comprising at least one active ingredient and optionally one or more pharmaceutically acceptable excipients.

[2784] In general, such preparatory methods include the step of associating the active ingredient with an excipient and/or one or more other accessory ingredients. As used herein, the phrase “active ingredient” generally refers an engineered retron as described herein.

[2785] A pharmaceutical composition in accordance with the present disclosure may be prepared, packaged, and/or sold in bulk, as a single unit dose, and/or as a plurality of single unit doses. As used herein, a “unit dose” refers to a discrete amount of the pharmaceutical composition comprising a predetermined amount of the active ingredient. The amount of the active ingredient is generally equal to the dosage of the active ingredient which would be administered to a subject and/or a convenient fraction of such a dosage such as, for example, one-half or one-third of such a dosage.

[2786] Other aspects of the present disclosure relate to pharmaceutical compositions comprising any of the various components of the recombinant retron-based genome editing systems described herein, including, but not limited to, engineered retrons and/or retron components, engineered ncRNAs, engineered msDNA, engineered RT, nucleic acid molecules encoding the engineered retrons and/or retron components, programmable nucleases (e.g., RNA-guided nucleases), guide RNAs, and vector or vector systems encoding the engineered retrons and/or retron components, and any combinations thereof. The term“pharmaceutical composition”, as used herein, refers to a composition formulated for pharmaceutical use. In some embodiments, the pharmaceutical composition further comprises a pharmaceutically acceptable carrier. In some embodiments, the pharmaceutical composition comprises additional agents (e.g. for specific delivery, increasing half-life, or other therapeutic compounds).

[2787] As used here, the term “pharmaceutically-acceptable carrier” means a pharmaceutically-acceptable material, composition or vehicle, such as a liquid or solid filler, diluent, excipient, manufacturing aid (e.g., lubricant, talc magnesium, calcium or zinc stearate, or steric acid), or solvent encapsulating material, involved in carrying or transporting the compound from one site (e.g., the delivery site) of the body, to another site (e.g., organ, tissue or portion of the body). A pharmaceutically acceptable carrier is“acceptable” in the sense of being compatible with the other ingredients of the formulation and not injurious to the tissue of the subject (e.g., physiologically compatible, sterile, physiologic pH, etc.).

[2788] Some examples of materials which can serve as pharmaceutically-acceptable carriers include: (1) sugars, such as lactose, glucose and sucrose; (2) starches, such as corn starch and potato starch; (3) cellulose, and its derivatives, such as sodium carboxymethyl cellulose, methylcellulose, ethyl cellulose, microcrystalline cellulose and cellulose acetate; (4) powdered tragacanth; (5) malt; (6) gelatin; (7) lubricating agents, such as magnesium stearate, sodium lauryl sulfate and talc; (8) excipients, such as cocoa butter and suppository waxes; (9) oils, such as peanut oil, cottonseed oil, safflower oil, sesame oil, olive oil, corn oil and soybean oil; (10) glycols, such as propylene glycol; (11) polyols, such as glycerin, sorbitol, mannitol and polyethylene glycol (PEG); (12) esters, such as ethyl oleate and ethyl laurate; (13) agar; (14) buffering agents, such as magnesium hydroxide and aluminum hydroxide; (15) alginic acid; (16) pyrogen-free water; (17) isotonic saline; (18) Ringer's solution; (19) ethyl alcohol; (20) pH buffered solutions; (21) polyesters, polycarbonates and/or polyanhydrides; (22) bulking agents, such as polypeptides and amino acids (23) serum component, such as serum albumin, HDL and LDL; (22) C2-C12 alcohols, such as ethanol; and (23) other non-toxic compatible substances employed in pharmaceutical formulations. Wetting agents, coloring agents, release agents, coating agents, sweetening agents, flavoring agents, perfuming agents, preservative and antioxidants can also be present in the formulation. The terms such as“excipient”, “carrier”, “pharmaceutically acceptable carrier” or the like are used interchangeably herein.

[2789] In some embodiments, the pharmaceutical composition is formulated for delivery to a subject, e.g., for gene editing. Suitable routes of administrating the pharmaceutical composition described herein include, without limitation: topical, subcutaneous, transdermal, intradermal, intralesional, intraarticular, intraperitoneal, intravesical, transmucosal, gingival, intradental, intracochlear, transtympanic, intraorgan, epidural, intrathecal, intramuscular, intravenous, intravascular, intraosseus, periocular, intratumoral, intracerebral, and intracerebroventricular administration.

[2790] In some embodiments, the pharmaceutical composition described herein is administered locally to a diseased site (e.g., tumor site). In some embodiments, the pharmaceutical composition described herein is administered to a subject by injection, by means of a catheter, by means of a suppository, or by means of an implant, the implant being of a porous, non-porous, or gelatinous material, including a membrane, such as a sialastic membrane, or a fiber.

[2791] In other embodiments, the pharmaceutical composition described herein is delivered in a controlled release system. In one embodiment, a pump may be used (see, e.g., Langer, 1990, Science 249:1527-1533; Sefton, 1989, CRC Crit. Ref. Biomed. Eng. 14:201; Buchwald et al., 1980, Surgery 88:507; Saudek et al., 1989, N. Engl. J. Med. 321:574). In another embodiment, polymeric materials can be used. (See, e.g., Medical Applications of Controlled Release (Langer and Wise eds., CRC Press, Boca Raton, Fla., 1974); Controlled Drug Bioavailability, Drug Product Design and Performance (Smolen and Ball eds., Wiley, New York, 1984); Ranger and Peppas, 1983, Macromol. Sci. Rev. Macromol. Chem. 23:61. See also Levy et al., 1985, Science 228:190; During et al., 1989, Ann. Neurol. 25:351; Howard et al., 1989, J. Neurosurg. 71:105). Other controlled release systems are discussed, for example, in Langer, supra.

[2792] In some embodiments, the pharmaceutical composition is formulated in accordance with routine procedures as a composition adapted for intravenous or subcutaneous administration to a subject, e.g., a human. In some embodiments, pharmaceutical composition for administration by injection are solutions in sterile isotonic aqueous buffer. Where necessary, the pharmaceutical can also include a solubilizing agent and a local anesthetic such as lignocaine to ease pain at the site of the injection. Generally, the ingredients are supplied either separately or mixed together in unit dosage form, for example, as a dry lyophilized powder or water free concentrate in a hermetically sealed container such as an ampoule or sachette indicating the quantity of active agent. Where the pharmaceutical is to be administered by infusion, it can be dispensed with an infusion bottle containing sterile pharmaceutical grade water or saline. Where the pharmaceutical composition is administered by injection, an ampoule of sterile water for injection or saline can be provided so that the ingredients can be mixed prior to administration.

[2793] A pharmaceutical composition for systemic administration may be a liquid, e.g., sterile saline, lactated Ringer's or Hank's solution. In addition, the pharmaceutical composition can be in solid forms and re-dissolved or suspended immediately prior to use. Lyophilized forms are also contemplated.

[2794] The pharmaceutical composition can be contained within a lipid particle or vesicle, such as a liposome or microcrystal or LNP, which is also suitable for parenteral administration. The particles can be of any suitable structure, such as unilamellar or plurilamellar, so long as compositions are contained therein. Compounds can be entrapped in “stabilized plasmid-lipid particles” (SPLP) containing the fusogenic lipid dioleoylphosphatidylethanolamine (DOPE), low levels (5-10 mol %) of cationic lipid, and stabilized by a polyethyleneglycol (PEG) coating (Zhang Y. P. et al., Gene Ther. 1999, 6:1438-47). Positively charged lipids such as N-[1-(2,3-dioleoyloxi)propyl]-N,N,N-trimethyl-amoniummethylsulfate, or “DOTAP,” are particularly preferred for such particles and vesicles. The preparation of such lipid particles is well known. See, e.g., U.S. Pat. Nos. 4,880,635; 4,906,477; 4,911,928; 4,917,951; 4,920,016; and 4,921,757; each of which is incorporated herein by reference.

[2795] Further, the pharmaceutical composition can be provided as a pharmaceutical kit comprising (a) a container containing a recombinant retron-based genome editing system or one or more components thereof in lyophilized form and (b) a second container containing a pharmaceutically acceptable diluent (e.g., sterile water) for injection. The pharmaceutically acceptable diluent can be used for reconstitution or dilution of the lyophilized system of the invention. Optionally associated with such container(s) can be a notice in the form prescribed by a governmental agency regulating the manufacture, use or sale of pharmaceuticals or biological products, which notice reflects approval by the agency of manufacture, use or sale for human administration.

[2796] In another aspect, an article of manufacture containing materials useful for the treatment of the diseases described above is included. In some embodiments, the article of manufacture comprises a container and a label. Suitable containers include, for example, bottles, vials, syringes, and test tubes. The containers may be formed from a variety of materials such as glass or plastic. In some embodiments, the container holds a composition that is effective for treating a disease described herein and may have a sterile access port. For example, the container may be an intravenous solution bag or a vial having a stopper pierce-able by a hypodermic injection needle. The active agent in the composition is a compound of the invention. In some embodiments, the label on or associated with the container indicates that the composition is used for treating the disease of choice. The article of manufacture may further comprise a second container comprising a pharmaceutically-acceptable buffer, such as phosphate-buffered saline, Ringer's solution, or dextrose solution. It may further include other materials desirable from a commercial and user standpoint, including other buffers, diluents, filters, needles, syringes, and package inserts with instructions for use.

### N. USE AND METHODS OF USE

[2797] The engineered retron comprising the heterologous nucleic acid sequence can be used in a variety of applications, several non-limiting examples of which are described herein. In general, the engineered retron can be used in any suitable organism. In some embodiments, the organism is a eukaryote.

[2798] In some embodiments, the organism is an animal. In some embodiments, the animal is a fish, an amphibian, a reptile, a mammal, or a bird. In some embodiments, the animal is a farm animal or agriculture animal. Non-limiting examples of farm and agriculture animals include horses, goats, sheep, swine, cattle, llamas, alpacas, and birds, e.g., chickens, turkeys, ducks, and geese. In some embodiments, the animal is a non-human primate, e.g., baboons, capuchin monkeys, chimpanzees, lemurs, macaques, marmosets, tamarins, spider monkeys, squirrel monkeys, and vervet monkeys. In some embodiments, the animal is a pet. Non-limiting examples of pets include dogs, cats horses, wolfs, rabbits, ferrets, gerbils, hamsters, chinchillas, fancy rats, guinea pigs, canaries, parakeets, and parrots.

[2799] In some embodiments, the organism is a plant. Plants that may be transfected with an engineered retron include monocots and dicots. Particular examples include, but are not limited to, corn (maize), sorghum, wheat, sunflower, potato, cotton, rice, soybean, sugarbeet, sugarcane, tobacco, barley, and oilseed rape, Brassica sp., alfalfa, rye, millet, safflower, peanuts, sweet potato, cassava, coffee, coconut, pineapple, citrus trees, cocoa, tea, banana, avocado, fig, guava, mango, olive, papaya, cashew, macadamia, almond, oats, vegetables, ornamentals, and conifers. Vegetables include, but are not limited to, crucifers, peppers, tomatoes, lettuce, green beans, lima beans, peas, and members of the genus Cucumis such as cucumber, cantaloupe, and musk melon. Ornamentals include, but are not limited to, azalea, hydrangea, hibiscus, roses, tulips, daffodils, petunias, carnation, poinsettia, and chrysanthemum.

[2800] In some embodiments, heterologous nucleic acid sequences can be added to the subject engineered retron to provide a cell with a heterologous nucleic acid encoding a protein or regulatory RNA of interest, a cellular barcode, a donor polynucleotide suitable for use in gene editing, e.g., by homology directed repair (HDR) or recombination-mediated genetic engineering (recombineering), or a CRISPR protospacer DNA sequence for use in molecular recording, as discussed further below. Such heterologous sequences may be inserted, for example, into the msr locus or the msd locus such that the heterologous sequence is transcribed by the retron reverse transcriptase as part of the msDNA product.

[2801] In some embodiments, the engineered retrons described herein may be used for research tools, such as kits, functional genomics assays, and generating engineered cell lines and animal models for research and drug screening. The kit may comprise one or more reagents in addition to the engineered retron, such as a buffer, a control reagent, a control vector, a control RNA polynucleotide, a reagent for in vitro production of the polypeptide from DNA, and adaptors for sequencing. A buffer can be, for example, a stabilization buffer, a reconstituting buffer, a diluting buffer, a wash buffer, or a buffer for introducing a polypeptide and/or polynucleotide of the kit into a cell. In some instances, a kit can comprise one or more additional reagents specific for plants. One or more additional reagents for plants can include, for example, soil, nutrients, plants, seeds, spores, Agrobacterium, a T-DNA vector, and a pBINAR vector.

### Gene Editing

[2802] In some embodiments, the retron is used for genome editing a desired site. A retron is engineered with a heterologous nucleic acid sequence encoding a donor polynucleotide suitable for use with nuclease genome editing system. The nuclease is designed to specifically target a location proximal to the desired edit (the nuclease should be designed such that it will not cut the target once the edit is properly installed). The nuclease (e.g., CAS or non-CAS) is linked to the retron, either by direct fusion to the RT or by fusion of the msDNA to the gRNA (only applicable for RNA-guided nucleases). A heterologous nucleic acid sequence is inserted into the retron msd. See for example FIG. 3, which shows a marker representing the edit.

[2803] In some embodiments, the heterologous nucleic acid sequence has 10-100 or more bp of homologous nucleic acid sequence to the genome on both sides of the desired edit. The desired edit (insertion, deletion, or mutation) is in between the homologous sequence.

[2804] In some embodiments, donor polynucleotides comprise a sequence comprising an intended genome edit flanked by a pair of homology arms responsible for targeting the donor polynucleotide to the target locus to be edited in a cell. The donor polynucleotide typically comprises a 5′ homology arm that hybridizes to a 5′ genomic target sequence and a 3′ homology arm that hybridizes to a 3′ genomic target sequence. The homology arms are referred to herein as 5′ and 3′ (i.e., upstream and downstream) homology arms, which relate to the relative position of the homology arms to the nucleotide sequence comprising the intended edit within the donor polynucleotide. The 5′ and 3′ homology arms hybridize to regions within the target locus in the genomic DNA to be modified, which are referred to herein as the “5′ target sequence” and “3′ target sequence,” respectively.

[2805] The homology arm must be sufficiently complementary for hybridization to the target sequence to mediate homologous recombination between the donor polynucleotide and genomic DNA at the target locus. For example, a homology arm may comprise a nucleotide sequence having at least about 80-100% sequence identity to the corresponding genomic target sequence, including any percent identity within this range, such as at least 80%, 81%, 82%, 83%, 84%, 85%, 86%, 87%, 88%, 89%, 90%, 91%, 92%, 93%, 94%, 95%, 96%, 97%, 98%, 99% or 100% sequence identity thereto, wherein the nucleotide sequence comprising the intended edit can be integrated into the genomic DNA by HDR at the genomic target locus recognized (i.e., having sufficient complementary for hybridization) by the 5′ and 3′ homology arms.

[2806] In some embodiments, the corresponding homologous nucleotide sequences in the genomic target sequence (i.e., the “5′ target sequence” and “3′ target sequence”) flank a specific site for cleavage and/or a specific site for introducing the intended edit. The distance between the specific cleavage site and the homologous nucleotide sequences (e.g., each homology arm) can be several hundred nucleotides. In some embodiments, the distance between a homology arm and the cleavage site is 200 nucleotides or less (e.g., 0, 10, 20, 30, 50, 75, 100, 125, 150, 175, and 200 nucleotides). In most cases, a smaller distance may give rise to a higher gene targeting rate. In some embodiments, the donor polynucleotide is substantially identical to the target genomic sequence, across its entire length except for the sequence changes to be introduced to a portion of the genome that encompasses both the specific cleavage site and the portions of the genomic target sequence to be altered.

[2807] A homology arm can be of any length, e.g. 10 nucleotides or more, 15 nucleotides or more, 20 nucleotides or more, 50 nucleotides or more, 100 nucleotides or more, 250 nucleotides or more, 300 nucleotides or more, 350 nucleotides or more, 400 nucleotides or more, 450 nucleotides or more, 500 nucleotides or more, 1000 nucleotides (1 kb) or more, 5000 nucleotides (5 kb) or more, 10000 nucleotides (10 kb) or more, etc. In some instances, the 5′ and 3′ homology arms are substantially equal in length to one another. However, in some instances the 5′ and 3′ homology arms are not necessarily equal in length to one another. For example, one homology arm may be 30% shorter or less than the other homology arm, 20% shorter or less than the other homology arm, 10% shorter or less than the other homology arm, 5% shorter or less than the other homology arm, 2% shorter or less than the other homology arm, or only a few nucleotides less than the other homology arm. In other instances, the 5′ and 3′ homology arms are substantially different in length from one another, e.g. one may be 40% shorter or more, 50% shorter or more, sometimes 60% shorter or more, 70% shorter or more, 80% shorter or more, 90% shorter or more, or 95% shorter or more than the other homology arm.

[2808] The donor polynucleotide may be used in combination with an RNA-guided nuclease, which is targeted to a particular genomic sequence (i.e., genomic target sequence to be modified) by a guide RNA. A target-specific guide RNA comprises a nucleotide sequence that is complementary to a genomic target sequence, and thereby mediates binding of the nuclease-gRNA complex by hybridization at the target site. For example, the gRNA can be designed with a sequence complementary to the sequence of a minor allele to target the nuclease-gRNA complex to the site of a mutation. The mutation may comprise an insertion, a deletion, or a substitution. For example, the mutation may include a single nucleotide variation, gene fusion, translocation, inversion, duplication, frameshift, missense, nonsense, or other mutation associated with a phenotype or disease of interest. The targeted minor allele may be a common genetic variant or a rare genetic variant. In some embodiments, the gRNA is designed to selectively bind to a minor allele with single base-pair discrimination, for example, to allow binding of the nuclease-gRNA complex to a single nucleotide polymorphism (SNP). In particular, the gRNA may be designed to target disease-relevant mutations of interest for the purpose of genome editing to remove the mutation from a gene. Alternatively, the gRNA can be designed with a sequence complementary to the sequence of a major or wild-type allele to target the nuclease-gRNA complex to the allele for the purpose of genome editing to introduces a mutation into a gene in the genomic DNA of the cell, such as an insertion, deletion, or substitution. Such genetically modified cells can be used, for example, to alter phenotype, confer new properties, or produce disease models for drug screening.

[2809] In some embodiments, the RNA-guided nuclease used for genome modification is a clustered regularly interspersed short palindromic repeats (CRISPR) system Cas nuclease. Any RNA-guided Cas nuclease capable of catalyzing site-directed cleavage of DNA to allow integration of donor polynucleotides by the HDR mechanism can be used in genome editing, including CRISPR system Class 1, Type I, II, or III Cas nucleases; Class 2, Type II nuclease (such as Cas9); a Class 2, Type V nuclease (such as Cpf1), or a Class 2, Type VI nuclease (such as C2c2). Examples of Cas proteins include Cas1, Cas1B, Cas2, Cas3, Cas4, Cas5, CasSe (CasD), Cas6, Cas6e, Cas6f, Cas7, Cas8a1, Cas8a2, Cas8b, Cas8c, Cas9 (Csnl or Csxl2), CaslO, CaslOd, CasF, CasG, CasH, Csyl, Csy2, Csy3, Csel (CasA), Cse2 (CasB), Cse3 (CasE), Cse4 (CasC), Cscl, Csc2, Csa5, Csn2, Csm2, Csm3, Csm4, Csm5, Csm6, Cmrl, Cmr3, Cmr4, Cmr5, Cmr6, Csbl, Csb2, Csb3, Csxl7, Csx14, CsxlO, Csxl6, CsaX, Csx3, Csxl, Csxl5, Csfl, Csf2, Csf3, Csf4, and Cul966, and homologs or modified versions thereof.

[2810] In some embodiments, a Class 1, type II CRISPR system Cas9 endonuclease is used. Cas9 nucleases from any species, or biologically active fragments, variants, analogs, or derivatives thereof that retain Cas9 endonuclease activity (i.e., catalyze site-directed cleavage of DNA to generate double-strand breaks) may be used to perform genome modification as described herein. The Cas9 need not be physically derived from an organism but may be synthetically or recombinantly produced. Cas9 sequences from a number of bacterial species are well known in the art and listed in the National Center for Biotechnology Information (NCBI) database. See, for example, NCBI entries for Cas9 from: Streptococcus pyogenes (WP 002989955, WP_038434062, WP_011528583); Campylobacter jejuni (WP_022552435, YP 002344900), Campylobacter coli (WP 060786116); Canipylobacter fetus (WP 059434633); Corynebacterium ulcerans (NC_015683, NC_017317); Corynebacterium diphtheria (NC_016782, NC_016786); Enterococcus faecalis (WP 033919308); Spiroplasma syrphidicola (NC 021284); Prevotella intermedia (NC 017861); Spiroplasma taiwanense (NC 021846); Streptococcus iniae (NC 021314); Belliella baltica (NC 018010); Psychroflexus torquisl (NC O 18721); Streptococcus thermophilus (YP 820832), Streptococcus mutans (WP 061046374, WP 024786433); Listeria innocua (NP 472073); Listeria monocytogenes (WP 061665472); Legionella pneumophila (WP 062726656); Staphylococcus aureus (WP_001573634); Francisella tularensis (WP_032729892, WP_014548420), Enterococcus faecalis (WP 033919308); Lactobacillus rhamnosus (WP 048482595, WP_032965177); and Neisseria meningitidis (WP_061704949, YP_002342100); all of which sequences (as entered by the date of filing of this application) are herein incorporated by reference in their entireties. Any of these sequences or a variant thereof comprising a sequence having at least about 70-100% sequence identity thereto, including any percent identity within this range, such as 70, 71, 72, 73, 74, 75, 76, 77, 78, 79, 80, 81, 82, 83, 84, 85, 86, 87, 88, 89, 90, 91, 92, 93, 94, 95, 96, 97, 98, or 99% sequence identity thereto, can be used for genome editing, as described herein. See also Fonfara et al. (2014) Nucleic Acids Res. 42(4):2577-90; Kapitonov et al. (2015) J. Bacterid. 198(5): 797-807, Shmakov et al. (2015) Mol. Cell. 60(3):385-397, and Chylinski et al. (2014) Nucleic Acids Res. 42(10):6091-6105); for sequence comparisons and a discussion of genetic diversity and phylogenetic analysis of Cas9.

[2811] The genomic target site will typically comprise a nucleotide sequence that is complementary to the gRNA and may further comprise a protospacer adjacent motif (PAM). In some embodiments, the target site comprises 20-30 base pairs in addition to a 3 or more base pair PAM. Typically, the first nucleotide of a PAM can be any nucleotide, while the two or more other nucleotides will depend on the specific Cas9 protein that is chosen. Exemplary PAM sequences are known to those of skill in the art and include, without limitation, NNG, NGN, NAG, and NGG, wherein N represents any nucleotide. In some embodiments, the allele targeted by a gRNA comprises a mutation that creates a PAM within the allele, wherein the PAM promotes binding of the Cas9-gRNA complex to the allele.

[2812] In some embodiments, the gRNA is 5-50 nucleotides, 10-30 nucleotides, 15-25 nucleotides, 18-22 nucleotides, or 19-21 nucleotides in length, or any length between the stated ranges, including, for example, 10, 11, 12, 13, 14, 15, 16, 17, 18, 19, 20, 21, 22, 23, 24, 25, 26, 27, 28, 29, 30, 31, 32, 33, 34, or 35 nucleotides in length. The guide RNA may be a single guide RNA comprising crRNA and tracrRNA sequences in a single RNA molecule, or the guide RNA may comprise two RNA molecules with crRNA and tracrRNA sequences residing in separate RNA molecules.

[2813] In another embodiment, the CRISPR nuclease from Prevotella and Francisella 1 (Cpf1, or Cas12a) is used. Cpf1 is another class 11 CRISPR/Cas system RNA-guided nuclease with similarities to Cas9 and may be used analogously. Unlike Cas9, Cpf1 does not require a tracrRNA and only depends on a crRNA in its guide RNA, which provides the advantage that shorter guide RNAs can be used with Cpf1 for targeting than Cas9. Cpf1 is capable of cleaving either DNA or RNA. The PAM sites recognized by Cpf1 have the sequences 5′-YTN-3′ (where “Y” is a pyrimidine and “N” is any nucleobase) or 5′-TTN-3′, in contrast to the G-rich PAM site recognized by Cas9. Cpf1 cleavage of DNA produces double-stranded breaks with a sticky-ends having a 4 or 5 nucleotide overhang. For a discussion of Cpf1, see, e.g., Ledford et al. (2015) Nature. 526 (7571):17-17, Zetsche et al. (2015) Cell. 163 (3):759-771, Murovec et al. (2017) Plant Biotechnol. J. 15(8):917-926, Zhang et al. (2017) Front. Plant Sci. 8:177, Fernandes et al. (2016) Postepy Biochem. 62(3):315-326; herein incorporated by reference.

[2814] C2c1 (Cas12b) is another class II CRISPR/Cas system RNA-guided nuclease that may be used. C2c1, similarly to Cas9, depends on both a crRNA and tracrRNA for guidance to target sites. See, e.g., Shmakov et al. (2015) Mol Cell. 60(3):385-397, Zhang et al. (2017) Front Plant Sci. 8:177; herein incorporated by reference.

[2815] In yet another embodiment, an engineered RNA-guided Fokl nuclease may be used. RNA-guided Fokl nucleases comprise fusions of inactive Cas9 (dCas9) and the Fokl endonuclease (FokI-dCas9), wherein the dCas9 portion confers guide RNA-dependent targeting on Fokl. For a description of engineered RNA-guided Fold nucleases, see, e.g., Havlicek et al. (2017) Mol. Ther. 25(2):342-355, Pan et al. (2016) Sci Rep. 6:35794, Tsai et al. (2014) Nat Biotechnol. 32(6):569-576; herein incorporated by reference.

[2816] In other embodiments, any other Cas enzymes and variants described in other sections of the application (all incorporated herein) can be used similarly.

[2817] In some embodiments, the RNA-guided nuclease is provided in the form of a protein, optionally where the nuclease is complexed with a gRNA to form a ribonucleoprotein (RNP) complex. In some embodiments, the RNA-guided nuclease is provided by a nucleic acid encoding the RNA-guided nuclease, such as an RNA (e.g., messenger RNA) or DNA (expression vector). In some embodiments, the RNA-guided nuclease and the gRNA are both provided by vectors, such as the vectors and the vector system described in other parts of the application (all incorporated herein by reference). Both can be expressed by a single vector or separately on different vectors. The vectors encoding the RNA-guided nuclease and gRNA may be included in the vector system comprising the engineered retron msr gene, msd gene and ret gene sequences. In some embodiments, the RNA-guided nuclease is fused to the RT and/or the msDNA.

[2818] The RNP complex may be administered to a subject or delivered into a cell by methods known in the art, such as those described in U.S. Pat. No. 11,390,884, which is incorporated by reference herein in its entirety. In some embodiments, the endonuclease/gRNA ribonucleoprotein (RNP) complexes are delivered to cells by electroporation. Direct delivery of the RNP complex to a subject or cell eliminates the need for expression from nucleic acids (e.g., transfection of plasmids encoding Cas9 and gRNA). It also eliminates unwanted integration of DNA segments derived from nucleic acid delivery (e.g., transfection of plasmids encoding Cas9 and gRNA). An endonuclease/gRNA ribonucleoprotein (RNP) complex usually is formed prior to administration.

[2819] Codon usage may be optimized to further improve production of an RNA-guided nuclease and/or reverse transcriptase (RT) in a particular cell or organism. For example, a nucleic acid encoding an RNA-guided nuclease or reverse transcriptase can be modified to substitute codons having a higher frequency of usage in a yeast cell, a bacterial cell, a human cell, a non-human cell, a mammalian cell, a rodent cell, a mouse cell, a rat cell, or any other host cell of interest, as compared to the naturally occurring polynucleotide sequence. When a nucleic acid encoding the RNA-guided nuclease or reverse transcriptase is introduced into cells, the protein can be transiently, conditionally, or constitutively expressed in the cell.

[2820] In some embodiments, the engineered retron used for genome editing with nuclease genome editing systems can further include accessory or enhancer proteins for recombination. Examples of recombination enhancers can include nonhomologous end joining (NHEJ) inhibitors (e.g., inhibitor of DNA ligase IV, a KU inhibitor (e.g., KU70 or KU80), a DNA-PKc inhibitor, or an artemis inhibitor) and homologous directed repair (HDR) promoters, or both, that can enhance or improve more precise genome editing and/or the efficiency of homologous recombination. In some embodiments, the recombination accessory or enhancers can comprise C-terminal binding protein interacting protein (CtIP), cyclinB2, Rad family members (e.g. Rad50, Rad51, Rad52, etc).

[2821] CtIP is a transcription factor containing C2H2 zinc fingers that are involved in early steps of homologous recombination. Mammalian CtIP and its orthologs in other eukaryotes promote the resection of DNA double-strand breaks and are essential for meiotic recombination. HDR may be enhanced by using Cas9 nuclease associated (e.g. fused) to an N-terminal domain of CtIP, an approach that forces CtIP to the cleavage site and increases transgene integration by HDR. In some embodiments, an N-terminal fragment of CtIP, called HE for HDR enhancer, may be sufficient for HDR stimulation and requires the CtIP multimerization domain and CDK phosphorylation sites to be active. HDR stimulation by the Cas9-HE fusion depends on the guide RNA used, and therefore the guide RNA will be designed accordingly.

[2822] Using the gene editing system described herein, any target gene or sequence in a host cell can be edited or modified for a desired trait, including but not limited to: Myostatin (e.g., GDF8) to increase muscle growth; Pc POLLED to induce hairlessness; KISS1R to induce bore taint; Dead end protein (dnd) to induce sterility; Nano2 and DDX to induce sterility; CD163 to induce PRRSV resistance; RELA to induce ASFV resilience; CD18 to induce Mannheimia (Pasteurella) haemolytica resilience; NRAMPl to induce tuberculosis resilience; Negative regulators of muscle mass (e.g., Myostatin) to increase muscle mass.

### Diseases and Disorders

[2823] Provided herein are methods of treating a disease or disorder, the methods comprising administering to a subject in need thereof a pharmaceutical composition of the present disclosure which includes a retron-based gene editing system and/or components thereof. In various embodiments of the invention, target genome or epigenetic modifications include cells with monogenic diseases or disorders. Various monogenic diseases include but are not limited to: Adenosine Deaminase (ADA) Deficiency; Alpha-1 Antitrypsin Deficiency; Cystic Fibrosis; Duchenne Muscular Dystrophy; Galactosemia; Hemochromatosis; Huntington's Disease; Maple Syrup Urine Disease; Marfan Syndrome; Neurofibromatosis Type 1; Pachyonychia Congenita; Phenylkeotnuria; Severe Combined Immunodeficiency; Sickle Cell Disease; Smith-Lemli-Opitz Syndrome; Tay-Sachs Disease; hereditary tyrosinemia I; Influenza; SARS-CoV-2; Alzheimer's disease; Parkinson's disease.

[2824] Target sequences related to certain diseases and disorders are known in some cases. Target sequences or target editing sites include disease-associated or causative mutations for one or more of 10,000 monogenic disorders. A list of target sequences can be generated based on the monogenic disorders. Common genetic disorders that may be correctable by the gene editing systems described here including but are not limited to: Adenosine Deaminase (ADA) Deficiency; Alpha-1 Antitrypsin Deficiency; Cystic Fibrosis; Duchenne Muscular Dystrophy; Galactosemia; Hemochromatosis; Huntington's Disease; Maple Syrup Urine Disease; Marfan Syndrome; Neurofibromatosis Type 1; Pachyonychia Congenita; Phenylkeotnuria; Severe Combined Immunodeficiency; Sickle Cell Disease; Smith-Lemli-Opitz Syndrome; and Tay-Sachs Disease. In other embodiments, the disease-associated gene can be associated with a polygenic disorder selected from the group consisting of: heart disease; high blood pressure; Alzheimer's disease; arthritis; diabetes; cancer; and obesity.

[2825] The gene editing systems disclosed herein may also be used to treat the following genetic disorders by editing a defect in the disease-associated gene, as follows:

| Genetic disease | Disease gene |
|---|---|
| Arenoleukodystrophy (ALD) | ABCD1 |
| Agammaglobulinemia non-Bruton type | IGHM |
| Alport syndrome | COL4A5 |
| Amyloid neuropathy - Andrade disease | TTR |
| Angioneurotic oedema | C1NH |
| Alpha1-antitrypsin deficiency | SERPINEA 1 |
| Bartter syndrome type 4 | BSND |
| Blepharophimosis - ptosis - epicanthus inversus | FOXL2 |
| syndrome (BEPS) | |
| Brugada sindrome - Long QT syndrome-3 | SCN5A |
| Bruton agammaglobulinemia tyrosine kinase | BTK |
| Ceroid lipofuscinosis neuronal type 2 | CLN2 |
| Charcot Marie Tooth type 1A (CMT1A) | PMP22 |
| Charcot Marie Tooth type X (CMTX) | CMTX |
| Chronic granulomatous disease (CGD) | CYBB |
| Cystic Fibrosis (CF) | CFTR |
| Congenital adrenal hyperplasia (CAH) | CYP21A2 |
| Congenital disorder of glycosylation type Ia (CDG Ia) | PMM2 |
| Congenital fibrosis of extraocular muscles 1 (CFEOM1) | KIF21A |
| Crigler-Najjar syndrome | UGT1A1 |
| Deafness, autosomal recessive | CX26 |
| Diamond-Blackfan anemia (DBA) | RPS19 |
| Duchenne-Becker muscular dystrophy (DMD/DMB) | DMD |
| Duncan disease - X-linked lymphoproliferative syndrome | SH2D1A |
| (XLPD) | |
| Ectrodactyly ectodermal dysplasia and cleft lip/palate | p63 |
| syndrome (EEC) | |
| Epidermolysis bullosa dystrophica/pruriginosa | COL7A1 |
| Exostoses multiple type I (EXT1) | EXT1 |
| Exostoses multiple type II (EXT2) | EXT2 |
| Facioscapulohumeral muscular dystrophy | FRG1 |
| Factor VII deficiency | F7 |
| Familial Mediterranean Fever (FMF) | MEFV |
| Fanconi anemia A | FANCA |
| Fanconi anemia G | FANCG |
| Fragile-X | FRAXA |
| Gangliosidosis (GM1) | GLB1 |
| Gaucher disease (GD) | GBA |
| Glanzmann thrombasthenia | ITGA2B |
| Glucose-6-phosphate dehydrogenase deficiency | G6PD |
| Glutaric acidemia I | GCDH |
| Haemophilia A | F8 |
| Haemophilia B | F9 |
| Hand-foot-uterus syndrome | HOXD13 |
| Hemophagocytic lymphohistiocytosis familial, type 2 | PRF1 |
| (FHL2) | |
| Hypomagnesaemia primary | CLDN16 |
| HYPOPHOSPHATASIA | ALPL |
| Holt-Oram Sindrome (HOS) | TBX5 |
| Homocystinuria | MTHFR |
| Incontinentia pigmenti | NEMO |
| Lesch-Nyhan syndrome | HPRT |
| Limb-girdle muscular dystrophy type 2C (LGMD2C) | SGCG |
| Long QT syndrome-1 | KCNQ1 |
| Mannosidosis Alpha | MAN2B1 |
| Marfan syndrome | FBN1 |
| Methacrylic Aciduria, deficiency of beta- | HIBCH |
| hydroxyisobutyryl-CoA deacylase | |
| Mevalonic aciduria | MVK |
| Myotonic dystrophy (DM) | DMPK |
| Myotonic dystrophy type 2 (DM2) | ZNF9 |
| Mucopolysaccharidosis Type I - Hurler syndrome | IDUA |
| Mucopolysaccharidosis Type IIIA - Sanfilippo sindrome | SGSH |
| A (MPS3A) | |
| Mucopolysaccharidosis Type IIIB - Sanfilippo sindrome | NAGLU |
| B (MPS3B) | |
| Mucopolysaccharidosis Type VI (MPS VI) - Maroteaux- | ARSB |
| Lamy Syndrome | |
| Neuronal ceroid lipofuscinosis 1 - Batten's disease | PPT1 |
| (CLN1) | |
| Niemann-Pick disease | SMPD1 |
| Noonan sindrome | PTPN11 |
| Pancreatitis, hereditary (PCTT) | PRSS1 |
| Paramyotonia congenita (PMC) | SCN4A |
| Phenylketonuria | PAH |
| Polycystic kidney disease type 1 (PKD1) | PKD1 |
| Polycystic kidney disease type 2 (PKD2) | PKD2 |
| Polycystic kidney and hepatic disease-1 (ARPKD) | PKHD1 |
| Schwartz-Jampel/Stuve-Wiedemann syndrome | LIFR |
| Sickle cell anemia | HBB |
| Synpolydactyly (SPD1) | HOXA13 |
| Smith-Lemli-Opitz syndrome | DHCR7 |
| Spastic paraplegia type 3 | SPG3A |
| Spinal Muscular Atrophy (SMA) | SMN |
| Spinocerebellar ataxia 3 (SCA3) | ATXN3 |
| Spinocerebellar ataxia 7 (SCA7) | ATXN7 |
| Stargardt disease | ABCA4 |
| Tay Sachs (TSD) | HEXA |
| Thalassemia-α mental retardation syndrome | ATRX |
| Thalassemia-β | HBB |
| Torsion dystonia, early onset (EOTD) | DYT1 |
| Tyrosinaemia type 1 | FAH |
| Tuberosclerosis 1 | TSC1 |
| Tuberosclerosis 2 | TSC2 |
| Wiskott-Aldrich Sindrome (WAS) | WAS |

[2826] In addition, the gene editing systems disclosed herein may also be used to treat the following genetic disorders by editing a defect in the disease-associated gene, or in more than one gene associated with a particular disorders, as follows:

| | B | | | | |
|---|---|---|---|---|---|
| | Disease- | C | D | E | F |
| A | associated | Most common | Encoded product | Accession | Type of product |
| Genetic disease | genes | of (B) | of (C) | No. of (C) | of (C) |
| Adrenal hyperplasia due | CYP21A2 | CYP21A2 | Cytochrome | P08686 | Enzyme |
| to 21-hydroxylase | | (196) | P450 family 21 | | |
| deficiency (21-OHD CAH) | | | subfamily A | | |
| | | | member 2 | | |
| Aicardi-Goutières | ADAR; | RNASEH2B | Ribonuclease H2 | Q5TBB1 | Enzyme |
| syndrome encephalopathy | IFIH1; | (28) | subunit B | | |
| | RNASEH2A; | | | | |
| | RNASEH2B; | | | | |
| | RNASEH2C; | | | | |
| | SAMHD1; | | | | |
| | TREX1 | | | | |
| Alpha-1-antitrypsin | SERPINA1 | SERPINA1 | Serpin family A | P01009 | Enzyme |
| (A1AT) deficiency (AATD) | | (83) | member 1 | | inhibitor |
| Arrhythmogenic right | 13 different | PKP2 (138) | Plakophilin 2 | Q99959 | Adhesion |
| ventricular | genes linked | | | | protein in |
| cardiomyopathy/ | to this | | | | junctions and |
| dysplasia (ARVC, ARVD) | disorder, | | | | intermediate |
| | so far. | | | | filaments. |
| Autosomal dominant | BICC1; | PKD1 (1154) | Polycystin 1 | P98161 | Subunit of ion |
| polycystic kidney | GANAB; | | | | channel |
| disease (ADPKD) | PKD1; | | | | complex |
| | PKD2 | | | | |
| Brugada syndrome | 22 different | SCN5A (725) | Sodium voltage-gated | Q14524 | Ion channel |
| ventricular fibrillation | genes linked | | channel alpha subunit | | |
| | to this | | 5 | | |
| | disorder, | | | | |
| | so far | | | | |
| Catecholaminergic | CALM1; | RYR2 (288) | Ryanodine receptor 2 | Q92736 | Ion channel |
| polymorphic ventricular | CALM2; | | | | |
| tachycardia (CPVT) | CALM3; | | | | |
| | CASQ2; | | | | |
| | RYR2; | | | | |
| | TECRL; | | | | |
| | TRDN | | | | |
| Charcot- Marie-Tooth^{d} | 75 different | PMP22 (63) | Peripheral myelin | Q01453 | Ill-defined |
| disease/Hereditary | genes linked | | protein 22^{d} | | role in myelin |
| motor and sensory | to this | | | | and Schwann |
| neuropathy | disorder, | | | | cells |
| | so far. | | | | |
| Congenital adrenal | CYP11B1; | CYP21A2 | Cytochrome P450 | P08686 | Enzyme |
| hyperplasia (CAH) | CYP17A1; | (214) | family 21 subfamily A | | |
| | CYP21A2; | | member 2 | | |
| | HSD3B2; | | | | |
| | POR; STAR | | | | |
| Congenital sucrase- | SI | SI (23) | Sucrase-isomaltase | P14410 | Enzyme |
| isomaltase deficiency | | | | | |
| (CSID) | | | | | |
| Congenital bilateral | CFTR; | CFTR (120) | Cystic fibrosis | Q20BH0 | Ion channel |
| absence of vas deferens | ADGRG2 | | transmembrane | | |
| | | | conductance regulator | | |
| Cystic fibrosis | CFTR; | CFTR (1053) | Cystic fibrosis | Q20BH0 | Ion channel |
| | CLCA4; | | transmembrane | | |
| | DCTN4; | | conductance regulator | | |
| | STX1A; | | | | |
| | TGFB1 | | | | |
| Cystinuria-lysinuria | SLC3A1; | SLC7A9 (83) | Solute carrier | P82251 | Membrane |
| syndrome/Cystinuria | SLC7A9 | | family 7 member 9 | | transporter |
| Cytomegalic congenital | NR0B1 | NR0B1 (112) | Nuclear receptor | P51843 | Nuclear |
| adrenal hypoplasia | | | subfamily 0 group B | | receptor |
| (AHC) (subtype of | | | member 1 | | |
| congenital adrenal | | | | | |
| hypoplasia) | | | | | |
| Dentinogenes is | DSPP | DSPP (11) | Dentin sialophospho- | Q9NZW4 | Seeds |
| imperfecta (DGI) (all | | | protein | | biomineralization, |
| types) | | | | | Dentinogenesis |
| Duchenne muscular | DMD; | DMD (830) | Dystrophin | P11532 | Structural |
| dystrophy (DMD) | LTBP4 | | | | protein |
| Dysbetalipoproteinemia/ | APOE | APOE (42) | Apolipoprotein E | P02649 | Lipid carrier, |
| Hyperliproteinemia | | | | | lipoprotein |
| type 3 | | | | | |
| Ehlers-Danlos syndrome | COL1A1; | COL5A1 | Collagen type V alpha | P20908, | Structural |
| | COL5A1; | (106) | 1 chain, collagen type | P05997 | protein |
| | COL5A2 | | V alpha 2 chain | | |
| Familial adenomatous | APC; | APC (539) | Adenomatous | P25054 | Tumor |
| polyposis (FAP) | MUTYH | | polyposis coli protein | | suppressor, |
| | | | | | regulatory |
| | | | | | protein |
| Gardner syndrome | APC | APC (539) | Adenomatous | P25054 | Tumor |
| (subtype of familial | | | polyposis coli protein | | suppressor, |
| adenomatous polyposis) | | | | | associated with |
| | | | | | microtublules |
| Familial cerebral | CCM2; | KRIT1 (80) | Krev interaction | O00522 | Regulatory |
| cavernous malformation | KRIT1; | | trapped protein 1 | | protein |
| | PDCD10 | | | | |
| Familial hypocalciuric | CASR | CASR (373) | Calcium sensing | P41180 | G protein- |
| hypercalcemia type 1 | | | receptor | | coupled |
| (FHH) | | | | | receptor |
| Famililal | APOB; | LDLR (1254) | Low density | P01130 | Lipoprotein |
| hypercholesterolemia | LDLR; | | lipoprotein receptor | | receptor |
| | LDLRAP1; | | | | |
| | PCSK | | | | |
| Familial isolated | 45 different | TTN (672) | Titin | Q8WZ42 | Muscle |
| dilated cardiomyopathy | genes linked | | | | protein |
| | to this | | | | |
| | disorder, | | | | |
| | so far. | | | | |
| Familial long QT | 19 different | KCNQ1 (448) | Potassium voltage- | P51787 | Ion Channel |
| syndrome (LQTS), | genes linked | | gated channel | | |
| including Romano-Ward | to this | | subfamily Q member 1 | | |
| syndrome | disorder, | | | | |
| | so far. | | | | |
| Fragile X syndrome/ | FMR1 | FMR1 (7) | Fragile X mental | Q06787 | Regulator of |
| Martin-bell syndrome | | | retardation 1 | | mRNA biology |
| Glucose-6-phosphate | G6PD | G6PD (218) | Glucose-6-phosphate | P11413 | Enzymes |
| dehydrogenase | | | 1 dehydrogenase | | |
| deficiency | | | | | |
| Glycogen storage | 27 different | AGL (117) | Glycogen debranching | P35573 | Enzyme |
| disease | genes linked | | enzyme | | |
| | to this | | | | |
| | disorder, | | | | |
| | so far. | | | | |
| GM2 gangliosidosis | GM2A; | HEXA (124) | Hexosaminidase | P06865 | Enzyme |
| | HEXA; | | subunit alpha | | |
| | HEXB | | | | |
| Hemochromatosis | BMP6; | HFE (43) | Hereditary | Q30201 | Binds |
| | HAMP; | | hemochromatosis | | transferrin |
| | HFE; HJV; | | protein | | receptor |
| | SLC40A1; | | | | |
| | TFR2 | | | | |
| Hemolytic anemia due | PKLR | PKLR (237) | Pyruvate kinase | P30613 | Enzyme |
| to red cell pyruvate | | | | | |
| kinase deficiency | | | | | |
| Hemophilia A and B | F8; F9 | F8 (1898) | Coagulation factor | P00451 | Cofactor for |
| | | | VIII | | factor IXa |
| Hemophilia A | F8 | F8 (3364) | Coagulation factor | P00451 | Cofactor for |
| | | | VIII | | factor IXa |
| Hemorrhagic | ACVRL1; | ENG (187) | Endoglin | P17813 | Regulation of |
| telangiectasia/Osler | ENG; | | | | angiogenesis |
| Weder Rendu disease | GDF2; | | | | |
| | SMAD4 | | | | |
| Hereditary angioedema | ANGPT1; | SERPING1 | Serpin family G | P05155 | Enzyme |
| (HAE)/Angioneurotic | F12; PLG; | (252) | member 1 | | inhibitor |
| edema | SERPING1 | | | | |
| Hereditary breast | 14 different | BRCA1 | Breast cancer type 1 | P38398 | E3 ubiquitin- |
| and ovarian cancer | genes linked | (1262) | susceptibility protein | | protein ligase |
| syndrome | to this | | | | |
| | disorder | | | | |
| | so far. | | | | |
| Hereditary fructose | ALDOB | ALDOB (32) | Aldolase, fructose- | P05062 | Enzymes |
| intolerance/Fructosemia | | | bisphosphate B | | |
| Hereditary xanthinuria/ | MOCOS; | MOCOS (8); | Molybdenum cofactor | Q9C5X8, | Enzymes |
| Xanthine stone disease | XDH | XDH (17) | sulfurase, xanthine | P47989 | |
| | | | dehydrogenase | | |
| Hypohidrotic ectodermal | 10 different | EDA (199) | Ectodysplasin A | Q92838 | Cytokine |
| dysplasia (HED) | genes linked | | | | |
| | to this | | | | |
| | disorder, | | | | |
| | so far. | | | | |
| Iminoglycinuria | SLC36A2; | SLC36A2 (1) | Solute carrier family | Q495M3 | Membrane |
| | SLC6A18; | | 36 member 2 | | transporter |
| | SLC6A19; | | | | |
| | SLC6A20 | | | | |
| Li-Fraumeni syndrome | CDKN2A; | TP53 (417) | Tumor protein p53 | P04637 | Tumor |
| sarcoma, breast, | CHEK2; | | | | suppressor, |
| leukemia, and adrenal | MDM2; | | | | gene |
| gland (SBLA) syndrome | TP53 | | | | regulation |
| Long chain 3- | HADHA | HADHA (35) | Hydroxyacyl-CoA | P40939 | Enzyme |
| hydroxyacyl-CoA | | | dehydrogenase | | |
| dehydrogenase | | | trifunctional | | |
| deficiency (LCHAD) | | | multienzyme complex | | |
| | | | subunit alpha | | |
| Lynch syndrome | 11 different | MSH2 (34) | DNA mismatch repair | P43246 | DNA repair, |
| | genes linked | | protein Msh2 | | binds DNA, |
| | to this | | | | ATPase |
| | disorder | | | | |
| | so far | | | | |
| Marfan syndrome A | FBN1; | FBN1 (1893) | Fibrillin 1 | P35555 | Structural |
| | TGFBR2 | | | | protein, |
| | | | | | extracellular |
| | | | | | matrix |
| Maternal | PAH | PAH (690) | Phenylalanine | P00439 | Enzyme |
| phenylketonuria/ | | | hydroxylase | | |
| Phenylketonuric | | | | | |
| embryopathy | | | | | |
| Medium chain acyl-CoA | ACADM | ACADM | Acyl-CoA | P11310 | Enzyme |
| dehydrogenase | | (136) | dehydrogenase | | |
| deficiency (MCADD) | | | medium chain | | |
| Mucolipidosis type III | GNPTAB | GNPTAB (68) | N-acetylglucosamine | Q3T906 | Enzyme |
| (ML3) alpha/beta | | | 1 phosphate | | |
| | | | transferase, Subunits | | |
| | | | alpha and beta | | |
| Mucopolysaccharidosis | GALNS | GALNS (269) | Galactosamine (N- | P34059 | Enzyme |
| type 4A (MPS4A)/Morquio | | | acetyl)-6-sulfatase | | |
| disease type A | | | | | |
| Multiple endocrine | RET | RET (130) | Ret proto-oncogene | P07949 | Receptor |
| neoplasia type 2 | | | receptor tyrosine | | tyrosine |
| | | | kinase | | kinase |
| Multiple epiphyseal | COL2A1; | COMP (155) | Cartilage oligomeric | P49747 | Structural |
| dysplasia (MED) | COL9A1; | | matrix protein | | protein |
| | COL9A2; | | | | |
| | COL9A3/ | | | | |
| | collagen | | | | |
| | type IX | | | | |
| | alpha 3 | | | | |
| | chain; | | | | |
| | COMP; | | | | |
| | KIF7; | | | | |
| | MATN3; | | | | |
| | SLC26A2 | | | | |
| Neurofibromatosis | NF1 | NF1 (1208) | Neurofibromin 1 | P21359 | Regulator of |
| type 1 (NF1)/Von | | | | | Ras GTPase |
| Recklinghausen | | | | | activity |
| disease | | | | | |
| Oculocutaneous | LRMDA; | TYR (352) | Tyrosinase | P14679 | Enzyme |
| albinism (OCA) | MC1R; | | | | |
| | OCA2; | | | | |
| | SLC24A5; | | | | |
| | SLC45A2; | | | | |
| | TYR; | | | | |
| | TYRP1 | | | | |
| Osteogenesis imperfecta/ | 15 different | COL1A1 | Collagen type I alpha | P02452, | Structural |
| brittle bone disease | genes linked | (547); | 1 chain, collagen type | P08123 | protein |
| | to this | COL1A2 | I alpha 2 chain | | |
| | disorder, | (466) | | | |
| | so far. | | | | |
| Pendred syndrome (PDS)/ | FOXI1; | SLC26A4 | Solute carrier family | O43511 | Membrane |
| Deafness with goiter | KCNJ10; | (404) | 26 member 4 | | transporter |
| | SLC26A4 | | | | |
| Phenylketonuria (PKU)/ | PAH | PAH (690) | Phenylalanine | P00439 | Enzyme |
| Phenylalanine | | | hydroxylase | | |
| hydroxylase deficiency | | | | | |
| (PAH deficiency) | | | | | |
| Proximal spinal | NAIP; | SMN1 (47) | Survival motor neuron | Q16637 | RNA splicing |
| muscular atrophy (SMA) | SMN1; | | protein | | |
| | SMN2 | | | | |
| Retinitis Pigmentosa | 82 different | RHO (204) | Rhodopsin | P08100 | G-protein |
| (RP) | genes linked | | | | coupled |
| | to this | | | | receptor |
| | disorder, | | | | |
| | so far. | | | | |
| Recessive X-linked | STS | STS (28) | Steroid sulfatase | P08842 | Enzyme |
| ichthyosis (XLI) | | | | | |
| Retinoblastoma | NMYC; | RB1 (292) | RB transcriptional | P06400 | Tumor |
| (RB bilateral (40% | RB1 | | corepressor 1 | | suppressor, |
| of cases) and | | | | | cell cycle |
| unilateral (60% of | | | | | regulation |
| cases-de novo mutation) | | | | | |
| Rett syndrome | MECP2 | MECP2 (246) | Methyl-CpG binding | P51608 | Binds to |
| | | | protein 2 | | methylated |
| | | | | | DNA, gene |
| | | | | | regulation |
| Sickle cell anemia | HBB | HBB (433) | Hemoglobin subunit | P68871 | Oxygen |
| | | | beta | | carrier |
| Sotos syndrome/cerebral | APC2; | NSD1 (228) | Nuclear receptor | Q96L73 | Enzyme |
| gigantism | NSD1; | | binding SET domain | | |
| | SETD2 | | protein 1 | | |
| Stargardt disease/ | ABCA4; | ABCA4 (789) | ATP binding cassette | P78363 | Membrane |
| Fundus flavimaculatus | CNGB3; | | subfamily A member 4 | | transporter |
| | ELOVL4; | | | | |
| | PROM1; | | | | |
| | PRPH2 | | | | |
| Stickler syndrome/ | COL11A1; | COL2A1 | Collagen type II alpha | P02458 | Structural |
| hereditary progressive | COL2A1; | (335) | 1 chain | | protein |
| arthroophthalmopathy | COL11A2; | | | | |
| | COL9A1; | | | | |
| | COL9A2; | | | | |
| | COL9A3; | | | | |
| | LOXL3 | | | | |
| Supravalvular aortic | ELN | ELN (25) | Elastin | P15502 | Structural |
| stenosis (SVAS) | | | | | protien |
| β-Thalassemia | HBB | HBB (434) | Hemoglobin B chain | P68871 | Oxygen |
| | | | | | carrier |
| Tibial muscular | TTN | TTN (53) | Titin | Q8WZ42 | Muscle |
| dystrophy/Upp myopathy | | | | | protein |
| Tuberous sclerosis | TSC1; | TSC2 (518) | Tuberin | P49815 | Tumor |
| complex/Bourneville | TSC2 | | | | suppressor, |
| syndrome | | | | | Regulation of |
| | | | | | mTORC1 |
| | | | | | signaling |
| Von-Hippel Lindau | VHL | VHL (218) | Von Hippel-Lindau | P40337 | Tumor |
| disease | | | tumor suppressor | | suppressor, |
| | | | | | role in E3 |
| | | | | | ubiquitin |
| | | | | | ligase |
| | | | | | complex |
| Von Willebrand | VWF | VWF (636) | Von Willebrand factor | P04275 | Collagen |
| disease | | | | | binding, |
| | | | | | chaperone for |
| | | | | | coagulation |
| | | | | | factor VIII |
| X-linked | ABCD1 | ABCD1 (425) | ATP binding cassette | P33897 | Membrane |
| adrenoleukodystrophy | | | subfamily D member 1 | | transporter |
| (ALD) | | | | | |

[2827] Accordingly, to treat one or more such diseases or disorders, in various aspects of the invention, one or more targeted polynucleotide sequence related to certain diseases and disorders, e.g., a genetic mutation, is contacted by a retron-based gene editing system disclosed herein; and a guide RNA, wherein the guide RNA comprises a complementary sequence to that of a targeted polynucleotide sequence.

[2828] In some embodiments, the guide RNA directs a programmable nuclease of a retron-based editing system to the target site or the targeted polynucleotide sequence; and optionally forms a ribonucleoprotein complex with the polypeptide and the guide RNA.

[2829] Additional therapeutic applications for the genome editing systems disclosed herein include base editing, prime editing, gene insertions and/or deletions.

[2830] Diagnostic applications for the genome editing system include probes, diagnostics, theranostics.

[2831] The editing system comprising the heterologous nucleic acid sequence can be used in a variety of applications, several non-limiting examples of which are described herein. In general, the editing system can be used in any suitable organism. In some embodiments, the organism is a eukaryote.

[2832] In some embodiments, the organism is an animal. In some embodiments, the animal is a fish, an amphibian, a reptile, a mammal, or a bird. In some embodiments, the animal is a farm animal or agriculture animal. Non-limiting examples of farm and agriculture animals include horses, goats, sheep, swine, cattle, llamas, alpacas, and birds, e.g., chickens, turkeys, ducks, and geese. In some embodiments, the animal is a non-human primate, e.g., baboons, capuchin monkeys, chimpanzees, lemurs, macaques, marmosets, tamarins, spider monkeys, squirrel monkeys, and vervet monkeys. In some embodiments, the animal is a pet. Non-limiting examples of pets include dogs, cats, horses, rabbits, ferrets, gerbils, hamsters, chinchillas, fancy rats, guinea pigs, canaries, parakeets, and parrots.

[2833] In some embodiments, the organism is a plant. Plants that may be transfected with an Cas12a editing system include monocots and dicots. Particular examples include, but are not limited to, corn (maize), sorghum, wheat, sunflower, potato, cotton, rice, soybean, sugarbeet, sugarcane, tobacco, barley, and oilseed rape, Brassica sp., alfalfa, rye, millet, safflower, peanuts, sweet potato, cassava, coffee, coconut, pineapple, citrus trees, cocoa, tea, banana, avocado, fig, guava, mango, olive, papaya, cashew, macadamia, almond, oats, vegetables, ornamentals, and conifers. Vegetables include, but are not limited to, crucifers, peppers, tomatoes, lettuce, green beans, lima beans, peas, and members of the genus Cucumis such as cucumber, cantaloupe, and musk melon. Ornamentals include, but are not limited to, azalea, hydrangea, hibiscus, roses, tulips, daffodils, petunias, carnation, poinsettia, and chrysanthemum.

[2834] In some embodiments, heterologous nucleic acid sequences can be added to the subject editing system to provide a cell with a heterologous nucleic acid encoding a protein or regulatory RNA of interest, a cellular barcode, a donor polynucleotide suitable for use in gene editing, e.g., by homology directed repair (HDR) or recombination-mediated genetic engineering (recombineering), or a CRISPR protospacer DNA sequence for use in molecular recording, as discussed further below. In embodiments relating to retron-based gene editing systems, such heterologous sequences may be inserted, for example, into the msr locus or the msd locus such that the heterologous sequence is transcribed by the retron reverse transcriptase as part of the msDNA product.

[2835] In some embodiments, the editing systems described herein may be used for research tools, such as kits, functional genomics assays, and generating engineered cell lines and animal models for research and drug screening. The kit may comprise one or more reagents in addition to the editing system, such as a buffer, a control reagent, a control vector, a control RNA polynucleotide, a reagent for in vitro production of the polypeptide from DNA, and adaptors for sequencing. A buffer can be, for example, a stabilization buffer, a reconstituting buffer, a diluting buffer, a wash buffer, or a buffer for introducing a polypeptide and/or polynucleotide of the kit into a cell. In some instances, a kit can comprise one or more additional reagents specific for plants. One or more additional reagents for plants can include, for example, soil, nutrients, plants, seeds, spores, Agrobacterium, a T-DNA vector, and a pBINAR vector.

### Production of Protein or RNA

[2836] In some embodiments, the single-stranded msDNA generated by the engineered retron of the invention can be used to produce a desired product of interest in cells.

[2837] In some embodiments, the retron is engineered with a heterologous sequence encoding a polypeptide of interest to allow production of the polypeptide from the retron msDNA generated in a cell. The polypeptide of interest may be any type of protein/peptide including, without limitation, an enzyme, an extracellular matrix protein, a receptor, transporter, ion channel, or other membrane protein, a hormone, a neuropeptide, an antibody, or a cytoskeletal protein, a functional fragment thereof, or a biologically active domain of interest. In some embodiments, the protein is a therapeutic protein, therapeutic antibody for use in treatment of a disease, or a template to fix a mutation or mutated exon in the genome.

[2838] Non-limiting examples of polypeptides of interest include: growth hormones, insulin-like growth factors (IGF-1), Fat-1, Phytase, xylanase, beta-glucanase, Lysozyme or lysostaphin, Histone deacetylase such as HDAC6, CD163, etc.

[2839] In other embodiments, the retron is engineered with a heterologous sequence encoding an RNA of interest to allow production of the RNA from the retron in a cell. The RNA of interest may be any type of RNA including, without limitation, a RNA interference (RNAi) nucleic acid or regulatory RNA such as, but not limited to, a microRNA (miRNA), a small interfering RNA (siRNA), a short hairpin RNA (shRNA), a small nuclear RNA (snRNA), a long non-coding RNA (lncRNA), an antisense nucleic acid, and the like.

### Recombineering

[2840] Recombineering (recombination-mediated genetic engineering) can be used in modifying chromosomal as well as episomal replicons in cells, for example, to create gene replacements, gene knockouts, deletions, insertions, inversions, or point mutations. Recombineering can also be used to modify a plasmid or bacterial artificial chromosome (BAC), for example, to clone a gene or insert markers or tags.

[2841] The engineered retrons described herein can be used in recombineering applications to provide linear single-stranded or double-stranded DNA for recombination. Homologous recombination may be mediated by bacteriophage proteins such as RecE/RecT from Rac prophage or Redobd from bacteriophage lambda. The linear DNA should have sufficient homology at the 5′ and 3′ ends to a target DNA molecule present in a cell (e.g., plasmid, BAC, or chromosome) to allow recombination.

[2842] The linear double-stranded or single-stranded DNA molecule used in recombineering (i.e. donor polynucleotide) comprises a sequence having the intended edit to be inserted flanked by two homology arms that target the linear DNA molecule to a target site for homologous recombination. Homology anns for recombineering typically range in length from 13-300 nucleotides, or 20 to 200 nucleotides, including any length within this range such as 13, 14, 15, 16, 17, 18, 19, 20, 22, 24, 26, 28, 30, 32, 34, 36, 38, 40, 42, 44, 46, 48, 50, 55, 60, 65, 70, 75, 80, 85, 90, 95, 100, 105, 110, 115, 120, 125, 130, 135, 140, 145, 150, 155, 160, 165, 170, 175, 180, 185, 190, 195, or 200 nucleotides in length. In some embodiments, a homology arm is at least 15, at least 20, at least 30, at least 40, or at least 50 or more nucleotides in length. Homology arms ranging from 40-50 nucleotides in length generally have sufficient targeting efficiency for recombination; however, longer homology arms ranging from 150 to 200 bases or more may further improve targeting efficiency. In some embodiments, the 5′ homology arm and the 3′ homology arm differ in length. For example, the linear DNA may have about 50 bases at the 5′ end and about 20 bases at the 3′ end with homology to the region to be targeted.

[2843] The bacteriophage homologous recombination proteins can be provided to a cell as proteins or by one or more vectors encoding the recombination proteins, such as the vector or vector system. In some embodiments, one or more vectors encoding the bacteriophage recombination proteins are included in the vector system comprising the engineered retron msr gene, msd gene, and/or ret gene sequences. Additionally, a number of bacterial strains containing prophage recombination systems are available for recombineering, including, without limitation, DY380, containing a defective 1 prophage with recombination proteins exo, bet, and gam; EL250, derived from DY380, which in addition to the recombination genes found in DY380, also contains a tightly controlled arabinose-inducible flpe gene (flpe mediates recombination between two identical frt sites); EL350, also derived from DY380, which in addition to the recombination genes found in DY380, also contains a tightly controlled arabinose-inducible ere gene (ere mediates recombination between two identical loxP sites; SW102, derived from DY380, which is designed for BAC recombineering using a galK positive/negative selection; SW105, derived from EL250, which can also be used for galK positive/negative selection, but like EL250, contain an ara-inducible Flpe gene; and SW106, derived from EL350, which can be used for galK positive/negative selection, but like EL350, contains an ara-inducible Cre gene. Recombineering can be carried out by transfecting bacterial cells of such strains with an engineered retron comprising a heterologous sequence encoding a linear DNA suitable for recombineering. For a discussion of recombineering systems and protocols, see, e.g., Sharan et al. (2009) Nat Protoc. 4(2): 206-223, Zhang et al. (1998) Nature Genetics 20: 123-128, Muyrers et al. (1999) Nucleic Acids Res. 27: 1555-1557, Yu et al. (2000) Proc. Natl. Acad. Sci U.S.A. 97 (11):5978-5983; herein incorporated by reference.

### Molecular Recording

[2844] In some embodiments, the heterologous sequence in the engineered retron construct comprises a synthetic CRISPR protospacer DNA sequence to allow molecular recording. The endogenous CRISPR Cas1-Cas2 system is normally utilized by bacteria and archaea to keep track of foreign DNA sequences originating from viral infections by storing short sequences (i.e., protospacers) that confer sequence-specific resistance to invading viral nucleic acids within genome-based arrays. These arrays not only preserve the spacer sequences but also record the order in which the sequences are acquired, generating a temporal record of acquisition events.

[2845] This system can be adapted to record arbitrary DNA sequences into a genomic CRISPR array in the form of “synthetic protospacers” that are introduced into cells using engineered retrons. Engineered retrons carrying the protospacer sequences can be used for integration of synthetic CRISPR protospacer sequences at a specific genomic locus by utilizing the CRISPR system Cas1-Cas2 complex. Molecular recording can be used to keep track of certain biological events by producing a stable genetic memory tracking code. See, e.g., Shipman etaL. (2016) Science 353(6298): aafl 175 and International Patent Application Publication No. WO/2018/191525; herein incorporated by reference in their entireties.

[2846] In some embodiments, the CRISPR-Cas system is harnessed to record specific and arbitrary DNA sequences into a bacterial genome. The DNA sequences can be produced by an engineered retron within the cell. For example, the engineered retron can be used to produce the protospacers within the cell, which are inserted into a CRISPR array within the cell. The cell may be modified to include one or more engineered returns (or vector systems encoding them) that can produce one or more synthetic protospacers in the cell, wherein the synthetic protospacers are added to the CRISPR array. A record of defined sequences, recorded over many days, and in multiple modalities can be generated.

[2847] In some embodiments, the engineered retron comprises an msd protospacer nucleic acid region or an msr protospacer nucleic acid region. In the case of a msr protospacer nucleic acid region, the protospacer sequence is first incorporated into the msr RNA, which is reverse transcribed into protospacer DNA. Double stranded protospacer DNA is produced when two complementary protospacer DNA sequences having complementary sequences hybridize, or when a double-stranded structure (such as a hairpin) is formed in a single stranded protospacer DNA (e.g., a single msDNA can form an appropriate hairpin structure to provide the double stranded DNA protospacer).

[2848] In some embodiments, a single stranded DNA produced in vivo from a first engineered retron may be hybridized with a complementary single-stranded DNA produced in vivo from the same retron or a second engineered retron or may form a hairpin structure and then used as a protospacer sequence to be inserted into a CRISPR array as a spacer sequence. The engineered retron(s) should provide sufficient levels of the protospacer sequence within a cell for incorporation into the CRISPR array. The use of protospacers generated within the cell extends the in vivo molecular recording system from only capturing information known to a user, to capturing biological or environmental information that may be previously unknown to a user. For example, an msDNA protospacer sequence in an engineered retron construct may be driven by a promoter that is downstream of a sensor pathway for a biological phenomenon or environmental toxin. The capture and storage of the protospacer sequence in the CRISPR array records the event. If multiple msDNA protospacers are driven by different promoters, the activity of those promoters is recorded (along with anything that may be upstream of the promoters) as well as the relative order of promoter activity (based on the relative position of spacer sequences in the CRISPR array). At any point after the recording has taken place, the CRISPR array may be sequenced to determine whether a given biological or environmental event has taken place and the order of multiple events, given by the presence and relative position of msDNA-derived spacers in the CRISPR array.

[2849] In some embodiments, the synthetic protospacer further comprises an AAG PAM sequence at its 5′ end. Protospacers including the 5′ AAG PAM are acquired by the CRISPR array with greater efficiency than those that do not include a PAM sequence.

[2850] In some embodiments, Cas1 and Cas2 are provided by a vector that expresses the Cas1 and Cas2 at a level sufficient to allow the synthetic protospacer sequences produced by engineered retrons to be acquired by a CRISPR array in a cell. Such a vector system can be used to allow molecular recording in a cell that lacks endogenous Cas proteins.

### Therapeutic Applications

[2851] Also provided herein are methods of diagnosing, prognosing, treating, and/or preventing a disease, state, or condition in or of a subject, using the engineered retron of the invention.

[2852] Generally, the methods of diagnosing, prognosing, treating, and/or preventing a disease, state, or condition in or of a subject can include modifying a polynucleotide in a subject or cell thereof using a composition, system, or component thereof of the engineered retron as described herein, and/or include detecting a diseased or healthy polynucleotide in a subject or cell thereof using a composition, system, or component thereof of the engineered retron as described herein.

[2853] In some embodiments, the method of treatment or prevention can include using a composition, system, or component of the engineered retron to modify a polynucleotide of an infectious organism (e.g. bacterial or virus) within a subject or cell thereof.

[2854] In some embodiments, the method of treatment or prevention can include using a composition, system, or component of the engineered retron to modify a polynucleotide of an infectious organism or symbiotic organism within a subject.

[2855] In some embodiments, the composition, system, and components of the engineered retron can be used to develop models of diseases, states, or conditions.

[2856] In some embodiments, the composition, system, and components of the engineered retron can be used to detect a disease state or correction thereof, such as by a method of treatment or prevention described herein.

[2857] In some embodiments, the composition, system, and components of the engineered retron can be used to screen and select cells that can be used, for example, as treatments or preventions described herein.

[2858] In some embodiments, the composition, system, and components thereof can be used to develop biologically active agents that can be used to modify one or more biologic functions or activities in a subject or a cell thereof.

[2859] In general, the method can include delivering a composition, system, and/or component of the engineered retron to a subject or cell thereof, or to an infectious or symbiotic organism by a suitable delivery technique and/or composition. Once administered, the components can operate as described elsewhere herein to elicit a nucleic acid modification event. In some embodiments, the nucleic acid modification event can occur at the genomic, epigenomic, and/or transcriptomic level. DNA and/or RNA cleavage, gene activation, and/or gene deactivation can occur.

[2860] The composition, system, and components of the engineered retron as described elsewhere herein can be used to treat and/or prevent a disease, such as a genetic and/or epigenetic disease, in a subject; to treat and/or prevent genetic infectious diseases in a subject, such as bacterial infections, viral infections, fungal infections, parasite infections, and combinations thereof, to modify the composition or profile of a microbiome in a subject, which can in turn modify the health status of the subject; to modify cells ex vivo, which can then be administered to the subject whereby the modified cells can treat or prevent a disease or symptom thereof; or to treat mitochondrial diseases, where the mitochondrial disease etiology involves a mutation in the mitochondrial DNA.

[2861] Also provided is a method of treating a subject, e.g., a subject in need thereof, comprising inducing gene editing by transforming the subject with the polynucleotide encoding one or more components of the composition, system, or complex or any of polynucleotides or vectors described herein of the engineered retron, and administering them to the subject.

[2862] Also provided is a method of treating a subject, e.g., a subject in need thereof, comprising inducing transcriptional activation or repression of multiple target gene loci by transforming the subject with the polynucleotides or vectors described herein, wherein said polynucleotide or vector encodes or comprises one or more components of composition, system, complex or component of the engineered retron, and comprising multiple Cas effectors.

[2863] Also provided is a method of treating a subject, e.g., a subject in need thereof, comprising inducing gene editing by transforming the subject with the Cas effector(s), and encoding and expressing in vivo the remaining portions of the composition, system, (e.g., RNA, guides), complex or component of the engineered retron. A suitable repair template may also be provided by the engineered retron as described herein elsewhere.

[2864] Also provided is a method of treating a subject, e.g., a subject in need thereof, comprising inducing transcriptional activation or repression by transforming the subject with the systems or compositions herein.

[2865] Also provided is a method of inducing one or more polynucleotide modifications in a eukaryotic or prokaryotic cell or component thereof (e.g. a mitochondria) of a subject, infectious organism, and/or organism of the microbiome of the subject. The modification can include the introduction, deletion, or substitution of one or more nucleotides at a target sequence of a polynucleotide of one or more cell(s). The modification can occur in vitro, ex vivo, in situ, or in vivo.

[2866] In some embodiments, the method of treating or inhibiting a condition or a disease caused by one or more mutations in a genomic locus in a eukaryotic organism or a non-human organism can include manipulation of a target sequence within a coding, non-coding or regulatory element of said genomic locus in a target sequence in a subject or a non-human subject in need thereof comprising modifying the subject or a non-human subject by manipulation of the target sequence and wherein the condition or disease is susceptible to treatment or inhibition by manipulation of the target sequence including providing treatment comprising delivering a composition comprising the particle delivery system or the delivery system or the virus particle of any one of the above embodiment or the cell of any one of the above embodiment.

[2867] Also provided herein is the use of the particle delivery system or the delivery system or the virus vector (in viral particle) of any one of the above embodiment or the cell of any one of the above embodiment in ex vivo or in vivo gene or genome editing; or for use in in vitro, ex vivo or in vivo gene therapy.

[2868] Also provided herein are particle delivery systems, non-viral delivery systems, and/or the virus particle of any one of the above embodiments or the cell of any one of the above embodiments used in the manufacture of a medicament for in vitro, ex vivo or in vivo gene or genome editing or for use in in vitro, ex vivo or in vivo gene therapy or for use in a method of modifying an organism or a non-human organism by manipulation of a target sequence in a genomic locus associated with a disease or in a method of treating or inhibiting a condition or disease caused by one or more mutations in a genomic locus in a eukaryotic organism or a non-human organism.

[2869] In some embodiments, target polynucleotide modification using the subject engineered retron and the associated composition, vectors, system and methods comprises addition, deletion, or substitution of 1-about 10k nucleotides at each target sequence of said polynucleotide of said cell(s). The modification can include the addition, deletion, or substitution of at least 1, 5, 10, 11, 12, 13, 14, 15, 16, 17, 18, 19, 20, 21, 22, 23, 24, 25, 26, 27, 28, 29, 30, 35, 40, 45, 50, 75, 100, 200, 250, 300, 500, 1000, 1500, 2000, 2500, 3000, 3500, 4000, 5000, 6000, 7000, 8000, 9000, 10,000 or more nucleotides at each target sequence.

[2870] In some embodiments, formation of system or complex results in cleavage, nicking, and/or another modification of one or both strands in or near (e.g. within 1, 2, 3, 4, 5, 6, 7, 8, 9, 10, 20, 50, or more base pairs from) the target sequence.

[2871] In some embodiments, a method of modifying a target polynucleotide in a cell to treat or prevent a disease can include allowing a composition, system, or component of the subject engineered retron to bind to the target polynucleotide, e.g., to effect cleavage, nicking, or other modification as the composition, system, is capable of said target polynucleotide, thereby modifying the target polynucleotide, wherein the composition, system, or component thereof, complex with a guide sequence, and hybridize said guide sequence to a target sequence within the target polynucleotide, wherein said guide sequence is optionally linked to a tracr mate sequence, which in turn can hybridize to a tracr sequence. In some embodiments, modification can include cleaving or nicking one or two strands at the location of the target sequence by one or more components of the composition, system, or component thereof.

[2872] In some embodiments, the engineered retron and the associated compositions, systems, vectors, uses, and methods of use, can be used to treat diseases of the circulatory system. In some embodiments, the treatment can be carried out by using an AAV or a lentiviral vector to deliver the engineered retron, composition, system, and/or vector described herein to modify hematopoietic stem cells (HSCs) or iPSCs in vivo or ex vivo. In some embodiments, the treatment can be carried out by correcting HSCs or iPSCs as to the disease using a composition, system, herein or a component thereof, wherein the composition, system, optionally includes a suitable HDR repair template (e.g., a template in the msDNA of the engineered retron).

[2873] In some embodiments, the treatment or prevention for treating a circulatory system or blood disease can include modifying a human cord blood cell. In some embodiments, the treatment or prevention for treating a circulatory system or blood disease can include modifying a granulocyte colony-stimulating factor-mobilized peripheral blood cell (mPB) with any modification described herein. In some embodiments, the human cord blood cell or mPB can be CD34+. In some embodiments, the cord blood cells or mPB cells modified are autologous. In some embodiments, the cord blood cells or mPB cells are allogenic. In addition to the modification of the disease genes, allogenic cells can be further modified using the composition, system, described herein to reduce the immunogenicity of the cells when delivered to the recipient. The modified cord blood cells or mPB cells can be optionally expanded in vitro. The modified cord blood cell(s) or mPB cells can be derived to a subject in need thereof using any suitable delivery technique.

[2874] The composition and system may be engineered to target genetic locus or loci in HSCs. In some embodiments, the components of the systems can be codon-optimized for a eukaryotic cell and especially a mammalian cell, e.g., a human cell, for instance, HSC, or iPSC and sgRNA targeting a locus or loci in HSC, such as circulatory disease, can be prepared. These may be delivered via particles, such as the lipid nanoparticle delivery system described herein. The particles may be formed by the components of the systems herein being admixed.

[2875] In some embodiments, after ex vivo modification the HSCs or iPCS can be expanded prior to administration to the subject. Expansion of HSCs can be via any suitable method such as that described by, Lee, “Improved ex vivo expansion of adult hematopoietic stem cells by overcoming CUL4-mediated degradation of HOXB4.” Blood. 2013 May 16; 121(20):4082-9. doi: 10.1182/blood-2012-09-455204. Epub 2013 Mar. 21.

[2876] In some embodiments, the HSCs or iPSCs modified are autologous. In some embodiments, the HSCs or iPSCs are allogenic. In addition to the modification of the disease genes, allogenic cells can be further modified using the composition, system, described herein to reduce the immunogenicity of the cells when delivered to the recipient.

[2877] In some embodiments, the engineered retron and the associated compositions, systems, vectors, uses, and methods of use, can be used to treat neurological diseases. In some embodiments, the neurological diseases comprise diseases of the brain and CNS.

[2878] Delivery options for the diseases in the brain include encapsulation of the systems in the form of either DNA or RNA into liposomes and conjugating to molecular Trojan horses for trans-blood brain barrier (BBB) delivery. Molecular Trojan horses have been shown to be effective for delivery of B-gal expression vectors into the brain of non-human primates. The same approach can be used to delivery vectors or vector systems of the invention. In other embodiments, an artificial virus can be generated for CNS and/or brain delivery.

[2879] In some embodiments, the engineered retron and the associated compositions, systems, vectors, uses, and methods of use, can be used to treat hearing diseases or hearing loss in one or both ears. Deafness is often caused by lost or damaged hair cells that cannot relay signals to auditory neurons. In some embodiments, the composition, system, or modified cells can be delivered to one or both ears for treating or preventing hearing disease or loss by any suitable method or technique known in the art, such as US20120328580 (e.g., auricular administration), by intratympanic injection (e.g., into the middle ear), and/or injections into the outer, middle, and/or inner ear; administration in situ, via a catheter or pump (U.S. 2006/0030837) and Jacobsen (U.S. Pat. No. 7,206,639). Also see US20120328580. Cells resulting from such methods can then be transplanted or implanted into a patient in need of such treatment.

[2880] In some embodiments, the engineered retron and the associated compositions, systems, vectors, uses, and methods of use, can be used to treat diseases in non-dividing cells. Exemplary non-dividing cells include muscle cells or neurons. In such cells, homologous recombination (HR) is generally suppressed in the G1 cell-cycle phase, but can be turned back on using art-recognized methods, such as Orthwein et al. (Nature. 2015 Dec. 17; 528(7582): 422-426).

[2881] In some embodiments, the engineered retron and the associated compositions, systems, vectors, uses, and methods of use, can be used to treat diseases of the eye.

[2882] In some embodiments, the engineered retron and the associated compositions, systems, vectors, uses, and methods of use, can be used to treat muscle diseases and cardiovascular diseases.

[2883] In some embodiments, the engineered retron and the associated compositions, systems, vectors, uses, and methods of use, can be used to treat diseases of the liver and kidney.

[2884] In some embodiments, the engineered retron and the associated compositions, systems, vectors, uses, and methods of use, can be used to treat epithelial and lung diseases.

[2885] In some embodiments, the engineered retron and the associated compositions, systems, vectors, uses, and methods of use, can be used to treat diseases of the skin.

[2886] In some embodiments, the engineered retron and the associated compositions, systems, vectors, uses, and methods of use, can be used to treat cancer.

[2887] In some embodiments, the engineered retron and the associated compositions, systems, vectors, uses, and methods of use, can be used in adoptive cell therapy.

[2888] In some embodiments, the engineered retron and the associated compositions, systems, vectors, uses, and methods of use, can be used to treat infectious diseases.

[2889] In some embodiments, the engineered retron and the associated compositions, systems, vectors, uses, and methods of use, can be used to treat mitochondrial diseases.

[2890] All publications, published patent documents, and patent applications cited herein are hereby incorporated by reference to the same extent as though each individual publication, published patent document, or patent application was specifically and individually indicated as being incorporated by reference.

### O. Sequences

### Sequence Summary Table

[2891] The following sequences form part of the specification.

| SEQ ID NO: | Description |
|---|---|
| 1-7257 | Table A Sequences (AA) - Retron reverse transcriptase |
| | amino acid sequences computationally discovered pursuant |
| | to Example 3 and tested/evaluated throughout the Examples |
| | (sequences included in Sequence Listing filed with the |
| | Specification identified as |
| | RTX009P1_Sequence_Listing_26Jul23.xml) |
| 7258-14498 | Table A Sequences (NT) - Retron reverse transcriptase |
| | nucleotide sequences computationally discovered pursuant |
| | to Example 3 and tested/evaluated throughout the Examples |
| | (sequences included in Sequence Listing filed with the |
| | Specification identified as |
| | RTX009P1_Sequence_Listing_26Jul23.xml) |
| 14499-19108 | Table B Sequences (NT) - Retron non-coding RNA |
| | (ncRNA) nucleotide sequences discovered pursuant to |
| | Example 3 and tested/evaluated throughout the Examples |
| | (sequences included in Sequence Listing filed with the |
| | Specification identified as |
| | RTX009P1_Sequence_Listing_26Jul23.xml) |
| 19109-19125 | Examples: Select RT and ncRNA sequences (sequence |
| | included in this Specification) |
| 19126-19211 | Examples: RNA sequences (sequence included in this |
| | Specification) |
| 19212-19217 | Examples: Primer sequences (sequence included in this |
| | Specification) |
| 19218-19221 | Examples: qPCR primer sequences (sequence included in |
| | this Specification) |
| 19222-12261 | Examples: RT variants (coding sequences) (sequence |
| | included in this Specification) |
| 12262-19364 | Examples: Plasmid sequences (sequence included in this |
| | Specification) |
| 19365-19398 | Table C - Retron reverse transcriptase consensus amino acid |
| | sequences for most of the phylogenetic clades identified in |
| | Table A (sequence included in this Specification) |
| Sequences disclosed | Table X - sequences disclosed in Mestre et al., Systematic |
| in reference | Prediction of Genes Functionally Associated with Bacterial |
| | Retrons and Classification of The Encoded Tripartite |
| | Systems, Nucleic Acids Research, Volume 48, Issue 22, 16 |
| | Dec. 2020, Pages 12632-12647, which is incorporated |
| | herein by reference in its entirety. |
| 19399-19401, 19420, | NLS sequences |
| 19529-19542 | |
| 19402-19415 | TALE related sequences |
| 19416 | Meganuclease |
| 19417 | RE cut site |
| 19418-19419, 19469-19528 | Linkers |
| 19421 | Kozak sequence |
| 19422-19453 | Table Y and related disclosure - exemplary nucleotide |
| | sequences of 5′ UTRs |
| 19454-19468 | Table Z - additional stop elements of linear mRNA |
| 19543-19926 | Table 31A - optimized ncRNA library |
| 19927-19930 | RTX_6342 ncRNAs |

### Retron Sequences

[2892] The instant Specification discloses and claims recombinant retrons and components thereof (e.g., recombinant ncRNAs and recombinant retron RTs), as well as genome modification systems comprising said recombinant retrons and/or recombinant components thereof. Without limitation, such systems include recombinant retron-based genome editing systems, recombineering systems, and cell-recording systems. The Specification also discloses and claims the various components and aspects making up the systems, as well as their uses and applications, including without limitation: (a) recombinant nucleic acid molecules encoding recombinant retrons and retron-based genome modification systems, (b) vector systems (including viral and non-viral) comprising one or more components of said retron-based genome modification systems, including all-DNA vector systems, all-RNA vector systems, and DNA/RNA vector systems, (c) delivery systems for delivering said vector systems and/or components of the retron-based genome modification systems (e.g., lipid particles, lipid nanoparticles, and other delivery vehicle formats), (d) formulations comprising any of the aforementioned components for delivery to cells and/or tissues, including in vitro, in vivo, and ex vivo delivery, (e) cells modified by the recombinant retron-based genome modification systems and methods described herein, and (f) methods of modifying cells by conducting genome editing, recombineering, or cell recording using the herein disclosed retron-based genome modification systems, (g) methods of making the recombinant retrons, retron-based genome modification systems, vectors, and formulations described herein, and (h) pharmaceutical compositions and kits for modifying cells under in vitro, in vivo, and ex vivo conditions.

[2893] The recombinant retrons and retron-based genome modification systems described herein can be made, in various embodiments, by introducing one or more modifications into a known retron, e.g., a retron that is publicly known or previous published (e.g., Table X) or novel retron sequences (Tables A and B, as identified in the Examples).

### Table X: Previously Known Retron Reverse Transcriptases

[2894] Table X provides non-limiting examples of 1928 retron reverse transcriptases that may be modified in accordance with the herein methods to obtain a recombinant retron reverse transcriptase for use in the compositions, systems, and methods described herein. These retron sequences were reported in Mestre et al., “Systematic Prediction of Genes Functionally Associated with Bacterial Retrons and Classification of The Encoded Tripartite Systems,” Nucleic Acids Research, Volume 48, Issue 22, 16 Dec. 2020, Pages 12632-12647, the contents of which are incorporated herein by reference. In some embodiments, the Table X retrons are meant to be excluded from the scope of the claimed subject matter.

Table A with Rows A1-A45: Novel Retron Reverse Transcriptase Sequences

[2895] Table A provides non-limiting examples of retron reverse transcriptases that may be modified in accordance with the herein methods to obtain a recombinant retron reverse transcriptase or use in the compositions, systems, and methods described herein.

[2896] In particular, Table A provides sequence identifiers corresponding to the novel retron RTs identified as a result of the computational discovery work described in the Examples. The table provides sequence identifiers corresponding to the contents of the Sequence Listing included as part of this Specification. The table includes both RT amino acid sequences and RT nucleic acid sequences. The table is organized into forty-five rows each of which represents those sequences forming a single phylogenetic clade of related retron RTs as determined by the computational work described in the Example 3.

| | Seq ID Nos (sequences presented in the Sequence Listing) | | Phylogenetic |
|---|---|---|---|
| Table | RT Amino Acid Sequence | RT Nucleic Acid Sequence | Clade |
| A1 | 3980-4178 | 11231-11429 | I-A |
| A2 | 4671-4825 | 11922-12075 | I-B1 |
| A3 | 4980-5143 | 12229-12392 | I-B2 |
| A4 | 367-368, 427-441, 494- | 7624-7625, 7684-7698, 7751- | I-C |
| | 521, 526-527, 536, 626, | 7778, 7783-7784, 7793, 7883, | |
| | 649, 660-668, 675, 679, | 7906, 7917-7925, 7932, 7936, | |
| | 687-692, 695, 697, 703, | 7944-7949, 7952, 7954, 7960, | |
| | 716, 721-722, 751-763, | 7973, 7978-7979, 8008-8020, | |
| | 767, 770-1411, 1456-1462 | 8024, 8027-8667, 8712-8718 | |
| A5 | 1529-1569 | 8784-8823 | I-D |
| A6 | 6697-6701 | 13943-13947 | II |
| A7 | 4179-4670 | 11430-11921 | II-A1 |
| A8 | 4884-4909 | 12134-12159 | II-A1 other |
| A9 | 6919-6972 | 14163-14215 | II-A2 |
| A10 | 2786-2866, 2887-2938 | 10039-10119, 10140-10191 | II-A3 |
| A11 | 4826-4863 | 12076-12113 | II-A4 |
| A12 | 4864-4875 | 12114-12125 | II-A4 fused |
| A13 | 6974-7002 | 14217-14244 | II-A5 |
| A14 | 2598-2600, 2759-2785 | 9851-9853, 10012-10038 | III |
| A15 | 2445-2582 | 9699-9836 | III-A1 |
| A16 | 1983-2158 | 9237-9412 | III-A2 |
| A17 | 1612-1982 | 8866-9236 | III-A3 |
| A18 | 2601-2678 | 9854-9931 | III-A4 |
| A19 | 2679-2758 | 9932-10011 | III-A5 |
| A20 | 3442-3603 | 10694-10855 | IV |
| A21 | 3604-3708 | 10856-10959 | V |
| A22 | 2939-3441, 3709-3979, | 10192-10693, 10960-11230, | VI |
| | 5177-5192 | 12426-12441 | |
| A23 | 7003-7033 | 14245-14275 | VII-A1 |
| A24 | 7054-7133 | 14296-14374 | VII-A2 |
| A25 | 7034-7049 | 14276-14291 | VIII |
| A26 | 6835-6918 | 14079-14162 | IX |
| A27 | 6823-6834 | 14068-14078 | X |
| A28 | 298-366, 369-373, 442- | 7555-7623, 2626-7630, 7699- | XI |
| | 493, 522-525, 528-535, | 7750, 7785-7792, 7794, 7808- | |
| | 537, 551-554, 557, 560- | 7811, 7814, 7817-7882, 7929- | |
| | 625, 672-674, 680-681, | 7931, 7937-7938, 7941-7943, | |
| | 684-686, 696, 698, 702, | 7953, 7955, 7959, 7980-7999, | |
| | 723-742, 764-766, 1412- | 8021-8023, 8668-8706, 8708- | |
| | 1450, 1452-1453, 1463- | 8709, 8719-8722, 8825-8831 | |
| | 1466, 1571-1577 | | |
| A29 | 374-426, 539-550, 555- | 7631-7683, 7796-7807, 7812- | XII |
| | 556, 558-559, 671, 682- | 7813, 7815-7816, 7928, 7939- | |
| | 683, 743, 745-750 | 7940, 800, 8002-8007 | |
| A30 | 5942-6665 | 13189-13911 | XIII |
| A31 | 1-297, 715, 1580-1603 | 7258-7554, 7972, 8834-8857 | XIV |
| A32 | 705-714 | 7962-7971 | XV |
| A33 | 6681-6694 | 13927-13940 | XVI |
| A34 | 6788-6803 | 14033-14048 | XVII |
| A35 | 1469-1526, 5147-5151 | 8725-8781, 12396-12400 | CRISPR- |
| | | | associated |
| A36 | 2159-2428 | 9413-9682 | Ec107-like |
| A37 | 646-648 | 7903-7905 | RT-atpase |
| A38 | 2592-2595 | 9846-9849 | RT-DUF4116 |
| A39 | 676-678, 717-720 | 7933-7935, 7974-7977 | RT-HTH |
| A40 | 538, 669, 704, 1454 | 7795, 7926, 7961, 8710 | RT-pddex |
| A41 | 670, 699-701 | 7927, 7956-7958 | RT-unk |
| A42 | 4917-4979 | 12167-12228 | Phage |
| A43 | 4910-4916 | 12160-12166 | Jumbophage |
| A44 | 5195-5941 | 12444-13188 | Outgroup |
| A45 | 627-645, 650-659, 693- | 7884-7902, 7907-7916, 7950- | unclassified |
| | 694, 744, 768-769, | 7951, 8001, 8025-8026, 8707, | |
| | 1451, 1455, 1467-1468, | 8711, 8723-8724, 8782-8783, | |
| | 1527-1528, 1570, 1578, | 8824, 8832-8833, 8858-8865, | |
| | 1579, 1604-1611, 2429- | 9683-9698, 9837-9845, 9850, | |
| | 2444, 2583-2591, 2596- | 10120-10139, 12126-12133, | |
| | 2597, 2867-2886, 4876- | 12393-12395, 12401-12425, | |
| | 4883, 5144-5146, 5152- | 12442-12443, 13912-13926, | |
| | 5176, 5193-5194, 6666- | 13941-13942, 13948-14032, | |
| | 6680, 6695-6696, 6702- | 14049-14067, 14216, 14292- | |
| | 6787, 6804-6822, 6973, | 14295, 14375-14498 | |
| | 7050-7053, 7134-7257 | | |

Table B with Rows B1-B45: Exemplary ncRNA Sequences

[2897] Table B provides non-limiting examples of retron ncRNA sequences that may be modified in accordance with the herein methods to obtain a recombinant retron ncRNA sequences for use in the compositions, systems, and methods described herein. The sequences were discovered by the method of Example 3.

[2898] In particular, Table B provides sequence identifiers corresponding to the novel retron RTs identified as a result of the computational discovery work described in the Examples. The table provides sequence identifiers corresponding to the contents of the Sequence Listing included as part of this Specification. The table is organized into forty-five rows each of which represent those sequences forming a single phylogenetic clade of related retron ncRNAs as determined by the computational work described in the Example 3.

[2899] In various embodiments and in the claims, the disclosure provides recombinant retron-based genome editing systems which comprise combining in a cell through various delivery strategies a retron RT together with an ncDNA. In various aspects, the retron RTs and the ncDNA constituting the recombinant retron-based genome editing system can be based on pairing together such components that are naturally found associated to one another in nature, i.e., sourced from the same bacterial species. These are referred to as the “cognate” pairings of retron RT and retron ncRNA. A cognate pairing of a ncRNA and an RT (amino acid or nucleotide sequence) can easily be identified from information presented/included in the Sequence Listing by identifying those ncRNA sequences from Table B and those RT sequences from Table A have the same genomic accession number that is indicated for each sequence in the Sequence Listing. In various other aspects, the retron RT component and the ncRNA component can be from different bacterial species, i.e., are not found together in nature as cognate pairs. In still other embodiments, the retron RT component and the ncRNA component can both be from the same phylogenetic functional type (e.g., Type I-A, Type I-B1, Type I-B2, Type IC, etc.). For example, a recombinant retron-based genome editing system may be comprised of a retron RT from Type I-A (i.e., SEQ ID Nos: 3980-4178 for AA and SEQ TD Nos: 11231-11429 for NT-see Table A) and a retron ncRNA also from Type I-A (i.e., SEQ TD Nos: 16886-17078—see Table B).

| | Seq ID Nos (sequences presented | Phylogenetic |
|---|---|---|
| Table | in the Sequence Listing) | Clade |
| B1 | 16886-17078 | I-A |
| B2 | 17478-17622 | I-B1 |
| B3 | 17677-17756 | I-B2 |
| B4 | 14831-14833, 14838, 14847, 14850-15460 | IC |
| B5 | N/A | 1D |
| B6 | N/A | II |
| B7 | 17079-17477 | II-A1 |
| B8 | 17660-17676 | II-A1 other |
| B9 | 19031-19080 | II-A2 |
| B10 | 16414-16516 | II-A3 |
| B11 | 17623-17659 | II-A4 |
| B12 | N/A | II-A4 fused |
| B13 | 19081-19108 | II-A5 |
| B14 | 16397-16413 | III |
| B15 | 16195-16320 | III-A1 |
| B16 | 15779-15925 | III-A2 |
| B17 | 15476-15778 | III-A3 |
| B18 | 16321-16366 | III-A4 |
| B19 | 16367-16396 | III-A5 |
| B20 | 16705-16814 | IV |
| B21 | 16815-16885 | V |
| B22 | 16517-16704 | VI |
| B23 | N/A | VII-A1 |
| B24 | N/A | VII-A2 |
| B25 | N/A | VIII |
| B26 | 18949-19030 | IX |
| B27 | N/A | X |
| B28 | 14657-14716, 14778-14824, 14834, | XI |
| | 14835-14836, 14839, 15461-15475 | |
| B29 | 14717-14777, 14841-14846 | XII |
| B30 | 18413-18936 | XIII |
| B31 | 14499-14656 | XIV |
| B32 | N/A | XV |
| B33 | 18939 | XVI |
| B34 | N/A | XVII |
| B35 | N/A | CRISPR- |
| | | associated |
| B36 | 15926-16178 | Ec107-like |
| B37 | N/A | RT-atpase |
| B38 | N/A | RT-DUF4116 |
| B39 | N/A | RT-pddex |
| B40 | N/A | RT-HTH |
| B41 | 14837 | RT-unk |
| B42 | N/A | Phage |
| B43 | N/A | Jumbophage |
| B44 | 17757-18412 | Outgroup |
| B45 | 14825-14830, 14840, 14848-14849, | unclassified |
| | 16179-16194, 18937-18938, 18940-18948 | |

### Table C: Consensus RT Amino Acid Sequence

[2900] Table C provides a consensus amino acid sequence for most of the phylogenetic types of RT identified in Table A.

| RT Type | | |
|---|---|---|
| (based | | |
| on Phylo- | | SEQ |
| genetic | | ID |
| Clade) | Consensus Amino Acid Sequence | NO: |
| TypeIA | YKVYXIPKRXXGXRXIAXPXXXLKXXQXXX | 19365 |
| | XXXXXXXXXXHXXXXAYXXXXXIKXNAXXH | |
| | XXXXYXLKXDXXXFFNSIXXXXXXXXXXXX | |
| | XXXXXXXXXXXXXXXXFWXXXXXXXXXLXL | |
| | SXGAPSSPXXSNXXMXXFDXXXXXXCXXXX | |
| | XXYXRYADDXTFSTXXXXXLXXXPXXXXXX | |
| | LXXXXXXXXXXNXXKTXFSSKAHNRHXTGX | |
| | TXXNXXXXSXGRXXKRXIXXLXXXXXXX | |
| TypeIB1 | XXXXXXXXXXXXXXXXXLKXXXXFXXXXXX | 19366 |
| | XXXXXXXXXVXSYRKGXXXXXAVXXHXXXX | |
| | XFXXXDXXXFFXSIXXXXXXXXXXXXXXXX | |
| | PXXDXXXXXXXXXXXXXXXXXLPXGXXTSP | |
| | XXSNXXLXXFDXXXXXXCXXXXXXYTRYXD | |
| | DXIXSXXXXXXXXXXXXXXXXXLXXXXXXX | |
| | XXXNXXKXKXXXXGXXXKXLGXXILPXGXX | |
| | XXXXXXKXXXEXXXXXXXXX | |
| TypeIB2 | XXXXXXXXXXXXXXXXXXXXXXXXXXXXXX | 19367 |
| | XXXXXXXXXXXXXXXXXXXXXSYXXXXXXH | |
| | XXXXXXXRXDIXXFFXSIXXXXXXXXXXXX | |
| | XXXXXXXXXXXXXXXXXXXXXXXXXXXXXX | |
| | XXXXPXGXXXSPXXSNXXFRXXDXXIXXXC | |
| | XXXXXXYXRYADDXLFSXXXXXXXXXXXXF | |
| | XXXIXXXXXXXXXXXNXXKXXXXXXXXSLN | |
| | GXXXXXXXXXXXXXXXXXXXXXXXXXXXXX | |
| | X | |
| TypeIC | YXXFXIXKXXGXXRXIXAPXXXLKXXQXXL | 19368 |
| | XXXLXXXXXXXXXXXXXXXXXXHXFXXXXX | |
| | IXXNAXXHXXXXXVXNXDLXXFFXXXXFGR | |
| | VXGXFXXXXXFXXXXXXAXXXAQXXCXXXX | |
| | LPQGXPXSPXIXNXIXXXLDXXXXXXXXXX | |
| | XXYXRYADDXTFSTXXXXXXXXXXXXXXXX | |
| | XXXXXXXXXXXXXXGFXXNXXKTRXXXXXX | |
| | RQXVTGLXVNXXXNXXXXYXXXXRXXXXXX | |
| | XXX | |
| TypeID | YXXXXXXKKXGGXRXIXXPXXXLXXXQXXL | 19369 |
| | XXXLXXXYXXXXXXXXXGFXXXXXXXXXXX | |
| | XIXXNAXXIIXXKXXXLNXDXXXFFXSIXX | |
| | XXXXXXXXXXXFXXXXXXAXXXXLLXTXXX | |
| | XLPXGAPXSPXXSNXXCXXXDXXLXXXXXX | |
| | XXXXYXRYADDLTFSXXXXXXXXXXXXXXX | |
| | XIXXXXFXXNXKKXRXXXXXXXQXVTGXXV | |
| | NXKXNXXRXXXXXXRAXXHXXXXX | |
| TypeIIAl | YKXXXIXKXXGXXRXIXXPXXXXKXXQXXX | 19370 |
| | XXXXXXXXXXHXXAXAYXXXXXIXXNAXXH | |
| | XXXXXXXXXDFXXFFXSIXXXXXXXXXXXX | |
| | XXXXXXXXXXXXXXXXXXXXXXXXXXXXLX | |
| | IGXPXSPXXSNXXXXXXDXXXXXXXXXXXX | |
| | XYXRYADDXXXSXXXXXXXXXXXXXXXXXX | |
| | XXXXXXXXXXNXXKTXXXXXXXXXXXTGXX | |
| | XXXXXXXXXGRXXKRXXXXXXXXXXXX | |
| TypeID | YXXXXXXKKXGGXRXIXXPXXXLXXXQXXL | 19371 |
| | XXXLXXXYXXXXXXXXXGFXXXXXXXXXXX | |
| | XIXXNAXXHXXKXXXLNXDXXXFFXSIXXX | |
| | XXXXXXXXXXFXXXXXXAXXXXLLXTXXXX | |
| | LPXGAPXSPXXSNXXCXXXDXXLXXXXXXX | |
| | XXXYXRYADDLTFSXXXXXXXXXXXXXXXX | |
| | IXXXXFXXNXKKXRXXXXXXXQXVTGXXVN | |
| | XKXNXXRXXXXXXRAXXHXXXXX | |
| TypeIIA1 | YXXXXXXXXXXXXXXXXPXXXLKXXQXWXX | 19372 |
| | XXXXXXXXXXXXXXAYXXXXSXXXXAXXHX | |
| | XXXXXXXXDIXXFFXSXXXXXXXXXXXXXX | |
| | XXXXXXXXXXXXXXXXXXXXXXLXXGXXXS | |
| | PXIXNXXMXXXDXXXXXXXXXXXXXYXRYX | |
| | DDIXXSSXXXIXXXXXXXXXXXLXXXXXXX | |
| | NXXKTXXXXXXXXXXXTGXXXXXXXXXXGX | |
| | XXXXXXXXXXXXXXXX | |
| TypeIIA2 | YRXFXXXKXXGXXRXIXXPRXFXKXXQXXX | 19373 |
| | XDXXLXXLXXHXXXXXXXXXXSXXXNAXXH | |
| | XXXXXXXXXDIXXXFXXIXXXXXXXXXXXX | |
| | XXXXXXXXXXXXXXTXXXXLPQGAPTSPXX | |
| | SNXXLXXFDXXXXXXXXXXXXXYXRYXDDX | |
| | TXSXXXXXXXXXXXXXXXXXLXXXXXXXNX | |
| | XKXRXXXXXXXQXVTGXXXNXXXXPXRXXR | |
| | XXXRAXXXXAXX | |
| TypeIIA3 | YXXXXXXXXXXXXRXIXXPXXXLKXXQXWI | 19374 |
| | LXXILXXXXXSXXXXXFXXXXXXXXNAXXH | |
| | XXXXXXLXXDXXXFFXXXXXXXVXXXFXXX | |
| | GYXXXXXXXLXXXCXXXXXLPQGXXXSPXX | |
| | XNLXXXXLDXRXXXXXXXXXXXYTRYADDX | |
| | XXSXXXXXXXXXXXXXXXXIXXXEXXXXNX | |
| | XKXXXXXXXXXXXXTGXXXXXXXXXXXXXX | |
| | XXXRXXXXXXXX | |
| TypeIIA4 | XXXXXIXXXXXXRKIXTXXXXXXXXXXXXX | 19375 |
| | XXXXXXXXXXXXXFXKAYXXXXSIXXNAXX | |
| | HMYNDXFXXXDIXXFFXXIXHXXLXXXLXX | |
| | XXXXXXXXXXXXXXXXXXXXXXXXXXXGLX | |
| | XGXXXSPXLXNXYXKXFDXIXYGXLKXXXX | |
| | XXXIYTRYADDXXISFKXXXXXXXXXXXIX | |
| | XXXXXXLXXXXLXXNXXKXXXXXXXXSNHV | |
| | XITGXXIXXXXXXXRXXXVGXXXXXXLXXX | |
| | AXXXXXX | |
| TypeIIA4 | XXXXXXXXXXKXRXXXXXXXXXXGXXXXXX | 19376 |
| | HXXXXXXXXXXXXXXXXSYAYXXXXSIXXC | |
| | XXXHXXXXXFXKXDIXXFFNSIXXXXLXXX | |
| | XXXXXXXXXXXXXXXXXXXXXXXXXXXXPX | |
| | GLXXSPXXSDXYXXXXXXXXXXXXXXXXXX | |
| | YTRYADDIXISXXXXXXXXXXXXIXXXXXX | |
| | XLXXXXLXXNXXKXXXXXXXXXXXXXXXXG | |
| | XNIXXXXXXXXXXVGXXXXXXXXXXXXXXX | |
| | XX | |
| TypeIIA5 | YRXFXXXKXXGXXRXIXXPXTYLKVXQWWI | 19377 |
| | XDXIXXXXXXXXXXXGFXXGXXXXXNAXXH | |
| | XXXXXXLNXDXXXFFXSXXXXXXXXXFXXX | |
| | GXXXXXXXXLXXLXXXXXXXPXGAPTSPXX | |
| | XNXXXXXXDXXLXXXXXXXXXXYXRYADDX | |
| | TFSXXXXXXXXXXXXXXXXXXXXGFXXXXX | |
| | KTXXXGXXXRXXVTGXXXNXXXXXXXXXRX | |
| | XXRXXXHXXXXX | |
| TypeIIIA1 | YRXXXIXKXXGXXRXIXEPLPXLKXIQXWI | 19378 |
| | LXXILXXXXXSXXAKAXXXXXXXXXNXXXH | |
| | XXXXXXXXXDXXXFFXXIXXXXXXXXFXXX | |
| | GYXXXXXXXLXXLCXXXXXLPQGAPTSPXL | |
| | SNXXXXXXDXXXXXXXXXXXXXYTRYADDX | |
| | XFSGXXXXXXXXXXXXXXXXXXXXXXNXXK | |
| | XXXXXXXXXQXVTGXVVNXKXQXXXXXRXX | |
| | XRXXXXXIXK | |
| TypeIIIA2 | YRXFXIXKXXGGXRXIXXPXXXLXXXQXXI | 19379 |
| | XXXILXXXXXXXXXXXXXXXXSXXXNAXXH | |
| | XXXXXXLKXDXXXFFXSIXXXXXXXXFXXX | |
| | GYXXXXXXXLXXXCXXXXXLPQGAXTSPXL | |
| | SNXXXXXXDXXLXXXXXXXXXXYXRYADDX | |
| | XXSGXXXXXXXXXXXXXXXXXXGXXXNXXK | |
| | XXXXXXXXXXIXTGXXXXXXXXXXPXXXXR | |
| | XXXXXXXXXXXX | |
| TypeIIIA3 | YXXXXXXXXXXXXRXIXXPXXXLXXXQXXI | 19380 |
| | XXXXLXXXXXHXXXXAXXXXXXXXXXAXXH | |
| | XXXXWXXKXDXXXFFXXXXEXXXXXXFXXX | |
| | GYXXLXXXEXARXCTXXXXXXXXXXXXXXX | |
| | XXXXXXXXXXXXGXLPQGAPTSXXLXNLXX | |
| | XXXDXXXXXXAXXXXXXYTRYXDDXXXSXX | |
| | XXXXXXXXXXXXXXXXXXXXXXGXXXXXXX | |
| | XXXXXPGXXXXVLGLXVXXXXXXLXXXXXX | |
| | XXXXHXXXXXXX | |
| TypeIIIA4 | YXXXXXXKXXGGXRXIXXPXXXLXXXQXWI | 19381 |
| | XXNILXXXXXXXXXXGFXXXXSIXXNAXXH | |
| | XXXXXXLXXDLXXFXXXIXXXXXXXXFXXX | |
| | GYXXXXXXXXAXXXTXXXXXXXXXXXXXXX | |
| | XXXXXLPQGAPXSPXXXNXXXXXXDXRXXX | |
| | XXXXXXXXYXRYADDXTFSXXXXXXXXXXX | |
| | XXXIXXXEXXXXNXXKXXXXXXXXXXXVTG | |
| | LXXXXXXXXXXXXXXXXXXXXXXCXK | |
| TypeIIIA5 | YXXXXIXKXXGXXRXXXXPXXXLKXXQXWI | 19382 |
| | LXXILXXXXXXXXXXGFXXXXSIXXNAXXH | |
| | XXXXXXXXXDXXXFFPXIXXXXXXXXFXXX | |
| | GYXXXXXXXXXXXCTXXXXLPQGXPXSPXX | |
| | XNXXXXXXDXRXXXXXXXXXXXYXRYADDX | |
| | TXSGXXXXXXXXXXXXXIXXXXXXXXNXXK | |
| | XXXXXXXXXQXVTGXXVNXXXXXXXXXXXX | |
| | XXXXIYXXXKX | |
| TypeIIIunk | YXXXXXXXXXXXXXXXXPXXXLKXXQXWIX | 19383 |
| | XNILXXXXXXXXXXXXXXXXSIXXNAXXHX | |
| | XXXXXXXXDIXXFFXSIXXXXXXXXFXXXX | |
| | XXXXXXXXXXXXXXXXXXXXQGXPXSPXXX | |
| | NXXXXXXDXXXXXXXXXXXXXYXRYADDXX | |
| | XSXXXXXXXXXXXXXXXXXXXXXXXXNXXK | |
| | TXXXXXXXXXXXTGXXXXXXXXXXXXXXXX | |
| | XXXEXXYCXX | |
| TypeIV | YXXXXXXKXXGXXRXXXXPXXXXRXXQXRI | 19384 |
| | NXRIFXXXXXWPXXXXGSXPXXXXXXXXXX | |
| | XDYXXCAXXHCXXKXXLKXDIXXFFXNXXX | |
| | XXVXXXFXXXXXXXXXXXXXXXXCXXXXXX | |
| | XQGXXTSSYXAXLXLXXXEXXXXXXXXXKX | |
| | LXYTRXVDDITXSSXXXXXXFXXXXXXXXX | |
| | MLXXXXLPXNXXKXXXXXXXXXXLXVHGLR | |
| | XXXXXPRXPXXEXXXIRXXVXXXXXX | |
| TypeV | YXXXXXXXXXXXKXRXXXXPXXXLKXXQKR | 19385 |
| | INXXIFXXXXXPXYLXGGXXXXXXXRDYXX | |
| | NXXXHXXXXXXIXLDXXXFYXXIXXXXVXX | |
| | XXXXXXXFXXXVXXXLXXLXTXXXXXPQGX | |
| | CTSSYXANLXXXXXEYXXXXXXXXXXXXYX | |
| | RLLDDXTXSXXXXXXXXXXXXXXXXXXXXX | |
| | XXXLXXXXXXXXXXXXXXXXXXXXVTGLWX | |
| | XXXXPXXXXXXRXXIRXXVXXCXXX | |
| TypeVI | XXXXXXXXXXXXXRXXXXXXXXLXXXXXXX | 19386 |
| | XXXXXXXXXPXXXXXXXXXXXXXXNAXXHX | |
| | XXXXXXXXDXXXFXXXXXXXXXXXXXXXXX | |
| | XXXXXXXXXXXXXXXXXXXXXXGXXXSXXX | |
| | XXXXXXXXXXXXXXXXXXXXXXXXXXXDDX | |
| | XXSXXXXXXXXXXXXXXXXXXXXXXXXXXX | |
| | KXXXXXXXXXXXXTGXXXXXXXXXXXXXXX | |
| | XXXXXXXXXXXXX | |
| TypeVIIA1 | XXXXXXXXXXXXXXXRXVWEXXXXXXXXXK | 19387 |
| | XXXRXXXXFXXXXXXXXPHXXXXGYXXGRX | |
| | XRXNAXXHXGXXXXXXXDXXXFFPSIXXXR | |
| | XXXXXXXXGXXXXXXXXLXXFXTIXXXLPL | |
| | GLXXSPXXXNXXXXXXDXXLXXLAXXXXXX | |
| | YXRYXDDXXXSXXXXXPXXXXXXXXXXXXX | |
| | FXXXXXKXXXSKXGQXHXVTGLSXXXXXXP | |
| | HXPRXXKXXLRQELXXXXXX | |
| TypeVIIA2 | XXXXXXXXXXXXXRXXXXXXXXXXXXXKXX | 19388 |
| | XXXXXXXXXXXXXXGFXXXXXXXXNAXXHX | |
| | XXXXXXXXDXXXFFXXIXXXXXXXXXXXXX | |
| | XXXXXXXXXXXXXTXXXXLXXGXXTSPXXX | |
| | NXXXXXXDXXXXXXXXXXXXXXRYXDDXXF | |
| | SXXXXXXXXXXXXXXXXXXXXXXXXNXXKX | |
| | XXXXXGXXQXVTGLXXXXXXXPRXXXXXKX | |
| | XXRXXXXXXXX | |
| TypeVIII | YXXXXXXKRXXXXXGEXRXVXXAXXXXXXX | 19389 |
| | XHRXXXXXXXXXXXFGXHVQGFXXXRSXXX | |
| | NAXXHXXXXXXXHADIXXFFXXITXXQVXX | |
| | XXXXXXXXXXXAXXXAXXCTIDGXLXQGTR | |
| | CSPXXXNXVCXXXDXXXLXLAXXXXXXXXR | |
| | YADXXTFSGXXXXXXXXXXXXXXXXGFXLR | |
| | XXXCYXQXXGXXQXVTGLXVXDXXXPRLPK | |
| | XXKXXLRLXXXXXXKX | |
| TypeIX | YRXFXIXXXXXXXRXIXAPXVXLKXXQXWX | 19390 |
| | XXXXXXXXXXXXXVXGFXXGXXXXXAAXXH | |
| | XXAXWXXSXDXXXFFXXXXXXXXXXXLXXX | |
| | GYXXXXXXXXXXXXXXXXXLXQGXPXSPXX | |
| | SNXXXXXXDXXXXXXXXXXXXXXXRYADDX | |
| | XFSGXXXXXXXXXXXXXXXXXXXXWXXXXX | |
| | XXXXXXXPXRLKVHGLLVXXXXXXLTKGYR | |
| | NXXRAXXHXXXXX | |
| TypeX | YXXXPXXXXXXXXRWIEAPXXXLKXXQRXX | 19391 |
| | LXXXXYXXXXXXXAHGFXXGRSIXXNAXXH | |
| | XGXXXVVXXDXXXFFPXXXXXXXXXXXXXX | |
| | XXXXXXXXXXXXLXXXXXXLPQGAPTSPXL | |
| | XNLVXXXXDXXLXXXAXXXXXXYTRYADDL | |
| | XFSXXXXXXXXXXXXXXXXXXIXXXXGXXX | |
| | XXXKXXXXXXXQRQXVTGXVVNXXXXLPXX | |
| | XRRXLRAXXXXXXXX | |
| TypeXI | YXXFXIXKXXGXXRXIXXPXXXLKXXQXXX | 19392 |
| | XXXLXXXXXXXXXXXGFXXXXXXXXNAXXH | |
| | XXXXXXXNXDLXXFFXXIXXXRXXXXXXXX | |
| | XXXXXXXXAXXXAXXXXXXXXLPQGAPXSP | |
| | XXSNXXXXXXDXXLXXXAXXXXXXYTRYAD | |
| | DXTXSXXXXXXXXXXXXXXXXXXXXXXXXX | |
| | XXXXXXXXFXXNXXKXXXXXXXXXXXVTGX | |
| | XXNXXXNXXRXXXXXXXXXXXXXXXX | |
| TypeXII | YXXFXXXKXXGGXRXIXAPXXXLXXXQXXX | 19393 |
| | XXXXXXXXXXXXXAHGFXXXXSXXXNAXXH | |
| | XXXXXXXXXDXXXFFPXXXXXRVXGXFXXX | |
| | GYXXXXAXXXAXXXTXXXXXXXXXXXXXXX | |
| | XXXXXRXLPQGAXXSPXXXNXXXXXLDXRL | |
| | XXXAXXXXXXYTRYADDXTFSXXXXXXXXX | |
| | XXXXXXXXXXXXXEGFXXXXXKXXXXXXXX | |
| | XQXVTGXXVNXXXXXXRXXXXXXRAXXXXX | |
| | XXX | |
| TypeXIII | YXXFXXPKXXGGXRXIXAPXXXLXXXQXXX | 19394 |
| | LXXXXXXXXXXXXAIIGFXXXXSXXXNAXX | |
| | IIXXXXXXXXXDXXXFFPXXXXXRVXGXFX | |
| | XXGYXXXXAXXXXLXXTXXXXXXXXXXXXX | |
| | XXXXXXXRXLPQGAXXSPXXXNXXXXXLDX | |
| | RLXXXAXXXGXXYTRYADDLTFSXXXXXXX | |
| | XXXXXXXXXXXXXXXEGFXXXXXKXXXXXX | |
| | XXQXVTGXVVNXXXXXXRXXXXXXRAXXXX | |
| | XXXX | |
| TypeXIV | YXXFXIXKKXGXXRXIXXPXXXLXXXXXXX | 19395 |
| | XXXXXXXXXXXXXXXGFXXXXSXXXNAXXH | |
| | XXXXXVXNXDLXDFFXSXXXXRXXXXXXXX | |
| | PXXXXXXXXAXXXXXLCXXXXXXXXXXXXX | |
| | LPQGXPXSPXXXNXXCXXLDXXLXXXAXXX | |
| | XXXYXRYADDXTFSXXXXXXXXXXXXXXXX | |
| | XXXXXXXXXNXXKTRXXXXXXRQEVTGXXV | |
| | XXXXNVXXXYXXXXRXXLXXWXXX | |
| TypeXV | YXXFXXXKKSGGXRXIXXPXKSLXIXQXKL | 19396 |
| | SQXLYXXYXPXXXVHGXXXXXSIXTNAXXH | |
| | XXKXFXLNXDIXDFFXSINXGRVRGXFIAX | |
| | PYXLXXXVATXXAXICCXXNKLPQGAPXSP | |
| | IXSNLICXXXDXELQXFAXXXXXXYTRYAD | |
| | DITXSXXXXXLPXXLXXXXXXXXXXXXLGX | |
| | ELXXIIXXNGFXINXXKXRLXYXXQXQXVT | |
| | GLXVNXXVNVXRKYIRNXXXXLHAWEKX | |
| TypeXVI | YXXFXXXKXXGXXRXIXAPXXXLKXXQXXI | 19397 |
| | LXXXLXXVXLXXXAXGFRXXRSIXTNAXXH | |
| | XXXXXXXKXDXKXFFPSXXXXRVXGXXXXL | |
| | GYPXXXXXXLTXLXTXXXXLPXGAPTSPXX | |
| | XNXXXXRXDXRXXXLXXKXXFXYSRYADDX | |
| | XXSSXXXXXXXXIPFFXXIXXXEGFXXNEX | |
| | KXXIXRXGXRQXXTGXVVNXKXNXXXXEXX | |
| | XLRAVXXNCXXX | |
| TypeXVII | YRXFXXXKXDGXXRXXXXPXXXLKXXQXXX | 19398 |
| | XXXXLXXXXXHPXAXXFXXXXSXXXXAXXH | |
| | AXXXXXXTXDXXDFFXXTXXXRVXXXXXXX | |
| | XXXXXXXXXLXXLXXXXXXLPQGAPTSPXL | |
| | SNXVNXXXDXXXXXXXXXXXXXYTRYXDDX | |
| | XFSWXXXXXPXXFXXXXXXXLXXXGYXXXP | |
| | XKXXXXXXXXXXXPXXTGXXLXXXGXXXXP | |
| | XXXXXXXXXXXX | |

Table X—Previously known retron RTs (Accession No.: Organism)

[2901] The following sequences are disclosed in Mestre et al., Systematic Prediction of Genes Functionally Associated with Bacterial Retrons and Classification of The Encoded Tripartite Systems, Nucleic Acids Research, Volume 48, Issue 22, 16 Dec. 2020, Pages 12632-12647, which is incorporated herein by reference in its entirety. The sequences are described as sequence reference numbers and the source organism.

Sequence Accession No.; source organism

FIG|670897.3.peg.2382; Escherichia coli 2362-75
WP_000111473.1; Escherichia coli (Retron-Eco7)
FIG|286156.4.peg.5031; Photorhabdus australis
FIG|171439.3.peg.1995; Photorhabdus luminescens subsp. luminescens
FIG|1004151.3.peg.110; Photorhabdus khanii NC19
FIG|1736225.3.peg.2969; Erwinia sp. Leaf53
FIG|1897730.3.peg.2912; Citrobacter sp. CFSAN044567
FIG|286156.4.peg.5031; Aeromonas australiensis
FIG|1460083.3.peg.4429; Serratia liquefaciens FK01
FIG|585.10.peg.2369; Proteus vulgaris
WP_140315795.1; Vibrio parahaemolyticus (Retron-Vpa1)
FIG|670.147.peg.3463; Vibrio parahaemolyticus
FIG|1516159.4.peg.4737; Vibrio coralliirubri
FIG|190893.12.peg.246; Vibrio coralliilyticus
FIG|643674.5.peg.820; Paenalcaligenes hominis
FIG|1122619.3.peg.2381; Oligella ureolytica DSM 18253
FIG|29489.5.peg.3423; Aeromonas enteropelogenes
FIG|1899355.18.peg.3566; Oceanospirillaceae bacterium
FIG|49186.3.peg.4362; Marinobacterium stanieri
FIG|672.375.peg.4377; Vibrio vulnificus
FIG|584.202.peg.1668; Proteus mirabilis
FIG|394935.10.peg.4407; Chromobacterium haemolyticum
FIG|1196083.117.peg.637; Snodgrassella alvi
FIG|1196083.120.peg.2046; Snodgrassella alvi
FIG|1196083.114.peg.825; Snodgrassella alvi
FIG|550.250.peg.2975; Enterobacter cloacae
FIG|680.27.peg.793; Vibrio campbellii
FIG|1348393.3.peg.352; Pseudoalteromonas sp. H105
FIG|1234128.4.peg.4777; Vibrio parahaemolyticus SNUVpS-1
FIG|69219.6.peg.2213; Enterobacter cloacae subsp. dissolvens
FIG|208224.13.peg.2962; Enterobacter kobei
FIG|672.332.peg.2758; Vibrio vulnificus
FIG|1777131.3.peg.2267; Chromobacterium sp. F49
FIG|945550.3.peg.1167; Vibrio sinaloensis DSM 21326
FIG|648.75.peg.922; Aeromonas caviae
FIG|1238221.3.peg.2053; Vibrio parahaemolyticus VPTS-2009
FIG|56192.3.peg.3860; Photobacterium iliopiscarium
FIG|1806667.7.peg.3169; Marinomonas gallaica
FIG|272773.3.peg.1019; Salinivibrio costicola subsp. alcaliphilus
WP_073265166.1; Pseudomonas punonensis
FIG|1946584.3.peg.2789; Halomonas sp. UBA3074
FIG|2030880.3.peg.665; SAR86 cluster bacterium
FIG|80854.14.peg.530; Moritella viscosa
FIG|1902503.3.peg.1072; Marinomonas sp. QM202
FIG|1122212.3.peg.1985; Marinospirillum minutulum DSM 6287
FIG|40576.4.peg.4387; Xenorhabdus bovienii
FIG|287094.3.peg.78; Alteromonas addita
FIG|1805633.3.peg.1469; Acinetobacter sp. SFA
FIG|1945927.3.peg.1017; Acinetobacter sp. UBA1497
FIG|202956.9.peg.1680; Acinetobacter towneri
FIG|1811612.3.peg.155; Moraxellaceae bacterium REDSEA-S32_B1
FIG|573.14330.peg.438; Klebsiella pneumoniae
FIG|470.1294.peg.971; Acinetobacter baumannii
FIG|762966.3.peg.2452; Parasutterella excrementihominis YIT 11859
FIG|470.3514.peg.1550; Acinetobacter baumannii
FIG|470.2538.peg.3022; Acinetobacter baumannii
FIG|48296.130.peg.276; Acinetobacter pittii
FIG|663.91.peg.4688; Vibrio alginolyticus
FIG|296199.3.peg.4813; Vibrio gigantis
FIG|1367490.3.peg.3583; Aliivibrio fischeri ETJB5C
FIG|326537.3.peg.3698; Colwellia polaris
FIG|1175631.4.peg.4191; Pectobacterium wasabiae CFBP 3304
WP_001403504.1; Escherichia coli (Retron-Eco4/Ec83)
FIG|549.21.peg.1734; Pantoea agglomerans
FIG|140100.3.peg.2972; Vibrio cholerae
FIG|693153.4.peg.1176; Vibrio atlanticus
FIG|1238430.3.peg.1911; Vibrio nigripulchritudo AM115
FIG|1123036.3.peg.144; Psychromonas arctica DSM 14288
FIG|173990.3.peg.3319; Rheinheimera pacifica
FIG|1869214.4.peg.3809; Rheinheimera sp.
FIG|1898113.7.peg.1514; Idiomarinaceae bacterium
FIG|29484.39.peg.1876; Yersinia frederiksenii
FIG|1761793.3.peg.274; Marinobacter sp. DSM 26671
FIG|587.48.peg.2666; Providencia rettgeri
FIG|573.4147.peg.1684; Klebsiella pneumoniae
FIG|1263833.3.peg.2872; Serratia marcescens VGH107
FIG|1690502.3.peg.467; Pantoea sp. CFSAN033090
FIG|1029989.3.peg.5037; Salmonella enterica subsp. enterica serovar Agona str. 0292
FIG|211759.3.peg.770; Serratia marcescens
FIG|29483.5.peg.2283; Yersinia aldovae
FIG|1268238.3.peg.3466; Escherichia coli O5:K4(L):H4 str. ATCC 23502
FIG|548.121.peg.2368; Klebsiella aerogenes
FIG|196024.6.peg.1825; Aeromonas dhakensis
FIG|386429.3.peg.3784; Pseudoalteromonas sp. BSi20495
FIG|666.2089.peg.3167; Vibrio cholerae
WP_159353404.1; Vibrio cholerae (Retron-Vch1/Vc95)
FIG|670.362.peg.2186; Vibrio parahaemolyticus
FIG|615.398.peg.1671; Serratia marcescens
FIG|571.188.peg.5401; Klebsiella oxytoca
FIG|1389422.3.peg.2794; Klebsiella pneumoniae LAU-KP1
FIG|1082704.3.peg.1242; Lonsdalea britannica
FIG|1686379.3.peg.3365; Citrobacter sp. MGH104
FIG|83655.55.peg.221; Leclercia adecarboxylata
FIG|550.532.peg.617; Enterobacter cloacae
FIG|349965.6.peg.153; Yersinia intermedia ATCC 29909
FIG|1947028.3.peg.31; Pantoea sp. UBA2708
FIG|29484.34.peg.3725; Yersinia frederiksenii
FIG|314608.4.peg.222; Shewanella benthica KT99
FIG|585.16.peg.3620; Proteus vulgaris
FIG|1117313.3.peg.4128; Pseudoalteromonas arctica A 37-1-2
FIG|1236543.3.peg.1328; Shewanella putrefaciens JCM 20190 = NBRC 3908
FIG|550.520.peg.1818; Enterobacter cloacae
FIG|592316.4.peg.43; Pantoea sp. At-9b
FIG|1903 177.3.peg.4556; Vibrio sp. 10N.261.45.E1
FIG|1435069.3.peg.925; Vibrio tritonius
FIG|666.3258.peg.1211; Vibrio cholerae
FIG|1579504.3.peg.1822; Shewanella sp. ECSMB14102
FIG|727.548.peg.1576; Haemophilus influenzae
EIJ70524.1; Haemophilus parahaemolyticus HK385
FIG|1121935.3.peg.14; Hahella ganghwensis DSM 17046
FIG|400668.8.peg.2509; Marinomonas sp. MWYL1
FIG|1777491.3.peg.1212; Alteromonas sp. Mac1
FIG|2013797.3.peg.1728; Gammaproteobacteria bacterium HGW-Gammaproteobacteria-15
FIG|1008297.7.peg.4158; Salmonella enterica subsp. enterica serovar Typhimurium str. 798
EDM6246721.1; Salmonella enterica subsp. enterica serovar Typhimurium (Retron-Sen2 (St85))
FIG|421.19.peg.3278; Methylomonas methanica
FIG|758.17.peg.102; Rodentibacter pneumotropicus
FIG|726.60.peg.864; Haemophilus haemolyticus
FIG|1035188.3.peg.348; Haemophilus pittmaniae HK 85
FIG|670.79.peg.3738; Vibrio parahaemolyticus
FIG|1481663.12.peg.913; Vibrio metoecus
FIG|1123402.3.peg.611; Thorsellia anophelis DSM 18579
FIG|668.83.peg.3088; Aliivibrio fischeri
FIG|290110.6.peg.2319; Xenorhabdus budapestensis
FIG|568766.10.peg.822; Dickeya sp. NCPPB 3274
FIG|470.4268.peg.2217; Acinetobacter baumannii
FIG|1977881.3.peg.1569; Acinetobacter sp. ANC 4470
FIG|548.171.peg.2395; Klebsiella aerogenes
FIG|584.105.peg.1823; Proteus mirabilis
FIG|1275975.3.peg.1756; Salmonella enterica subsp. enterica serovar Newport str. Henan_3
FIG|615.474.peg.3994; Serratia marcescens
FIG|61647.13.peg.3699; Pluralibacter gergoviae
FIG|549.22.peg.222; Pantoea agglomerans
FIG|991944.3.peg.3216; Vibrio cholerae HE-25
WP_001022871.1; Vibrio cholerae (Retron-Vch2 (Vc81))
FIG|1638949.3.peg.1051; Vibrio sp. ECSMB14106
FIG|73010.3.peg.2815; Aeromonas encheleia
FIG|1444141.3.peg.3893; Escherichia coli 3-373-03_S3_C1
FIG|232.5.peg.1080; Alteromonas sp.
FIG|1175295.3.peg.21; Pseudoalteromonas sp. PAMC 22718
FIG|265726.7.peg.3430; Photobacterium halotolerans
WP_009585554.1; Acinetobacter
FIG|2004649.3.peg.1632; Acinetobacter sp. WCHA29
FIG|1324350.3.peg.2817; Acinetobacter equi
FIG|2048003.3.peg.1682; Alteromonas flava
FIG|571.171.peg.5963; Klebsiella oxytoca
FIG|573.4060.peg.3574; Klebsiellapneumoniae
FIG|1173850.3.peg.2995; Salmonella enterica subsp. enterica serovar Indiana str. ATCC 51959
FIG|1123516.3.peg.1267; Hydrogenovibrio halophilus DSM 15072
FIG|1981674.3.peg.1814; Pseudomonas sp. R9(2017)
FIG|1947311.3.peg.2053; Pseudomonas sp. UBA2684
FIG|1198309.3.peg.4291; Pseudomonas fluorescens ICMP 11288
FIG|715451.3.peg.1743; Alteromonas naphthalenivorans
FIG|316.285.peg.730; Pseudomonas stutzeri
FIG|1190606.3.peg.313; Enterovibrio calviensis 1F-211
WP_009176189.1;
WP_097050713.1; Thalassospira xiamenensis
FIG|1208323.3.peg.893; Celeribacter baekdonensis B30
KZK95863.1; Pseudovibrio sp. Ad46
FIG|101571.310.peg.3956; Burkholderia ubonensis
FIG|1882791.3.peg.1790; Burkholderia sp. CF099
FIG|1736536.3.peg.4809; Variovorax sp. Root434
PIG30812.1; Janthinobacterium sp. 35
FIG|1798244.3.peg.1046; Gallionellales bacterium GWA2_55_18
FIG|1131551.3.peg.1124; Methylotenera sp. 1P/1
FIG|1843082.3.peg.1574; Macromonas sp. BK-30
FIG|279058.16.peg.4721; Collimonas arenae
FIG|1548123.6.peg.1144; Pusillimonas sp. T2
FIG|380394.4.peg.276; Acidithiobacillus ferrooxidans ATCC 53993
WP_080292858.1;
FIG|101571.162.peg.3605; Burkholderia ubonensis
FIG|1382803.3.peg.22; Chromobacterium amazonense
FIG|930.4.peg.3851; Acidithiobacillus thiooxidans
FIG|1261658.3.peg.1787; Bibersteinia trehalosi Y31
FIG|1679001.3.peg.631; Pasteurellaceae bacterium NI1060
FIG|1334187.3.peg.653; Haemophilus influenzae KR494
FIG|1581107.3.peg.1286; Neisseria sp. HMSC15G01
FIG|486.24.peg.152; Neisseria lactamica
FIG|1953412.3.peg.1956; bacterium UBP10_UBA1160
WP_090322045.1; Nitrosomonas oligotropha
FIG|2013740.3.peg.1400; Deltaproteobacteria bacterium HGW-Deltaproteobacteria-13
FIG|1907413.3.peg.3170; Rhizobium sp. RU33A
FIG|1817963.3.peg.856; Roseomonas deserti
FIG|2035448.3.peg.1752; Rhizobium sp. C5
WP_014077019.1;
FIG|1648404.4.peg.2797; Erythrobacter atlanticus
FIG|359.11.peg.6331; Agrobacterium rhizogenes
FIG|887144.4.peg.573; Rhizobium taibaishanense
FIG|1116389.3.peg.333; Devosia insulae DS-56
FIG|121719.10.peg.3421; Pannonibacter phragmitetus
FIG|34002.6.peg.3570; Paracoccus alcaliphilus
FIG|1940281.4.peg.1560; Hoeflea sp.
FIG|1040981.5.peg.1561; Mesorhizobium ciceri WSM4083
FIG|410764.3.peg.807; Rhizobium multihospitium
FIG|1825934.3.peg.3111; Rhizobium anhuiense
FIG|1952824.3.peg.3061; Rhodobiaceae bacterium UBA3976
FIG|1871086.3.peg.2153; Brevundimonas sp.
FIG|588932.9.peg.647; Brevundimonas naejangsanensis
FIG|1951751.3.peg.1538; Erythrobacteraceae bacterium UBA1460
FIG|1843368.3.peg.904; Sphingobium sp. RAC03
FIG|155892.10.peg.3219; Caulobacter vibrioides
FIG|43057.4.peg.4537; Rhodobacter azotoformans
FIG|1514904.3.peg.974; Ahrensia marina
FIG|1338034.3.peg.722; Vibrio parahaemolyticus O1:Kuk str. FDA_R31
FIG|150340.18.peg.1837; Vibrio antiquarius
FIG|196024.5.peg.3821; Aeromonas dhakensis
FIG|244366.32.peg.1886; Klebsiella variicola
FIG|180957.35.peg.1654; Pectobacterium brasiliense
FIG|55601.149.peg.665; Vibrio anguillarum
FIG|121723.5.peg.2901; Photobacterium sp. SKA34
FIG|584.170.peg.837; Proteus mirabilis
FIG|40324.136.peg.3276; Stenotrophomonas maltophilia
FIG|1122188.5.peg.411; Lysobacter spongiicola DSM 21749
FIG|2032566.3.peg.2826; Xanthomonadaceae bacterium NML93-0792
FIG|287.1731.peg.2578; Pseudomonas aeruginosa
FIG|251702.3.peg.1529; Pseudomonas syringae pv. antirrhini
FIG|1960829.3.peg.5912; Pseudomonas sp. MF6394
FIG|76759.17.peg.5093; Pseudomonas monteilii
FIG|1981678.3.peg.5241; Pseudomonas sp. R45(2017)
FIG|1699620.3.peg.3028; Pseudomonas sp. RIT-PI-r
FIG|191391.4.peg.2140; Pseudomonas salomonii
FIG|1844093.4.peg.7190; Pseudomonas sp. 22 E 5
FIG|287.1744.peg.1414; Pseudomonas aeruginosa
FIG|287.1987.peg.910; Pseudomonas aeruginosa
FIG|287.4372.peg.4481; Pseudomonas aeruginosa
FIG|1856685.4.peg.2159; Pseudomonas sp. TCU-HL1
FIG|1718920.3.peg.3357; Pseudomonas sp. ICMP 8385
FIG|1781066.3.peg.2816; Duganella sp. HH101
FIG|95485.5.peg.60; Burkholderia stabilis
FIG|1572871.6.peg.588; Janthinobacterium sp. BJB304
WP_034208069.1; Burkholderia cepacia
WP_074283015.1; Burkholderia sp. GAS332
FIG|1168169.3.peg.2570; Methylomonas sp. 11b
FIG|1899355.16.peg.1328; Oceanospirillaceae bacterium
WP_093197597.1; Variovorax sp. YR750
FIG|1660091.3.peg.1650; Bordetella sp. SCN 67-23
FIG|134375.17.peg.4387; Achromobacter sp.
FIG|426114.10.peg.1990; Thiomonas arsenitoxydans
FIG|1947551.3.peg.1903; Stenotrophomonas sp. UBA2302
FIG|1914330.4.peg.2242; Salinisphaera sp.
FIG|1947037.3.peg.890; Pantoea sp. UBA5707
WP_094422719.1; Kosakonia cowanii
WP_079496884.1;
WP_088126255.1; Enterobacter kobei
WP_049614309.1; Yersinia
WP_048263135.1; Pectobacterium peruviense
WP_040197602.1; Klebsiella pneumoniae
FIG|669.34.peg.1586; Vibrio harveyi
FIG|672.219.peg.1032; Vibrio vulnificus
FIG|670.1028.peg.1775; Vibrio parahaemolyticus
WP_065207673.1; Photobacterium phosphoreum
FIG|1869214.3.peg.2231; Rheinheimera sp.
WP_029795910.1; Vibrio parahaemolyticus
FIG|1191302.3.peg.1081; Vibrio crassostreae 9ZC77
FIG|668.70.peg.1192; Aliivibrio fischeri
FIG|28229.4.peg.4229; Colwellia psychrerythraea
FIG|1855726.3.peg.270; Burkholderia sp. KK1
FIG|1674888.3.peg.829; Burkholderiales bacterium Beta_02
FIG|687412.4.peg.1108; Pseudorhodobacter aquimaris
WP_092465129.1; Donghicola eburneus
FIG|1120653.3.peg.5479; Ensifer sp. LC384
FIG|121719.5.peg.401; Pannonibacter phragmitetus
FIG|1798804.3.peg.1597; Rhizobium sp. 58
FIG|1946675.3.peg.3089; Kordiimonas sp. UBA4487
FIG|36861.5.peg.1400; Thiobacillus denitrificans
FIG|1115835.3.peg.1003; Methylotenera versatilis 79
FIG|1797188.3.peg.1508; Acidobacteria bacterium RIFCSPLOWO2_12_FULL_60_22
FIG|57320.3.peg.123; Pseudodesulfovibrio profundus
FIG|1267534.3.peg.1238; Acidobacteriaceae bacterium KBS 89
FIG|1951344.3.peg.527; Acidobacteriaceae bacterium UBA1307
WP_006226461.1; Achromobacter marplatensis
FIG|1503054.4.peg.5764; Burkholderia stagnalis
WP_006159686.1; Cupriavidus basilensis
WP_090191767.1; unclassified Duganella
FIG|539.8.peg.1698; Eikenella corrodens
FIG|1946925.3.peg.2129; Micavibrio sp. UBA5701
WP_047031309.1; Hoeflea sp. IMCC20628
FIG|1946134.3.peg.1092; Brevundimonas sp. UBA6547
WP_093914930.1; Sulfitobacter marinus
FIG|1862950.3.peg.1234; Rhizobiales bacterium NRL2
FIG|1166078.4.peg.1483; Aureimonas phyllosphaerae
FIG|709015.3.peg.734; Pontibacter actiniarum DSM 19842
WP_092160028.1; Desulfovibrio ferrireducens
FIG|2026749.3.peg.3364; Ignavibacteriae bacterium
WP_033771991.1; Pantoea agglomerans
WP_097097099.1; unclassified Enterobacteriaceae (miscellaneous)
FIG|1444151.3.peg.2733; Escherichia coli 2-177-06_S3_C2
WP_137545672.1; Escherichia coli Retron-Eco3 (Ec73)
FIG|573.14856.peg.3852; Klebsiella pneumoniae
WP_072021595.1; Serratia marcescens
FIG|29571.3.peg.478; Halomonas subglaciescola
WP_004534676.1;
WP_095622523.1; Halomonas sp. WRN001
FIG|376427.4.peg.3223; Halomonas gudaonensis
FIG|862908.3.peg.745; Halobacteriovorax marinus SJ
SCJ40239.1; uncultured Clostridium sp.
FIG|717962.3.peg.287; Coprococcus catus GD/7
WP_014642259.1; Halobacillus halophilus
FIG|2009042.3.peg.2106; Pseudomonas sp. Irchel 3H7
FIG|1981718.3.peg.4346; Pseudomonas sp. B39(2017)
FIG|665135.13.peg.1401; Pseudomonas sp. In5
FIG|1949067.3.peg.5629; Pseudomonas sp. PICF141
WP_007948552.1; Pseudomonas sp. GM21
SFB61662.1; Delftia tsuruhatensis
WP_011615687.1;
WP_014778098.1;
FIG|1429083.4.peg.2612; Pseudomonas hussainii
WP_095024014.1; Pseudomonas
WP_090203690.1; Pseudomonas asplenii
FIG|564423.8.peg.1646; Pseudomonas tolaasii NCPPB 2192
WP_078802277.1; Pseudomonas fluorescens
WP_090453229.1; Pseudomonas
FIG|1306420.5.peg.1032; Burkholderia pseudomallei MSHR5848
FIG|1357270.3.peg.1923; Pseudomonas syringae UB246
FIG|2018067.3.peg.2950; Pseudomonas sp. FDAARGOS_380
FIG|317.311.peg.3241; Pseudomonas syringae
FIG|287.2309.peg.126; Pseudomonas aeruginosa
WP_039522442.1; Pectobacterium brasiliense
WP_080861357.1; Klebsiella pneumoniae
WP_014542745.1; Erwinia sp. Ejp617
OSL25696.1; Escherichia coli TA255
FIG|1125693.3.peg.761; Proteus mirabilis WGLW4
KMK80587.1; Pectobacterium atrosepticum ICMP 1526
FIG|550.717.peg.2037; Enterobacter cloacae
ACS86154.1; Dickeya paradisiaca Ech703
WP_050122514.1; Yersinia frederiksenii
WP_081334048.1; Alteromonas macleodii
WP_055016254.1; Pseudoalteromonas sp. P1-13-1a
FIG|56799.5.peg.478; Colwellia sp.
FIG|666.3375.peg.2486; Vibrio cholerae
PIW62005.1; Shewanella sp. CG12_big_fil_rev_8_21_14_0_65_47_15
OCA54994.1; Photorhabdus namnaonensis
CNK75559.1; Yersinia frederiksenii
WP_024248662.1; Escherichia
WP_088618141.1; Methylovulum psychrotolerans
WP_051669880.1;
PCJ98666.1; Alteromonadaceae bacterium
WP_081919471.1; Acidithiobacillus ferrivorans
WP_055769167.1; Stenotrophomonas
WP_039422954.1; Xanthomonas vesicatoria
WP_078568253.1; Xanthomonas campestris
WP_093486747.1; unclassified Pseudoxanthomonas
WP_077445058.1; Rhodanobacter sp. C05
WP_092576562.1; Achromobacter sp. NFACC18-2
FIG|1330528.3.peg.2198; Escherichia coli NCCP 15656
FIG|83655.67.peg.2965; Leclercia adecarboxylata
FIG|573.10044.peg.2850; Klebsiella pneumoniae
WP_071888955.1; Enterobacterales
FIG|1799789.3.peg.4357; Paraglaciecola hydrolytica
FIG|2024839.8.peg.1563; Marinovum sp.
FIG|1381081.7.peg.1167; Vibrio panuliri
FIG|670.908.peg.3444; Vibrio parahaemolyticus
FIG|626887.3.peg.2431; Marinobacter nanhaiticus D15-8W
FIG|1913989.101.peg.1616; Gammaproteobacteria bacterium
FIG|262489.9.peg.2938; delta proteobacterium MLMS-1
FIG|2035207.3.peg.545; Janthinobacterium sp. 67
FIG|28095.13.peg.1040; Burkholderia gladioli
FIG|941449.3.peg.1262; Desulfovibrio sp. X2
FIG|1768806.3.peg.778; Rhodospirillaceae bacterium CCH5-H10
WP_083634830.1; Desulfovibrio sp. DV
FIG|1231.4.peg.574; Nitrosospira multiformis
FIG|604089.3.peg.1142; Flavobacterium sinopsychrotolerans
FIG|357523.3.peg.1851; Flavobacterium sp. 11
FIG|1423323.5.peg.321; Flavobacterium sp. AED
FIG|178356.3.peg.502; Flavobacterium xinjiangense
FIG|1946545.3.peg.3457; Flavobacterium sp. UBA4120
FIG|150146.3.peg.2822; Flavobacterium gillisiae
FIG|229203.4.peg.1981; Flavobacterium degerlachei
FIG|280093.5.peg.432; Flavobacterium granuli
FIG|728056.4.peg.1154; Flavobacterium oncorhynchi
FIG|143224.8.peg.2343; Zobellia uliginosa
FIG|1225176.3.peg.4300; Cecembia lonarensis LW9
FIG|1434700.3.peg.581; Moheibacter sediminis
FIG|996.47.peg.468; Flavobacterium columnare
FIG|172045.56.peg.2231; Elizabethkingia miricola
FIG|2024823.3.peg.2086; Altibacter sp.
FIG|2026728.18.peg.4090; Crocinitomicaceae bacterium
FIG|980584.3.peg.2930; Aquimarina agarivorans
FIG|1946744.3.peg.1682; Leeuwenhoekiella sp. UBA1003
FIG|1046627.3.peg.2526; Bizionia argentinensis JUB59
FIG|906888.15.peg.37; Nonlabens ulvanivorans
FIG|407022.4.peg.2865; Olivibacter domesticus
FIG|1500282.3.peg.3713; Chryseobacterium sp. CF365
WP_084550290.1; Chryseobacterium scophthalmum
FIG|190304.8.peg.741; Fusobacterium nucleatum subsp. nucleatum ATCC 25586
FIG|1352.1731.peg.603; Enterococcus faecium
FIG|1428.658.peg.666; Bacillus thuringiensis
FIG|1497681.3.peg.3095; Listeria newyorkensis
FIG|1396.1440.peg.4237; Bacillus cereus
FIG|1917876.3.peg.2997; Blautia sp. Marseille-P3087
FIG|1952168.3.peg.215; Lachnospiraceae bacterium UBA7480
FIG|1907659.3.peg.1085; Blautia sp. Marseille-P3201T
FIG|1265309.16.peg.461; Epibacterium mobile F1926
FIG|853.163.peg.215; Faecalibacterium prausnitzii
FIG|1264.5.peg.4; Ruminococcus albus
FIG|1500289.3.peg.4469; Chryseobacterium sp. OV705
FIG|1197728.3.peg.2386; Prevotella conceptionensis 9403948
FIG|1947486.3.peg.2515; Sphingobacterium sp. UBA1897
FIG|529.12.peg.1303; Ochrobactrum anthropi
FIG|1523429.3.peg.2936; Rhizobium sp. AAP116
FIG|1761878.3.peg.469; Paenibacillus sp. cl6col
FIG|1462996.4.peg.2634; Paenibacillus yonginensis
FIG|582475.4.peg.4724; Lysinibacillus xylanilyticus
FIG|1773.7915.peg.7638; Mycobacterium tuberculosis
FIG|360310.3.peg.4853; Bacillus sp. CDB3
FIG|1396.515.peg.2936; Bacillus cereus
FIG|662367.4.peg.242; Spirosoma endophyticum
FIG|1895719.3.peg.2950; Bacteroidales bacterium 45-6
FIG|906888.9.peg.926; Nonlabens ulvanivorans
FIG|694433.3.peg.2346; Saprospira grandis DSM 2844
FIG|1167006.5.peg.2941; Desulfocapsa sulfexigens DSM 10523
FIG|649724.3.peg.304; Clostridium sp. ATCC BAA-442
FIG|1505.32.peg.2959; Paeniclostridium sordellii
FIG|1953142.3.peg.1858; Bacteroidetes bacterium UBA1947
FIG|2029590.3.peg.2754; Mucilaginibacter sp. MD40
FIG|29581.33.peg.2300; Janthinobacterium lividum
FIG|40324.292.peg.236; Stenotrophomonas maltophilia
FIG|1403329.3.peg.287; Listeria monocytogenes Lm25180
FIG|1121865.3.peg.1262; Enterococcus columbae DSM 7374 = ATCC 51263
FIG|1120746.3.peg.3113; bacterium MS4
FIG|1952299.3.peg.221; Ruminococcaceae bacterium UBA2656
FIG|1965604.3.peg.686; Anaeromassilibacillus sp. An250
FIG|1673717.3.peg.805; Anaeromassilibacillus senegalensis
WP_116884683.1; Victivallis vadensis
FIG|1948697.3.peg.196; Lentisphaeria bacterium UBA4640
FIG|1232460.3.peg.46; Clostridiales bacterium VE202-28
WP_007864340.1; Clostridiales
WP_055649738.1; Hungatella hathewayi
FIG|1226325.3.peg.2005; Clostridium sp. KLE 1755
FIG|1432052.10.peg.3 166; Eisenbergiella tayi
FIG|208479.8.peg.4376; Enterocloster bolteae
FIG|1298920.3.peg.1959; [Desulfotomaculum] guttoideum DSM 4024
FIG|1776047.3.peg.4241; Clostridium sp. C105KSO15
FIG|1946596.3.peg.2399; Hungatella sp. UBA4396
FIG|1946603.3.peg.924; Hungatella sp. UBA7603
FIG|1410651.3.peg.407; [Clostridium] aerotolerans DSM 5434
FIG|1697784.3.peg.9617; Clostridia bacterium UC5.1-1D4
FIG|1745713.3.peg.3865; Bariatricus massiliensis
FIG|180332.3.peg.1515; Robinsoniella peoriensis
WP_072851604.1; Lactonifactor longoviformis
WP_003507561.1; Clostridiales
FIG|1111728.3.peg.587; Budvicia aquatica DSM 5075 = ATCC 35567
FIG|1122977.4.peg.2473; Pragia fontium DSM 5563 = ATCC 49100
FIG|1950915.3.peg.189; Clostridiales bacterium UBA644
FIG|1950927.3.peg.912; Clostridiales bacterium UBA7187
ERK60856.1; Oscillibacter sp. KLE 1728
WP_009260579.1; Flavonifractor plautii
FIG|1235797.3.peg.2409; Oscillibacter sp. 1-3
FIG|1520815.3.peg.1262; Ruminococcaceae bacterium D5
FIG|1855302.3.peg.1138; Pseudobutyrivibrio sp. JW11
FIG|43305.5.peg.3631; Butyrivibrio proteoclasticus
FIG|411463.15.peg.1791; Eubacterium ventriosum ATCC 27560
FIG|1235792.3.peg.3837; Lachnospiraceae bacterium M18-1
FIG|97139.3.peg.669; Schaedlerella arabinosiphila
FIG|1291051.3.peg.1165; Mediterraneibacter glycyrrhizinilyticus JCM 13369
FIG|1532.6.peg.4793; Blautia coccoides
FIG|1121114.4.peg.5478; Blautia producta ATCC 27340 = DSM 2950
FIG|1262776.3.peg.1908; Clostridium sp. CAG:149
FIG|1262792.3.peg.1164; Clostridium sp. CAG:299
FIG|1262995.3.peg.2852; Firmicutes bacterium CAG:646
FIG|537007.17.peg.3146; Blautia hansenii DSM 20583
FIG|1965569.3.peg.1928; Lachnoclostridium sp. An169
FIG|1952411.3.peg.2018; Ruminococcaceae bacterium UBA6353
FIG|1965578.3.peg.1947; Pseudoflavonifractor sp. An187
WP_001775049.1; Escherichia coli Retron-Eco5 (Ec107)
WP_012602583.1;
WP_015962464.1; Enterobacteriaceae bacterium strain FGI 57
FIG|1005999.3.peg.3342; Leminorella grimontii ATCC 33999 = DSM 5078
FIG|1378073.3.peg.795; Enterobacter sp. CC120223-11
FIG|911023.3.peg.138; Yokenella regensburgei ATCC 49455
FIG|1834193.3.peg.4113; Enterococcus sp. 9E7_DIV0242
FIG|1649188.10.peg.406; Listeria goaensis
FIG|1430899.3.peg.278; Listeria fleischmannii 1991
FIG|1211844.4.peg.748; Candidatus Stoquefichus massiliensis AP9
FIG|1658109.3.peg.34; Candidatus Stoquefichus sp. SB1
FIG|1262793.3.peg.950; Clostridium sp. CAG:302
FIG|1262908.3.peg.1120; Mycoplasma sp. CAG:956
FIG|1674844.3.peg.242; Clostridiales bacterium Firm_06
FIG|1410672.3.peg.2823; Ruminococcus flavefaciens ND2009
FIG|1947424.3.peg.1718; Ruminococcus sp. UBA4310
FIG|1265.9.peg.2602; Ruminococcus flavefaciens
FIG|1336236.3.peg.1817; Ruminococcus flavefaciens ATCC 19208
CDC65895.1; Ruminococcus sp. CAG:57
WP_092946213.1; Ruminococcaceae bacterium YRB3002
FIG|1307.1644.peg.1532; Streptococcus suis
WP_050516365.1; Escherichia coli
WP_097505494.1; Escherichia coli Retron-Eco5 (Ec107)
FIG|573.15585.peg.2343; Klebsiella pneumoniae
WP_023581669.1; Proteus hauseri
WP_079656969.1; Serratia marcescens
WP_090085157.1; Phytobacter sp. SCO41
FIG|573.15584.peg.1543; Klebsiella pneumoniae
WP_023330997.1; Enterobacter cloacae complex
FIG|72407.673.peg.2552; Klebsiella pneumoniae subsp. pneumoniae
CNM01182.1; Yersinia pseudotuberculosis
CNG88012.1; Yersinia enterocolitica
FIG|1925763.3.peg.649; Marinobacter salexigens
PKW24121.1; Marinobacter sp. LV10R510-8
WP_045597342.1; Vibrio vulnificus
WP_098972386.1; Aeromonas sp. CU5
WP_005172873.1; Yersinia enterocolitica
WP_052979504.1; Enterobacteriaceae
WP_083069261.1; Pantoea vagans
WP_053911905.1; Pseudoalteromonas sp. SW0106-04
FIG|1916082.18.peg.39; Alteromonadaceae bacterium
WP_046555216.1; Arsukibacterium sp. MJ3
KPW01986.1; Pseudoalteromonas sp. P1-8
WP_094277737.1; Oceanimonas baumannii
FIG|1414654.3.peg.2005; Oceanisphaera psychrotolerans
WP_008133621.1; unclassified Pseudoalteromonas
KQA22543.1; Vibrio metoecus
WP_000284440.1; Vibrio cholerae
WP_011261677.1; Aliivibrio fischeri
KEE40622.1;
WP_012982829.1;
ALL66139.1; Paraburkholderia caribensis MBA4
WP_093223969.1; Pseudomonas vancouverensis
FIG|2015553.3.peg.2940; Pseudomonas sp. PGPPP1
WP_096082869.1; Pseudomonas aeruginosa
ONM67687.1; Pseudomonas aeruginosa
FIG|316.213.peg.2906; Pseudomonas stutzeri
WP_078734267.1; Pseudomonas fluorescens
WP_079384669.1; Pseudomonas aeruginosa
WP_095948157.1; Variovorax boronicumulans
WP_011625020.1; Shewanella sp. MR-7
WP_100292553.1; Aeromonas cavernicola
WP_055021484.1; Pseudoalteromonas sp. P1-26
PHS01491.1; Oceanobacter sp.
FIG|2024618.3.peg.1141; Acinetobacter sp. BS1
WP_114139108.1; Klebsiella pneumoniae
WP_077749737.1; Pseudomonas sp. FSL W5-0299
WP_078451378.1; Pseudomonas aeruginosa
WP_007245785.1; Pseudomonas syringae group
FIG|316.280.peg.1454; Pseudomonas stutzeri
WP_086822222.1; Pseudomonas aeruginosa
WP_073268605.1; Pseudomonas punonensis
WP_095280108.1; Lelliottia jeotgali
WP_095715328.1; Citrobacter sp. TSA-1
WP_050111525.1; Yersinia
WP_013724211.1; Aeromonas veronii
WP_021140819.1; Aeromonas salmonicida
FIG|1094342.5.peg.1611; Alcanivorax xenomutans
FIG|1932666.4.peg.1886; Haliea sp.
WP_087148323.1; Crenothrix polyspora
WP_064022638.1; Methylomonas sp. DH-1
PIY64876.1; Shewanella sp. CG_4_10_14_0_8 um_filter_42_13
WP_006710190.1; Vibrio ichthyoenteri
WP_045040928.1; Photobacterium iliopiscarium
WP_054543201.1; Vibrio splendidus
WP_080540293.1; Vibrio vulnificus
FIG|2032624.3.peg.2540; Halomonas sp. WN018
KJT50308.1; Salmonella enterica subsp. enterica serovar Heidelberg str. RI-11-014588 Retron-Sen1 (Se72)
WP_005761319.1;
ODQ05744.1; Shigella sp. FC130
KKW01006.1; Candidatus Saccharibacteria bacterium GW2011_GWC2_48_9
KMZ12260.1; Candidatus Burkholderia humilis
SFQ04394.1; Ralstonia sp. NFACC01
WP_025373922.1; Advenella mimigardefordensis
WP_093341200.1; Variovorax sp. PDC80
WP_091453700.1; Giesbergeria anulus
SAY51889.1; Neisseria weaveri
WP_065255232.1; Moraxella lacunata
WP_049330876.1; Neisseria
FIG|1196095.197.peg.151; Gilliamella apicola
WP_072956843.1; Vibrio gazogenes
FIG|857087.3.peg.3286; Methylomonas methanica MC09
FIG|1952222.3.peg.1307; Methylococcaceae bacterium UBA3127
WP_039486261.1; Vibrio sinaloensis
WP_065545234.1; Vibrio scophthalmi
WP_033094845.1; Colwellia psychrerythraea
WP_057552475.1; Vibrio cholerae
WP_004726393.1; Vibrio furnissii
FIG|2020862.3.peg.1934; Halobacteriovorax sp.
FIG|624.1260.peg.1437; Shigella sonnei
WP_011516221.1; Burkholderiales
FIG|1947370.3.peg.1923; Pusillimonas sp. UBA4517
WP_038400955.1; Yersinia pseudotuberculosis
FIG|1951903.3.peg.117; Halieaceae bacterium UBA3099
WP_024914507.1; Chania multitudinisentens
WP_042893228.1; Enterobacteriaceae
WP_038238211.1; Xenorhabdus szentirmaii
EXI65661.1; Candidatus Accumulibacter sp. SK-12
WP_016452106.1; Delftia
WP_013517170.1; Alicycliphilus denitrificans
OXC73828.1; Caballeronia sordidicola
AIO65205.1; Burkholderia oklahomensis
WP_013234866.1; Herbaspirillum seropedicae
WP_082884385.1; Piscirickettsiaceae bacterium NZ-RLO1
FIG|2006849.4.peg.371; Xanthomonadales bacterium
WP_074262787.1; Paraburkholderia phenazinium
WP_009906786.1; Burkholderia thailandensis
WP_022524328.1;
WP_081817450.1; Halomonas sp. HL-48
WP_020312233.1; Pseudomonas syringae
KPY75916.1; Pseudomonas amygdali pv. tabaci
FIG|1793966.3.peg.180; Pseudomonas fluvialis
FIG|1891229.16.peg.2033; Pseudomonadales bacterium
WP_099454886.1; Pseudomonas putida
WP_092400423.1; Pseudomonas sp. NFACC39-1
WP_012315430.1; Pseudomonas putida
WP_020799819.1; Pseudomonas sp. G5(2012)
WP_004574016.1;
FIG|1435425.3.peg.787; Pseudomonas sp. QTF5
WP_045490543.1; Pseudomonas sp. StFLB209
WP_011506503.1; Chromohalobacter salexigens
FIG|1609967.3.peg.3047; Halomonas sp. HG01
FIG|1492738.3.peg.2698; Flavobacterium seoulense
WP_092849245.1; Algibacter pectinivorans
WP_025835957.1; Bacteroides
FIG|2025877.3.peg.668; Parabacteroides sp. AT13
FIG|246787.6.peg.2081; Bacteroides cellulosilyticus
FIG|1339287.3.peg.1113; Bacteroides fragilis str. 3986 T(B)9
FIG|1946017.3.peg.1516; Alistipes sp. UBA940
WP_038655380.1; Mucinivorans hirudinis
WP_093669272.1; Tenacibaculum sp. MAR_2009_124
WP_073241067.1; Flavobacterium flevense
WP_096193803.1; Cytophagales bacterium TFI 002
WP_076357635.1;
WP_073238193.1; Pedobacter caeni
WP_076451370.1;
WP_091906542.1; Porphyromonadaceae bacterium KH3R12
WP_051365712.1; Flavobacterium saliperosum
FIG|1938609.3.peg.1765; Flavobacterium sp. LM4
SDJ72221.1; Flavobacterium noncentrifugens
FIG|1985174.3.peg.2584; Chitinophagaceae bacterium IBVUCB2
WP_092737749.1; Riemerella columbipharyngis
FIG|192149.3.peg.42; Muricauda sp.
FIG|418630.3.peg.1685; Rhodobacter megalophilus
FIG|1915314.3.peg.3469; Thioclava sp. DLFJ5-1
FIG|2030815.3.peg.2725; Marinosulfonomonas sp.
FIG|2035451.3.peg.4632; Rhizobium sp. L18
WP_043872258.1; Celeribacter indicus
WP_055683826.1; Jannaschia rubra
FIG|1947537.3.peg.498; Sphingopyxis sp. UBA6198
WP_069065961.1; Sphingobium sp. RAC03
WP_084280100.1; Novosphingobium sp. B1
FIG|1895845.3.peg.487; Sphingobium sp. 66-54
GAK73419.1; Agrobacterium rubi TR3 = NBRC 13261
WP_090966398.1; Aureimonas phyllosphaerae
WP_091860144.1; Bosea robiniae
WP_085092006.1; Azospirillum oryzae
FIG|1528100.4.peg.28; Methylomagnum ishizawai
FIG|32057.3.peg.9515; Calothrix sp. PCC 7103
FIG|103690.10.peg.3571; Nostoc sp. PCC 7120 = FACHB-418
FIG|1137095.11.peg.15; Scytonema sp. HK-05
CDZ48826.1; Neorhizobium galegae bv. officinalis
WP_072340070.1; Devosia enhydra
OYR18277.1; Ochrobactrum thiophenivorans
WP_093509439.1; Sphingopyxis sp. YR583
WP_081799025.1; Novosphingobium resinovorum
PIY55545.1; Zetaproteobacteria bacterium CG_4_10_14_0_8_um_filter_49_80
SDT44912.1; Bradyrhizobium canariense
WP_096350346.1;
WP_074962594.1; Jannaschia rubra
WP_038724888.1; Burkholderia pseudomallei
WP_012217410.1; Burkholderia multivorans
WP_100428762.1; Janthinobacterium sp. 67
WP_082161008.1; Candidatus Competibacter denitrificans
AFL73219.1; Thiocystis violascens DSM 198
WP_014427842.1;
FIG|364030.3.peg.3554; Thiomonas delicata
KGW20495.1; Burkholderia pseudomallei MSHR2451
SFE83076.1; Variovorax sp. OK212
WP_013028226.1; Sideroxydans lithotrophicus
WP_080311424.1; Burkholderia pseudomallei
FIG|337.13.peg.3872; Burkholderia glumae
WP_082643860.1; Pseudomonas
CKH90039.1; Pseudomonas aeruginosa
WP_083287254.1; unclassified Janthinobacterium
WP_122648546.1; Burkholderia pseudomallei
WP_082706753.1; unclassified Pseudomonas
WP_080936076.1; Klebsiella pneumoniae
WP_000746343.1; Enterobacteriaceae
EMX54653.1; Escherichia coli MP020980.2
WP_053270700.1; Escherichia coli
FIG|1736224.3.peg.3731; Serratia sp. Leaf51
FIG|1175299.4.peg.709; Dickeya zeae ZJU1202
WP_001461245.1; Enterobacteriaceae
FIG|617145.3.peg.3535; Vibrio splendidus 1F-157
FIG|1440054.3.peg.3851; Vibrio sp. OY15
FIG|617135.3.peg.594; Aliivibrio fischeri ZF-211
WP_023267764.1; Shewanella decolorationis
FIG|1481663.36.peg.3628; Vibrio metoecus
FIG|670.893.peg.2716; Vibrio parahaemolyticus
FIG|680.33.peg.5391; Vibrio campbellii
FIG|298386.8.peg.4344; Photobacterium profundum SS9
FIG|663.73.peg.714; Vibrio alginolyticus
FIG|1333511.3.peg.3208; Pseudoalteromonas haloplanktis TAB23
WP_064574154.1; Hafnia paralvei
WP_064645509.1; Obesumbacterium proteus
FIG|630.105.peg.4248; Yersinia enterocolitica
FIG|400673.7.peg.1969; Legionella pneumophila str. Corby
WP_092678546.1; Rosenbergiella nectarea
WP_069476513.1; Raoultella ornithinolytica
FIG|1267535.3.peg.2394; Bryobacterales bacterium KBS 96
WP_000446053.1; Acinetobacter baumannii
FIG|1948587.3.peg.786; Gammaproteobacteria bacterium UBA1902
WP_014949305.1; Alteromonas macleodii
FIG|1797397.3.peg.2386; Bdellovibrionales bacterium RIFOXYC1_FULL_54_43
FIG|1386968.3.peg.847; Francisella tularensis subsp. novicida PA10-7858
WP_074900850.1;
FIG|1975705.3.peg.898; Psychrobacter sp. FDAARGOS_221
WP_066184577.1; Arcobacter
FIG|1780380.4.peg.4010; Eubacteriaceae bacterium CHKCI004
FIG|556261.3.peg.2546; Clostridium sp. D5
FIG|1193534.6.peg.2375; uncultured Flavonifractor sp.
FIG|1042163.3.peg.3771; Brevibacillus laterosporus LMG 15441
WP_062492190.1; Paenibacillus sp. 32O-W
WP_081674606.1; Lactobacillus harbinensis
WP_050781686.1; Lactobacillus coryniformis
WP_021109137.1; Enterococcus faecium
WP_046309803.1; Staphylococcus
CBL03706.1; Gordonibacter pamelaeae 7-10-1-b
WP_090944285.1; Pelosinus propionicus
WP_077305443.1; Clostridium beijerinckii
FIG|410072.5.peg.40; Coprococcus comes
WP_011669870.1; Leptospira borgpetersenii
WP_015565235.1; Faecalibacterium prausnitzii
CUO23478.1; Faecalibacterium prausnitzii
WP_085748688.1; Rhizobacter gummiphilus
WP_093270014.1; Psychrobacillus sp. OK032
SHE86352.1; Atopostipes suicloacalis DSM 15692
WP_000346292.1; unclassified Streptococcus
WP_080465410.1; Lactobacillus plantarum
WP_080662531.1; Lactobacillus brevis
WP_093131554.1; Salinibacillus kushneri
WP_093336905.1; Salibacterium halotolerans
FIG|1974627.3.peg.386; Candidatus Levybacteria bacterium CG_4_9_14_0_2_um_filter_35_21
FIG|1802603.3.peg.453; Candidatus Woykebacteria bacterium
RIFCSPHIGHO2_12_FULL_45_10
FIG|392734.5.peg.3006; Terriglobus roseus
AGL61879.1; Candidatus Saccharimonas aalborgensis
FIG|319224.16.peg.2726; Shewanella putrefaciens CN-32
FIG|1720343.3.peg.1263; Pseudoalteromonas sp. 1_2015MBL_MicDiv
FIG|1136158.3.peg.3691; Vibrio cyclitrophicus 1F97
FIG|666.3017.peg.1000; Vibrio cholerae
FIG|1909458.3.peg.2277; Salinivibrio sp. ML198
FIG|1638949.3.peg.831; Vibrio sp. ECSMB14106
FIG|493915.3.peg.158; Pseudoalteromonas sp. NJ631
BAC94535.1; Vibrio vulnificus YJ016
FIG|1191313.3.peg.1135; Vibrio splendidus 1S-124
FIG|670.1244.peg.3807; Vibrio parahaemolyticus
FIG|1659714.3.peg.4264; Citrobacter braakii
FIG|1192730.4.peg.1976; Salmonella enterica subsp. enterica serovar Kintambo
FIG|550.1216.peg.4296; Enterobacter cloacae
WP_072269713.1; Serratia
WP_053898075.1; Escherichia coli
FIG|624.1264.peg.1635; Shigella sonnei
FIG|1181777.3.peg.78; Escherichia coli KTE233
FIG|1802256.3.peg.310; Sulfurimonas sp. RIFOXYB12_FULL_35_9
PHR73342.1; Arcobacter sp.
FIG|2014260.3.peg.3813; bacterium (Candidatus Blackallbacteria)
CG13_big_fil rev_8_21_14_2_50_49_14
WP_042497590.1; Vibrio maritimus
WP_063522799.1; Vibrio sp. HI00D65
WP_004186757.1; Enterobacteriaceae
WP_040122746.1; Vibrio
WP_086046550.1; Vibrio harveyi group
WP_063849005.1; Enterobacter cloacae
WP_023486614.1; Enterobacteriaceae
WP_070992278.1; Pseudoalteromonas byunsanensis
FIG|1005665.3.peg.2532; Kosakonia oryzendophytica
FIG|1219066.3.peg.3636; Vibrio parahaemolyticus NBRC 12711
FIG|1225184.4.peg.1222; Pantoea sp. A4
FIG|675814.3.peg.1256; Vibrio coralliilyticus ATCC BAA-450
SFR59865.1; Pseudobutyrivibrio sp. NOR37
FIG|853.16.peg.1112; Faecalibacterium prausnitzii
FIG|1965572.3.peg.1423; Pseudoflavonifractor sp. An176
FIG|588581.3.peg.3589; Ruminiclostridium papyrosolvens DSM 2782
FIG|1396.1409.peg.4169; Bacillus cereus
FIG|1428.538.peg.4047; Bacillus thuringiensis
FIG|1465.16.peg.946; Brevibacillus laterosporus
WP_087385137.1;
AIF42417.1; Virgibacillus sp. SK37
WP_076543941.1; Halanaerobium kushneri
FIG|1121093.3.peg.3089; Bacillus panaciterrae DSM 19096
FIG|29367.3.peg.2029; Clostridium puniceum
WP_089719707.1; Halanaerobium congolense
FIG|307249.3.peg.3585; uncultured Sporomusa sp.
WP_072949666.1; Ruminococcus flavefaciens
CCX81854.1; Ruminococcus sp. CAG:108
FIG|1491.669.peg.2217; Clostridium botulinum
FIG|1872455.3.peg.401; Alkaliphilus sp.
FIG|576117.5.peg.4005; Celeribacter halophilus
FIG|1225647.3.peg.1829; Phaeobacter sp. 11ANDIMAR09
FIG|1380380.4.peg.1574; Ahrensia sp. 13_GOM-1096m
FIG|293.7.peg.2956; Brevundimonas diminuta
WP_095437634.1; Rhizobium sp. 11515TR
FIG|1912891.7.peg.702; Sphingobium sp.
FIG|1736574.3.peg.4024; Pseudoxanthomonas sp. Root630
FIG|227946.13.peg.4105; Xanthomonas translucens pv. poae
FIG|1761791.3.peg.4793; Lysobacter sp. yr284
FIG|1560195.5.peg.485; Janthinobacterium sp. BJB301
FIG|1503054.43.peg.6257; Burkholderia stagnalis
FIG|1207504.10.peg.4279; Burkholderia pseudomultivorans
WP_092172515.1; unclassified Pseudomonas
WP_074815429.1; Pseudomonas syringae
FIG|150146.3.peg.3162; Flavobacterium gillisiae
FIG|76832.8.peg.3775; Myroides odoratimimus
FIG|1202724.3.peg.994; Flavobacterium akiainvivens
FIG|1805473.3.peg.3678; Chryseobacterium timonianum
FIG|253.33.peg.3826; Chryseobacterium indologenes
WP_076561634.1; Chryseobacterium indoltheticum
FIG|2024823.3.peg.95; Altibacter sp.
FIG|1250278.4.peg.3462; Salegentibacter sp. Hel_I_6
FIG|1797342.3.peg.689; Bacteroidetes bacterium GWF2_33_38
WP_084184261.1; Chryseobacterium ureilyticum
FIG|1948560.3.peg.3003; Deltaproteobacteria bacterium UBA6106
FIG|1392.364.peg.2564; Bacillus anthracis
FIG|872970.3.peg.1713; Amphibacillus marinus
FIG|1385514.3.peg.313; Pontibacillus yanchengensis Y32
FIG|76853.4.peg.2614; Solibacillus silvestris
FIG|1423774.3.peg.1262; Lactobacillus nantensis DSM 16982
FIG|1410670.3.peg.2844; Ruminococcus flavefaciens MA2007
FIG|169435.7.peg.1348; Anaerotruncus colihominis
FIG|1946597.3.peg.2104; Hungatella sp. UBA4568
FIG|1948087.3.peg.796; Firmicutes bacterium UBA6113
FIG|642492.3.peg.2638; Cellulosilyticum lentocellum DSM 5427
FIG|1950841.3.peg.2383; Clostridiales bacterium UBA2436
FIG|555512.3.peg.1251; Salipiger marinus
FIG|383381.3.peg.2538; Erythrobacter sp. JL475
WP_081629462.1;
FIG|1736258.3.peg.3392; Methylobacterium sp. Leaf112
FIG|1950192.3.peg.426; Anaerolineales bacterium UBA2232
FIG|170623.6.peg.4661; Azotobacter beijerinckii
FIG|170623.7.peg.704; Azotobacter beijerinckii
FIG|1981099.3.peg.513; Niveispirillum lacus
FIG|1250539.3.peg.3491; Pelagibaca abyssi
FIG|1947582.3.peg.2979; Sulfitobacter sp. UBA1132
FIG|1909294.17.peg.3456; Rhizobiales bacterium
FIG|1735583.3.peg.1657; Pseudovibrio sp. W64
FIG|670.1220.peg.4688; Vibrio parahaemolyticus
FIG|1004786.3.peg.925; Alteromonas mediterranea DE1
FIG|2013797.3.peg.2109; Gammaproteobacteria bacterium HGW-Gammaproteobacteria-15
FIG|1948580.3.peg.3400; Gammaproteobacteria bacterium UBA1012
FIG|1714300.3.peg.306; Marinobacterium profundum
FIG|1961547.3.peg.1371; Desulfobulbaceae bacterium UBA2273
FIG|441162.10.peg.6621; Burkholderia oklahomensis C6786
FIG|615.307.peg.4666; Serratia marcescens
FIG|631.3.peg.1883; Yersinia intermedia
FIG|1763535.3.peg.1547; Hydrogenophaga crassostreae
FIG|43263.5.peg.2702; Pseudomonas alcaligenes
FIG|244366.46.peg.3595; Klebsiella variicola
FIG|1224150.8.peg.3856; Dickeya paradisiaca NCPPB 2511
FIG|61645.10.peg.2019; Enterobacter asburiae
FIG|1948706.3.peg.2225; Opitutae bacterium UBA1333
FIG|2026771.13.peg.1697; Opitutae bacterium
FIG|2026771.11.peg.1955; Opitutae bacterium
FIG|2026772.5.peg.424; Opitutales bacterium
FIG|2026801.20.peg.1798; Verrucomicrobiales bacterium
FIG|2026801.14.peg.1176; Verrucomicrobiales bacterium
FIG|1951369.3.peg.1157; Akkermansiaceae bacterium UBA6946
FIG|1977087.12.peg.1918; Proteobacteria bacterium
FIG|2026779.14.peg.4171; Planctomycetaceae bacterium
FIG|2026779.28.peg.3264; Planctomycetaceae bacterium
FIG|2026779.30.peg.3181; Planctomycetaceae bacterium
FIG|2026779.29.peg.2310; Planctomycetaceae bacterium
FIG|1797235.3.peg.3; Acinetobacter sp. RIFCSPHIGHO2_12_41_5
FIG|316.284.peg.937; Pseudomonas stutzeri
FIG|296.11.peg.442; Pseudomonas fragi
FIG|1981714.3.peg.993; Pseudomonas sp. B5(2017)
FIG|50340.44.peg.6020; Pseudomonas fuscovaginae
FIG|1761897.3.peg.509; Pseudomonas sp. ok272
FIG|1402514.3.peg.154; Pseudomonas aeruginosa BWHPSA014
FIG|1938440.3.peg.5997; Pseudomonas sp. T
FIG|1566250.3.peg.959; Pseudomonas sp. NFACC02
FIG|316.357.peg.479; Pseudomonas stutzeri
FIG|287.4433.peg.2945; Pseudomonas aeruginosa
FIG|1970515.3.peg.709; Hydrogenophilales bacterium 12-61-10
FIG|95486.85.peg.1748; Burkholderia cenocepacia
FIG|292.61.peg.8104; Burkholderia cepacia
FIG|1408450.3.peg.3766; Methylobacter tundripaludum 21/22
FIG|157910.3.peg.5727; Paraburkholderia tuberum
FIG|279058.16.peg.4239; Collimonas arenae
FIG|1537272.3.peg.1916; Janthinobacterium sp. HH100
FIG|1218081.3.peg.1751; Paraburkholderia kururiensis subsp. thiooxydans NBRC 107107
FIG|573.14059.peg.3113; Klebsiella pneumoniae
FIG|40324.192.peg.51; Stenotrophomonas maltophilia
FIG|1219041.3.peg.4613; Sphingomonas azotifigens NBRC 15497
FIG|1561196.3.peg.560; Burkholderia sp. E7m39
FIG|1882750.3.peg.1035; Burkholderia sp. GAS332
FIG|1736266.3.peg.1145; Duganella sp. Leaf126
FIG|2015350.3.peg.1640; Burkholderia sp. AU18528
FIG|58133.4.peg.815; Nitrosospira sp. NpAV
FIG|1691980.3.peg.1912; Rhodocyclaceae bacterium Paddy-1
FIG|305.393.peg.1023; Ralstonia solanacearum
FIG|56449.3.peg.3604; Xanthomonas bromi
FIG|1281282.5.peg.1894; Xanthomonas campestris pv. campestris str. CN14
FIG|40324.334.peg.1103; Stenotrophomonas maltophilia
FIG|1349793.3.peg.2529; Hydrogenophaga taeniospiralis NBRC 102512
FIG|1842727.3.peg.1491; Rhodoferax koreense
FIG|1619952.3.peg.5158; Burkholderiaceae bacterium 16
FIG|1970380.3.peg.1914; Halothiobacillus sp. 14-55-98
FIG|2015568.3.peg.2963; Burkholderiales bacterium PBB6
FIG|1752215.3.peg.23 12; Gammaproteobacteria bacterium Ga0077554
FIG|1706231.5.peg.3125; Janthinobacterium sp. CG23_2
FIG|2013716.3.peg.2169; Betaproteobacteria bacterium HGW-Betaproteobacteria-4
FIG|1946997.3.peg.3049; Nitrospira sp. UBA7655
FIG|765913.3.peg.2527; Thiorhodococcus drewsii AZ1
FIG|1743159.3.peg.1891; Polynucleobacter yangtzensis
FIG|1597955.3.peg.3923; Limnohabitans sp. DM1
FIG|1184267.3.peg.1626; Bdellovibrio exovorus JSS
FIG|101571.190.peg.3007; Burkholderia ubonensis
FIG|123899.5.peg.1710; Bordetella trematum
FIG|463035.3.peg.3900; Bordetella genomosp. 12
FIG|1395608.4.peg.211; Bordetella genomosp. 5
FIG|1947379.3.peg.2784; Rhodoferax sp. UBA5149
WP_074294985.1; Paraburkholderia phenazinium
FIG|1324617.3.peg.820; Paraburkholderia aspalathi
FIG|80868.3.peg.3458; Acidovorax cattleyae
FIG|1388764.3.peg.1840; Pseudogulbenkiania ferrooxidans EGD-HP2
FIG|251747.15.peg.4695; Chromobacterium subtsugae
FIG|670.1020.peg.382; Vibrio parahaemolyticus
FIG|1055803.3.peg.1434; Pseudoalteromonas sp. TB51
FIG|1201036.3.peg.177; Pseudochrobactrum sp. AO18b
FIG|1220581.4.peg.1434; Agrobacterium rhizogenes NBRC 13257
FIG|398.6.peg.6695; Rhizobium tropici
FIG|931866.6.peg.8184; Bradyrhizobium ottawaense
FIG|142585.3.peg.1658; Bradyrhizobium sp. C9
FIG|1082933.13.peg.1537; Mesorhizobium amorphae CCNWGS0123
FIG|1768789.3.peg.791; Methylobacterium sp. CCH7-A2
FIG|1381123.3.peg.3819; Aliihoeflea sp. 2WW
FIG|1297570.3.peg.1970; Mesorhizobium sp. STM 4661
FIG|935546.3.peg.3816; Mesorhizobium loti NZP2037
FIG|1128253.3.peg.1960; Bradyrhizobium japonicum CCBAU 15354
FIG|1444315.4.peg.3983; Lysobacter capsici AZ78
FIG|1185327.3.peg.1608; Xanthomonas axonopodis pv. manihotis str. Xam668
FIG|1881043.3.peg.2597; Pseudoxanthomonas sp. GM95
ALN84423.1; Lysobacter capsici
FIG|56460.15.peg.1977; Xanthomonas vesicatoria
FIG|1317116.6.peg.2759; Oceanicola sp. 22II-s10i
FIG|564137.3.peg.4320; Roseicitreum antarcticum
FIG|1952800.3.peg.3583; Rhodobacteraceae bacterium UBA2553
FIG|218673.12.peg.3041; Sulfitobacter dubius
FIG|1912092.3.peg.2119; Nioella sediminis
FIG|1736558.3.peg.5006; Ensifer sp. Root558
FIG|91360.5.peg.3717; Desulforhopalus singaporensis
FIG|1948756.3.peg.2576; Spirochaetia bacterium UBA2205
FIG|1855322.3.peg.103; Bradyrhizobium sp. Rc3b
FIG|1437360.11.peg.2429; Bradyrhizobium erythrophlei
FIG|1871052.3.peg.1026; Afipia sp.
FIG|1038860.3.peg.8756; Bradyrhizobium elkanii WSM2783
FIG|1898112.54.peg.3758; Rhodospirillaceae bacterium
FIG|1660129.3.peg.4854; Phenylobacterium sp. SCN 70-31
FIG|1482074.3.peg.4109; Hartmannibacter diazotrophicus
FIG|1970306.3.peg.552; Acidocella sp. 35-58-6
FIG|1686310.5.peg.1409; Bartonella apis
FIG|1798192.3.peg.1953; Thalassospira sp. KO164
FIG|1235461.17.peg.11; Sinorhizobium meliloti GR4
FIG|442.12.peg.222; Gluconobacter oxydans
FIG|1938607.3.peg.1954; Sphingomonas sp. LM7
FIG|1231624.3.peg.39; Asaia bogorensis NBRC 16594
FIG|1121271.3.peg.4112; Gemmobacter nectariphilus DSM 15620
FIG|33059.16.peg.1690; Acidithiobacillus caldus
FIG|502025.10.peg.925; Haliangium ochraceum DSM 14365
FIG|1734406.3.peg.691; Alphaproteobacteria bacterium BRH_c36
FIG|1979207.3.peg.4304; Parvularcula sp.
FIG|1953057.3.peg.74; Parvularculaceae bacterium UBA4496
FIG|858423.3.peg.10004; Bradyrhizobium arachidis
FIG|267128.3.peg.2015; Sphingopyxis granuli
FIG|582667.3.peg.5553; Methylobacterium pseudosasicola
FIG|1187852.3.peg.2712; Methylobacterium tarhaniae
FIG|582675.3.peg.1247; Methylobacterium gossipiicola
FIG|1951640.3.peg.515; Deferribacteraceae bacterium UBA6799
FIG|1948417.4.peg.1606; Alphaproteobacteria bacterium UBA6187
FIG|45074.5.peg.981; Legionella santicrucis
FIG|1434232.4.peg.2927; Magnetofaba australis IT-1
FIG|1945950.3.peg.3568; Acinetobacter sp. UBA6526
FIG|106654.22.peg.994; Acinetobacter nosocomialis
FIG|1977883.3.peg.3023; Acinetobacter sp. ANC 3903
FIG|1945948.3.peg.700; Acinetobacter sp. UBA5984
FIG|1226327.3.peg.2796; Acinetobacter kookii
FIG|1879049.4.peg.5949; Acinetobacter sp. WCHAc010034
FIG|1945955.3.peg.1951; Acinetobacter sp. UBA7614
FIG|1675530.3.peg.2149; Acinetobacter genomosp. 33YU
FIG|1310638.3.peg.1006; Acinetobacter baumannii 1437282
FIG|1400001.4.peg.34; Necropsobacter massiliensis
FIG|1132496.5.peg.136; Pasteurella multocida subsp. multocida str. HN06
FIG|1908263.4.peg.2604; Rodentibacter trehalosifermentans
FIG|375432.4.peg.200; Haemophilus influenzae R3021
FIG|400668.8.peg.3776; Marinomonas sp. MWYL1
FIG|1913989.193.peg.841; Gammaproteobacteria bacterium
FIG|856793.5.peg.1975; Micavibrio aeruginosavorus ARL-13
SBW23286.1; Citrobacter europaeus
FIG|1736225.3.peg.985; Erwinia sp. Leaf53
FIG|29486.12.peg.818; Yersinia ruckeri
FIG|914128.3.peg.2502; Serratia symbiotica str. Tucson
FIG|1796497.3.peg.952; Grimontia celer
FIG|1095649.3.peg.3298; Vibrio cholerae O1 str. EM-1676A
FIG|137584.4.peg.1627; Thalassomonas viridans
FIG|173990.3.peg.1773; Rheinheimera pacifica
FIG|1720343.3.peg.3189; Pseudoalteromonas sp. 1_2015MBL_MicDiv
FIG|1202962.4.peg.1481; Moritella marina ATCC 15381
FIG|669.50.peg.2993; Vibrio harveyi
FIG|691.32.peg.1517; Vibrio natriegens
FIG|156578.3.peg.2521; Alteromonadales bacterium TW-7
FIG|661.14.peg.380; Photobacterium angustum
FIG|654.94.peg.1733; Aeromonas veronii
FIG|703.9.peg.319; Plesiomonas shigelloides
FIG|589873.36.peg.1971; Alteromonas australica
FIG|28107.3.peg.3571; Pseudoalteromonas espejiana
FIG|1547444.3.peg.4264; Pseudoalteromonas sp. PLSV
FIG|629266.7.peg.847; Pseudomonas syringae pv. actinidiae str. M302091
FIG|251722.19.peg.4059; Pseudomonas amygdali pv. aesculi
FIG|587851.4.peg.1470; Pseudomonas chlororaphis subsp. aureofaciens
FIG|1265490.3.peg.2330; Pseudomonas sp. URMO17WK12:I8
FIG|316.101.peg.3534; Pseudomonas stutzeri
FIG|1916993.3.peg.4917; Pseudomonas putida
FIG|1628833.3.peg.2448; Pseudomonas sp. ES3-33
FIG|1283291.4.peg.1991; Pseudomonas sp. URMO17WK12:I11
FIG|83963.5.peg.3885; Pseudomonas syringae pv. papulans
FIG|1206777.3.peg.4334; Pseudomonas sp. Lz4W
FIG|113268.3.peg.3785; Bathymodiolus platifrons methanotrophic gill symbiont
FIG|1131284.3.peg.1562; zeta proteobacterium SCGC AB-137-C09
FIG|2026807.7.peg.2258; Zetaproteobacteria bacterium
FIG|281689.4.peg.2060; Desulfuromonas acetoxidans DSM 684
FIG|1188231.4.peg.1200; Mariprofundus ferrooxydans M34
FIG|1367489.3.peg.682; Aliivibrio fischeri SA1G
FIG|1873135.3.peg.4249; Shewanella sp. SACH
FIG|663.73.peg.2465; Vibrio alginolyticus
FIG|1588629.3.peg.1134; Aeromonas sp. L_1B5_3
FIG|1121922.3.peg.3454; Glaciecola pallidula DSM 14239 = ACAM 615
FIG|351745.9.peg.2506; Shewanella sp. W3-18-1
FIG|29497.20.peg.3798; Vibrio splendidus
FIG|1367486.3.peg.187; Aliivibrio fischeri CB37
FIG|511062.4.peg.1890; Oceanimonas sp. GK1
FIG|654.12.peg.188; Aeromonas veronii
FIG|29497.21.peg.4482; Vibrio splendidus
FIG|1659713.3.peg.560; Enterobacter bugandensis
FIG|1124991.3.peg.3617; Morganella morganii subsp. morganii KT
FIG|104623.3.peg.1381; Serratia sp. ATCC 39006
FIG|1256989.3.peg.902; Providencia alcalifaciens R90-1475
FIG|1125694.3.peg.1143; Proteus mirabilis WGLW6
FIG|574096.6.peg.2693; Pantoea allii
FIG|1095774.3.peg.2623; Pantoea ananatis PA13
FIG|869692.4.peg.2910; Escherichia coli 3003
WP_140159440.1; Escherichia coli Retron-Eco2 (Ec67)
FIG|550.437.peg.1444; Enterobacter cloacae
FIG|573.13605.peg.2600; Klebsiella pneumoniae
FIG|550.285.peg.3783; Enterobacter cloacae
FIG|1265672.3.peg.3869; Salmonella enterica subsp. enterica serovar Agona str. 70.E.05
FIG|573.10028.peg.542; Klebsiella pneumoniae
FIG|749537.3.peg.218; Escherichia coli MS 115-1
ANK06786.1; Escherichia coli O25b:H4
FIG|670.880.peg.975; Vibrio parahaemolyticus
FIG|1192730.4.peg.3; Salmonella enterica subsp. enterica serovar Kintambo
FIG|1224144.4.peg.4030; Dickeya sp. CSL RW240
FIG|568766.10.peg.2937; Dickeya sp. NCPPB 3274
FIG|1076549.3.peg.4260; Pantoea rodasii
FIG|548.102.peg.3401; Klebsiella aerogenes
FIG|630.90.peg.1795; Yersinia enterocolitica
FIG|79883.5.peg.266; Bacillus horikoshii
FIG|180861.3.peg.3762; Bacillus thuringiensis serovar sumiyoshiensis
FIG|1390.157.peg.339; Bacillus amyloliquefaciens
FIG|293386.15.peg.304; Bacillus stratosphericus
FIG|1053181.3.peg.3820; Bacillus cereus BAG2X1-3
FIG|1884375.3.peg.681; Paenibacillus sp. PDC88
FIG|334735.5.peg.923; Sporosarcina koreensis
FIG|79884.3.peg.1120; Bacillus pseudalcaliphilus
FIG|1628206.3.peg.4802; Bacillus sp. LK2
FIG|1396.1605.peg.6235; Bacillus cereus
FIG|182710.3.peg.317; Oceanobacillus iheyensis
FIG|860.10.peg.486; Fusobacterium periodonticum
FIG|1855308.3.peg.1467; Trichococcus ilyis
FIG|931626.3.peg.151; Acetobacterium woodii DSM 1030
FIG|1965575.3.peg.2547; Lachnoclostridium sp. An181
FIG|1352.2757.peg.71; Enterococcus faecium
FIG|1299895.3.peg.900; Listeria monocytogenes CFSAN002349
FIG|53346.29.peg.1591; Enterococcus mundtii
FIG|1649188.10.peg.1545; Listeria goaensis
FIG|158847.6.peg.432; Megamonas hypermegale
FIG|1121289.3.peg.2775; Clostridiisalibacter paucivorans DSM 22131
FIG|1950885.3.peg.858; Clostridiales bacterium UBA4693
FIG|1965576.3.peg.1978; Pseudoflavonifractor sp. An184
FIG|1952416.3.peg.1629; Ruminococcaceae bacterium UBA642
FIG|1262803.3.peg.8; Clostridium sp. CAG:413
FIG|28037.216.peg.60; Streptococcus mitis
FIG|1074052.3.peg.33; Streptococcus sobrinus TCI-9
FIG|1304.207.peg.1536; Streptococcus salivarius
FIG|1154859.3.peg.955; Streptococcus agalactiae LMG 14609
FIG|1080071.3.peg.332; Streptococcus orisasini
FIG|1139219.3.peg.2194; Enterococcus dispar ATCC 51266
FIG|1834176.3.peg.811; Enterococcus sp. 3G1_DIV0629
FIG|1622.15.peg.947; Lactobacillus murinus
FIG|565651.6.peg.1942; Enterococcus faecalis ARO1/DG
FIG|1473546.3.peg.703; Lysinibacillus sp. BF-4
FIG|37734.13.peg.137; Enterococcus casseliflavus
FIG|492670.92.peg.623; Bacillus velezensis
FIG|1639.1907.peg.2641; Listeria monocytogenes
FIG|1123489.3.peg.170; Veillonella magna DSM 19857
FIG|1280687.3.peg.1880; Butyrivibrio fibrisolvens YRB2005
FIG|1262889.3.peg.680; Eubacterium sp. CAG:38
FIG|1235800.3.peg.2226; Lachnospiraceae bacterium 10-1
FIG|1897035.3.peg.445; Firmicutes bacterium CAG:552_39_19
FIG|199.588.peg.774; Campylobacter concisus
FIG|1111133.4.peg.219; Peptoniphilus sp. BV3AC2
FIG|936589.3.peg.875; Veillonella sp. AS16
WP_070600378.1;
FIG|1896998.3.peg.1750; Coprococcus sp. CAG:131-related_45_246
FIG|41170.3.peg.3013; Exiguobacterium acetylicum
FIG|59620.44.peg.897; uncultured Clostridium sp.
FIG|1262843.3.peg.313; Clostridium sp. CAG:813
FIG|1262834.3.peg.1287; Clostridium sp. CAG:715
FIG|1256219.3.peg.760; Lactobacillus paracasei subsp. paracasei Lpp230
FIG|115778.31.peg.1994; Leuconostoc gelidum subsp. gasicomitatum
FIG|29385.174.peg.531; Staphylococcus saprophyticus
FIG|1295.21.peg.75; Staphylococcus schleiferi
FIG|148814.13.peg.1360; Lactobacillus kunkeei
FIG|1282.1242.peg.673; Staphylococcus epidermidis
FIG|1581078.3.peg.1186; Staphylococcus sp. HMSC10C03
FIG|1891097.3.peg.280; Macrococcus goetzii
WP_080703103.1;
FIG|1214184.3.peg.1129; Streptococcus suis 22083
FIG|1154771.3.peg.209; Streptococcus agalactiae FSL C1-487
FIG|1415765.3.peg.1578; Streptococcus mitis 21/39
FIG|1581074.3.peg.720; Granulicatella sp. HMSC31F03
FIG|1349.233.peg.712; Streptococcus uberis
FIG|1946281.3.peg.392; Catabacter sp. UBA5893
FIG|1328309.5.peg.1889; Lactobacillus plantarum IPLA88
FIG|1214190.3.peg.2034; Streptococcus suis YS17
FIG|29385.135.peg.2098; Staphylococcus saprophyticus
FIG|1715184.3.peg.1265; Aerococcus sp. HMSC035B07
FIG|1881068.3.peg.2940; Sphingomonas sp. OV641
FIG|1522072.3.peg.3829; Sphingobium sp. ba1
FIG|1802172.3.peg.237; Sphingopyxis sp. RIFCSPHIGHO2_12_FULL_65_19
FIG|1128204.3.peg.2189; Bradyrhizobium elkanii CCBAU 43297
FIG|1708715.5.peg.4517; Ensifer aridi
FIG|195105.3.peg.2062; Haematobacter massiliensis
FIG|1283312.3.peg.4182; Sphingomonas wittichii DC-6
FIG|1120654.4.peg.406; Ensifer sp. LC499
FIG|529.36.peg.3144; Ochrobactrum anthropi
FIG|1194716.3.peg.4774; Sinorhizobium meliloti AK75
FIG|1660088.4.peg.2967; Agrobacterium sp. SCN 61-19
FIG|1951259.3.peg.2515; Sphingomonadales bacterium UBA6174
FIG|1912891.5.peg.2102; Sphingobium sp.
FIG|1670800.3.peg.1844; Mesorhizobium oceanicum
FIG|2032658.3.peg.157; Alphaproteobacteria bacterium WMHbin7
FIG|1819565.5.peg.2208; Flavimaricola marinus
FIG|1245469.3.peg.1160; Bradyrhizobium oligotrophicum S58
FIG|1615890.4.peg.173; Bradyrhizobium sp. LTSP849
FIG|56454.3.peg.3464; Xanthomonas hortorum
FIG|40324.384.peg.1060; Stenotrophomonas maltophilia
FIG|1801972.3.peg.1832; Planctomycetes bacterium RBG_19FT_COMBO_48_8
FIG|1978765.3.peg.3488; Nitrospira sp. ST-bin5
FIG|2009322.3.peg.2770; Leptolyngbya ohadii IS1
FIG|1325564.3.peg.3733; Nitrospira japonica
FIG|43662.9.peg.1688; Pseudoalteromonas piscicida
FIG|670.134.peg.4439; Vibrio parahaemolyticus
FIG|998520.3.peg.3325; Pseudoalteromonas agarivorans
FIG|1723759.3.peg.401; Pseudoalteromonas sp. P1-26
FIG|672.133.peg.585; Vibrio vulnificus
FIG|1324960.19.peg.585; Aeromonas salmonicida subsp. pectinolytica 34mel
FIG|196024.16.peg.3965; Aeromonas dhakensis
FIG|654.27.peg.4266; Aeromonas veronii
FIG|1802253.3.peg.1045; Sulfurimonas sp. RIFCSPLOWO2_12_36_12
FIG|636.16.peg.3905; Edwardsiella tarda
FIG|1124958.3.peg.5012; Salmonella enterica subsp. enterica serovar Muenster str. 0315
FIG|573.10007.peg.225; Klebsiella pneumoniae
FIG|1946737.3.peg.4002; Leclercia sp. UBA1284
FIG|1398203.3.peg.3712; Xenorhabdus bovienii str. kraussei Quebec
FIG|615.247.peg.2151; Serratia marcescens
FIG|52441.3.peg.3752; Nitrosomonas aestuarii
FIG|1951948.3.peg.242; Hyphomonadaceae bacterium UBA2389
FIG|165186.29.peg.27; uncultured Ruminococcus sp.
FIG|2013842.3.peg.1881; Synergistetes bacterium HGW-Synergistetes-1
FIG|411484.7.peg.436; Clostridium sp. SS2/1
FIG|460384.4.peg.447; Enterocloster lavalensis
FIG|1761781.3.peg.2961; Clostridium sp. DSM 8431
FIG|1451.25.peg.614; Paenibacillus amylolyticus
FIG|1776378.3.peg.2009; Paenibacillus phocaensis
FIG|1866315.3.peg.2122; Bacillus sp. N35-10-4
FIG|1034836.4.peg.4077; Bacillus amyloliquefaciens XH7
FIG|1397.14.peg.5097; Bacillus circulans
FIG|1497681.5.peg.772; Listeria newyorkensis
FIG|1053224.3.peg.4333; Bacillus cereus VD021
FIG|1374.4.peg.2798; Planococcus kocurii
FIG|458233.11.peg.419; Macrococcus caseolyticus JCSC5402
FIG|417368.6.peg.944; Enterococcus thailandicus
FIG|1353.16.peg.736; Enterococcus gallinarum
FIG|1639.1307.peg.2578; Listeria monocytogenes
FIG|1649188.4.peg.450; Listeria goaensis
FIG|333990.5.peg.1279; Carnobacterium sp. AT7
FIG|1121085.3.peg.4805; Bacillus aidingensis DSM 18341
FIG|659243.6.peg.1163; Bacillus siamensis
FIG|1965645.3.peg.1428; Alistipes sp. An54
FIG|1950664.3.peg.363; Bacteroidales bacterium UBA5918
FIG|681398.3.peg.1596; Paludibacter jiangxiensis
FIG|1947481.3.peg.1596; Sphingobacterium sp. UBA1498
FIG|1946424.3.peg.2345; Dysgonomonas sp. UBA4861
FIG|188932.3.peg.968; Pedobacter cryoconitis
FIG|505249.7.peg.1802; Arcobacter marinus
FIG|1802259.3.peg.374; Sulfurimonas sp. RIFOXYD12_FULL_33_39
FIG|1872629.13.peg.663; Arcobacter sp.
FIG|497650.4.peg.949; Sulfurovum sp. enrichment culture clone C5
FIG|1981711.3.peg.707; Pseudomonas sp. B8(2017)
FIG|287.926.peg.3808; Pseudomonas aeruginosa
FIG|157782.3.peg.183; Pseudomonas parafulva
FIG|1225174.5.peg.576; Pseudomonas mendocina S5.2
FIG|237610.8.peg.4301; Pseudomonas psychrotolerans
FIG|1116369.3.peg.182; Hoeflea sp. 108
WP_080858354.1;
FIG|1679460.3.peg.2715; Marinibacterium profundimaris
FIG|1811547.3.peg.510; Maritimibacter sp. REDSEA-S28_B5
FIG|93684.8.peg.518; Roseivivax halotolerans
EMZ69714.1; Escherichia coli 174900
FIG|103796.87.peg.3165; Pseudomonas syringae pv. actinidiae
WP_078828851.1; Pantoea ananatis
FIG|2018067.3.peg.1734; Pseudomonas sp. FDAARGOS_380
FIG|294.255.peg.5151; Pseudomonas fluorescens
FIG|287.4271.peg.5445; Pseudomonas aeruginosa
FIG|46677.3.peg.3237; Pseudomonas agarici
FIG|83964.10.peg.849; Pseudomonas coronafaciens pv. porri
FIG|1932113.4.peg.2793; Pseudomonas sp. PA1(2017)
FIG|1712677.3.peg.189; Pseudomonas sp. 2822-15
FIG|1479235.3.peg.2741; Halomonas sp. HL-48
FIG|227946.12.peg.3247; Xanthomonas translucens pv. poae
FIG|40324.220.peg.2801; Stenotrophomonas maltophilia
FIG|227946.13.peg.35; Xanthomonas translucens pv. poae
FIG|487909.15.peg.4212; Xanthomonas translucens pv. undulosa
FIG|40324.145.peg.2120; Stenotrophomonas maltophilia
FIG|1182783.3.peg.8; Xanthomonas campestris JX
FIG|1736581.3.peg.4144; Lysobacter sp. Root667
FIG|470.4256.peg.2128; Acinetobacter baumannii
FIG|1804984.3.peg.4735; Burkholderia sp. OLGA172
FIG|1882792.3.peg.5959; Burkholderia sp. CF145
FIG|1458357.5.peg.7849; Caballeronia jiangsuensis
FIG|674703.3.peg.3992; Rhodoplanes sp. Z2-YC6860
FIG|1230476.3.peg.595; Bradyrhizobium sp. DFCI-1
FIG|1752222.3.peg.1730; Rhizobiales bacterium Ga0077525
FIG|1948848.3.peg.320; Patescibacteria group bacterium UBA6220
FIG|1860092.3.peg.3966; Alphaproteobacteria bacterium MedPE-SWcel
FIG|398.7.peg.3301; Rhizobium tropici
FIG|418630.3.peg.960; Rhodobacter megalophilus
FIG|56.40.peg.5712; Sorangium cellulosum
FIG|1660160.3.peg.2510; Acidobacteria bacterium SCN 69-37
FIG|1661042.3.peg.2224; Pseudomonas sp. NBRC 111127
FIG|1712678.3.peg.4198; Pseudomonas sp. 2822-17
FIG|1736561.3.peg.128; Pseudomonas sp. Root562
FIG|76760.8.peg.1730; Pseudomonas rhodesiae
FIG|1295133.4.peg.7170; Pseudomonas putida JCM 18798
FIG|1718917.3.peg.3132; Pseudomonas sp. ICMP 460
FIG|237306.3.peg.591; Pseudomonas syringae pv. persicae
FIG|1079060.3.peg.1479; Pseudomonas savastanoi pv. phaseolicola 1644R
FIG|1981714.3.peg.1068; Pseudomonas sp. B5(2017)
FIG|1419583.3.peg.4516; Pseudomonas mandelii PD30
FIG|1718918.3.peg.4166; Pseudomonas sp. ICMP 561
FIG|64988.7.peg.76; Alcanivorax jadensis
FIG|1961564.3.peg.685; Desulfovibrionaceae bacterium UBA5546
FIG|2004648.3.peg.1747; Acinetobacter sp. WCHA39
FIG|1080187.3.peg.399; Cupriavidus sp. UYPR2.512
FIG|76114.8.peg.258; Aromatoleum aromaticum EbN1
FIG|196367.9.peg.6286; Caballeronia sordidicola
FIG|1217418.3.peg.694; Cupriavidus sp. HPC(L)
FIG|1752216.3.peg.4007; Nitrosomonadales bacterium Ga0074132
FIG|1249621.3.peg.3614; Cupriavidus sp. HMR-1
FIG|179879.8.peg.6514; Burkholderia anthina
FIG|1246301.3.peg.4482; Variovorax paradoxus B4
WP_092746164.1; Acidovorax valerianellae
FIG|536.30.peg.857; Chromobacterium violaceum
FIG|1961112.3.peg.115; Planctomycetes bacterium UTPLA1
FIG|44574.5.peg.4575; Nitrosomonas communis
FIG|265901.4.peg.190; Photobacterium sp. J15
FIG|80852.21.peg.1289; Aliivibrio wodanis
FIG|1136159.3.peg.2534; Vibrio cyclitrophicus 1F111
FIG|24.6.peg.4539; Shewanella putrefaciens
FIG|888433.3.peg.1974; Pseudoalteromonas sp. GutCa3
FIG|196024.6.peg.3651; Aeromonas dhakensis
FIG|1352943.3.peg.5028; Vibrio harveyi E385
WP_088124663.1; Vibrio cholerae
FIG|29497.15.peg.1220; Vibrio splendidus
FIG|670.413.peg.1227; Vibrio parahaemolyticus
FIG|584.91.peg.3337; Proteus mirabilis
FIG|263819.5.peg.201; Yersinia aleksiciae
FIG|1656094.3.peg.1449; Alteromonas confluentis
FIG|634.5.peg.607; Yersinia bercovieri
FIG|630.85.peg.4080; Yersinia enterocolitica
FIG|1212491.3.peg.1847; Legionella fallonii LLAP-10
FIG|1498499.3.peg.2812; Legionella norrlandica
FIG|1844092.4.peg.3143; Pseudomonas sp. 8 R 14
FIG|1441629.3.peg.2119; Pseudomonas cichorii JBC1
WP_092369835.1; Pseudomonas seleniipraecipitans
FIG|477228.3.peg.2040; Pseudomonas stutzeri TS44
FIG|317.249.peg.4299; Pseudomonas syringae
FIG|1597.16.peg.2055; Lactobacillus paracasei
FIG|1184720.6.peg.2708; Rhizobium anhuiense
FIG|1566263.3.peg.185; Rhizobium sp. NFR03
FIG|1951216.3.peg.1622; Rhizobiales bacterium UBA1909
FIG|1219052.3.peg.3572; Sphingomonas pruni NBRC 15498
FIG|376620.8.peg.122; Gluconobacter japonicus
FIG|1736587.3.peg.2638; Devosia sp. Root685
WP_011269850.1; Xanthomonas campestris
FIG|1195246.3.peg.467; Alishewanella agri BL06
FIG|1931276.3.peg.1294; Haliangium sp. UPWRP_2
FIG|1931204.4.peg.12; Confluentimicrobium sp.
FIG|2052957.3.peg.3497; Pseudorhodobacter sp. MZDSW-24AT
FIG|1952825.3.peg.2772; Rhodobiaceae bacterium UBA4205
FIG|1189622.3.peg.1716; Pseudomonas amygdali pv. tabaci str. 6605
FIG|294.173.peg.2741; Pseudomonas fluorescens
FIG|294.122.peg.3307; Pseudomonas fluorescens
FIG|1198456.3.peg.4053; Pseudomonas guguanensis
FIG|1855380.3.peg.1951; Pseudomonas sp. Z003-0.4C(8344-21)
FIG|1144330.3.peg.3879; Pseudomonas sp. GM48
FIG|86265.3.peg.2799; Pseudomonas thivervalensis
FIG|1881035.3.peg.3817; Mitsuaria sp. PDC51
FIG|511.8.peg.774; Alcaligenes faecalis
FIG|1095552.3.peg.2955; Methylobacter luteus IMV-B-3098
FIG|1690268.3.peg.1172; Acidovorax sp. SD340
FIG|871652.3.peg.1451; Poseidonocella sedimentorum
FIG|1946868.3.peg.175; Methylophaga sp. UBA1490
FIG|1924940.3.peg.1147; Mameliella sp.
FIG|1912891.7.peg.5370; Sphingobium sp.
FIG|1236503.3.peg.1539; Acetobacter persici JCM 25330
FIG|1745182.3.peg.1942; Paracoccus sp. MKU1
FIG|1112.5.peg.2875; Porphyrobacter neustonensis
WP_051585410.1; Sphingomonas paucimobilis
FIG|1082931.4.peg.3584; Pelagibacterium halotolerans B2
FIG|1907665.3.peg.5475; Agrobacterium sp. DSM 25558
FIG|1841652.4.peg.3782; Agrobacterium sp. 13-626
FIG|1736312.3.peg.3441; Rhizobium sp. Leaf262
FIG|1768770.3.peg.4687; Caulobacter sp. CCH5-E12
FIG|355591.9.peg.1867; Marinobacter vinifirmus
FIG|1869214.4.peg.1848; Rheinheimera sp.
FIG|1946470.3.peg.3546; Erythrobacter sp. UBA2510
FIG|1860090.3.peg.231; Roseobacter sp. MedPE-SWde
FIG|2020902.8.peg.1814; Ponticaulis sp.
FIG|940286.3.peg.3612; Komagataeibacter oboediens 174Bp2
FIG|1736380.3.peg.1842; Rhizobium sp. Leaf453
FIG|665126.3.peg.2283; Prosthecomicrobium hirschii
FIG|2029410.3.peg.1956; Mesorhizobium sp. WSM4311
WP_003169203.1; Brevundimonas diminuta
FIG|1884373.3.peg.3317; Mesorhizobium sp. YR577
FIG|989436.3.peg.3203; Pseudovibrio sp. Ad5
FIG|1736359.3.peg.3976; Rhizobium sp. Leaf386
FIG|104102.12.peg.3797; Acetobacter tropicalis
FIG|1500305.3.peg.4736; Rhizobium sp. OK665
FIG|1842535.30.peg.6; Blastomonas sp. RAC04
FIG|70775.16.peg.91; Pseudomonas plecoglossicida
FIG|287.4262.peg.2063; Pseudomonas aeruginosa
WP_017702484.1; Pseudomonas syringae
FIG|1357292.3.peg.4700; Pseudomonas syringae pv. pisi str. PP1
FIG|287.2436.peg.3554; Pseudomonas aeruginosa
FIG|76758.3.peg.4722; Pseudomonas orientalis
FIG|1904755.3.peg.3469; Pseudomonas sp. 43NM1
FIG|47879.37.peg.693; Pseudomonas corrugata
FIG|1771311.3.peg.1935; Pseudomonas sp. ATCC PTA-122608
FIG|2008975.3.peg.1976; Pseudomonas sp. Irchel 3E13
FIG|1259798.3.peg.1121; Pseudomonas sp. LAMO17WK12:I2
FIG|1736487.3.peg.2103; Noviherbaspirillum sp. Root189
FIG|1706231.5.peg.1557; Janthinobacterium sp. CG23_2
FIG|1804984.3.peg.4700; Burkholderia sp. OLGA172
FIG|54067.3.peg.2925; Xylophilus ampelinus
FIG|40324.357.peg.1426; Stenotrophomonas maltophilia
FIG|1967657.4.peg.913; Salmonella enterica subsp. enterica serovar Telelkebir
FIG|573.14330.peg.816; Klebsiella pneumoniae
FIG|615.357.peg.16; Serratia marcescens
FIG|1122616.3.peg.231; Oceanospirillum beijerinckii DSM 7166
FIG|314276.4.peg.1389; Idiomarina baltica OS145
FIG|1038921.4.peg.2790; Pseudomonas chlororaphis subsp. aureofaciens 30-84
FIG|292.72.peg.3280; Burkholderia cepacia
FIG|1899355.18.peg.947; Oceanospirillaceae bacterium
FIG|2015356.3.peg.5401; Burkholderia sp. AU33647
FIG|206665.3.peg.1731; Desulfonauticus submarinus
FIG|1987165.3.peg.2564; Sphingobium sp. GW456-12-10-14-TSB1
FIG|1283312.3.peg.2182; Sphingomonas wittichii DC-6
FIG|1223566.3.peg.1810; Bradyrhizobium sp. CCGE-LA001
FIG|76761.16.peg.744; Pseudomonas veronii
PIY00499.1; Hydrogenophilales bacterium CG_4_10_14_3_um_filter_58_23
FIG|305.94.peg.4778; Ralstonia solanacearum
FIG|1758178.5.peg.2546; Celeribacter ethanolicus
FIG|1354263.4.peg.2524; Hafnia paralvei ATCC 29927
FIG|1125979.3.peg.1941; Rhizobium sp. PDO1-076
FIG|1338032.3.peg.3393; Vibrio parahaemolyticus O1:K33 str. CDC_K4557
FIG|1898112.54.peg.3344; Rhodospirillaceae bacterium
FIG|1432558.3.peg.4265; Klebsiella pneumoniae ISC21
FIG|333962.3.peg.2767; Providencia heimbachae
FIG|60552.10.peg.2414; Burkholderia vietnamiensis
WP_011808964.1; Verminephrobacter eiseniae
FIG|1844107.4.peg.2966; Pseudomonas sp. 58 R 12
FIG|1952916.3.peg.906; Synergistaceae bacterium UBA5549
FIG|458817.8.peg.542; Shewanella halifaxensis HAW-EB4
FIG|1674859.3.peg.1291; Spirochaetales bacterium Spiro_03
FIG|1121434.3.peg.22; Halodesulfovibrio aestuarii DSM 10141
FIG|1262899.3.peg.286; Fusobacterium sp. CAG:439
FIG|57320.3.peg.1084; Pseudodesulfovibrio profundus
FIG|1736444.3.peg.3753; Acinetobacter sp. Root1280
FIG|1310670.3.peg.2122; Acinetobacter sp. 907131
FIG|505345.6.peg.150; Gallibacterium genomosp. 3
FIG|670.887.peg.4391; Vibrio parahaemolyticus
FIG|196024.16.peg.2750; Aeromonas dhakensis
FIG|663.48.peg.1321; Vibrio alginolyticus
FIG|28141.133.peg.4717; Cronobacter sakazakii
FIG|1117315.3.peg.3; Pseudoalteromonas haloplanktis ATCC 14393
FIG|1917164.4.peg.2739; Shewanella sp. UCD-KL21
FIG|2006083.3.peg.3222; Photobacterium sp. CECT 9192
FIG|584.227.peg.2146; Proteus mirabilis
FIG|1792834.4.peg.1793; Marinicella sediminis
FIG|1333513.3.peg.3775; Pseudoalteromonas haloplanktis TAE56
FIG|1305826.3.peg.1246; Streptomyces sp. Amel2xC10
WP_048809063.1; Microbacterium ginsengisoli
FIG|1987376.3.peg.4246; Pseudonocardia sp. N23
FIG|164115.3.peg.6832; Streptomyces niveiscabiei
FIG|285676.33.peg.4994; Micromonospora saelicesensis
SFF52649.1; Streptomyces alni
FIG|1100822.3.peg.6408; Streptomyces sp. AmelKG-E11A
WP_098467790.1;
FIG|1190417.3.peg.2916; Geodermatophilus telluris
SDS16714.1; Agrococcus carbonis
FIG|692370.5.peg.1108; Altererythrobacter dongtanensis
FIG|1736370.3.peg.1383; Sphingomonas sp. Leaf412
FIG|1759074.3.peg.2615; Sphingopyxis sp. HIX
FIG|1120928.3.peg.922; Acinetobacter tjernbergiae DSM 14971 = CIP 107465
FIG|470.4268.peg.2032; Acinetobacter baumannii
FIG|1217627.3.peg.995; Acinetobacter baumannii NIPH 67
FIG|28450.149.peg.5786; Burkholderia pseudomallei
FIG|2032650.3.peg.3543; Magnetococcales bacterium HCHbin5
FIG|101571.169.peg.3909; Burkholderia ubonensis
FIG|396597.7.peg.2128; Burkholderia ambifaria MEX-5
FIG|869212.3.peg.3514; Turneriella parva DSM 21527
FIG|1196083.80.peg.1885; Snodgrassella alvi
FIG|1304886.3.peg.1257; Desulfotignum balticum DSM 7044
FIG|555.16.peg.1362; Pectobacterium carotovorum subsp. carotovorum
FIG|1421338.3.peg.151; Enterobacter asburiae L1
FIG|443144.3.peg.785; Geobacter sp. M21
FIG|1265503.3.peg.1271; Colwellia piezophila ATCC BAA-637
FIG|55601.100.peg.1601; Vibrio anguillarum
FIG|299766.9.peg.4890; Enterobacter hormaechei subsp. steigerwaltii
FIG|243231.5.peg.1360; Geobacter sulfurreducens PCA
FIG|1263083.3.peg.558; Klebsiella variicola CAG:634
FIG|57706.9.peg.1106; Citrobacter braakii
FIG|1619244.3.peg.1323; Enterobacter bugandensis
SHO56340.1; Vibrio quintilis
FIG|688.15.peg.906; Aliivibrio logei
FIG|663.75.peg.4800; Vibrio alginolyticus
FIG|1967612.3.peg.4508; Salmonella enterica subsp. houtenae serovar 50:z4, z23:—
FIG|82985.3.peg.3508; Pragia fontium
FIG|55207.5.peg.1840; Pectobacterium betavasculorum
FIG|582.25.peg.388; Morganella morganii
FIG|1006598.5.peg.80; Serratia plymuthica RVH1
FIG|82977.3.peg.3268; Buttiauxella agrestis
CRY53703.1; Yersinia intermedia
FIG|595494.3.peg.706; Tolumonas auensis DSM 9187
FIG|1217694.3.peg.3300; Acinetobacter sp. CIP 64.2
FIG|470.2679.peg.715; Acinetobacter baumannii
FIG|1879050.4.peg.2797; Acinetobacter wuhouensis
FIG|2004650.3.peg.1818; Acinetobacter chinensis
FIG|648.80.peg.1405; Aeromonas caviae
FIG|1217722.3.peg.1866; Pseudomonas sp. S13.1.2
FIG|294.88.peg.4234; Pseudomonas fluorescens
FIG|629262.5.peg.1917; Pseudomonas syringae pv. japonica str. M301072
WP_053932309.1; Pseudomonas coronafaciens
FIG|1844101.3.peg.4702; Pseudomonas sp. 31 R 17
FIG|380021.13.peg.6149; Pseudomonas protegens
FIG|287.3716.peg.2163; Pseudomonas aeruginosa
FIG|287.3208.peg.1464; Pseudomonas aeruginosa
FIG|1952221.3.peg.555; Methylococcaceae bacterium UBA2780
FIG|1869214.3.peg.3542; Rheinheimera sp.
FIG|375286.7.peg.830; Janthinobacterium sp. Marseille
FIG|536.26.peg.4616; Chromobacterium violaceum
FIG|983548.3.peg.2977; Dokdonia sp. 4H-3-7-5
FIG|307480.5.peg.1780; Chryseobacterium vrystaatense
FIG|1262921.3.peg.2213; Prevotella sp. CAG:1185
FIG|1965649.3.peg.4193; Butyricimonas sp. An62
FIG|1951558.3.peg.3731; Chitinophagaceae bacterium UBA4411
FIG|1950669.3.peg.2035; Bacteroidales bacterium UBA6192
FIG|1869230.3.peg.3025; Chryseobacterium sp. CBo1
FIG|1500294.3.peg.2814; Chryseobacterium sp. YR485
FIG|1756149.11.peg.2545; Elizabethkingia bruuniana
FIG|1137281.3.peg.1436; Xanthomarina gelatinilytica
FIG|1964365.5.peg.2525; Sneathiella sp.
FIG|28450.428.peg.5049; Burkholderia pseudomallei
FIG|1628751.3.peg.813; Nostoc linckia z16
FIG|60137.10.peg.1138; Sulfitobacter pontiacus
FIG|1580596.3.peg.2701; Phaeobacter piscinae
FIG|1041141.4.peg.4741; Rhizobium leguminosarum bv. viciae 128C53
WP_063290764.1; unclassified Pseudovibrio
FIG|1816219.4.peg.1873; Colwellia sp. PAMC 21821
FIG|651.3.peg.13; Aeromonas media
FIG|134375.17.peg.3222; Achromobacter sp.
WP_011296194.1; Cupriavidus pinatubonensis
FIG|1513890.4.peg.2322; Pseudomonas chlororaphis subsp. piscium
FIG|294.193.peg.980; Pseudomonas fluorescens
FIG|287.2516.peg.114; Pseudomonas aeruginosa
FIG|2006083.3.peg.3219; Photobacterium sp. CECT 9192
FIG|458817.8.peg.538; Shewanella halifaxensis HAW-EB4
FIG|1073383.3.peg.1289; Aeromonas veronii AMC34
FIG|190893.14.peg.2110; Vibrio coralliilyticus
FIG|663.144.peg.2659; Vibrio alginolyticus
FIG|55601.106.peg.926; Vibrio anguillarum
FIG|669.51.peg.5531; Vibrio harveyi
FIG|1250059.5.peg.3511; Tenacibaculum sp. MAR_2009_124
FIG|906888.6.peg.2449; Nonlabens ulvanivorans
WP_042276051.1; Nonlabens sediminis
FIG|1953167.3.peg.1254; Bacteroidetes bacterium UBA6221
FIG|991.14.peg.629; Flavobacterium hydatis
FIG|1121890.3.peg.5; Flavobacterium frigidarium DSM 17623
FIG|387094.4.peg.1115; Flavobacterium hercynium
FIG|1946558.3.peg.2413; Flavobacterium sp. UBA7665
FIG|253.27.peg.2882; Chryseobacterium indologenes
FIG|1685010.5.peg.4376; Chryseobacterium glaciei
FIG|1500289.3.peg.4103; Chryseobacterium sp. OV705
FIG|1500298.3.peg.2823; Chryseobacterium sp. YR561
FIG|1797331.3.peg.2180; Bacteroidetes bacterium GWE2_29_8
FIG|1947498.3.peg.1366; Sphingobacterium sp. UBA4616
WP_074239321.1; Chitinophaga niabensis
FIG|192149.7.peg.174; Muricauda sp.
FIG|718222.3.peg.4924; Bacillus cereus TIAC219
FIG|1053210.3.peg.211; Bacillus cereus HuB4-10
FIG|2026089.3.peg.6077; Paenibacillus sp. XY044
FIG|1938610.3.peg.3678; Flavobacterium sp. LM5
FIG|1947482.3.peg.632; Sphingobacterium sp. UBA1575
FIG|1948844.3.peg.823; Patescibacteria group bacterium UBA6130
FIG|986.7.peg.83; Flavobacterium johnsoniae
FIG|1950382.3.peg.461; Bacteroidales bacterium UBA1181
FIG|1947145.3.peg.376; Prevotella sp. UBA3765
FIG|1122989.3.peg.367; Prevotella oris DSM 18711 = JCM 12252
FIG|1896974.3.peg.2001; Bacteroides sp. 43_108
FIG|2014804.3.peg.4306; Lewinellaceae bacterium SD302
FIG|1428.517.peg.2380; Bacillus thuringiensis
FIG|1428.574.peg.3351; Bacillus thuringiensis
FIG|1428.590.peg.5685; Bacillus thuringiensis
FIG|720554.3.peg.188; Hungateiclostridium clariflavum DSM 19732
FIG|1122203.4.peg.2283; Marinococcus halotolerans DSM 16375
FIG|1462525.3.peg.3489; Thalassobacillus sp. TM-1
FIG|1395513.3.peg.363; Sporolactobacillus laevolacticus DSM 442
FIG|1262834.3.peg.1229; Clostridium sp. CAG:715
SCI87282.1; uncultured Roseburia sp.
FIG|1952116.3.peg.2349; Lachnospiraceae bacterium UBA6480
WP_069150959.1; Lachnospiraceae
FIG|1265.10.peg.3100; Ruminococcus flavefaciens
FIG|1120998.3.peg.2858; Anaerovorax odorimutans DSM 5092
WP_072702499.1; Butyrivibrio hungatei
FIG|1232453.3.peg.2795; Clostridiales bacterium VE202-21
FIG|39485.11.peg.251; Lachnospira eligens
WP_072832325.1;
FIG|1509.24.peg.2487; Clostridium sporogenes
SCI88558.1; uncultured Clostridium sp.
FIG|1490.6.peg.2635; Paraclostridium bifermentans
FIG|1947399.3.peg.1322; Hungateiclostridiaceae bacterium UBA3548
FIG|1953138.3.peg.796; Bacteroidetes bacterium UBA1312
FIG|1950875.3.peg.364; Clostridiales bacterium UBA4139
FIG|1396.1518.peg.4860; Bacillus cereus
FIG|1305675.3.peg.2174; Bacillus solimangrovi
FIG|1423.436.peg.4365; Bacillus subtilis
FIG|361277.6.peg.1539; Terribacillus saccharophilus
FIG|1392.356.peg.4724; Bacillus anthracis
FIG|1053189.3.peg.4219; Bacillus cereus BAG5X1-1
WP_079442297.1; Clostridium chromiireducens
FIG|1953262.3.peg.783; Candidatus Omnitrophica bacterium UBA1562
FIG|1797955.3.peg.2304; Elusimicrobia bacterium RIFOXYA12_FULL_51_18
FIG|1953111.3.peg.2436; Acidobacteria bacterium UBA7540
WP_099010551.1; Escherichia coli Retron-Eco1 (Ec86)
FIG|1005565.3.peg.1153; Escherichia coli 3006
FIG|158822.8.peg.1905; Cedecea neteri
FIG|1444060.3.peg.4830; Escherichia coli 4-203-08_S1_C1
FIG|29484.22.peg.4571; Yersinia frederiksenii
FIG|529823.3.peg.332; Cellvibrio sp. OA-2007
FIG|48296.218.peg.3142; Acinetobacter pittii
FIG|550.518.peg.3445; Enterobacter cloacae
FIG|204773.6.peg.4; Herminiimonas arsenicoxydans
FIG|670.190.peg.4348; Vibrio parahaemolyticus
FIG|44577.7.peg.209; Nitrosomonas ureae
FIG|1125747.3.peg.1; Paraglaciecola agarilytica NO2
FIG|1338034.3.peg.2437; Vibrio parahaemolyticus O1:Kuk str. FDA_R31
FIG|1952844.3.peg.2619; Rhodocyclaceae bacterium UBA5533
FIG|1288788.3.peg.2384; Vibrio parahaemolyticus 3631
FIG|644.31.peg.975; Aeromonas hydrophila
FIG|498292.3.peg.28; Flavobacterium swingsii
FIG|1948088.3.peg.4515; Firmicutes bacterium UBA6132
FIG|1408433.3.peg.3094; Crocinitomix catalasitica ATCC 23190
WP_074236572.1; Chryseobacterium zeae
FIG|1127353.3.peg.1738; Salmonella enterica subsp. enterica serovar Newport str. #11-4
FIG|1881110.4.peg.120; Pantoea sesami
FIG|34038.6.peg.27; Rahnella aquatilis
FIG|630.95.peg.4256; Yersinia enterocolitica
FIG|149387.11.peg.1139; Salmonella enterica subsp. enterica serovar Brandenburg
FIG|1343738.3.peg.2232; Vibrio cholerae 2012EL-1759 Retron-Vch3 (Vc137)
FIG|1423.175.peg.4339; Bacillus subtilis
FIG|2021695.3.peg.3399; Bacillus sp. 7894-2
FIG|189426.10.peg.597; Paenibacillus odorifer
FIG|2020949.3.peg.856; Romboutsia weinsteinii
FIG|1243664.3.peg.1004; Bacillus massiliogorillae
FIG|1855345.3.peg.2971; Bacillus sp. RRD69
FIG|1946358.3.peg.2514; Clostridium sp. UBA4108
FIG|1520.90.peg.2502; Clostridium beijerinckii
FIG|79672.3.peg.288; Bacillus thuringiensis serovar medellin
FIG|189426.19.peg.3973; Paenibacillus odorifer
FIG|1497.3.peg.4049; Clostridium formicaceticum
FIG|169760.4.peg.4269; Paenibacillus stellifer
WP_073588670.1; Anaerocolumna xylanovorans
FIG|1950815.3.peg.1585; Clostridiales bacterium UBA1341
FIG|1897004.3.peg.2166; Eubacterium sp. 45_250
FIG|1946293.3.peg.290; Catabacter sp. UBA7571
FIG|1796620.3.peg.3489; Acutalibacter muris
FIG|76857.53.peg.2245; Fusobacterium nucleatum subsp. polymorphum
FIG|2013784.3.peg.1260; Firmicutes bacterium HGW-Firmicutes-3
FIG|79884.3.peg.1106; Bacillus pseudalcaliphilus
FIG|135461.47.peg.1552; Bacillus subtilis subsp. subtilis
WP_016122013.1; Bacillus cereus group
FIG|1499688.3.peg.3214; Bacillus sp. LF1
FIG|1318.8.peg.1495; Streptococcus parasanguinis
FIG|1381091.3.peg.1173; Streptococcus equi subsp. zooepidemicus SzAM60
FIG|1409369.3.peg.815; Staphylococcus aureus AMMC6050
FIG|1497681.5.peg.3014; Listeria newyorkensis
FIG|1095727.3.peg.409; Streptococcus sp. SK643
FIG|1318.12.peg.313; Streptococcus parasanguinis
FIG|1681184.3.peg.4899; Lysinibacillus sp. ZYM-1
FIG|561879.29.peg.3569; Bacillus safensis
FIG|1884359.3.peg.2978; Psychrobacillus sp. OK028
FIG|29367.3.peg.1112; Clostridium puniceum
FIG|225345.3.peg.1103; Clostridium chromiireducens
FIG|1345695.10.peg.2438; Clostridium saccharobutylicum DSM 13864
FIG|119641.3.peg.784; Clostridium uliginosum
FIG|1761781.3.peg.88; Clostridium sp. DSM 8431
FIG|1946346.3.peg.2999; Clostridium sp. UBA1056
FIG|1492.48.peg.3952; Clostridium butyricum
FIG|1121302.3.peg.4511; Clostridium cavendishii DSM 21758
FIG|398512.4.peg.5301; Pseudobacteroides cellulosolvens ATCC 35603 = DSM 2933
FIG|1946357.3.peg.500; Clostridium sp. UBA3947
FIG|642492.3.peg.3338; Cellulosilyticum lentocellum DSM 5427
FIG|1946690.3.peg.1553; Lachnoclostridium sp. UBA3320
FIG|397290.3.peg.150; Lachnospiraceae bacterium A2
FIG|97138.3.peg.1713; Clostridium sp. ASF356
FIG|1965545.3.peg.499; Tyzzerella sp. An114
FIG|1047063.3.peg.240; WS1 bacterium JGI 0000059-K21
FIG|1192034.3.peg.1508; Chondromyces apiculatus DSM 436
AAA88323.1; Myxococcus xanthus Retron-Mxa2 (Mx65)
FIG|33.8.peg.8196; Myxococcus fulvus
FIG|215803.3.peg.1485; Enhygromyxa salina
FIG|1406225.3.peg.2150; Archangium violaceum Cb vi76
FIG|1952931.3.peg.5137; Verrucomicrobia subdivision 3 bacterium UBA6082
FIG|1972460.3.peg.279; Anaerolineaceae bacterium 4572_78
FIG|1950201.3.peg.3297; Anaerolineales bacterium UBA2796
WP_015247705.1;
FIG|1799658.3.peg.2777; Planctomycetaceae bacterium SCGC AG-212-F19
FIG|214688.26.peg.6659; Gemmata obscuriglobus UQM 2246
FIG|2023130.3.peg.4250; Rhodopirellula sp. MGV
FIG|52.7.peg.9046; Chondromyces crocatus
FIG|448385.16.peg.2914; Sorangium cellulosum So ce56
FIG|888845.4.peg.14202; Minicystis rosea
FIG|1752210.3.peg.1275; Deltaproteobacteria bacterium Ga0077539
FIG|1391654.3.peg.3562; Labilithrix luteola
FIG|1752218.3.peg.3670; Planctomycetaceae bacterium Ga0077529
WP_006981058.1; Chthoniobacter flavus
FIG|1952939.3.peg.2584; Verrucomicrobiaceae bacterium UBA1938
FIG|2024858.3.peg.3711; Sandaracinus sp.
WP_009096166.1; Rhodopirellula sp. SWK7
FIG|595453.3.peg.1506; Rhodopirellula sp. SM50
FIG|1263868.3.peg.4100; Rhodopirellula europaea SH398
FIG|167547.3.peg.303; Prochlorococcus marinus str. MIT 9311
FIG|1499501.3.peg.459; Prochlorococcus sp. SS52
FIG|1905359.3.peg.4335; marine bacterium AO1-C
WP_002700020.1; Microscilla marina
FIG|1913989.145.peg.263; Gammaproteobacteria bacterium
WP_073154989.1; Seinonella peptonophila
FIG|46223.3.peg.3648; Thermoflavimicrobium dichotomicum
FIG|1329796.3.peg.1947; Risungbinella massiliensis
FIG|1123252.3.peg.3225; Shimazuella kribbensis DSM 45090
FIG|714067.3.peg.3719; Kroppenstedtia eburnea
FIG|1341151.3.peg.628; Laceyella sacchari 1-1
FIG|2026763.3.peg.3089; Myxococcales bacterium
FIG|1797895.3.peg.2518; Deltaproteobacteria bacterium RIFOXYA12_FULL_58_15
FIG|373672.4.peg.4082; Chryseobacterium gambrini
FIG|1416778.5.peg.4374; Chryseobacterium arachidis
FIG|1603293.4.peg.829; Flavobacterium sp. 316
CCB70859.1; Flavobacterium branchiophilum FL-15
FIG|1986952.3.peg.951; Sphingobacteriaceae bacterium GW460-11-11-14-LB5
FIG|1476464.3.peg.4304; Pedobacter xixiisoli
FIG|1761785.3.peg.3112; Flavobacterium sp. ov086
FIG|1664068.3.peg.3690; bacterium 336/3
FIG|880071.3.peg.3500; Bernardetia litoralis DSM 6794
FIG|1121902.3.peg.2906; Eisenibacter elegans DSM 3317
FIG|1509483.4.peg.1923; Flectobacillus sp. BAB-3569
FIG|1166018.3.peg.5312; Fibrella aestuarina BUZ 2
FIG|634771.3.peg.967; Chitinophaga eiseniae
FIG|29529.3.peg.396; Chitinophaga arvensicola
FIG|1891659.3.peg.6032; Chitinophaga sp. CB10
FIG|2033437.3.peg.3442; Chitinophaga sp. MD30
FIG|1004.4.peg.1677; Chitinophaga sancti
FIG|1881041.3.peg.3698; Chitinophaga sp. YR627
FIG|1123078.3.peg.2010; Runella zeae DSM 19591
FIG|354355.3.peg.1846; Niastella yeongjuensis
FIG|1951546.3.peg.1574; Chitinophagaceae bacterium UBA1946
FIG|1812911.3.peg.633; Flavihumibacter sp. CACIAM 22H1
FIG|477680.4.peg.4668; Filimonas lacunae
FIG|221126.7.peg.3781; Algibacter lectus
FIG|342954.4.peg.734; Lacinutrix algicola
FIG|1871037.5.peg.2180; Flavobacteriaceae bacterium
FIG|669041.3.peg.843; Tenacibaculum dicentrarchi
WP_074538568.1; Cellulophaga baltica
FIG|1248440.3.peg.1511; Polaribacter franzmannii ATCC 700399
FIG|1121007.3.peg.1574; Aquimarina muelleri DSM 19832
FIG|688867.3.peg.2332; Ohtaekwangia koreensis
FIG|926565.3.peg.717; Sporocytophaga myxococcoides DSM 11118
FIG|1257021.3.peg.5265; Flammeovirgaceae bacterium 311
FIG|2044937.5.peg.2350; candidate division KSB3 bacterium
FIG|1499966.3.peg.180; Candidatus Moduliflexus flocculans
FIG|1948269.3.peg.1254; Verrucomicrobia bacterium UBA6053
FIG|694433.3.peg.3103; Saprospira grandis DSM 2844
FIG|2008677.3.peg.3337; Mitsuaria noduli
FIG|946333.3.peg.3570; Rhizobacter gummiphilus
FIG|1736433.3.peg.5559; Rhizobacter sp. Root1221
FIG|1500265.3.peg.5760; Methylibium sp. YR605
FIG|1121349.4.peg.2836; Comamonas composti DSM 21721
FIG|1082851.3.peg.91; Comamonas serinivorans
FIG|1121480.5.peg.5468; Pseudoduganella violaceinigra DSM 15887
FIG|2045208.3.peg.1247; Massilia violaceinigra
FIG|1736455.3.peg.3692; Massilia sp. Root133
FIG|34073.25.peg.8569; Variovorax paradoxus
FIG|1884311.3.peg.7121; Variovorax sp. OK202
FIG|1123487.3.peg.1763; Uliginosibacterium gangwonense DSM 18521
FIG|2029111.3.peg.3032; Comamonadaceae bacterium NML120219
FIG|1977087.20.peg.1226; Proteobacteria bacterium
FIG|754436.4.peg.4454; Photobacterium aphoticum
FIG|265726.7.peg.1038; Photobacterium halotolerans
FIG|1121867.3.peg.59; Enterovibrio calviensis DSM 14347
FIG|1238431.3.peg.2655; Vibrio nigripulchritudo BLFn1
FIG|1384589.3.peg.2721; [Erwinia] teleogrylli
FIG|1261127.3.peg.2947; Citrobacter amalonaticus Y19
FIG|349521.8.peg.3588; Hahella chejuensis KCTC 2396
FIG|525918.3.peg.1501; Thiothrix caldifontis
FIG|1737490.4.peg.4974; Agarilytica rhodophyticola
FIG|251229.3.peg.427; Chroococcidiopsis thermalis PCC 7203
FIG|1245923.3.peg.9587; Scytonema millei VB511283
FIG|1503470.5.peg.10896; cyanobacterium TDX16
FIG|2005460.3.peg.1118; Chondrocystis sp. NIES-4102
FIG|179408.3.peg.4679; Oscillatoria nigro-viridis PCC 7112
FIG|1612423.3.peg.5384; Nostoc linckia z1
FIG|63737.11.peg.472; Nostoc punctiforme PCC 73102
FIG|224013.5.peg.7163; Nostoc piscinale CENA21
FIG|1932621.3.peg.7363; Nostoc sp. T09
FIG|373994.3.peg.3383; Rivularia sp. PCC 7116
FIG|2005463.3.peg.257; Calothrix sp. NIES-4105
FIG|2005459.3.peg.7019; Tolypothrix sp. NIES-4075
FIG|184925.3.peg.2602; Chlorogloeopsis fritschii PCC 9212
FIG|454136.5.peg.3127; Phormidium ambiguum IAM M-71
FIG|203124.6.peg.2732; Trichodesmium erythraeum IMS101
FIG|2040638.3.peg.3067; Tychonema bourrellyi FEM_GT703
FIG|1880991.4.peg.2927; Oscillatoriales cyanobacterium USR001
FIG|1173028.3.peg.7115; Oscillatoria sp. PCC 10802
FIG|568701.4.peg.2073; Moorea bouillonii PNG
FIG|927677.3.peg.4187; Synechocystis sp. PCC 7509
FIG|179408.3.peg.6267; Oscillatoria nigro-viridis PCC 7112
FIG|1710894.3.peg.2079; Aphanizomenon flos-aquae LD13
FIG|1947888.3.peg.4484; Cyanobacteria bacterium UBA6047
FIG|1705388.3.peg.1178; Planktothricoides sp. SR001
FIG|454136.5.peg.4162; Phormidium ambiguum IAM M-71
FIG|2005458.3.peg.378; Nostoc sp. NIES-4103
FIG|1947874.3.peg.4590; Cyanobacteria bacterium UBA1583
FIG|1781255.3.peg.802; Desertifilum sp. IPPAS B-1220
FIG|1128427.4.peg.2346; filamentous cyanobacterium ESFC-1
FIG|1946321.3.peg.3928; Chloracidobacterium sp. UBA7656
FIG|118173.3.peg.1030; Pseudanabaena sp. PCC 6802
FIG|1922337.4.peg.4802; Leptolyngbya sp. ‘hensonii’
FIG|927668.3.peg.2766; Pseudanabaena biceps PCC 7429
FIG|1173020.3.peg.6191; Chamaesiphon minutus PCC 6605
FIG|329726.14.peg.4440; Acaryochloris marina MBIC11017
FIG|215803.3.peg.1649; Enhygromyxa salina
FIG|1920190.3.peg.9548; Archangium sp. Cb G35
FIG|1961464.3.peg.5181; Myxococcales bacterium UBA2376
FIG|765913.3.peg.336; Thiorhodococcus drewsii AZ1
FIG|1396141.3.peg.2891; Haloferula sp. BvORR071
FIG|1961463.3.peg.5253; Myxococcales bacterium UBA1671
AAL40743.1; Nannocystis exedens Retron-Nex2 (Ne144)
FIG|54.3.peg.4123; Nannocystis exedens
FIG|53367.3.peg.3417; Asanoa ferruginea
FIG|460265.11.peg.3882; Methylobacterium nodulans ORS 2060
FIG|298794.3.peg.462; Methylobacterium variabile
FIG|190148.4.peg.3492; Bradyrhizobium paxllaeri
FIG|1075417.3.peg.445; Catalinimonas alkaloidigena
FIG|1429438.4.peg.7505; Candidatus Entotheonella factor
FIG|1977087.12.peg.1756; Proteobacteria bacterium
FIG|92487.3.peg.3972; Thiothrix eikelboomii
FIG|1977087.20.peg.1473; Proteobacteria bacterium
FIG|1123400.3.peg.3276; Thiofilum flexile DSM 14609
FIG|34062.8.peg.73; Moraxella osloensis
FIG|1699623.3.peg.1502; Psychrobacter sp. P11G3
FIG|1123509.3.peg.848; Zooshikella ganghwensis DSM 15267
FIG|2026735.3.peg.2222; Deltaproteobacteria bacterium
FIG|1977087.12.peg.2982; Proteobacteria bacterium
FIG|2026763.4.peg.1195; Myxococcales bacterium
FIG|1977087.12.peg.510; Proteobacteria bacterium
FIG|1123508.3.peg.7252; Zavarzinella formosa DSM 19928
FIG|214688.26.peg.3091; Gemmata obscuriglobus UQM 2246
FIG|1908690.5.peg.1204; Fimbriiglobus ruber
FIG|1805126.3.peg.4431; Deltaproteobacteria bacterium CG2_30_63_29
FIG|1882752.4.peg.1962; Singulisphaera sp. GP187
FIG|1636152.3.peg.5364; Planctomyces sp. SH-PL62
APR75442.1; Minicystis rosea
FIG|54.3.peg.8798; Nannocystis exedens
FIG|980254.4.peg.4083; Roseimaritima ulvae
FIG|1856297.3.peg.3627; Gammaproteobacteria bacterium 45_16_T64
FIG|1219077.3.peg.1945; Vibrio azureus NBRC 104587
FIG|1334629.3.peg.167; Myxococcus fulvus 124B02
AAA25405.1; Myxococcus xanthus Retron-Mxal (Mx162)
FIG|378806.16.peg.4444; Stigmatella aurantiaca DW4/3-1
WP_002615305.1; Stigmatella aurantiaca Retron-Sau1 (Sa163)
FIG|48.3.peg.757; Archangium gephyra
FIG|448385.16.peg.2083; Sorangium cellulosum So ce56
FIG|52.7.peg.5100; Chondromyces crocatus
FIG|1752210.3.peg.5621; Deltaproteobacteria bacterium Ga0077539
FIG|2024858.3.peg.6345; Sandaracinus sp.
WP_012826728.1; Haliangium ochraceum
FIG|927083.3.peg.3408; Sandaracinus amylolyticus
WP_006977315.1; Plesiocystis pacifica
FIG|1400863.5.peg.627; Candidatus Competibacter denitrificans_Run A_D11
FIG|1961463.3.peg.4303; Myxococcales bacterium UBA1671
FIG|1898731.3.peg.3099; Curtobacterium sp. MCBA15_001
FIG|1279028.3.peg.3374; Curtobacterium sp. 314Chir4.1
FIG|1898733.3.peg.2056; Curtobacterium sp. MCBA15_004
FIG|1795630.3.peg.3476; Frondihabitans sp. PAMC 28766
FIG|2033654.3.peg.3461; Curtobacterium sp. ‘Ferrero’
FIG|1736329.5.peg.1436; Frondihabitans sp. Leaf304
FIG|1736292.3.peg.1083; Rathayibacter sp. Leaf185
FIG|1736327.3.peg.206; Rathayibacter sp. Leaf296
FIG|1736311.3.peg.3668; Curtobacterium sp. Leaf261
FIG|1736308.3.peg.2333; Frigoribacterium sp. Leaf254
FIG|656366.8.peg.2905; Arthrobacter alpinus
FIG|494023.3.peg.138; Paeniglutamicibacter antarcticus
ASN40093.1; Arthrobacter sp. 7749
FIG|1494608.3.peg.465; Arthrobacter sp. PAMC 25486
FIG|656366.4.peg.2620; Arthrobacter alpinus
FIG|656366.3.peg.1944; Arthrobacter alpinus
FIG|1132441.3.peg.1888; Arthrobacter sp. 35W
FIG|1704044.3.peg.520; Arthrobacter sp. ERGS1:01
FIG|1496689.3.peg.681; Arthrobacter sp. L77
FIG|1681197.3.peg.149; Arthrobacter sp. RIT-PI-e
FIG|37921.12.peg.1481; Arthrobacter agilis
FIG|1736303.3.peg.982; Arthrobacter sp. Leaf234
FIG|1312978.3.peg.1472; Arthrobacter sp. H41
FIG|1348338.3.peg.1472; Leifsonia rubra CMS 76R
FIG|1452536.3.peg.1955; Microbacterium sp. Cr-K20
FIG|1736525.3.peg.446; Leifsonia sp. Root4
FIG|1529318.3.peg.434; Cryobacterium sp. MLB-32
FIG|1267973.3.peg.3479; Arthrobacter sp. H5
FIG|150121.3.peg.1900; Agreia pratensis
FIG|123316.3.peg.955; Agreia sp. VKM Ac-2052
FIG|1052260.3.peg.3617; Klenkia soli
FIG|1566299.3.peg.3962; Klenkia marina
FIG|1736356.3.peg.3150; Modestobacter sp. Leaf380
FIG|1736354.3.peg.1787; Geodermatophilus sp. Leaf369
FIG|479431.6.peg.3115; Nakamurella multipartita DSM 44233
FIG|1090615.3.peg.2397; Nakamurella panacisegetis
FIG|1306174.4.peg.4778; Kineosporia aurantiaca JCM 3230
FIG|546871.3.peg.1120; Friedmanniella luteola
FIG|630515.4.peg.525; Microlunatus soli
FIG|546874.3.peg.1181; Friedmanniella sagamiharensis
BAK35674.1; Microlunatus phosphovorus NM-1
FIG|1380390.4.peg.72; Solirubrobacterales bacterium URHD0059
FIG|1283299.3.peg.2784; Conexibacter woesei Iso977N
FIG|929712.3.peg.3165; Patulibacter minatonensis DSM 18081
FIG|1123262.3.peg.3125; Solirubrobacter soli DSM 22325
FIG|1861.4.peg.5240; Geodermatophilus obscurus
FIG|1137993.4.peg.1318; Geodermatophilus africanus
FIG|1070870.3.peg.778; Geodermatophilus nigrescens
FIG|1190417.3.peg.1785; Geodermatophilus telluris
FIG|477641.3.peg.1023; Modestobacter marinus
FIG|1798228.3.peg.3756; Blastococcus sp. DSM 46838
WP_091929708.1; Blastococcus sp. DSM 46786
SHH20361.1; Jatrophihabitans endophyticus
FIG|1844.3.peg.1151; Nocardioides luteus
FIG|748909.6.peg.1418; Nocardioides alpinus
FIG|402596.3.peg.987; Nocardioides exalbidus
FIG|1736322.3.peg.1963; Nocardioides sp. Leaf285
FIG|1445613.3.peg.3490; Sciscionella sp. SE31
FIG|543632.4.peg.9742; Actinoplanes subtropicus
FIG|1036182.3.peg.2958; Actinoplanes atraurantiacus
FIG|1246995.3.peg.737; Actinoplanes friuliensis DSM 7358
FIG|56427.3.peg.3052; Couchioplanes caeruleus subsp. caeruleus
FIG|1710355.3.peg.2225; Actinoplanes sp. TFC3
FIG|649831.3.peg.2352; Actinoplanes sp. N902-109
FIG|35754.4.peg.6321; Dactylosporangium aurantiacum
FIG|1881.4.peg.2703; Micromonospora viridifaciens
FIG|47863.3.peg.3975; Micromonospora globosa
FIG|285665.4.peg.2050; Micromonospora coriariae
FIG|1192034.3.peg.4668; Chondromyces apiculatus DSM 436
FIG|1198133.3.peg.2442; Myxococcus xanthus DZ2
FIG|33.8.peg.521; Myxococcus fulvus
FIG|394193.3.peg.7794; Amycolatopsis saalfeldensis
FIG|369932.4.peg.5621; Amycolatopsis niigatensis
FIG|1238180.3.peg.5340; Amycolatopsis azurea DSM 43854
FIG|589385.3.peg.7940; Amycolatopsis xylanica
FIG|1068980.3.peg.1527; Amycolatopsis nigrescens CSC17Ta-90
FIG|1854586.3.peg.2100; Amycolatopsis antarctica
FIG|587909.3.peg.3086; Yuhushiella deserti
FIG|2030.3.peg.3051; Kibdelosporangium aridum
FIG|1382595.4.peg.3164; Saccharopolyspora erythraea D
WP_013675061.1; Pseudonocardia dioxanivorans
FIG|1660131.3.peg.2805; Pseudonocardia sp. SCN 72-86
FIG|366584.3.peg.4349; Pseudonocardia oroxyli
FIG|1885031.4.peg.5241; Pseudonocardia sp. Ae331_Ps2
FIG|1690815.5.peg.5350; Pseudonocardia sp. HH130630-07
FIG|1123023.3.peg.3229; Pseudonocardia acaciae DSM 45401
FIG|1449976.3.peg.8114; Kutzneria albida DSM 43870
WP_007238159.1;
FIG|1220583.3.peg.1582; Gordonia aichiensis NBRC 108223
GAB07179.1; Gordonia amarae NBRC 15530
FIG|1223545.3.peg.704; Gordonia soli NBRC 108243
FIG|1223540.3.peg.3237; Gordonia desulfuricans NBRC 100010
FIG|1112204.3.peg.4913; Gordonia polyisoprenivorans VH2
AFR49048.1; Gordonia sp. KTR9
FIG|402289.3.peg.1558; Rhodococcus sp. HA99
FIG|1077144.3.peg.224; Dietzia alimentaria 72
FIG|1344003.3.peg.1864; Williamsia sterculiae
FIG|1463823.3.peg.3407; Microbispora sp. NRRL B-24597
FIG|1903117.3.peg.1566; Williamsia sp. 1138
FIG|1603258.4.peg.1828; Williamsia herbipolensis
FIG|644548.3.peg.652; Gordonia neofelifaecis NRRL B-59395
FIG|1136941.3.peg.1310; Gordonia phthalatica
FIG|1223542.3.peg.3439; Gordonia malaquae NBRC 108250
FIG|473 12.10.peg.4232; Tsukamurella pulmonis
FIG|57704.14.peg.421; Tsukamurella tyrosinosolvens
FIG|521096.6.peg.2443; Tsukamurella paurometabola DSM 20162
FIG|1123241.3.peg.3642; Nakamurella lactea DSM 19367
FIG|1210073.4.peg.1031; Nocardia salmonicida NBRC 100378
FIG|1206740.4.peg.4617; Nocardia thailandica NBRC 100428
FIG|1210064.4.peg.2434; Nocardia altamirensis NBRC 108246
FIG|1123258.3.peg.1651; Smaragdicoccus niigatensis DSM 44881 = NBRC 103563
FIG|1443888.3.peg.2891; Rhodococcus fascians 02-815
FIG|1517936.4.peg.882; Rhodococcus sp. CUA-806
FIG|398843.6.peg.4214; Rhodococcus kyotonensis
FIG|1813677.3.peg.4031; Rhodococcus sp. EPR-157
WP_008711873.1; organism not named
FIG|1381122.3.peg.6103; Rhodococcus erythropolis DN1
FIG|1736210.3.peg.2766; Rhodococcus sp. Leaf7
FIG|1736300.3.peg.1279; Rhodococcus sp. Leaf225
FIG|1219012.3.peg.1705; Rhodococcus corynebacterioides NBRC 14404
FIG|1219023.3.peg.2791; Rhodococcus rhodnii NBRC 100604
FIG|616997.3.peg.2548; Hoyosella altamirensis
FIG|1303689.4.peg.2934; Rhodococcus koreensis JCM 10743 = NBRC 100607
FIG|644.85.peg.4392; Aeromonas hydrophila.

Use of Sequence Listing to Identify Cognate RT ncRNA Pairs

[2902] A cognate pairing of a ncRNA and an RT (amino acid or nucleotide sequence) can easily be identified from information presented/included in the sequence listing by identifying those ncRNA sequences from Table B and those RT sequences from Table A have the same genomic accession number that is indicated for each sequence in the Sequence Listing. In various other aspects, the retron RT component and the ncRNA component can be from different bacterial species, i.e., are not found together in nature as cognate pairs. In still other embodiments, the retron RT component and the ncRNA component can both be from the same phylogenetic functional type (e.g., Type I-A, Type I-B1, Type I-B2, Type IC, etc.). For example, a recombinant retron-based genome editing system may be comprised of a retron RT from Type I-A (i.e., SEQ ID Nos: 3980-4178 for AA and SEQ ID Nos: 11231-11429 for NT-see Table A) and a retron ncRNA also from Type I-A (i.e., SEQ ID Nos: 16886-17078—see Table B).

[2903] The sequence listing that is/was co-filed with this PCT Application forms a part of this Specification as originally filed. As noted above, the sequence listing may be consulted to identify a cognate pairing between a retron RT (of Table A-AA or NT) and a retron ncRNA (of Table B). The following steps may be followed:
[2904] Step 1. Pick an RT sequence. Select any RT sequence from Table A by its sequence identifier (e.g., SEQ ID NO: 4178).
[2905] Step 2. Locate the sequence entry in the sequence listing. Identify the selected sequence identifier (e.g., SEQ ID NO: 4178) in the sequence listing using any text-find function in a suitable text editing software used to read the sequence listing file (e.g., Microsoft Word) that was submitted with this Specification at the time of filing and which forms a part of this Specification as originally filed. Taking into account that the sequence listing as originally included in this Specification is in the format of an XML file, the search would be for the following text (in {brackets}): {sequenceIDNumber-“4178” }.
[2906] Step 3. Determine which organism and/or NCBI sequence reference number is associated with the sequence entry. Once Step 2 locates the searched text, inspect that sequence entry for the several text lines referring to “</INSDQualifier_value>” and note the NCBI reference sequence number displayed to the left of one of the identified lines. The designator “</INSDQualifier_value>” also indicates the source organism as well. For example, for entry {sequenceIDNumber-“4178” }, the organism identified at a first “</INSDQualifier_value>” is “Shewanell sp.” and the NCBI reference number identified at a second “</INSDQualifier_value>” is “Related to NZ_JWGX01000025.1” Thus the NCBI reference number is NZ_JWGX01000025.1 and the organism is Shewanella sp. for SEQ ID NO: 4178.
[2907] Step 4. Find the coganate retron ncRNA sequence. Conduct a text search of the sequence listing for the NCBI reference number identified in Step 3. Inspect the entry for the associated SEQ ID NO:. In the case of SEQ ID NO: 4178, the NCBI reference number is “NZ_JWGX01000025.1” and the associated ncRNA sequence is SEQ ID NO: 17078.

[2908] This further exemplified as follows:
[2909] Step 1. Pick any RT sequence from Table A (e.g., SEQ ID NO: 4178).
[2910] Step 2. Search and identify SEQ ID NO: 4178 in the sequence listing file by searching for the text in brackets as follows: {sequenceIDNumber=“4178” }. Inspect the hit region, which is imaged as the following computer screen image and which shows in bold the (a) amino acid sequence of SEQ ID NO: 4178, (b) the associated organism as “Shewanella sp.”, and (c) the associate NCBI reference number as “NZ_JWGX01000025.1”.

```
                              <INSDSeq_sequence>
MKKLLDYLTSSDNLKNYLKLTYPQISYDDDVFLINGKYHLSSLIKSAPKMYKFYTIPKRNGGRR
AIAKPSKKLKVTQRDLSTYLEKILPVADCAFAYRANKSIKDNALIHVGNKELLKMDLYNFENSI
TPKMLINEIKESDLSFEESELDYIKKLAFWCPSKEDNGKLILSVGAPSSPLLSNFIMYRFDSVL
SEVAKSNKVKYSRYADDIFLSINVPNVLKLFVNIVKIILKEMIKDELIINEMKIVESSKAHNRH
VIGITITNDNKISIGRQNKRMISSLVHKYSLGYLDTSKIIRLRGLISFASSIEPDFIIRLENKY
TENLINKLIKGLD</INSDSeq_sequence>
                        <INSDSeq>
                        <INSDSeq_length>339</INSDSeq_length>
                        <INSDSeq_moltype>AA</INSDSeq_moltype>
                        <INSDSeq_division>PAT</INSDSeq_division>
                        <INSDSeq_feature-table>
                            <INSDFeature>
                                <INSEFeature_key>
source</INSDFeature_key>
            <INSDFeature_location>1..339</INSDFeature_location>
                                <INSDFeature_quals>
                                    <INSDQualifier>
                                        <INSDQualifier_name>
mol_type</INSDQualifier_name>
                                        <INSDQualifier_value>other
protein</INSDQualifier_value>
                                      </INSDQualifier>
                                      <INSDQualifier>
                                          <INSDQualifier_name>
organism</INSDQualifier_name>
                                          <INSDQualifier_value>
Shewanella sp.</INSDQualifier_value>
                                      </INSDQualifier>
                                      <INSDQualifier>
                                          <INSDQualifier_name>
note</INSDQualifier_name>
                                        <INSDQualifier_value>
Related to NZ_JWGX01000025.1</INSDQualifier_value>
                                    </INSDQualifier>
                                </INSDFeature_quals>
                            </INSDFeature>
                        </INSDSeq_feature-table>
                        <INSDSeq_sequence>
HEELQKSLLASNEVKEEFSQKASHIFSESGQKLPNAAESLALAALQNVKYQGFYMYKVYTIPKE
```

[2911] Step 3. Identify the NCBJ reference number. In this example, the NCBI reference number is NZ_JWGX01000025.1.

[2912] Step 4. The NCBJ reference number is then used to locate the cognate retron ncRNA sequence in the sequence listing. In this case, the cognate ncRNA sequence is SEQ ID NO: 17078, as shown in the below computer screen image of the ncRNA sequence entry for SEQ ID NO: 17078, which as can be seen by inspection, shares the NCBJ reference number of “NZ_JWGX010000025.1” and the organism of “Shewanella sp.”

```
                          <INSDSeq_sequence>
actctttagcgttcgggttaaatattaatttacctagtcgggcgattagccagactgaaactta
ttgaacgggtttttgggtgcgaaagcatcacatcctaaattcgttcctcatttaggatgtgatg
ctttcgcttcctctagtaaagggtt</INSDSeq_sequence>
                        </INSDSeq>
        </sequenceData>
        <SequenceData sequenceIDNumber=“17078”>
                        <INSDSeq>
                        <INSDSeq_length>190</INSDSeq_length>
                        <INSDSeq_moltype>RNA</INSDSeq_moltype>
                        <INSDSeq_division>PAT</INSDSeq_division>
                        <INSDSeq_feature-table>
                            <INSDFeature>
                                <INSDFeature_key>
source</INSDFeature_key>
            <INSDFeature_location>1..190</INSDFeature_location>
                                <INSDFeature_quals>
                                    <INSDQualifier>
                                        <INSDQualifier_name>
mol_type</INSDQualifier_name>
                                        <INSDQualifier_value>other
RNA</INSDQualifier_value>
                                      </INSDQualifier>
                                      <INSDQualifier>
                                          <INSDQualifier_name>
organism</INSDQualifier_name>
                                          <INSDQualifier_value>
Shewanella sp.</INSDQualifier_value>
                                      </INSDQualifier>
                                      <INSDQualifier>
                                          <INSDQualifier_name>
note</INSDQualifier_name>
                                        <INSDQualifier_value>
Related to NZ_JWGX01000025.1</INSDQualifier_value>
                                    </INSDQualifier>
                                </INSDFeature_quals>
                            </INSDFeature>
                        </INSDSeq_feature-table>
                        <INSDSeq_sequence>
gctgtttagcgttttggggttttaaggtgttcaatgatcaatgtaatcagcctagtcgggtgta
```

[2913] Thus, the cognate retron RT from Table A and retron ncRNA from Table B may be easily identified for embodiments involving a retron editing system that comprises a retron RT paired with its cognate retron ncRNA.

### EXEMPLARY EMBODIMENTS

[2914] Exemplary embodiment Group A

[2915] The following paragraphs describe exemplary and non-limiting embodiments of the present disclosure.

[2916] Paragraph 1. An engineered retron, comprising:
[2917] a) an msr locus (that encodes the msr RNA portion of an msDNA);
[2918] b) an msd locus encoding the msd RNA portion of the msDNA;
[2919] c) a retron reverse transcriptase (RT), wherein said msd RNA is capable of being reverse transcribed to form the msDNA by the retron reverse transcriptase (RT);
[2920] d) a heterologous nucleic acid inserted at or within the msd locus, upstream of the msr locus, upstream or downstream of the msd locus; and,
[2921] e) a sequence modification (e.g., insertion, deletion, and/or substitution of one or more nucleotide(s)) in the msr locus and/or the msd locus that:
   [2922] i) modulates (e.g., enhances) reverse transcription, processivity, accuracy/fidelity, and/or production of the msDNA (e.g., in the mammalian cell);
   [2923] ii) modulates (e.g., reduces) immunogenicity of ncRNA encoded by the engineered retron (e.g., the msr locus and/or the msd locus) in a host (e.g., a host comprising the mammalian cell); and/or
   [2924] iii) comprises a nucleotide sequence that modulates (e.g., inhibits, either permanently or transiently) a function of the msDNA; and/or
   [2925] iv) modulates (e.g., improves) efficiency of targeted genome editing/engineering.

[2926] Paragraph 2. The engineered retron of paragraph 1, wherein said engineered retron is engineered based on and/or to resemble a secondary structure of a wild-type or consensus retron encoding a wild-type or consensus retron ncRNA encompassed by:
[2927] 1) any one of the sequences and/or structures as depicted in SEQ ID NOs: 1-21 and/or FIGS. 2-22; or
[2928] 2) a variant of 1), having:
   [2929] A) up to 1, 2, or 3 (e.g., up to 1) nucleotide changes per 10 red lettered-nucleotides;
   [2930] B) up to 4, 5, or 6 (e.g., up to 1 or 2) nucleotide changes per 10 black lettered-nucleotides; and/or
   [2931] C) up to 7, 8, or 9 (e.g., up to 3 or 4) nucleotide changes per 10 grey lettered-nucleotides; and/or
[2932] optionally further comprising:
   [2933] a) 7, 8, 9, or 10 (e.g., 9 or 10) nucleotides present per 10 red-circled nucleotides;
   [2934] b) 6, 7, 8, 9, or 10 (e.g., 8, 9 or 10) nucleotides present per 10 black-circled nucleotides;
   [2935] c) 4, 5, 6, 7, 8, 9, or 10 (e.g., 6, 7, 8, 9 or 10) nucleotides present per 10 grey-circled nucleotides; and/or
   [2936] d) 2, 3, 4, 5, 6, 7, 8, 9, or 10 (e.g., 4, 5, 6, 7, 8, 9, or 10) nucleotides present per 10 white-circled nucleotides.

[2937] Paragraph 3. The engineered retron of any one of paragraphs 1-2, wherein said engineered retron is engineered by introducing said sequence modification into a wild-type retron encoding a wild-type ncRNA, or into a synthetic/artificial retron encoding the consensus retron ncRNA.

[2938] Paragraph 4. The engineered retron of any one of paragraphs 1-3, wherein the sequence modification comprises, in the encoded retron ncRNA, one or more of:
[2939] (i) a modified (e.g., mutated, reduced, or eliminated) bulge in a1, a2 or both a1 and a2;
[2940] (ii) an extension or shortening of a1, a2 or both a1 and a2;
[2941] (iii) an extension or shortening of a spacer sequence between hairpin loops (e.g., S1, S2, S3, S4, S5 and/or S6);
[2942] (iv) a modified (e.g., mutated or eliminated) bulge in hairpin loops (e.g., L1, L2, L3, L4, L5 and/or L6 (e.g., by removing unpaired bases in the bulge, or by replacing unpaired bases with an equivalent number of base pairs));
[2943] (v) a modified (e.g., extended or shortened) length of hairpin loops (e.g., L1, L2, L3, L4, L5 and/or L6);
[2944] (vi) an alternative L1 and/or L2 having complement, reverse, or reverse complement sequences;
[2945] (vii) a modified (e.g., increased) number of unpaired bases at the tip of hairpin loops (e.g., L1, L2, L3, L4, L5 and/or L6);
[2946] (viii) a modified (e.g., increased or decreased) GC content in hairpin loops (e.g., L1, L2, L3, L4, L5 and/or L6);
[2947] (ix) an insertion of the heterologous nucleic acid in spacer sequences between hairpin loops (e.g., S1, S2, S3, S4, S5 and/or S6), or at the tip of hairpin loops (e.g., L1, L2, L3, L4, L5 and/or L6);
[2948] (x) a deletion of hairpin loops (e.g., L1, L2, L3, L4, L5 and/or L6);
[2949] (xi) an addition of a new loop in spacer sequences between hairpin loops (e.g., S1, S2, S3, S4, S5 and/or S6);
[2950] (xii) circularization of the ncRNA with the 5′ end and the 3′ end of the ncRNA being connected either directly, or via a spacer sequence;
[2951] (xiii) a repositioned branching guanosine capable of initiating reverse transcription priming;
[2952] (xiv) a staggered end sequence that reduces immunogenicity of the retron ncRNA, created by, e.g., adding or removing the 5′ al nucleotides and/or the 3′ a2 nucleotides; and/or,
[2953] (xv) an antisense sequence complementary to a CRISPR/Cas guide RNA (gRNA) sequence encoded by the heterologous nucleic acid, wherein the antisense sequence hybridizes to and inhibits said gRNA in the encoded retron ncRNA, and wherein said antisense sequence is removed upon reverse transcription of the msDNA.

[2954] Paragraph 5. The engineered retron of any one of paragraphs 1-4, comprising:
[2955] (i) a heterologous nucleic acid (such as the coding sequence for an RNA aptamer or a ribozyme) inserted into the msr locus or the msd locus (such as in an S region (e.g., S1, S2, S3, S4, S5 and/or S6), or the tip of an L region (e.g., L1, L2, L3, L4, L5 and/or L6)), or upstream or downstream of either the msr locus or the msd locus; or,
[2956] (ii) a first heterologous nucleic acid inserted into the msd locus, and a second heterologous nucleic acid inserted either upstream of the msr locus or downstream of the msd locus, wherein the second heterologous nucleic acid encodes a CRISPR/Cas guide RNA (gRNA).

[2957] Paragraph 6. The engineered retron of any one of paragraphs 1-5, wherein said retron reverse transcriptase (RT) is a cognate RT, a retron RT from a species within the same clade of the cognate RT, or a retron RT not within the same clade of the cognate RT (such as an unrelated RT or an engineered RT).

[2958] Paragraph 7. The engineered retron of any one of paragraphs 1-6, wherein said heterologous nucleic acid encodes a protein or peptide of interest, or wherein said heterologous nucleic acid comprises or encodes a donor/template sequence (e.g., a donor that corrects/repairs/removes a mutation at the target genome site, such as a mutated exon in a disease gene; a functional DNA element (such as a promoter, an enhancer, a protein binding sequence, a methylation site, a homology region for assisting gene editing, etc.); or a coding sequence for a functional RNA element (ncRNAs, etc)).

[2959] Paragraph 8. The engineered retron paragraph 7, wherein said protein or peptide of interest comprises a therapeutic protein (such as a wt protein defective in a disease cell, or a therapeutic antibody or antigen-binding fragment thereof) useful in treating a disease.

[2960] Paragraph 9. The engineered retron of paragraph 7, wherein said donor/template sequence corrects/repairs/removes a mutation at the target genome site (such as a mutated exon in a disease gene).

[2961] Paragraph 10. The engineered retron of any one of paragraphs 1-9, further comprising or encoding a sequence-specific nuclease (such as a CRISPR/Cas effector enzyme, a ZFN, a TALEN, a meganuclease, TnpB, IscB, or a restriction endonuclease (RE)), and/or a DNA-repair modulating biomolecule.

[2962] Paragraph 11. The engineered retron of paragraph 10, wherein the sequence-specific nuclease is fused to the RT, optionally via a flexible linker (e.g., a flexible linker comprising Gly and Ser rich sequences such as G4S repeats or GS repeats) or by a generally disordered protein sequence (such as unstructured hydrophilic, biodegradable protein polymer, e.g., an XTEN peptide polymer).

[2963] Paragraph 12. The engineered retron of paragraph 10 or 11, wherein the nuclease is a CRISPR/Cas effector enzyme that forms a complex with a guide RNA (gRNA) recognizing a target sequence, wherein the gRNA is linked to the ncRNA and/or the msDNA, either directly or through a linker/spacer polynucleotide.

[2964] Paragraph 13. The engineered retron of paragraph 10, wherein the DNA-repair modulating biomolecule is a regulatory protein that modulates (e.g., enhances) HDR, and the regulatory protein is fused to the RT or to the sequence-specific nuclease, optionally via a flexible linker (e.g., the flexible linker comprising Gly and Ser rich sequences such as G4S repeats or GS repeats) or by a generally disordered protein sequence (such as unstructured hydrophilic, biodegradable protein polymer, e.g., an XTEN peptide polymer).

[2965] Paragraph 14. A vector system comprising a vector comprising the engineered retron of any one of paragraphs 1-13.

[2966] Paragraph 15. The vector system of paragraph 14, wherein the msr locus, the msd locus, and the RT gene are provided by the same vector.

[2967] Paragraph 16. The vector system of paragraph 14 or 15, wherein the same vector comprises a promoter operably linked to the msr locus and/or the msd locus.

[2968] Paragraph 17. The vector system of any one of paragraphs 14-16, wherein the promoter is further operably linked to the RT gene.

[2969] Paragraph 18. The vector system of paragraph 14, wherein the msr locus, the msd locus, and the RT gene are provided by at least two different vectors.

[2970] Paragraph 19. The vector system of paragraph 14 or 18, wherein said RT gene is provided in trans with respect to the msr gene and/or the msd gene.

[2971] Paragraph 20. The vector system of any one of paragraphs 14-19, wherein the one or more vectors comprise a viral vector and/or a nonviral vector.

[2972] Paragraph 21. The vector system of paragraph 20, wherein the nonviral vector comprises a plasmid.

[2973] Paragraph 22. The vector system of any one of paragraphs 14-21, comprising a vector encoding a sequence-specific nuclease.

[2974] Paragraph 23. The vector system of paragraph 22, wherein the sequence-specific nuclease comprises an RNA-guided sequence-specific nuclease (e.g., a CRISPR/Cas effector enzyme, an engineered RNA-guided FokI-nuclease (e.g., dCas-FokI), an RNA-guided DNA endonuclease, TnpB, IscB, or a transposon-associated nuclease), or a non-RNA-guided sequence-specific nuclease (e.g., a meganuclease, a zinc finger nuclease (ZFN), a TALE nuclease (TALEN), or a restriction endonuclease (RE)).

[2975] Paragraph 24. The vector system of paragraph 23, wherein the Cas effector enzyme is a Class 1, Type I, II, or III Cas; a Class 2, Type II Cas (e.g., Cas9); or a Class 2, Type V Cas (e.g., Cpf1).

[2976] Paragraph 25. The vector system of paragraph 23, wherein:
[2977] 1) the RNA-guided sequence-specific nuclease comprises the CRISPR/Cas effector enzyme, the engineered RNA-guided FokI-nuclease (e.g., dCas-FokI), the RNA-guided DNA endonuclease, TnpB, IscB, IsrB, or the transposon-associated nuclease; or,
[2978] 2) non-RNA-guided sequence-specific nuclease comprises the meganuclease, the zinc finger nuclease (ZFN), the TALE nuclease (TALEN), or the restriction endonuclease (RE).

[2979] Paragraph 26. The vector system of any one of paragraphs 14-25, further comprising a vector encoding a homologous recombination enhancer protein.

[2980] Paragraph 27. An isolated host cell comprising the engineered retron of any one of paragraphs 1-13, or the vector system of any of paragraphs 14-26.

[2981] Paragraph 28. The host cell of paragraph 27, wherein the host cell is a prokaryotic, archeon, or eukaryotic host cell.

[2982] Paragraph 29. The host cell of paragraph 28, wherein the eukaryotic host cell is a mammalian host cell.

[2983] Paragraph 30. The host cell of paragraph 28, wherein the eukaryotic host cell is a non-human host cell.

[2984] Paragraph 31. The host cell of paragraph 29, wherein the mammalian host cell is a human host cell.

[2985] Paragraph 32. The host cell of any of paragraphs 28-31, wherein the host cell is an artificial cell or genetically modified cell.

[2986] Paragraph 33. A pharmaceutical composition comprising the engineered retron of any one of paragraphs 1-13.

[2987] Paragraph 34. A delivery vehicle comprising the engineered retron of any one of paragraphs 1-13 or ncRNA encoded by the engineered retron of any one of paragraphs 1-13, the vector of any one of paragraphs 14-26, the host cell of any one of paragraphs 27-32, or the pharmaceutical composition of paragraph 33.

[2988] Paragraph 35. The delivery vehicle of paragraph 34, which is a lipid nanoparticle.

[2989] Paragraph 36. The delivery vehicle of paragraph 35, wherein the lipid nanoparticle comprises at least one cationic lipid selected from the group consists of: a lipid in Table (I), a lipid having a structure of Formula (I), a lipid having a structure of Formula (II), a lipid having a structure of Formula (III), a lipid having a structure of Formula (IV), a lipid having a structure of Formula (V), a lipid having a structure of Formula (VI), and combinations thereof.

[2990] Paragraph 37. A kit comprising the engineered retron of any one of paragraphs 1-13 or ncRNA encoded by the engineered retron of any one of paragraphs 1-13, the vector or vector system of any one of paragraphs 14-26, the host cell of any one of paragraphs 27-32, the pharmaceutical composition of paragraph 33, or the delivery vehicle of any one of paragraphs 34-36, and instructions for genetically modifying a cell with said engineered retron, ncRNA, vector/vector system, host cell, pharmaceutical composition, or delivery vehicle.

[2991] Paragraph 38. A method of modifying a target DNA sequence in a host (e.g., mammalian) cell, the method comprising introducing into the mammalian cell the engineered retron of any one of paragraphs 1-13 or ncRNA encoded by the engineered retron of any one of paragraphs 1-13, the vector or vector system of any one of paragraphs 14-26, the pharmaceutical composition of paragraph 33, or the delivery vehicle of any one of paragraphs 34-36, to allow the production of the msDNA in the host (e.g., mammalian) cell, wherein the encoded heterologous nucleic acid in the msDNA is integrated into the genome of the host (e.g., mammalian) cell at the target DNA sequence.

[2992] Paragraph 39. Use of the engineered retron of any one of paragraphs 1-13 or ncRNA encoded by the engineered retron of any one of paragraphs 1-13, the vector or vector system of any one of paragraphs 14-26, the pharmaceutical composition of paragraph 33, or the delivery vehicle of any one of paragraphs 34-36, to effect modification of a target DNA sequence in a host (e.g., mammalian) cell.

### Exemplary Embodiment Group B

[2993] The following paragraphs further describe exemplary and non-limiting embodiments of the present disclosure.

[2994] Paragraph 1. An engineered nucleic acid construct comprising:
[2995] a) a first polynucleotide encoding a non-coding RNA (ncRNA), said first polynucleotide comprising:
   [2996] 1) an msr locus encoding the msr RNA portion of a multi-copy single-stranded DNA (msDNA); and
   [2997] 2) an msd locus encoding the msd RNA portion of the msDNA; and
[2998] b) one or more heterologous nucleic acids inserted at or within a location selected from: the msd locus, upstream of the msr locus, upstream of the msd locus, and downstream of the msd locus,
[2999] wherein the ncRNA comprises:
[3000] (I) an ncRNA listed in Table B, or an ncRNA having at least 50%, at least 55%, at least 60%, at least 65%, at least 70%, at least 75%, at least 80%, at least 85%, at least 90%, at least 91%, at least 92%, at least 93%, at least 94%, at least 95%, at least 96%, at least 97%, at least 98%, at least 99%, at least 99.1%, at least 99.2%, at least 99.3%, at least 99.4%, at least 99.5%, at least 99.6%, at least 99.7%, at least 99.8% or at least 99.9% sequence identity with an ncRNA listed in Table B; and/or
[3001] (II) an ncRNA having a conserved structure of any one of the ncRNA structures of FIGS. 2-27; and
[3002] wherein the ncRNA optionally excludes any ncRNA associated in nature with any one of the retron reverse transcriptases of Table X.

[3003] Paragraph 2. The engineered nucleic acid construct of paragraph 1, further comprising a second polynucleotide encoding a reverse transcriptase (RT), or a portion thereof, wherein the encoded RT or portion thereof is capable of synthesizing a DNA copy of at least a portion of the msd locus encoding the msDNA.

[3004] Paragraph 3. The engineered nucleic acid construct of paragraph 2,
[3005] wherein the second polynucleotide comprises:
[3006] III) a polynucleotide listed in Table A, or a polynucleotide having at least 50%, at least 55%, at least 60%, at least 65%, at least 70%, at least 75%, at least 80%, at least 85%, at least 90%, at least 91%, at least 92%, at least 93%, at least 94%, at least 95%, at least 96%, at least 97%, at least 98%, at least 99%, at least 99.1%, at least 99.2%, at least 99.3%, at least 99.4%, at least 99.5%, at least 99.6%, at least 99.7%, at least 99.8% or at least 99.9% sequence identity to a polynucleotide listed in Table A; and/or
[3007] IV) encodes a consensus amino acid sequence of Table C, or encodes an amino acid sequence having at least 50%, at least 55%, at least 60%, at least 65%, at least 70%, at least 75%, at least 80%, at least 85%, at least 90%, at least 91%, at least 92%, at least 93%, at least 94%, at least 95%, at least 96%, at least 97%, at least 98%, at least 99%, at least 99.1%, at least 99.2%, at least 99.3%, at least 99.4%, at least 99.5%, at least 99.6%, at least 99.7%, at least 99.8% or at least 99.9% sequence identity to an amino acid sequence listed in Table C; and/or
[3008] wherein the second polynucleotide encodes:
[3009] V) a polypeptide listed in Table A, or a polypeptide having at least 50%, at least 55%, at least 60%, at least 65%, at least 70%, at least 75%, at least 80%, at least 85%, at least 90%, at least 91%, at least 92%, at least 93%, at least 94%, at least 95%, at least 96%, at least 97%, at least 98%, at least 99%, at least 99.1%, at least 99.2%, at least 99.3%, at least 99.4%, at least 99.5%, at least 99.6%, at least 99.7%, at least 99.8% or at least 99.9% sequence identity to a polypeptide listed in Table A; and/or
[3010] VI) a polypeptide comprising a polypeptide consensus sequence listed in Table C, or a polypeptide having at least 50%, at least 55%, at least 60%, at least 65%, at least 70%, at least 75%, at least 80%, at least 85%, at least 90%, at least 91%, at least 92%, at least 93%, at least 94%, at least 95%, at least 96%, at least 97%, at least 98%, at least 99%, at least 99.1%, at least 99.2%, at least 99.3%, at least 99.4%, at least 99.5%, at least 99.6%, at least 99.7%, at least 99.8% or at least 99.9% sequence identity to an amino acid sequence listed in Table C; and/or wherein the second polynucleotide optionally does not encode an amino acid sequence listed in Table X.

[3011] Paragraph 4. An engineered nucleic acid construct comprising:
[3012] a) a first polynucleotide encoding a non-coding RNA (ncRNA), said first polynucleotide comprising:
   [3013] 1) an msr locus encoding the msr RNA portion of a multi-copy single-stranded DNA (msDNA); and
   [3014] 2) an msd locus encoding the msd RNA portion of the msDNA;
[3015] b) one or more heterologous nucleic acids inserted at or within a location selected from: the msd locus, upstream of the msr locus, upstream of the msd locus, and downstream of the msd locus; and
[3016] c) a second polynucleotide encoding a reverse transcriptase (RT), or a portion thereof, wherein the encoded RT or portion thereof is capable of synthesizing a DNA copy of at least a portion of the msd locus encoding the msDNA, and,
[3017] wherein the non-coding RNA (ncRNA) of the first polynucleotide optionally has a conserved structure of any one of the ncRNA structures of FIGS. 2-27;
[3018] wherein the second polynucleotide comprises:
[3019] I) a polynucleotide listed in Table A, or a polynucleotide having at least 50%, at least 55%, at least 60%, at least 65%, at least 70%, at least 75%, at least 80%, at least 85%, at least 90%, at least 91%, at least 92%, at least 93%, at least 94%, at least 95%, at least 96%, at least 97%, at least 98%, at least 99%, at least 99.1%, at least 99.2%, at least 99.3%, at least 99.4%, at least 99.5%, at least 99.6%, at least 99.7%, at least 99.8% or at least 99.9% sequence identity to a polynucleotide listed in Table A; and/or
[3020] wherein the second polynucleotide encodes:
[3021] II) a polypeptide listed in Table A, or a polypeptide having at least 50%, at least 55%, at least 60%, at least 65%, at least 70%, at least 75%, at least 80%, at least 85%, at least 90%, at least 91%, at least 92%, at least 93%, at least 94%, at least 95%, at least 96%, at least 97%, at least 98%, at least 99%, at least 99.1%, at least 99.2%, at least 99.3%, at least 99.4%, at least 99.5%, at least 99.6%, at least 99.7%, at least 99.8% or at least 99.9% sequence identity to a polypeptide listed in Table A; and/or
[3022] IV) a polypeptide comprising a polypeptide consensus sequence listed in Table C, or a polypeptide having at least 50%, at least 55%, at least 60%, at least 65%, at least 70%, at least 75%, at least 80%, at least 85%, at least 90%, at least 91%, at least 92%, at least 93%, at least 94%, at least 95%, at least 96%, at least 97%, at least 98%, at least 99%, at least 99.1%, at least 99.2%, at least 99.3%, at least 99.4%, at least 99.5%, at least 99.6%, at least 99.7%, at least 99.8% or at least 99.9% sequence identity to a polypeptide listed in Table C; and
[3023] wherein the second polynucleotide optionally does not encode an amino acid sequence of Table X.

[3024] Paragraph 4a. An engineered nucleic acid construct, comprising:
[3025] 1) an msr locus (that encodes the msr RNA portion of an msDNA);
[3026] 2) an msd locus encoding the msd RNA portion of the msDNA;
[3027] 3) a sequence encoding a retron reverse transcriptase (RT), wherein said msd RNA is capable of being reverse transcribed to form the msDNA by the retron reverse transcriptase (RT); and,
[3028] 4) a heterologous nucleic acid inserted at or within the msd locus, upstream of the msr locus, upstream or downstream of the msd locus;
[3029] wherein the engineered nucleic acid construct optionally has (a) a secondary structure of a wild-type ncRNA of any one of FIGS. 2-27 or
[3030] b) a variant of a), having:
   [3031] i) up to 1, 2, or 3 (e.g., up to 1) nucleotide changes per 10 red lettered-nucleotides;
   [3032] ii) up to 4, 5, or 6 (e.g., up to 1 or 2) nucleotide changes per 10 black lettered-nucleotides; and/or
   [3033] iii) up to 7, 8, or 9 (e.g., up to 3 or 4) nucleotide changes per 10 grey lettered-nucleotides.

[3034] Paragraph 5. The engineered nucleic acid construct of any one of paragraphs 1 to 4a, comprising one or more sequence modifications (e.g., an insertion, deletion, and/or substitution of one or more nucleotide(s)) in the msr locus and/or the msd locus that:
[3035] a) modulates (e.g., enhances) reverse transcription, processivity, accuracy/fidelity, and/or production of the msDNA (e.g., in the mammalian cell);
[3036] b) modulates (e.g., reduces) immunogenicity of ncRNA encoded by the engineered retron (e.g., the msr locus and/or the msd locus) in a host (e.g., a host comprising the mammalian cell);
[3037] c) modulates (e.g., inhibits, either permanently or transiently) a function of the msDNA; and/or
[3038] d) modulates (e.g., improves) efficiency of targeted genome editing/engineering.

[3039] Paragraph 6. The engineered nucleic acid construct of any one of paragraphs 1 to 4, wherein said engineered nucleic acid construct has a secondary structure of a wild-type retron encoding a wild-type retron ncRNA encompassed by:
[3040] a) any one of the structures as depicted in FIGS. 2-27, or
[3041] b) a variant of a), having:
   [3042] i) up to 1, 2, or 3 (e.g., up to 1) nucleotide changes per 10 red lettered-nucleotides;
   [3043] ii) up to 4, 5, or 6 (e.g., up to 1 or 2) nucleotide changes per 10 black lettered-nucleotides; and/or
   [3044] iii) up to 7, 8, or 9 (e.g., up to 3 or 4) nucleotide changes per 10 grey lettered-nucleotides; and/or
[3045] optionally further comprising:
   [3046] i) 7, 8, 9, or 10 (e.g., 9 or 10) nucleotides present per 10 red-circled nucleotides;
   [3047] ii) 6, 7, 8, 9, or 10 (e.g., 8, 9 or 10) nucleotides present per 10 black-circled nucleotides;
   [3048] iii) 4, 5, 6, 7, 8, 9, or 10 (e.g., 6, 7, 8, 9 or 10) nucleotides present per 10 grey-circled nucleotides; and/or
   [3049] iv) 2, 3, 4, 5, 6, 7, 8, 9, or 10 (e.g., 4, 5, 6, 7, 8, 9, or 10) nucleotides present per 10 white-circled nucleotides.

[3050] Paragraph 7. The engineered nucleic acid construct of any one of paragraphs 1-6, wherein the nucleic acid construct is engineered by introducing the one or more sequence modifications into a wild-type retron encoding a wild-type ncRNA listed in Table B.

[3051] Paragraph 8. The engineered nucleic acid construct of any one of paragraphs 1-7, wherein the one or more sequence modifications in the ncRNA comprises one or more of:
[3052] (i) a modified (e.g., mutated, reduced, or eliminated) bulge in a1, a2, or both a1 and a2;
[3053] (ii) an extension or shortening of a1, a2, or both a1 and a2;
[3054] (iii) an extension or shortening of a spacer sequence between hairpin loops (e.g., S1, S2, S3, and/or S4);
[3055] (iv) an additional or modified (e.g., mutated or eliminated) bulge in hairpin loops (e.g., L2 and/or L3 (e.g., by removing unpaired bases in the bulge, or by replacing unpaired bases with an equivalent number of base pairs));
[3056] (v) a modified (e.g., extended or shortened) length of hairpin loops (e.g., L1, L2, L3, and/or L4);
[3057] (vi) an alternative L1 and/or L2 having complement, reverse, or reverse complement sequences;
[3058] (vii) a modified (e.g., increased) number of unpaired bases at the tip of hairpin loops (e.g., L1, L2, L3, and/or L4);
[3059] (viii) a modified (e.g., increased or decreased) GC content in hairpin loops (e.g., L1, L2, L3, and/or L4);
[3060] (ix) an insertion of the heterologous nucleic acid in spacer sequences between hairpin loops (e.g., S1, S2, S3 and/or S4), or at the tip of hairpin loops (e.g., L1, L2, L3, and/or L4);
[3061] (x) a deletion of one or more hairpin loops (e.g., L1, L2, L3 and/or L4);
[3062] (xi) an addition of a new loop in a spacer sequence between hairpin loops (e.g., SI, S2, S3, and/or S4);
[3063] (xii) circularization of the ncRNA with the 5′ end and the 3′ end of the ncRNA being connected either directly, or via a spacer sequence;
[3064] (xiii) a repositioned branching guanosine capable of initiating reverse transcription priming;
[3065] (xiv) a staggered end sequence that reduces immunogenicity of the retron ncRNA, created by, e.g., adding or removing the 5′ al nucleotides and/or the 3′ a2 nucleotides; and/or,
[3066] (xv) an antisense sequence complementary to a CRISPR/Cas guide RNA (gRNA) sequence encoded by the heterologous nucleic acid, wherein the antisense sequence hybridizes to and inhibits said gRNA in the encoded retron ncRNA, and wherein said antisense sequence is removed upon reverse transcription of the msDNA.

[3067] Paragraph 9. The engineered nucleic acid construct of any one of paragraphs 1-8, wherein the one or more heterologous nucleic acid sequences comprise:
[3068] a) a heterologous nucleic acid (such as the coding sequence for an RNA aptamer or a ribozyme) inserted into the msr locus or the msd locus (such as in an S region (e.g., S1, S2, S3 and/or S4), or the tip of an L region (e.g., L1, L2, L3 and/or L4), or upstream or downstream of either the msr locus or the msd locus; or
[3069] b) a first heterologous nucleic acid inserted into the msd locus, and a second heterologous nucleic acid inserted either upstream of the msr locus or downstream of the msd locus, wherein the second heterologous nucleic acid encodes a guide RNA.

[3070] Paragraph 10. The engineered nucleic acid construct of any one of paragraphs 1-9, wherein said heterologous nucleic acid encodes:
[3071] (a) a protein or peptide of interest, or wherein said heterologous nucleic acid comprises;
[3072] (b) a DNA donor template sequence;
[3073] (c) a functional DNA element selected from a promoter, an enhancer, a protein binding sequence, a methylation site, a homology region for assisting gene editing, and the like; or
[3074] (d) a coding sequence for a functional RNA element selected from a guide RNA and a ncRNA.

[3075] Paragraph 11. The engineered nucleic acid construct of paragraph 10, wherein said protein or peptide of interest comprises a therapeutic protein useful in treating a disease.

[3076] Paragraph 12. The engineered nucleic acid construct of paragraph 10, wherein said DNA donor template sequence corrects/repairs/removes a mutation at the target genome site.

[3077] Paragraph 13. The engineered nucleic acid construct of any one of paragraphs 1-12, further comprising or encoding a sequence-specific nuclease (such as a CRISPR/Cas effector enzyme, a ZFN, a TALEN, a meganuclease, TnpB, IscB, or a restriction endonuclease (RE)), and/or a DNA-repair modulating biomolecule.

[3078] Paragraph 13b. The engineered nucleic acid construct of paragraphs 1-13 wherein the engineered nucleic acid is an all-RNA component system.

[3079] Paragraph 13c. The engineered nucleic acid construct of paragraphs 1-13 wherein the engineered nucleic acid is an all-DNA molecule system.

[3080] Paragraph 14. The engineered nucleic acid construct of paragraph 13, wherein the sequence-specific nuclease is fused to the RT, optionally via a flexible linker (e.g., a flexible linker comprising Gly and Ser rich sequences such as G4S repeats or GS repeats) or by a generally disordered protein sequence (such as unstructured hydrophilic, biodegradable protein polymer, e.g., an XTEN peptide polymer).

[3081] Paragraph 15. The engineered nucleic acid construct of paragraph 13 or 14, wherein the nuclease is a CRISPR/Cas effector enzyme that forms a complex with a guide RNA (gRNA) recognizing a target sequence, wherein the gRNA is linked to the ncRNA and/or the msDNA, either directly or through a linker/spacer polynucleotide.

[3082] Paragraph 16. The engineered nucleic acid construct of paragraph 13, wherein the DNA-repair modulating biomolecule is a regulatory protein that modulates (e.g., enhances) HDR, and the regulatory protein is optionally fused to the RT or to the sequence-specific nuclease, optionally via a flexible linker (e.g., the flexible linker comprising Gly and Ser rich sequences such as G4S repeats or GS repeats) or by a generally disordered protein sequence (such as unstructured hydrophilic, biodegradable protein polymer, e.g., an XTEN peptide polymer).

[3083] Paragraph 17. A vector system comprising one or more vectors comprising the engineered nucleic acid construct of any one of paragraphs 1-16, wherein the vector system is optionally all-RNA.

[3084] Paragraph 18. The vector system of paragraph 17, wherein the msr locus, the msd locus, and the polynucleotide encoding the RT are comprised within the same vector.

[3085] Paragraph 19. The vector system of paragraph 17 or 18, wherein the same vector further comprises a promoter operably linked to the msr locus and/or the msd locus.

[3086] Paragraph 20. The vector system of paragraph 19, wherein the promoter is further operably linked to the polynucleotide encoding the RT.

[3087] Paragraph 21. A vector system comprising one or more vectors, comprising the engineered nucleic acid construct of paragraph 1 or 2, wherein the vector system further comprises a second polynucleotide encoding a reverse transcriptase (RT), or a portion thereof, wherein the encoded RT is capable of synthesizing a DNA copy of at least a portion of the msd locus encoding the msDNA, and wherein the msr locus, the msd locus, and the second polynucleotide encoding the RT are provided by at least two different vectors.

[3088] Paragraph 22. The vector system of paragraph 21, wherein:
[3089] a) the second polynucleotide comprises:
   [3090] i) a polynucleotide listed in Table A, or a polynucleotide having at least 50%, at least 55%, at least 60%, at least 65%, at least 70%, at least 75%, at least 80%, at least 85%, at least 90%, at least 91%, at least 92%, at least 93%, at least 94%, at least 95%, at least 96%, at least 97%, at least 98%, at least 99%, at least 99.1%, at least 99.2%, at least 99.3%, at least 99.4%, at least 99.5%, at least 99.6%, at least 99.7%, at least 99.8% or at least 99.9% sequence identity to a polynucleotide listed in Table A; and/or
[3091] b) the second polynucleotide encodes:
   [3092] i) a polypeptide listed in Table A, or a polypeptide having at least 50%, at least 55%, at least 60%, at least 65%, at least 70%, at least 75%, at least 80%, at least 85%, at least 90%, at least 91%, at least 92%, at least 93%, at least 94%, at least 95%, at least 96%, at least 97%, at least 98%, at least 99%, at least 99.1%, at least 99.2%, at least 99.3%, at least 99.4%, at least 99.5%, at least 99.6%, at least 99.7%, at least 99.8% or at least 99.9% sequence identity to a polypeptide listed in Table A; and/or
   [3093] ii) a polypeptide listed in Table C, or a polypeptide having at least 50%, at least 55%, at least 60%, at least 65%, at least 70%, at least 75%, at least 80%, at least 85%, at least 90%, at least 91%, at least 92%, at least 93%, at least 94%, at least 95%, at least 96%, at least 97%, at least 98%, at least 99%, at least 99.1%, at least 99.2%, at least 99.3%, at least 99.4%, at least 99.5%, at least 99.6%, at least 99.7%, at least 99.8% or at least 99.9% sequence identity to a polypeptide listed in Table C; and
[3094] wherein the second polynucleotide optionally does not encode a polypeptide listed in Table X.

[3095] Paragraph 23. The vector system of paragraph 21 or 22, wherein the polynucleotide encoding the RT is provided in trans with respect to the msr gene and/or the msd gene.

[3096] Paragraph 24. The vector system of any one of paragraphs 17-23, wherein the one or more vectors comprise a viral vector.

[3097] Paragraph 25. The vector system of paragraph 24, wherein the viral vector is a retroviral vector, a lentiviral vector, an adenoviral vector, an adeno-associated viral vector, a vaccinia viral vector, a poxviral vector, or a herpes simplex viral vector.

[3098] Paragraph 26. The vector system of any one of paragraphs 17-23, wherein the one or more vectors comprise a non-viral vector.

[3099] Paragraph 27. The vector system of paragraph 26, wherein the non-viral vector comprises a plasmid.

[3100] Paragraph 28. The vector system of paragraph 26, wherein the non-viral vector comprises a liposome, a lipid nanoparticle (LNP), a cationic polymer, a vesicle, or a gold nanoparticle.

[3101] Paragraph 29. The vector system of any one of paragraphs 17-28, comprising a vector encoding a sequence-specific nuclease.

[3102] Paragraph 30. The vector system of paragraph 29, wherein the sequence-specific nuclease comprises an RNA-guided sequence-specific nuclease (e.g., a CRISPR/Cas effector enzyme, an engineered RNA-guided FokI-nuclease (e.g., dCas-FokI), an RNA-guided DNA endonuclease, TnpB, IscB, or a transposon-associated nuclease), or a non-RNA-guided sequence-specific nuclease (e.g., a meganuclease, a zinc finger nuclease (ZFN), a TALE nuclease (TALEN), or a restriction endonuclease (RE)).

[3103] Paragraph 31. The vector system of paragraph 30, wherein the Cas effector enzyme is a Class 1, Type I, II, or III Cas; a Class 2, Type II Cas (e.g., Cas9); or a Class 2, Type V Cas (e.g., Cpf1).

[3104] Paragraph 32. The vector system of paragraph 30, wherein: 1) the RNA-guided sequence-specific nuclease comprises the CRISPR/Cas effector enzyme, the engineered RNA-guided FokI-nuclease (e.g., dCas-FokI), the RNA-guided DNA endonuclease, TnpB, IscB, IsrB, or the transposon-associated nuclease; or, 2) non-RNA-guided sequence-specific nuclease comprises the meganuclease, the zinc finger nuclease (ZFN), the TALE nuclease (TALEN), or the restriction endonuclease (RE).

[3105] Paragraph 33. The vector system of any one of paragraphs 17-32, further comprising a vector encoding a homologous recombination enhancer protein.

[3106] Paragraph 34. An RNA molecule encoded by the engineered nucleic acid construct of any one of paragraphs 1-16.

[3107] Paragraph 35. A recombinant retron-based genome editing system comprising:
[3108] a) a non-coding RNA (ncRNA) comprising:
   [3109] i) an nsr locus encoding the msr RNA portion of a multi-copy single-stranded DNA (msDNA); and
   [3110] ii) an msd locus encoding the msd RNA portion of the msDNA;
[3111] b) a heterologous nucleic acid inserted at or within a location selected from: the msd locus, upstream of the msr locus, upstream of the msd locus, and downstream of the msd locus; and
[3112] c) a sequence encoding a reverse transcriptase (RT), or a domain thereof comprising:
   [3113] i) a polypeptide listed in Table A, or a polypeptide having at least 50%, at least 55%, at least 60%, at least 65%, at least 70%, at least 75%, at least 80%, at least 85%, at least 90%, at least 91%, at least 92%, at least 93%, at least 94%, at least 95%, at least 96%, at least 97%, at least 98%, at least 99%, at least 99.1%, at least 99.2%, at least 99.3%, at least 99.4%, at least 99.5%, at least 99.6%, at least 99.7%, at least 99.8% or at least 99.9% sequence identity to a polypeptide listed in Table A; and/or
   [3114] ii) a polypeptide listed in Table C, or a polypeptide having at least 50%, at least 55%, at least 60%, at least 65%, at least 70%, at least 75%, at least 80%, at least 85%, at least 90%, at least 91%, at least 92%, at least 93%, at least 94%, at least 95%, at least 96%, at least 97%, at least 98%, at least 99%, at least 99.1%, at least 99.2%, at least 99.3%, at least 99.4%, at least 99.5%, at least 99.6%, at least 99.7%, at least 99.8% or at least 99.9% sequence identity to a polypeptide listed in Table C; and
[3115] wherein, the RT optionally does not comprise a polypeptide listed in Table X.

[3116] Paragraph 36. A recombinant retron-based genome editing system comprising:
[3117] a) a non-coding RNA (ncRNA) comprising:
   [3118] i) an msr locus encoding the msr RNA portion of a multi-copy single-stranded DNA (msDNA); and
   [3119] ii) an msd locus encoding the msd RNA portion of the msDNA;
[3120] wherein the ncRNA comprises:
   [3121] i) an ncRNA listed in Table B, or an ncRNA having at least 50%, at least 55%, at least 60%, at least 65%, at least 70%, at least 75%, at least 80%, at least 85%, at least 90%, at least 91%, at least 92%, at least 93%, at least 94%, at least 95%, at least 96%, at least 97%, at least 98%, at least 99%, at least 99.1%, at least 99.2%, at least 99.3%, at least 99.4%, at least 99.5%, at least 99.6%, at least 99.7%, at least 99.8% or at least 99.9% sequence identity to an ncRNA listed in Table B; and/or
   [3122] ii) an ncRNA having a conserved structure of any one of the ncRNA structures of FIGS. 2-27; and
[3123] wherein the ncRNA optionally excludes any ncRNA associated in nature with any one of the retron reverse transcriptases of Table X;
[3124] b) a heterologous nucleic acid inserted at or within a location selected from: the msd locus; upstream of the msr locus; upstream of the msd locus; and downstream of the msd locus; and
[3125] c) a reverse transcriptase (RT), or a portion thereof, wherein the RT is capable of synthesizing a DNA copy of at least a portion of the msd locus encoding the msDNA.

[3126] Paragraph 37. A recombinant retron-based genome editing system comprising:
[3127] a) a non-coding RNA (ncRNA) comprising:
   [3128] i) an msr locus encoding the msr RNA portion of a multi-copy single-stranded DNA (msDNA); and
   [3129] ii) an msd locus encoding the msd RNA portion of the msDNA;
[3130] wherein, the ncRNA comprises:
   [3131] i) an ncRNA listed in Table B, or an ncRNA having at least 50%, at least 55%, at least 60%, at least 65%, at least 70%, at least 75%, at least 80%, at least 85%, at least 90%, at least 91%, at least 92%, at least 93%, at least 94%, at least 95%, at least 96%, at least 97%, at least 98%, at least 99%, at least 99.1%, at least 99.2%, at least 99.3%, at least 99.4%, at least 99.5%, at least 99.6%, at least 99.7%, at least 99.8% or at least 99.9% sequence identity to an ncRNA listed in Table B; and/or
   [3132] ii) an ncRNA having a conserved structure of any one of the ncRNA structures of FIGS. 2-27; and
   [3133] wherein the ncRNA optionally excludes any ncRNA associated in nature with any one of the retron reverse transcriptases of Table X;
[3134] b) a heterologous nucleic acid inserted at or within a location selected from: the msd locus, upstream of the msr locus, upstream of the msd locus, and downstream of the msd locus; and
[3135] c) a reverse transcriptase (RT) or a domain thereof: wherein the RT comprises:
   [3136] i) an RT listed in Table A, or an RT having at least 50%, at least 55%, at least 60%, at least 65%, at least 70%, at least 75%, at least 80%, at least 85%, at least 90%, at least 91%, at least 92%, at least 93%, at least 94%, at least 95%, at least 96%, at least 97%, at least 98%, at least 99%, at least 99.1%, at least 99.2%, at least 99.3%, at least 99.4%, at least 99.5%, at least 99.6%, at least 99.7%, at least 99.8% or at least 99.9% sequence identity to an RT listed in Table A; and/or
   [3137] ii) a consensus sequence listed in Table C, or a polypeptide having at least 50%, at least 55%, at least 60%, at least 65%, at least 70%, at least 75%, at least 80%, at least 85%, at least 90%, at least 91%, at least 92%, at least 93%, at least 94%, at least 95%, at least 96%, at least 97%, at least 98%, at least 99%, at least 99.1%, at least 99.2%, at least 99.3%, at least 99.4%, at least 99.5%, at least 99.6%, at least 99.7%, at least 99.8% or at least 99.9% sequence identity to an amino acid sequence listed in Table C; and
[3138] wherein the RT does not optionally comprise an RT listed in Table X.

[3139] Paragraph 38. An isolated host cell comprising the engineered nucleic acid construct of any one of paragraphs 1-16, the vector system of any of paragraphs 17-33, the RNA molecule of paragraph 34, or the recombinant retron-based genome editing system of any one of paragraphs 35-37.

[3140] Paragraph 39. The isolated host cell of paragraph 38, wherein the host cell is a prokaryotic, archeon, or eukaryotic host cell.

[3141] Paragraph 40. The isolated host cell of paragraph 38, wherein the eukaryotic host cell is a mammalian host cell.

[3142] Paragraph 41. The isolated host cell of paragraph 39, wherein the eukaryotic host cell is a non-human host cell.

[3143] Paragraph 42. The isolated host cell of paragraph 40, wherein the mammalian host cell is a human host cell.

[3144] Paragraph 43. The isolated host cell of any one of paragraphs 38-42, wherein the host cell is an artificial cell or genetically modified cell.

[3145] Paragraph 44. A pharmaceutical composition comprising:
[3146] a) the engineered nucleic acid construct of any one of paragraphs 1-16, ncRNA encoded by the engineered nucleic acid construct of any one of paragraphs 1-16, the vector system of any one of paragraphs 17-33, the RNA molecule of paragraph 34, the recombinant retron-based genome editing system of any one of paragraphs 35-37, and/or the isolated host cell of any one of paragraphs 38-43; and
[3147] b) a pharmaceutically acceptable carrier.

[3148] Paragraph 45. A pharmaceutical composition comprising:
[3149] a) a lipid nanoparticle (LNP); and
[3150] b) the engineered nucleic acid construct of any one of paragraphs 1-16, ncRNA encoded by the engineered nucleic acid construct of any one of paragraphs 1-16, the vector system of any one of paragraphs 17-33, the RNA molecule of paragraph 34, and/or the recombinant retron-based genome editing system of any one of paragraphs 35-37.

[3151] Paragraph 46. The pharmaceutical composition of paragraph 45, wherein the LNP encapsulates the engineered nucleic acid construct, ncRNA, vector system, RNA molecule, and/or engineered nucleic acid-enzyme construct.

[3152] Paragraph 47. The pharmaceutical composition of paragraph 45 or 46, wherein the lipid nanoparticle comprises:
[3153] a) one or more ionizable lipids;
[3154] b) one or more structural lipids;
[3155] c) one or more PEGylated lipids; and
[3156] d) one or more phospholipids.

[3157] Paragraph 48. The pharmaceutical composition of paragraph 47, wherein the one or more ionizable lipids is selected from the group consisting of those disclosed in Table 2.

[3158] Paragraph 49. The pharmaceutical composition of paragraph 47 or 48, wherein the one or more structural lipids are selected from the group consisting of cholesterol, fecosterol, beta sitosterol, sitosterol, ergosterol, campesterol, stigmasterol, brassicasterol, tomatidine, tomatine, ursolic acid, alpha-tocopherol, prednisolone, dexamethasone, prednisone, and hydrocortisone.

[3159] Paragraph 50. The pharmaceutical composition of any one of paragraphs 47-49, wherein the one or more PEGylated lipids are selected from the group consisting of PEG-c-DOMG, PEG-DMG, PEG-DLPE, PEG-DMPE, PEG-DPPC, and PEG-DSPE.

[3160] Paragraph 51. The pharmaceutical composition of any one of paragraphs 47-50, wherein the one or more phospholipids are selected from the group consisting of 1,2-distearoyl-sn-glycero-3-phosphocholine (DSPC), 1,2-dioleoyl-sn-glycero-3-phosphoethanolamine (DOPE), 1,2-dilinoleoyl-sn-glycero-3-phosphocholine (DLPC), 1,2-dimyristoyl-sn-glycero-phosphocholine (DMPC), 1.2-dioleoyl-sn-glycero-3-phosphocholine (DOPC), 1,2-dipalmitoyl-sn-glycero-3-phosphocholine (DPPC), 1,2-diundecanoyl-sn-glycero-phosphocholine (DUPC), 1-palmitoyl-2-oleoyl-sn-glycero-3-phosphocho line (POPC), 1,2-di-O-octadecenyl-sn-glycero-3-phosphocholine (18:0 Diether PC), 1-oleoyl-2-cholesterylhemisuccinoyl-sn-glycero-3-phosphocholine (OChemsPC), 1-hexadecyl-sn-glycero-3-phosphocholine (C16 Lyso PC), 1,2-dilinolenoyl-sn-glycero-3-phosphocholine, 1,2-diarachidonoyl-sn-glycero-3-phosphocholine, 1,2-didocosahexaenoyl-sn-glycero-3-phosphocholine, 1,2-diphytanoylsn-glycero-3-phosphoethanolamine (ME 16.0 PE), 1,2-distearoyl-sn-glycero-3-phosphoethanolamine, 1,2-dilinoleoyl-sn-glycero-3-phosphoethanolamine, 1,2-dilinolenoyl-sn-glycero-3-phosphoethanolamine, 1,2-diarachidonoyl-sn-glycero-3-phosphoethanolamine, 1,2-didocosahexaenoyl-sn-glycero-3-phosphoethanolamine, 1,2-dioleoyl-sn-glycero-3-phospho-rac-(1-glycerol) sodium salt (DOPG), and sphingomyelin.

[3161] Paragraph 52. The pharmaceutical composition of any one of paragraphs 47-51, wherein the lipid nanoparticle comprises about 48.5 mol % ionizable lipid, about 10 mol % phospholipid, about 40 mol % structural lipid, and about 1.5 mol % of PEG lipid.

[3162] Paragraph 53. The pharmaceutical composition of any one of paragraphs 47-52, wherein the lipid nanoparticle comprises about 48.5 mol % ionizable lipid, about 10 mol % phospholipid, about 39 mol % structural lipid, and about 2.5 mol % of PEG lipid.

[3163] Paragraph 54. The pharmaceutical composition of any one of paragraphs 47-53, wherein the LNP further comprises a targeting moiety operably connected to the LNP.

[3164] Paragraph 55. The pharmaceutical composition of any one of paragraphs 47-54, wherein the LNP further comprises one or more additional components selected from the group consisting of DDAB, EPC, 14PA, 18BMP, DODAP, DOTAP, and C12-200.

[3165] Paragraph 56. The pharmaceutical composition of paragraph 45, wherein the lipid nanoparticle comprises at least one cationic lipid selected from the group consisting of: a lipid in Table 2, a lipid having a structure of Formula (I), a lipid having a structure of Formula (II), a lipid having a structure of Formula (III), a lipid having a structure of Formula (IV), a lipid having a structure of Formula (V), a lipid having a structure of Formula (VI), and combinations thereof.

[3166] Paragraph 57. A kit comprising the engineered nucleic acid construct of any one of paragraphs 1-16, ncRNA encoded by the engineered nucleic acid construct of any one of paragraphs 1-16, the vector system of any one of paragraphs 17-33, the RNA molecule of paragraph 34, the recombinant retron-based genome editing system of any one of paragraphs 35-37, the host cell of any one of paragraphs 38-43, or the pharmaceutical composition of any one of paragraphs 44-56, and instructions for genetically modifying a cell with said engineered nucleic acid construct, ncRNA, vector system, host cell, or pharmaceutical composition.

[3167] Paragraph 58. A method of modifying a target DNA sequence in a host (e.g., mammalian) cell, the method comprising introducing into the mammalian cell the engineered nucleic acid construct of any one of paragraphs 1-16, ncRNA encoded by the engineered nucleic acid construct of any one of paragraphs 1-16, the vector system of any one of paragraphs 17-33, the RNA molecule of paragraph 34, the recombinant retron-based genome editing system of any one of paragraphs 35-37, or the pharmaceutical composition of any one of paragraphs 44-56, to allow production of the msDNA in the host (e.g., mammalian) cell, wherein the heterologous nucleic acid in the msDNA modifies the genome of the host.

[3168] Paragraph 59. The method of paragraph 58, wherein the modifying comprises introducing an insertion, deletion and/or substitution into the target DNA sequence.

[3169] Paragraph 60. A method of treating a disease or condition in a subject in need thereof, the method comprising administering a therapeutically effective amount of the engineered nucleic acid construct of any one of paragraphs 1-16, ncRNA encoded by the engineered nucleic acid construct of any one of paragraphs 1-16, the vector system of any one of paragraphs 17-33, the RNA molecule of paragraph 34, the recombinant retron-based genome editing system of any one of paragraphs 35-37, the host cell of any one of paragraphs 38-43, or the pharmaceutical composition of any one of paragraphs 44-56 to the subject, thereby treating the disease or condition in the subject.

[3170] Paragraph 61. A method of treating a disease or condition in a subject in need thereof, the method comprising administering a therapeutically effective amount of the host cell of any one of paragraphs 38-43 to the subject, thereby treating the disease or condition in the subject.

[3171] Paragraph 62. The method of paragraph 61, wherein the host cell is autologous to the subject.

[3172] Paragraph 63. The method of paragraph 61, wherein the host cell is allogeneic to the subject.

### Exemplary Embodiment Group C

[3173] The following paragraphs also describe exemplary and non-limiting embodiments of the present disclosure.

[3174] Paragraph 1. A gene editing system comprising one or more delivery vehicles, wherein:
[3175] the delivery vehicle(s) comprise RNA cargo,
[3176] said RNA cargo comprises (a) at least one mRNA molecule encoding (i) a nucleic acid programmable nuclease and (ii) a retron reverse transcriptase, (b) an engineered retron ncRNA, and (c) guide RNA for the programmable nuclease,
[3177] each delivery vehicle contains (a)(i) and/or (a)(ii) and/or (b) and/or (c),
[3178] whereby one delivery vehicle or more than one delivery vehicle delivers (a)(i), (a)(ii), (b), and (c).

[3179] Paragraph 2. The gene editing system of paragraph 1, wherein (a)(i) and (a)(ii) comprise a single mRNA molecule encoding the nucleic acid programmable nuclease and the retron reverse transcriptase.

[3180] Paragraph 3. The gene editing system of paragraph 2, wherein (a)(i) and (a)(ii) are encoded and expressed as a fusion protein.

[3181] Paragraph 4. The gene editing system of paragraph 3, wherein the fusion protein comprises the C-terminal end of the nucleic acid programmable nuclease fused to the N-terminal end of the retron reverse transcriptase (nuclease:RT fusion).

[3182] Paragraph 5. The gene editing system of paragraph 3, wherein the fusion protein comprises the N-terminal end of the nucleic acid programmable nuclease fused to the C-terminal end of the retron reverse transcriptase (RT:nuclease fusion).

[3183] Paragraph 6. The gene editing system of paragraph 1, wherein (a)(i) and (a)(ii) comprise a first mRNA molecule encoding the nucleic acid programmable nuclease and a second mRNA molecule encoding the retron reverse transcriptase.

[3184] Paragraph 7. The gene editing system of paragraph 1, wherein (c) is separate from (a)(i), (a)(ii) and (b) or is provided in trans.

[3185] Paragraph 8. The gene editing system of paragraph 1, wherein (b) the engineered retron ncRNA, and (c) the guide RNA are fused or are provided in cis.

[3186] Paragraph 9. The gene editing system of paragraph 8, wherein the guide RNA is fused to the 5′ end of the retron ncRNA.

[3187] Paragraph 10. The gene editing system of paragraph 8, wherein the guide RNA is fused to the 3′ end of the retron ncRNA.

[3188] Paragraph 11. The gene editing system of paragraph 8, wherein the engineered ncRNA comprises a first guide RNA fused to the 5′ end of the retron ncRNA, and a second guide RNA fused to the 3′ end of the retron ncRNA, and the first and second guide RNAs target different sequences.

[3189] Paragraph 12. The gene editing system of paragraph 1, wherein the one or more delivery vehicles comprise a liposome or a lipid nanoparticle (LNP).

[3190] Paragraph 13. The gene editing system of paragraph 1, wherein (a) the at least one mRNA molecule encoding (i) the nucleic acid programmable nuclease and (ii) the retron reverse transcriptase, and (b) the engineered retron ncRNA are in the same delivery vehicle.

[3191] Paragraph 14. The gene editing system of paragraph 1, wherein the (a) the at least one mRNA molecule encoding (i) the nucleic acid programmable nuclease and (ii) the retron reverse transcriptase, and (b) the engineered retron ncRNA are in separate delivery vehicles.

[3192] Paragraph 15. The gene editing system of paragraph 1, wherein the nucleic acid programmable nuclease and the retron reverse transcriptase are encoded on separate mRNA molecules and those separate mRNA molecules of (a)(i) and (a)(ii) are contained in the same delivery vehicle.

[3193] Paragraph 16. The gene editing system of paragraph 1, wherein the nucleic acid programmable nuclease and the retron reverse transcriptase are encoded on separate mRNA molecules and those separate mRNA molecules of (a)(i) and (a)(ii) are contained in different delivery vehicles.

[3194] Paragraph 17. The gene editing system of paragraph 1, wherein the engineered retron ncRNA includes a sequence of interest encoding a donor polynucleotide comprising an intended edit to be integrated at a target sequence in a cell, and wherein the donor polynucleotide is flanked by a 5′ homology arm that hybridizes to a sequence 5′ to the target sequence and a 3′ homology arm that hybridizes to a sequence 3′ to the target sequence.

[3195] Paragraph 18. The gene editing system of paragraph 1, wherein the nucleic acid programmable nuclease comprises a Cas9 nuclease, a TnpB nuclease, or a Cas12a nuclease.

[3196] Paragraph 19. The gene editing system of paragraph 18, wherein the nucleic acid programmable nuclease comprises a Cas9 nuclease.

[3197] Paragraph 20. The gene editing system of paragraph 1, wherein the retron reverse transcriptase has an amino acid sequence of Table A, or an amino acid sequence having at least 90%, 95%, 99%, or 100% sequence identity with any amino acid sequence of Table A.

[3198] Paragraph 21. The gene editing system of paragraph 1, wherein the engineered retron ncRNA comprises:
[3199] A) a pre-msr sequence having a first complementary region of the retron ncRNA;
[3200] B) an msr sequence including an msr stem-loop structure;
[3201] C) an msd sequence including an msd stem-loop structure and a sequence of interest, wherein said msd sequence templates a single strand DNA product (RT-DNA) in the presence of the retron reverse transcriptase; and
[3202] D) a post-msd sequence having a second complementary region, wherein the first and second complementary regions form an al/a2 duplex region of the retron ncRNA,
   [3203] wherein the msr stem-loop structure, the msd stem-loop structure, or the al/a2 duplex comprise a modification which result in increased editing efficiency in the presence of a nucleic acid programmable nuclease that associates with the one or more guide RNAs, and
   [3204] wherein optionally one or more of the guide RNAs of (c) are coupled to the pre-msr sequence, the post-msd sequence, or both the pre-msr sequence and the post-msd sequence.

[3205] Paragraph 22. The gene editing system of paragraph 21, wherein the sequence of interest encodes a donor polynucleotide comprising an intended edit to be integrated at a target sequence of a cell, wherein the donor polynucleotide is flanked by a 5′ homology arm that hybridizes to a sequence 5′ to the target sequence and a 3′ homology arm that hybridizes to a sequence 3′ to the target sequence.

[3206] Paragraph 23. The gene editing system of paragraph 21, wherein the ncRNA has a nucleotide sequence of any sequences of Table B, or a nucleotide sequence having at least 90%, 95%, 99%, or 100% sequence identity with any sequence of Table B.

[3207] Paragraph 24. An isolated cell comprising the gene editing system of paragraph 1.

[3208] Paragraph 25. The isolated cell of paragraph 24, wherein the isolated cell is a mammalian cell.

[3209] Paragraph 26. The isolated cell of paragraph 25, wherein the mammalian cell is a human cell.

[3210] Paragraph 27. A composition comprising:
[3211] a) the gene editing system of paragraph 1; and
[3212] b) a pharmaceutically or veterinarily acceptable carrier.

[3213] Paragraph 28. The composition of paragraph 27, wherein the delivery vehicle is a lipid nanoparticle comprising:
[3214] a) one or more ionizable lipids;
[3215] b) one or more structural lipids;
[3216] c) one or more PEGylated lipids; and
[3217] d) one or more phospholipids.

[3218] Paragraph 29. The composition of paragraph 28, wherein the one or more ionizable lipids comprises an ionizable lipid set forth in Table 2.

[3219] Paragraph 30. A method of genetically modifying a cell comprising:
[3220] contacting the gene editing system of paragraph 17 with the cell, thereby delivering the RNA cargo to the cell,
   [3221] wherein:
      [3222] the nucleic acid programmable nuclease forms a complex with the guide RNA, wherein said guide RNA directs the complex to the target sequence,
      [3223] the nucleic acid programmable nuclease creates a double-stranded break in in the target sequence,
      [3224] the retron reverse transcriptase and engineered retron ncRNA create RT DNA that comprises the donor polynucleotide, and
      [3225] the donor polynucleotide becomes integrated at the target sequence.

### Examples

### Example 1: Retron Engineering

[3226] This example demonstrates that an engineered (or recombinant) retron as described herein can be engineered based on existing sequence information in a sequence database.

[3227] Specifically, retron-like reverse transcriptases (RTs) are first identified from various genomic or metagenomic sequence databases. The identified ncRNA regions of the retrons are then predicted in silico, and/or are determined empirically by, for example, reconstituting the putative retron system in a living cell, to assay for msDNA production.

[3228] Once a particular wild-type retron is identified and confirmed, one or more sequence elements of the retron are modified based on the methods described herein, and/or the associated RT is modified or engineered to enhance the overall activity and/or processivity of the retron. For example, the wild-type retron can be engineered by one or more of the following methods: (a) addition of a heterologous nucleic acid sequence of interest (e.g., a nucleotide sequence encoding an HDR donor template) to the various portions and structures of the msd locus; (b) performing any/all of the structural modifications described herein; (c) optionally linking the engineered retron ncRNA to one or more CRISPR gRNA, e.g., a gRNA linked to the 3′ end of a retron ncRNA, or a gRNA linked to the 5′ end of a retron ncRNA, or a pair of gRNAs linked one to the 3′ end and one to the 5′ end of a retron ncRNA.

[3229] The engineered retron or its encoded ncRNA are optionally linked to a sequence-specific nuclease such as CRISPR/Cas enzyme and/or gRNA, ZFN, TALEN, TnpBs, or IscBs, and the like

[3230] For example, the RT is fused to the CRISPR/Cas enzyme (such as Cas9 or Cpf1) as a N- or C-terminal fusion, optionally further fused to a nuclear localization signal (NLS) at the N- and/or C-terminal of the fusion. The ncRNA or the resulting msDNA after reverse transcription is also linked to a guide RNA (gRNA) at the 5′ or 3′ end, and can be used with the cognate CRISPR/Cas enzyme in the method of the invention.

[3231] In another example, the RT is linked to a DNA-repair modulating biomolecule, such as a HDR promoter and/or an NHEJ peptide inhibitor, as described herein above.

### Example 2A: Genome Engineering

[3232] This example demonstrates that the engineered retron can be used to introduce a heterologous nucleic acid sequence (e.g., a targeting DNA donor or template) into a host cell genome (e.g., a human cell).

[3233] First, a targeting DNA is introduced into the msd portion of the engineered retron, as shown in FIG. 3 as a “marker.” The heterologous nucleic acid sequence is designed such that it is flanked by 10-100 or more base pairs of homologous sequence substantially identical/homologous to the genomic sequence at the target site. Thus, the desired edit on the “marker” is in between the homologous sequence arms, and includes an insertion, a deletion, and/or other mutations.

[3234] A sequence-specific nuclease, such as a Cas9 nuclease, forms a complex with a guide RNA that specifically targets a location at or near the desired editing site on the genomic sequence. The nuclease is designed such that it does not cut the target once the edit is properly installed. In this experiment, the Cas9 nuclease is linked to the retron reverse transcriptase (RT) as a fusion protein. The Cas9 gRNA is also linked to the ncRNA or msDNA produced by the engineered retron.

[3235] The engineered retron encoding the sequence-specific nuclease (and the fused RT) as well as the ncRNA (and the linked gRNA) are then introduced into a host cell, such as a human cell.

[3236] The engineered retron is introduced as part of a plasmid for transfection into the cell, or as part of a viral vector (such as an AAV vector) for infecting the cell.

[3237] Alternatively, the transcribed ncRNA (and the linked gRNA) can be formulated in vitro in, for example, the lipid nanoparticle or delivery system of the invention, for direct delivery into the host cell. The sequence-specific nuclease (and the fused RT) can either be separately delivered into the host cell (using transfection of plasmid or infection by AAV, etc.), or delivered with the ncRNA in lipid nanoparticles. For example, the coding sequence (e.g., mRNA) of the Cas9-RT fusion is formulated with the ncRNA in the same lipid nanoparticle, or separately formulated as lipid nanoparticles to be delivered together, either simultaneously or one after another.

[3238] Once present inside the cell, the Cas9-RT fusion is translated by the host cell translation machinery, while the ncRNA is transcribed from the engineered retron (if the ncRNA is not directly delivered into the cell). The RT portion of the fusion proceeds to reverse transcribe the ncRNA and convert it to msDNA, which includes the heterologous nucleic acid sequence as the cargo/donor/template. Meanwhile, double-stranded breaks (DSBs) are generated at the target site by the CRISPR/Cas9 nuclease. The cargo/donor/template sequence is then integrated into the host genome at the target site, via host cell DNA repair (e.g., HDR) after the Cas9 nuclease forms the DSB.

[3239] The cells of interest are then assayed for correct installation of the edit on the heterologous nucleic acid sequence, either through phenotypic changes that occur due to the edit, or by direct DNA sequencing of the target site, or both.

### Example 2B. Level of Precise Retron Editing in Mammalian Cells is Comparable Between Plasmid-Delivered Retrons Versus RNA-Delivered Retrons

[3240] While CRISPR/Cas technology has revolutionized genome editing technology, precise editing of pathologic mutations or insertion of large DNA fragments at specific locations to restore fitness of cells is still at its infancy. Delivery of donor DNA for precise editing is a current bottleneck for therapeutic applications. Current therapeutic ex-vivo and in vivo delivery of donor DNA relies on AAV (adeno-associated virus) transduction. However, AAV manufacturing is complicated and expensive. Additionally, AAV has raised safety concerns in some gene therapy clinical trials. The inventors sought to develop an approach for delivery DNA donors that avoids the drawbacks of AAV-based DNA delivery.

[3241] The inventors sought instead to develop an RNA-based approach for delivering DNA donors to cells for carrying out precise editing.

[3242] Retrons have been discovered in many bacterial species. These genetic elements are defined by their unique ability to produce an unusual satellite DNA known as msDNA (multicopy single-stranded DNA). The DNA includes a reverse transcriptase (RT)-coding gene (ret) and two contiguous, inverted non-coding sequences (named msr and msd). The ret gene and the non-coding RNA (ncRNA, msr and msd) are transcribed as a single RNA, which is folded into a specific secondary structure. Once translated, the RT binds the RNA template downstream from the msd locus, initiating reverse transcription of the RNA towards its 5′ end, assisted by the 2′OH group present in a conserved branching guanosine residue that acts as a primer. Reverse transcription halts before reaching the msr locus, and the resulting DNA, the msDNA, remains covalently attached to the RNA template via a 2′-5′ phosphodiester bond and base-pairing between the 3′ ends of the msDNA and the RNA template. In this Example, these unique features of retrons were utilized to produce donor DNA for precise genome editing through a validated RNA delivery system and were shown to produce similar levels of precise Cas9-based editing in mammalian cells as compared to plasmid-delivered retrons.

[3243] FIGS. 1L and 1M show the results of the first set of experiments. Three different kinds of retrons were evaluated (Eco1-R1, Eco3-R2, Eco5-R3) as to their capability of inserting a 16 base pair insertion at a specific genomic site, the EMX1 gene. mRNA of each reverse transcriptase and the cognate non-coding retron RNA were electroporated into Cas9-expressing HEK293T mammalian cells. The guide RNA of the Cas9 is fused with the non-coding retron RNA to ensure that guide RNA and the in situ generated single strand donor DNA (i.e., the product of reverse transcription of the ncRNA template) are colocalized at the editing target site. As a control, a previously established plasmid system encoding Eco1 reverse transcriptase and its non-coding RNA was lipofected into the same cell line. Edited sequences were PCR amplified from extracted genomic DNA and made into NGS libraries and analyzed by sequencing. The results demonstrate that retron components delivered as RNAs could provide donor DNA template for precise editing as efficiently as those delivered via plasmid transfection.

[3244] In the second set of experiments (data not shown), the ratio between the reverse transcriptase mRNA and its non-coding RNA template were optimized. Incremental amounts of non-coding RNA template were combined with a given amount of reverse transcriptase mRNA (tested at two different fixed concentrations of reverse transcriptase mRNA). The results indicate that the ratio between the reverse transcriptase mRNA and its non-coding RNA template can be optimized in order to increase the efficiency of editing. For example, the data show that increasing the non-coding RNA template to a given amount of RT enzyme improved the integration rate of the 16 bp insert.

### Example 3: Computational Discovery of Novel Retrons and Phylogenetic Analysis to Increase Retron Diversity for Genome Editing Applications

[3245] Reverse transcriptases (RTs), also called RNA-directed DNA polymerases, are enzymes capable of synthesizing DNA using RNA as a template. Although they are present in the three domains of life and viruses; prokaryotic RTs have been traditionally less explored in comparison with their eukaryotic counterparts. Prokaryotic RTs can be divided into 6 main groups: (1) Group II introns, (2) CRISPR-associated RTs, (3) Diversity Generating Retroelements, (4) Retrons, (5) Abi (Abortive infection) RTs and (6) Unknown Groups of RTs (UG). In the last five years, a burst of research has increased the knowledge about prokaryotic RTs that led to the discovery of novel putative systems with potential antiphage properties, including retrons. In this Example, a systematic search of public databases was performed with the aim of increasing the number and diversity of known retrons for possible use in genome editing applications. As a result, new types of retrons have been identified, and the increase in data has allowed the identification of new associated ncRNAs.

[3246] As a first step in this work, a set of known retron RTs was manually curated, trimmed, and aligned to create suitable input, which was then used to train an HMM model for identifying new retron RTs.

[3247] Next, this model was applied to existing databases of protein sequences (e.g., nr database from NCBI) to identify potential candidate retron RTs.

[3248] As a next step, the identified candidates were then grouped by sequence identity and individual representative sequences from each group were chosen. These RT domains of these representative candidates were then aligned, and an initial phylogenetic tree was built.

[3249] Next, using information about other known classes of RTs, the full phylogeny was separated into bonafide retron RT candidates and RTs that could belong to other classes (such as group II introns, DGRs, CRISPR-Cas RTs, etc). A new alignment and phylogenetic tree were then constructed from these verified candidates, as shown in FIG. 28. For all sequences in the new alignment, a matrix of the protein neighborhood was built, indicating which proteins were present in the vicinity of the candidate retron RTs. From there, types and subtypes of retrons were defined based on the RT phylogeny and identity of associated effector proteins. The candidate RT sequences are presented in Table A

[3250] To predict ncRNAs proximal to the candidate retron RTs, genomic regions proximal to the candidate retron RTs were extracted, aligned, and analyzed for structural covariance using an iterative convergence model.

[3251] ncRNA classification methodology:

[3252] To identify what type of ncRNA a sequence may belong to, sequences can be checked against the covariance model of existing ncRNA types. The Infernal suite (http://eddylab.org/infernal) provides tools to do this. Briefly, covariance models can be built from structural alignment of known ncRNAs for each type, then collated into a CM database. From there, new sequences can be searched against the databases to verify whether the sequence fits with any of the represented families.

[3253] The resulting retron RT sequences are provided herein at Table A. The resulting and corresponding retron ncRNA sequences are provided herein at Table B.

### Example 4: Design and Demonstration of Retron-Based Editing System in Cells

[3254] Current genome editing methods can efficiently disrupt target genes by inserting and deleting genetic information using programmable nucleases. However, gene disruption that does not discriminate mutant from wild type allele impairs not only mutant allele in pathogenesis but also wild type allele in normal physiology of the organism. In Transthyretin (TTR) induced amyloidosis, for example, mutated TTR alleles cause the disease but non-pathogenic wild type allele plays a role in neuro protection and injury response (1). As a single nucleotide exchange is a dominant variant in TTR (2), the vast majority of pathogenic alleles in human differ from their nonpathogenic counterparts by small modifications that require much more precise editing technologies to correct. Homology-directed repair (HDR) stimulated by nuclease-mediated DNA breaks has been widely used to install precise editing. However, HDR relies on the delivery of exogenous donor DNA, that can trigger strong immune response and has been shown inefficient to deliver universally high abundance in recipients (3). Current therapeutical ex-vivo and in vivo delivery of donor DNA relies on AAV (adeno-associated virus) transduction. However, AAV manufacturing is complicated and expensive. Additionally, AAV has raised safety concerns in 30% of 255 complete or ongoing clinical trials surveyed by meta-analysis (4). RNA delivery in contrast, successfully demonstrated its safety, easier manufacturing and efficacy in two SARS-Covid2 vaccines. Based on this amenability of RNA as a cargo, we searched the system, where donor DNA for precise editing could be generated from delivered RNA within cells.

[3255] Retrons are defined by their unique ability to produce an unusual satellite DNA known as msDNA (multicopy single-stranded DNA) from RNA inside the cell (5). These bacterial elements are involved in phage defense (6) and consist of a non-coding RNA and a reverse transcriptase (RT) that can reverse transcribe non-coding RNA (ncRNA) into msDNA. Their tightly defined sites of reverse transcription enable to insert donor DNA sequences in non-coding RNA substrate. Moreover, their compact size is amenable to deliver along with programmable nuclease in all RNA format. These features place retron an attractive tool for precise genome editing in therapeutic application.

[3256] Independent approach to generate new DNA sequences by reverse transcription in the cell is prime editing and its virus originating RT can achieve up to 44 bp insertion (7). Retron in natural sequence can produce up to 163 nucleotide single strand DNA (8), suggesting that longer insertion in retron mediated editing is feasible. In line with this, newly characterized retrons could insert 100 bp with 6 bp deletion in EMX1 locus of HEK293T cells in S. pyogenes Cas9 nuclease system.

A. Evidence of Retron from Different Clades in Precise Editing

[3257] As a first step, retron/retron-like RTs were searched in bacterial genomes. Phylogenetic analysis of the over 7,000 retron/retron-like sequences identified from searches against bacterial genomes was conducted, resulting in the phylogenetic tree of FIG. 28. Non-coding RNA gene was searched in the genomic neighborhood of the retron/retron-like RT sequences for conserved RNA secondary structures resembling characterized msr-msd transcripts: self-hybridizing inverted repeat at the ends, hairpin structures in msr and msd, such as those represented by FIGS. 2-27. Using covariance models and consensus structure detection, ncRNAs were identified with a high degree of confidence in certain RTs. To evaluate gene editing applicability of retron across diverse phylogeny, Eco1, Eco3, Eco5, Aco1, RTX3-2042, 6083 v1 and 6943 were selected for further analysis (FIG. 30). Eco1, Eco3 and Eco5 were previously experimentally validated retrons to show msDNA production (9). Aco1 was recently annotated in the literature but has not been experimentally validated as producing msDNA (10). RTX3-2042, 6083 v1 and 6943 are novel retrons.

[3258] A gene editing assay was first performed in plasmid DNA format. Retron elements are assembled in a plasmid, where RT is transcribed under CAG promoter and ncRNA fused at its 3′ end to the 5′ end of a single guide RNA (sgRNA) of Cas9 nuclease under U6 or H1 RNA polymerase III promoter (see FIGS. 31A and 31B). Desired sequence to insert at EMX1 targeting site flanked with homology arm at both sides is inserted within msD stem loop of ncRNA of each retron. As described in FIGS. 32 and 33, the plasmid was transfected to Cas9 expressing human embryonic kidney 293T (HEK293T) cells via lipofection. Three days after transfection, EMX1 target genomic locus was amplified by PCR and sequences were analyzed by next generation sequencing (NGS). The precise edit assayed is characterized as a 10 bp insertion and a 6 bp substitution and its percentage is calculated by CRISPResso 2 analysis among other editing outcomes.

[3259] A representative editing outcome is shown in FIG. 35. Eco1 (FIG. 36), Aco1 (FIG. 37), RTX3-2042 (FIG. 38), RTX3-6083 v1 and 6943 (FIG. 39A) showed precise editing efficiency of 0.3%, 0.1%, 0.25%, 0.06% and 0.05% (left graph in FIGS. 36, 37, 38, and 39, respectively). Undesired editing outcome defined as indels that incorporated random nucleotides or deleted sequences near Cas9 cutting site amounted to 50%, 3%, 5%, 2% and 4% (right graph in FIGS. 36, 37, 38, and 39A, respectively). Follow up experiments using the same assay indicated that RTX3_6083v1 and RTX3_6943 generated 3-4 fold more precise edits than Eco1 while indels generated from these two retrons were 2-3 fold lower (FIGS. 39B and 39C). RTX3_2042 showed precise editing at similar frequencies to Eco1 but had more variability than other samples (FIGS. 39B and 39C). These data demonstrated that recently reported (Aco1) and three novel retrons (RTX3-2042, RTX6083 v1, RTX3-6943) enable precise gene editing in human cells, in addition to previously characterized Eco1 (11).

[3260] Follow up experiments using the same assay indicated that RTX3-6342S and RTX3-6342L and RTX-1262 generated precise edits 10-20 fold more frequently than Eco1 and approximately 5-10 fold more frequent than RTX3-2042, 6083v1, 6943, and 0637 (see FIG. 39E—left). Furthermore, indels generated using RTX3-6342S, 6342L, 1262, 0637, and 6083v1 were two-fold less frequent compared to Eco1 (FIG. 39E—right). Indels generated using RTX3-2042 were decreased by 80% compared to Eco1 (FIG. 39E—right). Additionally, these retrons all generated precise edits more frequently than another literature validated retron, Eco3, albeit with similar or higher frequencies of indels (FIG. 39E). A small group of retrons were also modified with deletions in the msd stem to assess if precise editing could be improved. We noted that precise editing was increased after shortening the msd stem in six retrons while precise editing was lowered or unchanged in the remaining three retrons (FIG. 57 and FIG. 58).

[3261] These data demonstrated that recently reported (Aco1) and six novel retrons (RTX3-0637, RTX3-1262, RTX3-2042, RTX6083 v1, RTX3-6342, RTX3-6943) enable precise gene editing in human cells, in addition to previously characterized Eco1 and Eco3 in gene editing. Furthermore, modifying the msd stem length can alter precise editing but the effects can be retron specific.

B. Evidence of Retron-Mediated Gene Editing in all-RNA System

[3262] To establish RNA-based editing system, gene editing assay with two RNA components (RT mRNA and ncRNA fused to sgRNA of Cas9 nuclease) was performed first, in HEK293T cells constitutively expressing Cas9 nuclease. With RT and ncRNA being separated in RNA format, the condition for higher precise editing and lower indels could be easier identified than when they are together in the same plasmid by optimizing the ratio between RT enzyme and its substrate. EcoI, Eco3, and Eco5, three previously known retrons, were chosen for this first set of experiments with an all-RNA format.

[3263] RT mRNA of each retron and their cognate ncRNAs fused to sgRNA of Cas9 nuclease were produced by in vitro transcription. Following experimental scheme in FIG. 40. Eco1, Eco3 and Eco5 mediated gene editing activity was compared at two different ratios of RT mRNA and ncRNA-sgRNA fusion in Cas9 expressing HEK293T cells. More amount of ncRNA than RT mRNA was transfected to maximize msDNA production for precise gene editing. Results showed precise edits up to 0.4% for Eco3 and as low as 10% indels for Eco3 (FIG. 41). Precise editing frequency in RNA based assay is comparable to that in plasmid-based assay.

[3264] Given that Eco3 produced highest editing, RNA load and RT mRNA: ncRNA-sgRNA fusion ratio was further optimized in Eco3 retron system. To 0.2 or 0.5 μg of RT mRNA, ncRNA-sgRNA fusion was added at ratios of RT mRNA to ncRNA, 1:2, 1:3, 1:4, 1:5, 1:8, 1:10, respectively. 0.5 g of RT mRNA gave rise to more precise editing than 0.2 ug at any ratio and increasing ncRNA correlated with higher precise editing (FIG. 42, left). Indels was as low as 6% (FIG. 42, right). With two RNA components, precise editing was achieved up to 1% of cell population.

[3265] Next, Cas9 mRNA was added to RT mRNA and ncRNA-sgRNA fusion, making all RNA editing system in HEK293T cells (FIG. 43). At the optimized RNA load and ratio of RT mRNA and ncRNA-sgRNA fusion, the amount of Cas9 mRNA was titrated with Eco3 retron (FIG. 44). Precise editing was observed up to 0.1% of cell population with 0.2 μg of Cas9 mRNA and adding more it did not increase editing efficiency. While the precise editing frequency is an order of magnitude lower than two RNA system, the editing occurred by specific action of Cas9 nuclease and retron, since the absence of either abrogated the precise editing.

[3266] The delivery of all RNA system to cells was also made via lipofection using MessengerMAX reagent (FIG. 45). This approach is more resembling in vivo delivery of therapeutic RNAs loaded in lipid nanoparticle (LNP), in terms of formation of RNA/lipid complexes and cell uptake mechanism. When applied to Aco1 retron system that consists of Aco1 RT mRNA, Aco1 ncRNA-sgRNA fusion, and Cas9 mRNA, precise editing of 56 bp insertion with 6 bp deletion was observed in 0.1% of cell population and the frequency of indels was about 1.5% (FIG. 46). Aco1 retron was recently annotated but has not been experimentally validated yet (10). The precise gene editing mediated by Aco1 strongly suggests that Aco1 retron could produce msDNA inside cells. Moreover, the length of insertion in precise editing exceeds those made by other reverse transcriptase mediated editing (7).

C. Enhanced Retron-Mediated Gene Editing in all-RNA System with sgRNA Spike-In

[3267] In all experiments above, retron ncRNA fused with sgRNA of Cas9 nuclease was used. This fusion RNA serves as a template of RT and at same time sgRNA portion could complex with Cas9 nuclease. Two enzymes acting on a single RNA piece could create steric effects that affect the activity of either enzyme. In line with this hypothesis, frequency of indels that tells overall Cas9 nuclease activity is only about 1.5% with 400 ng of ncRNA-sgRNA fusion (FIG. 46, right).

[3268] To test systematically the hypothesis, Cas9 nuclease activity by frequency of indels was compared between equimolar amounts of ncRNA-sgRNA fusion and separated sgRNA. When electroporated with 200 ng of Cas9 mRNA, 1 μg (7.5 μmol) of ncRNA-sgRNA fusion shows 20-fold lower activity than 0.266 μg (7.5 μmol) of separated sgRNA alone (FIG. 47) The result suggests that ncRNA-sgRNA fusion might inhibit either formation of complex with Cas9 protein or the activity of Cas9-sgRNA complex or both. In addition, chemically modified sgRNA shows 6-fold higher activity than unmodified sgRNA. These results indicate that affected Cas9 cleavage activity by ncRNA-sgRNA fusion could limit precise editing and addition of separated sgRNA could compensate for it. Modification of separated sgRNA is expected to further enhance precise editing.

[3269] FIG. 48 summarizes the assay of sgRNA spike-in in all RNA system and FIG. R. shows the results using Eco3 retron. At 0.2 μg of Cas9 mRNA and 0.5 μg of RT mRNA, the amount of sgRNA spike-in is titrated at 50, 100, and 200 ng (FIG. 41, left). The titration was performed at two different ratios of RT mRNA: ncRNA-sgRNA fusion=1:6 or 1:8. With addition of 50 ng of sgRNA spike-in to 1:6 ratio, the precise editing was achieved 40-fold and gradually increased with more sgRNA, reaching up to 50-fold increase at 200 ng. 1:8 ratio of RT mRNA:ncRNA-sgRNA fusion responded similarly to sgRNA spike-in and obtained slightly higher activity than 1:6, up to 13% of precise editing. Higher precise editing with sgRNA spike-in came along with higher indels on the right graph.

[3270] The effect of sgRNA spike-in in precise editing was confirmed using orthogonal delivery method, lipofection (FIG. 50). Although overall amount of RNA to transfect was five times lower than in electroporation, 3.4% of precise editing was obtained without sgRNA spike-in, which is 7.5-fold higher than that achieved by electroporation (FIG. 49 and FIG. 51, left graph). With addition of sgRNA as low as 2 ng, precise editing further increased up to 3.5-fold, reaching 12% efficiency (FIG. 51, left). Increasing the amount of sgRNA up to 10 ng did not further change the efficiency. The precise editing observed is dependent on retron since the absence of retron components (RT mRNA and ncRNA-sgRNA fusion) completely abrogated the editing.

[3271] These data support that physical fusion of ncRNA and sgRNA of Cas9 nuclease could be a limiting factor for Cas9 activity and consequently precise editing and spike-in of sgRNA significantly enhances editing by complementing it.

D. Separation of ncRNA and sgRNA

[3272] The impact of separating sgRNA from ncRNA on editing was tested in Eco3 retron system comparing the editing efficiency between ncRNA-sgRNA fusion and separated ncRNA and sgRNA side by side (FIG. 52). Increasing amount of sgRNA was added to 300 ng of ncRNA that is equimolar amount of 400 ng of ncRNA-sgRNA fusion. With no sgRNA added, no precise editing was observed as expected. With 10 ng of sgRNA, precise editing peaked at 2.23% compared to 1.78% obtained with ncRNA-sgRNA fusion (FIG. 52, left). The increasing amount of sgRNA beyond 10 ng did not further improve precise editing. Frequency of indels (FIG. 52, right) showed a similar trend as precise editing.

[3273] These data demonstrates that separation of ncRNA and sgRNA could achieve comparable or even higher precise editing than ncRNA-sgRNA fusion.

E. Lead Retrons from Different Clades Show Precise Editing Activity in an Alternative Cell Type

[3274] These examples have shown robust precise editing activity in 293T cells. To confirm that these results can be extended to other cell types, a plasmid encoding lead retron reverse transcriptases and ncRNA/EMX1 sgRNA fusions were co-electroporated, along with plasmid encoding Cas9-mCherry, into K562 cells, an erythroblast leukemia cell line (FIG. 87). FIG. 88 (left) shows that RTX3_2042, 6083v1, 6943, 1262, 6342L, and 6342S can generate precise editing frequencies of 1.3%, 1.2%, 1%, 2.9%, 5%, and 6.7% respectively. The precise editing frequency of RTX3_6342S could be boosted to 10.5% by including an EMX1 gRNA expression cassette on the Cas9-mCherry plasmid. This system also generated robust indel frequencies in all samples. These frequencies varied between retrons and did not correlate with precise editing frequencies (FIG. 88, right). The lack of correlation between indels and precise edits could be explained by steric effects in the ncRNA/sgRNA fusion that influence interactions between Cas9 and gRNA or reverse transcriptase and ncRNA.

[3275] The precise editing efficiencies using our novel retrons were also compared to several experimentally validated retrons (10) in this system using the Cas9-mCherry EMX1 gRNA plasmid. Retrons Eco1, Eco3, Aco1, Saul, Sen1, RTX3_2781, RTX3_1262, RTX3_6342L, and RTX3_6342S were tested and observed having precise editing efficiencies of 0.1%, 0.8%, 14%, 3.4%, 0.1%, 14.2%, 19%, and 19.5%, respectively (FIGS. 89 and 90, left). Indels also varied between samples and did not correlate with precise editing levels, which could be explained by the same steric effects mentioned earlier (FIGS. 89 and 90, right). These data indicate that RTX3_1262, 6342L, and 63425 generate precise edits as or more frequently than previously documented retrons.

### F. Lead Retrons can Generate Precise Edits Robustly Using an RNA-Guided Nickase

[3276] Previous experiments have shown that retrons can install precise edits using double-strand breaks (DSBs) as recombination initiating events. However, using DSBs to initiate repair can lead to indel formation at off-target sites and chromosomal rearrangements, an undesirable effect for therapeutic development (12). To avoid indels, a ssDNA nick can be used to initiate recombination rather than DSBs (13). To determine if the Cas9 D10A nickase could initiate retron-mediated precise editing, a Cas9 D10A-mCherry EMX1 gRNA plasmid was co-electroporated with a plasmid encoding a retron RT and ncRNA/EMX1 sgRNA fusion into K562 cells. Significant editing was not observed when using retrons Eco1, Eco3, RTX3_6083v1, or RTX3_6943 (FIG. 91, left). However, RTX3_2042, RTX3_1262, RTX3_6342L, and RTX3_6342S saw precise editing frequencies of ˜0.2%, ˜0.6%, ˜0.2%, and ˜0.4% respectively (FIG. 91, left). As expected, precise editing frequencies initiated by a nick were >ten-fold lower than those initiated using a DSB and indel frequencies were much lower compared to the frequencies seen using the Cas9 nuclease (FIG. 91, right). These data suggest that RNA-guided nickases can install edits encoded by novel retrons using a plasmid-based system in vitro.

G. Retron-Mediated Gene Editing is Compatible with LbCas12a and TnpB Nucleases

[3277] The examples have used Cas9 nuclease or nickase to perform retron-mediated gene editing. However, alternative nucleases, such as, but not limited to, LbCas12a (14) and TnpB (15) could be used in a retron-based gene editing system in place of a Cas9 nuclease or nickase. To determine if Cas12a or TnpB could induce retron-mediated gene editing, a plasmid encoding LbCas12a, TnpB, or Cas9 was co-electroporated and their corresponding EMX1 gRNAs and a plasmid encoding retron RTX3_6083v1 reverse transcriptase and ncRNA template for each nuclease into K562 cells. Using this approach, it could be noted that LbCas12a and RTX3_6083v1 could mediate precise editing of ˜0.6% (FIG. 92, left) with about 30% less indels than the Cas9 comparator (FIG. 92, right). However, precise editing frequencies generated by TnpB and RTX3_6083v1 were ˜0.04% with one guide and undetectable with another (FIG. 93, left). This is likely due to limited cutting activity with gRNA #2 as no indels were detected above background. Despite similar indel frequencies seen using Cas12a (FIG. 93, right) with sgRNA #1 precise editing frequencies were substantially lower than those seen with Cas12a (FIG. 92, left). The discrepancy in precise editing frequencies could be due to differences in DSB formation, DSB resolution, or protein expression of the nucleases. Additionally, it was noted that precise editing frequencies using a separated Cas9 gRNA and retron ncRNA led to precise editing efficiencies similar to those seen when ncRNA/sgRNA fusions are co-electroporated with a plasmid encoding Cas9 and an EMX1 gRNA expression cassette in prior experiments (FIG. 91, left). In all, retron-mediated gene editing can be achieved with Cas12a-like and TnpB-like nucleases and fusion of gRNA to the retron ncRNA is not necessary to facilitate precise editing using a plasmid based retron gene editor.

H. Retron-Mediated Gene Editing can be Performed with Truncated RT Proteins

[3278] Retrons contain partner domains that are potentially critical for physiological phage defense functions but unnecessary for reverse transcriptase activity (6). RTX3_6342 contains an N-terminal region consisting of several alpha helices that are not predicted to align to the reverse transcriptase domain (FIG. 94) (16). To determine if this region was necessary for precise editing, N-terminal truncations of different lengths were created and precise editing activity was assessed by NGS. It is noted that deletions of residues 1-49 AA, 1-99 AA, and 1-144 AA did not compromise the precise editing activity of RTX3_6342 (FIG. 95). As expected, indels were unaffected (FIG. 95). These data suggest that the non-RT domains in 6342S are not necessary for reverse transcription.

### I. Retron-Mediated Installation of Exon-Sized 200-400 Base Pair Inserts

[3279] To determine if retron-mediated gene editing could install edits larger than 10 bp, edits of 10, 25, 205, 305, and 405 bp at the EMX1 locus were attempted. Precise editing efficiencies of ˜35%, ˜40%, ˜30%, ˜35%, and ˜40% were observed for 10 bp, 25 bp, 205 bp, 305 bp, and 405 bp, respectively, using RTX3_6342 (FIG. 96, left). RTX3_1262 was also tested in a similar manner and observed as having precise editing efficiencies of ˜22%, ˜35%, ˜28%, ˜2% and ˜10% for edits of 10 bp, 25 bp, 205 bp, 305 bp, and 405 bp, respectively. It is noted that indel frequencies were similar across samples and therefore nuclease activity doesn't limit the installation of these edits (FIG. 96, right). Together these data indicate that inserts >205 bp can be efficiently installed using retron-mediated editing, which exceeds the sizes installed by prior reverse transcriptase-based gene-editors (7). Furthermore, RTX3_6342S tends to install longer edits at more robust frequencies than RTX3_1262.

[3280] Reverse transcriptases (RTs) tend to be observed as error-prone compared to replicative DNA polymerases due to lack of a proofreading domain and structural differences in the enzyme active site (17). To determine if longer edits were installed accurately using RTX3_6342S reverse transcriptase, the prior data was re-analyzed using CRISPResso2 parameters that quantified substitutions in edited alleles. It is noted that the percentage of precise edits declined as the inserts became longer when substitutions were quantified using CRISPResso2 (FIG. 97, left, compare circles to triangles). This trend was not observed when quantifying indels (FIG. 97, right, compare circles to triangles) suggesting that reverse transcriptase fidelity is responsible for the mutations seen in precise edits installed by RTX3_6342S. This suggests that further optimization of reverse transcriptase fidelity can be performed to accurately install large edits.

### J. Rational Mutagenesis of Retron RTs to Improve Processivity and Fidelity

[3281] The biochemical properties of many RTs, such as processivity and fidelity, are extensively characterized in the literature (17). Furthermore, some RTs have been extensively engineered for high processivity and fidelity for use in applications such as RNA-Sequencing library preparation and prime editing (17) (18). However, Retron RT fidelity and processivity have not been characterized, nor has anyone attempted to improve these traits. The palm, fingers, and thumb domains inside most DNA polymerases interact with the template molecule and direct incoming nucleotides to the catalytic core for efficient DNA synthesis (19). Here select residues in these domains were mutated based on structural comparison of an Alphafold predicted structure of RTX3_6342S with crystal structures of MMLV or Marathon RT and Eco1 (Table J1, below).

TABLE J1
Mutation of select residues in RTX3_6342S.

| Region | MMLV | Eco1 | 6342 | MMLV | Eco1 | 6342 |
|---|---|---|---|---|---|---|
| Thumb | 301 | 279 | 465 | ARG | GLU | ASN |
| Thumb | 302 | 280 | 466 | GLU | HIS | GLU |
| Thumb | 304 | 282 | 468 | LEU | ARG | SER |
| Thumb | 306 | 284 | 470 | THR | TRP | MET |
| Thumb | 308 | 286 | 472 | GLY | SER | SER |
| Thumb | 309 | 287 | 473 | PHE | PHE | TRP |
| Thumb | 311 | 289 | 475 | ARG | LEU | LYS |
| Thumb | 312 | 290 | 476 | LEU | SER | SER |
| Thumb | 313 | 291 | 477 | TRP | VAL | VAL |

[3282] These residues were prioritized based on their proximity to the RNA/DNA template present in MMLV/Eco1 structures and prior engineered MMLV or Marathon variants referenced in the literature (17) (20).

[3283] As proof of concept, 32 RT variants were engineered across nine residues in the RTX3_6342 RT thumb domain. In particular, the following 32 RT variants were constructed based on RTX3_6342S:
[3284] (1) E466K, E466N, E466Q, E466R;
[3285] (2) K475N, K475Q, K475R;
[3286] (3) M470K, M470N, M470Q, M470R;
[3287] (4) N465K, N465Q, N465R;
[3288] (5) S468K, S468N, S468Q, S468R;
[3289] (6) S472G, S472P;
[3290] (7) S476K, S476N, S476Q, S476R;
[3291] (8) V477F, V477I, V477L, V477W; and
[3292] (9) W473F, W473K, W473R, W473Y.

[3293] These constructs were then co-electroporated into K562 cells along with a plasmid encoding Cas9, an EMX1 sgRNA, and the RTX3_6342S ncRNA with a 10 bp or 305 bp insert. After 72 hrs, the cells were harvested for amplicon sequencing analysis and editing quantified using CRISPResso. Most rationally designed mutations modestly decreased the ratio of precise edits to indels (PEIR) using a 10 bp or 305 bp insert (FIG. 98, top). However, it is noted that N465K increased the PEIR while installing a 305 bp insertion, suggesting that the mutation increased the processivity or total ssDNA production of the RTX_6342 reverse transcriptase (FIG. 98, bottom). It was observed that literature mutations improving MMLV activity (T306K and W313F) decreased the PEIR for both 10 bp and 305 bp inserts using orthologous mutants of RTX3_6342 (M470K, and V477F) both as single and combo mutants (FIG. 98 and FIG. 99). It is also noted that RTX3_6342 V265P, an ortholog of MMLV L139P, decreased the PEIR of a 305 bp insert, had no effect on a 205 bp insert, and increased the ratio using a 405 bp insert (FIG. 99). These results could be due to differing sequence characteristics or secondary structures present in each individual insert. A second set of mutations was also screened based on prior engineered marathon RT variants or favorable Rosetta scores after modeling the 6342 RT. It was observed that the mutations E238R, E479K, and K255P all resulted in increases in PEIR over WT 6342 RT (FIG. 100). An additional N-terminal truncation was constructed that preserves an α-helix that potentially makes contact with the retron RNA (FIG. 101). It is noted that the precise edits:indel ratios while installing longer edits were increased using this partial truncation, rather than eliminating the N-terminal domain entirely (FIG. 102).

### K. Protein Fusions to Improve Retron RT Processivity

[3294] DNA polymerase processivity has not only been optimized through mutagenesis of the polymerase itself but domain fusions are also known to improve processivity (19). The small DNA binding proteins Sso7d and Sac7d have been fused to MMLV RT to improve processivity during PCR reactions nearly eight-fold on both DNA and RNA templates. Furthermore, attempts were made to improve the editing efficiencies of prime editors by fusing these proteins to the MMLV RT but no significant improvement in editing efficiency was observed (18). However, the edits installed in these experiments were small <90 bp and native MMLV has a processivity of 69±14 bp/binding event suggesting that much longer edits would need to be installed to observe an improvement (18) (19). This specification teaches and demonstrates that edits as long as 400 bp can be installed using retron-mediated genome-editing. To determine if fusing Sso7d or Sac7d could improve retron-mediated genome editing efficiencies, two variants each of Sac7d or Sso7d were fused to retrons RTs from RTX3_1262 and RTX2_6342, at the N or C-terminus. The installation of a 405 bp insertion into the EMX1 locus was then evaluated. It was observed that fusing these domains to the N-terminus of either RT tended to be more robust than C-terminal fusions. Furthermore, these N-terminal fusions led to an approximately ten-fold increase in the installation frequencies of a 405 bp insert with RTX3_1262 and approximately a two-fold increase using RTX3_1262 (FIG. 103). It is thought that this difference in magnitude could be due to differences in the baseline processivity or ssDNA generation of RTX3_6342 (˜4%) vs RTX3_1262 (˜0.4%) and the effect of these fusions on RTs like RTX3_6342 might be more pronounced with longer inserts.

L. Identifying Alternative Retrons from the RTX3_6342 Family

[3295] In addition to engineering retrons, screening additional retrons in the same family as certain high performing retrons (e.g., RTX3_6342, 6943, 6083, and 1262) could identify novel retrons with more ideal characteristics for gene-editing. An additional 99 unique retrons were chosen from an initial dataset with at least 70% similarity to RTX3_6342, 6943, 6083, or 1262 RT or their corresponding ncRNAs. These retrons were cloned into plasmid vectors expressing the RT from the CAG promoter and the ncRNA as a ncRNA-gRNA fusion designed to insert 305 bp into the hEMX1 locus. This plasmid was co-electroporated into K562 cells with a second plasmid containing Cas9 and the same hEMX1 sgRNA to boost editing efficiencies. After 72 hrs the genomic DNA was isolated and the hEMX1 locus amplified for sequencing. It was observed that all retrons in this dataset capable of precise editing frequencies >1% were similar to the lead retron RTX3_6342, indicating this family is particularly enriched for RTs compatible with retron-mediated gene-editing (FIG. 104). However, none of these RTs showed precise editing frequencies on par with RTX3_6342.

### Example 5: Improved ncRNAs Generated by Transcription from Template Linearized Plasmid Having Blunt Ends Show Higher Precise Editing Efficiency

[3296] Previously made in vitro transcription experiments to produce ncRNA used a double-stranded DNA template containing a 3′ overhang (on same strand as T7 promoter sequence). A new template with a blunt end was designed and tested. See FIG. 52. As shown in FIG. 53, four RNAs (cas9 mRNA, Eco3 RT mRNA, gRNA targeting EMX1 locus and ncRNA) were transfected into 293T cells using MessengerMAX lipofection reagent. Cells were harvested after 3 days, genomic DNA isolated, the EMX1 locus amplified, the Illumina libraries produced and sequenced on NextSeq. The percent of precise edits improves more than 5-fold for ncRNA produced using blunt end template as compared to the precise editing by ncRNA produced using overhang template.

### Example 6: Improved ncRNAs Due to Improved In Vitro Template Optimization and ncRNA End Protection with MS2 Hairpin

[3297] Additional elements can be added to the ncRNA by encoding them on the plasmid template. FIG. 53 shows a modified Eco3 ncRNA that comprises an MS2 stem loop hairpin structure added to its 3′ end. As shown in FIG. 54, the precise editing of ncRNA comprising the 3′ MS2 structure resulted in nearly 15-fold increase in precise editing compared to an ncRNA generated from a overhang template, and nearly 3-fold increase in precise editing compared to an ncRNA generated from a blunt end template.

[3298] FIG. 53 schematic describes the modification made to improve RNA quality. First approach was about how to linearize plasmid DNA template for in vitro transcription (FIG. 53, A). Two identical plasmids encoding Eco3 ncRNA were made except different restriction enzyme sites at 3′ of ncRNA: One generates 3′ overhang and the other generates blunt end. Templates with 3′ overhangs can cause the RNA polymerase to extend on the opposite strand, resulting in longer transcripts containing the sequence of the complementary strand (13). Second consideration was to add a MS2 hairpin at 3′ of ncRNA (FIG. 53, B). Retron ncRNA contains mutually reverse complementary sequences at 5′ and 3 ends that forms a stem loop structure. However, these sequences could also mediate intermolecular interactions, creating higher-order structures. The addition of MS2 hairpin at one end could mitigate such intermolecular interactions. MS2 sequence is a bacteriophage-derived RNA aptamer that does not interact with endogenous proteins in mammalian cells.

[3299] Testing these new RNAs in gene editing assay is shown in FIG. 54. Four components of all RNA system (RT mRNA, Cas9 mRNA, ncRNA, sgRNA) were delivered to HEK293T cells by Lipofectamine MessengerMAX. All RNA was transfected at a fixed amount as shown on the graphs. Using RNA with the template containing a 3′ overhang produced 1.35% precise edits. Using the template containing a blunt end increased precise editing to 5.94%. Adding an MS2 stem loop to the 3′ end of the ncRNA further increased precise editing to 12.39%. On the right graph, frequency of indels is shown for respective conditions. Altogether, precise editing increased nine (9) fold by optimizing in vitro transcription template and 3′ end protection by MS2 hairpin.

### Example 7: Modified ncRNAs with Caps and/or Tails

[3300] ncRNA performance can be modified by adding a cap structure to the 5′ end and/or adding a poly(A) tail at the 3′ end, as depicted in FIG. 55. As shown in FIG. 56, using ncRNA with either or both protection by cap and tail lowered indels as compared uncapped/untailed ncRNAs. In this experiment, a 4 component all-RNA system (RT mRNA+Cas9 mRNA+ncRNA-sgRNA+sgRNA) was delivered to HEK293T cells by Lipofectamine MessengerMAX. All RNA was transfected at a fixed amount RT mRNA 100 ng, ncRNA-sgRNA 400 ng, Cas9 mRNA 100 ng, and sgRNA 5 ng. ncRNA-gRNA fusion was either capped (+cap −tail) or poly-A tailed (−cap +tail) or both capped and poly-A tailed (+cap +tail). Using RNA without end protection (−cap −tail) produced ˜4.5% precise edits and the editing was dependent on retron since the absence of RT abrogated precise editing. Using RNA with either or both protection by cap and tail produced lower precise editing (left graph) but lowered indels (right graph) than without cap and tail.

### Example 8: Precise Editing with Cas9 Nickase

[3301] Wild Type (WT) Cas9 nuclease generates double strand break (DSB) that can potentially increase genomic instability by generating larger deletion or chromosome translocation. Moreover, DSB induces p53-mediated DNA damage response pathway that often compromises the physiology of edited cells. Single point mutations in either of Cas9 nuclease domains can generate nickases that cut only one strand of targeting site. D10A variant cuts target strand using intact HNH nuclease domain and H840A variant cuts non-target strand using intact RuvC domain. Nicks can initiate homology-directed repair (HDR) and cause less mutagenic end joining than DSBs. These features draw a considerable interest in using nickases in retron-mediated precise editing.

[3302] FIG. 73 shows the results testing Cas9 nickases activity in 4 component all-RNA system (RT mRNA+Cas9 mRNA+ncRNA+sgRNA) delivered to HEK293T cells by Lipofectamine MessengerMAX. D10A and H840A nickases were used in parallel with WT Cas9 and they were tested either with separated ncRNA or with ncRNA-sgRNA fusion. All RNA was transfected at a fixed amount RT mRNA 100 ng, ncRNA/ncRNA-sgRNA 400 ng, Cas9 variant mRNA 100 ng, and sgRNA 5 ng. Precise editing by Cas9 WT (Wild Type) was ˜9% when either ncRNA or ncRNA-sgRNA was used with additional sgRNA. With Cas9 H480A mutant that nicks non-target strand, activity was barely seen above background in any condition. With Cas9 D10A mutant that nicks target strand, precise editing was observed ˜0.1% frequency in both separated and fused ncRNA and sgRNA format. Indels are shown at the right graph at respective conditions of left graph. As expected, indels are extremely low for either nickases with or without additional sgRNA and only WT Cas9 generated significant indels.

[3303] FIG. 74 shows negative controls that lack one of components (Cas9 variant or ncRNA/ncRNA-sgRNA or RT) in all RNA system. They were tested with or without additional sgRNA. All controls in top graph do not show precise editing activity beyond background level, supporting that precise editing achieved by Cas9 WT or Cas9 nickase is dependent on each component of all RNA system.

### Example 9: Dual sgRNAs Achieve Higher Precise Editing than Single sgRNA

[3304] It was reasoned that use of multiple sgRNAs at the proximity of targeting site could generate more free DNA ends upon cleavage and recruit more repair machinery, that would provide higher chance of precise editing. Two pairs of sgRNA were found to test this hypothesis, sgRNA1 at immediately left side of insertion in combination with either sgRNA2 or sgRNA3 at the right side of insertion on EMX1 gene (FIG. 68 schematic at right). Results of testing dual sgRNAs vs single sgRNA was shown in FIG. 37. RTX2042 retron in all RNA system was delivered to HEK293T cells by lipofection. At given amount of RT mRNA, Cas9 mRNA and ncRNA-sgRNA, additional sgRNA was added. The same ncRNA-sgRNA with template encoded a 25 bp insertion on the Cas9 sgRNA's non-targeting strand was used for all conditions. With one additional sgRNA (#1), precise editing was 0.27%, which increased up to 5-fold to either 1.33% (#2) or 1.13% (#3) in the presence of a second sgRNA. On the bottom graph, frequency of indels is shown for respective conditions.

[3305] These data demonstrates that dual sgRNA at the vicinity of targeting site could enhance the precise editing mediated by retron.

### Example 10. Editing with Larger Insert Size

[3306] Most of experiments so far tested 10 bp insertion at 3′ of EMX1 gene by retron-mediated precise editing. The feasibility of longer insertion was examined by designing new ncRNAs with gradually increased insert length: 25, 50, 75 and 100 bp for Eco3, Aco1, RTX-2042, and RTX-6943 retrons. Sequences to insert are randomly chosen that they do not share any homology with human genome and GC content is 50% for all inserts to generate no bias. At given amount of RT mRNA (100 ng) and Cas9 mRNA (100 ng), 400 ng of ncRNA-sgRNA fusion with different template lengths ranging from 10 to 100 bp were added and delivered to HEK 293T cells via lipofection. Overall, the efficiency is comparable cross the size of insert for all retrons. For 100 bp insertions, precise editing was achieved at 1.04% for Eco3, 1.52% for Aco1, 1.37% for RTX2042 and 0.05% frequency for RTX6943 retron (FIG. 59A). On the bottom row of graphs, frequency of indels for respective conditions shows a very similar trend to precise editing (FIG. 59B).

[3307] When sgRNA spike-in was added to above conditions (FIGS. 60A and 60B), the overall activity increased and activity was not compromised with longer inserts. For 100 bp insertions, precise editing increased 1.8˜8 fold from without sgRNA spike-in, 1.82% for Eco3, 4.50% for Aco1, 4.40% for RTX-2042 and 0.4% for RTX-6943. At the bottom panel, frequency of indels also increased for respective conditions.

[3308] In combination with Cas9 nuclease, retron can insert 100 bp precisely at target site of the genome up to 4.5% efficiency.

### Example 11. Inserting a Whole Gene by Retron-Mediated Precise Editing

[3309] Correcting large mutation hot spot or insert a moderate size of gene precisely into the genome broadens the applicability of Retron-mediated gene editing. To interrogate this, a GFP gene with its own promoter and poly-A signal (1267 bp, FIG. 61A) was integrated in ncRNA of retron and gene editing assay was performed with three retrons, Eco3, Aco1 and RTX6943. As a readout of insertion, 5′ and 3′ junctions between EMX1 host and insert sequences were amplified by qPCR. ΔCt (Ct of without RT sample−Ct of with RT sample) value was used for relative quantification of integration. The bigger value of ΔCt indicates the higher frequency of insert in the sample. With all three retrons, amplicons of both 5′ and 3′ junctions are detectable significantly above background level (FIG. 61B). Amplicon of 3′ junction is more abundant than that of 5′ junction probably because insertion at 3′ is facilitated by enriched 5′ end of msDNA from reverse transcription. FIG. 61D shows PCR products from Aco1 retron analyzed by Agilent Tapestation High Sensitivity D1000 screentape. In the presence of RT (+RT sample, left on the gel), the expected size of amplicons were detected at both 5′ and 3′ junctions of edited alleles as indicated by arrows. Edited alleles were not detected in the absence of RT (−RT sample, right on the gel). Triangle indicates the expected amplicon for unedited alleles, which is present in both −RT and +RT samples. In addition, FIG. 61C shows qPCR data depicting GFP insertion at 5′ or 3′ junctions at EMX1 locus by two retrons. ncRNA-sgRNA engineered to contain GFP gene insert was transfected to HEK293T cells, together with RT mRNA of each retron, Cas9 mRNA, with/without additional sgRNA. Genomic DNA was analyzed by indicated primer pairs in the table to detect GFP gene insertion at 5′ or 3′ junctions on the edited allele. ΔCt was obtained by subtracting junction Ct value from EMX1 Ct value for relative quantification of GFP insertion at EMX1 locus. With all two retrons, amplicons of both 5′ and 3′ junctions are detectable significantly above background level. Amplicon of 3′ junction is slightly more abundant than that of 5′ junction probably because insertion at 3′ is facilitated by more enriched 5′ end of msDNA from reverse transcription. Thus, two different retrons have been shown to insert a whole gene by retron editing.

[3310] In all, these results demonstrated the feasibility of inserting an entire gene by retron-mediated precise editing.

### Example 12. Order of sgRNA and ncRNA in Fused RNA

[3311] Next, the order of sgRNA and ncRNA in fusion was addressed. The order might play an important role in ensuring the activity of two enzymes (Cas9 and RT of retron) on one fused substrate. A. ncRNA-sgRNA and B. sgRNA-ncRNA order were compared for precise editing with Eco3, Aco1, and RTX-2042 retron (FIG. 62A). For Eco3 and RTX-2042, sgRNA-ncRNA order allowed significantly higher activity for both precise editing (6- and 3-fold, respectively) and indels (3- and 2-fold respectively) than ncRNA-sgRNA order. The same order provided higher indels for Aco1 (2 fold), suggesting that sgRNA at 5′ of the fusion permits higher Cas9 activity. However, precise editing with Aco1 was comparable between two orders.

[3312] When sgRNA spike-in was added to above conditions, the overall activity slightly increased (FIG. 62B). The addition of sgRNA spike-in compensated inferior Cas9 activity with ncRNA-sgRNA (to that with sgRNA-ncRNA), so that precise editing and indels became comparable to the inverse order for all retrons.

[3313] The precise editing was dependent on the presence of RT and Cas9 (FIG. 63). When any one of these components is removed, precise editing is undetectable or at background levels with either order of ncRNA and sgRNA fusion (FIG. 63 top graphs). This was consistent with all three retrons. On the bottom graphs, frequency of indels is shown for respective conditions (FIG. 63 bottom graphs).

### Example 13. Separation of ncRNA and sgRNA

[3314] The addition of sgRNA spike-in to either order of ncRNA and sgRNA fusion increased precise editing and indels (FIGS. 62A, 62B and FIG. 63). These data suggest that physical fusion of ncRNA and sgRNA of Cas9 nuclease could be a limiting factor for Cas9 activity and consequently precise editing thus separation of ncRNA and sgRNA could be a better strategy for precise editing.

[3315] The impact of separating sgRNA from ncRNA on editing was tested in Eco3, Aco1, RTX-2042 and RTX-6943 retron system comparing the editing efficiency between A. ncRNA-sgRNA or B. sgRNA-ncRNA fusion and C. separated ncRNA and sgRNA with or without additional sgRNA (FIG. 64). With Eco3, the separation significantly outperformed (˜5 fold) any order of fusion of ncRNA and sgRNA in precise editing. With no sgRNA added to separated ncRNA, no precise editing was observed, as expected. On the other hand, separated version of Aco1 and RTX-2042 ncRNAs achieved a comparable level of precise editing to fused RNA. Separated ncRNA of RTX-6943 showed lower activity than fused version but the overall activity of this retron is a magnitude lower than others.

[3316] These data demonstrates that separation of ncRNA and sgRNA could achieve comparable or even higher precise editing than ncRNA and sgRNA fusion depending on the type of retron.

### Example 14. Retron Mediated Precise Editing Occurs at Another Genomic Locus, AATVS1

[3317] All previous gene editing assays were done at EMX1 gene locus. With Eco3, Aco1, RTX2042 and RTX6943 retrons, AAVS1 locus was targeted for precise editing. AAVS1 locus, in intron 1 of PPP1R12C (protein phosphatase 1 regulatory subunit 12C) gene, is known as a “safe harbor”, because its disruption does not have adverse effects on the cell, and robust transcription of locus is permissive for stable expression of an exogenously inserted gene. Within msD stem loop of ncRNA from each retron, 25 bp insertion donor sequence was incorporated and to the 3′ end of engineered ncRNA, sgRNA targeting AAVS1 was fused.

[3318] FIG. 65 shows the result of testing four retrons to edit AAVS1 locus. For all four retrons, precise editing was enhanced in the presence of additional sgRNA and ranged from 0.73% to 2.05%. On the right, frequency of indels at respective conditions shares a similar trend of precise editing. Removing either RT, ncRNA-sgRNA or Cas9 mRNA abrogated precise editing showing Retron and Cas9 specificity of editing (FIG. 66), while indels are robust in the bottom graph.

### Example 15. Testing Template Strand Bias for Precise Editing

[3319] Cas9 uses different endonuclease domain to make cleavage on either sgRNA targeting or non-targeting strand. Differential release timing of each nuclease domains of Cas9 from DNA substrates after cutting might influence how single strand donor interact with broken DNA and repair pathway (12).

[3320] Results of testing donor templates on the opposite strand relative to Cas9 sgRNA targeting strand are shown in FIG. 67. Eco3 and Aco1 retrons in all RNA system were delivered to HEK293T cells by lipofection. The given amount of RT mRNA, Cas9 mRNA, additional sgRNA targeting EMX1 locus, and appropriate ncRNA-sgRNA described underneath the graph were added. All donor templates tested contained 25 bp insert. All ncRNAs used in previous experiments encoded the donor template of the strand targeted by the Cas9 sgRNA and denoted by the letter T. ncRNA that contains reverse complementary sequence of Cas9 targeting strand is denoted as NT. For Eco3, in the presence of additional sgRNA, precise editing was 1.67% when template was on the targeting strand and 0.85% when the template was on the non-targeting strand. For Aco1, in the presence of additional sgRNA, precise editing was 2.96% when template was on the targeting strand and 3.40% when the template was on the non-targeting strand. On the bottom row of graphs, frequency of indels is shown for respective conditions.

[3321] At least in EMX1 locus, retron ncRNA encoding either Cas9 targeting or non-targeting strand produced a similar level of precise editing.

### Example 16. Retron Mediated Precise Editing by Cas9 Nickase is Improved by Combining Dual sgRNAs

[3322] Retron mediated precise editing with Cas9 nickase was observed but at low efficiency (˜0.1%) in previous study. This is consistent with other studies that a single nick does not efficiently induce gene editing, because the induced single-strand breaks are very efficiently repaired by the base excision repair pathway (22) (23). In contrast, combination of a pair of PAM (protospacer-adjacent motif)-out sgRNAs at proximity with Cas9 nickase led to efficient gene editing (precise edits and indels) (23). This double-nick approach induces a site-specific double strand break leading to target gene indels but off-targets are significantly reduced by 50-1000 fold than Cas9 WT.

[3323] Whether double-nick approach supports retron-mediated precise editing, three sgRNAs were selected at the 3′ of last exon of EMX1 (FIG. 70). Combination of sgRNA 1+3, 2+3 and 1+2 were tested with Cas9 D10A nickase in parallel with Cas9 WT using sgRNA1. All RNA was transfected at a fixed amount RT mRNA 100 ng, ncRNA-sgRNA 400 ng, Cas9 variant mRNA 100 ng, and sgRNA 5 ng each. sgRNA 1+3 combination with nickase gave the highest precise editing at 3% efficiency (FIG. 70, top left graph). This efficiency with dual sgRNA is ˜30 fold higher than that achieved using single sgRNA but still lower than Cas9 WT guided by sgRNA1 (13% editing efficiency). The editing was dependent on retron system since the absence of RT abrogated the editing. Precise edits were not proportional but correlated with indel frequency (FIG. 54, bottom left graph).

### Example 17. A Novel Retron R6083 is Capable of Inserting Up to 100 bp in all RNA System

[3324] FIG. 71 shows result of testing different template lengths/ncRNA and sgRNA separation or fusion with R6083 retron in all RNA system. All RNA was delivered to HEK293T cells by lipofection. At given amount of RT mRNA and Cas9 mRNA, ncRNA-sgRNA fusion with different template lengths ranging from 25 to 100 bp or ncRNA with 25 bp insertion were added. Precise insertion of 100 bp to EMX1 locus was observed at ˜2% efficiency (FIG. 71 top left graph). Separated ncRNA exhibited lower activity than ncRNA-sgRNA fusion with 25 bp insertion. The precise editing was dependent on the presence of RT and ncRNA as shown in top, right graph. On the bottom row of graphs, frequency of indels is shown for respective conditions.

[3325] FIG. 72 shows that R6083 retron was able to insert 25 bp template into AAVS1 locus in all RNA system. With additional sgRNA, 3% of editing efficiency was observed and the activity was completely dependent on the presence of either RT or ncRNA (FIG. 72 left graph).

### Example 18. Cas9-RT Fusion Vs Separated Cas9 and RT

[3326] In all previous studies, Cas9 and RT mRNA were delivered separately. Physically fused Cas9−RT could be beneficial for colocalization of two enzymes in cellular compartment but also be harmful by interfering activity of each enzyme. To address this point, Cas9 and Eco3 RT were fused through a SGGSx2-XTEN-SGGSx2 (SEQ ID NO:19932) flexible linker and tested for precise gene editing in parallel with separated format. The same molar concentration of Cas9 (150 ng) and RT mRNA (50 ng) corresponding to 200 ng of Cas9-RT fusion were used in separation and the editing efficiency of fused or separated enzyme were compared for either ncRNA alone (left on left graph of FIG. 73) or ncRNA-sgRNA fusion (right on right graph of FIG. 73). Separated Cas9 and RT achieved higher editing efficiency than when they were fused with both ncRNA (3-fold) and ncRNA-sgRNA (1.5-fold). Higher editing by separated enzymes was more pronounced when ncRNA and sgRNA was separated, suggesting that separated enzymes are more flexible to search for respective targets. Consistent with precise editing, indels from fused enzyme was lower in both ncRNA and ncRNA-sgRNA fusion. These results suggest that Cas9 and RT in fused format could constrain each other even with a flexible linker between.

### Example 19. Retron ncRNA End Protection by Cap and Tail (New Experiment)

[3327] 5′ and 3′ end of eukaryotic mRNAs are modified by capping and tailing, respectively. Both the cap and the tail protect the transcript from exonucleases and help it get exported from the nucleus and translated on the ribosomes. More recently, long non coding RNAs (>200 nt) are shown to be often capped and tailed (21).

[3328] To attempt to increase half-life of retron ncRNA in cells, either cap or tail and both cap and tail were added to ncRNA (FIG. 55 schematic). FIG. 74 shows the results of end protection of ncRNA-sgRNA fusion by cap and tail in 4 component all-RNA system (RT mRNA+Cas9 mRNA+ncRNA+sgRNA) delivered to HEK293T cells by Lipofectamine MessengerMAX. All RNA was transfected at a fixed amount RT mRNA 100 ng, ncRNA-sgRNA 400 ng, Cas9 mRNA 100 ng, and sgRNA 5 ng. ncRNA-gRNA fusion was either capped (+cap −tail) or poly-A tailed (−cap +tail) or both capped and poly-A tailed (+cap +tail). ncRNA without end protection (−cap −tail) produced ˜4.5% precise edits when additional sgRNA was added and the editing was dependent on the presence of RT. While capping alone did not change editing efficiency, tailing alone slightly increased editing and both cap and tail significantly improved editing efficiency about 2-fold (left graph). Indels at all conditions were comparable as shown in the right graph.

[3329] These results support that end protection of ncRNA by cap and tail promotes retron-mediated precise editing possibly by enhancing stability of ncRNA within cells.

### Example 20. Circularization of ncRNA

[3330] We looked for an alternative way of stabilizing ncRNA. Circular RNA forms a covalently closed continuous loop and this endless form endows extended durability. FIG. 75 describes how circular ncRNA is made. Circularization leveraged on group I self-splicing intron method that has been reported to be more applicable to long RNA circularization and requires only the addition of GTP and Mg2⁺ as cofactors (22). ncRNA is surrounded by self-splicing intron and complementary homology sequences (FIG. 75 step1). External and internal homology sequences bring two introns into proximity (step2). Exogenously added GTP initiates a series of trans-esterification that excises the introns and ligates ncRNA in a circular form (step3).

[3331] FIG. 76 summarizes the results of testing modified ncRNAs for precise editing at EMX1 locus by Eco3 all RNA system in HEK293T cells. All RNA was transfected at a fixed amount RT mRNA 100 ng, ncRNA 400 ng, Cas9 mRNA 100 ng, and sgRNA 5 ng. With the addition of MS2 stem loop at 3′ end of ncRNA, the activity nearly doubled at 15% efficiency from unmodified ncRNA (˜8%). Circularization of ncRNA achieved further increased efficiency, reaching at 22%. Circularization of ncRNA was done as described in FIG. 75. Without sgRNA, both precise edit and indels were not detectable as expected. Indels are shown at the right graph at respective conditions of left graph.

### Example 21. RT and its Cognate ncRNA from Same Retron is Required to Support Precise Editing

[3332] RT of retron does not require an exogenous primer but instead utilizes a specific branching G residue within a folded secondary structure of template ncRNA to initiate reverse transcription (23). Some early discovered RTs were shown to recognize specifically secondary structure and priming G in their cognate ncRNA for msD synthesis (24). This RT-ncRNA specificity was tested with a newly characterized Aco1 retron in gene editing system in parallel with Eco3, one of early retrons. In consistent with previous studies, Aco1 supported precise editing only when paired with its cognate ncRNA and the activity was abrogated when paired with Eco3 ncRNA (FIG. 77, left graph). The same observation was made with Eco3 retron and Eco3, only with its cognate ncRNA contributed to precise editing. Indels are shown at the right graph at respective conditions of left graph.

### Example 22. Precise Insertion of Exon-Size Sequences

[3333] Exon-size long insertion has clinical value to replace a mutation enriched exon causing genetic diseases. For example, exon 8 is the mutation hot spot in Wilson's disease patients with ˜500 mutations that are regionally and ethnically different (25). We tested insertion of different size up to 305 bp with Aco1, Eco3 and a completely novel R1262 retron at EMX1 locus of HEK293T cells. Aco1 achieved precise insertions of 10, 100 and 205 bp at 8, 4, and 1.3% (FIG. 78, left in top graphs). Eco3 made precise insertions of 10 and 205 bp at 12 and 2.3%, respectively (FIG. 78, middle in top graphs). A novel retron R1262 obtained 25, 205, and 305 bp insertion at 20, 15 and 8.8% efficiency (FIG. 78, right in top graphs). The activity of R1262 is notably robust with insignificant drop from 25 to 205 bp size increase, in contrast to Aco1 or Eco3. Furthermore, the ratio of precise edit over indels is the least (1:2) with R1262 (FIG. 78 indels in bottom graphs). Precise editing was abrogated in the absence of RT or sgRNA, indicating that the system is dependent on both retron and site-specific nuclease.

[3334] In addition to EMX1 locus, R1262 retron supported 205 bp precise insertion at AAVS1 locus with 11% efficiency (FIG. 79). These data expand the potential of retron-mediated gene editing as a genetic medicine.

### Example 23. Optimization of RT:ncRNA Ratio for >200 bp Long Insertion with R1262 Retron

[3335] ncRNA is the source of single strand DNA that serves as a repair template and the more single strand DNA production could induce higher editing. However, ncRNA might shortest live inside cells among RT, Cas9 mRNA, and sgRNA and be a limiting factor in retron based editing system since ncRNA without chemical modification is vulnerable to cellular nucleases and upon reverse transcription, ncRNA is degraded by cellular RNase H (28). Based on these hypotheses, all RNA system is formulated with ncRNA occupying the highest proportion of cocktail and previous studies with Eco3 retron agreed with this point. FIG. 80 shows the results of testing RT: ncRNA ratio for >200 bp long insertion at EMX1 locus with a novel reton R1262. RT: ncRNA ratio was tested at 1:12.5, 1:16.7 and 1:25 molar ratio. 1:16.7 ratio corresponds to 1:4 mass ratio that was used in the rest of studies. With ncRNA (right in the left graph), the best editing was observed at 1:12.5 ratio for both 205 and 305 bp insertion. With ncRNA-sgRNA fusion (left at left graph), all ratio tested generated comparable editing but a weak tendency of increased editing was seen with increased amount of ncRNA-sgRNA.

### Example 24. A Novel Retron R2781 is Capable of Inserting Up to 100 bp in all RNA System

[3336] FIG. 105 shows results of testing different template lengths of ncRNA with a novel retron R2781 in an all-RNA system. All RNA was delivered to HEK293T cells by lipofection. At given amount of RT mRNA and Cas9 mRNA, ncRNA with different template length insertion were added. In FIG. 16, R2781 demonstrated 10 bp insertion at EMX1 locus at similar activity as other hits, R1262, R6342S, 6342L in plasmid system. Here, the activity of R2781 for 25 bp, 205 bp and 405 bp insertion at EMX1 locus was evaluated with two different homology arm (HA) length (30 bp for both arms or 49 bp left/65 bp right). Precise insertion of 25 bp with 30 bp homology arm was achieved at 11% efficiency (left graph). The efficiency of same length insertion was reduced to half with longer homology arm (49/65 bp) suggesting that this retron reverse transcriptase might have limited enzymatic processivity. Conversely, the activity inserting 205 or 405 bp significantly dropped. Indels are shown at the right graph at respective conditions of left graph.

### Example 25. Precise Editing with Cas9 Nickase and Retron R6342S

[3337] Wild Type (WT) Cas9 nuclease generates double strand break (DSB) that can potentially increase genomic instability by generating larger deletion or chromosome translocation or chromosome loss (32). Single point mutations in either of Cas9 nuclease domains can generate nickases that cut only one strand of targeting site. D10A variant cuts target strand using intact HNH nuclease domain and H840A variant cuts non-target strand using intact RuvC domain. Nicks can initiate homology-directed repair (HDR) and cause less mutagenic end joining than DSBs (13). These features draw considerable interest in using nickases in retron-based precise editing.

[3338] Previously, retron based precise insertion of 10 bp was achieved at 0.1% efficiency with Eco3 retron combined with D10A nickase (FIG. 76). Here, DOA wild type and D10A nickase with R221K/N394K mutations previously shown to improve Cas9 nuclease activity (33) was tested with one of lead retrons, R6342S. Precise editing activity by R6342S was observed 3-4 times higher than Eco3 with wild type nickase and further enhanced (7 times higher) with R221K/N394K nickase mutant (FIG. 106).

### Example 26. Retron Meditated Precise Deletion of Genomic DNA

[3339] A number of genetic diseases could be corrected by simply deleting aberrant genomic sequences. Dystrophin gene in muscle disease (34) and Col7A1 gene in skin disease (35) and repeat expansion disorders (36) are good examples to delete undesired mutation containing sequences. Here, precise deletion mediated by retron R1262 was tested in an all-RNA system. In FIG. 107, two deletion strategies are depicted in the top panel. Retron ncRNA is designed by juxtaposing left and right homology arms sequences to delete the intervening sequence. Dell is deleting 214 bp upstream of Cas9 cutting site and del2 is deleting 248 bp downstream of Cas9 cutting site at EMX1 locus. Retron mediated deletion was compared with direct delivery of increasing amounts of single strand DNA (ssDNA) donors (150 and 300 ng). In bottom panel, left graph shows that R1262 was able to delete 248 bp (del2) from EMX1 locus at similar activity as ssDNA donor. Indels are shown on the right graph at respective conditions of left graph. Of note, unintended indel activity by retron-mediated deletion was ˜6 fold lower than ssDNA donor mediated deletion. Deletion activity of 214 bp (dell) by R1262 was not detected.

[3340] This data suggests that retron could be used for precise deletion of genomic DNA at similar activity as ssDNA donor but with lower unintended activity.

### Example 27. NHEJ-Based Insertion of Retron-Derived Double Strand DNA at Target Site

[3341] The current approach for retron mediated gene editing is dependent on homology dependent repair (HDR) mechanism, which is only active in dividing cells. Most retrons generate single strand DNA (ssDNA), which can be used for HDR template. In order to apply retron mediated editing to non-dividing cells where HDR is not active (e.g., in non-dividing cells), alternative approaches could be considered. One such alternative approach is to utilize nonhomologous DNA end-joining (NHEJ) to integrate double strand DNA (dsDNA) at a target cut site. NHEJ based integration of dsODN/dsDNA has been demonstrated various times in literature and has worked in cells and in vivo. This approach can be used for small insertions as well as large insertions such as exon replacement and safe harbour knock-in.

[3342] A dsDNA template may be formed from retrons by employing two ncRNAs of any retron whose encoded RT ssDNA products are complementary to each other and which form a duplex to become dsDNA (FIG. 108, schematics in left). These dsDNAs contain msR and msD spacer sequences at both extremes that do not hybridize each other and could be inhibitory for end-joining. The inclusion of sgRNA recognition sequences (same as genomic target sequence) in tandem at both ends of insert leads to blunt-ended double strand DNA and one direction of insertion is more stably installed than the other since it prevents from recutting by Cas9. Insertion in the other direction allows Cas9 recutting thus the edited sequence is less stable. Using this strategy, R1262 retron with two complementary ncRNAs inserted ˜120 bp dsDNA on EMX1 locus at ˜1% efficiency, higher when insert sequence was flanked with two sgRNA sequences in tandem (FIG. 108, top right graph). Basal insertion activity of R6342 without tandem sgRNA sequences was slightly higher than that of R1262. Indels are shown at the right, bottom graph at respective conditions of top graph. This data demonstrates that retron-derived dsDNA could directly integrate at the target site by an NHEJ mechanism and does not require homology with the site of integration.

### Example 28. Retron RNAs do not Trigger Overt Immune Response

[3343] Potential immunogenicity of retron mediated editing was tested in an all-RNA system using human peripheral blood mononuclear cells (hPBMCs). PBMCs contain both innate and adaptive immune cells and these cells are equipped with sensors to detect foreign nucleic acids. RNA quality and the presence of 5′ triphosphate of RNA generated by in vitro transcription could activate immune sensors. In addition, single strand DNAs made by Retron RT using ncRNA as template could potentially trigger immune response. To reduce immune reaction, uridine in RT mRNA was replaced by less immunogenic m1Ψ (37) and 5′ triphosphate of ncRNA is capped with m7G. These modified versions of RNA were by themselves or in combination, electroporated to hPBMCs along with GFP mRNA without base modification (TriLink) as a control. After overnight culture, the supernatant was analyzed for cytokine production. Among 25 cytokines and chemokines examined, those above detection limit are shown in FIG. 109. Type I interferon, a hallmark of immune response to foreign nucleic acids was not detected in any retron RNA transfected cells and some inflammatory cytokines/chemokines were detected at low level in retron RNA transfected cells, but at much lower level than GFP mRNA control except RT mRNA without U modification. Of note, ncRNA was not modified for U as GFP mRNA control and was electroporated four times more than RT mRNA or GFP mRNA reflecting the condition used for gene editing. In spite of this similarity and difference, ncRNA transfected cells produced much less cytokines/chemokines than GFP mRNA control.

### Example 29. Evidence of Retron-Mediated Precise Editing in Primary Cells

[3344] First, bone marrow derived CD34+human stem cells (HSCs) were used to evaluate the performance of retron-mediated gene editing in primary cells. HSCs are long live and capable of generating entire hematopoietic system so that HSC transplant has been used for decades to treat hematopoietic disorders such as genetic diseases or leukemias. While transplant therapy has been supportive for patients, it lacks definitive curative outcome. In contrast, direct correction of mutations present in the genome of patient HSCs holds the potential for a curative effect. The confirmation of this notion will eventually emerge through HSC gene editing therapy in clinical setting.

[3345] In FIG. 110, results of testing retron-mediated gene editing in human stem progenitor cells in an all-RNA system are shown. Frozen HSCs were thawed to expand for three days in the presence of hSCF, hFLT3-L, hTPO cytokines to prevent differentiation. A total of 3 or 5 μg of Cas9 mRNA, guide RNA (gRNA), R6342 RT mRNA and ncRNA were mixed at mass ratio indicated in each label at the left graph, and electroporated to HSCs. After another three-day culture, genomic DNA was extracted and sequenced to measure editing frequency. With total of 5 microgram of RNA, divided at ratio of 1:0.3:4:1=Cas9:gRNA:ncRNA:RT, precise insertion of 25 bp at AAVS1 locus was observed at 0.1% of frequency (left graph). Indels in their respective condition are shown at the right graph.

[3346] Second, T-cells are the cells of the immune system responsible for seeking out and destroying unhealthy cells. These unhealthy cells are typically cells infected with harmful pathogen, but some T-cells can also naturally recognize and kill cancer cells. Genetic engineering of T-cell genome enhances such T-cell function and immunotherapies with enhanced T-cell function have provided remarkable clinical success to treat B cell acute lymphoblastic leukemia (38). Based on these successes, a wide range of clinical developments against cancer, infectious diseases, and autoimmune diseases have been leveraging on T-cell genome engineering.

[3347] In FIG. 111, results of testing retron-mediated gene editing in human T-cells in all-RNA system are shown. Frozen human pan T-cells from peripheral blood were thawed and activated for two days in the presence of anti-CD3/anti-CD28 conjugated magnetic beads and IL-2 cytokine. After the culture, anti-CD3/anti-CD28 beads were removed from cells by magnet. A total of 3 or 5 μg of Cas9 mRNA, guide RNA (gRNA), R6342 RT mRNA and ncRNA were mixed at mass ratio indicated in each label at the left graph, and electroporated to T-cells by either Neon or Lonza electroporator. After an additional three-day culture, genomic DNA was extracted and sequenced to measure editing frequency. With total of 3 μg of RNA, divided at 1:0.3:3:1=Cas9:gRNA:ncRNA:RT, precise insertion of 25 bp at AAVS1 locus was observed up to 1.7% of frequency using Neon machine (left graph). Indels in their respective condition are shown in the right graph.

### Example 30. Retron-Based Gene Editing In Vivo Using LNP

[3348] In certain embodiments, retron-mediated gene editing can be achieved with an-all RNA system without requiring a viral DNA donor or exogenous DNA donor since retrons are able to produce donor DNA from a ncRNA template inside cells. As proposed herein, this feature is particularly apt for lipid nanoparticle (LNP)-based platform. Following the methods described herein, the performance of retron-based gene editing in vivo is investigated. Retron-based gene editing system could be formulated in one or more LNPs.

[3349] An exemplary and non-limiting LNP formulation system may be prepared for in vivo delivery of a retron editing system.

### LNP Formulation for In Vivo Delivery of Retron-Based Editing System

[3350] Ionizable lipids, phospholipids, cholesterol, and PEG-lipids are dissolved in pure ethanol at specified molar ratios (exemplary formulations shown below as Formulation Molar Ratios A, B, C, and D), with a total lipid concentration of about 7.2 mM. A polynucleotide solution (exemplary concentration of 0.067 mg/mL) is prepared using acidic buffer (pH 4.0-5.0) containing a gene editing system, such as a 1:0.3:4:1 ratio of a Cas9 mRNA/gRNA/ncRNA/RT. The nucleotide and lipid solutions are mixed at a 3:1 volume ratio using a NanoAssemblr microfluidic system at a 12 mL/min total flow rate resulting in rapid mixing and self-assembly of LNPs. Formulations are further dialyzed against PBS (pH 7.4) overnight at 4° C., concentrated using centrifugal filtration and filtered (0.2 μm pore size). The particle size and polydispersity index (PDI) of formulations was measured by dynamic light scattering (DLS) using a Zetasizer Ultra (Malvern Panalytical). RNA encapsulation efficiency (EE %) was determined by Ribogreen assay.

### Formulation Molar Ratio A:

| Ionizable Lipid | DSPC | Cholesterol | DMG PEG-2k |
|---|---|---|---|
| 48.5 | 10 | 39 | 2.5 |

### Formulation Molar Ratio B:

| Ionizable Lipid | DSPC | Cholesterol | DMG PEG-2k |
|---|---|---|---|
| 55 | 10 | 32.5 | 2.5 |

### Formulation Molar Ratio C:

| Ionizable Lipid | DSPC | Cholesterol | DMPE PEG-2k |
|---|---|---|---|
| 55 | 10 | 32.5 | 2.5 |

### Formulation Molar Ratio D:

| Ionizable Lipid | DSPC | Cholesterol | DSPE PEG-2k |
|---|---|---|---|
| 48.5 | 10 | 40 | 1.5 |

### In Vivo Delivery Protocol of LNP-Based Retron Editing System

[3351] CD-1 female mice, ranging from new-born to adult age (6-10 weeks) are used in each study. LNPs are dosed via the lateral tail vein in a volume of approximately 5 mL per kilogram body weight. The animals are periodically observed for adverse effects for at least 24 hours post dose. Mice are dosed at 2 mpk. Each formulation is dosed in 5 animals. Animals are euthanized at 7 days by exsanguination via cardiac puncture under isoflurane anesthesia. On-target/off-target tissues are collected from each animal for DNA extraction and analysis. Cohorts of mice are measured for editing by Next-Generation Sequencing (NGS). Overall health and well-being of animals is recorded to determine whether delivery of gene editing payloads resulted in deleterious off-target editing.

### Example 31. Retron ncRNA Sequence Optimization Via High-Throughput Screening of ncRNA Variant Library

[3352] Retrons are native to prokaryotes and hence, the ncRNA sequences can be further engineered to accommodate their application and maximize efficiency in human cells.

[3353] To understand and optimize the editing efficiency by retron ncRNA in human cells, a pooled ncRNA library with 191 variants (sequences provided in Table 31A below) plus 2 controls (a positive and negative control) of different lengths and sequences in several key elements (such as, but not limited to, modifications to the lengths of the a1:a2 stem, msR stem-loop) was developed. Each of these variants is associated with unique barcodes designed in the donor region, and the variant library is synthesized as a pooled oligo library. The synthesized oligo library is cloned into a pooled DNA library, from which pooled ncRNAs are produced by in vitro transcription. RNA library is then transfected to the 293T cell line and we harvest cells at different timepoints post-transfection. Next-generation sequencing is then applied for the unique barcodes to measure the abundance of each RNA variant, production of the ssDNA donor, and the precise insertion at the edited locus. Through comparing these data sets, the stability and efficacy of each ncRNA variant can be scored. From the scoring insight, enhanced ncRNA can be optimized/engineered by integrating the most effective modified features.

### Methods:

[3354] 191 ncRNA variants are designed with variation introduced to the following ncRNA elements: (1) al a2; (2) msD stem; (3) msR stem; (4) msR loop; (5) termination sequence (within msR spacer region); (6) msD, msR spacer deletions (minimal variants). In addition, one positive control (WT R6342S ncRNA) and a negative control with disrupted reverse transcription priming sites. Each of these variants is associated with several unique barcodes (e.g., “ACCTATCATTCANNNNNNNN”) designed in the donor region which targets human EMX1 gene. The variant library is synthesized as a pooled oligo library. The synthesized oligo library is assembled into a pooled DNA library, from which pooled ncRNAs are produced by in vitro transcription. The ncRNA variant sequences and the control sequences are provided in Table 31A. A representative library ncRNA construct is depicted in FIG. 112. The types of variations in the library is depicted in FIG. 113.

TABLE 31A
ncRNA variant sequences and barcodes

| | | SEQ | | SEQ | |
|---|---|---|---|---|---|
| | DNA sequence (changed region are labelled with | ID | | ID | |
| Variants | lower case) | NO: | Barcodes | NO: | Type |
| Positive | CATAGATTTCTTGGCCTTTATGCTGTGGTGTTGC | | ACCTAT | | Positive |
| control | GCCACGGTGGAGATTTGTCAAATACACATCATT | | CATTCA | | control |
| (WT) | AGGTTGCGACAAACGGCAGAAGCTGGAGGAGG | | NNNNN | | |
| | AAGGGCCTGAGTCCGAGCAGAAGAACCTGCAG | | NNN | | |
| | GACCTATCATTCANNNNNNNNAAAGTTCTCCCA | | | | |
| | TCACATCAACCGGTGGCGCATTGCCACGAAGCA | | | | |
| | GGCCAATGGGGAGGACATCGATGTCACACAAC | | | | |
| | CAAATATAAGAATTGTTAGCAAGAAATCTATG | | | | |
| Negative | CATAGATTTCTTatCCTTTATGCTGTGGTGTTGCG | | ACCTAT | | Negative |
| control | CCACGGTGGAGATTTGTCAAATACACATCATTA | | CATTCA | | control |
| | GGTTGCGACAAACGGCAGAAGCTGGAGGAGGA | | NNNNN | | |
| | AGGGCCTGAGTCCGAGCAGAAGAACCTGCAGG | | NNN | | |
| | ACCTATCATTCANNNNNNNNAAAGTTCTCCCAT | | | | |
| | CACATCAACCGGTGGCGCATTGCCACGAAGCA | | | | |
| | GGCCAATGGGGAGGACATCGATGTCACACAAC | | | | |
| | CAAATATAAGAATTGTTAGCAAGAAATCTATG | | | | |
| Var0001 | tataaGCCTTTATGCTGTGGTGTTGCGCCACGGTG | 19543 | ACCTAT | 19735 | ala2 |
| | GAGATTTGTCAAATACACATCATTAGGTTGCGA | | CATTCA | | variant |
| | CAAACGGCAGAAGCTGGAGGAGGAAGGGCCTG | | NNNNN | | |
| | AGTCCGAGCAGAAGAACCTGCAGGACCTATCA | | NNN | | |
| | TTCANNNNNNNNAAAGTTCTCCCATCACATCAA | | | | |
| | CCGGTGGCGCATTGCCACGAAGCAGGCCAATG | | | | |
| | GGGAGGACATCGATGTCACACAACCAAATATA | | | | |
| | AGAATTGTTAGttata | | | | |
| Var0002 | tgataGCCTTTATGCTGTGGTGTTGCGCCACGGTG | 19544 | ACCTAT | 19736 | ala2 |
| | GAGATTTGTCAAATACACATCATTAGGTTGCGA | | CATTCA | | variant |
| | CAAACGGCAGAAGCTGGAGGAGGAAGGGCCTG | | NNNNN | | |
| | AGTCCGAGCAGAAGAACCTGCAGGACCTATCA | | NNN | | |
| | TTCANNNNNNNNAAAGTTCTCCCATCACATCAA | | | | |
| | CCGGTGGCGCATTGCCACGAAGCAGGCCAATG | | | | |
| | GGGAGGACATCGATGTCACACAACCAAATATA | | | | |
| | AGAATTGTTAGtatca | | | | |
| Var0003 | tctacGCCTTTATGCTGTGGTGTTGCGCCACGGTG | 19545 | ACCTAT | 19737 | ala2 |
| | GAGATTTGTCAAATACACATCATTAGGTTGCGA | | CATTCA | | variant |
| | CAAACGGCAGAAGCTGGAGGAGGAAGGGCCTG | | NNNNN | | |
| | AGTCCGAGCAGAAGAACCTGCAGGACCTATCA | | NNN | | |
| | TTCANNNNNNNNAAAGTTCTCCCATCACATCAA | | | | |
| | CCGGTGGCGCATTGCCACGAAGCAGGCCAATG | | | | |
| | GGGAGGACATCGATGTCACACAACCAAATATA | | | | |
| | AGAATTGTTAGgtaga | | | | |
| Var0004 | gatccGCCTTTATGCTGTGGTGTTGCGCCACGGTG | 19546 | ACCTAT | 19738 | ala2 |
| | GAGATTTGTCAAATACACATCATTAGGTTGCGA | | CATTCA | | variant |
| | CAAACGGCAGAAGCTGGAGGAGGAAGGGCCTG | | NNNNN | | |
| | AGTCCGAGCAGAAGAACCTGCAGGACCTATCA | | NNN | | |
| | TTCANNNNNNNNAAAGTTCTCCCATCACATCAA | | | | |
| | CCGGTGGCGCATTGCCACGAAGCAGGCCAATG | | | | |
| | GGGAGGACATCGATGTCACACAACCAAATATA | | | | |
| | AGAATTGTTAGggatc | | | | |
| Var0005 | acgcgGCCTTTATGCTGTGGTGTTGCGCCACGGTG | 19547 | ACCTAT | 19739 | ala2 |
| | GAGATTTGTCAAATACACATCATTAGGTTGCGA | | CATTCA | | variant |
| | CAAACGGCAGAAGCTGGAGGAGGAAGGGCCTG | | NNNNN | | |
| | AGTCCGAGCAGAAGAACCTGCAGGACCTATCA | | NNN | | |
| | TTCANNNNNNNNAAAGTTCTCCCATCACATCAA | | | | |
| | CCGGTGGCGCATTGCCACGAAGCAGGCCAATG | | | | |
| | GGGAGGACATCGATGTCACACAACCAAATATA | | | | |
| | AGAATTGTTAGcgcgt | | | | |
| Var0006 | cgcgcGCCTTTATGCTGTGGTGTTGCGCCACGGTG | 19548 | ACCTAT | 19740 | ala2 |
| | GAGATTTGTCAAATACACATCATTAGGTTGCGA | | CATTCA | | variant |
| | CAAACGGCAGAAGCTGGAGGAGGAAGGGCCTG | | NNNNN | | |
| | AGTCCGAGCAGAAGAACCTGCAGGACCTATCA | | NNN | | |
| | TTCANNNNNNNNAAAGTTCTCCCATCACATCAA | | | | |
| | CCGGTGGCGCATTGCCACGAAGCAGGCCAATG | | | | |
| | GGGAGGACATCGATGTCACACAACCAAATATA | | | | |
| | AGAATTGTTAGgcgcg | | | | |
| Var0007 | tattaaatttGCCTTTATGCTGTGGTGTTGCGCCACGG | 19549 | ACCTAT | 19741 | ala2 |
| | TGGAGATTTGTCAAATACACATCATTAGGTTGC | | CATTCA | | variant |
| | GACAAACGGCAGAAGCTGGAGGAGGAAGGGCC | | NNNNN | | |
| | TGAGTCCGAGCAGAAGAACCTGCAGGACCTAT | | NNN | | |
| | CATTCANNNNNNNNAAAGTTCTCCCATCACATC | | | | |
| | AACCGGTGGCGCATTGCCACGAAGCAGGCCAA | | | | |
| | TGGGGAGGACATCGATGTCACACAACCAAATA | | | | |
| | TAAGAATTGTTAGaaatttaata | | | | |
| Var0008 | tataatacgaGCCTTTATGCTGTGGTGTTGCGCCACG | 19550 | ACCTAT | 19742 | ala2 |
| | GTGGAGATTTGTCAAATACACATCATTAGGTTG | | CATTCA | | variant |
| | CGACAAACGGCAGAAGCTGGAGGAGGAAGGGC | | NNNNN | | |
| | CTGAGTCCGAGCAGAAGAACCTGCAGGACCTA | | NNN | | |
| | TCATTCANNNNNNNNAAAGTTCTCCCATCACAT | | | | |
| | CAACCGGTGGCGCATTGCCACGAAGCAGGCCA | | | | |
| | ATGGGGAGGACATCGATGTCACACAACCAAAT | | | | |
| | ATAAGAATTGTTAGtcgtattata | | | | |
| Var0009 | ttctgccaatGCCTTTATGCTGTGGTGTTGCGCCACGG | 19551 | ACCTAT | 19743 | ala2 |
| | TGGAGATTTGTCAAATACACATCATTAGGTTGC | | CATTCA | | variant |
| | GACAAACGGCAGAAGCTGGAGGAGGAAGGGCC | | NNNNN | | |
| | TGAGTCCGAGCAGAAGAACCTGCAGGACCTAT | | NNN | | |
| | CATTCANNNNNNNNAAAGTTCTCCCATCACATC | | | | |
| | AACCGGTGGCGCATTGCCACGAAGCAGGCCAA | | | | |
| | TGGGGAGGACATCGATGTCACACAACCAAATA | | | | |
| | TAAGAATTGTTAGattggcagaa | | | | |
| Var0010 | tctcctcgagGCCTTTATGCTGTGGTGTTGCGCCACG | 19552 | ACCTAT | 19744 | ala2 |
| | GTGGAGATTTGTCAAATACACATCATTAGGTTG | | CATTCA | | variant |
| | CGACAAACGGCAGAAGCTGGAGGAGGAAGGGC | | NNNNN | | |
| | CTGAGTCCGAGCAGAAGAACCTGCAGGACCTA | | NNN | | |
| | TCATTCANNNNNNNNAAAGTTCTCCCATCACAT | | | | |
| | CAACCGGTGGCGCATTGCCACGAAGCAGGCCA | | | | |
| | ATGGGGAGGACATCGATGTCACACAACCAAAT | | | | |
| | ATAAGAATTGTTAGctcgaggaga | | | | |
| Var0011 | ccgggttcgcGCCTTTATGCTGTGGTGTTGCGCCACG | 19553 | ACCTAT | 19745 | ala2 |
| | GTGGAGATTTGTCAAATACACATCATTAGGTTG | | CATTCA | | variant |
| | CGACAAACGGCAGAAGCTGGAGGAGGAAGGGC | | NNNNN | | |
| | CTGAGTCCGAGCAGAAGAACCTGCAGGACCTA | | NNN | | |
| | TCATTCANNNNNNNNAAAGTTCTCCCATCACAT | | | | |
| | CAACCGGTGGCGCATTGCCACGAAGCAGGCCA | | | | |
| | ATGGGGAGGACATCGATGTCACACAACCAAAT | | | | |
| | ATAAGAATTGTTAGgcgaacccgg | | | | |
| Var0012 | ggccgggcccGCCTTTATGCTGTGGTGTTGCGCCAC | 19554 | ACCTAT | 19746 | ala2 |
| | GGTGGAGATTTGTCAAATACACATCATTAGGTT | | CATTCA | | variant |
| | GCGACAAACGGCAGAAGCTGGAGGAGGAAGGG | | NNNNN | | |
| | CCTGAGTCCGAGCAGAAGAACCTGCAGGACCT | | NNN | | |
| | ATCATTCANNNNNNNNAAAGTTCTCCCATCACA | | | | |
| | TCAACCGGTGGCGCATTGCCACGAAGCAGGCC | | | | |
| | AATGGGGAGGACATCGATGTCACACAACCAAA | | | | |
| | TATAAGAATTGTTAGgggcccggcc | | | | |
| Var0013 | aaatttaattataaaGCCTTTATGCTGTGGTGTTGCGCCA | 19555 | ACCTAT | 19747 | ala2 |
| | CGGTGGAGATTTGTCAAATACACATCATTAGGT | | CATTCA | | variant |
| | TGCGACAAACGGCAGAAGCTGGAGGAGGAAGG | | NNNNN | | |
| | GCCTGAGTCCGAGCAGAAGAACCTGCAGGACC | | NNN | | |
| | TATCATTCANNNNNNNNAAAGTTCTCCCATCAC | | | | |
| | ATCAACCGGTGGCGCATTGCCACGAAGCAGGC | | | | |
| | CAATGGGGAGGACATCGATGTCACACAACCAA | | | | |
| | ATATAAGAATTGTTAGtttataattaaattt | | | | |
| Var0014 | atattctattacttgGCCTTTATGCTGTGGTGTTGCGCCA | 19556 | ACCTAT | 19748 | ala2 |
| | CGGTGGAGATTTGTCAAATACACATCATTAGGT | | CATTCA | | variant |
| | TGCGACAAACGGCAGAAGCTGGAGGAGGAAGG | | NNNNN | | |
| | GCCTGAGTCCGAGCAGAAGAACCTGCAGGACC | | NNN | | |
| | TATCATTCANNNNNNNNAAAGTTCTCCCATCAC | | | | |
| | ATCAACCGGTGGCGCATTGCCACGAAGCAGGC | | | | |
| | CAATGGGGAGGACATCGATGTCACACAACCAA | | | | |
| | ATATAAGAATTGTTAGcaagtaatagaatat | | | | |
| Var0015 | gcgtatagtaatctgGCCTTTATGCTGTGGTGTTGCGCC | 19557 | ACCTAT | 19749 | ala2 |
| | ACGGTGGAGATTTGTCAAATACACATCATTAGG | | CATTCA | | variant |
| | TTGCGACAAACGGCAGAAGCTGGAGGAGGAAG | | NNNNN | | |
| | GGCCTGAGTCCGAGCAGAAGAACCTGCAGGAC | | NNN | | |
| | CTATCATTCANNNNNNNNAAAGTTCTCCCATCA | | | | |
| | CATCAACCGGTGGCGCATTGCCACGAAGCAGG | | | | |
| | CCAATGGGGAGGACATCGATGTCACACAACCA | | | | |
| | AATATAAGAATTGTTAGcagattactatacgc | | | | |
| Var0016 | aacgcgaaacgctggGCCTTTATGCTGTGGTGTTGCGC | 19558 | ACCTAT | 19750 | ala2 |
| | CACGGTGGAGATTTGTCAAATACACATCATTAG | | CATTCA | | variant |
| | GTTGCGACAAACGGCAGAAGCTGGAGGAGGAA | | NNNNN | | |
| | GGGCCTGAGTCCGAGCAGAAGAACCTGCAGGA | | NNN | | |
| | CCTATCATTCANNNNNNNNAAAGTTCTCCCATC | | | | |
| | ACATCAACCGGTGGCGCATTGCCACGAAGCAG | | | | |
| | GCCAATGGGGAGGACATCGATGTCACACAACC | | | | |
| | AAATATAAGAATTGTTAGccagcgtttcgcgtt | | | | |
| Var0017 | gaggcgggtgccgcaGCCTTTATGCTGTGGTGTTGCGC | 19559 | ACCTAT | 19751 | ala2 |
| | CACGGTGGAGATTTGTCAAATACACATCATTAG | | CATTCA | | variant |
| | GTTGCGACAAACGGCAGAAGCTGGAGGAGGAA | | NNNNN | | |
| | GGGCCTGAGTCCGAGCAGAAGAACCTGCAGGA | | NNN | | |
| | CCTATCATTCANNNNNNNNAAAGTTCTCCCATC | | | | |
| | ACATCAACCGGTGGCGCATTGCCACGAAGCAG | | | | |
| | GCCAATGGGGAGGACATCGATGTCACACAACC | | | | |
| | AAATATAAGAATTGTTAGtgcggcacccgcctc | | | | |
| Var0018 | gcggccgcgggcgggGCCTTTATGCTGTGGTGTTGCGC | 19560 | ACCTAT | 19752 | ala2 |
| | CACGGTGGAGATTTGTCAAATACACATCATTAG | | CATTCA | | variant |
| | GTTGCGACAAACGGCAGAAGCTGGAGGAGGAA | | NNNNN | | |
| | GGGCCTGAGTCCGAGCAGAAGAACCTGCAGGA | | NNN | | |
| | CCTATCATTCANNNNNNNNAAAGTTCTCCCATC | | | | |
| | ACATCAACCGGTGGCGCATTGCCACGAAGCAG | | | | |
| | GCCAATGGGGAGGACATCGATGTCACACAACC | | | | |
| | AAATATAAGAATTGTTAGcccgcccgcggccgc | | | | |
| Var0019 | aatattatattaaatattatGCCTTTATGCTGTGGTGTTGCGC | 19561 | ACCTAT | 19753 | ala2 |
| | CACGGTGGAGATTTGTCAAATACACATCATTAG | | CATTCA | | variant |
| | GTTGCGACAAACGGCAGAAGCTGGAGGAGGAA | | NNNNN | | |
| | GGGCCTGAGTCCGAGCAGAAGAACCTGCAGGA | | NNN | | |
| | CCTATCATTCANNNNNNNNAAAGTTCTCCCATC | | | | |
| | ACATCAACCGGTGGCGCATTGCCACGAAGCAG | | | | |
| | GCCAATGGGGAGGACATCGATGTCACACAACC | | | | |
| | AAATATAAGAATTGTTAGataatatttaatataatatt | | | | |
| Var0020 | gaacaaactaaatataaatcGCCTTTATGCTGTGGTGTTGC | 19562 | ACCTAT | 19754 | ala2 |
| | GCCACGGTGGAGATTTGTCAAATACACATCATT | | CATTCA | | variant |
| | AGGTTGCGACAAACGGCAGAAGCTGGAGGAGG | | NNNNN | | |
| | AAGGGCCTGAGTCCGAGCAGAAGAACCTGCAG | | NNN | | |
| | GACCTATCATTCANNNNNNNNAAAGTTCTCCCA | | | | |
| | TCACATCAACCGGTGGCGCATTGCCACGAAGCA | | | | |
| | GGCCAATGGGGAGGACATCGATGTCACACAAC | | | | |
| | CAAATATAAGAATTGTTAGgatttatatttagtttgttc | | | | |
| Var0021 | cgatttctaagacttcggtaGCCTTTATGCTGTGGTGTTGCG | 19563 | ACCTAT | 19755 | ala2 |
| | CCACGGTGGAGATTTGTCAAATACACATCATTA | | CATTCA | | variant |
| | GGTTGCGACAAACGGCAGAAGCTGGAGGAGGA | | NNNNN | | |
| | AGGGCCTGAGTCCGAGCAGAAGAACCTGCAGG | | NNN | | |
| | ACCTATCATTCANNNNNNNNAAAGTTCTCCCAT | | | | |
| | CACATCAACCGGTGGCGCATTGCCACGAAGCA | | | | |
| | GGCCAATGGGGAGGACATCGATGTCACACAAC | | | | |
| | CAAATATAAGAATTGTTAGtaccgaagtcttagaaatcg | | | | |
| Var0022 | gtcagggaactccaggaggaGCCTTTATGCTGTGGTGTTG | 19564 | ACCTAT | 19756 | ala2 |
| | CGCCACGGTGGAGATTTGTCAAATACACATCAT | | CATTCA | | variant |
| | TAGGTTGCGACAAACGGCAGAAGCTGGAGGAG | | NNNNN | | |
| | GAAGGGCCTGAGTCCGAGCAGAAGAACCTGCA | | NNN | | |
| | GGACCTATCATTCANNNNNNNNAAAGTTCTCCC | | | | |
| | ATCACATCAACCGGTGGCGCATTGCCACGAAGC | | | | |
| | AGGCCAATGGGGAGGACATCGATGTCACACAA | | | | |
| | CCAAATATAAGAATTGTTAGtcctcctggagttccctgac | | | | |
| Var0023 | cgtgggccgcgcttgagccgGCCTTTATGCTGTGGTGTTG | 19565 | ACCTAT | 19757 | ala2 |
| | CGCCACGGTGGAGATTTGTCAAATACACATCAT | | CATTCA | | variant |
| | TAGGTTGCGACAAACGGCAGAAGCTGGAGGAG | | NNNNN | | |
| | GAAGGGCCTGAGTCCGAGCAGAAGAACCTGCA | | NNN | | |
| | GGACCTATCATTCANNNNNNNNAAAGTTCTCCC | | | | |
| | ATCACATCAACCGGTGGCGCATTGCCACGAAGC | | | | |
| | AGGCCAATGGGGAGGACATCGATGTCACACAA | | | | |
| | CCAAATATAAGAATTGTTAGcggctcaagcgcggcccacg | | | | |
| Var0024 | cggccgccggcgccggcgcgGCCTTTATGCTGTGGTGTTG | 19566 | ACCTAT | 19758 | ala2 |
| | CGCCACGGTGGAGATTTGTCAAATACACATCAT | | CATTCA | | variant |
| | TAGGTTGCGACAAACGGCAGAAGCTGGAGGAG | | NNNNN | | |
| | GAAGGGCCTGAGTCCGAGCAGAAGAACCTGCA | | NNN | | |
| | GGACCTATCATTCANNNNNNNNAAAGTTCTCCC | | | | |
| | ATCACATCAACCGGTGGCGCATTGCCACGAAGC | | | | |
| | AGGCCAATGGGGAGGACATCGATGTCACACAA | | | | |
| | CCAAATATAAGAATTGTTAGcgcgccggcgccggcggcc | | | | |
| | g | | | | |
| Var0025 | attaatatataaatttaattatataGCCTTTATGCTGTGGTGTTG | 19567 | ACCTAT | 19759 | ala2 |
| | CGCCACGGTGGAGATTTGTCAAATACACATCAT | | CATTCA | | variant |
| | TAGGTTGCGACAAACGGCAGAAGCTGGAGGAG | | NNNNN | | |
| | GAAGGGCCTGAGTCCGAGCAGAAGAACCTGCA | | NNN | | |
| | GGACCTATCATTCANNNNNNNNAAAGTTCTCCC | | | | |
| | ATCACATCAACCGGTGGCGCATTGCCACGAAGC | | | | |
| | AGGCCAATGGGGAGGACATCGATGTCACACAA | | | | |
| | CCAAATATAAGAATTGTTAGtatataattaaatttatatattaat | | | | |
| Var0026 | gttatactaataagaattatctgaaGCCTTTATGCTGTGGTGTT | 19568 | ACCTAT | 19760 | ala2 |
| | GCGCCACGGTGGAGATTTGTCAAATACACATCA | | CATTCA | | variant |
| | TTAGGTTGCGACAAACGGCAGAAGCTGGAGGA | | NNNNN | | |
| | GGAAGGGCCTGAGTCCGAGCAGAAGAACCTGC | | NNN | | |
| | AGGACCTATCATTCANNNNNNNNAAAGTTCTCC | | | | |
| | CATCACATCAACCGGTGGCGCATTGCCACGAAG | | | | |
| | CAGGCCAATGGGGAGGACATCGATGTCACACA | | | | |
| | ACCAAATATAAGAATTGTTAGttcagataattcttattagtat | | | | |
| | aac | | | | |
| Var0027 | ttaagatagaggcacttctagtgagGCCTTTATGCTGTGGTGT | 19569 | ACCTAT | 19761 | ala2 |
| | TGCGCCACGGTGGAGATTTGTCAAATACACATC | | CATTCA | | variant |
| | ATTAGGTTGCGACAAACGGCAGAAGCTGGAGG | | NNNNN | | |
| | AGGAAGGGCCTGAGTCCGAGCAGAAGAACCTG | | NNN | | |
| | CAGGACCTATCATTCANNNNNNNNAAAGTTCTC | | | | |
| | CCATCACATCAACCGGTGGCGCATTGCCACGAA | | | | |
| | GCAGGCCAATGGGGAGGACATCGATGTCACAC | | | | |
| | AACCAAATATAAGAATTGTTAGctcactagaagtgcctct | | | | |
| | atcttaa | | | | |
| Var0028 | caggcagcacgcacacagccgaaatGCCTTTATGCTGTGGTG | 19570 | ACCTAT | 19762 | ala2 |
| | TTGCGCCACGGTGGAGATTTGTCAAATACACAT | | CATTCA | | variant |
| | CATTAGGTTGCGACAAACGGCAGAAGCTGGAG | | NNNNN | | |
| | GAGGAAGGGCCTGAGTCCGAGCAGAAGAACCT | | NNN | | |
| | GCAGGACCTATCATTCANNNNNNNNAAAGTTCT | | | | |
| | CCCATCACATCAACCGGTGGCGCATTGCCACGA | | | | |
| | AGCAGGCCAATGGGGAGGACATCGATGTCACA | | | | |
| | CAACCAAATATAAGAATTGTTAGatttcggctgtgtgcgt | | | | |
| | gctgcctg | | | | |
| Var0029 | caccactggcgccgccagcaggcggGCCTTTATGCTGTGGTG | 19571 | ACCTAT | 19763 | ala2 |
| | TTGCGCCACGGTGGAGATTTGTCAAATACACAT | | CATTCA | | variant |
| | CATTAGGTTGCGACAAACGGCAGAAGCTGGAG | | NNNNN | | |
| | GAGGAAGGGCCTGAGTCCGAGCAGAAGAACCT | | NNN | | |
| | GCAGGACCTATCATTCANNNNNNNNAAAGTTCT | | | | |
| | CCCATCACATCAACCGGTGGCGCATTGCCACGA | | | | |
| | AGCAGGCCAATGGGGAGGACATCGATGTCACA | | | | |
| | CAACCAAATATAAGAATTGTTAGccgcctgctggcggc | | | | |
| | gccagtggtg | | | | |
| Var0030 | cgcggccgcgccgggcgcgcgcccgGCCTTTATGCTGTGGT | 19572 | ACCTAT | 19764 | ala2 |
| | GTTGCGCCACGGTGGAGATTTGTCAAATACACA | | CATTCA | | variant |
| | TCATTAGGTTGCGACAAACGGCAGAAGCTGGA | | NNNNN | | |
| | GGAGGAAGGGCCTGAGTCCGAGCAGAAGAACC | | NNN | | |
| | TGCAGGACCTATCATTCANNNNNNNNAAAGTTC | | | | |
| | TCCCATCACATCAACCGGTGGCGCATTGCCACG | | | | |
| | AAGCAGGCCAATGGGGAGGACATCGATGTCAC | | | | |
| | ACAACCAAATATAAGAATTGTTAGcgggcgcgcgccc | | | | |
| | ggcgcggccgcg | | | | |
| Var0031 | aataattattatataataatatattaataaGCCTTTATGCTGTGGTG | 19573 | ACCTAT | 19765 | ala2 |
| | TTGCGCCACGGTGGAGATTTGTCAAATACACAT | | CATTCA | | variant |
| | CATTAGGTTGCGACAAACGGCAGAAGCTGGAG | | NNNNN | | |
| | GAGGAAGGGCCTGAGTCCGAGCAGAAGAACCT | | NNN | | |
| | GCAGGACCTATCATTCANNNNNNNNAAAGTTCT | | | | |
| | CCCATCACATCAACCGGTGGCGCATTGCCACGA | | | | |
| | AGCAGGCCAATGGGGAGGACATCGATGTCACA | | | | |
| | CAACCAAATATAAGAATTGTTAGttattaatatattattatat | | | | |
| | aataattatt | | | | |
| Var0032 | aataatataatcccttagtctattagtttaGCCTTTATGCTGTGGTG | 19574 | ACCTAT | 19766 | ala2 |
| | TTGCGCCACGGTGGAGATTTGTCAAATACACAT | | CATTCA | | variant |
| | CATTAGGTTGCGACAAACGGCAGAAGCTGGAG | | NNNNN | | |
| | GAGGAAGGGCCTGAGTCCGAGCAGAAGAACCT | | NNN | | |
| | GCAGGACCTATCATTCANNNNNNNNAAAGTTCT | | | | |
| | CCCATCACATCAACCGGTGGCGCATTGCCACGA | | | | |
| | AGCAGGCCAATGGGGAGGACATCGATGTCACA | | | | |
| | CAACCAAATATAAGAATTGTTAGtaaactaatagactaa | | | | |
| | gggattatattatt | | | | |
| Var0033 | taatttacaggacagggactttactcgatcGCCTTTATGCTGTGGT | 19575 | ACCTAT | 19767 | ala2 |
| | GTTGCGCCACGGTGGAGATTTGTCAAATACACA | | CATTCA | | variant |
| | TCATTAGGTTGCGACAAACGGCAGAAGCTGGA | | NNNNN | | |
| | GGAGGAAGGGCCTGAGTCCGAGCAGAAGAACC | | NNN | | |
| | TGCAGGACCTATCATTCANNNNNNNNAAAGTTC | | | | |
| | TCCCATCACATCAACCGGTGGCGCATTGCCACG | | | | |
| | AAGCAGGCCAATGGGGAGGACATCGATGTCAC | | | | |
| | ACAACCAAATATAAGAATTGTTAGgatcgagtaaagtc | | | | |
| | cctgtcctgtaaatta | | | | |
| Var0034 | tatctggcaacggccagagagagcgcctgaGCCTTTATGCTGTG | 19576 | ACCTAT | 19768 | ala2 |
| | GTGTTGCGCCACGGTGGAGATTTGTCAAATACA | | CATTCA | | variant |
| | CATCATTAGGTTGCGACAAACGGCAGAAGCTG | | NNNNN | | |
| | GAGGAGGAAGGGCCTGAGTCCGAGCAGAAGAA | | NNN | | |
| | CCTGCAGGACCTATCATTCANNNNNNNNAAAG | | | | |
| | TTCTCCCATCACATCAACCGGTGGCGCATTGCC | | | | |
| | ACGAAGCAGGCCAATGGGGAGGACATCGATGT | | | | |
| | CACACAACCAAATATAAGAATTGTTAGtcaggcgct | | | | |
| | ctctctggccgttgccagata | | | | |
| Var0035 | gccgtcccgcgcggcctgcccaaacgccctGCCTTTATGCTGTG | 19577 | ACCTAT | 19769 | ala2 |
| | GTGTTGCGCCACGGTGGAGATTTGTCAAATACA | | CATTCA | | variant |
| | CATCATTAGGTTGCGACAAACGGCAGAAGCTG | | NNNNN | | |
| | GAGGAGGAAGGGCCTGAGTCCGAGCAGAAGAA | | NNN | | |
| | CCTGCAGGACCTATCATTCANNNNNNNNAAAG | | | | |
| | TTCTCCCATCACATCAACCGGTGGCGCATTGCC | | | | |
| | ACGAAGCAGGCCAATGGGGAGGACATCGATGT | | | | |
| | CACACAACCAAATATAAGAATTGTTAGagggcgttt | | | | |
| | gggcaggccgcgcgggacggc | | | | |
| Var0036 | cgccgccggccgggcgcgggcgccggcggcGCCTTTATGCTGT | 19578 | ACCTAT | 19770 | ala2 |
| | GGTGTTGCGCCACGGTGGAGATTTGTCAAATAC | | CATTCA | | variant |
| | ACATCATTAGGTTGCGACAAACGGCAGAAGCT | | NNNNN | | |
| | GGAGGAGGAAGGGCCTGAGTCCGAGCAGAAGA | | NNN | | |
| | ACCTGCAGGACCTATCATTCANNNNNNNNAAA | | | | |
| | GTTCTCCCATCACATCAACCGGTGGCGCATTGC | | | | |
| | CACGAAGCAGGCCAATGGGGAGGACATCGATG | | | | |
| | TCACACAACCAAATATAAGAATTGTTAGgccgccg | | | | |
| | gcgcccgcgcccggccggcggcg | | | | |
| Var0037 | aatatatataaatattaataataatattaataaatGCCTTTATGCTGTG | 19579 | ACCTAT | 19771 | ala2 |
| | GTGTTGCGCCACGGTGGAGATTTGTCAAATACA | | CATTCA | | variant |
| | CATCATTAGGTTGCGACAAACGGCAGAAGCTG | | NNNNN | | |
| | GAGGAGGAAGGGCCTGAGTCCGAGCAGAAGAA | | NNN | | |
| | CCTGCAGGACCTATCATTCANNNNNNNNAAAG | | | | |
| | TTCTCCCATCACATCAACCGGTGGCGCATTGCC | | | | |
| | ACGAAGCAGGCCAATGGGGAGGACATCGATGT | | | | |
| | CACACAACCAAATATAAGAATTGTTAGatttattaatat | | | | |
| | tattattaatatttatatatatt | | | | |
| Var0038 | ttaatatctaacaattattgaagttgctttatttcGCCTTTATGCTGTG | 19580 | ACCTAT | 19772 | ala2 |
| | GTGTTGCGCCACGGTGGAGATTTGTCAAATACA | | CATTCA | | variant |
| | CATCATTAGGTTGCGACAAACGGCAGAAGCTG | | NNNNN | | |
| | GAGGAGGAAGGGCCTGAGTCCGAGCAGAAGAA | | NNN | | |
| | CCTGCAGGACCTATCATTCANNNNNNNNAAAG | | | | |
| | TTCTCCCATCACATCAACCGGTGGCGCATTGCC | | | | |
| | ACGAAGCAGGCCAATGGGGAGGACATCGATGT | | | | |
| | CACACAACCAAATATAAGAATTGTTAGgaaataaag | | | | |
| | caacttcaataattgttagatattaa | | | | |
| Var0039 | cagttatagcgcgaactagtttgacctgatttgtaGCCTTTATGCTGT | 19581 | ACCTAT | 19773 | ala2 |
| | GGTGTTGCGCCACGGTGGAGATTTGTCAAATAC | | CATTCA | | variant |
| | ACATCATTAGGTTGCGACAAACGGCAGAAGCT | | NNNNN | | |
| | GGAGGAGGAAGGGCCTGAGTCCGAGCAGAAGA | | NNN | | |
| | ACCTGCAGGACCTATCATTCANNNNNNNNAAA | | | | |
| | GTTCTCCCATCACATCAACCGGTGGCGCATTGC | | | | |
| | CACGAAGCAGGCCAATGGGGAGGACATCGATG | | | | |
| | TCACACAACCAAATATAAGAATTGTTAGtacaaatc | | | | |
| | aggtcaaactagttcgcgctataactg | | | | |
| Var0040 | atagactggccgcccgtaggaacttgaggacgcacGCCTTTATGCT | 19582 | ACCTAT | 19774 | ala2 |
| | GTGGTGTTGCGCCACGGTGGAGATTTGTCAAAT | | CATTCA | | variant |
| | ACACATCATTAGGTTGCGACAAACGGCAGAAG | | NNNNN | | |
| | CTGGAGGAGGAAGGGCCTGAGTCCGAGCAGAA | | NNN | | |
| | GAACCTGCAGGACCTATCATTCANNNNNNNNA | | | | |
| | AAGTTCTCCCATCACATCAACCGGTGGCGCATT | | | | |
| | GCCACGAAGCAGGCCAATGGGGAGGACATCGA | | | | |
| | TGTCACACAACCAAATATAAGAATTGTTAGgtgcg | | | | |
| | tcctcaagttcctacgggggccagtctat | | | | |
| Var0041 | gcgagcgcgaggacgccacgagcacgcgccctgccGCCTTTATGC | 19583 | ACCTAT | 19775 | ala2 |
| | TGTGGTGTTGCGCCACGGTGGAGATTTGTCAAA | | CATTCA | | variant |
| | TACACATCATTAGGTTGCGACAAACGGCAGAA | | NNNNN | | |
| | GCTGGAGGAGGAAGGGCCTGAGTCCGAGCAGA | | NNN | | |
| | AGAACCTGCAGGACCTATCATTCANNNNNNNN | | | | |
| | AAAGTTCTCCCATCACATCAACCGGTGGCGCAT | | | | |
| | TGCCACGAAGCAGGCCAATGGGGAGGACATCG | | | | |
| | ATGTCACACAACCAAATATAAGAATTGTTAGggc | | | | |
| | agggcgcgtgctcgtggcgtcctcgcgctcgc | | | | |
| Var0042 | cggccggcgcccgggccggggggcccgcgggcggGCCTTTATG | 19584 | ACCTAT | 19776 | ala2 |
| | CTGTGGTGTTGCGCCACGGTGGAGATTTGTCAA | | CATTCA | | variant |
| | ATACACATCATTAGGTTGCGACAAACGGCAGA | | NNNNN | | |
| | AGCTGGAGGAGGAAGGGCCTGAGTCCGAGCAG | | NNN | | |
| | AAGAACCTGCAGGACCTATCATTCANNNNNNN | | | | |
| | NAAAGTTCTCCCATCACATCAACCGGTGGCGCA | | | | |
| | TTGCCACGAAGCAGGCCAATGGGGAGGACATC | | | | |
| | GATGTCACACAACCAAATATAAGAATTGTTAGc | | | | |
| | cgcccgcgggcccgcccggcccgggcgccggccg | | | | |
| Var0043 | catagagGCCTTTATGCTGTGGTGTTGCGCCACGGT | 19585 | ACCTAT | 19777 | ala2 |
| | GGAGATTTGTCAAATACACATCATTAGGTTGCG | | CATTCA | | variant |
| | ACAAACGGCAGAAGCTGGAGGAGGAAGGGCCT | | NNNNN | | |
| | GAGTCCGAGCAGAAGAACCTGCAGGACCTATC | | NNN | | |
| | ATTCANNNNNNNNAAAGTTCTCCCATCACATCA | | | | |
| | ACCGGTGGCGCATTGCCACGAAGCAGGCCAAT | | | | |
| | GGGGAGGACATCGATGTCACACAACCAAATAT | | | | |
| | AAGAATTGTTAGctctatg | | | | |
| Var0044 | CATAGATTTCTTGGCCTTTATGCTGTGGTGTTGC | 19586 | ACCTAT | 19778 | msD |
| | GCCACGGTGGAGATTTGTCAAATACACATCATT | | CATTCA | | stem |
| | AggttgcgcgcaattcgctacgctaccaatactgtgACAAACGGCA | | NNNNN | | variant |
| | GAAGCTGGAGGAGGAAGGGCCTGAGTCCGAGC | | NNN | | |
| | AGAAGAACCTGCAGGACCTATCATTCANNNNN | | | | |
| | NNNAAAGTTCTCCCATCACATCAACCGGTGGCG | | | | |
| | CATTGCCACGAAGCAGGCCAATGGGGAGGACA | | | | |
| | TCGATGTCAcacagtattggtgctacgctgaagtgtcacaaccAAA | | | | |
| | TATAAGAATTGTTAGCAAGAAATCTATG | | | | |
| Var0045 | CATAGATTTCTTGGCCTTTATGCTGTGGTGTTGC | 19587 | ACCTAT | 19779 | msD |
| | GCCACGGTGGAGATTTGTCAAATACACATCATT | | CATTCA | | stem |
| | AggttgcgcgcaattcgctacgctaccaataACAAACGGCAGAA | | NNNNN | | variant |
| | GCTGGAGGAGGAAGGGCCTGAGTCCGAGCAGA | | NNN | | |
| | AGAACCTGCAGGACCTATCATTCANNNNNNNN | | | | |
| | AAAGTTCTCCCATCACATCAACCGGTGGCGCAT | | | | |
| | TGCCACGAAGCAGGCCAATGGGGAGGACATCG | | | | |
| | ATGTCAtattggtgctacgctgaagtgtcacaaccAAATATAAG | | | | |
| | AATTGTTAGCAAGAAATCTATG | | | | |
| Var0046 | CATAGATTTCTTGGCCTTTATGCTGTGGTGTTGC | 19588 | ACCTAT | 19780 | msD |
| | GCCACGGTGGAGATTTGTCAAATACACATCATT | | CATTCA | | stem |
| | AggttgcgcgcaattcgctacgctacACAAACGGCAGAAGCT | | NNNNN | | variant |
| | GGAGGAGGAAGGGCCTGAGTCCGAGCAGAAGA | | NNN | | |
| | ACCTGCAGGACCTATCATTCANNNNNNNNAAA | | | | |
| | GTTCTCCCATCACATCAACCGGTGGCGCATTGC | | | | |
| | CACGAAGCAGGCCAATGGGGAGGACATCGATG | | | | |
| | TCAgtgctacgctgaagtgtcacaaccAAATATAAGAATTGT | | | | |
| | TAGCAAGAAATCTATG | | | | |
| Var0047 | CATAGATTTCTTGGCCTTTATGCTGTGGTGTTGC | 19589 | ACCTAT | 19781 | msD |
| | GCCACGGTGGAGATTTGTCAAATACACATCATT | | CATTCA | | stem |
| | AggttgcgcgcaattcgctacACAAACGGCAGAAGCTGGA | | NNNNN | | variant |
| | GGAGGAAGGGCCTGAGTCCGAGCAGAAGAACC | | NNN | | |
| | TGCAGGACCTATCATTCANNNNNNNNAAAGTTC | | | | |
| | TCCCATCACATCAACCGGTGGCGCATTGCCACG | | | | |
| | AAGCAGGCCAATGGGGAGGACATCGATGTCAta | | | | |
| | cgctgaagtgtcacaaccAAATATAAGAATTGTTAGCAA | | | | |
| | GAAATCTATG | | | | |
| Var0048 | CATAGATTTCTTGGCCTTTATGCTGTGGTGTTGC | 19590 | ACCTAT | 19782 | msD |
| | GCCACGGTGGAGATTTGTCAAATACACATCATT | | CATTCA | | stem |
| | AggttgcgcgcaattcACAAACGGCAGAAGCTGGAGGA | | NNNNN | | variant |
| | GGAAGGGCCTGAGTCCGAGCAGAAGAACCTGC | | NNN | | |
| | AGGACCTATCATTCANNNNNNNNAAAGTTCTCC | | | | |
| | CATCACATCAACCGGTGGCGCATTGCCACGAAG | | | | |
| | CAGGCCAATGGGGAGGACATCGATGTCAgaagtgt | | | | |
| | cacaaccAAATATAAGAATTGTTAGCAAGAAATCT | | | | |
| | ATG | | | | |
| Var0049 | CATAGATTTCTTGGCCTTTATGCTGTGGTGTTGC | 19591 | ACCTAT | 19783 | msD |
| | GCCACGGTGGAGATTTGTCAAATACACATCATT | | CATTCA | | stem |
| | AggttgcgcgcACAAACGGCAGAAGCTGGAGGAGG | | NNNNN | | variant |
| | AAGGGCCTGAGTCCGAGCAGAAGAACCTGCAG | | NNN | | |
| | GACCTATCATTCANNNNNNNNAAAGTTCTCCCA | | | | |
| | TCACATCAACCGGTGGCGCATTGCCACGAAGCA | | | | |
| | GGCCAATGGGGAGGACATCGATGTCAgtgtcacaacc | | | | |
| | AAATATAAGAATTGTTAGCAAGAAATCTATG | | | | |
| Var0050 | CATAGATTTCTTGGCCTTTATGCTGTGGTGTTGC | 19592 | ACCTAT | 19784 | msD |
| | GCCACGGTGGAGATTTGTCAAATACACATCATT | | CATTCA | | stem |
| | AggttgACAAACGGCAGAAGCTGGAGGAGGAAGG | | NNNNN | | variant |
| | GCCTGAGTCCGAGCAGAAGAACCTGCAGGACC | | NNN | | |
| | TATCATTCANNNNNNNNAAAGTTCTCCCATCAC | | | | |
| | ATCAACCGGTGGCGCATTGCCACGAAGCAGGC | | | | |
| | CAATGGGGAGGACATCGATGTCAcaaccAAATAT | | | | |
| | AAGAATTGTTAGCAAGAAATCTATG | | | | |
| Var0051 | CATAGATTTCTTGGCCTTTATGCTGTGGTGTTGC | 19593 | ACCTAT | 19785 | msD |
| | GCCACGGTGGAGATTTGTCAAATACACATCATT | | CATTCA | | stem |
| | AtataaACAAACGGCAGAAGCTGGAGGAGGAAGG | | NNNNN | | variant |
| | GCCTGAGTCCGAGCAGAAGAACCTGCAGGACC | | NNN | | |
| | TATCATTCANNNNNNNNAAAGTTCTCCCATCAC | | | | |
| | ATCAACCGGTGGCGCATTGCCACGAAGCAGGC | | | | |
| | CAATGGGGAGGACATCGATGTCAttataAAATATA | | | | |
| | AGAATTGTTAGCAAGAAATCTATG | | | | |
| Var0052 | CATAGATTTCTTGGCCTTTATGCTGTGGTGTTGC | 19594 | ACCTAT | 19786 | msD |
| | GCCACGGTGGAGATTTGTCAAATACACATCATT | | CATTCA | | stem |
| | AtgataACAAACGGCAGAAGCTGGAGGAGGAAGG | | NNNNN | | variant |
| | GCCTGAGTCCGAGCAGAAGAACCTGCAGGACC | | NNN | | |
| | TATCATTCANNNNNNNNAAAGTTCTCCCATCAC | | | | |
| | ATCAACCGGTGGCGCATTGCCACGAAGCAGGC | | | | |
| | CAATGGGGAGGACATCGATGTCAtatcaAAATATA | | | | |
| | AGAATTGTTAGCAAGAAATCTATG | | | | |
| Var0053 | CATAGATTTCTTGGCCTTTATGCTGTGGTGTTGC | 19595 | ACCTAT | 19787 | msD |
| | GCCACGGTGGAGATTTGTCAAATACACATCATT | | CATTCA | | stem |
| | AtctacACAAACGGCAGAAGCTGGAGGAGGAAGG | | NNNNN | | variant |
| | GCCTGAGTCCGAGCAGAAGAACCTGCAGGACC | | NNN | | |
| | TATCATTCANNNNNNNNAAAGTTCTCCCATCAC | | | | |
| | ATCAACCGGTGGCGCATTGCCACGAAGCAGGC | | | | |
| | CAATGGGGAGGACATCGATGTCAgtagaAAATAT | | | | |
| | AAGAATTGTTAGCAAGAAATCTATG | | | | |
| Var0054 | CATAGATTTCTTGGCCTTTATGCTGTGGTGTTGC | 19596 | ACCTAT | 19788 | msD |
| | GCCACGGTGGAGATTTGTCAAATACACATCATT | | CATTCA | | stem |
| | AgatccACAAACGGCAGAAGCTGGAGGAGGAAGG | | NNNNN | | variant |
| | GCCTGAGTCCGAGCAGAAGAACCTGCAGGACC | | NNN | | |
| | TATCATTCANNNNNNNNAAAGTTCTCCCATCAC | | | | |
| | ATCAACCGGTGGCGCATTGCCACGAAGCAGGC | | | | |
| | CAATGGGGAGGACATCGATGTCAggatcAAATAT | | | | |
| | AAGAATTGTTAGCAAGAAATCTATG | | | | |
| Var0055 | CATAGATTTCTTGGCCTTTATGCTGTGGTGTTGC | 19597 | ACCTAT | 19789 | msD |
| | GCCACGGTGGAGATTTGTCAAATACACATCATT | | CATTCA | | stem |
| | AacgcgACAAACGGCAGAAGCTGGAGGAGGAAG | | NNNNN | | variant |
| | GGCCTGAGTCCGAGCAGAAGAACCTGCAGGAC | | NNN | | |
| | CTATCATTCANNNNNNNNAAAGTTCTCCCATCA | | | | |
| | CATCAACCGGTGGCGCATTGCCACGAAGCAGG | | | | |
| | CCAATGGGGAGGACATCGATGTCAcgcgtAAATA | | | | |
| | TAAGAATTGTTAGCAAGAAATCTATG | | | | |
| Var0056 | CATAGATTTCTTGGCCTTTATGCTGTGGTGTTGC | 19598 | ACCTAT | 19790 | msD |
| | GCCACGGTGGAGATTTGTCAAATACACATCATT | | CATTCA | | stem |
| | AcgcgcACAAACGGCAGAAGCTGGAGGAGGAAG | | NNNNN | | variant |
| | GGCCTGAGTCCGAGCAGAAGAACCTGCAGGAC | | NNN | | |
| | CTATCATTCANNNNNNNNAAAGTTCTCCCATCA | | | | |
| | CATCAACCGGTGGCGCATTGCCACGAAGCAGG | | | | |
| | CCAATGGGGAGGACATCGATGTCAgcgcgAAATA | | | | |
| | TAAGAATTGTTAGCAAGAAATCTATG | | | | |
| Var0057 | CATAGATTTCTTGGCCTTTATGCTGTGGTGTTGC | 19599 | ACCTAT | 19791 | msD |
| | GCCACGGTGGAGATTTGTCAAATACACATCATT | | CATTCA | | stem |
| | AtattaaatttACAAACGGCAGAAGCTGGAGGAGGAA | | NNNNN | | variant |
| | GGGCCTGAGTCCGAGCAGAAGAACCTGCAGGA | | NNN | | |
| | CCTATCATTCANNNNNNNNAAAGTTCTCCCATC | | | | |
| | ACATCAACCGGTGGCGCATTGCCACGAAGCAG | | | | |
| | GCCAATGGGGAGGACATCGATGTCAaaatttaataAA | | | | |
| | ATATAAGAATTGTTAGCAAGAAATCTATG | | | | |
| Var0058 | CATAGATTTCTTGGCCTTTATGCTGTGGTGTTGC | 19600 | ACCTAT | 19792 | msD |
| | GCCACGGTGGAGATTTGTCAAATACACATCATT | | CATTCA | | stem |
| | AtataatacgaACAAACGGCAGAAGCTGGAGGAGGA | | NNNNN | | variant |
| | AGGGCCTGAGTCCGAGCAGAAGAACCTGCAGG | | NNN | | |
| | ACCTATCATTCANNNNNNNNAAAGTTCTCCCAT | | | | |
| | CACATCAACCGGTGGCGCATTGCCACGAAGCA | | | | |
| | GGCCAATGGGGAGGACATCGATGTCAtcgtattataA | | | | |
| | AATATAAGAATTGTTAGCAAGAAATCTATG | | | | |
| Var0059 | CATAGATTTCTTGGCCTTTATGCTGTGGTGTTGC | 19601 | ACCTAT | 19793 | msD |
| | GCCACGGTGGAGATTTGTCAAATACACATCATT | | CATTCA | | stem |
| | AttctgccaatACAAACGGCAGAAGCTGGAGGAGGA | | NNNNN | | variant |
| | AGGGCCTGAGTCCGAGCAGAAGAACCTGCAGG | | NNN | | |
| | ACCTATCATTCANNNNNNNNAAAGTTCTCCCAT | | | | |
| | CACATCAACCGGTGGCGCATTGCCACGAAGCA | | | | |
| | GGCCAATGGGGAGGACATCGATGTCAattggcagaa | | | | |
| | AAATATAAGAATTGTTAGCAAGAAATCTATG | | | | |
| Var0060 | CATAGATTTCTTGGCCTTTATGCTGTGGTGTTGC | 19602 | ACCTAT | 19794 | msD |
| | GCCACGGTGGAGATTTGTCAAATACACATCATT | | CATTCA | | stem |
| | AtctcctcgagACAAACGGCAGAAGCTGGAGGAGGA | | NNNNN | | variant |
| | AGGGCCTGAGTCCGAGCAGAAGAACCTGCAGG | | NNN | | |
| | ACCTATCATTCANNNNNNNNAAAGTTCTCCCAT | | | | |
| | CACATCAACCGGTGGCGCATTGCCACGAAGCA | | | | |
| | GGCCAATGGGGAGGACATCGATGTCActcgaggaga | | | | |
| | AAATATAAGAATTGTTAGCAAGAAATCTATG | | | | |
| Var0061 | CATAGATTTCTTGGCCTTTATGCTGTGGTGTTGC | 19603 | ACCTAT | 19795 | msD |
| | GCCACGGTGGAGATTTGTCAAATACACATCATT | | CATTCA | | stem |
| | AccgggttcgcACAAACGGCAGAAGCTGGAGGAGG | | NNNNN | | variant |
| | AAGGGCCTGAGTCCGAGCAGAAGAACCTGCAG | | NNN | | |
| | GACCTATCATTCANNNNNNNNAAAGTTCTCCCA | | | | |
| | TCACATCAACCGGTGGCGCATTGCCACGAAGCA | | | | |
| | GGCCAATGGGGAGGACATCGATGTCAgcgaacccgg | | | | |
| | AAATATAAGAATTGTTAGCAAGAAATCTATG | | | | |
| Var0062 | CATAGATTTCTTGGCCTTTATGCTGTGGTGTTGC | 19604 | ACCTAT | 19796 | msD |
| | GCCACGGTGGAGATTTGTCAAATACACATCATT | | CATTCA | | stem |
| | AggccgggcccACAAACGGCAGAAGCTGGAGGAGG | | NNNNN | | variant |
| | AAGGGCCTGAGTCCGAGCAGAAGAACCTGCAG | | NNN | | |
| | GACCTATCATTCANNNNNNNNAAAGTTCTCCCA | | | | |
| | TCACATCAACCGGTGGCGCATTGCCACGAAGCA | | | | |
| | GGCCAATGGGGAGGACATCGATGTCAgggcccggc | | | | |
| | cAAATATAAGAATTGTTAGCAAGAAATCTATG | | | | |
| Var0063 | CATAGATTTCTTGGCCTTTATGCTGTGGTGTTGC | 19605 | ACCTAT | 19797 | msL |
| | GCCACGGTGGAGATTTGTCAAATACACATCATT | | CATTCA | | stem |
| | AaaatttaattataaaACAAACGGCAGAAGCTGGAGGAG | | NNNNN | | variant |
| | GAAGGGCCTGAGTCCGAGCAGAAGAACCTGCA | | NNN | | |
| | GGACCTATCATTCANNNNNNNNAAAGTTCTCCC | | | | |
| | ATCACATCAACCGGTGGCGCATTGCCACGAAGC | | | | |
| | AGGCCAATGGGGAGGACATCGATGTCAtttataattaa | | | | |
| | atttAAATATAAGAATTGTTAGCAAGAAATCTATG | | | | |
| Var0064 | CATAGATTTCTTGGCCTTTATGCTGTGGTGTTGC | 19606 | ACCTAT | 19798 | msD |
| | GCCACGGTGGAGATTTGTCAAATACACATCATT | | CATTCA | | stem |
| | AatattctattacttgACAAACGGCAGAAGCTGGAGGAG | | NNNNN | | variant |
| | GAAGGGCCTGAGTCCGAGCAGAAGAACCTGCA | | NNN | | |
| | GGACCTATCATTCANNNNNNNNAAAGTTCTCCC | | | | |
| | ATCACATCAACCGGTGGCGCATTGCCACGAAGC | | | | |
| | AGGCCAATGGGGAGGACATCGATGTCAcaagtaata | | | | |
| | gaatatAAATATAAGAATTGTTAGCAAGAAATCTA | | | | |
| | TG | | | | |
| Var0065 | CATAGATTTCTTGGCCTTTATGCTGTGGTGTTGC | 19607 | ACCTAT | 19799 | msD |
| | GCCACGGTGGAGATTTGTCAAATACACATCATT | | CATTCA | | stem |
| | AgcgtatagtaatctgACAAACGGCAGAAGCTGGAGGA | | NNNNN | | variant |
| | GGAAGGGCCTGAGTCCGAGCAGAAGAACCTGC | | NNN | | |
| | AGGACCTATCATTCANNNNNNNNAAAGTTCTCC | | | | |
| | CATCACATCAACCGGTGGCGCATTGCCACGAAG | | | | |
| | CAGGCCAATGGGGAGGACATCGATGTCAcagattac | | | | |
| | tatacgcAAATATAAGAATTGTTAGCAAGAAATCT | | | | |
| | ATG | | | | |
| Var0066 | CATAGATTTCTTGGCCTTTATGCTGTGGTGTTGC | 19608 | ACCTAT | 19800 | msD |
| | GCCACGGTGGAGATTTGTCAAATACACATCATT | | CATTCA | | stem |
| | AaacgcgaaacgctggACAAACGGCAGAAGCTGGAGG | | NNNNN | | variant |
| | AGGAAGGGCCTGAGTCCGAGCAGAAGAACCTG | | NNN | | |
| | CAGGACCTATCATTCANNNNNNNNAAAGTTCTC | | | | |
| | CCATCACATCAACCGGTGGCGCATTGCCACGAA | | | | |
| | GCAGGCCAATGGGGAGGACATCGATGTCAccagc | | | | |
| | gtttcgcgttAAATATAAGAATTGTTAGCAAGAAATC | | | | |
| | TATG | | | | |
| Var0067 | CATAGATTTCTTGGCCTTTATGCTGTGGTGTTGC | 19609 | ACCTAT | 19801 | msD |
| | GCCACGGTGGAGATTTGTCAAATACACATCATT | | CATTCA | | stem |
| | AgaggcgggtgccgcaACAAACGGCAGAAGCTGGAGG | | NNNNN | | variant |
| | AGGAAGGGCCTGAGTCCGAGCAGAAGAACCTG | | NNN | | |
| | CAGGACCTATCATTCANNNNNNNNAAAGTTCTC | | | | |
| | CCATCACATCAACCGGTGGCGCATTGCCACGAA | | | | |
| | GCAGGCCAATGGGGAGGACATCGATGTCAtgcgg | | | | |
| | cacccgcctcAAATATAAGAATTGTTAGCAAGAAAT | | | | |
| | CTATG | | | | |
| Var0068 | CATAGATTTCTTGGCCTTTATGCTGTGGTGTTGC | 19610 | ACCTAT | 19802 | msD |
| | GCCACGGTGGAGATTTGTCAAATACACATCATT | | CATTCA | | stem |
| | AgcggccgcggggggACAAACGGCAGAAGCTGGAG | | NNNNN | | variant |
| | GAGGAAGGGCCTGAGTCCGAGCAGAAGAACCT | | NNN | | |
| | GCAGGACCTATCATTCANNNNNNNNAAAGTTCT | | | | |
| | CCCATCACATCAACCGGTGGCGCATTGCCACGA | | | | |
| | AGCAGGCCAATGGGGAGGACATCGATGTCAcccg | | | | |
| | cccgcggccgcAAATATAAGAATTGTTAGCAAGAAA | | | | |
| | TCTATG | | | | |
| Var0069 | CATAGATTTCTTGGCCTTTATGCTGTGGTGTTGC | 19611 | ACCTAT | 19803 | msD |
| | GCCACGGTGGAGATTTGTCAAATACACATCATT | | CATTCA | | stem |
| | AaatattatattaaatattatACAAACGGCAGAAGCTGGAG | | NNNNN | | variant |
| | GAGGAAGGGCCTGAGTCCGAGCAGAAGAACCT | | NNN | | |
| | GCAGGACCTATCATTCANNNNNNNNAAAGTTCT | | | | |
| | CCCATCACATCAACCGGTGGCGCATTGCCACGA | | | | |
| | AGCAGGCCAATGGGGAGGACATCGATGTCAataa | | | | |
| | tatttaatataatattAAATATAAGAATTGTTAGCAAGAA | | | | |
| | ATCTATG | | | | |
| Var0070 | CATAGATTTCTTGGCCTTTATGCTGTGGTGTTGC | 19612 | ACCTAT | 19804 | msD |
| | GCCACGGTGGAGATTTGTCAAATACACATCATT | | CATTCA | | stem |
| | AgaacaaactaaatataaatcACAAACGGCAGAAGCTGGA | | NNNNN | | variant |
| | GGAGGAAGGGCCTGAGTCCGAGCAGAAGAACC | | NNN | | |
| | TGCAGGACCTATCATTCANNNNNNNNAAAGTTC | | | | |
| | TCCCATCACATCAACCGGTGGCGCATTGCCACG | | | | |
| | AAGCAGGCCAATGGGGAGGACATCGATGTCAga | | | | |
| | tttatatttagtttgttcAAATATAAGAATTGTTAGCAAGAA | | | | |
| | ATCTATG | | | | |
| Var0071 | CATAGATTTCTTGGCCTTTATGCTGTGGTGTTGC | 19613 | ACCTAT | 19805 | msD |
| | GCCACGGTGGAGATTTGTCAAATACACATCATT | | CATTCA | | stem |
| | AcgatttctaagacttcggtaACAAACGGCAGAAGCTGGA | | NNNNN | | variant |
| | GGAGGAAGGGCCTGAGTCCGAGCAGAAGAACC | | NNN | | |
| | TGCAGGACCTATCATTCANNNNNNNNAAAGTTC | | | | |
| | TCCCATCACATCAACCGGTGGCGCATTGCCACG | | | | |
| | AAGCAGGCCAATGGGGAGGACATCGATGTCAta | | | | |
| | ccgaagtcttagaaatcgAAATATAAGAATTGTTAGCAAG | | | | |
| | AAATCTATG | | | | |
| Var0072 | CATAGATTTCTTGGCCTTTATGCTGTGGTGTTGC | 19614 | ACCTAT | 19806 | msD |
| | GCCACGGTGGAGATTTGTCAAATACACATCATT | | CATTCA | | stem |
| | AgtcagggaactccaggaggaACAAACGGCAGAAGCTGG | | NNNNN | | variant |
| | AGGAGGAAGGGCCTGAGTCCGAGCAGAAGAAC | | NNN | | |
| | CTGCAGGACCTATCATTCANNNNNNNNAAAGTT | | | | |
| | CTCCCATCACATCAACCGGTGGCGCATTGCCAC | | | | |
| | GAAGCAGGCCAATGGGGAGGACATCGATGTCAt | | | | |
| | cctcctggagttccctgacAAATATAAGAATTGTTAGCAA | | | | |
| | GAAATCTATG | | | | |
| Var0073 | CATAGATTTCTTGGCCTTTATGCTGTGGTGTTGC | 19615 | ACCTAT | 19807 | msD |
| | GCCACGGTGGAGATTTGTCAAATACACATCATT | | CATTCA | | stem |
| | AcgtgggccgcgcttgagccgACAAACGGCAGAAGCTGG | | NNNNN | | variant |
| | AGGAGGAAGGGCCTGAGTCCGAGCAGAAGAAC | | NNN | | |
| | CTGCAGGACCTATCATTCANNNNNNNNAAAGTT | | | | |
| | CTCCCATCACATCAACCGGTGGCGCATTGCCAC | | | | |
| | GAAGCAGGCCAATGGGGAGGACATCGATGTCA | | | | |
| | cggctcaagcgcggcccacgAAATATAAGAATTGTTAGC | | | | |
| | AAGAAATCTATG | | | | |
| Var0074 | CATAGATTTCTTGGCCTTTATGCTGTGGTGTTGC | 19616 | ACCTAT | 19808 | msD |
| | GCCACGGTGGAGATTTGTCAAATACACATCATT | | CATTCA | | stem |
| | AcggccgccggcgccggcgcgACAAACGGCAGAAGCTG | | NNNNN | | variant |
| | GAGGAGGAAGGGCCTGAGTCCGAGCAGAAGAA | | NNN | | |
| | CCTGCAGGACCTATCATTCANNNNNNNNAAAG | | | | |
| | TTCTCCCATCACATCAACCGGTGGCGCATTGCC | | | | |
| | ACGAAGCAGGCCAATGGGGAGGACATCGATGT | | | | |
| | CAcgcgccggcgccggcggccgAAATATAAGAATTGTTA | | | | |
| | GCAAGAAATCTATG | | | | |
| Var0075 | CATAGATTTCTTGGCCTTTATGCTGTGGTGTTGC | 19617 | ACCTAT | 19809 | msD |
| | GCCACGGTGGAGATTTGTCAAATACACATCATT | | CATTCA | | stem |
| | AattaatatataaatttaattatataACAAACGGCAGAAGCTGG | | NNNNN | | variant |
| | AGGAGGAAGGGCCTGAGTCCGAGCAGAAGAAC | | NNN | | |
| | CTGCAGGACCTATCATTCANNNNNNNNAAAGTT | | | | |
| | CTCCCATCACATCAACCGGTGGCGCATTGCCAC | | | | |
| | GAAGCAGGCCAATGGGGAGGACATCGATGTCAt | | | | |
| | atataattaaatttatatattaatAAATATAAGAATTGTTAGCA | | | | |
| | AGAAATCTATG | | | | |
| Var0076 | CATAGATTTCTTGGCCTTTATGCTGTGGTGTTGC | 19618 | ACCTAT | 19810 | msD |
| | GCCACGGTGGAGATTTGTCAAATACACATCATT | | CATTCA | | stem |
| | AgttatactaataagaattatctgaaACAAACGGCAGAAGCTG | | NNNNN | | variant |
| | GAGGAGGAAGGGCCTGAGTCCGAGCAGAAGAA | | NNN | | |
| | CCTGCAGGACCTATCATTCANNNNNNNNAAAG | | | | |
| | TTCTCCCATCACATCAACCGGTGGCGCATTGCC | | | | |
| | ACGAAGCAGGCCAATGGGGAGGACATCGATGT | | | | |
| | CAttcagataattcttattagtataacAAATATAAGAATTGTTA | | | | |
| | GCAAGAAATCTATG | | | | |
| Var0077 | CATAGATTTCTTGGCCTTTATGCTGTGGTGTTGC | 19619 | ACCTAT | 19811 | msD |
| | GCCACGGTGGAGATTTGTCAAATACACATCATT | | CATTCA | | stem |
| | AttaagatagaggcacttctagtgagACAAACGGCAGAAGCT | | NNNNN | | variant |
| | GGAGGAGGAAGGGCCTGAGTCCGAGCAGAAGA | | NNN | | |
| | ACCTGCAGGACCTATCATTCANNNNNNNNAAA | | | | |
| | GTTCTCCCATCACATCAACCGGTGGCGCATTGC | | | | |
| | CACGAAGCAGGCCAATGGGGAGGACATCGATG | | | | |
| | TCActcactagaagtgcctctatcttaaAAATATAAGAATTGT | | | | |
| | TAGCAAGAAATCTATG | | | | |
| Var0078 | CATAGATTTCTTGGCCTTTATGCTGTGGTGTTGC | 19620 | ACCTAT | 19812 | msD |
| | GCCACGGTGGAGATTTGTCAAATACACATCATT | | CATTCA | | stem |
| | AcaggcagcacgcacacagccgaaatACAAACGGCAGAAGC | | NNNNN | | variant |
| | TGGAGGAGGAAGGGCCTGAGTCCGAGCAGAAG | | NNN | | |
| | AACCTGCAGGACCTATCATTCANNNNNNNNAA | | | | |
| | AGTTCTCCCATCACATCAACCGGTGGCGCATTG | | | | |
| | CCACGAAGCAGGCCAATGGGGAGGACATCGAT | | | | |
| | GTCAatttcggctgtgtgcgtgctgcctgAAATATAAGAATTG | | | | |
| | TTAGCAAGAAATCTATG | | | | |
| Var0079 | CATAGATTTCTTGGCCTTTATGCTGTGGTGTTGC | 19621 | ACCTAT | 19813 | msD |
| | GCCACGGTGGAGATTTGTCAAATACACATCATT | | CATTCA | | stem |
| | AcaccactggcgccgccagcaggggACAAACGGCAGAAGC | | NNNNN | | variant |
| | TGGAGGAGGAAGGGCCTGAGTCCGAGCAGAAG | | NNN | | |
| | AACCTGCAGGACCTATCATTCANNNNNNNNAA | | | | |
| | AGTTCTCCCATCACATCAACCGGTGGCGCATTG | | | | |
| | CCACGAAGCAGGCCAATGGGGAGGACATCGAT | | | | |
| | GTCAccgcctgctggcggcgccagtggtgAAATATAAGAATT | | | | |
| | GTTAGCAAGAAATCTATG | | | | |
| Var0080 | CATAGATTTCTTGGCCTTTATGCTGTGGTGTTGC | 19622 | ACCTAT | 19814 | msD |
| | GCCACGGTGGAGATTTGTCAAATACACATCATT | | CATTCA | | stem |
| | AcgcggccgcgccgggcgcgcgcccgACAAACGGCAGAAG | | NNNNN | | variant |
| | CTGGAGGAGGAAGGGCCTGAGTCCGAGCAGAA | | NNN | | |
| | GAACCTGCAGGACCTATCATTCANNNNNNNNA | | | | |
| | AAGTTCTCCCATCACATCAACCGGTGGCGCATT | | | | |
| | GCCACGAAGCAGGCCAATGGGGAGGACATCGA | | | | |
| | TGTCAcgggcgcgcgcccggcgcggccgcgAAATATAAGA | | | | |
| | ATTGTTAGCAAGAAATCTATG | | | | |
| Var0081 | CATAGATTTCTTGGCCTTTATGCTGTGGTGTTGC | 19623 | ACCTAT | 19815 | msD |
| | GCCACGGTGGAGATTTGTCAAATACACATCATT | | CATTCA | | stem |
| | AaataattattatataataatatattaataaACAAACGGCAGAAGC | | NNNNN | | variant |
| | TGGAGGAGGAAGGGCCTGAGTCCGAGCAGAAG | | NNN | | |
| | AACCTGCAGGACCTATCATTCANNNNNNNNAA | | | | |
| | AGTTCTCCCATCACATCAACCGGTGGCGCATTG | | | | |
| | CCACGAAGCAGGCCAATGGGGAGGACATCGAT | | | | |
| | GTCAttattaatatattattatataataattattAAATATAAGAATT | | | | |
| | GTTAGCAAGAAATCTATG | | | | |
| Var0082 | CATAGATTTCTTGGCCTTTATGCTGTGGTGTTGC | 19624 | ACCTAT | 19816 | msD |
| | GCCACGGTGGAGATTTGTCAAATACACATCATT | | CATTCA | | stem |
| | AaataatataatcccttagtctattagtttaACAAACGGCAGAAGC | | NNNNN | | variant |
| | TGGAGGAGGAAGGGCCTGAGTCCGAGCAGAAG | | NNN | | |
| | AACCTGCAGGACCTATCATTCANNNNNNNNAA | | | | |
| | AGTTCTCCCATCACATCAACCGGTGGCGCATTG | | | | |
| | CCACGAAGCAGGCCAATGGGGAGGACATCGAT | | | | |
| | GTCAtaaactaatagactaagggattatattattAAATATAAGAAT | | | | |
| | TGTTAGCAAGAAATCTATG | | | | |
| Var0083 | CATAGATTTCTTGGCCTTTATGCTGTGGTGTTGC | 19625 | ACCTAT | 19817 | msD |
| | GCCACGGTGGAGATTTGTCAAATACACATCATT | | CATTCA | | stem |
| | AtaatttacaggacagggactttactcgatcACAAACGGCAGAA | | NNNNN | | variant |
| | GCTGGAGGAGGAAGGGCCTGAGTCCGAGCAGA | | NNN | | |
| | AGAACCTGCAGGACCTATCATTCANNNNNNNN | | | | |
| | AAAGTTCTCCCATCACATCAACCGGTGGCGCAT | | | | |
| | TGCCACGAAGCAGGCCAATGGGGAGGACATCG | | | | |
| | ATGTCAgatcgagtaaagtccctgtcctgtaaattaAAATATAAG | | | | |
| | AATTGTTAGCAAGAAATCTATG | | | | |
| Var0084 | CATAGATTTCTTGGCCTTTATGCTGTGGTGTTGC | 19626 | ACCTAT | 19818 | msD |
| | GCCACGGTGGAGATTTGTCAAATACACATCATT | | CATTCA | | stem |
| | AtatctggcaacggccagagagagcgcctgaACAAACGGCAGA | | NNNNN | | variant |
| | AGCTGGAGGAGGAAGGGCCTGAGTCCGAGCAG | | NNN | | |
| | AAGAACCTGCAGGACCTATCATTCANNNNNNN | | | | |
| | NAAAGTTCTCCCATCACATCAACCGGTGGCGCA | | | | |
| | TTGCCACGAAGCAGGCCAATGGGGAGGACATC | | | | |
| | GATGTCAtcaggcgctctctctggccgttgccagataAAATATAA | | | | |
| | GAATTGTTAGCAAGAAATCTATG | | | | |
| Var0085 | CATAGATTTCTTGGCCTTTATGCTGTGGTGTTGC | 19627 | ACCTAT | 19819 | msD |
| | GCCACGGTGGAGATTTGTCAAATACACATCATT | | CATTCA | | stem |
| | AgccgtcccggggcctgcccaaacgccctACAAACGGCAGA | | NNNNN | | variant |
| | AGCTGGAGGAGGAAGGGCCTGAGTCCGAGCAG | | NNN | | |
| | AAGAACCTGCAGGACCTATCATTCANNNNNNN | | | | |
| | NAAAGTTCTCCCATCACATCAACCGGTGGCGCA | | | | |
| | TTGCCACGAAGCAGGCCAATGGGGAGGACATC | | | | |
| | GATGTCAagggcgtttgggcaggccgcgcgggacggcAAATAT | | | | |
| | AAGAATTGTTAGCAAGAAATCTATG | | | | |
| Var0086 | CATAGATTTCTTGGCCTTTATGCTGTGGTGTTGC | 19628 | ACCTAT | 19820 | msD |
| | GCCACGGTGGAGATTTGTCAAATACACATCATT | | CATTCA | | stem |
| | AcgccgccggccgggcgcgggcgccggcggcACAAACGGCAG | | NNNNN | | variant |
| | AAGCTGGAGGAGGAAGGGCCTGAGTCCGAGCA | | NNN | | |
| | GAAGAACCTGCAGGACCTATCATTCANNNNNN | | | | |
| | NNAAAGTTCTCCCATCACATCAACCGGTGGCGC | | | | |
| | ATTGCCACGAAGCAGGCCAATGGGGAGGACAT | | | | |
| | CGATGTCAgccgccggcgcccgcgcccggccggcggcgAAAT | | | | |
| | ATAAGAATTGTTAGCAAGAAATCTATG | | | | |
| Var0087 | CATAGATTTCTTGGCCTTTATGCTGTGGTGTTGC | 19629 | ACCTAT | 19821 | msD |
| | GCCACGGTGGAGATTTGTCAAATACACATCATT | | CATTCA | | stem |
| | AaatatatataaatattaataataatattaataaatACAAACGGCAGA | | NNNNN | | variant |
| | AGCTGGAGGAGGAAGGGCCTGAGTCCGAGCAG | | NNN | | |
| | AAGAACCTGCAGGACCTATCATTCANNNNNNN | | | | |
| | NAAAGTTCTCCCATCACATCAACCGGTGGCGCA | | | | |
| | TTGCCACGAAGCAGGCCAATGGGGAGGACATC | | | | |
| | GATGTCAatttattaatattattattaatatttatatatattAAATATAA | | | | |
| | GAATTGTTAGCAAGAAATCTATG | | | | |
| Var0088 | CATAGATTTCTTGGCCTTTATGCTGTGGTGTTGC | 19630 | ACCTAT | 19822 | msD |
| | GCCACGGTGGAGATTTGTCAAATACACATCATT | | CATTCA | | stem |
| | AttaatatctaacaattattgaagttgctttatttcACAAACGGCAGA | | NNNNN | | variant |
| | AGCTGGAGGAGGAAGGGCCTGAGTCCGAGCAG | | NNN | | |
| | AAGAACCTGCAGGACCTATCATTCANNNNNNN | | | | |
| | NAAAGTTCTCCCATCACATCAACCGGTGGCGCA | | | | |
| | TTGCCACGAAGCAGGCCAATGGGGAGGACATC | | | | |
| | GATGTCAgaaataaagcaacttcaataattgttagatattaaAAATA | | | | |
| | TAAGAATTGTTAGCAAGAAATCTATG | | | | |
| Var0089 | CATAGATTTCTTGGCCTTTATGCTGTGGTGTTGC | 19631 | ACCTAT | 19823 | msD |
| | GCCACGGTGGAGATTTGTCAAATACACATCATT | | CATTCA | | stem |
| | AcagttatagcgcgaactagtttgacctgatttgtaACAAACGGCAG | | NNNNN | | variant |
| | AAGCTGGAGGAGGAAGGGCCTGAGTCCGAGCA | | NNN | | |
| | GAAGAACCTGCAGGACCTATCATTCANNNNNN | | | | |
| | NNAAAGTTCTCCCATCACATCAACCGGTGGCGC | | | | |
| | ATTGCCACGAAGCAGGCCAATGGGGAGGACAT | | | | |
| | CGATGTCAtacaaatcaggtcaaactagttcgcgctataactgAAAT | | | | |
| | ATAAGAATTGTTAGCAAGAAATCTATG | | | | |
| Var0090 | CATAGATTTCTTGGCCTTTATGCTGTGGTGTTGC | 19632 | ACCTAT | 19824 | msD |
| | GCCACGGTGGAGATTTGTCAAATACACATCATT | | CATTCA | | stem |
| | AatagactggccgcccgtaggaacttgaggacgcacACAAACGGC | | NNNNN | | variant |
| | AGAAGCTGGAGGAGGAAGGGCCTGAGTCCGAG | | NNN | | |
| | CAGAAGAACCTGCAGGACCTATCATTCANNNN | | | | |
| | NNNNAAAGTTCTCCCATCACATCAACCGGTGGC | | | | |
| | GCATTGCCACGAAGCAGGCCAATGGGGAGGAC | | | | |
| | ATCGATGTCAgtgcgtcctcaagttcctacgggggccagtctatA | | | | |
| | AATATAAGAATTGTTAGCAAGAAATCTATG | | | | |
| Var0091 | CATAGATTTCTTGGCCTTTATGCTGTGGTGTTGC | 19633 | ACCTAT | 19825 | msD |
| | GCCACGGTGGAGATTTGTCAAATACACATCATT | | CATTCA | | stem |
| | AgcgagcgcgaggacgccacgagcacgcgccctgccACAAACGG | | NNNNN | | variant |
| | CAGAAGCTGGAGGAGGAAGGGCCTGAGTCCGA | | NNN | | |
| | GCAGAAGAACCTGCAGGACCTATCATTCANNN | | | | |
| | NNNNNAAAGTTCTCCCATCACATCAACCGGTGG | | | | |
| | CGCATTGCCACGAAGCAGGCCAATGGGGAGGA | | | | |
| | CATCGATGTCAggcagggcgcgtgctcgtggcgtcctcgcgctcg | | | | |
| | cAAATATAAGAATTGTTAGCAAGAAATCTATG | | | | |
| Var0092 | CATAGATTTCTTGGCCTTTATGCTGTGGTGTTGC | 19634 | ACCTAT | 19826 | msD |
| | GCCACGGTGGAGATTTGTCAAATACACATCATT | | CATTCA | | stem |
| | AcggccggcgcccgggccggggggcccgcgggcggACAAACG | | NNNNN | | variant |
| | GCAGAAGCTGGAGGAGGAAGGGCCTGAGTCCG | | NNN | | |
| | AGCAGAAGAACCTGCAGGACCTATCATTCANN | | | | |
| | NNNNNNAAAGTTCTCCCATCACATCAACCGGTG | | | | |
| | GCGCATTGCCACGAAGCAGGCCAATGGGGAGG | | | | |
| | ACATCGATGTCAccgcccgcgggcccgcccggcccgggcgccg | | | | |
| | gccgAAATATAAGAATTGTTAGCAAGAAATCTAT | | | | |
| | G | | | | |
| Var0093 | CATAGATTTCTTGGCCTTTATGCTGTGGTGtgtCG | 19635 | ACCTAT | 19827 | msR |
| | CCACGGTGGAGATTTGTCAAATACACATCATTA | | CATTCA | | loop |
| | GGTTGCGACAAACGGCAGAAGCTGGAGGAGGA | | NNNNN | | variant |
| | AGGGCCTGAGTCCGAGCAGAAGAACCTGCAGG | | NNN | | |
| | ACCTATCATTCANNNNNNNNAAAGTTCTCCCAT | | | | |
| | CACATCAACCGGTGGCGCATTGCCACGAAGCA | | | | |
| | GGCCAATGGGGAGGACATCGATGTCACACAAC | | | | |
| | CAAATATAAGAATTGTTAGCAAGAAATCTATG | | | | |
| Var0094 | CATAGATTTCTTGGCCTTTATGCTGTGGTGgttCG | 19636 | ACCTAT | 19828 | msR |
| | CCACGGTGGAGATTTGTCAAATACACATCATTA | | CATTCA | | loop |
| | GGTTGCGACAAACGGCAGAAGCTGGAGGAGGA | | NNNNN | | variant |
| | AGGGCCTGAGTCCGAGCAGAAGAACCTGCAGG | | NNN | | |
| | ACCTATCATTCANNNNNNNNAAAGTTCTCCCAT | | | | |
| | CACATCAACCGGTGGCGCATTGCCACGAAGCA | | | | |
| | GGCCAATGGGGAGGACATCGATGTCACACAAC | | | | |
| | CAAATATAAGAATTGTTAGCAAGAAATCTATG | | | | |
| Var0095 | CATAGATTTCTTGGCCTTTATGCTGTGGTGttcCG | 19637 | ACCTAT | 19829 | msR |
| | CCACGGTGGAGATTTGTCAAATACACATCATTA | | CATTCA | | loop |
| | GGTTGCGACAAACGGCAGAAGCTGGAGGAGGA | | NNNNN | | variant |
| | AGGGCCTGAGTCCGAGCAGAAGAACCTGCAGG | | NNN | | |
| | ACCTATCATTCANNNNNNNNAAAGTTCTCCCAT | | | | |
| | CACATCAACCGGTGGCGCATTGCCACGAAGCA | | | | |
| | GGCCAATGGGGAGGACATCGATGTCACACAAC | | | | |
| | CAAATATAAGAATTGTTAGCAAGAAATCTATG | | | | |
| Var0096 | CATAGATTTCTTGGCCTTTATGCTGTGGTGtctCG | 19638 | ACCTAT | 19830 | msR |
| | CCACGGTGGAGATTTGTCAAATACACATCATTA | | CATTCA | | loop |
| | GGTTGCGACAAACGGCAGAAGCTGGAGGAGGA | | NNNNN | | variant |
| | AGGGCCTGAGTCCGAGCAGAAGAACCTGCAGG | | NNN | | |
| | ACCTATCATTCANNNNNNNNAAAGTTCTCCCAT | | | | |
| | CACATCAACCGGTGGCGCATTGCCACGAAGCA | | | | |
| | GGCCAATGGGGAGGACATCGATGTCACACAAC | | | | |
| | CAAATATAAGAATTGTTAGCAAGAAATCTATG | | | | |
| Var0097 | CATAGATTTCTTGGCCTTTATGCTGTGGTGcttCG | 19639 | ACCTAT | 19831 | msR |
| | CCACGGTGGAGATTTGTCAAATACACATCATTA | | CATTCA | | loop |
| | GGTTGCGACAAACGGCAGAAGCTGGAGGAGGA | | NNNNN | | variant |
| | AGGGCCTGAGTCCGAGCAGAAGAACCTGCAGG | | NNN | | |
| | ACCTATCATTCANNNNNNNNAAAGTTCTCCCAT | | | | |
| | CACATCAACCGGTGGCGCATTGCCACGAAGCA | | | | |
| | GGCCAATGGGGAGGACATCGATGTCACACAAC | | | | |
| | CAAATATAAGAATTGTTAGCAAGAAATCTATG | | | | |
| Var0098 | CATAGATTTCTTGGCCTTTATGCTGTGGTGtttCG | 19640 | ACCTAT | 19832 | msR |
| | CCACGGTGGAGATTTGTCAAATACACATCATTA | | CATTCA | | loop |
| | GGTTGCGACAAACGGCAGAAGCTGGAGGAGGA | | NNNNN | | variant |
| | AGGGCCTGAGTCCGAGCAGAAGAACCTGCAGG | | NNN | | |
| | ACCTATCATTCANNNNNNNNAAAGTTCTCCCAT | | | | |
| | CACATCAACCGGTGGCGCATTGCCACGAAGCA | | | | |
| | GGCCAATGGGGAGGACATCGATGTCACACAAC | | | | |
| | CAAATATAAGAATTGTTAGCAAGAAATCTATG | | | | |
| Var0099 | CATAGATTTCTTGGCCTTTATGCTGTGGTGttttCG | 19641 | ACCTAT | 19833 | msR |
| | CCACGGTGGAGATTTGTCAAATACACATCATTA | | CATTCA | | loop |
| | GGTTGCGACAAACGGCAGAAGCTGGAGGAGGA | | NNNNN | | variant |
| | AGGGCCTGAGTCCGAGCAGAAGAACCTGCAGG | | NNN | | |
| | ACCTATCATTCANNNNNNNNAAAGTTCTCCCAT | | | | |
| | CACATCAACCGGTGGCGCATTGCCACGAAGCA | | | | |
| | GGCCAATGGGGAGGACATCGATGTCACACAAC | | | | |
| | CAAATATAAGAATTGTTAGCAAGAAATCTATG | | | | |
| Var0100 | CATAGATTTCTTGGCCTTTATGCTGTGGTGttgcC | 19642 | ACCTAT | 19834 | msR |
| | GCCACGGTGGAGATTTGTCAAATACACATCATT | | CATTCA | | loop |
| | AGGTTGCGACAAACGGCAGAAGCTGGAGGAGG | | NNNNN | | variant |
| | AAGGGCCTGAGTCCGAGCAGAAGAACCTGCAG | | NNN | | |
| | GACCTATCATTCANNNNNNNNAAAGTTCTCCCA | | | | |
| | TCACATCAACCGGTGGCGCATTGCCACGAAGCA | | | | |
| | GGCCAATGGGGAGGACATCGATGTCACACAAC | | | | |
| | CAAATATAAGAATTGTTAGCAAGAAATCTATG | | | | |
| Var0101 | CATAGATTTCTTGGCCTTTATGCTGTGGTGcttgC | 19643 | ACCTAT | 19835 | msR |
| | GCCACGGTGGAGATTTGTCAAATACACATCATT | | CATTCA | | loop |
| | AGGTTGCGACAAACGGCAGAAGCTGGAGGAGG | | NNNNN | | variant |
| | AAGGGCCTGAGTCCGAGCAGAAGAACCTGCAG | | NNN | | |
| | GACCTATCATTCANNNNNNNNAAAGTTCTCCCA | | | | |
| | TCACATCAACCGGTGGCGCATTGCCACGAAGCA | | | | |
| | GGCCAATGGGGAGGACATCGATGTCACACAAC | | | | |
| | CAAATATAAGAATTGTTAGCAAGAAATCTATG | | | | |
| Var0102 | CATAGATTTCTTGGCCTTTATtataaTTGttataGGAG | 19644 | ACCTAT | 19836 | msR |
| | ATTTGTCAAATACACATCATTAGGTTGCGACAA | | CATTCA | | stem |
| | ACGGCAGAAGCTGGAGGAGGAAGGGCCTGAGT | | NNNNN | | variant |
| | CCGAGCAGAAGAACCTGCAGGACCTATCATTCA | | NNN | | |
| | NNNNNNNNAAAGTTCTCCCATCACATCAACCG | | | | |
| | GTGGCGCATTGCCACGAAGCAGGCCAATGGGG | | | | |
| | AGGACATCGATGTCACACAACCAAATATAAGA | | | | |
| | ATTGTTAGCAAGAAATCTATG | | | | |
| Var0103 | CATAGATTTCTTGGCCTTTATtgataTTGtatcaGGAG | 19645 | ACCTAT | 19837 | msR |
| | ATTTGTCAAATACACATCATTAGGTTGCGACAA | | CATTCA | | stem |
| | ACGGCAGAAGCTGGAGGAGGAAGGGCCTGAGT | | NNNNN | | variant |
| | CCGAGCAGAAGAACCTGCAGGACCTATCATTCA | | NNN | | |
| | NNNNNNNNAAAGTTCTCCCATCACATCAACCG | | | | |
| | GTGGCGCATTGCCACGAAGCAGGCCAATGGGG | | | | |
| | AGGACATCGATGTCACACAACCAAATATAAGA | | | | |
| | ATTGTTAGCAAGAAATCTATG | | | | |
| Var0104 | CATAGATTTCTTGGCCTTTATtctacTTGgtagaGGAG | 19646 | ACCTAT | 19838 | msR |
| | ATTTGTCAAATACACATCATTAGGTTGCGACAA | | CATTCA | | stem |
| | ACGGCAGAAGCTGGAGGAGGAAGGGCCTGAGT | | NNNNN | | variant |
| | CCGAGCAGAAGAACCTGCAGGACCTATCATTCA | | NNN | | |
| | NNNNNNNNAAAGTTCTCCCATCACATCAACCG | | | | |
| | GTGGCGCATTGCCACGAAGCAGGCCAATGGGG | | | | |
| | AGGACATCGATGTCACACAACCAAATATAAGA | | | | |
| | ATTGTTAGCAAGAAATCTATG | | | | |
| Var0105 | CATAGATTTCTTGGCCTTTATgatccTTGggatcGGA | 19647 | ACCTAT | 19839 | msR |
| | GATTTGTCAAATACACATCATTAGGTTGCGACA | | CATTCA | | stem |
| | AACGGCAGAAGCTGGAGGAGGAAGGGCCTGAG | | NNNNN | | variant |
| | TCCGAGCAGAAGAACCTGCAGGACCTATCATTC | | NNN | | |
| | ANNNNNNNNAAAGTTCTCCCATCACATCAACC | | | | |
| | GGTGGCGCATTGCCACGAAGCAGGCCAATGGG | | | | |
| | GAGGACATCGATGTCACACAACCAAATATAAG | | | | |
| | AATTGTTAGCAAGAAATCTATG | | | | |
| Var0106 | CATAGATTTCTTGGCCTTTATacgcgTTGcgcgtGGA | 19648 | ACCTAT | 19840 | msR |
| | GATTTGTCAAATACACATCATTAGGTTGCGACA | | CATTCA | | stem |
| | AACGGCAGAAGCTGGAGGAGGAAGGGCCTGAG | | NNNNN | | variant |
| | TCCGAGCAGAAGAACCTGCAGGACCTATCATTC | | NNN | | |
| | ANNNNNNNNAAAGTTCTCCCATCACATCAACC | | | | |
| | GGTGGCGCATTGCCACGAAGCAGGCCAATGGG | | | | |
| | GAGGACATCGATGTCACACAACCAAATATAAG | | | | |
| | AATTGTTAGCAAGAAATCTATG | | | | |
| Var0107 | CATAGATTTCTTGGCCTTTATcgcgcTTGgcgcgGGA | 19649 | ACCTAT | 19841 | msR |
| | GATTTGTCAAATACACATCATTAGGTTGCGACA | | CATTCA | | stem |
| | AACGGCAGAAGCTGGAGGAGGAAGGGCCTGAG | | NNNNN | | variant |
| | TCCGAGCAGAAGAACCTGCAGGACCTATCATTC | | NNN | | |
| | ANNNNNNNNAAAGTTCTCCCATCACATCAACC | | | | |
| | GGTGGCGCATTGCCACGAAGCAGGCCAATGGG | | | | |
| | GAGGACATCGATGTCACACAACCAAATATAAG | | | | |
| | AATTGTTAGCAAGAAATCTATG | | | | |
| Var0108 | CATAGATTTCTTGGCCTTTATtattaaatttTTGaaatttaat | 19650 | ACCTAT | 19842 | msR |
| | aGGAGATTTGTCAAATACACATCATTAGGTTGC | | CATTCA | | stem |
| | GACAAACGGCAGAAGCTGGAGGAGGAAGGGCC | | NNNNN | | variant |
| | TGAGTCCGAGCAGAAGAACCTGCAGGACCTAT | | NNN | | |
| | CATTCANNNNNNNNAAAGTTCTCCCATCACATC | | | | |
| | AACCGGTGGCGCATTGCCACGAAGCAGGCCAA | | | | |
| | TGGGGAGGACATCGATGTCACACAACCAAATA | | | | |
| | TAAGAATTGTTAGCAAGAAATCTATG | | | | |
| Var0109 | CATAGATTTCTTGGCCTTTATtataatacgaTTGtgtatta | 19651 | ACCTAT | 19843 | msR |
| | taGGAGATTTGTCAAATACACATCATTAGGTTGC | | CATTCA | | stem |
| | GACAAACGGCAGAAGCTGGAGGAGGAAGGGCC | | NNNNN | | variant |
| | TGAGTCCGAGCAGAAGAACCTGCAGGACCTAT | | NNN | | |
| | CATTCANNNNNNNNAAAGTTCTCCCATCACATC | | | | |
| | AACCGGTGGCGCATTGCCACGAAGCAGGCCAA | | | | |
| | TGGGGAGGACATCGATGTCACACAACCAAATA | | | | |
| | TAAGAATTGTTAGCAAGAAATCTATG | | | | |
| Var0110 | CATAGATTTCTTGGCCTTTATttctgccaatTTGattggca | 19652 | ACCTAT | 19844 | msR |
| | gaaGGAGATTTGTCAAATACACATCATTAGGTTG | | CATTCA | | stem |
| | CGACAAACGGCAGAAGCTGGAGGAGGAAGGGC | | NNNNN | | variant |
| | CTGAGTCCGAGCAGAAGAACCTGCAGGACCTA | | NNN | | |
| | TCATTCANNNNNNNNAAAGTTCTCCCATCACAT | | | | |
| | CAACCGGTGGCGCATTGCCACGAAGCAGGCCA | | | | |
| | ATGGGGAGGACATCGATGTCACACAACCAAAT | | | | |
| | ATAAGAATTGTTAGCAAGAAATCTATG | | | | |
| Var0111 | CATAGATTTCTTGGCCTTTATtctcctcgagTTGctcgag | 19653 | ACCTAT | 19845 | msR |
| | gagaGGAGATTTGTCAAATACACATCATTAGGTT | | CATTCA | | stem |
| | GCGACAAACGGCAGAAGCTGGAGGAGGAAGGG | | NNNNN | | variant |
| | CCTGAGTCCGAGCAGAAGAACCTGCAGGACCT | | NNN | | |
| | ATCATTCANNNNNNNNAAAGTTCTCCCATCACA | | | | |
| | TCAACCGGTGGCGCATTGCCACGAAGCAGGCC | | | | |
| | AATGGGGAGGACATCGATGTCACACAACCAAA | | | | |
| | TATAAGAATTGTTAGCAAGAAATCTATG | | | | |
| Var0112 | CATAGATTTCTTGGCCTTTATccgggttcgcTTGgcgaa | 19654 | ACCTAT | 19846 | msR |
| | cccggGGAGATTTGTCAAATACACATCATTAGGTT | | CATTCA | | stem |
| | GCGACAAACGGCAGAAGCTGGAGGAGGAAGGG | | NNNNN | | variant |
| | CCTGAGTCCGAGCAGAAGAACCTGCAGGACCT | | NNN | | |
| | ATCATTCANNNNNNNNAAAGTTCTCCCATCACA | | | | |
| | TCAACCGGTGGCGCATTGCCACGAAGCAGGCC | | | | |
| | AATGGGGAGGACATCGATGTCACACAACCAAA | | | | |
| | TATAAGAATTGTTAGCAAGAAATCTATG | | | | |
| Var0113 | CATAGATTTCTTGGCCTTTATggccgggcccTTGgggc | 19655 | ACCTAT | 19847 | msR |
| | ccggccGGAGATTTGTCAAATACACATCATTAGGT | | CATTCA | | stem |
| | TGCGACAAACGGCAGAAGCTGGAGGAGGAAGG | | NNNNN | | variant |
| | GCCTGAGTCCGAGCAGAAGAACCTGCAGGACC | | NNN | | |
| | TATCATTCANNNNNNNNAAAGTTCTCCCATCAC | | | | |
| | ATCAACCGGTGGCGCATTGCCACGAAGCAGGC | | | | |
| | CAATGGGGAGGACATCGATGTCACACAACCAA | | | | |
| | ATATAAGAATTGTTAGCAAGAAATCTATG | | | | |
| Var0114 | CATAGATTTCTTGGCCTTTATaaatttaattataaaTTGttta | 19656 | ACCTAT | 19848 | msR |
| | taattaaatttGGAGATTTGTCAAATACACATCATTAG | | CATTCA | | stem |
| | GTTGCGACAAACGGCAGAAGCTGGAGGAGGAA | | NNNNN | | variant |
| | GGGCCTGAGTCCGAGCAGAAGAACCTGCAGGA | | NNN | | |
| | CCTATCATTCANNNNNNNNAAAGTTCTCCCATC | | | | |
| | ACATCAACCGGTGGCGCATTGCCACGAAGCAG | | | | |
| | GCCAATGGGGAGGACATCGATGTCACACAACC | | | | |
| | AAATATAAGAATTGTTAGCAAGAAATCTATG | | | | |
| Var0115 | CATAGATTTCTTGGCCTTTATatattctattacttgTTGcaa | 19657 | ACCTAT | 19849 | msR |
| | gtaatagaatatGGAGATTTGTCAAATACACATCATTA | | CATTCA | | stem |
| | GGTTGCGACAAACGGCAGAAGCTGGAGGAGGA | | NNNNN | | variant |
| | AGGGCCTGAGTCCGAGCAGAAGAACCTGCAGG | | NNN | | |
| | ACCTATCATTCANNNNNNNNAAAGTTCTCCCAT | | | | |
| | CACATCAACCGGTGGCGCATTGCCACGAAGCA | | | | |
| | GGCCAATGGGGAGGACATCGATGTCACACAAC | | | | |
| | CAAATATAAGAATTGTTAGCAAGAAATCTATG | | | | |
| Var0116 | CATAGATTTCTTGGCCTTTATgcgtatagtaatctgTTGca | 19658 | ACCTAT | 19850 | msR |
| | gattactatacgcGGAGATTTGTCAAATACACATCATT | | CATTCA | | stem |
| | AGGTTGCGACAAACGGCAGAAGCTGGAGGAGG | | NNNNN | | variant |
| | AAGGGCCTGAGTCCGAGCAGAAGAACCTGCAG | | NNN | | |
| | GACCTATCATTCANNNNNNNNAAAGTTCTCCCA | | | | |
| | TCACATCAACCGGTGGCGCATTGCCACGAAGCA | | | | |
| | GGCCAATGGGGAGGACATCGATGTCACACAAC | | | | |
| | CAAATATAAGAATTGTTAGCAAGAAATCTATG | | | | |
| Var0117 | CATAGATTTCTTGGCCTTTATaacgcgaaacgctggTTG | 19659 | ACCTAT | 19851 | msR |
| | ccagcgtttcgcgttGGAGATTTGTCAAATACACATCAT | | CATTCA | | stem |
| | TAGGTTGCGACAAACGGCAGAAGCTGGAGGAG | | NNNNN | | variant |
| | GAAGGGCCTGAGTCCGAGCAGAAGAACCTGCA | | NNN | | |
| | GGACCTATCATTCANNNNNNNNAAAGTTCTCCC | | | | |
| | ATCACATCAACCGGTGGCGCATTGCCACGAAGC | | | | |
| | AGGCCAATGGGGAGGACATCGATGTCACACAA | | | | |
| | CCAAATATAAGAATTGTTAGCAAGAAATCTATG | | | | |
| Var0118 | CATAGATTTCTTGGCCTTTATgaggcgggtgccgcaTTG | 19660 | ACCTAT | 19852 | msR |
| | tgcggcacccgcctcGGAGATTTGTCAAATACACATCA | | CATTCA | | stem |
| | TTAGGTTGCGACAAACGGCAGAAGCTGGAGGA | | NNNNN | | variant |
| | GGAAGGGCCTGAGTCCGAGCAGAAGAACCTGC | | NNN | | |
| | AGGACCTATCATTCANNNNNNNNAAAGTTCTCC | | | | |
| | CATCACATCAACCGGTGGCGCATTGCCACGAAG | | | | |
| | CAGGCCAATGGGGAGGACATCGATGTCACACA | | | | |
| | ACCAAATATAAGAATTGTTAGCAAGAAATCTAT | | | | |
| | G | | | | |
| Var0119 | CATAGATTTCTTGGCCTTTATgcggccgcgggcgggTT | 19661 | ACCTAT | 19853 | msR |
| | GcccgcccgcggccgcGGAGATTTGTCAAATACACATC | | CATTCA | | stem |
| | ATTAGGTTGCGACAAACGGCAGAAGCTGGAGG | | NNNNN | | variant |
| | AGGAAGGGCCTGAGTCCGAGCAGAAGAACCTG | | NNN | | |
| | CAGGACCTATCATTCANNNNNNNNAAAGTTCTC | | | | |
| | CCATCACATCAACCGGTGGCGCATTGCCACGAA | | | | |
| | GCAGGCCAATGGGGAGGACATCGATGTCACAC | | | | |
| | AACCAAATATAAGAATTGTTAGCAAGAAATCTA | | | | |
| | TG | | | | |
| Var0120 | CATAGATTTCTTGGCCTTTATaatattatattaaatattatTT | 19662 | ACCTAT | 19854 | msR |
| | GataatatttaatataatattGGAGATTTGTCAAATACACAT | | CATTCA | | stem |
| | CATTAGGTTGCGACAAACGGCAGAAGCTGGAG | | NNNNN | | variant |
| | GAGGAAGGGCCTGAGTCCGAGCAGAAGAACCT | | NNN | | |
| | GCAGGACCTATCATTCANNNNNNNNAAAGTTCT | | | | |
| | CCCATCACATCAACCGGTGGCGCATTGCCACGA | | | | |
| | AGCAGGCCAATGGGGAGGACATCGATGTCACA | | | | |
| | CAACCAAATATAAGAATTGTTAGCAAGAAATCT | | | | |
| | ATG | | | | |
| Var0121 | CATAGATTTCTTGGCCTTTATgaacaaactaaatataaatcT | 19663 | ACCTAT | 19855 | msR |
| | TGgatttatatttagtttgttcGGAGATTTGTCAAATACACAT | | CATTCA | | stem |
| | CATTAGGTTGCGACAAACGGCAGAAGCTGGAG | | NNNNN | | variant |
| | GAGGAAGGGCCTGAGTCCGAGCAGAAGAACCT | | NNN | | |
| | GCAGGACCTATCATTCANNNNNNNNAAAGTTCT | | | | |
| | CCCATCACATCAACCGGTGGCGCATTGCCACGA | | | | |
| | AGCAGGCCAATGGGGAGGACATCGATGTCACA | | | | |
| | CAACCAAATATAAGAATTGTTAGCAAGAAATCT | | | | |
| | ATG | | | | |
| Var0122 | CATAGATTTCTTGGCCTTTATcgatttctaagacttcggtaT | 19664 | ACCTAT | 19856 | msR |
| | TGtaccgaagtcttagaaatcgGGAGATTTGTCAAATACAC | | CATTCA | | stem |
| | ATCATTAGGTTGCGACAAACGGCAGAAGCTGG | | NNNNN | | variant |
| | AGGAGGAAGGGCCTGAGTCCGAGCAGAAGAAC | | NNN | | |
| | CTGCAGGACCTATCATTCANNNNNNNNAAAGTT | | | | |
| | CTCCCATCACATCAACCGGTGGCGCATTGCCAC | | | | |
| | GAAGCAGGCCAATGGGGAGGACATCGATGTCA | | | | |
| | CACAACCAAATATAAGAATTGTTAGCAAGAAA | | | | |
| | TCTATG | | | | |
| Var0123 | CATAGATTTCTTGGCCTTTATgtcagggaactccaggagg | 19665 | ACCTAT | 19857 | msR |
| | aTTGtcctcctggagttccctgacGGAGATTTGTCAAATAC | | CATTCA | | stem |
| | ACATCATTAGGTTGCGACAAACGGCAGAAGCT | | NNNNN | | variant |
| | GGAGGAGGAAGGGCCTGAGTCCGAGCAGAAGA | | NNN | | |
| | ACCTGCAGGACCTATCATTCANNNNNNNNAAA | | | | |
| | GTTCTCCCATCACATCAACCGGTGGCGCATTGC | | | | |
| | CACGAAGCAGGCCAATGGGGAGGACATCGATG | | | | |
| | TCACACAACCAAATATAAGAATTGTTAGCAAGA | | | | |
| | AATCTATG | | | | |
| Var0124 | CATAGATTTCTTGGCCTTTATcgtgggccgcgcttgagccg | 19666 | ACCTAT | 19858 | msR |
| | TTGcggctcaagcgcggcccacgGGAGATTTGTCAAATAC | | CATTCA | | stem |
| | ACATCATTAGGTTGCGACAAACGGCAGAAGCT | | NNNNN | | variant |
| | GGAGGAGGAAGGGCCTGAGTCCGAGCAGAAGA | | NNN | | |
| | ACCTGCAGGACCTATCATTCANNNNNNNNAAA | | | | |
| | GTTCTCCCATCACATCAACCGGTGGCGCATTGC | | | | |
| | CACGAAGCAGGCCAATGGGGAGGACATCGATG | | | | |
| | TCACACAACCAAATATAAGAATTGTTAGCAAGA | | | | |
| | AATCTATG | | | | |
| Var0125 | CATAGATTTCTTGGCCTTTATcggccgccggcgccggcg | 19667 | ACCTAT | 19859 | msR |
| | cgTTGcgcgccggcgccggcggccgGGAGATTTGTCAAAT | | CATTCA | | stem |
| | ACACATCATTAGGTTGCGACAAACGGCAGAAG | | NNNNN | | variant |
| | CTGGAGGAGGAAGGGCCTGAGTCCGAGCAGAA | | NNN | | |
| | GAACCTGCAGGACCTATCATTCANNNNNNNNA | | | | |
| | AAGTTCTCCCATCACATCAACCGGTGGCGCATT | | | | |
| | GCCACGAAGCAGGCCAATGGGGAGGACATCGA | | | | |
| | TGTCACACAACCAAATATAAGAATTGTTAGCAA | | | | |
| | GAAATCTATG | | | | |
| Var0126 | CATAGATTTCTTGGCCTTTATattaatatataaatttaattatat | 19668 | ACCTAT | 19860 | msR |
| | aTTGtatataattaaatttatatattaatGGAGATTTGTCAAATA | | CATTCA | | stem |
| | CACATCATTAGGTTGCGACAAACGGCAGAAGCT | | NNNNN | | variant |
| | GGAGGAGGAAGGGCCTGAGTCCGAGCAGAAGA | | NNN | | |
| | ACCTGCAGGACCTATCATTCANNNNNNNNAAA | | | | |
| | GTTCTCCCATCACATCAACCGGTGGCGCATTGC | | | | |
| | CACGAAGCAGGCCAATGGGGAGGACATCGATG | | | | |
| | TCACACAACCAAATATAAGAATTGTTAGCAAGA | | | | |
| | AATCTATG | | | | |
| Var0127 | CATAGATTTCTTGGCCTTTATgttatactaataagaattatctg | 19669 | ACCTAT | 19861 | msR |
| | aaTTGttcagataattcttattagtataacGGAGATTTGTCAAAT | | CATTCA | | stem |
| | ACACATCATTAGGTTGCGACAAACGGCAGAAG | | NNNNN | | variant |
| | CTGGAGGAGGAAGGGCCTGAGTCCGAGCAGAA | | NNN | | |
| | GAACCTGCAGGACCTATCATTCANNNNNNNNA | | | | |
| | AAGTTCTCCCATCACATCAACCGGTGGCGCATT | | | | |
| | GCCACGAAGCAGGCCAATGGGGAGGACATCGA | | | | |
| | TGTCACACAACCAAATATAAGAATTGTTAGCAA | | | | |
| | GAAATCTATG | | | | |
| Var0128 | CATAGATTTCTTGGCCTTTATttaagatagaggcacttctagt | 19670 | ACCTAT | 19862 | msR |
| | gagTTGctcactagaagtgcctctatcttaaGGAGATTTGTCAA | | CATTCA | | stem |
| | ATACACATCATTAGGTTGCGACAAACGGCAGA | | NNNNN | | variant |
| | AGCTGGAGGAGGAAGGGCCTGAGTCCGAGCAG | | NNN | | |
| | AAGAACCTGCAGGACCTATCATTCANNNNNNN | | | | |
| | NAAAGTTCTCCCATCACATCAACCGGTGGCGCA | | | | |
| | TTGCCACGAAGCAGGCCAATGGGGAGGACATC | | | | |
| | GATGTCACACAACCAAATATAAGAATTGTTAGC | | | | |
| | AAGAAATCTATG | | | | |
| Var0129 | CATAGATTTCTTGGCCTTTATcaggcagcacgcacacagc | 19671 | ACCTAT | 19863 | msR |
| | cgaaatTTGatttcggctgtgtgcgtgctgcctgGGAGATTTGTC | | CATTCA | | stem |
| | AAATACACATCATTAGGTTGCGACAAACGGCA | | NNNNN | | variant |
| | GAAGCTGGAGGAGGAAGGGCCTGAGTCCGAGC | | NNN | | |
| | AGAAGAACCTGCAGGACCTATCATTCANNNNN | | | | |
| | NNNAAAGTTCTCCCATCACATCAACCGGTGGCG | | | | |
| | CATTGCCACGAAGCAGGCCAATGGGGAGGACA | | | | |
| | TCGATGTCACACAACCAAATATAAGAATTGTTA | | | | |
| | GCAAGAAATCTATG | | | | |
| Var0130 | CATAGATTTCTTGGCCTTTATcaccactggcgccgccagc | 19672 | ACCTAT | 19864 | msR |
| | aggcggTTGccgcctgctggcggcgccagtggtgGGAGATTTGT | | CATTCA | | stem |
| | CAAATACACATCATTAGGTTGCGACAAACGGCA | | NNNNN | | variant |
| | GAAGCTGGAGGAGGAAGGGCCTGAGTCCGAGC | | NNN | | |
| | AGAAGAACCTGCAGGACCTATCATTCANNNNN | | | | |
| | NNNAAAGTTCTCCCATCACATCAACCGGTGGCG | | | | |
| | CATTGCCACGAAGCAGGCCAATGGGGAGGACA | | | | |
| | TCGATGTCACACAACCAAATATAAGAATTGTTA | | | | |
| | GCAAGAAATCTATG | | | | |
| Var0131 | CATAGATTTCTTGGCCTTTATcgcggccgcgccgggcgc | 19673 | ACCTAT | 19865 | msR |
| | gcgcccgTTGcgggcgcgcgcccggcgcggccgcgGGAGATTT | | CATTCA | | stem |
| | GTCAAATACACATCATTAGGTTGCGACAAACGG | | NNNNN | | variant |
| | CAGAAGCTGGAGGAGGAAGGGCCTGAGTCCGA | | NNN | | |
| | GCAGAAGAACCTGCAGGACCTATCATTCANNN | | | | |
| | NNNNNAAAGTTCTCCCATCACATCAACCGGTGG | | | | |
| | CGCATTGCCACGAAGCAGGCCAATGGGGAGGA | | | | |
| | CATCGATGTCACACAACCAAATATAAGAATTGT | | | | |
| | TAGCAAGAAATCTATG | | | | |
| Var0132 | CATAGATTTCTTGGCCTTTATaataattattatataataatatat | 19674 | ACCTAT | 19866 | msR |
| | taataaTTGttattaatatattattatataataattattGGAGATTTGTC | | CATTCA | | stem |
| | AAATACACATCATTAGGTTGCGACAAACGGCA | | NNNNN | | variant |
| | GAAGCTGGAGGAGGAAGGGCCTGAGTCCGAGC | | NNN | | |
| | AGAAGAACCTGCAGGACCTATCATTCANNNNN | | | | |
| | NNNAAAGTTCTCCCATCACATCAACCGGTGGCG | | | | |
| | CATTGCCACGAAGCAGGCCAATGGGGAGGACA | | | | |
| | TCGATGTCACACAACCAAATATAAGAATTGTTA | | | | |
| | GCAAGAAATCTATG | | | | |
| Var0133 | CATAGATTTCTTGGCCTTTATaataatataatcccttagtctat | 19675 | ACCTAT | 19867 | msR |
| | tagtttaTTGtaaactaatagactaagggattatattattGGAGATTTG | | CATTCA | | stem |
| | TCAAATACACATCATTAGGTTGCGACAAACGGC | | NNNNN | | variant |
| | AGAAGCTGGAGGAGGAAGGGCCTGAGTCCGAG | | NNN | | |
| | CAGAAGAACCTGCAGGACCTATCATTCANNNN | | | | |
| | NNNNAAAGTTCTCCCATCACATCAACCGGTGGC | | | | |
| | GCATTGCCACGAAGCAGGCCAATGGGGAGGAC | | | | |
| | ATCGATGTCACACAACCAAATATAAGAATTGTT | | | | |
| | AGCAAGAAATCTATG | | | | |
| Var0134 | CATAGATTTCTTGGCCTTTATtaatttacaggacagggacttt | 19676 | ACCTAT | 19868 | msR |
| | actcgatcTTGgatcgagtaaagtccctgtcctgtaaattaGGAGATT | | CATTCA | | stem |
| | TGTCAAATACACATCATTAGGTTGCGACAAACG | | NNNNN | | variant |
| | GCAGAAGCTGGAGGAGGAAGGGCCTGAGTCCG | | NNN | | |
| | AGCAGAAGAACCTGCAGGACCTATCATTCANN | | | | |
| | NNNNNNAAAGTTCTCCCATCACATCAACCGGTG | | | | |
| | GCGCATTGCCACGAAGCAGGCCAATGGGGAGG | | | | |
| | ACATCGATGTCACACAACCAAATATAAGAATTG | | | | |
| | TTAGCAAGAAATCTATG | | | | |
| Var0135 | CATAGATTTCTTGGCCTTTATtatctggcaacggccagaga | 19677 | ACCTAT | 19869 | msR |
| | gagcgcctgaTTGtcaggcgctctctctggccgttgccagataGGAGA | | CATTCA | | stem |
| | TTTGTCAAATACACATCATTAGGTTGCGACAAA | | NNNNN | | variant |
| | CGGCAGAAGCTGGAGGAGGAAGGGCCTGAGTC | | NNN | | |
| | CGAGCAGAAGAACCTGCAGGACCTATCATTCA | | | | |
| | NNNNNNNNAAAGTTCTCCCATCACATCAACCG | | | | |
| | GTGGCGCATTGCCACGAAGCAGGCCAATGGGG | | | | |
| | AGGACATCGATGTCACACAACCAAATATAAGA | | | | |
| | ATTGTTAGCAAGAAATCTATG | | | | |
| Var0136 | CATAGATTTCTTGGCCTTTATgccgtcccgcgcggcctgcc | 19678 | ACCTAT | 19870 | msR |
| | caaacgccctTTGagggcgtttgggcaggccgcgcgggacggcGGA | | CATTCA | | stem |
| | GATTTGTCAAATACACATCATTAGGTTGCGACA | | NNNNN | | variant |
| | AACGGCAGAAGCTGGAGGAGGAAGGGCCTGAG | | NNN | | |
| | TCCGAGCAGAAGAACCTGCAGGACCTATCATTC | | | | |
| | ANNNNNNNNAAAGTTCTCCCATCACATCAACC | | | | |
| | GGTGGCGCATTGCCACGAAGCAGGCCAATGGG | | | | |
| | GAGGACATCGATGTCACACAACCAAATATAAG | | | | |
| | AATTGTTAGCAAGAAATCTATG | | | | |
| Var0137 | CATAGATTTCTTGGCCTTTATcgccgccggccgggcgcg | 19679 | ACCTAT | 19871 | msR |
| | ggcgccggcggcTTGgccgccggcgcccgcgcccggccggcggcgG | | CATTCA | | stem |
| | GAGATTTGTCAAATACACATCATTAGGTTGCGA | | NNNNN | | variant |
| | CAAACGGCAGAAGCTGGAGGAGGAAGGGCCTG | | NNN | | |
| | AGTCCGAGCAGAAGAACCTGCAGGACCTATCA | | | | |
| | TTCANNNNNNNNAAAGTTCTCCCATCACATCAA | | | | |
| | CCGGTGGCGCATTGCCACGAAGCAGGCCAATG | | | | |
| | GGGAGGACATCGATGTCACACAACCAAATATA | | | | |
| | AGAATTGTTAGCAAGAAATCTATG | | | | |
| Var0138 | CATAGATTTCTTGGCCTTTATaatatatataaatattaataata | 19680 | ACCTAT | 19872 | msR |
| | atattaataaatTTGatttattaatattattattaatatttatatatattGGAGAT | | CATTCA | | stem |
| | TTGTCAAATACACATCATTAGGTTGCGACAAAC | | NNNNN | | variant |
| | GGCAGAAGCTGGAGGAGGAAGGGCCTGAGTCC | | NNN | | |
| | GAGCAGAAGAACCTGCAGGACCTATCATTCAN | | | | |
| | NNNNNNNAAAGTTCTCCCATCACATCAACCGGT | | | | |
| | GGCGCATTGCCACGAAGCAGGCCAATGGGGAG | | | | |
| | GACATCGATGTCACACAACCAAATATAAGAATT | | | | |
| | GTTAGCAAGAAATCTATG | | | | |
| Var0139 | CATAGATTTCTTGGCCTTTATttaatatctaacaattattgaag | 19681 | ACCTAT | 19873 | msR |
| | ttgctttatttcTTGgaaataaagcaacttcaataattgttagatattaaGGA | | CATTCA | | stem |
| | GATTTGTCAAATACACATCATTAGGTTGCGACA | | NNNNN | | variant |
| | AACGGCAGAAGCTGGAGGAGGAAGGGCCTGAG | | NNN | | |
| | TCCGAGCAGAAGAACCTGCAGGACCTATCATTC | | | | |
| | ANNNNNNNNAAAGTTCTCCCATCACATCAACC | | | | |
| | GGTGGCGCATTGCCACGAAGCAGGCCAATGGG | | | | |
| | GAGGACATCGATGTCACACAACCAAATATAAG | | | | |
| | AATTGTTAGCAAGAAATCTATG | | | | |
| Var0140 | CATAGATTTCTTGGCCTTTATcagttatagcgcgaactagttt | 19682 | ACCTAT | 19874 | msR |
| | gacctgatttgtaTTGtacaaatcaggtcaaactagttcgcgctataactgG | | CATTCA | | stem |
| | GAGATTTGTCAAATACACATCATTAGGTTGCGA | | NNNNN | | variant |
| | CAAACGGCAGAAGCTGGAGGAGGAAGGGCCTG | | NNN | | |
| | AGTCCGAGCAGAAGAACCTGCAGGACCTATCA | | | | |
| | TTCANNNNNNNNAAAGTTCTCCCATCACATCAA | | | | |
| | CCGGTGGCGCATTGCCACGAAGCAGGCCAATG | | | | |
| | GGGAGGACATCGATGTCACACAACCAAATATA | | | | |
| | AGAATTGTTAGCAAGAAATCTATG | | | | |
| Var0141 | CATAGATTTCTTGGCCTTTATatagactggccgcccgtagg | 19683 | ACCTAT | 19875 | msR |
| | aacttgaggacgcacTTGgtgcgtcctcaagttcctacgggcggccagtct | | CATTCA | | stem |
| | atGGAGATTTGTCAAATACACATCATTAGGTTGC | | NNNNN | | variant |
| | GACAAACGGCAGAAGCTGGAGGAGGAAGGGCC | | NNN | | |
| | TGAGTCCGAGCAGAAGAACCTGCAGGACCTAT | | | | |
| | CATTCANNNNNNNNAAAGTTCTCCCATCACATC | | | | |
| | AACCGGTGGCGCATTGCCACGAAGCAGGCCAA | | | | |
| | TGGGGAGGACATCGATGTCACACAACCAAATA | | | | |
| | TAAGAATTGTTAGCAAGAAATCTATG | | | | |
| Var0142 | CATAGATTTCTTGGCCTTTATgcgagcgcgaggacgccac | 19684 | ACCTAT | 19876 | msR |
| | gagcacgcgccctgccTTGggcagggcgcgtgctcgtggcgtcctcgcg | | CATTCA | | stem |
| | ctcgcGGAGATTTGTCAAATACACATCATTAGGTT | | NNNNN | | variant |
| | GCGACAAACGGCAGAAGCTGGAGGAGGAAGGG | | NNN | | |
| | CCTGAGTCCGAGCAGAAGAACCTGCAGGACCT | | | | |
| | ATCATTCANNNNNNNNAAAGTTCTCCCATCACA | | | | |
| | TCAACCGGTGGCGCATTGCCACGAAGCAGGCC | | | | |
| | AATGGGGAGGACATCGATGTCACACAACCAAA | | | | |
| | TATAAGAATTGTTAGCAAGAAATCTATG | | | | |
| Var0143 | CATAGATTTCTTGGCCTTTATcggccggcgcccgggccg | 19685 | ACCTAT | 19877 | msR |
| | ggcgggcccgcgggcggTTGccgcccgcgggcccgcccggcccgggc | | CATTCA | | stem |
| | gccggccgGGAGATTTGTCAAATACACATCATTAG | | NNNNN | | variant |
| | GTTGCGACAAACGGCAGAAGCTGGAGGAGGAA | | NNN | | |
| | GGGCCTGAGTCCGAGCAGAAGAACCTGCAGGA | | | | |
| | CCTATCATTCANNNNNNNNAAAGTTCTCCCATC | | | | |
| | ACATCAACCGGTGGCGCATTGCCACGAAGCAG | | | | |
| | GCCAATGGGGAGGACATCGATGTCACACAACC | | | | |
| | AAATATAAGAATTGTTAGCAAGAAATCTATG | | | | |
| Var0144 | CATAGATTTCTTGgcatGCTGTGGTGTTGCGCCAC | 19686 | ACCTAT | 19878 | Minimal |
| | GGTGGAGATTTGTCAAATACACATCATTAGGTT | | CATTCA | | variant |
| | GCGACAAACGGCAGAAGCTGGAGGAGGAAGGG | | NNNNN | | |
| | CCTGAGTCCGAGCAGAAGAACCTGCAGGACCT | | NNN | | |
| | ATCATTCANNNNNNNNAAAGTTCTCCCATCACA | | | | |
| | TCAACCGGTGGCGCATTGCCACGAAGCAGGCC | | | | |
| | AATGGGGAGGACATCGATGTCACACAACCAAA | | | | |
| | TATAAGAATTGTTAGCAAGAAATCTATG | | | | |
| Var0145 | CATAGATTTCTTGGCCTTTATGCTGTGGTGTTGC | 19687 | ACCTAT | 19879 | Minimal |
| | GCCACGGTggtgtcaaatacacatcattaGGTTGCGACAAA | | CATTCA | | variant |
| | CGGCAGAAGCTGGAGGAGGAAGGGCCTGAGTC | | NNNNN | | |
| | CGAGCAGAAGAACCTGCAGGACCTATCATTCA | | NNN | | |
| | NNNNNNNNAAAGTTCTCCCATCACATCAACCG | | | | |
| | GTGGCGCATTGCCACGAAGCAGGCCAATGGGG | | | | |
| | AGGACATCGATGTCACACAACCAAATATAAGA | | | | |
| | ATTGTTAGCAAGAAATCTATG | | | | |
| Var0146 | CATAGATTTCTTGGCCTTTATGCTGTGGTGTTGC | 19688 | ACCTAT | 19880 | Minimal |
| | GCCACGGTggagatttgtcaaatacactaGGTTGCGACAAA | | CATTCA | | variant |
| | CGGCAGAAGCTGGAGGAGGAAGGGCCTGAGTC | | NNNNN | | |
| | CGAGCAGAAGAACCTGCAGGACCTATCATTCA | | NNN | | |
| | NNNNNNNNAAAGTTCTCCCATCACATCAACCG | | | | |
| | GTGGCGCATTGCCACGAAGCAGGCCAATGGGG | | | | |
| | AGGACATCGATGTCACACAACCAAATATAAGA | | | | |
| | ATTGTTAGCAAGAAATCTATG | | | | |
| Var0147 | CATAGATTTCTTGGCCTTTATGCTGTGGTGTTGC | 19689 | ACCTAT | 19881 | Minimal |
| | GCCACGGTggaatacacatcattaGGTTGCGACAAACGG | | CATTCA | | variant |
| | CAGAAGCTGGAGGAGGAAGGGCCTGAGTCCGA | | NNNNN | | |
| | GCAGAAGAACCTGCAGGACCTATCATTCANNN | | NNN | | |
| | NNNNNAAAGTTCTCCCATCACATCAACCGGTGG | | | | |
| | CGCATTGCCACGAAGCAGGCCAATGGGGAGGA | | | | |
| | CATCGATGTCACACAACCAAATATAAGAATTGT | | | | |
| | TAGCAAGAAATCTATG | | | | |
| Var0148 | CATAGATTTCTTGGCCTTTATGCTGTGGTGTTGC | 19690 | ACCTAT | 19882 | Minimal |
| | GCCACGGTggagatttgtcaaataGGTTGCGACAAACGG | | CATTCA | | variant |
| | CAGAAGCTGGAGGAGGAAGGGCCTGAGTCCGA | | NNNNN | | |
| | GCAGAAGAACCTGCAGGACCTATCATTCANNN | | NNN | | |
| | NNNNNAAAGTTCTCCCATCACATCAACCGGTGG | | | | |
| | CGCATTGCCACGAAGCAGGCCAATGGGGAGGA | | | | |
| | CATCGATGTCACACAACCAAATATAAGAATTGT | | | | |
| | TAGCAAGAAATCTATG | | | | |
| Var0149 | CATAGATTTCTTGGCCTTTATGCTGTGGTGTTGC | 19691 | ACCTAT | 19883 | Minimal |
| | GCCACGGTggcatcattaGGTTGCGACAAACGGCAG | | CATTCA | | variant |
| | AAGCTGGAGGAGGAAGGGCCTGAGTCCGAGCA | | NNNNN | | |
| | GAAGAACCTGCAGGACCTATCATTCANNNNNN | | NNN | | |
| | NNAAAGTTCTCCCATCACATCAACCGGTGGCGC | | | | |
| | ATTGCCACGAAGCAGGCCAATGGGGAGGACAT | | | | |
| | CGATGTCACACAACCAAATATAAGAATTGTTAG | | | | |
| | CAAGAAATCTATG | | | | |
| Var0150 | CATAGATTTCTTGGCCTTTATGCTGTGGTGTTGC | 19692 | ACCTAT | 19884 | Minimal |
| | GCCACGGTggagattttaGGTTGCGACAAACGGCAGA | | CATTCA | | variant |
| | AGCTGGAGGAGGAAGGGCCTGAGTCCGAGCAG | | NNNNN | | |
| | AAGAACCTGCAGGACCTATCATTCANNNNNNN | | NNN | | |
| | NAAAGTTCTCCCATCACATCAACCGGTGGCGCA | | | | |
| | TTGCCACGAAGCAGGCCAATGGGGAGGACATC | | | | |
| | GATGTCACACAACCAAATATAAGAATTGTTAGC | | | | |
| | AAGAAATCTATG | | | | |
| Var0151 | CATAGATTTCTTGGCCTTTATGCTGTGGTGTTGC | 19693 | ACCTAT | 19885 | Minimal |
| | GCCACGGTggtaGGTTGCGACAAACGGCAGAAGC | | CATTCA | | variant |
| | TGGAGGAGGAAGGGCCTGAGTCCGAGCAGAAG | | NNNNN | | |
| | AACCTGCAGGACCTATCATTCANNNNNNNNAA | | NNN | | |
| | AGTTCTCCCATCACATCAACCGGTGGCGCATTG | | | | |
| | CCACGAAGCAGGCCAATGGGGAGGACATCGAT | | | | |
| | GTCACACAACCAAATATAAGAATTGTTAGCAAG | | | | |
| | AAATCTATG | | | | |
| Var0152 | CATAGATTTCTTGGCCTTTATGCTGTGGTGTTGC | 19694 | ACCTAT | 19886 | Minimal |
| | GCCACGGTGGAGATTTGTCAAATACACATCATT | | CATTCA | | variant |
| | AGGTTGCGACAAACGGCAGAAGCTGGAGGAGG | | NNNNN | | |
| | AAGGGCCTGAGTCCGAGCAGAAGAACCTGCAG | | NNN | | |
| | GACCTATCATTCANNNNNNNNAAAGTTCTCCCA | | | | |
| | TCACATCAACCGGTGGCGCATTGCCACGAAGCA | | | | |
| | GGCCAATGGGGAGGACATCGATGTCACACAAC | | | | |
| | CaaagaattgttagCAAGAAATCTATG | | | | |
| Var0153 | CATAGATTTCTTGGCCTTTATGCTGTGGTGTTGC | 19695 | ACCTAT | 19887 | Minimal |
| | GCCACGGTGGAGATTTGTCAAATACACATCATT | | CATTCA | | variant |
| | AGGTTGCGACAAACGGCAGAAGCTGGAGGAGG | | | | |
| | AAGGGCCTGAGTCCGAGCAGAAGAACCTGCAG | | NNNNN | | |
| | GACCTATCATTCANNNNNNNNAAAGTTCTCCCA | | NNN | | |
| | TCACATCAACCGGTGGCGCATTGCCACGAAGCA | | | | |
| | GGCCAATGGGGAGGACATCGATGTCACACAAC | | | | |
| | CaaatataagaaagCAAGAAATCTATG | | | | |
| Var0154 | CATAGATTTCTTGGCCTTTATGCTGTGGTGTTGC | 19696 | ACCTAT | 19888 | Minimal |
| | GCCACGGTGGAGATTTGTCAAATACACATCATT | | CATTCA | | variant |
| | AGGTTGCGACAAACGGCAGAAGCTGGAGGAGG | | NNNNN | | |
| | AAGGGCCTGAGTCCGAGCAGAAGAACCTGCAG | | NNN | | |
| | GACCTATCATTCANNNNNNNNAAAGTTCTCCCA | | | | |
| | TCACATCAACCGGTGGCGCATTGCCACGAAGCA | | | | |
| | GGCCAATGGGGAGGACATCGATGTCACACAAC | | | | |
| | CaatgttagCAAGAAATCTATG | | | | |
| Var0155 | CATAGATTTCTTGGCCTTTATGCTGTGGTGTTGC | 19697 | ACCTAT | 19889 | Minimal |
| | GCCACGGTGGAGATTTGTCAAATACACATCATT | | CATTCA | | variant |
| | AGGTTGCGACAAACGGCAGAAGCTGGAGGAGG | | NNNNN | | |
| | AAGGGCCTGAGTCCGAGCAGAAGAACCTGCAG | | NNN | | |
| | GACCTATCATTCANNNNNNNNAAAGTTCTCCCA | | | | |
| | TCACATCAACCGGTGGCGCATTGCCACGAAGCA | | | | |
| | GGCCAATGGGGAGGACATCGATGTCACACAAC | | | | |
| | CaaatatagCAAGAAATCTATG | | | | |
| Var0156 | CATAGATTTCTTGGCCTTTATGCTGTGGTGTTGC | 19698 | ACCTAT | 19890 | Minimal |
| | GCCACGGTGGAGATTTGTCAAATACACATCATT | | CATTCA | | variant |
| | AGGTTGCGACAAACGGCAGAAGCTGGAGGAGG | | NNNNN | | |
| | AAGGGCCTGAGTCCGAGCAGAAGAACCTGCAG | | NNN | | |
| | GACCTATCATTCANNNNNNNNAAAGTTCTCCCA | | | | |
| | TCACATCAACCGGTGGCGCATTGCCACGAAGCA | | | | |
| | GGCCAATGGGGAGGACATCGATGTCACACAAC | | | | |
| | CaaagCAAGAAATCTATG | | | | |
| Var0157 | CATAGATTTCTTGGCCTTTATGCTGTGGTGTTGC | 19699 | ACCTAT | 19891 | Termination |
| | GCCACGGTggagatttgtcaaatacacataattaGGTTGCGAC | | CATTCA | | variant |
| | AAACGGCAGAAGCTGGAGGAGGAAGGGCCTGA | | NNNNN | | |
| | GTCCGAGCAGAAGAACCTGCAGGACCTATCATT | | NNN | | |
| | CANNNNNNNNAAAGTTCTCCCATCACATCAACC | | | | |
| | GGTGGCGCATTGCCACGAAGCAGGCCAATGGG | | | | |
| | GAGGACATCGATGTCACACAACCAAATATAAG | | | | |
| | AATTGTTAGCAAGAAATCTATG | | | | |
| Var0158 | CATAGATTTCTTGGCCTTTATGCTGTGGTGTTGC | 19700 | ACCTAT | 19892 | Termination |
| | GCCACGGTggagatttgtcaaatacacattattaGGTTGCGACA | | CATTCA | | variant |
| | AACGGCAGAAGCTGGAGGAGGAAGGGCCTGAG | | NNNNN | | |
| | TCCGAGCAGAAGAACCTGCAGGACCTATCATTC | | NNN | | |
| | ANNNNNNNNAAAGTTCTCCCATCACATCAACC | | | | |
| | GGTGGCGCATTGCCACGAAGCAGGCCAATGGG | | | | |
| | GAGGACATCGATGTCACACAACCAAATATAAG | | | | |
| | AATTGTTAGCAAGAAATCTATG | | | | |
| Var0159 | CATAGATTTCTTGGCCTTTATGCTGTGGTGTTGC | 19701 | ACCTAT | 19893 | Termination |
| | GCCACGGTggagatttgtcaaatacaaatcattaGGTTGCGAC | | CATTCA | | variant |
| | AAACGGCAGAAGCTGGAGGAGGAAGGGCCTGA | | NNNNN | | |
| | GTCCGAGCAGAAGAACCTGCAGGACCTATCATT | | NNN | | |
| | CANNNNNNNNAAAGTTCTCCCATCACATCAACC | | | | |
| | GGTGGCGCATTGCCACGAAGCAGGCCAATGGG | | | | |
| | GAGGACATCGATGTCACACAACCAAATATAAG | | | | |
| | AATTGTTAGCAAGAAATCTATG | | | | |
| Var0160 | CATAGATTTCTTGGCCTTTATGCTGTGGTGTTGC | 19702 | ACCTAT | 19894 | Termination |
| | GCCACGGTggagatttgtcaaatacatatcattaGGTTGCGACA | | CATTCA | | variant |
| | AACGGCAGAAGCTGGAGGAGGAAGGGCCTGAG | | NNNNN | | |
| | TCCGAGCAGAAGAACCTGCAGGACCTATCATTC | | NNN | | |
| | ANNNNNNNNAAAGTTCTCCCATCACATCAACC | | | | |
| | GGTGGCGCATTGCCACGAAGCAGGCCAATGGG | | | | |
| | GAGGACATCGATGTCACACAACCAAATATAAG | | | | |
| | AATTGTTAGCAAGAAATCTATG | | | | |
| Var0161 | CATAGATTTCTTGGCCTTTATGCTGTGGTGTTGC | 19703 | ACCTAT | 19895 | Termination |
| | GCCACGGTggagatttgtcaaatacaaataattaGGTTGCGAC | | CATTCA | | variant |
| | AAACGGCAGAAGCTGGAGGAGGAAGGGCCTGA | | NNNNN | | |
| | GTCCGAGCAGAAGAACCTGCAGGACCTATCATT | | NNN | | |
| | CANNNNNNNNAAAGTTCTCCCATCACATCAACC | | | | |
| | GGTGGCGCATTGCCACGAAGCAGGCCAATGGG | | | | |
| | GAGGACATCGATGTCACACAACCAAATATAAG | | | | |
| | AATTGTTAGCAAGAAATCTATG | | | | |
| Var0162 | CATAGATTTCTTGGCCTTTATGCTGTGGTGTTGC | 19704 | ACCTAT | 19896 | Termination |
| | GCCACGGTggagatttgtcaaatacaaattattaGGTTGCGACA | | CATTCA | | variant |
| | AACGGCAGAAGCTGGAGGAGGAAGGGCCTGAG | | NNNNN | | |
| | TCCGAGCAGAAGAACCTGCAGGACCTATCATTC | | NNN | | |
| | ANNNNNNNNAAAGTTCTCCCATCACATCAACC | | | | |
| | GGTGGCGCATTGCCACGAAGCAGGCCAATGGG | | | | |
| | GAGGACATCGATGTCACACAACCAAATATAAG | | | | |
| | AATTGTTAGCAAGAAATCTATG | | | | |
| Var0163 | CATAGATTTCTTGGCCTTTATGCTGTGGTGTTGC | 19705 | ACCTAT | 19897 | Termination |
| | GCCACGGTggagatttgtcaaatacatataattaGGTTGCGACA | | CATTCA | | variant |
| | AACGGCAGAAGCTGGAGGAGGAAGGGCCTGAG | | NNNNN | | |
| | TCCGAGCAGAAGAACCTGCAGGACCTATCATTC | | NNN | | |
| | ANNNNNNNNAAAGTTCTCCCATCACATCAACC | | | | |
| | GGTGGCGCATTGCCACGAAGCAGGCCAATGGG | | | | |
| | GAGGACATCGATGTCACACAACCAAATATAAG | | | | |
| | AATTGTTAGCAAGAAATCTATG | | | | |
| Var0164 | CATAGATTTCTTGGCCTTTATGCTGTGGTGTTGC | 19706 | ACCTAT | 19898 | Termination |
| | GCCACGGTggagatttgtcaaatacatattattaGGTTGCGACA | | CATTCA | | variant |
| | AACGGCAGAAGCTGGAGGAGGAAGGGCCTGAG | | NNNNN | | |
| | TCCGAGCAGAAGAACCTGCAGGACCTATCATTC | | NNN | | |
| | ANNNNNNNNAAAGTTCTCCCATCACATCAACC | | | | |
| | GGTGGCGCATTGCCACGAAGCAGGCCAATGGG | | | | |
| | GAGGACATCGATGTCACACAACCAAATATAAG | | | | |
| | AATTGTTAGCAAGAAATCTATG | | | | |
| Var0165 | CATAGATTTCTTGGCCTTTATGCTGTGGTGTTGC | 19707 | ACCTAT | 19899 | Termination |
| | GCCACGGTggagatttgtcaaataaacatcattaGGTTGCGAC | | CATTCA | | variant |
| | AAACGGCAGAAGCTGGAGGAGGAAGGGCCTGA | | NNNNN | | |
| | GTCCGAGCAGAAGAACCTGCAGGACCTATCATT | | NNN | | |
| | CANNNNNNNNAAAGTTCTCCCATCACATCAACC | | | | |
| | GGTGGCGCATTGCCACGAAGCAGGCCAATGGG | | | | |
| | GAGGACATCGATGTCACACAACCAAATATAAG | | | | |
| | AATTGTTAGCAAGAAATCTATG | | | | |
| Var0166 | CATAGATTTCTTGGCCTTTATGCTGTGGTGTTGC | 19708 | ACCTAT | 19900 | Termination |
| | GCCACGGTggagatttgtcaaatatacatcattaGGTTGCGACA | | CATTCA | | variant |
| | AACGGCAGAAGCTGGAGGAGGAAGGGCCTGAG | | NNNNN | | |
| | TCCGAGCAGAAGAACCTGCAGGACCTATCATTC | | NNN | | |
| | ANNNNNNNNAAAGTTCTCCCATCACATCAACC | | | | |
| | GGTGGCGCATTGCCACGAAGCAGGCCAATGGG | | | | |
| | GAGGACATCGATGTCACACAACCAAATATAAG | | | | |
| | AATTGTTAGCAAGAAATCTATG | | | | |
| Var0167 | CATAGATTTCTTGGCCTTTATGCTGTGGTGTTGC | 19709 | ACCTAT | 19901 | Termination |
| | GCCACGGTggagatttgtcaaataaaaatcattaGGTTGCGAC | | CATTCA | | variant |
| | AAACGGCAGAAGCTGGAGGAGGAAGGGCCTGA | | NNNNN | | |
| | GTCCGAGCAGAAGAACCTGCAGGACCTATCATT | | NNN | | |
| | CANNNNNNNNAAAGTTCTCCCATCACATCAACC | | | | |
| | GGTGGCGCATTGCCACGAAGCAGGCCAATGGG | | | | |
| | GAGGACATCGATGTCACACAACCAAATATAAG | | | | |
| | AATTGTTAGCAAGAAATCTATG | | | | |
| Var0168 | CATAGATTTCTTGGCCTTTATGCTGTGGTGTTGC | 19710 | ACCTAT | 19902 | Termination |
| | GCCACGGTggagatttgtcaaataaatatcattaGGTTGCGACA | | CATTCA | | variant |
| | AACGGCAGAAGCTGGAGGAGGAAGGGCCTGAG | | NNNNN | | |
| | TCCGAGCAGAAGAACCTGCAGGACCTATCATTC | | NNN | | |
| | ANNNNNNNNAAAGTTCTCCCATCACATCAACC | | | | |
| | GGTGGCGCATTGCCACGAAGCAGGCCAATGGG | | | | |
| | GAGGACATCGATGTCACACAACCAAATATAAG | | | | |
| | AATTGTTAGCAAGAAATCTATG | | | | |
| Var0169 | CATAGATTTCTTGGCCTTTATGCTGTGGTGTTGC | 19711 | ACCTAT | 19903 | Termination |
| | GCCACGGTggagatttgtcaaatataaatcattaGGTTGCGACA | | CATTCA | | variant |
| | AACGGCAGAAGCTGGAGGAGGAAGGGCCTGAG | | NNNNN | | |
| | TCCGAGCAGAAGAACCTGCAGGACCTATCATTC | | NNN | | |
| | ANNNNNNNNAAAGTTCTCCCATCACATCAACC | | | | |
| | GGTGGCGCATTGCCACGAAGCAGGCCAATGGG | | | | |
| | GAGGACATCGATGTCACACAACCAAATATAAG | | | | |
| | AATTGTTAGCAAGAAATCTATG | | | | |
| Var0170 | CATAGATTTCTTGGCCTTTATGCTGTGGTGTTGC | 19712 | ACCTAT | 19904 | Termination |
| | GCCACGGTggagatttgtcaaatatatatcattaGGTTGCGACA | | CATTCA | | variant |
| | AACGGCAGAAGCTGGAGGAGGAAGGGCCTGAG | | NNNNN | | |
| | TCCGAGCAGAAGAACCTGCAGGACCTATCATTC | | NNN | | |
| | ANNNNNNNNAAAGTTCTCCCATCACATCAACC | | | | |
| | GGTGGCGCATTGCCACGAAGCAGGCCAATGGG | | | | |
| | GAGGACATCGATGTCACACAACCAAATATAAG | | | | |
| | AATTGTTAGCAAGAAATCTATG | | | | |
| Var0171 | CATAGATTTCTTGGCCTTTATGCTGTGGTGTTGC | 19713 | ACCTAT | 19905 | Termination |
| | GCCACGGTggagatttgtaaaatacacatcattaGGTTGCGAC | | CATTCA | | variant |
| | AAACGGCAGAAGCTGGAGGAGGAAGGGCCTGA | | NNNNN | | |
| | GTCCGAGCAGAAGAACCTGCAGGACCTATCATT | | NNN | | |
| | CANNNNNNNNAAAGTTCTCCCATCACATCAACC | | | | |
| | GGTGGCGCATTGCCACGAAGCAGGCCAATGGG | | | | |
| | GAGGACATCGATGTCACACAACCAAATATAAG | | | | |
| | AATTGTTAGCAAGAAATCTATG | | | | |
| Var0172 | CATAGATTTCTTGGCCTTTATGCTGTGGTGTTGC | 19714 | ACCTAT | 19906 | Termination |
| | GCCACGGTggagatttgttaaatacacatcattaGGTTGCGACA | | CATTCA | | variant |
| | AACGGCAGAAGCTGGAGGAGGAAGGGCCTGAG | | NNNNN | | |
| | TCCGAGCAGAAGAACCTGCAGGACCTATCATTC | | NNN | | |
| | ANNNNNNNNAAAGTTCTCCCATCACATCAACC | | | | |
| | GGTGGCGCATTGCCACGAAGCAGGCCAATGGG | | | | |
| | GAGGACATCGATGTCACACAACCAAATATAAG | | | | |
| | AATTGTTAGCAAGAAATCTATG | | | | |
| Var0173 | CATAGATTTCTTGGCCTTTATGCTGTGGTGTTGC | 19715 | ACCTAT | 19907 | Termination |
| | GCCACGGTggagatttgtaaaataaacatcattaGGTTGCGAC | | CATTCA | | variant |
| | AAACGGCAGAAGCTGGAGGAGGAAGGGCCTGA | | NNNNN | | |
| | GTCCGAGCAGAAGAACCTGCAGGACCTATCATT | | NNN | | |
| | CANNNNNNNNAAAGTTCTCCCATCACATCAACC | | | | |
| | GGTGGCGCATTGCCACGAAGCAGGCCAATGGG | | | | |
| | GAGGACATCGATGTCACACAACCAAATATAAG | | | | |
| | AATTGTTAGCAAGAAATCTATG | | | | |
| Var0174 | CATAGATTTCTTGGCCTTTATGCTGTGGTGTTGC | 19716 | ACCTAT | 19908 | Termination |
| | GCCACGGTggagatttgtaaaatatacatcattaGGTTGCGACA | | CATTCA | | variant |
| | AACGGCAGAAGCTGGAGGAGGAAGGGCCTGAG | | NNNNN | | |
| | TCCGAGCAGAAGAACCTGCAGGACCTATCATTC | | NNN | | |
| | ANNNNNNNNAAAGTTCTCCCATCACATCAACC | | | | |
| | GGTGGCGCATTGCCACGAAGCAGGCCAATGGG | | | | |
| | GAGGACATCGATGTCACACAACCAAATATAAG | | | | |
| | AATTGTTAGCAAGAAATCTATG | | | | |
| Var0175 | CATAGATTTCTTGGCCTTTATGCTGTGGTGTTGC | 19717 | ACCTAT | 19909 | Termination |
| | GCCACGGTggagatttgttaaataaacatcattaGGTTGCGACA | | CATTCA | | variant |
| | AACGGCAGAAGCTGGAGGAGGAAGGGCCTGAG | | NNNNN | | |
| | TCCGAGCAGAAGAACCTGCAGGACCTATCATTC | | NNN | | |
| | ANNNNNNNNAAAGTTCTCCCATCACATCAACC | | | | |
| | GGTGGCGCATTGCCACGAAGCAGGCCAATGGG | | | | |
| | GAGGACATCGATGTCACACAACCAAATATAAG | | | | |
| | AATTGTTAGCAAGAAATCTATG | | | | |
| Var0176 | CATAGATTTCTTGGCCTTTATGCTGTGGTGTTGC | 19718 | ACCTAT | 19910 | Termination |
| | GCCACGGTggagatttgttaaatatacatcattaGGTTGCGACA | | CATTCA | | variant |
| | AACGGCAGAAGCTGGAGGAGGAAGGGCCTGAG | | NNNNN | | |
| | TCCGAGCAGAAGAACCTGCAGGACCTATCATTC | | NNN | | |
| | ANNNNNNNNAAAGTTCTCCCATCACATCAACC | | | | |
| | GGTGGCGCATTGCCACGAAGCAGGCCAATGGG | | | | |
| | GAGGACATCGATGTCACACAACCAAATATAAG | | | | |
| | AATTGTTAGCAAGAAATCTATG | | | | |
| Var0177 | CATAGATTTCTTGGCCTTTATGCTGTGGTGTTGC | 19719 | ACCTAT | 19911 | Termination |
| | GCCACGGTggagatttatcaaatacacatcattaGGTTGCGACA | | CATTCA | | variant |
| | AACGGCAGAAGCTGGAGGAGGAAGGGCCTGAG | | NNNNN | | |
| | TCCGAGCAGAAGAACCTGCAGGACCTATCATTC | | NNN | | |
| | ANNNNNNNNAAAGTTCTCCCATCACATCAACC | | | | |
| | GGTGGCGCATTGCCACGAAGCAGGCCAATGGG | | | | |
| | GAGGACATCGATGTCACACAACCAAATATAAG | | | | |
| | AATTGTTAGCAAGAAATCTATG | | | | |
| Var0178 | CATAGATTTCTTGGCCTTTATGCTGTGGTGTTGC | 19720 | ACCTAT | 19912 | Termination |
| | GCCACGGTggagatttttcaaatacacatcattaGGTTGCGACA | | CATTCA | | variant |
| | AACGGCAGAAGCTGGAGGAGGAAGGGCCTGAG | | NNNNN | | |
| | TCCGAGCAGAAGAACCTGCAGGACCTATCATTC | | NNN | | |
| | ANNNNNNNNAAAGTTCTCCCATCACATCAACC | | | | |
| | GGTGGCGCATTGCCACGAAGCAGGCCAATGGG | | | | |
| | GAGGACATCGATGTCACACAACCAAATATAAG | | | | |
| | AATTGTTAGCAAGAAATCTATG | | | | |
| Var0179 | CATAGATTTCTTGGCCTTTATGCTGTGGTGTTGC | 19721 | ACCTAT | 19913 | Termination |
| | GCCACGGTggagatttataaaatacacatcattaGGTTGCGACA | | CATTCA | | variant |
| | AACGGCAGAAGCTGGAGGAGGAAGGGCCTGAG | | NNNNN | | |
| | TCCGAGCAGAAGAACCTGCAGGACCTATCATTC | | NNN | | |
| | ANNNNNNNNAAAGTTCTCCCATCACATCAACC | | | | |
| | GGTGGCGCATTGCCACGAAGCAGGCCAATGGG | | | | |
| | GAGGACATCGATGTCACACAACCAAATATAAG | | | | |
| | AATTGTTAGCAAGAAATCTATG | | | | |
| Var0180 | CATAGATTTCTTGGCCTTTATGCTGTGGTGTTGC | 19722 | ACCTAT | 19914 | Termination |
| | GCCACGGTggagatttattaaatacacatcattaGGTTGCGACA | | CATTCA | | variant |
| | AACGGCAGAAGCTGGAGGAGGAAGGGCCTGAG | | NNNNN | | |
| | TCCGAGCAGAAGAACCTGCAGGACCTATCATTC | | NNN | | |
| | ANNNNNNNNAAAGTTCTCCCATCACATCAACC | | | | |
| | GGTGGCGCATTGCCACGAAGCAGGCCAATGGG | | | | |
| | GAGGACATCGATGTCACACAACCAAATATAAG | | | | |
| | AATTGTTAGCAAGAAATCTATG | | | | |
| Var0181 | CATAGATTTCTTGGCCTTTATGCTGTGGTGTTGC | 19723 | ACCTAT | 19915 | Termination |
| | GCCACGGTggagatttttaaaatacacatcattaGGTTGCGACA | | CATTCA | | variant |
| | AACGGCAGAAGCTGGAGGAGGAAGGGCCTGAG | | NNNNN | | |
| | TCCGAGCAGAAGAACCTGCAGGACCTATCATTC | | NNN | | |
| | ANNNNNNNNAAAGTTCTCCCATCACATCAACC | | | | |
| | GGTGGCGCATTGCCACGAAGCAGGCCAATGGG | | | | |
| | GAGGACATCGATGTCACACAACCAAATATAAG | | | | |
| | AATTGTTAGCAAGAAATCTATG | | | | |
| Var0182 | CATAGATTTCTTGGCCTTTATGCTGTGGTGTTGC | 19724 | ACCTAT | 19916 | Termination |
| | GCCACGGTggagattttttaaatacacatcattaGGTTGCGACA | | CATTCA | | variant |
| | AACGGCAGAAGCTGGAGGAGGAAGGGCCTGAG | | NNNNN | | |
| | TCCGAGCAGAAGAACCTGCAGGACCTATCATTC | | NNN | | |
| | ANNNNNNNNAAAGTTCTCCCATCACATCAACC | | | | |
| | GGTGGCGCATTGCCACGAAGCAGGCCAATGGG | | | | |
| | GAGGACATCGATGTCACACAACCAAATATAAG | | | | |
| | AATTGTTAGCAAGAAATCTATG | | | | |
| Var0183 | CATAGATTTCTTGGCCTTTATGCTGTGGTGTTGC | 19725 | ACCTAT | 19917 | Termination |
| | GCCACGGTggagatttgtcaaatacacatccttaGGTTGCGAC | | CATTCA | | variant |
| | AAACGGCAGAAGCTGGAGGAGGAAGGGCCTGA | | NNNNN | | |
| | GTCCGAGCAGAAGAACCTGCAGGACCTATCATT | | NNN | | |
| | CANNNNNNNNAAAGTTCTCCCATCACATCAACC | | | | |
| | GGTGGCGCATTGCCACGAAGCAGGCCAATGGG | | | | |
| | GAGGACATCGATGTCACACAACCAAATATAAG | | | | |
| | AATTGTTAGCAAGAAATCTATG | | | | |
| Var0184 | CATAGATTTCTTGGCCTTTATGCTGTGGTGTTGC | 19726 | ACCTAT | 19918 | Termination |
| | GCCACGGTggagatttgtcaaatacacatcgttaGGTTGCGAC | | CATTCA | | variant |
| | AAACGGCAGAAGCTGGAGGAGGAAGGGCCTGA | | NNNNN | | |
| | GTCCGAGCAGAAGAACCTGCAGGACCTATCATT | | NNN | | |
| | CANNNNNNNNAAAGTTCTCCCATCACATCAACC | | | | |
| | GGTGGCGCATTGCCACGAAGCAGGCCAATGGG | | | | |
| | GAGGACATCGATGTCACACAACCAAATATAAG | | | | |
| | AATTGTTAGCAAGAAATCTATG | | | | |
| Var0185 | CATAGATTTCTTGGCCTTTATGCTGTGGTGTTGC | 19727 | ACCTAT | 19919 | Termination |
| | GCCACGGTggaggtttgtcaaatacacaccattaGGTTGCGAC | | CATTCA | | variant |
| | AAACGGCAGAAGCTGGAGGAGGAAGGGCCTGA | | NNNNN | | |
| | GTCCGAGCAGAAGAACCTGCAGGACCTATCATT | | NNN | | |
| | CANNNNNNNNAAAGTTCTCCCATCACATCAACC | | | | |
| | GGTGGCGCATTGCCACGAAGCAGGCCAATGGG | | | | |
| | GAGGACATCGATGTCACACAACCAAATATAAG | | | | |
| | AATTGTTAGCAAGAAATCTATG | | | | |
| Var0186 | CATAGATTTCTTGGCCTTTATGCTGTGGTGTTGC | 19728 | ACCTAT | 19920 | Termination |
| | GCCACGGTggagctttgtcaaatacacagcattaGGTTGCGAC | | CATTCA | | variant |
| | AAACGGCAGAAGCTGGAGGAGGAAGGGCCTGA | | NNNNN | | |
| | GTCCGAGCAGAAGAACCTGCAGGACCTATCATT | | NNN | | |
| | CANNNNNNNNAAAGTTCTCCCATCACATCAACC | | | | |
| | GGTGGCGCATTGCCACGAAGCAGGCCAATGGG | | | | |
| | GAGGACATCGATGTCACACAACCAAATATAAG | | | | |
| | AATTGTTAGCAAGAAATCTATG | | | | |
| Var0187 | CATAGATTTCTTGGCCTTTATGCTGTGGTGTTGC | 19729 | ACCTAT | 19921 | Termination |
| | GCCACGGTggagattggtcaaatacccatcattaGGTTGCGAC | | CATTCA | | variant |
| | AAACGGCAGAAGCTGGAGGAGGAAGGGCCTGA | | NNNNN | | |
| | GTCCGAGCAGAAGAACCTGCAGGACCTATCATT | | NNN | | |
| | CANNNNNNNNAAAGTTCTCCCATCACATCAACC | | | | |
| | GGTGGCGCATTGCCACGAAGCAGGCCAATGGG | | | | |
| | GAGGACATCGATGTCACACAACCAAATATAAG | | | | |
| | AATTGTTAGCAAGAAATCTATG | | | | |
| Var0188 | CATAGATTTCTTGGCCTTTATGCTGTGGTGTTGC | 19730 | ACCTAT | 19922 | Termination |
| | GCCACGGTggagattcgtcaaatacgcatcattaGGTTGCGAC | | CATTCA | | variant |
| | AAACGGCAGAAGCTGGAGGAGGAAGGGCCTGA | | NNNNN | | |
| | GTCCGAGCAGAAGAACCTGCAGGACCTATCATT | | NNN | | |
| | CANNNNNNNNAAAGTTCTCCCATCACATCAACC | | | | |
| | GGTGGCGCATTGCCACGAAGCAGGCCAATGGG | | | | |
| | GAGGACATCGATGTCACACAACCAAATATAAG | | | | |
| | AATTGTTAGCAAGAAATCTATG | | | | |
| Var0189 | CATAGATTTCTTGGCCTTTATGCTGTGGTGTTGC | 19731 | ACCTAT | 19923 | Termination |
| | GCCACGGTggagatttgtccaatacacatcattaGGTTGCGAC | | CATTCA | | variant |
| | AAACGGCAGAAGCTGGAGGAGGAAGGGCCTGA | | NNNNN | | |
| | GTCCGAGCAGAAGAACCTGCAGGACCTATCATT | | NNN | | |
| | CANNNNNNNNAAAGTTCTCCCATCACATCAACC | | | | |
| | GGTGGCGCATTGCCACGAAGCAGGCCAATGGG | | | | |
| | GAGGACATCGATGTCACACAACCAAATATAAG | | | | |
| | AATTGTTAGCAAGAAATCTATG | | | | |
| Var0190 | CATAGATTTCTTGGCCTTTATGCTGTGGTGTTGC | 19732 | ACCTAT | 19924 | Termination |
| | GCCACGGTggagatttgtcgaatacacatcattaGGTTGCGAC | | CATTCA | | variant |
| | AAACGGCAGAAGCTGGAGGAGGAAGGGCCTGA | | NNNNN | | |
| | GTCCGAGCAGAAGAACCTGCAGGACCTATCATT | | NNN | | |
| | CANNNNNNNNAAAGTTCTCCCATCACATCAACC | | | | |
| | GGTGGCGCATTGCCACGAAGCAGGCCAATGGG | | | | |
| | GAGGACATCGATGTCACACAACCAAATATAAG | | | | |
| | AATTGTTAGCAAGAAATCTATG | | | | |
| Var0191 | CATAGATTTCTTGGCCTTTATGCTGTGGTGTTGC | 19733 | ACCTAT | 19925 | Termination |
| | GCCACGGTggagatttgccaaatacacatcattaGGTTGCGAC | | CATTCA | | variant |
| | AAACGGCAGAAGCTGGAGGAGGAAGGGCCTGA | | NNNNN | | |
| | GTCCGAGCAGAAGAACCTGCAGGACCTATCATT | | NNN | | |
| | CANNNNNNNNAAAGTTCTCCCATCACATCAACC | | | | |
| | GGTGGCGCATTGCCACGAAGCAGGCCAATGGG | | | | |
| | GAGGACATCGATGTCACACAACCAAATATAAG | | | | |
| | AATTGTTAGCAAGAAATCTATG | | | | |

[3355] The screen methodology is depicted in FIG. 114. Essentially, the ncRNA library is co-transfected into 293T cells with Cas9 mRNA, reverse transcriptase mRNA, and guide RNA targeting EMX1 site. Total nucleic acid including RNA, ssDNA is collected 16 hours after transfection and genomic DNA (gDNA) is harvested 96 hours after transfection. Barcode abundances are measured by in-house high-throughput sequencing of ncRNA, ssDNA template, and genomic EMX1 sites. Barcode counts in ssDNA and gDNA are first normalized to the input ncRNA level from initial ncRNA library. Then the per variant ssDNA template production level or gDNA insertion level are calculated by averaging unique barcodes associated with such variant.

### Results:

[3356] Results are shown in the scatter plot of FIG. 115. Genomic insertion level is correlated with the ssDNA template production level (Figure), and the negative control ncRNA exhibits low efficiency in both ssDNA production as well as gDNA insertion. ncRNA variants that exhibit higher activity than the WT R6342S ncRNA can be identified in FIG. 115 as those data points falling in the top right quadrant. Below in Table 31B are listed 13 of the top performing ncRNA variants that show over 1.5-fold higher activity in both levels of gDNA insertion and ssDNA production.

TABLE 31B
top performing ncRNA variants

| Variants with improved performance | Type of variation |
|---|---|
| Var0015 | a1a2 variant |
| Var0020 | a1a2 variant |
| Var0026 | a1a2 variant |
| Var0031 | a1a2 variant |
| Var0044 | msD stem variant |
| Var0060 | msD stem variant |
| Var0061 | msD stem variant |
| Var0062 | msD stem variant |
| Var0065 | msD stem variant |
| Var0066 | msD stem variant |
| Var0070 | msD stem variant |
| Var0071 | msD stem variant |
| Var0076 | msD stem variant |

### Examples: Materials and Methods

[3357] Mammalian cell culture HEK293T (ATCC CRF-3216) or 293T-Cas9 (Genecopoeia SL502) cells were cultured in Dulbecco's modified Eagle's medium (DMEM) plus GlutaMAX (Thermo Fisher Scientific), supplemented with 10% (v/v) fetal bovine serum (Gibco). Cells were maintained at 37° C. with 5% C02.

[3358] Genomic DNA extraction After incubation, the media was removed from the cells and genomic DNA was extracted by the addition of prepGEM reagent (Thomas Scientific: PUN0050) directly into each well of the tissue culture plate. Lysed cells were transferred to a 96 well PCR plate and incubated at 72° C. for 10 minutes, followed by 95° C. enzyme inactivation step for 2 minutes.

[3359] High-throughput DNA sequencing of genomic DNA samples Human EMX1 gene or AAVS1 locus was amplified from genomic DNA samples and sequenced on an Illumina NextSeq. Briefly, amplification primers containing Illumina forward and reverse adapters were used for a first round of PCR (PCR1) amplifying EMX1 targeting site. 25 μl PCR1 reactions were performed with 0.3 μM of each forward and reverse primer, 1 μl of genomic DNA extract and 12.5 μl of KAPA HIFI HOTSTART PCR master mix. PCR reactions were carried out as follows: 95° C. for 1 minute, then 25 cycles of [98° C. for 20 seconds, 65° C. for 15 seconds, and 72° C. for 15 seconds], followed by a final 72° C. extension for 2 minutes. PCR reactions were purified using Ampure XP beads (Beckman Coulter) and eluted in 20 μl H20. Unique Illumina barcoding primer pairs were added to each sample in a secondary PCR reaction (PCR2). Specifically, 25 μl PCR2 reactions were performed with 5 μl of IDT for Illumina UDI primers (Illumina), 1 μl of purified PCR1 reaction, and 12.5 μl of KAPA HIFI HOTSTART PCR master mix. PCR reactions were carried out as follows: 95° C. for 3 minutes, then 10 cycles of [95° C. for 30 seconds, 55° C. for 30 seconds, and 72° C. for 30 seconds], followed by a final 72° C. extension for 5 minutes. PCR2 reactions were purified by SequalPrep Normalization plate kit (Thermo Fisher Scientific) and pooled. Size and purity were evaluated by Tape station D1000 assay (Agilent). DNA concentration was measured by fluorometric quantification (Qubit, Thermo Fisher Scientific) and libraries were sequenced with 30% PhiX sequencing control on an Illumina NextSeq 2000 instrument using P1 or P2 300 cycle kit. Sequencing reads were demultiplexed and alignment of amplicon sequences to a reference sequence was performed using CRISPresso2. CRISPresso2 was run in HDR mode using the desired sequence as the expected allele and precise editing yield was calculated as the number of HDR aligned reads divided by total aligned reads.

[3360] Junction qPCR for GFP integration qPCR was used to determine presence of GFP at the EMX1 locus post editing. Primers were designed to flank the 5′ and 3′ junction of GFP insertion at EMX1 locus. Briefly, 25 μl qPCR reactions were performed with 12.5 μl of KAPA HiFi HotStart ReadyMix (Roche), 0.3 μM of each forward and reverse primer, 2 μl of gDNA, 1× of SYBR Green (Thermo Fisher Scientific: 57563), and 1× of Rox Reference Dye (Thermo Fisher Scientific: 54881). qPCR reactions were carried out as follows: 50° C. for 2 minutes, 95° C. for 3 minutes, then 40 cycles of [98° C. for 30 seconds, 67° C. for 30 seconds, and 72° C. for 30 seconds], 72° C. extension for 2 minutes, followed by a melt curve analysis with 95° C. for 15 seconds, 60° C. for 1 minute and 95° C. for 1 second. Delta Ct was obtained by subtracting PCR surrounding junction's Ct value from PCR surrounding cutting's Ct value to relatively quantify GFP insertion at EMX1 locus. Additionally, qPCR samples were run on Tapestation 4200 (Agilent) with High-Sensitivity D1000 Reagents (Agilent) to confirm band size at expectation.

[3361] Plasmid based gene editing. Plasmids encoding retrons were synthesized by Twist Bioscience. Plasmids containing Cas12a and TnpB were synthesized by Azenta Life Sciences. The Cas9-mCherry and Cas9-mCherry EMX1 sgRNA plasmids were synthesized by Vector Builder Inc. Quintara Biosciences synthesized deletion variants of RTX3_6342S. For 293T-Cas9 transfections, 25,000 293T-Cas9 cells (Genecopoeia: SL502) were transfected using Lipofectamine 3000 (Thermofisher: L3000001) according to the manufacturer's protocol. Transfected cells were incubated at 37° C. for 72 hrs before lysis in prepGEM reagent (Thomas Scientific: PUN0050) according to the manufacturer's protocol. For K562 cells, A Neon or Lonza Electroporation system was used. 100,000 K562 cells were electroporated in OPTI-MEM (Neon) or SF buffer (Lonza) using settings of 1450V with three 10 ms pulses (Neon) or EH120 (Lonza) and 500 ng of total plasmid DNA (250 ng Retron RT+ncRNA/EMX1 sgRNA fusion, and either 250 ng Cas9-mCherry, 250 ng Cas9-mCherry EMX1 sgRNA, 250 ng Cas12a EMX1, or 250 ng TnpB EMX1. Cells were allowed to incubate at 37° C. for 72 hrs. A 1 μL aliquot of crude lysate was used as template for amplification of the EMX1 target site by PCR. Illumina adaptors and UDIs were added in a second round of PCR before loading onto an Illumina NextSeq. The resulting FASTQ files were used as input for CRISPResso2 which quantified precise editing and indels at the EMX1 locus.

[3362] In vitro transcription Plasmid templates were synthesized by Twist Bioscience. T7 promoter was inserted upstream of RT or ncRNA sequences. Plasmid was linearized by Sbf1-HF enzyme (NEB, R3642S) or EcoR V (NEB, R0195L) for 16 hour at 37° C. and the complete linearization was checked by agarose gel electrophoresis. Linearized template was purified by GeneRT PCR purification kit (K0701, Thermo Fisher Scientific) and quantified by Nanodrop. mRNA was synthesized for 16 hour at 37° C. using HiScribe T7 mRNA kit with CleanCap Reagent AG (NEB, E2080S) and ncRNA using HiScribe T7 High Yield RNA synthesis kit (NEB, 2040S) following manufacturer's protocol. After DNAsel treatment, RNA was purified using Qiagen RNeasy midi kit (Qiagen, 75144). RNA concentration was measured by Nanodrop (Thermo Fisher) and purity and size were evaluated by RNA ScreenTape analysis on Tape station (Agilent). RT mRNA was further poly (A) tailed by E. coli Poly(A) polymerase (NEB, M0276) and purified by Qiagen RNeasy midi kit. Tail length was estimated by RNA ScreenTape analysis by comparing before and after poly (A) adenylation.

[3363] RNA Transfection by Neon Electroporation system HEK293T (ATCC CRF-3216) or 293T-Cas9 (Genecopoeia SL502) cells were harvested and resuspended in R buffer. 50,000 cells with 1 μl of RNA mixture were electroporated by 10 l Neon tip at 1150 voltage, 20 pulses. Electroporated cells were gently transferred to 96 well plate (VWR) containing prewarmed culture media and cultured for 72 hours before genomic DNA extraction.

[3364] RNA Transfection by Lipofectamine MessengerMAX 20,000 HEK293T (ATCC CRF-3216) cells were seeded in 96 well plates. 120,000 cells were seeded in 24 well plates. 16-24 hours post-seeding, cells were transfected with 0.3 μl (or 0.1 μl of Lipofectamine MessengerMax per 100 ng of RNA) of Lipofectamine MessengerMax (Thermo Fisher Scientific) with appropriate amount of RNA mixture. Cells were cultured for 72 hours before genomic DNA extraction.

[3365] Circularization of ncRNA The template was designed adopting the strategy and sequences shown in (27). In vitro transcription was performed similarly as described above except that 7.5 mM pf NTPs were used instead of 10 mM concentration. After DNAsel treatment, RNA was purified using Qiagen RNeasy midi kit (Qiagen, 75144). RNA was treated with RNAse R (Biosearch, RNR0725) to enrich circular RNA and purified using Qiagen Rneasy modi kit. RNA concentration was measured by Nanodrop (Thermo Fisher) and purity and size were evaluated by RNA ScreenTape analysis on Tape station (Agilent).

### EXAMPLES: REFERENCES

[3366] 1. Are we creating a new phenotype? M F, Dohrn. 2021, Neurological Research and Practice.
[3367] 2. Val50Met hereditary transthyretin amyloidosis: not just a medical problem but a psychosocial burden. J, Gonzalez-Moreno. s.l.: Orphanet Journal of Rare Diseases, 2021, Vol. 16.
[3368] 3. Synthetic DNA delivery systems. D, Luo. 2000, Nature Biotechnology, pp. 33-37.
[3369] 4. rAAV immunogenicity, toxicity, and durability in 255 clinical trials: A meta-analysis. W, Shen. 2022, Frontiers in Immunology.
[3370] 5. Reverse transcriptase associated with the biosynthesis of the branched RNA-linked msDNA in Myxococcus xanthus. S, inouye. s.l.: Cell, 1989, Vol. 56. 709-717.
[3371] 6. Bacterial retrons function in anti-phage defense. A, Millman. s.l.: Cell, 2020, Vol. 183. 1551-1561.
[3372] 7. Search-and-replace genome editing without double-strand breaks or donor DNA. A V, anzalone. 2019, Nature, pp. 149-157.
[3373] 8. Branched RNA covalently linked to the 5′ end of a single-stranded DNA in Stigmatella aurantiaca. T, Furuichi. 1, s.l.: Cell, 1987, Vol. 48. 47-53.
[3374] 9. Retrons and their applications in genome engineering. A J, Simon. 21, s.l.: Nucleic Acids Research, 2019, Vol. 47.
[3375] 10. Systematic prediction of genes functionally associated with bacterial retrons and classification of the encoded tripartite system. M R, Mestre. 22, s.l.: Nucleic Acids Research, 2020, Vol. 48.
[3376] 11. Precise genome editing across kingdoms of life using retron-derived DNA. S C, lopez. 2, s.l. Nature Chemical Biology, 2021, Vol. 18.
[3377] 12. Precise Gene Editing Preserves Hematopoietic Stem Cell Function following Transient p53-mediated DNA Damage Response. Schiorli, Giulia. s.l.: Cell Stem Cell, 2019, Vol. 24.
[3378] 13. Initiation of homologous recombination at DNA nicks. Maizels N, Davis L. 14, s.l.: Nucleic Acids Research, 2018, Vol. 46.
[3379] 14. Cpf1 is a single RNA-guided endonuclease of a class 2 CRISPR-Cas system. Zetsche B, Gootenberg J S, Abudayyeh 00, Slaymaker I M, Makarova K S, Essletzbichler P, Volz S E, Joung J, Van der Oost J, Regev A, Koonin E V, Zhang F. 3, s.l.: Cell, 2015, Vol. 163.
[3380] 15. Transposase-associated TnpB is a programmable RNA-guided DNA endonuclease. Karvelis, T., Druteika, G., Bigelyte, G. s.l.: Nature, 2021, Vol. 599.
[3381] 16. Highly accurate protein structure prediction with AlphaFold. Jumper, J., Evans, R., Pritzel, A. s.l.: Nature, 2021, Vol. 596.
[3382] 17. M-MuLV reverse transcriptase: Selected properties and improved mutants. Oscorbin I P, Filipenko M L. s.l.: Comput Struct Biotechnol J, 2021, Vol. 19.
[3383] 18. Drag-and-drop genome insertion of large sequences without double-strand DNA cleavage using CRISPR-directed integrases. Yarnall MTN, Ioannidi E O, Schmitt-Ulms C, Krajeski R N et al. 4, s.l.: Nat Biotechnol, 2023, Vol. 41.
[3384] 19. The attachment of a DNA-binding Sso7D-like protein improves processivity and resistance to inhibitors of M-MuLV reverse transcriptase. Oscorbib I P, Wong P F et al. 24, s.l.: FEBS Lett, 2020, Vol. 594.
[3385] 20. Engineered CRISPR primer editors with compact, untethered reverse transcriptases. Grünewald, J., Miller, B. R., Szalay, R. N et al. s.l.: Nat Biotechnol, 2023, Vol. 41.
[3386] 21. Enhancing homology-directed genome editing by active and inactive CRISPR CAS9 using asymmetric donor DNA. Richardson, Christopher D. s.l.: Nature Biotechnology, 2016, Vol. 34.
[3387] 22. Self-coded 3′ extension of run-off transcripts produces aberrant products during in vitro transcription with T7polymerase. F J Triana-Alonso, M Dabrowski, J Wadzack, K H Nierhaus. 11, s.l.: J Biol Chem, 1995, Vol. 270.
[3388] 23. Imaging Single mRNA molecules in mammalian cells using an optimized MS2-MCP system. M Vera, E Tutucci, R H Singer. s.l.: Methods Mol Biol, 2019, Vol. 2038.
[3389] 24. Gene regulation by long non-coding RNAs and its biological functions. L Statello, C-J Guo, L-L Chen, M Huarte. s.l.: Nature reviews molecular cell biology, 2021, Vol. 22.
[3390] 25. Precise and efficient nucleotide substitution near genomic nick via noncanonical homology-directed repair. Nakajuma K, Zhou Y, Tomita A, Hirade Y, Gurumurthy C B, Nakada S. 2, s.l.: Genome Research, 2018, Vol. 28.
[3391] 26. Double nicking by RNA-guided CRISPR Cas9 for enhanced genome editing specificity. Ran F A, Hsu P D, Lin C Y, Gootenberg J S, Konermann S, Trevino A E, Scott D A, Inoue A, Matoba, S, Zhang Y, Zhang F. 6, s.l.: Cell, 2013, Vol. 154.
[3392] 27. Engineering circular RNA for potent and stable translation in eukaryotic cells. Wesselhoeft R A, Kowalski P S, Anderson D G. s.l.: Nature Communications, 2018, Vol. 9.
[3393] 28. Retrons, msDNA, and the bacterial genome. Lampson B C, Inouye M, Inouye S. s.l.: Cytogenet Genome Res, 2005, Vol. 110.
[3394] 29. Reverse transcriptase from bacterial retrons require specific secondary structure at the 5′-end of the template for the cDNA priming reaction. Shimamoto T, Hsu M Y, Inouye S, Inoye M. 4, s.l.: JBC, 1993, Vol. 268.
[3395] 30. In vivo Exon Replacement in the Mouse Atp7b Gene by the Cas9 system. Liu L, Cao J, Chang Q, Xing F, Yan G, Fu L, Wang H, Ma Z, Chen X, Li Y, Li S. 9, s.l.: Human Gene Therapy, 2019, Vol. 30.
[3396] 31. Retron reverse transcriptase termination and phage defense are dependent on host RNase H1. Palka C, Fishman C B, Bhattarai-Kline S, Myers S A, Shipman S L. 6, s.l.: Nucleic Acids Res, 2022, Vol. 50.
[3397] 32. Frequent aneuploidy in primary human T cells after CRISPR-Cas9 cleavage. Nahmad A D, Reuveni E, Goldschmidt E et al. s.l.: Nat Biotechnol, 2022, Vol. 10.
[3398] 33. Deep mutational scanning of S. pyogenes Cas9 reveals important functional domains. Spencer J M, Zhang X. s.l.: Sci. Rep., 2017, Vol. 7.
[3399] 34. In vivo genome editing improves muscle function in a mouse model of Duchenne muscular dystrophy. Nelson C E, Hakim C H, Ousterout D G et al. 6271, s.l.: Science, 2016, Vol. 351.
[3400] 35. Clinically relevant correction of Recessive Dystrophic Epidermolysis Bullosa by dual sgRNA CRISPR/Casi-mediated gene editing. Bonafont J, Mencia A, Garcia M et al. 5, s.l.: Mol Ther, 2019, Vol. 27.
[3401] 36. CRISPR/Cas9-mediated excision of ALS/FTD-causing hexanucleotide repeat expansion in C90RF72 rescues major disease mechanisms in vivo and in vitro. Meij boom K E, Abdallah A, Forham N P et al. 6286, s.l.: Nature Communications, 2022, Vol. 13.
[3402] 37. Modifications in an Emergency: The role of N1-Methylpseudouridine in COVID-19 Vaccines. Nace K D, Meier J L. 5, s.l.: ACS Cent Sci, 2021, Vol. 7.
[3403] 38. Genetic engineering of T cells for immunotherapy. Ellis G I, Sheppard N C, Riley J L. s.l. Nature reviews genetics, 2021, Vol. 22.
[3404] 39. Lipid nanoparticles for mRNA delivery. Hou Z, Zaks T, Langer R, Dong Y. s.l.: Nature Reviews Materials, 2021, Vol. 6.

### Examples: Sequences

Select RT and ncRNA Sequences—Summary

| Description | SEQ ID NO: |
|---|---|
| EMX1 gRNA sequence (nt) | 19109 |
| Eco1 ncRNA (nt) | 19110 |
| AcoI ncRNA (nt) | 19111 |
| RTX_1262 RT (aa) | 1262 |
| RTX_1262 ncRNA (nt) | 15327 |
| RTX3_2042 RT (aa) | 2042 or 19112 |
| RTX_2042 ncRNA (nt) | 19113 |
| RTX_2781 RT (aa) | 2781 |
| RTX_2781 ncRNA (nt) | 16411 |
| RTX_6083v1 RT (aa) | 6083 or 19114 |
| RTX3_6083v1 ncRNA (nt) | 18547 |
| RTX_6342 RT (aa) | 6342 |
| RTX_6342 ncRNA (nt) | 18731 |
| RTX_6342L ncRNA (nt) | 19927 |
| RTX_6342S ncRNA (nt) | 19928 |
| Engineered 6342S ncRNA + HDR template | 19929 |
| Engineered 6342L ncRNA + HDR template | 19930 |
| RTX_6943 RT (aa) | 6943 or 19116 |
| RTX_6943 ncRNA (nt) | 19053 |
| Engineered RTX_6943 ncRNA | 19117 |
| Eco1 RT (nt | 19118 |
| Eco1 ncRNA (nt) | 19119 |
| Eco3 RT (nt) | 19120 |
| Eco3 ncRNA (nt) | 19121 |
| Eco5 RT - (nt) | 19122 |
| Eco5 ncRNA (nt) | 19123 |
| EMX1 - sgRNA modified (nt) | 19124 |
| EMX1 sgRNA unmodified (nt) | 19125 |

Select RT and ncRNA Sequences

EMX1 s.p Cas9 gRNA
(SEQ ID NO: 19109)
GAGTCCGAGCAGAAGAAGAA
Ecol ncRNA + HDR Template
(SEQ ID NO: 19110)
TGATAAGATTCCGTATGCGCACCCTTAGCGAGAGGTTTATCATTAAGGTC
AACCTCTGGATGTTGTTTCGGCATCCTGCATTGAATCTGAGTTACTGTCT
GTTTTCCTACAAACGGCAGAAGCTGGAGGAGGAAGGGCCTGAGTCCGAGC
AGAAGAAAAAGTTCTCCCATCACATCAACCGGTGGCGCATTGCCACGAAG
CAGGCCAATGGGGAGGACATCGATGTCAAGGAAACCCGTTTCTTCTGACG
TAAGGGTGCGCATACGGAATCTTATCA
Acol ncRNA + HDR Template
(SEQ ID NO: 19111)
CCGTAGTGGGAGCCTCAGGCGAGGGTGTGTATCATGCCCGTTCTGCCAAG
ACCCACCAAAGAAGGGCACCGTGGAGGACAAACGGCAGAAGCTGGAGGAG
GAAGGGCCTGAGTCCGAGCAGAAGAAACAGAAGTGCAAAGTTCTCCCATC
ACATCAACCGGTGGCGCATTGCCACGAAGCAGGCCAATGGGGAGGACATC
GATGTCACCTCCACGGTGCAATGCGAAAGCAACTTGAGGCTTTGCTTAGT
ATGAGGCTCCCACTACGG
Retron 1262
RT
(SEQ ID NO: 1262)
MISFSEIKSRNDFADALQIPRSVLTHVLYIAKPESFYESFTIPKKNGEDR
IIMAPKGTLKSIQTKLSKQLVEYRASISQKGQEKSNISHGFEREKSIITN
AQIHRNKRYVINYDLKDFFDSFHFGRVVGFFEKNKHFLLPYEVAVIIAQL
TCYNGRLPQGAPTSPVITNLICEILDYRVLKIAKRYKLDYTRYADDLTFS
TNYSRFLEVFDSFAKELLQEISNSGFTINQSKTRLLYRDSRQEVTGLVVN
KKIGVNREYVKSTRAMAQALYSTGEFTINGIPGTIKQLEGRFGFIDQLDH
YNNVIDDAKHDAYSLNGREKQFQEFLFFKTFFFNEYPLVITEGKTDIRYL
KAALKSLHQKYPELICKEDDGTFRFKISFFRRSKRWKYFFGISKDGADAM
KLLYRFFTGQKGVKNYYRLFAEKYKAVQRNPVIMLFDNEMESKRPLNKFI
SEEVKIPSSEQQLFKEQLYYHLIPGSKTYLMTHPLPPGKTEAEIEDLFPT
EVLGVKLDGKSFSTKDKFDTSKFYGKDIFSSYVYEHWKSIDFSGFIPLLD
KINMLVQNEKKPGLNT
ncRNA
(SEQ ID NO: 15327)
GAGCGTGTGACAAGATTTTGGGCTTGTGTTTCGCAAGCTTTGATTAAAAT
GGTAGATGGATTTGCTATCTATCGTCATTTCCAGTACTGTTATGTTTATG
TTCTGTTTACCCGTATGCACCATCCGCATAATGAGTTGTCACACGCTC
Retron 2042
RT
(SEQ ID NO: 19112 or SEQ ID NO: 2042)
MKDDQYSQWKKYYESRGILPEIQDKLLNYAKIHIDNNTPVIFNFEHLTLL
LGREKNYLSSVVNSPDSHYRKFKIKKRSGGEREITAPYLSLLEMQYWIYR
NILINVKIHYAAHGFAQDKSIITNSRNHLGQKHLLKMDLKDFFPSIKLNR
IIYIFKSLGYPNIIAFYLASICSYKGHLPQGSPTSPILSNIVSITLDNRL
VKFARKMKLRYSRYADDLTFSGDKIPTNYIKYITDIINDEGFEVNDTKTK
LYLKAGKRIVTGISVIGNDPKLPREYKRKLKQELHYIFTYGIGSHMAKKK
IKKINYLYRIIGKVNFWLNIEPDNEYARNAKAKLLLLIDN*
Cognate ncRNA
(SEQ ID NO: 15833)
AGGTGGTTATATTCTAGTATTTATGAAGTGTAGTCGCTTCGATCGTTAAG
GCTGATTTTAACCTCTGCATAATAATATCGGTAGATATTATTATGCACGC
TCCCTTTAGCAGAGCTAAGAATCGCTCACTCAGGCACAAGCTTTGAGGAG
CGACCTCCTCAAAGCTTGTGCCTGAGTGAGAGCTAAAGAAAAGAAAAGTA
GAATAAGCCACCT
Engineered 2042 ncRNA: RTX3_2042
ncRNA + HDR_Template
(SEQ ID NO: 19113)
GTTAAGGTGGTTATATTCTAGTATTTATGAAGTGTAGTCGCTTCGATCGT
TAAGGCTGATTTTAACCTCTGCATAATAATATCGGTAGATATTATTATGC
ACGCTCCCTTTAGCAGAGCTAAGAATCGCTCACTCAGGCACAAGCTTTGA
GGACAAACGGCAGAAGCTGGAGGAGGAAGGGCCTGAGTCCGAGCAGAAGA
ATCCTAAGAGAAAAGTTCTCCCATCACATCAACCGGTGGCGCATTGCCAC
GAAGCAGGCCAATGGGGAGGACATCGATGTCACCTCAAAGCTTGTGCCTG
AGTGAGAGCTAAAGAAAAGAAAAGTAGAATAAGCCACCTTAAC
Retron 2781
RT
(SEQ ID NO: 2781)
MSGRLWKYLTPQQEREFILSLNLLPASCRKRMSGEAQLALLYAISNHVER
HYRKVRIPKKDGKSRRLLVPDGLLKGVQRNILRHCLDGRSVSEYACAYRR
GLSAADNAAPHAGGGKDKLLLKLDIRDFFDSILFWQVYGAAFPGSLFPPA
AAGLLTHLCCCGDRLPQGAPTSPAISNLVMKPFDEFMGAWCRQRQIVYTR
YCDDLTFSGAFDPKAVYHKARHLLEAMGFALNAEKTALRNRGMRQSVTGL
VVNERVRTGVPYRRRIRQEMYYCRKYGVGEHLQAVGRLTGTETQEEAAEA
ERAFLCALLGKIGYVLLLEPENREFLEYREICRGMQAEQEKASCPPACGE
REQKRRGGKEK
Cognate ncRNA
(SEQ ID NO: 16411)
AAGAGCAACTAGATTGAGGCGATTCGCCTCCTTGGAAAAGGGTACTAAGT
TTCTGTCGCACACCAATTTATAAGCTTATAAATTGGTGTGCGACAGAAAT
GAAATAAATAGTAGTTGCTCTT
Retron 6083
RT
(SEQ ID NO: 19114 or SEQ ID NO: 6083)
MSNPQPTRAEIFERIKQSSKQEVILEEMQRLGFWPRSEGQPEVAADLIQR
EGELQRELAELNKKLAVKRNPERALREMRKQRMKDARDKREVTKRAQAQQ
RYDKALLWHEKRASHVAYLGPGVSASLHENSSATQEQGDKGKPKRARDRA
VPDLQRLTLNGLPALISAAQLAESMGVSVAELRFLSFHREVARTNHYHSF
TLPKKTGGERLISAPMPRLKRAQYWVLDNVLAKMPAHDAAHGFLAGRSII
SNAKPHAGQDVVINLDVKDFFPSIAFGRIKGVFRQLGYGESIATVFALLC
SENRAQAWQVDGERLFVGGKARERVLPQGAPTSPMLTNLLCRRMDRRLLG
LAKQLGFVYTRYADDLTFSASGEPARDNVGKLLSRVRWILRDEGFTPHPD
KERVMRKGRRQEVTGLVVNSDTPSVSRETRRRLRAALHRASQPDAASKPA
HWQGHTAQPSQLLGLATFVHQIDPKQGKTLLADAQQLMRSPIDRANDAAK
SASRADAAQQSFRVLAAAGKPPVLADGKNWWQPAPPATPVLEKTDQQRRE
ERQATRRQQAAAAAPPPSSTRRNERPQQAAHEQQGDAQPQNEAPPRFDPD
QYAPPPRNVMTYWAQIAISFFLGSILHNRLITIFAMVAVIALYYMRRQRW
DVFMGILVVATLLGYLVRGMG*
Cognate ncRNA
(SEQ ID NO: 18547)
CCGGAGCAATGAGCAGGCTCTTGCAATCCGGGCGGTGTTTCGCCGCCCTT
GTGAACTGCCGTTTCATGCACCACGGGCGCCGTTTTCACTGTGCCACCCC
AGCCACGGTAGTGCTTTTCCTGAGTGGCTTGCCACAAGCGAAGCAGCACT
ACCGTGGCGGGGTGGCGTCGAGCGAACAGCTCCCGTCCCGTGAGCCCTAC
AGGCTCTTCGACGAGATGCACATTGCTCCG
Engineered 6083 ncRNA: RTX3_6083v1
ncRNA + HDR Template
(SEQ ID NO: 19115)
GCTCCGGAGCAATGAGCAGGCTCTTGCAATCCGGGCGGTGTTTCGCCGCC
CTTGTGAACTGCCGTTTCATGCACCACGGGCGCCGTTTTCACTGTGCCAC
CCCAGCCACGGTAGTGCTACAAACGGCAGAAGCTGGAGGAGGAAGGGCCT
GAGTCCGAGCAGAAGAACTACAAGGTTAAAGTTCTCCCATCACATCAACC
GGTGGCGCATTGCCACGAAGCAGGCCAATGGGGAGGACATCGATGTCAAG
CACTACCGTGGCGGGGTGGCGTCGAGCGAACAGCTCCCGTCCCGTGAGCC
CTACAGGCTCTTCGACGAGATGCACATTGCTCCGGAGC
Retron 6342
RT
(SEQ ID NO: 6342)
MMENQENNMNNRKNYREAVNTMGKKEFTLIKMQEYGFWPKNLPTPYERQE
SETEEQYKERKCLLEKYEKVIDEISKLYEEKDKINLKLRELQKKYDETWD
YERIRLDVSKTIMQESIERRAERKRQRELEKEQRSEEWKKEKENKIVFIG
KGYSSLLYDKETDENKLLLQELPIIKDDKELANFLGIEYKKLRFLVYHRD
VISVDNYHRYTIPKKKGGVRNIAAPKSILKNSQRIILEEILSKIPTSNYS
HGFLKGKSVVSAAKVHVKKPDLLINIDLEDFFPTITFERVRGMFKSFGYS
GYVASMLAMICTYCERMKVEVRGEEKYVKISDRILPQGSPASPMITNIIC
VKLDKRINGLSTKYDFIYTRYADDMSFSFTGDINELSVGSFMGLVSKIVK
EEGFNINKDKTKFLRKNNRQCITGIVINNEEIGVPKKWIKILRAAIYNAN
KVKNSGEILSNKVINEISGMTSWVKSVNEERYKDIINDAMNLINN
Cognate ncRNA
(SEQ ID NO: 18731)
ACATAGATTTCTTGGCCTTTATGCTGTGGTGTTGCGCCACGGTGGAGATT
TGTCAAATACACATCATTAGGTTGCGCGCAATTCGCTACGCTACCAATAC
TGTGGGCATTAAAAATCGAGCCTTCGGTTATGCCACAGTATTGGTGCTAC
GCTGAAGTGTCACAACCAAATATAAGAATTGTTAGCAAGAAATCTATG
RTX_6342S ncRNA
(SEQ ID NO: 19927)
CAUAGAUUUCUUGGCCUUUAUGCUGUGGUGUUGCGCCACGGUGGAGAUUU
GUCAAAUACACAUCAUUAGGUUGCG__place_insert_here__CACA
ACCAAAUAUAAGAAUUGUUAGCAAGAAAUCUAUG
RTX_6342L ncRNA
(SEQ ID NO: 19928)
CAUAGAUUUCUUGGCCUUUAUGCUGUGGUGUUGCGCCACGGUGGAGAUUU
GUCAAAUACACAUCAUUAGGUUGCGCGCAAUUCGCUACGCUACCAAUACU
GUGGGCAU__place_insert_here__AUGCCACAGUAUUGGUGCUAC
GCUGAAGUGUCACAACCAAAUAUAAGAAUUGUUAGCAAGAAAUCUAUG
RTX_6342S ncRNA + HDR
Template Insert
(SEQ ID NO: 19929)
CAUAGAUUUCUUGOCCUUUAUGCUGUGGUGUUGCGCCACOGUGGAGAUUU
GUCAAAUACACAUCAUUAGGUUGCGACAAACGGCAGAAGCTGGAGGAGGA
AGGGCCTGAGTCCGAGCAGAAGAATCGTCAGTGCAAAGTTCTCCCATCAC
ATCAACCGGTGGCGCATTGCCACGAAGCAGGCCAATGGGGAGGACATCGA
TGTCACACAACCAAAUAUAAGAAUUGUUAGCAAGAAAUCUAUG
RTX_6342L ncRNA + HDR
Template Insert
(SEQ ID NO: 19930)
CAUAGAUUUCUUGGCCUUUAUGCUGUGGUGUUGCGCCACGGUGGAGAUUU
GUCAAAUACACAUCAUUAGGUUGCGCGCAAUUCGCUACGCUACCAAUACU
GUGGGCAUACAAACGGCAGAAGCTGGAGGAGGAAGGGCCTGAGTCCGAGC
AGAAGAACGTAATCCGGAAAGTTCTCCCATCACATCAACCGGTGGCGCAT
TGCCACGAAGCAGGCCAATGGGGAGGACATCGATGTCAAUGCCACAGUAU
UGGUGCUACGCUGAAGUGUCACAACCAAAUAUAAGAAUUGUUAGCAAGAA
AUCUAUG
Retron 6943
RT
(SEQ ID NO: 19116 or SEQ ID NO: 6943))
MEESTNYKLLVWGLSVIQPATPNEVLNYLTSTLNDNGLLPDVEKMIHYFE
LLDQLGYIHQVSKRNNLYSLTPRGNERLTPALKRLRDKIRLFMLDNCHSI
SKLGVLASTDTENMGGDSPSLQLRHNLKEVPHPSLSWAAGTLPSSPRQAW
VRIYEQLNIGSMSSDEASTPTTARNAPLSFVGRLGFSLNYYSFNKIDEPL
FNNDGVTAIASCIGISPGLITAMVKSPKRYYRTFNLRKKSGGFRSILAPR
KFIKTIQYWLKDHVLNRLKIHSSCYSYRSGVSIKDNAINHVKKKFVASID
ISDYFGSINKKMVKDCFYKNNIPDHIVNTISGIVTYNDVLPQGAPTSPII
SNAILFEFDEEMTAHALTLDCIYTRYSDDISISSDYKENIAILINIAEAN
LLSAGFTLNRQKQRIASDNSRQVVTGILVNESIRPTRCYRKKIRSAFDHA
LKEQDGSQLTINKLRGYLNYLKSFETYGFKFNEKKYKETLDFLIALKQS*
ncRNA
(SEQ ID NO: 19053)
ACTGATACAGAGAATATGGGCGGTGATTCGCCGTCTTTACAGTTAAGGCA
CAATTTAAAAGAGGTTCCGCACCCAAGCCTGTCTTGGGCTGCAGGGACCC
TGCCCAGCAGCCCAAGACAGGCTTGGGTGCGGATCTACGAGCAATTAAAT
ATTGGTTCGATGTCCAGT
Engineered ncRNA: RTX3_6943
ncRNA + HDR Template
(SEQ ID NO: 19117)
GCGGAGTGCTGGCCTCAACTGATACAGAGAATATGGGCGGTGATTCGCCG
TCTTTACAGTTAAGGCACAATTTAAAAGAGGTTCCGCACCCAAGCCTGTC
TTGGGCTGCACAAACGGCAGAAGCTGGAGGAGGAAGGGCCTGAGTCCGAG
CAGAAGAACGTATGGCCTAAAGTTCTCCCATCACATCAACCGGTGGCGCA
TTGCCACGAAGCAGGCCAATGGGGAGGACATCGATGTCAGCAGCCCAAGA
CAGGCTTGGGTGCGGATCTACGAGCAATTAAATATTGGTTCGATGTCCAG
TGATGAGGCCAGCACCCGC
Eco1 RT [symbol]
Coding sequence only. RNA was produced
from a CRO and proprietary 5′cap, 5′UTR,
3′UTR and encoded polyA of around 120
bases were added. Full substitution with
IN-methyl-pseudouridine)
(SEQ ID NO: 19118)
AUGAAAUCUGCAGAGUAUCUGAAUACGUUCCGCCUUAGGAAUUUGGGCCU
CCCCGUGAUGAACAAUCUCCACGAUAUGAGCAAGGCGACUCGAAUAUCCG
UGGAAACGCUGAGACUGCUCAUCUAUACAGCAGACUUUCGGUACAGGAUC
UACACGGUCGAAAAGAAGGGGCCUGAGAAACGCAUGCGAACAAUUUAUCA
ACCUAGCCGAGAGCUCAAGGCGUUGCAGGGCUGGGUUCUUCGAAACAUCC
UUGACAAACUCUCAUCAUCACCCUUUAGUAUUGGGUUUGAAAAGCACCAA
AGCAUCCUUAACAACGCGACGCCACACAUAGGUGCCAAUUUCAUAUUGAA
CAUCGACUUGGAGGAUUUUUUUCCGAGCCUCACAGCCAAUAAAGUGUUCG
GUGUUUUUCACAGUCUUGGGUACAAUCGCCUUAUUAGUUCCGUUCUUACC
AAGAUUUGUUGUUACAAGAAUCUCUUGCCCCAGGGAGCACCCAGCAGUCC
GAAAUUGGCGAAUUUGAUUUGUUCCAAGCUCGAUUAUCGAAUACAAGGGU
ACGCGGGCAGCCGGGGACUCAUCUAUACCCGCUACGCAGACGAUCUUACG
CUGUCUGCCCAAUCAAUGAAGAAGGUCGUAAAGGCGCGGGAUUUCUUGUU
UUCUAUCAUCCCGUCCGAGGGCUUGGUAAUUAAUUCCAAAAAGACUUGUA
UCUCAGGACCACGAUCUCAGCGAAAAGUGACAGGACUCGUCAUUUCUCAA
GAAAAAGUCGGUAUAGGGAGAGAGAAGUAUAAGGAAAUCCGCGCGAAGAU
CCACCACAUAUUCUGUGGCAAGAGCAGCGAGAUAGAACACGUCCGAGGCU
GGUUGUCCUUCAUACUGAGCGUGGACUCAAAAAGCCACCGCCGGUUGAUC
ACCUAUAUUUCAAAACUGGAAAAGAAAUAUGGAAAGAACCCACUCAACAA
AGCUAAAACACCACCAAAGAAGAAAAGAAAGGUCUGA
EcolncRNA
ncRNA-sgRNA fusion (6 bp
substition in EMX1 gene)
(SEQ ID NO: 19119)
GAAAUGAUAAGAUUCCGUAUGCGCACCCUUAGCGAGAGGUUUAUCAUUAA
GGUCAACCUCUGGAUGUUGUUUCGGCAUCCUGCAUUGAAUCUGAGUUACU
GUCUGUUUUCCUACAAACGGCAGAAGCUGGAGGAGGAAGGGCCUGAGUCC
GAGCAGAAGAAAAAGUUCUCCCAUCACAUCAACCGGUGGCGCAUUGCCAC
GAAGCAGGCCAAUGGGGAGGACAUCGAUGUCAAGGAAACCCGUUUCUUCU
GACGUAAGGGUGCGCAUACGGAAUCUUAUCAGAGUCCGAGCAGAAGAAGA
AGUUUCAGAGCUAUGCUGGAAACAGCAUAGCAAGUUGAAAUAAGGCUAGU
CCGUUAUCAACUUGAAAAAGUGGCACCGAGUCGGUGCUUUUUUUUUUUU
Eco3 RT [symbol]
Coding sequence only. RNA was produced
from a CRO and proprietary 5′cap, 5′UTR,
3′UTR and encoded polyA of around 120
bases were added. Full substitution with
IN-methyl-pseudouridine
(SEQ ID NO: 19120)
AUGCGCAUUUACUCUCUGAUCGACAGCCAAACCUUAAUGACCAAAGGGUU
CGCAUCCGAGGUCAUGAGGAGCCCAGAACCCCCUAAGAAGUGGGACAUUG
CGAAGAAGAAGGGCGGAAUGCGUACGAUAUACCAUCCCUCUUCUAAGGUG
AAGCUGAUACAGUACUGGCUGAUGAACAACGUGUUCUCCAAAUUGCCGAU
GCACAACGCCGCGUACGCUUUCGUGAAGAAUAGAUCUAUCAAGUCUAACG
CACUGCUGCACGCAGAGAGUAAGAACAAAUACUACGUUAAGAUUGACCUG
AAGGACUUCUUUCCAAGCAUCAAGUUCACAGACUUCGAAUAUGCCUUUAC
CCGGUACCGUGACAGAAUAGAGUUCACGACCGAGUACGACAAAGAACUGC
UUCAGCUGAUUAAGACCAUUUGUUUCAUUUCUGACUCUACACUGCCAAUA
GGCUUCCCCACUUCCCCUCUUAUAGCCAAUUUCGUCGCCAGGGAGCUGGA
CGAGAAGCUCACUCAGAAGCUGAACGCUAUAGACAAGCUCAACGCUACGU
ACACUCGCUACGCAGACGACAUAAUCGUGAGCACGAACAUGAAGGGCGCC
UCUAAGCUGAUCUUAGACUGCUUCAAGCGGACCAUGAAGGAAAUCGGACC
CGAUUUCAAGAUCAAUAUCAAGAAGUUCAAAAUAUGCUCUGCCAGUGGCG
GCUCAAUUGUCGUGACGGGCCUUAAGGUCUGUCAUGACUUCCACAUAACU
CUGCACCGGUCUAUGAAGGACAAGAUCCGCCUGCACCUCUCUCUCCUGUC
CAAAGGUAUUCUGAAGGACGAGGACCACAACAAGCUGUCCGGGUACAUCG
CCUACGCUAAGGACAUCGAUCCACACUUCUACACCAAGCUCAAUAGGAAG
UACUUCCAGGAGAUCAAGUGGAUACAAAACCUGCAUAAUAAGGUGGAGCC
ACCAAAGAAGAAAAGAAAGGUCUGA
Eco3 ncRNA
ncRNA-sgRNA fusion (10 bp insertion
in EMX1 gene)
(SEQ ID NO: 19121)
GAAAUGAUAAGAUUCCGUAAGAGCCAAACCUAGCAUUUUAUGGGUUAAUA
GCCCAUCGGGCCAUGAGUCAUGGUUUCGCCUAGUAUUUUAGCUAUGCCCG
UCGUUCAGUUCGCUGAACAAACGGCAGAAGCUGGAGGAGGAAGGGCCUGA
GUCCGAGCAGAAGAAUUACGUCUGCAAAGUUCUCCCAUCACAUCAACCGG
UGGCGCAUUGCCACGAAGCAGGCCAAUGGGGAGGACAUCGAUGUCAUCAG
CGAACUGAUCGACGUGCUCAAGUAGGUUUGGCUCUUACGGAAUCUUAUCA
GAGUCCGAGCAGAAGAAGAAGUUUCAGAGCUAUGCUGGAAACAGCAUAGC
AAGUUGAAAUAAGGCUAGUCCGUUAUCAACUUGAAAAAGUGGCACCGAGU
CGGUGCUUUUUUUUUUUU
Eco5 RT [symbol]
Coding sequence only. RNA was produced
from a CRO and proprietary 5′cap, 5′UTR,
3′UTR and encoded polyA of around 120
bases were added. Full substitution with
IN-methyl-pseudouridine
(SEQ ID NO: 19122)
AUGGACGCUACCAGAACGACUCUCCUUGCAUUGGAUCUCUUCGGAUCUCC
AGGUUGGUCCGCCGAUAAAGAAAUUCAGAGGCUUCAUGCGCUCAGUAAUC
AUGCUGGAAGGCAUUACAGAAGGAUUAUAUUAAGUAAAAGGCACGGCGGA
CAGCGUCUUGUGCUUGCACCUGAUUACUUGUUAAAGACCGUUCAGCGCAA
CAUUUUGAAGAACGUUUUGAGUCAAUUUCCACUGUCACCAUUUGCUACAG
CCUACAGACCGGGAUGCCCAAUCGUGUCUAACGCGCAGCCACACUGCCAA
CAGCCACAGAUCUUGAAACUCGAUAUAGAAAACUUCUUCGAUUCUAUUAG
UUGGUUGCAGGUGUGGCGGGUGUUUCGCCAGGCCCAGUUGCCCCGAAAUG
UCGUAACGAUGCUCACUUGGAUAUGUUGUUAUAACGACGCACUUCCGCAG
GGUGCCCCUACAUCCCCUGCAAUUUCCAAUCUCGUCAUGAGAAGGUUUGA
UGAACGGAUUGGAGAAUGGUGUCAGGCUCGAGGGAUUACCUACACUCGCU
ACUGCGAUGACAUGACGUUUAGUGGACACUUCAAUGCAAGGCAGGUCAAG
AAUAAAGUCUGCGGUCUCUUAGCUGAGCUGGGCCUUUCCCUGAAUAAACG
GAAAGGCUGCCUCAUAGCGGCUUGUAAGCGCCAGCAAGUCACCGGCAUUG
UUGUGAAUCACAAGCCACAGCUUGCCCGAGAAGCCAGGCGUGCCCUGCGU
CAGGAAGUGCACCUGUGCCAGAAAUAUGGAGUUAUCUCUCAUCUCUCACA
UAGAGGUGAACUGGAUCCUAGCGGAGAUCUGCACGCUCAGGCGACAGCGU
AUCUCUAUGCACUCCAGGGGAGAAUUAACUGGCUUCUUCAAAUUAACCCU
GAGGAUGAGGCGUUUCAACAGGCCCGGGAGUCCGUUAAGAGGAUGUUAGU
UGCCUGGCCACCAAAGAAGAAAAGAAAGGUCUGA
Eco5 ncRNA [symbol]
ncRNA-sgRNA fusion (10 bp insertion
in EMX1 gene)
(SEQ ID NO: 19123)
GAAAUGAUAAGAUUCCGUACGCCAGCAGUGGCAAUAGCGUUUCCGGCCUU
UUGUGCCGGGAGGGUCGGCGAGUCGCUGACUUAACGCCAGUAGUAUGUCC
AUAUACCCAAAGUCGCUUCAUUGUAACAAACGGCAGAAGCUGGAGGAGGA
AGGGCCUGAGUCCGAGCAGAAGAAUCCUUCGAGCAAAGUUCUCCCAUCAC
AUCAACCGGUGGCGCAUUGCCACGAAGCAGGCCAAUGGGGAGGACAUCGA
UGUCAUACAGUUACGCGCCUUCGGGAUGGUUUAAUGGUAUUGCCGCUGUU
GGCGUACGGAAUCUUAUCAGAGUCCGAGCAGAAGAAGAAGUUUCAGAGCU
AUGCUGGAAACAGCAUAGCAAGUUGAAAUAAGGCUAGUCCGUUAUCAACU
UGAAAAAGUGGCACCGAGUCGGUGCUUUUUUUUUUUU
EMX1 sgRNA modified [symbol]
Contains chemical modifications from
Synthego: 2′-F, 2′-O-methyl,
phosphorothioates
(SEQ ID NO: 19124)
GAGUCCGAGCAGAAGAAGAAGUUUCAGAGCUAUGCUGGAAACAGCAUAGC
AAGUUGAAAUAAGGCUAGUCCGUUAUCAACUUGAAAAAGUGGCACCGAGU
CGGUGCUUUUU
EMX1 sgRNA unmodified [symbol]
No modifications
(SEQ ID NO: 19125)
GAGUCCGAGCAGAAGAAGAAGUUUCAGAGCUAUGCUGGAAACAGCAUAGC
AAGUUGAAAUAAGGCUAGUCCGUUAUCAACUUGAAAAAGUGGCACCGAGU
CGGUGCUUUUU

### RANA Sequences—Summary

| | | SEQ ID |
|---|---|---|
| Sequence Name | Description | NO: |
| Eco1 RT | Coding sequence only. RNA was produced from a CRO and | 19126 |
| | proprietary 5′ cap, 5′ UTR, 3′ UTR and encoded poly A of around 120 | |
| | bases were added. Full substitution with 1N-methyl-pseudouridine | |
| Eco1 ncRNA-sgRNA | ncRNA-sgRNA fusion (6 bp substition in EMX1 gene) | 19127 |
| Eco3 RT | Coding sequence only. RNA was produced from a CRO and | 19128 |
| | proprietary 5′ cap, 5′ UTR, 3′ UTR and encoded poly A of around 120 | |
| | bases were added. Full substitution with 1N-methyl-pseudouridine | |
| Eco3 ncRNA-sgRNA | ncRNA-sgRNA fusion (10 bp insertion in EMX1 gene) | 19129 |
| Eco5 RT | Coding sequence only. RNA was produced from a CRO and | 19130 |
| | proprietary 5′ cap, 5′ UTR, 3′ UTR and encoded poly A of around 120 | |
| | bases were added. Full substitution with 1N-methyl-pseudouridine | |
| Eco5 ncRNA-sgRNA | ncRNA-sgRNA fusion (10 bp insertion in EMX1 gene) | 19131 |
| Cas9 | All U are N-1-methylpseudouridine. | 19132 |
| EMX1 sgRNA modified | Contains chemical modifications from Synthego: 2′-F, 2′-O-methyl, | 19133 |
| | phosphorothioates | |
| EMX1 sgRNA unmodified | No modifications | 19134 |
| Eco3 ncRNA | Eco3 ncRNA only with 10 bp insertion | 19135 |
| Eco3 ncRNA-MS2 | Eco3 ncRNA only with 10 bp insertion and 3′ MS2 stem loop | 19136 |
| Aco1 RT | Aco1 RT RNA sequence including 5′ and 3′ UTRs | 19137 |
| Aco1 ncRNA-sgRNA_50 | Aco1 ncRNA-sgRNA with 50 bp insertion | 19138 |
| Aco1 sgRNA-ncRNA_50 | Aco1 sgRNA-ncRNA with 50 bp insertion | 19139 |
| Eco3_EMX1 gRNA_ncRNA_25 | Eco3 ncRNA containing 25 bp insertion in EMX1 gene fused to | 19140 |
| | EMX1 sgRNA at 5′ end | |
| Eco3_ncRNA only | Eco3 ncRNA containing 25 bp insertion in EMX1 gene | 19141 |
| Eco3_ncRNA_AAVS1 gRNA_25 | Eco3 ncRNA containing 25 bp insertion in AAVS1 gene fused to | 19142 |
| | AAVS1 sgRNA at 3′ end | |
| Eco3_ncRNA_EMX1 gRNA_25 | Eco3 ncRNA containing 25 bp insertion in EMX1 gene fused to | 19143 |
| | EMX1 sgRNA at 3′ end | |
| Eco3_ncRNA_EMX1 gRNA_50 | Eco3 ncRNA containing 50 bp insertion in EMX1 gene fused to | 19144 |
| | EMX1 sgRNA at 3′ end | |
| Eco3_ncRNA_EMX1 gRNA_75 | Eco3 ncRNA containing 75 bp insertion in EMX1 gene fused to | 19145 |
| | EMX1 sgRNA at 3′ end | |
| Eco3_ncRNA_EMX1 gRNA_100 | Eco3 ncRNA containing 100 bp insertion in EMX1 gene fused to | 19146 |
| | EMX1 sgRNA at 3′ end | |
| Eco3_ncRNA_EMX1 gRNA_GFP | Eco3 ncRNA containing GFP gene insertion in EMX1 gene fused to | 19147 |
| gene | EMX1 sgRNA at 3′ end. Entire GFP cassette is in antisense | |
| | orientation and contains mini EF1a promoter and beta globin polyA | |
| | signal. | |
| Eco3_NT_ncRNA_EMX gRNA_25 | Eco3 ncRNA containing 25 bp insertion (on opposite strand of | 19148 |
| | sgRNA cut) in EMX1 gene fused to EMX1 sgRNA at 3′ end | |
| Aco1_EMX1 gRNA_ncRNA_25 | Aco1 ncRNA containing 25 bp insertion in EMX1 gene fused to | 19149 |
| | EMX1 sgRNA at 5′ end | |
| Aco1_ncRNA only | Aco1 ncRNA containing 25 bp insertion in EMX1 gene | 19150 |
| Aco1_ncRNA_AAVS1 gRNA_25 | Aco1 ncRNA containing 25 bp insertion in AAVS1 gene fused to | 19151 |
| | AAVS1 sgRNA at 3′ end | |
| Aco1_ncRNA_EMX1 gRNA_25 | Aco1 ncRNA containing 25 bp insertion in EMX1 gene fused to | 19152 |
| | EMX1 sgRNA at 3′ end | |
| Aco1_ncRNA_EMX1 gRNA_50 | Aco1 ncRNA containing 50 bp insertion in EMX1 gene fused to | 19153 |
| | EMX1 sgRNA at 3′ end | |
| Aco1_ncRNA_EMX1 gRNA_75 | Aco1 ncRNA containing 75 bp insertion in EMX1 gene fused to | 19154 |
| | EMX1 sgRNA at 3′ end | |
| Aco1_ncRNA_EMX1 gRNA_100 | Aco1 ncRNA containing 100 bp insertion in EMX1 gene fused to | 19155 |
| | EMX1 sgRNA at 3′ end | |
| Aco1_ncRNA_EMX1 gRNA_GFP | Aco1 ncRNA containing GFP gene insertion in EMX1 gene fused to | 19156 |
| gene | EMX1 sgRNA at 3′ end. Entire GFP cassette is in antisense | |
| | orientation and contains mini EF1a promoter and bcta globin poly A | |
| | signal. | |
| Aco1_NT_ncRNA_EMX1 gRNA_25 | Aco1 ncRNA containing 25 bp insertion (on opposite strand of | 19157 |
| | sgRNA cut) in EMX1 gene fused to EMX1 sgRNA at 3′ end | |
| R2042_EMX1 gRNA_ncRNA_25 | R2042 ncRNA containing 25 bp insertion in EMX1 gene fused to | 19158 |
| | EMX1 sgRNA at 5′ end | |
| R2042_ncRNA only_25 | R2042 ncRNA containing 25 bp insertion in EMX1 genc | 19159 |
| R2042_ncRNA_AAVS1 gRNA_25 | R2042 ncRNA containing 25 bp insertion in EMX1 gene fused to | 19160 |
| | AAVS1 sgRNA at 3′ cnd | |
| R2042_ncRNA_EMX1 gRNA_25 | R2042 ncRNA containing 25 bp insertion in EMX1 gene fused to | 19161 |
| | EMX1 sgRNA at 3′ end | |
| R2042_ncRNA_EMX1 gRNA_50 | R2042 ncRNA containing 50 bp insertion in EMX1 gene fused to | 19162 |
| | EMX1 sgRNA at 3′ end | |
| R2042_ncRNA_EMX1 gRNA_75 | R2042 ncRNA containing 75 bp insertion in EMX1 gene fused to | 19163 |
| | EMX1 sgRNA at 3′ end | |
| R2042_ncRNA_EMX1 gRNA_100 | R2042 ncRNA containing 100 bp insertion in EMX1 gene fused to | 19164 |
| | EMX1 sgRNA at 3′ end | |
| R2042_ncRNA_NT_EMX1 | R2042 ncRNA containing 25 bp insertion (on opposite strand of | 19165 |
| gRNA_25_dual guides | sgRNA cut) in EMX1 gene fused to EMX1 sgRNA at 3′ end | |
| R2042_RT | R2042 RT mRNA sequence, coding sequence only | 19166 |
| R6943_RT | R6943 RT mRNA sequence, coding sequence only | 19167 |
| R6943_ncRNA_EMX1gRNA_GFP | R6943 ncRNA containing GFP gene insertion in EMX1 gene fused | 19168 |
| gene | to EMX1 sgRNA at 3′ end. Entire GFP cassette is in antisense | |
| | orientation and contains mini EF1a promoter and beta globin poly A | |
| | signal. | |
| R6943_ncRNA_EMX1gRNA_100bp | R6943 ncRNA containing 100 bp insertion in EMX1 gene fused to | 19169 |
| | EMX1 sgRNA at 3′ end | |
| R6943_ncRNA_EMX1gRNA_75bp | R6943 ncRNA containing 75 bp insertion in EMX1 gene fused to | 19170 |
| | EMX1 sgRNA at 3′ end | |
| R6943_ncRNA_EMX1gRNA_50bp | R6943 ncRNA containing 50 bp insertion in EMX1 gene fused to | 19171 |
| | EMX1 sgRNA at 3′ end | |
| R6943_ncRNA_EMX1gRNA_25bp | R6943 ncRNA containing 25 bp insertion in EMX1 gene fused to | 19172 |
| | EMX1 sgRNA at 3′ end | |
| R6943_ncRNA_AAVS1 | R6943 ncRNA containing 25 bp insertion in AAVS1 gene fused to | 19173 |
| gRNA_25bp | AAVS1 sgRNA at 3′ end | |
| R6943_ncRNA only_25bp | R6943 ncRNA containing 25 bp insertion in EMX1 gene | 19174 |
| AAVS1 sgRNA | Contains chemical modifications from Synthego: 2′-F, 2′-O-methyl, | 19175 |
| | phosphorothioates | |
| R1262_RT-1 (R1262 RT) | R1262 retron RT mRNA | 19176 |
| R1262_nc-5 (R1262_ncRNA- | R1262 ncRNA containing 505 bp insertion in EMX1 site | 19177 |
| EMX1_505) | | |
| R1262_nc-3 (R1262_ncRNA- | R1262 ncRNA containing 305 bp insertion in EMX1 site | 19178 |
| EMX1_305) | | |
| R1262_nc-1 (R1262_ncRNA- | R1262 ncRNA containing 25 bp insertion in EMX1 site | 19179 |
| EMX1_25) | | |
| R1262_nc-4 (R1262_ncRNA- | R1262 ncRNA containing 405 bp insertion in EMX1 site | 19180 |
| EMX1_405) | | |
| R1262_nc-2 (R1262_ncRNA- | R1262 ncRNA containing 205 bp insertion in EMX1 site | 19181 |
| EMX1_205) | | |
| R1262_nc-19 (R1262_ncRNA- | R1262 ncRNA containing 205 bp insertion in EMX1 site combined | 19182 |
| sgEMX1_205) | with EMX1 sgRNA at 3′ end | |
| R1262_nc-20 (R1262_sgEMX1- | R1262 ncRNA containing 205 bp insertion in EMX1 site combined | 19183 |
| ncRNA_205) | with EMX1 sgRNA at 5′ end | |
| R1262_nc-13 (R1262_ncRNA- | R1262 ncRNA containing 25 bp insertion in AAVS1 site | 19184 |
| AAVS1_25) | | |
| R1262_nc-14 (R1262_ncRNA- | R1262 ncRNA containing 205 bp insertion in AAVS1 site | 19185 |
| AAVS1_205) | | |
| R1262_nc-15 (R1262_ncRNA- | R1262 ncRNA containing 505 bp insertion in AAVS1 site | 19186 |
| AAVS1_505) | | |
| R1262_nc-18 (R1262_ncRNA- | R1262 ncRNA containing 505 bp insertion in AAVS1 site and MS2 | 19187 |
| AAVS1-MS2_505) | stem loop at 3′ end | |
| R1262_nc-17 (R1262_ncRNA- | R1262 ncRNA containing 205 bp insertion in AAVS1 site and MS2 | 19188 |
| AAVS1-MS2 205) | stem loop at 3′ end | |
| R1262_nc-16 (R1262_ncRNA- | R1262 ncRNA containing 25 bp insertion in AAVS1 site and MS2 | 19189 |
| AAVS1-MS2_25) | stem loop at 3′ end | |
| R1262_nc-9 (R1262_ncRNA-EMX1- | R1262 ncRNA containing 305 bp insertion in EMX1 site and MS2 | 19190 |
| MS2_305) | stem loop at 3′ end | |
| R1262_nc-7 (R1262_ncRNA-EMX1- | R1262 ncRNA containing 25 bp insertion in EMX1 site and MS2 stem | 19191 |
| MS2_25) | loop at 3′ end | |
| R1262_nc-6 (R1262_ncRNA- | R1262 ncRNA containing P2A-GFP insertion in EMX1 site | 19192 |
| EMX1_P2A-GFP) | | |
| R1262_nc-22 (R1262_sgAAVS1- | R1262 ncRNA containing 205 bp insertion in AAVS1 site combined | 19193 |
| ncRNA_205) | with sgAAVS1 at 5′ end | |
| R1262_nc-8 (R1262_ncRNA-EMX1- | R1262 ncRNA containing 205 bp insertion in EMX1 site and MS2 | 19194 |
| MS2_205) | stem loop at 3′ end | |
| R1262_nc-21 (R1262_ncRNA- | R1262 ncRNA containing 205 bp insertion in AAVS1 site combined | 19195 |
| sgAAVS1_205) | with sgAAVS1 at 3′ end | |
| R1262_nc-10 (R1262_ncRNA- | R1262 ncRNA containing 405 bp insertion in EMX1 site and MS2 | 19196 |
| EMX1-MS2_405) | stem loop at 3′ end | |
| R1262_nc-11 (R1262_ncRNA- | R1262 ncRNA containing 505 bp insertion in EMX1 site and MS2 | 19197 |
| EMX1-MS2_505) | stem loop at 3′ end | |
| R1262_nc-12 (R1262_ncRNA- | R1262 ncRNA containing P2A-GFP insertion in EMX1 site and MS2 | 19198 |
| EMX1-MS2_P2A-GFP) | stem loop at 3′ end | |
| R1262_nc-23 (R1262_ncRNA- | Same as R1262_nc-6 but with longer homology arms | 19199 |
| EMX1_P2A-GFP_LongHA) | | |
| R1262_nc-24 (R1262_ncRNA- | Same as R1262_nc-12 but with longer homology arms | 19200 |
| EMX1-MS2_P2A-GFP_LongHA) | | |
| 6083 v1 RT | 6083 retron RT mRNA | 19201 |
| 6083 v1_ncRNA_AAVS1 | R6083 retron containing 25 bp insertion at AAVS1 site | 19202 |
| gRNA_25bp | | |
| 6083 v1_ncRNA only_25bp | R6083 retron containing 25 bp insertion at EMX1 site | 19203 |
| 6083 v1_ncRNA EMX1 | R6083 retron containing 25 bp insertion at EMX1 site and sgEMX1 at | 19204 |
| gRNA_25bp | 3′ end | |
| 6083 v1_ncRNA_EMX1 gRNA_GFP | R6083 retron containing GFP gene insertion at EMX1 site and | 19205 |
| gene | sgEMX1 at 3′ end | |
| 6083 v1_ncRNA_EMX1 | R6083 retron containing 50 bp insertion at EMX1 site and sgEMX1 at | 19206 |
| gRNA_50bp | 3′ end | |
| 6083 v1_ncRNA_EMX1 | R6083 retron containing 100 bp insertion at EMX1 site and sgEMX1 | 19207 |
| gRNA_100bp | at 3′ end | |
| 6083 v1_ncRNA_EMX1 | R6083 retron containing 75 bp insertion at EMX1 site and sgEMX1 at | 19208 |
| gRNA_75bp | 3′ end | |
| Aco1_ncRNA-EMX1_100 | Aco1 ncRNA containing 100 bp insertion in EMX1 gene | 19209 |
| Aco1_ncRNA-EMX1_205 | Aco1 ncRNA containing 205 bp insertion in EMX1 gene | 19210 |
| Eco3 ncRNA-EMX1_205 | Eco3 ncRNA containing 205 bp insertion in EMX1 gene | 19211 |

| Sequence | | |
|---|---|---|
| Name | Description | Sequence |
| Eco1 RT | Coding sequence only. RNA | AUGAAAUCUGCAGAGUAUCUGAAUACGUUCCGCCUUAGGAAUU |
| | was produced from a CRO and | UGGGCCUCCCCGUGAUGAACAAUCUCCACGAUAUGAGCAAGGCG |
| | proprietary 5′ cap, 5′ UTR, 3′ | ACUCGAAUAUCCGUGGAAACGCUGAGACUGCUCAUCUAUACAGC |
| | UTR and encoded polyA of | AGACUUUCGGUACAGGAUCUACACGGUCGAAAAGAAGGGGCCU |
| | around 120 bases were added. | GAGAAACGCAUGCGAACAAUUUAUCAACCUAGCCGAGAGCUCAA |
| | Full substitution with 1N- | GGCGUUGCAGGGCUGGGUUCUUCGAAACAUCCUUGACAAACUCU |
| | methyl-pseudouridine | CAUCAUCACCCUUUAGUAUUGGGUUUGAAAAGCACCAAAGCAUC |
| | | CUUAACAACGCGACGCCACACAUAGGUGCCAAUUUCAUAUUGAA |
| | | CAUCGACUUGGAGGAUUUUUUUCCGAGCCUCACAGCCAAUAAAG |
| | | UGUUCGGUGUUUUUCACAGUCUUGGGUACAAUCGCCUUAUUAG |
| | | UUCCGUUCUUACCAAGAUUUGUUGUUACAAGAAUCUCUUGCCCC |
| | | AGGGAGCACCCAGCAGUCCGAAAUUGGCGAAUUUGAUUUGUUCC |
| | | AAGCUCGAUUAUCGAAUACAAGGGUACGCGGGCAGCCGGGGACU |
| | | CAUCUAUACCCGCUACGCAGACGAUCUUACGCUGUCUGCCCAAU |
| | | CAAUGAAGAAGGUCGUAAAGGCGCGGGAUUUCUUGUUUUCUAU |
| | | CAUCCCGUCCGAGGGCUUGGUAAUUAAUUCCAAAAAGACUUGUA |
| | | UCUCAGGACCACGAUCUCAGCGAAAAGUGACAGGACUCGUCAUU |
| | | UCUCAAGAAAAAGUCGGUAUAGGGAGAGAGAAGUAUAAGGAAA |
| | | UCCGCGCGAAGAUCCACCACAUAUUCUGUGGCAAGAGCAGCGAG |
| | | AUAGAACACGUCCGAGGCUGGUUGUCCUUCAUACUGAGCGUGGA |
| | | CUCAAAAAGCCACCGCCGGUUGAUCACCUAUAUUUCAAAACUGG |
| | | AAAAGAAAUAUGGAAAGAACCCACUCAACAAAGCUAAAACACCA |
| | | CCAAAGAAGAAAAGAAAGGUCUGA (SEQ ID NO: 19126) |
| Eco1 ncRNA- | ncRNA-sgRNA fusion (6 bp | GAAAUGAUAAGAUUCCGUAUGCGCACCCUUAGCGAGAGGUUUA |
| sgRNA | substition in EMX1 gene) | UCAUUAAGGUCAACCUCUGGAUGUUGUUUCGGCAUCCUGCAUUG |
| | | AAUCUGAGUUACUGUCUGUUUUCCUACAAACGGCAGAAGCUGG |
| | | AGGAGGAAGGGCCUGAGUCCGAGCAGAAGAAAAAGUUCUCCCA |
| | | UCACAUCAACCGGUGGCGCAUUGCCACGAAGCAGGCCAAUGGGG |
| | | AGGACAUCGAUGUCAAGGAAACCCGUUUCUUCUGACGUAAGGG |
| | | UGCGCAUACGGAAUCUUAUCAGAGUCCGAGCAGAAGAAGAAGU |
| | | UUCAGAGCUAUGCUGGAAACAGCAUAGCAAGUUGAAAUAAGGC |
| | | UAGUCCGUUAUCAACUUGAAAAAGUGGCACCGAGUCGGUGCUU |
| | | UUUUUUUUUU (SEQ ID NO: 19127) |
| Eco3 RT | Coding sequence only. RNA | AUGCGCAUUUACUCUCUGAUCGACAGCCAAACCUUAAUGACCAA |
| | was produced from a CRO and | AGGGUUCGCAUCCGAGGUCAUGAGGAGCCCAGAACCCCCUAAGA |
| | proprietary 5′ cap, 5′ UTR, 3′ | AGUGGGACAUUGCGAAGAAGAAGGGCGGAAUGCGUACGAUAUA |
| | UTR and encoded polyA of | CCAUCCCUCUUCUAAGGUGAAGCUGAUACAGUACUGGCUGAUGA |
| | around 120 bases were added. | ACAACGUGUUCUCCAAAUUGCCGAUGCACAACGCCGCGUACGCU |
| | Full substitution with 1N- | UUCGUGAAGAAUAGAUCUAUCAAGUCUAACGCACUGCUGCACGC |
| | methyl-pseudouridine | AGAGAGUAAGAACAAAUACUACGUUAAGAUUGACCUGAAGGAC |
| | | UUCUUUCCAAGCAUCAAGUUCACAGACUUCGAAUAUGCCUUUAC |
| | | CCGGUACCGUGACAGAAUAGAGUUCACGACCGAGUACGACAAAG |
| | | AACUGCUUCAGCUGAUUAAGACCAUUUGUUUCAUUUCUGACUCU |
| | | ACACUGCCAAUAGGCUUCCCCACUUCCCCUCUUAUAGCCAAUUU |
| | | CGUCGCCAGGGAGCUGGACGAGAAGCUCACUCAGAAGCUGAACG |
| | | CUAUAGACAAGCUCAACGCUACGUACACUCGCUACGCAGACGAC |
| | | AUAAUCGUGAGCACGAACAUGAAGGGCGCCUCUAAGCUGAUCUU |
| | | AGACUGCUUCAAGCGGACCAUGAAGGAAAUCGGACCCGAUUUCA |
| | | AGAUCAAUAUCAAGAAGUUCAAAAUAUGCUCUGCCAGUGGCGG |
| | | CUCAAUUGUCGUGACGGGCCUUAAGGUCUGUCAUGACUUCCACA |
| | | UAACUCUGCACCGGUCUAUGAAGGACAAGAUCCGCCUGCACCUC |
| | | UCUCUCCUGUCCAAAGGUAUUCUGAAGGACGAGGACCACAACAA |
| | | GCUGUCCGGGUACAUCGCCUACGCUAAGGACAUCGAUCCACACU |
| | | UCUACACCAAGCUCAAUAGGAAGUACUUCCAGGAGAUCAAGUGG |
| | | AUACAAAACCUGCAUAAUAAGGUGGAGCCACCAAAGAAGAAAA |
| | | GAAAGGUCUGA (SEQ ID NO: 19128) |
| Eco3 ncRNA- | ncRNA-sgRNA fusion (10 bp | GAAAUGAUAAGAUUCCGUAAGAGCCAAACCUAGCAUUUUAUGG |
| sgRNA | insertion in EMX1 gene) | GUUAAUAGCCCAUCGGGCCAUGAGUCAUGGUUUCGCCUAGUAUU |
| | | UUAGCUAUGCCCGUCGUUCAGUUCGCUGAACAAACGGCAGAAGC |
| | | UGGAGGAGGAAGGGCCUGAGUCCGAGCAGAAGAAUUACGUCUG |
| | | CAAAGUUCUCCCAUCACAUCAACCGGUGGCGCAUUGCCACGAAG |
| | | CAGGCCAAUGGGGAGGACAUCGAUGUCAUCAGCGAACUGAUCGA |
| | | CGUGCUCAAGUAGGUUUGGCUCUUACGGAAUCUUAUCAGAGUCC |
| | | GAGCAGAAGAAGAAGUUUCAGAGCUAUGCUGGAAACAGCAUAG |
| | | CAAGUUGAAAUAAGGCUAGUCCGUUAUCAACUUGAAAAAGUGG |
| | | CACCGAGUCGGUGCUUUUUUUUUUUU (SEQ ID NO: 19129) |
| Eco5 RT | Coding sequence only. RNA | AUGGACGCUACCAGAACGACUCUCCUUGCAUUGGAUCUCUUCGG |
| | was produced from a CRO and | AUCUCCAGGUUGGUCCGCCGAUAAAGAAAUUCAGAGGCUUCAUG |
| | proprietary 5′ cap, 5′ UTR, 3′ | CGCUCAGUAAUCAUGCUGGAAGGCAUUACAGAAGGAUUAUAUU |
| | UTR and encoded polyA of | AAGUAAAAGGCACGGCGGACAGCGUCUUGUGCUUGCACCUGAUU |
| | around 120 bases were added. | ACUUGUUAAAGACCGUUCAGCGCAACAUUUUGAAGAACGUUUU |
| | Full substitution with 1N- | GAGUCAAUUUCCACUGUCACCAUUUGCUACAGCCUACAGACCGG |
| | methyl-pseudouridine | GAUGCCCAAUCGUGUCUAACGCGCAGCCACACUGCCAACAGCCA |
| | | CAGAUCUUGAAACUCGAUAUAGAAAACUUCUUCGAUUCUAUUA |
| | | GUUGGUUGCAGGUGUGGCGGGUGUUUCGCCAGGCCCAGUUGCCC |
| | | CGAAAUGUCGUAACGAUGCUCACUUGGAUAUGUUGUUAUAACG |
| | | ACGCACUUCCGCAGGGUGCCCCUACAUCCCCUGCAAUUUCCAAU |
| | | CUCGUCAUGAGAAGGUUUGAUGAACGGAUUGGAGAAUGGUGUC |
| | | AGGCUCGAGGGAUUACCUACACUCGCUACUGCGAUGACAUGACG |
| | | UUUAGUGGACACUUCAAUGCAAGGCAGGUCAAGAAUAAAGUCU |
| | | GCGGUCUCUUAGCUGAGCUGGGCCUUUCCCUGAAUAAACGGAAA |
| | | GGCUGCCUCAUAGCGGCUUGUAAGCGCCAGCAAGUCACCGGCAU |
| | | UGUUGUGAAUCACAAGCCACAGCUUGCCCGAGAAGCCAGGCGUG |
| | | CCCUGCGUCAGGAAGUGCACCUGUGCCAGAAAUAUGGAGUUAUC |
| | | UCUCAUCUCUCACAUAGAGGUGAACUGGAUCCUAGCGGAGAUCU |
| | | GCACGCUCAGGCGACAGCGUAUCUCUAUGCACUCCAGGGGAGAA |
| | | UUAACUGGCUUCUUCAAAUUAACCCUGAGGAUGAGGCGUUUCA |
| | | ACAGGCCCGGGAGUCCGUUAAGAGGAUGUUAGUUGCCUGGCCAC |
| | | CAAAGAAGAAAAGAAAGGUCUGA (SEQ ID NO: 19130) |
| Eco5 ncRNA- | ncRNA-sgRNA fusion (10 bp | GAAAUGAUAAGAUUCCGUACGCCAGCAGUGGCAAUAGCGUUUCC |
| sgRNA | insertion in EMX1 gene) | GGCCUUUUGUGCCGGGAGGGUCGGCGAGUCGCUGACUUAACGCC |
| | | AGUAGUAUGUCCAUAUACCCAAAGUCGCUUCAUUGUAACAAACG |
| | | GCAGAAGCUGGAGGAGGAAGGGCCUGAGUCCGAGCAGAAGAAU |
| | | CCUUCGAGCAAAGUUCUCCCAUCACAUCAACCGGUGGCGCAUUG |
| | | CCACGAAGCAGGCCAAUGGGGAGGACAUCGAUGUCAUACAGUUA |
| | | CGCGCCUUCGGGAUGGUUUAAUGGUAUUGCCGCUGUUGGCGUAC |
| | | GGAAUCUUAUCAGAGUCCGAGCAGAAGAAGAAGUUUCAGAGCU |
| | | AUGCUGGAAACAGCAUAGCAAGUUGAAAUAAGGCUAGUCCGUU |
| | | AUCAACUUGAAAAAGUGGCACCGAGUCGGUGCUUUUUUUUUUU |
| | | U (SEQ ID NO: 19131) |
| Cas9 | All U are N-1- | GGGUCCCGCAGUCGGCGUCCAGCGGCUCUGCUUGUUCGUGUGUG |
| | methylpseudouridine. | UGUCGUUGCAGGCCUUAUUCGGAUCCGCCACCAUGGACAAGAAG |
| | | UACAGCAUCGGACUGGACAUCGGAACAAACAGCGUCGGAUGGGC |
| | | AGUCAUCACAGACGAAUACAAGGUCCCGAGCAAGAAGUUCAAGG |
| | | UCCUGGGAAACACAGACAGACACAGCAUCAA |
| | | GAAGAACCUGAUCGGAGCACUGCUGUUCGACAGCGGAGAAACAG |
| | | CAGAAGCAACAAGACUGAAGAGAAC |
| | | AGCAAGAAGAAGAUACACAAGAAGAAAGAACAGAAUCUGCUAC |
| | | CUGCAGGAAAUCUUCAGCAACGAAAU |
| | | GGCAAAGGUCGACGACAGCUUCUUCCACAGACUGGAAGAAAGCU |
| | | UCCUGGUCGAAGAAGACAAGAAGCA |
| | | CGAAAGACACCCGAUCUUCGGAAACAUCGUCGACGAAGUCGCAU |
| | | ACCACGAAAAGUACCCGACAAUCUAC |
| | | CACCUGAGAAAGAAGCUGGUCGACAGCACAGACAAGGCAGACCU |
| | | GAGACUGAUCUACCUGGCACUGGCA |
| | | CACAUGAUCAAGUUCAGAGGACACUUCCUGAUCGAAGGAGACCU |
| | | GAACCCGGACAACAGCGACGUCGAC |
| | | AAGCUGUUCAUCCAGCUGGUCCAGACAUACAACCAGCUGUUCGA |
| | | AGAAAACCCGAUCAACGCAAGCGGA |
| | | GUCGACGCAAAGGCAAUCCUGAGCGCAAGACUGAGCAAGAGCAG |
| | | AAGACUGGAAAACCUGAUCGCACAG |
| | | CUGCCGGGAGAAAAGAAGAACGGACUGUUCGGAAACCUGAUCGC |
| | | ACUGAGCCUGGGACUGACACCGAAC |
| | | UUCAAGAGCAACUUCGACCUGGCAGAAGACGCAAAGCUGCAGCU |
| | | GAGCAAGGACACAUACGACGACGAC |
| | | CUGGACAACCUGCUGGCACAGAUCGGAGACCAGUACGCAGACCU |
| | | GUUCCUGGCAGCAAAGAACCUGAGC |
| | | GACGCAAUCCUGCUGAGCGACAUCCUGAGAGUCAACACAGAAAU |
| | | CACAAAGGCACCGCUGAGCGCAAGC |
| | | AUGAUCAAGAGAUACGACGAACACCACCAGGACCUGACACUGCU |
| | | GAAGGCACUGGUCAGACAGCAGCUG |
| | | CCGGAAAAGUACAAGGAAAUCUUCUUCGACCAGAGCAAGAACGG |
| | | AUACGCAGGAUACAUCGACGGAGGA |
| | | GCAAGCCAGGAAGAAUUCUACAAGUUCAUCAAGCCGAUCCUGGA |
| | | AAAGAUGGACGGAACAGAAGAACUG |
| | | CUGGUCAAGCUGAACAGAGAAGACCUGCUGAGAAAGCAGAGAA |
| | | CAUUCGACAACGGAAGCAUCCCGCAC |
| | | CAGAUCCACCUGGGAGAACUGCACGCAAUCCUGAGAAGACAGGA |
| | | AGACUUCUACCCGUUCCUGAAGGAC |
| | | AACAGAGAAAAGAUCGAAAAGAUCCUGACAUUCAGAAUCCCGU |
| | | ACUACGUCGGACCGCUGGCAAGAGGA |
| | | AACAGCAGAUUCGCAUGGAUGACAAGAAAGAGCGAAGAAACAA |
| | | UCACACCGUGGAACUUCGAAGAAGUC |
| | | GUCGACAAGGGAGCAAGCGCACAGAGCUUCAUCGAAAGAAUGAC |
| | | AAACUUCGACAAGAACCUGCCGAAC |
| | | GAAAAGGUCCUGCCGAAGCACAGCCUGCUGUACGAAUACUUCAC |
| | | AGUCUACAACGAACUGACAAAGGUC |
| | | AAGUACGUCACAGAAGGAAUGAGAAAGCCGGCAUUCCUGAGCG |
| | | GAGAACAGAAGAAGGCAAUCGUCGAC |
| | | CUGCUGUUCAAGACAAACAGAAAGGUCACAGUCAAGCAGCUGAA |
| | | GGAAGACUACUUCAAGAAGAUCGAA |
| | | UGCUUCGACAGCGUCGAAAUCAGCGGAGUCGAAGACAGAUUCAA |
| | | CGCAAGCCUGGGAACAUACCACGAC |
| | | CUGCUGAAGAUCAUCAAGGACAAGGACUUCCUGGACAACGAAGA |
| | | AAACGAAGACAUCCUGGAAGACAUC |
| | | GUCCUGACACUGACACUGUUCGAAGACAGAGAAAUGAUCGAAG |
| | | AAAGACUGAAGACAUACGCACACCUG |
| | | UUCGACGACAAGGUCAUGAAGCAGCUGAAGAGAAGAAGAUACA |
| | | CAGGAUGGGGAAGACUGAGCAGAAAG |
| | | CUGAUCAACGGAAUCAGAGACAAGCAGAGCGGAAAGACAAUCCU |
| | | GGACUUCCUGAAGAGCGACGGAUUC |
| | | GCAAACAGAAACUUCAUGCAGCUGAUCCACGACGACAGCCUGAC |
| | | AUUCAAGGAAGACAUCCAGAAGGCA |
| | | CAGGUCAGCGGACAGGGAGACAGCCUGCACGAACACAUCGCAAA |
| | | CCUGGCAGGAAGCCCGGCAAUCAAG |
| | | AAGGGAAUCCUGCAGACAGUCAAGGUCGUCGACGAACUGGUCAA |
| | | GGUCAUGGGAAGACACAAGCCGGAA |
| | | AACAUCGUCAUCGAAAUGGCAAGAGAAAACCAGACAACACAGAA |
| | | GGGACAGAAGAACAGCAGAGAAAGAAUGAAGAGAAUCGAAGAA |
| | | GGAAUCAAGGAACUGGGAAGCCAGAUCCUGAAGGAACACCCGGU |
| | | CGAAAAC |
| | | ACACAGCUGCAGAACGAAAAGCUGUACCUGUACUACCUGCAGAA |
| | | CGGAAGAGACAUGUACGUCGACCAG |
| | | GAACUGGACAUCAACAGACUGAGCGACUACGACGUCGACCACAU |
| | | CGUCCCGCAGAGCUUCCUGAAGGACG |
| | | ACAGCAUCGACAACAAGGUCCUGACAAGAAGCGACAAGAACAGA |
| | | GGAAAGAGCGACAACGUCCCGAGCG |
| | | AAGAAGUCGUCAAGAAGAUGAAGAACUACUGGAGACAGCUGCU |
| | | GAACGCAAAGCUGAUCACACAGAGAA |
| | | AGUUCGACAACCUGACAAAGGCAGAGAGAGGAGGACUGAGCGA |
| | | ACUGGACAAGGCAGGAUUCAUCAAGA |
| | | GACAGCUGGUCGAAACAAGACAGAUCACAAAGCACGUCGCACAG |
| | | AUCCUGGACAGCAGAAUGAACACAA |
| | | AGUACGACGAAAACGACAAGCUGAUCAGAGAAGUCAAGGUCAU |
| | | CACACUGAAGAGCAAGCUGGUCAGCG |
| | | ACCUCAGAAAGGACUUCCAGUUCUACAAGGUCAGAGAAAUCAAC |
| | | AACUACCACCACGCACACGACGCAU |
| | | ACCUGAACGCAGUCGUCGGAACAGCACUGAUCAAGAAGUACCCG |
| | | AAGCUGGAAAGCGAAUUCGUCUACG |
| | | GAGACUACAAGGUCUACGACGUCAGAAAGAUGAUCGCAAAGAG |
| | | CGAACAGGAAAUCGGAAAGGCAACAG |
| | | CAAAGUACUUCUUCUACAGCAACAUCAUGAACUUCUUCAAGACA |
| | | GAAAUCACACUGGCAAACGGAGAAA |
| | | UCAGAAAGAGACCGCUGAUCGAAACAAACGGAGAAACAGGAGA |
| | | AAUCGUCUGGGACAAGGGAAGAGACU |
| | | UCGCAACAGUCAGAAAGGUCCUGAGCAUGCCGCAGGUCAACAUC |
| | | GUCAAGAAGACAGAAGUCCAGACAG |
| | | GAGGAUUCAGCAAGGAAAGCAUCCUGCCGAAGAGAAACAGCGAC |
| | | AAGCUGAUCGCAAGAAAGAAGGACU |
| | | GGGACCCGAAGAAGUACGGAGGAUUCGACAGCCCGACAGUCGCA |
| | | UACAGCGUCCUGGUCGUCGCAAAGG |
| | | UCGAAAAGGGAAAGAGCAAGAAGCUGAAGAGCGUCAAGGAACU |
| | | GCUGGGAAUCACAAUCAUGGAAAGAAGCAGCUUCGAAAAGAAC |
| | | CCGAUCGACUUCCUGGAAGCAAAGGGAUACAAGGAAGUCAAGA |
| | | AGGACCUGA |
| | | UCAUCAAGCUGCCGAAGUACAGCCUGUUCGAACUGGAAAACGGA |
| | | AGAAAGAGAAUGCUGGCAAGCGCAG |
| | | GAGAACUGCAGAAGGGAAACGAACUGGCACUGCCGAGCAAGUAC |
| | | GUCAACUUCCUGUACCUGGCAAGCC |
| | | ACUACGAAAAGCUGAAGGGAAGCCCGGAAGACAACGAACAGAA |
| | | GCAGCUGUUCGUCGAACAGCACAAGC |
| | | ACUACCUGGACGAAAUCAUCGAACAGAUCAGCGAAUUCAGCAAG |
| | | AGAGUCAUCCUGGCAGACGCAAACC |
| | | UGGACAAGGUCCUGAGCGCAUACAACAAGCACAGAGACAAGCCG |
| | | AUCAGAGAACAGGCAGAAAACAUCA |
| | | UCCACCUGUUCACACUGACAAACCUGGGAGCACCGGCAGCAUUC |
| | | AAGUACUUCGACACAACAAUCGACAG |
| | | AAAGAGAUACACAAGCACAAAGGAAGUCCUGGACGCAACACUGA |
| | | UCCACCAGAGCAUCACAGGACUGUA |
| | | CGAAACAAGAAUCGACCUGAGCCAGCUGGGAGGAGACGGAGGA |
| | | GGAAGCCCGAAGAAGAAGAGAAAGGU |
| | | CUAGCUAGCCAUCACAUUUAAAAGCAUCUCAGCCUACCAUGAGA |
| | | AUAAGAGAAAGAAAAUGAAGAUCAA |
| | | UAGCUUAUUCAUCUCUUUUUCUUUUUCGUUGGUGUAAAGCCAA |
| | | CACCCUGUCUAAAAAACAUAAAUUUC |
| | | UUUAAUCAUUUUGCCUCUUUUCUCUGUGCUUCAAUUAAUAAAA |
| | | AAUGGAAAGAACCUCGAGAAAAAAAA |
| | | AAAAAAAAAAAAAAAAAAAAAAAAAAAAAAAAAAAAAAAAAAA |
| | | AAAAAAAAAAAAAAAAAAAAAAAAA |
| | | AAAAAAAAAAAAAAUCUAG (SEQ ID NO: 19132) |
| EMX1 | Contains chemical | GAGUCCGAGCAGAAGAAGAAGUUUCAGAGCUAUGCUGGAAACA |
| sgRNA | modifications from Synthego: | GCAUAGCAAGUUGAAAUAAGGCUAGUCCGUUAUCAACUUGAAA |
| modified | 2′-F, 2′-O-methyl, | AAGUGGCACCGAGUCGGUGCUUUUU (SEQ ID NO: 19133) |
| | phosphorothioates | |
| EMX1 | No modifications | GAGUCCGAGCAGAAGAAGAAGUUUCAGAGCUAUGCUGGAAACA |
| sgRNA | | GCAUAGCAAGUUGAAAUAAGGCUAGUCCGUUAUCAACUUGAAA |
| unmodified | | AAGUGGCACCGAGUCGGUGCUUUUU (SEQ ID NO: 19134) |
| Eco3 ncRNA | Eco3 ncRNA only with 10 bp | GGGAUAAUUGAUAAGAUUCCGUAAGAGCCAAACCUAGCAUUUU |
| | insertion | AUGGGUUAAUAGCCCAUCGGGCCAUGAGUCAUGGUUUCGCCUAG |
| | | UAUUUUAGCUAUGCCCGUCGUUCAGUUCGCUGAACAAACGGCAG |
| | | AAGCUGGAGGAGGAAGGGCCUGAGUCCGAGCAGAAGAAUUACG |
| | | UCUGCAAAGUUCUCCCAUCACAUCAACCGGUGGCGCAUUGCCAC |
| | | GAAGCAGGCCAAUGGGGAGGACAUCGAUGUCAUCAGCGAACUG |
| | | AUCGACGUGCUCAAGUAGGUUUGGCUCUUACGGAAUCUUAUCA |
| | | GAU (SEQ ID NO: 19135) |
| Eco3 ncRNA- | Eco3 ncRNA only with 10 bp | GGGAUAAUUGAUAAGAUUCCGUAAGAGCCAAACCUAGCAUUUU |
| MS2 | insertion and 3′ MS2 stem loop | AUGGGUUAAUAGCCCAUCGGGCCAUGAGUCAUGGUUUCGCCUAG |
| | | UAUUUUAGCUAUGCCCGUCGUUCAGUUCGCUGAACAAACGGCAG |
| | | AAGCUGGAGGAGGAAGGGCCUGAGUCCGAGCAGAAGAAUUACG |
| | | UCUGCAAAGUUCUCCCAUCACAUCAACCGGUGGCGCAUUGCCAC |
| | | GAAGCAGGCCAAUGGGGAGGACAUCGAUGUCAUCAGCGAACUG |
| | | AUCGACGUGCUCAAGUAGGUUUGGCUCUUACGGAAUCUUAUCA |
| | | ACAUGAGGAUCACCCAUGUGAU (SEQ ID NO: 19136) |
| Aco1 RT | Aco1 RT RNA sequence | AGGGGGAAAUAAGAGAGAAAAGAAGAGUAAGAAGAAAUAUAAG |
| | including 5′ and 3′ UTRs | AGCCACCAUGGAGCCCAAUGACUACGUAAAUAGGUUGCGACAUG |
| | | CUAUGGAAAUAAGUGAAAACCCGCGCUUUAGCCCUGAGUACAUU |
| | | GCUCAAUGUUGUACUUACGCCGAGAAUCUCCUCAAGCAAGGGCU |
| | | GCCAGUUCUGUUCGAUCAAACGCAUAUUCGGAAAGUUCUGGGG |
| | | AUGGCGGCACCUCGAUUGUGUGAUUAUCACAGAUUCACAAUCCC |
| | | AAAGCACAACGGAUCUAGAAUUAUCACGGCCCCAUCUAGGAAGC |
| | | UGAAGCUUCGACAACAAUGGAUAUACCAGAAUAUCCUUAUACG |
| | | AAAGGAGGCUUCACCGUACACGCACGGAUUUGUUCCUGAACGCA |
| | | GCAUCGUGACUAACGCAAUCCUCCAUAUAGGAUACGCAUACACC |
| | | UACUGCGUGGAUAUCACGGAUUUCUUUCCUAGCAUCACUAAGAA |
| | | GCAGGUCUUGCCUAUAUUCCGAAAUAUGGGCUAUAGUGGUUCU |
| | | GCUGCAAAUACUCUCUGCGACCUCUGUUGCUAUGACGGGGUCCU |
| | | CCCCCAGGGGGCGCCUACUAGCCCAUACCUCAGUAACAUGAUUU |
| | | GUCGCGAUCUUGAUGACGAAUUGGGGGCUAUGGCGCGGCGGUU |
| | | CCGGGGGAUUUUUACACGGUAUGCGGAUGACAUAGCUAUCUCCA |
| | | CAAACCAACAACAGCCGCAACUUUUGGAUGCCUUGGGACUUAUC |
| | | CUCGGGAAGCACGGAUUUCUUAUGAAUCUCGAUAAGUGUCGAG |
| | | UCUAUAAUCCUGGACAGCCCAAAAGAAUUACUGGAUUGACCGUU |
| | | CACAAUAGAGUAUCAGUUCCGAAAACCUUUAAGCGGAAAUUGC |
| | | GGCAGGAAAUACAUUACUGUCAGAAGUUCGGAGUGACUGCACA |
| | | UUUGGAAAACACGAAGGCUGCACGAUCCAUCCACUAUAGGGAAC |
| | | AUCUGUAUGGAAAGGCAUACUAUGUUAAAAUGGUUGAGCCUGA |
| | | GCUCGGGGCGCACUUCCUCGAUGAGUUGUCAAAGGUAGACUGGC |
| | | CAGAGCCACCAAAGAAGAAAAGAAAGGUCUGAUAAUAGGCUGG |
| | | AGCCUCGGUGGCCAUGCUUCUUGCCCCUUGGGCCUCCCCCCAGC |
| | | CCCUCCUCCCCUUCCUGCACCCGUACCCCCGUGGUCUUUGAAUA |
| | | AAGUCUGAGUGGGCGGCCCUGCA (SEQ ID NO: 19137) |
| Aco1 | Aco1 ncRNA-sgRNA with 50 | GGGGUAUAAAACCGGGAACGAUCAGACCGGGGUGAAUUCGCCCC |
| ncRNA- | bp insertion | CUUGAUCAAACGGCACUAACCACUGUUUGCCGUGCGUGCGUACA |
| sgRNA_50 | | AACGGCAGAAGCUGGAGGAGGAAGGGCCUGAGUCCGAGCAGAA |
| | | GAAAACUCGAGCUCUGAUCAGUAUCAUGGGGCCCAUGGUUGAA |
| | | UGACUCCUAUAAAGUUCUCCCAUCACAUCAACCGGUGGCGCAUU |
| | | GCCACGAAGCAGGCCAAUGGGGAGGACAUCGAUGUCAACGCACG |
| | | CACGGCAAACAGACAGAUCCAUUACUAUUACAAUUUAUUUAGU |
| | | GAUCGUUCCCGGUUUUAUACGAGUCCGAGCAGAAGAAGAAGUU |
| | | UCAGAGCUAUGCUGGAAACAGCAUAGCAAGUUGAAAUAAGGCU |
| | | AGUCCGUUAUCAACUUGAAAAAGUGGCACCGAGUCGGUGCUUU |
| | | UUCCUGCA (SEQ ID NO: 19138) |
| Aco1 sgRNA- | Aco1 sgRNA-ncRNA with 50 | GGGGAGUCCGAGCAGAAGAAGAAGUUUCAGAGCUAUGCUGGAA |
| ncRNA_50 | bp insertion | ACAGCAUAGCAAGUUGAAAUAAGGCUAGUCCGUUAUCAACUUG |
| | | AAAAAGUGGCACCGAGUCGGUGCUUUUUGUAUAAAACCGGGAA |
| | | CGAUCAGACCGGGGUGAAUUCGCCCCCUUGAUCAAACGGCACUA |
| | | ACCACUGUUUGCCGUGCGUGCGUACAAACGGCAGAAGCUGGAGG |
| | | AGGAAGGGCCUGAGUCCGAGCAGAAGAAAACUCGAGCUCUGAUC |
| | | AGUAUCAUGGGGCCCAUGGUUGAAUGACUCCUAUAAAGUUCUCC |
| | | CAUCACAUCAACCGGUGGCGCAUUGCCACGAAGCAGGCCAAUGG |
| | | GGAGGACAUCGAUGUCAACGCACGCACGGCAAACAGACAGAUCC |
| | | AUUAUUAUUACAAUUUAUUUAGUGAUCGUUCCCGGUUUUAUAC |
| | | CCUGCA (SEQ ID NO: 19139) |
| Eco3_EMX1 | Eco3 ncRNA containing 25 bp | GAGUCCGAGCAGAAGAAGAAGUUUCAGAGCUAUGCUGGAAACA |
| gRNA_ | insertion in EMX1 gene fused | GCAUAGCAAGUUGAAAUAAGGCUAGUCCGUUAUCAACUUGAAA |
| ncRNA_25 | to EMX1 sgRNA at 5′ end | AAGUGGCACCGAGUCGGUGCUUUUUAAUAACAACGAAAUGAUA |
| | | AGAUUCCGUAAGAGCCAAACCUAGCAUUUUAUGGGUUAAUAGC |
| | | CCAUCGGGCCAUGAGUCAUGGUUUCGCCUAGUAUUUUAGCUAUG |
| | | CCCGUCGUUCAGUUCGCUGAACAAACGGCAGAAGCUGGAGGAGG |
| | | AAGGGCCUGAGUCCGAGCAGAAGAAaACUCGAGCUCUGAAUGAC |
| | | UCCUAUAaaguuCUCCCAUCACAUCAACCGGUGGCGCAUUGCCACG |
| | | AAGCAGGCCAAUGGGGAGGACAUCGAUGUCAUCAGCGAACUGA |
| | | UCGACGUGCUCAAGUAGGUUUGGCUCUUACGGAAUCUUAUCA |
| | | (SEQ ID NO: 19140) |
| Eco3_ncRNA | Eco3 ncRNA containing 25 bp | GAAAUGAUAAGAUUCCGUAAGAGCCAAACCUAGCAUUUUAUGG |
| only | insertion in EMX1 gene | GUUAAUAGCCCAUCGGGCCAUGAGUCAUGGUUUCGCCUAGUAUU |
| | | UUAGCUAUGCCCGUCGUUCAGUUCGCUGAACAAACGGCAGAAGC |
| | | UGGAGGAGGAAGGGCCUGAGUCCGAGCAGAAGAAUUACGUCUG |
| | | CAAAGUUCUCCCAUCACAUCAACCGGUGGCGCAUUGCCACGAAG |
| | | CAGGCCAAUGGGGAGGACAUCGAUGUCAUCAGCGAACUGAUCGA |
| | | CGUGCUCAAGUAGGUUUGGCUCUUACGGAAUCUUAUCA(SEQ ID |
| | | NO: 19141) |
| Eco3_ncRNA_ | Eco3 ncRNA containing 25 bp | GAAAUGAUAAGAUUCCGUAAGAGCCAAACCUAGCAUUUUAUGG |
| AAVSI | insertion in AAVSI gene fused | GUUAAUAGCCCAUCGGGCCAUGAGUCAUGGUUUCGCCUAGUAUU |
| gRNA_25 | to AAVSI sgRNA at 3′ end | UUAGCUAUGCCCGUCGUUCAGUUCGCUGACUGUCCCCUCCACCC |
| | | CACAGUGGGGCCACUAGGGACAGAAAUGACAGUGGUUGGUGCU |
| | | CUAAAAAUUAAUGACAGAAAAGCCCCAUCCUUAGGCCUCCUCCU |
| | | UCCUAGUCUCCUGAUAUUGGGUCUAACCCCCAUCAGCGAACUGA |
| | | UCGACGUGCUCAAGUAGGUUUGGCUCUUACGGAAUCUUAUCAA |
| | | AUAACAACGGGGCCACUAGGGACAGGAUGUUUCAGAGCUAUGC |
| | | UGGAAACAGCAUAGCAAGUUGAAAUAAGGCUAGUCCGUUAUCA |
| | | ACCUGAAAAAGUGGCACCGAGUCGGUGCUUUUU(SEQ ID NO: |
| | | 19142) |
| Eco3_ncRNA_ | Eco3 ncRNA containing 25 bp | GAAAUGAUAAGAUUCCGUAAGAGCCAAACCUAGCAUUUUAUGG |
| EMX1 | insertion in EMX1 gene fused | GUUAAUAGCCCAUCGGGCCAUGAGUCAUGGUUUCGCCUAGUAUU |
| gRNA_25 | to EMX1 sgRNA at 3′ end | UUAGCUAUGCCCGUCGUUCAGUUCGCUGAACAAACGGCAGAAGC |
| | | UGGAGGAGGAAGGGCCUGAGUCCGAGCAGAAGAAaACUCGAGCU |
| | | CUGAAUGACUCCUAUAaaguuCUCCCAUCACAUCAACCGGUGGCGC |
| | | AUUGCCACGAAGCAGGCCAAUGGGGAGGACAUCGAUGUCAUCAG |
| | | CGAACUGAUCGACGUGCUCAAGUAGGUUUGGCUCUUACGGAAUC |
| | | UUAUCAAAUAACAACGAGUCCGAGCAGAAGAAGAAGUUUCAGA |
| | | GCUAUGCUGGAAACAGCAUAGCAAGUUGAAAUAAGGCUAGUCC |
| | | GUUAUCAACUUGAAAAAGUGGCACCGAGUCGGUGCUUUUU(SEQ |
| | | ID NO: 19143) |
| Eco3_ncRNA_ | Eco3 ncRNA containing 50 bp | GAAAUGAUAAGAUUCCGUAAGAGCCAAACCUAGCAUUUUAUGG |
| EMX1 | insertion in EMX1 gene fused | GUUAAUAGCCCAUCGGGCCAUGAGUCAUGGUUUCGCCUAGUAUU |
| gRNA_50 | to EMX1 sgRNA at 3′ end | UUAGCUAUGCCCGUCGUUCAGUUCGCUGAACAAACGGCAGAAGC |
| | | UGGAGGAGGAAGGGCCUGAGUCCGAGCAGAAGAAaACUCGAGCU |
| | | CUGAUCAGUAUCAUGGGGCCCAUGGUUGAAUGACUCCUAUAaagu |
| | | uCUCCCAUCACAUCAACCGGUGGCGCAUUGCCACGAAGCAGGCC |
| | | AAUGGGGAGGACAUCGAUGUCAUCAGCGAACUGAUCGACGUGC |
| | | UCAAGUAGGUUUGGCUCUUACGGAAUCUUAUCAAAUAACAACG |
| | | AGUCCGAGCAGAAGAAGAAGUUUCAGAGCUAUGCUGGAAACAG |
| | | CAUAGCAAGUUGAAAUAAGGCUAGUCCGUUAUCAACUUGAAAA |
| | | AGUGGCACCGAGUCGGUGCUUUUU(SEQ ID NO: 19144) |
| Eco3_ncRNA_ | Eco3 ncRNA containing 75 bp | GAAAUGAUAAGAUUCCGUAAGAGCCAAACCUAGCAUUUUAUGG |
| EMX1 | insertion in EMX1 gene fused | GUUAAUAGCCCAUCGGGCCAUGAGUCAUGGUUUCGCCUAGUAUU |
| gRNA_75 | to EMX1 sgRNA at 3′ end | UUAGCUAUGCCCGUCGUUCAGUUCGCUGAACAAACGGCAGAAGC |
| | | UGGAGGAGGAAGGGCCUGAGUCCGAGCAGAAGAAaACUCGAGCU |
| | | CUGAGCCCCACCGCAGCUUGCCAGCACUUUCAGUAUCAUGGGGC |
| | | CCAUGGUUGAAUGACUCCUAUAaaguuCUCCCAUCACAUCAACCGG |
| | | UGGCGCAUUGCCACGAAGCAGGCCAAUGGGGAGGACAUCGAUGU |
| | | CAUCAGCGAACUGAUCGACGUGCUCAAGUAGGUUUGGCUCUUAC |
| | | GGAAUCUUAUCAAAUAACAACGAGUCCGAGCAGAAGAAGAAGU |
| | | UUCAGAGCUAUGCUGGAAACAGCAUAGCAAGUUGAAAUAAGGC |
| | | UAGUCCGUUAUCAACUUGAAAAAGUGGCACCGAGUCGGUGCUU |
| | | UUU(SEQ ID NO: 19145) |
| Eco3_ncRNA_ | Eco3 ncRNA containing 100 | GAAAUGAUAAGAUUCCGUAAGAGCCAAACCUAGCAUUUUAUGG |
| EMX1 | bp insertion in EMX1 gene | GUUAAUAGCCCAUCGGGCCAUGAGUCAUGGUUUCGCCUAGUAUU |
| gRNA_100 | fused to EMX1 sgRNA at 3′ | UUAGCUAUGCCCGUCGUUCAGUUCGCUGAACAAACGGCAGAAGC |
| | end | UGGAGGAGGAAGGGCCUGAGUCCGAGCAGAAGAAaACUCGAGCU |
| | | CUGAGCCCCACUGUCGAGAAGUAUGUAUCUCGCUCCCGCAGCUU |
| | | GCCAGCACUUUCAGUAUCAUGGGGCCCAUGGUUGAAUGACUCCU |
| | | AUAaaguuCUCCCAUCACAUCAACCGGUGGCGCAUUGCCACGAAGC |
| | | AGGCCAAUGGGGAGGACAUCGAUGUCAUCAGCGAACUGAUCGAC |
| | | GUGCUCAAGUAGGUUUGGCUCUUACGGAAUCUCAUCAAAUAAC |
| | | AACGAGUCCGAGCAGAAGAAGAAGUUUCAGAGCUAUGCUGGAA |
| | | ACAGCAUAGCAAGUUGAAAUAAGGCUAGUCCGUUAUCAACUUG |
| | | AAAAAGUGGCACCGAGUCGGUGCUUUUU(SEQ ID NO: 19146) |
| Eco3_ncRNA_ | Eco3 ncRNA containing GFP | GAAAUGAUAAGAUUCCGUAAGAGCCAAACCUAGCAUUUUAUGG |
| EMX1 | gene insertion in EMX1 gene | GUUAAUAGCCCAUCGGGCCAUGAGUCAUGGUUUCGCCUAGUAUU |
| gRNA_GFP | fused to EMX1 sgRNA at 3′ | UUAGCUAUGCCCGUCGUUCAGUUCGCUGAACAAACGGCAGAAGC |
| gene | end. Entire GFP cassette is in | UGGAGGAGGAAGGGCCUGAGUCCGAGCAGAAGAAcccauauguccuuc |
| | antisense orientation and | cgagugagagacacaaaaaauuccaacacacuauugcaaugaaaauaa |
| | contains mini EFla promoter | auuuccuuuuuagccagaagucagaugcucaaggggcuucaugauguc |
| | and beta globin polyA signal. | cccauaauuuuuggcagagggaaaaagaucucagugguauuugugagc |
| | | cagggcauuggccacaccagccaccaccuucugauaggcagccugcac |
| | | cugaggagugcggccgcuuuacuuguacagcucguccaugccgagagu |
| | | gaucccggggggucacgaacucagugguugucgggcagcagcacgggg |
| | | ccgucgccgauggggguguucugcugguaguggucggcgcuugucggc |
| | | caugauauagacguuguggcuguuuuuuuuuugagauucaccucgggg |
| | | ggucuuguaguugccgucguccuugaagaagaugguggcuccuggacg |
| | | uagccuucgggcauggcggacuugaagaagucgugcugcuucaugugg |
| | | ucgggguagcggcugaagcacugcacgccguaggucaggguggucacg |
| | | agggugggccagggcacgggcagcuugccgguggugcagaugaacuuc |
| | | agggucaguugccguagguggcaucgcccucgcccucgccggacacgu |
| | | gaacuuguggccguuuacgucgccguccagcucgaccaggaugggcac |
| | | caccccggugaacagcuccucgcccuugcucaccaugguggcgaccgg |
| | | uggaucccgggcccgcgguaccgucgacugcagaauucgaagcuugag |
| | | cucgagaucugaguccgguagcgcuagggaucugacgguucacuaaac |
| | | ccuguguuccacccucgggaaaaaggcggagccaguacacgacaucac |
| | | uuucccaguuuaccccgcgccaccuucucuaggcaccgguucaauugc |
| | | cgaccccuccccccaacuucucggggacuguggggaugugcgcu |
| | | cugcccguuCUCCCAUCACAUCAACCGGUGGCGCAUUGCCACGAAGC |
| | | AGGCCAAUGGGGAGGACAUCGAUGUCAUCAGCGAACUGAUCGAC |
| | | GUGCUCAAGUAGGUUUGGCUCUUACGGAAUCUUAUCAAAUAAC |
| | | AACGAGUCCGAGCAGAAGAAGAAGUUUCAGAGCUAUGCUGGAA |
| | | ACAGCAUAGCAAGUUGAAAUAAGGCUAGUCCGUUAUCAACUUG |
| | | AAAAAGUGGCACCGAGUCGGUGCUUUUU(SEQ ID NO: 19147) |
| Eco3_NT_nc | Eco3 ncRNA containing 25 bp | GAAAUGAUAAGAUUCCGUAAGAGCCAAACCUAGCAUUUUAUGG |
| RNA_EMX | insertion (on opposite strand of | GUUAAUAGCCCAUCGGGCCAUGAGUCAUGGUUUCGCCUAGUAUU |
| gRNA_25 | sgRNA cut) in EMX1 gene | UUAGCUAUGCCCGUCGUUCAGUUCGCUGAugacaucgauguccucccca |
| | fused to EMX1 sgRNA at 3′ | uuggccugcuucguggcaaugcgccaccgguugaugugaugggagaacu |
| | end | uUAUAGGAGUCAuuuguUCAGCGAACUGAUCGACGUGCUCAAGUAGGUU |
| | | UGGCUCUUACGGAAUCUUAUCAAAUAACAACGAGUCCGAGCAGAAGAAG |
| | | AAGUUUCAGAGCUAUGCUGGAAACAGCAUAGCAAGUUGAAAUAAG |
| | | GCUAGUCCGUUAUCAACUUGAAAAAGUGGCACCGAGUCGGUGCU |
| | | UUUU(SEQ ID NO: 19148) |
| Aco1_EMX1 | Aco1 ncRNA containing 25 bp | gaguccgagcagaagaagaaguuucagagcuaugcuggaaacagcauag |
| gRNA_ncRN | insertion in EMX1 gene fused | caaguugaaauaaggcuaguccguuaucaacuugaaaaaguggcaccga |
| A 25 | to EMX1 sgRNA at 5′ end | gucggugcuuuuuAAUAACAACguauaaaaccgggaacgaucagaccgg |
| | | ggugaauucgcccccuugaucaaacggcacuaaccacuguuugccgugc |
| | | gugcguacaaacggcagaagcuggaggaggaagggccugaguccgagca |
| | | gaagaaaACUCGAGCUCUGAAUGACUCCUAUAaaguucucccaucacau |
| | | caaccgguggcgcauugccacgaagcaggccaauggggaggacaucgau |
| | | gucaacgcacgcacggcaaacagacagauccauuauuuuuuuuuuu |
| | | (SEQ ID NO: 19149) |
| Aco1_ncRNA | Aco1 ncRNA containing 25 bp | guauaaaaccgggaacgaucagaccggggugaauucgcccccuugaucaa |
| only | insertion in EMX1 gene | acggcacuaaccacuguuugccgugcgugcguacaaacggcagaagcugg |
| | | aggaggaagggccugaguccgagcagaagaaaACUCGAGCUCUGAAUGAC |
| | | UCCUAUAaaguucucccaucacaucaaccgguggcgcauugccacgaagc |
| | | aggccaauggggaggacaucgaugucaacgcacgcacggcaaacagacag |
| | | auccauuauuauuacaauuuauuuagugaucguucccgguuuuauac |
| | | (SEQ ID NO: 19150) |
| Aco1_ncRNA_ | Aco1 ncRNA containing 25 bp | guauaaaaccgggaacgaucagaccggggugaauucgcccccuugaucaaa |
| AAVS1 | insertion in AAVSI gene fused | cggcacuaaccacuguuugccgugcgugcguUCUGUCCCCUCCACCCCACA |
| gRNA_25 | to AAVSI sgRNA at 3′ end | GUGGGGCCACUAGGGACAGAAAUGACAGUGGUUGGUGCUCUAAAAAUUAAU |
| | | GACAGAAAAGCCCCAUCCUUAGGCCUCCUCCUUCCUAGUCUCCUGAUAUUG |
| | | GGUCUAACCCCCAacgcacgcacggcaaacagacagauccauuauuauuac |
| | | aauuuauuuagugaucguucccgguuuuauacAAUAACAACGGGGCCACUA |
| | | GGGACAGGAUguuucagagcuaugcuggaaacagcauagcaaguugaaaua |
| | | aggcuaguccguuaucaacuugaaaaaguggcaccgagucggugcuuuuu |
| | | (SEQ ID NO: 19151) |
| Aco1_ncRNA_ | Aco1 ncRNA containing 25 bp | guauaaaaccgggaacgaucagaccggggugaauucgcccccuugaucaa |
| EMX1 | insertion in EMX1 gene fused | acggcacuaaccacuguuugccgugcgugcguacaaacggcagaagcugg |
| gRNA_25 | to EMX1 sgRNA at 3′ end | aggaggaagggccugaguccgagcagaagaaaACUCGAGCUCUGAAUGAC |
| | | UCCUAUAaaguucucccaucacaucaaccgguggcgcauugccacgaagc |
| | | aggccaauggggaggacaucgaugucaacgcacgcacggcaaacagacag |
| | | aucgcagaagaagaaguuucagagcuaugcuggaaacagcauagcaaguu |
| | | gaaauaaggcuaguccguuaucaacuugaaaaaguggcaccgagucggug |
| | | cuuuuu(SEQ ID NO: 19152) |
| Aco1_ncRNA_ | Aco1 ncRNA containing 50 bp | guauaaaaccgggaacgaucagaccggggugaauucgcccccuugaucaa |
| EMX1 | insertion in EMX1 gene fused | acggcacuaaccacuguuugccgugcgugcguacaaacggcagaagcugg |
| gRNA_50 | to EMX1 sgRNA at 3′ end | aggaggaagggccugaguccgagcagaagaaaACUCGAGCUCUGAAUGAC |
| | | UCCUAUAaaguucucccaucacaucaaccgguggcgcauugccacgaagc |
| | | aggccaauggggaggacaucgaugucaacgcacgcacggcaaacagacag |
| | | aucgcagaagaagaaguuucagagcuaugcuggaaacagcauagcaaguu |
| | | gaaauaaggcuaguccguuaucaacuugaaaaaguggcaccgagucggug |
| | | cuuuuu(SEQ ID NO: 19153) |
| Aco1_ncRNA_ | Aco1 ncRNA containing 75 bp | guauaaaaccgggaacgaucagaccggggugaauucgcccccuugaucaa |
| EMX1 | insertion in EMX1 gene fused | acggcacuaaccacuguuugccgugcgugcguacaaacggcagaagcugg |
| gRNA_75 | to EMX1 sgRNA at 3′ end | aggaggaagggccugaguccgagcagaagaaaACUCGAGCUCUGAGCCCC |
| | | ACCGCAGCUUGCCAGCACUUUCAGUAUCAUGGGGCCCAUGGUUGAAUGAC |
| | | UCCUAUAaaguucucccaucacaucaaccgguggcgcauugccacgaagc |
| | | aggccaauggggaggacaucgaugucaacgcacgcacggcaaaACgaguc |
| | | cgagcagaagaagaaguuucagagcuaugcuggaaacagcauagcaaguu |
| | | gaaauaaggcuaguccguuaucaacuugaaaaaguggcaccgagucggug |
| | | cuuuuu(SEQ ID NO: 19154) |
| Aco1_ncRNA_ | Aco1 ncRNA containing 100 | guauaaaaccgggaacgaucagaccggggugaauucgcccccuugaucaa |
| EMX1 | bp insertion in EMX1 gene | acggcacuaaccacuguuugccgugcgugcguacaaacggcagaagcugg |
| gRNA_100 | fused to EMX1 sgRNA at 3′ | aggaggaagggccugaguccgagcagaagaaa |
| | end | ACUCGAGCUCUGAGCCCCACUGUCGAGAAGUAUGUAUCUCGCUC |
| | | CCGCAGCUUGCCAGCACUUUCAGUAUCAUGGGGCCCAUGGUUGA |
| | | AUGACUCCUAUAaaguucucccaucacaucaaccgguggcgcauugccac |
| | | gaagcaggccaauggggaggacaucgaugucaacgcacgcacggcaaaca |
| | | gacagauccauuauuauuacaauuuagagcuaugcuggaaacagcauagc |
| | | aaguugaaauaaggcuaguccguuaucaacuugaaaaaguggcaccgagu |
| | | cggugcuuuuu(SEQ ID NO: 19155) |
| Aco1_ncRNA_ | Aco1 ncRNA containing GFP | guauaaaaccgggaacgaucagaccggggugaauucgcccccuugaucaa |
| EMX1 | gene insertion in EMX1 gene | acggcacuaaccacuguuugccgugcgugcguacaaacggcagaagcugg |
| gRNA_GFP | fused to EMX1 sgRNA at 3′ | aggaggaagggccugaguccgagcagaagaacccauauguccuuccgagu |
| gene | end. Entire GFP cassette is in | gagagacacaaaaaauuccaacacacuauugcaaugaaaauaaauuuccu |
| | antisense orientation and | uuauuagccagaagucagaugcucaaggggcuucaugauguccccauaau |
| | contains mini EFla promoter | uuuuggcagagggaaaaagaucucagugguauuugugagccagggcauug |
| | and beta globin polyA signal. | gccacaccagccaccaccuucugauaggcagccugcaccugaggagugcg |
| | | gccgcuuuacuuguacagcucguccaugccgagagugaucccggcggcgg |
| | | ucacgaacuccagcaggaccaugugaucgcgcuucucguuggggucuuug |
| | | cucagggggacugggugcucagguagugguugucgggcagcagcacgggg |
| | | ccgucgccgauggggguguucugcugguaguggucggcgagcugcacgcu |
| | | gccguccucgauguuguggcggaucuugaaguucaccuugaugccguucu |
| | | ucugcuugucggccaugauauagacguuguggcuguuguaguuguacucc |
| | | agcuugugccccaggauguugccguccuccuugaagucgaugcccuucag |
| | | cucgaugcgguucaccagggugucgcccucgaacuucaccucgggggguc |
| | | uuguaguugccgucuccuugaagaagauggugcgcuccuggacguagccu |
| | | ucgggcauggggacuugaagaagucgugcugcuucauguggucgggguag |
| | | cggcugaagcacugcacgccguaggucaggguggucacgagggugggcca |
| | | gggcacgggcagcuugccgguggugcagaugaacuucagggucaguugcc |
| | | guagguggaugucugccggacacgcugaacuuguggccguuuacgucgcc |
| | | guccagcucgaccaggaugggcaccaccccggugaacagcuccucgcccu |
| | | ugcucaccaugguggcgaccgguggaucccgggcccgcgguaccgucgac |
| | | ugcagaauucgaagcuugagcucgagaucugaguccgguagcgcuagcgg |
| | | aucugacgguucacuaaacccuguguucuggggcaaacccguugcgaaaa |
| | | agaacguucacggcgacuacugcacuuauauacgguucucccccacccuc |
| | | gggaaaaaggcggagccaguacacgacaucacuuucccaguuuaccccgc |
| | | gccaccuucucuaggcaccgguucaauugccgaccccuccccccaacuuc |
| | | ucggggacugugggcgaugugcgcucugcccguucucccaucacaucaac |
| | | cgguggcgcauugccacgaagcaggccaauggggaggacaucgaugucaa |
| | | cgcacgcacggcaaacagacagauccauuauuauuacaauuuauuuagug |
| | | aucguucccgguuuuauacAAUAACAACgaguccgagcagaagaagaagu |
| | | uucagagcuaugcuggaaacagcauagcaaguugaaauaaggcuaguccg |
| | | uuaucaacuugaaaaaguggcaccgagucggugcuuuuu(SEQ ID NO: |
| | | 19156) |
| Aco1_NT_nc | Aco1 ncRNA containing 25 bp | guauaaaaccgggaacgaucagaccggggugaauucgcccccuugaucaa |
| RNA_EMX1 | insertion (on opposite strand of | acggcacuaaccacuguuugccgugcgugcguugacaucgauguccuccc |
| gRNA_25 | sgRNA cut) in EMX1 gene | cauuggccugcuucguggcaaugcgccaccgguugaugugaugggagaac |
| | fused to EMX1 sgRNA at 3′ | uuUAUAGGAGUCAUUCAGAGCUCGAGUuuucuucugcucggacucaggcc |
| | end | cuuccuccuccagcuucugccguuuguacgcacgcacggcaaacagacag |
| | | auccauuauuauuacaauuuauuuagugaucguucccgguuuuauacAAU |
| | | AACAACgaguccgagcagaagaagaaguuucagagcuaugcuggaaacag |
| | | cauagcaaguugaaauaaggcuaguccguuaucaacuugaaaaaguggca |
| | | ccgagucggugcuuuuu(SEQ ID NO: 19157) |
| R2042_EMX1 | R2042 ncRNA containing 25 | gaguccgagcagaagaagaaguuucagagcuaugcuggaaacag |
| gRNA_ncRN | bp insertion in EMX1 gene | cauagcaaguugaaauaaggcuaguccguuaucaacuugaaaaa |
| A_25 | fused to EMX1 sgRNA at 5′ | guggcaccgagucggugcuuuuuAAUAACAACGCGU |
| | end | UAAGGUGGUUAUAUUCUAGUAUUUAUGAAGUGUAGUCGCUUCG |
| | | AUCGUUAAGGCUGAUUUUAACCUCUGCAUAAUAAUAUCGGUAG |
| | | AUAUUAUUAUGCACGCUCCCUUUAGCAGAGCUAAGAAUCGCUCA |
| | | CUCAGGCACAAGCUUUGAGGACAAACGGCAGAAGCUGGAGGAG |
| | | GAAGGGCCUGAGUCCGAGCAGAAGAAaACUCGAGCUCUGAAUGA |
| | | CUCCUAUAAAGUUCUCCCAUCACAUCAACCGGUGGCGCAUUGCC |
| | | ACGAAGCAGGCCAAUGGGGAGGACAUCGAUGUCACCUCAAAGCU |
| | | UGUGCCUGAGUGAGAGCUAAAGAAAAGAAAAGUAGAAUAAGCC |
| | | ACCUUAACGC(SEQ ID NO: 19158) |
| R2042_ncRN | R2042 ncRNA containing 25 | GCGUUAAGGUGGUUAUAUUCUAGUAUUUAUGAAGUGUAGUCGC |
| A only_25 | bp insertion in EMX1 gene | UUCGAUCGUUAAGGCUGAUUUUAACCUCUGCAUAAUAAUAUCG |
| | | GUAGAUAUUAUUAUGCACGCUCCCUUUAGCAGAGCUAAGAAUC |
| | | GCUCACUCAGGCACAAGCUUUGAGGACAAACGGCAGAAGCUGGA |
| | | GGAGGAAGGGCCUGAGUCCGAGCAGAAGAAaACUCGAGCUCUGA |
| | | AUGACUCCUAUAAAGUUCUCCCAUCACAUCAACCGGUGGCGCAU |
| | | UGCCACGAAGCAGGCCAAUGGGGAGGACAUCGAUGUCACCUCAA |
| | | AGCUUGUGCCUGAGUGAGAGCUAAAGAAAAGAAAAGUAGAAUA |
| | | AGCCACCUUAACGC(SEQ ID NO: 19159) |
| R2042_ncRN | R2042 ncRNA containing 25 | GCGUUAAGGUGGUUAUAUUCUAGUAUUUAUGAAGUGUAGUCGC |
| A_AAVS1 | bp insertion in EMX1 gene | UUCGAUCGUUAAGGCUGAUUUUAACCUCUGCAUAAUAAUAUCG |
| gRNA_25 | fused to AAVSI sgRNA at 3′ | GUAGAUAUUAUUAUGCACGCUCCCUUUAGCAGAGCUAAGAAUC |
| | end | GCUCACUCAGGCACAAGCUUUGAGGUCUGUCCCCUCCACCCCAC |
| | | AGUGGGGCCACUAGGGACAGAAAUGACAGUGGUUGGUGCUCUA |
| | | AAAAUUAAUGACAGAAAAGCCCCAUCCUUAGGCCUCCUCCUUCC |
| | | UAGUCUCCUGAUAUUGGGUCUAACCCCCACCUCAAAGCUUGUGC |
| | | CUGAGUGAGAGCUAAAGAAAAGAAAAGUAGAAUAAGCCACCUU |
| | | AACGCAAUAACAACGGGGCCACUAGGGACAGGAUguuucagag |
| | | cuaugcuggaaacagcauagcaaguugaaauaaggcuaguccg |
| | | uuaucaacuugaaaaaguggcaccgagucggugcuuuuu(SEQ |
| | | ID NO: 19160) |
| R2042_ncRN | R2042 ncRNA containing 25 | GCGUUAAGGUGGUUAUAUUCUAGUAUUUAUGAAGUGUAGUCGC |
| A_EMX1 | bp insertion in EMX1 gene | UUCGAUCGUUAAGGCUGAUUUUAACCUCUGCAUAAUAAUAUCG |
| gRNA_25 | fused to EMX1 sgRNA at 3′ | GUAGAUAUUACUAUGCACGCUCCCUUUAGCAGAGCUAAGAAUC |
| | end | GCUCACUCAGGCACAAGCUUUGAGGACAAACGGCAGAAGCUGGA |
| | | GGAGGAAGGGCCUGAGUCCGAGCAGAAGAAaACUCGAGCUCUGA |
| | | AUGACUCCUAUAAAGUUCUCCCAUCACAUCAACCGGUGGCGCAU |
| | | UGCCACGAAGCAGGCCAAUGGGGAGGACAUCGAUGUCACCUCAA |
| | | AGCUUGUGCCUGAGUGAGAGCUAAAGAAAAGAAAAGUAGAAUA |
| | | AGCCACCUUAACGCAAUAACAACgaguccgagcagaagaagaag |
| | | uuucagagcuaugcuggaaacagcauagcaaguugaaauaaggc |
| | | uaguccguuaucaacuugaaaaaguggcaccgagucggu |
| | | gcuuuuu(SEQ ID NO: 19161) |
| R2042_ncRN | R2042 ncRNA containing 50 | GCGUUAAGGUGGUUAUAUUCUAGUAUUUAUGAAGUGUAGUCGC |
| A_EMX1 | bp insertion in EMX1 gene | UUCGAUCGUUAAGGCUGAUUUUAACCUCUGCAUAAUAAUAUCG |
| gRNA_50 | fused to EMX1 sgRNA at 3′ | GUAGAUAUUAUUAUGCACGCUCCCUUUAGCAGAGCUAAGAAUC |
| | end | GCUCACUCAGGCACAAGCUUUGAGGACAAACGGCAGAAGCUGGA |
| | | GGAGGAAGGGCCUGAGUCCGAGCAGAAGAAaACUCGAGCUCUGA |
| | | UCAGUAUCAUGGGGCCCAUGGUUGAAUGACUCCUAUAaaguuCUC |
| | | CCAUCACAUCAACCGGUGGCGCAUUGCCACGAAGCAGGCCAAUG |
| | | GGGAGGACAUCGAUGUCACCUCAAAGCUUGUGCCUGAGUGAGA |
| | | GCUAAAGAAAAGAAAAGUAGAAUAAGCCACCUUAACGCAAUAA |
| | | CAACgaguccgagcagaagaagaaguuucagagcuaugcuggaa |
| | | acagcauagcaaguugaaauaaggcuaguccguuaucaacuuga |
| | | aaaaguggcaccgagucggugcuuuuu(SEQ ID NO: 19162) |
| R2042_ncRN | R2042 ncRNA containing 75 | GCGUUAAGGUGGUUAUAUUCUAGUAUUUAUGAAGUGUAGUCGC |
| A_EMX1 | bp insertion in EMX1 gene | UUCGAUCGUUAAGGCUGAUUUUAACCUCUGCAUAAUAAUAUCG |
| gRNA_75 | fused to EMX1 sgRNA at 3′ | GUAGAUAUUAUAUGCACGCUCCCUUUAGCAGAGCUAAGAAUC |
| | end | GCUCACUCAGGCACAAGCUUUGAGGACAAACGGCAGAAGCUGGA |
| | | GGAGGAAGGGCCUGAGUCCGAGCAGAAGAAaACUCGAGCUCUGA |
| | | GCCCCACCGCAGCUUGCCAGCACUUUCAGUAUCAUGGGGCCCAU |
| | | GGUUGAAUGACUCCUAUAaaguuCUCCCAUCACAUCAACCGGUGG |
| | | CGCAUUGCCACGAAGCAGGCCAAUGGGGAGGACAUCGAUGUCAC |
| | | CUCAAAGCUUGUGCCUGAGUGAGAGCUAAAGAAAAGAAAAGUA |
| | | GAAUAAGCCACCUUAACGCAAUAACAACgaguccgagcagaagaa |
| | | gaaguuucagagcuaugcuggaaacagcauagcaaguugaaauaa |
| | | ggcuaguccguuaucaacuugaaaaaguggcaccgagucggugcu |
| | | uuuu(SEQ ID NO: 19163) |
| R2042_ncRN | R2042 ncRNA containing 100 | GCGUUAAGGUGGUUAUAUUCUAGUAUUUAUGAAGUGUAGUCGC |
| A_EMX1 | bp insertion in EMX1 gene | UUCGAUCGUUAAGGCUGAUUUUAACCUCUGCAUAAUAAUAUCG |
| gRNA_100 | fused to EMX1 sgRNA at 3′ | GUAGAUAUUACUAUGCACGCUCCCUUUAGCAGAGCUAAGAAUC |
| | end | GCUCACUCAGGCACAAGCUUUGAGGACAAACGGCAGAAGCUGGA |
| | | GGAGGAAGGGCCUGAGUCCGAGCAGAAGAAaACUCGAGCUCUGA |
| | | GCCCCACUGUCGAGAAGUAUGUAUCUCGCUCCCGCAGCUUGCCA |
| | | GCACUUUCAGUAUCAUGGGGCCCAUGGUUGAAUGACUCCUAUAa |
| | | aguuCUCCCAUCACAUCAACCGGUGGCGCAUUGCCACGAAGCAGG |
| | | CCAAUGGGGAGGACAUCGAUGUCACCUCAAAGCUUGUGCCUGAG |
| | | UGAGAGCUAAAGAAAAGAAAAGUAGAAUAAGCCACCUUAACGC |
| | | AAUAACAACgaguccgagcagaagaagaaguuucagagcuaugcu |
| | | ggaaacagcauagcaaguugaaauaaggcuaguccguuaucaacu |
| | | ugaaaaaguggcaccgagucgguguuuuu(SEQ ID NO: 19164) |
| R2042_ncRN | R2042 ncRNA containing 25 | GCGUUAAGGUGGUUAUAUUCUAGUAUUUAUGAAGUGUAGUCGC |
| A_NT_EMX1 | bp insertion (on opposite strand | UUCGAUCGUUAAGGCUGAUUUUAACCUCUGCAUAAUAAUAUCG |
| gRNA_25_dual | of sgRNA cut) in EMX1 gene | GUAGAUAUUAUUAUGCACGCUCCCUUUAGCAGAGCUAAGAAUC |
| guides | fused to EMX1 sgRNA at 3′ | GCUCACUCAGGCACAAGCUUUGAGGugacaucgauguccuccc |
| | end | cauuggccugcuucguggcaaugcgccaccuauaguuagugua |
| | | cugcaacuuUAUAGGAGUCAUUCACCUCAAAGCUUGUGCCUGA |
| | | GUGAGAGCUAAAGAAAAGAAAAGUAGAAUAAGCCACCUUAACG |
| | | CAAUAACAACgaguccgagcagaagaagaaguuucagagcuau |
| | | gcuggaaacagcauagcaaguugaaauaaggcuaguccguuau |
| | | caacuugaaaaaguggcaccgagucggugcuuuuu(SEQ ID |
| | | NO: 19165) |
| R2042_RT | R2042 RT mRNA sequence, | AUGAAGGACGACCAGUACUCUCAGUGGAAGAAGUACUACGAGA |
| | coding sequence only | GCAGGGGCAUCCUGCCCGAGAUCCAGGACAAGCUCCUGAACUAC |
| | | GCCAAGAUCCACAUCGACAACAACACCCCGGUGAUCUUCAACUU |
| | | CGAGCACCUGACCCUGCUGCUGGGCAGGGAGAAGAACUACCUGU |
| | | CCAGCGUGGUGAACAGCCCCGACAGCCACUACAGAAAGUUCAAG |
| | | AUCAAGAAGAGAUCCGGAGGCGAGAGGGAGAUCACCGCUCCCUA |
| | | UCUCAGCCUCCUGGAGAUGCAGUACUGGAUCUACAGGAACAUCC |
| | | UGAUCAACGUGAAGAUCCACUACGCCGCUCACGGCUUCGCUCAG |
| | | GAUAAGAGCAUUAUCACCAACUCCAGGAACCACCUGGGGCAGAA |
| | | ACAUCUGCUCAAGAUGGAUCUGAAGGAUUUCUUCCCCAGCAUCA |
| | | AGCUGAACAGAAUCAUCUACAUCUUCAAGAGCCUGGGCUACCCC |
| | | AAUAUCAUCGCCUUCUACCUGGCCAGCAUCUGCAGCUACAAGGG |
| | | CCACCUGCCCCAGGGCAGCCCCACAAGCCCUAUCCUGAGCAACA |
| | | UCGUGAGCAUCACCCUGGACAACAGACUGGUGAAGUUCGCCAGA |
| | | AAGAUGAAGCUGAGAUACAGCAGGUACGCCGACGACCUGACGUU |
| | | CAGCGGGGACAAGAUCCCCACCAACUACAUCAAGUACAUCACCG |
| | | ACAUCAUCAAUGAUGAGGGCUUCGAGGUGAACGACACCAAGACC |
| | | AAGCUCUACCUGAAGGCCGGGAAGAGAAUCGUGACGGGCAUUUC |
| | | CGUGAUCGGAAAUGACCCGAAGCUUCCGCGGGAAUACAAGCGGA |
| | | AGCUGAAGCAGGAGCUGCACUACAUCUUCACCUACGGCAUCGGC |
| | | AGCCACAUGGCCAAGAAGAAGAUCAAGAAGAUCAACUACCUCUA |
| | | CAGGAUCAUCGGCAAGGUGAACUUCUGGCUGAACAUCGAGCCCG |
| | | ACAACGAGUACGCCAGAAACGCCAAGGCCAAGCUGCUGCUGCUC |
| | | AUCGACAACccaccaaagaagaaaagaaaggucuga(SEQ ID |
| | | NO: 19166) |
| R6943 RT | R6943 RT mRNA sequence, | AUGGAGGAGAGCACCAACUACAAGCUGCUGGUGUGGGGACUGA |
| | coding sequence only | GCGUGAUCCAACCCGCUACCCCCAACGAGGUGCUGAACUACCUC |
| | | ACCAGCACCCUGAACGAUAACGGGCUGCUGCCCGACGUGGAGAA |
| | | GAUGAUCCACUACUUUGAGCUGCUGGACCAGCUGGGCUACAUCC |
| | | ACCAGGUGAGCAAGAGGAACAACCUCUACUCACUGACCCCCAGG |
| | | GGCAACGAAAGGUUGACCCCUGCCCUGAAGAGACUCAGGGACAA |
| | | GAUCAGACUGUUCAUGCUGGACAACUGCCACAGCAUCAGCAAGC |
| | | UGGGCGUGCUGGCCAGCACAGAUACAGAGAACAUGGGGGGCGAC |
| | | AGCCCCUCACUCCAGCUGAGGCACAACCUCAAGGAGGUGCCUCA |
| | | UCCCAGCCUUAGCUGGGCUGCUGGAACCCUGCCUAGCUCUCCUA |
| | | GGCAGGCUUGGGUUCGGAUCUACGAACAGCUGAACAUCGGCAGC |
| | | AUGAGCAGCGACGAGGCUAGCACACCCACCACCGCCAGAAAUGC |
| | | CCCCCUGAGCUUCGUGGGCAGGCUGGGCUUCAGCCUGAACUACU |
| | | ACAGCUUCAACAAGAUCGACGAGCCCCUGUUCAACAACGAUGGC |
| | | GUGACCGCCAUCGCCAGCUGCAUCGGCAUCAGCCCCGGGCUGAU |
| | | UACCGCUAUGGUGAAGUCACCAAAGCGGUACUACAGGACCUUCA |
| | | ACCUGAGAAAGAAGUCCGGGGGCUUCAGAUCCAUUCUGGCCCCC |
| | | AGAAAGUUCAUCAAGACCAUCCAGUACUGGCUGAAGGAUCAUG |
| | | UGCUGAACAGGCUCAAGAUCCACAGCUCCUGUUACAGCUACAGG |
| | | AGCGGCGUGUCCAUCAAGGACAACGCCAUCAACCACGUGAAGAA |
| | | GAAGUUCGUGGCCAGCAUCGACAUUUCCGAUUACUUCGGAAGCA |
| | | UCAACAAGAAGAUGGUGAAGGACUGCUUUUACAAGAACAAUAU |
| | | UCCCGAUCACAUCGUGAAUACCAUCAGCGGCAUCGUGACCUACA |
| | | ACGACGUGCUGCCUCAGGGCGCUCCCACCAGCCCUAUCAUUAGC |
| | | AACGCCAUCCUGUUCGAGUUCGACGAGGAGAUGACGGCUCAUGC |
| | | CCUCACUCUCGACUGUAUCUACACCAGAUACAGCGACGACAUCU |
| | | CGAUAUCCUCCGACUAUAAGGAGAAUAUCGCCAUCCUGAUCAAC |
| | | AUCGCCGAGGCCAACCUGUUGAGCGCUGGAUUCACGCUCAACAG |
| | | ACAGAAGCAAAGGAUUGCUUCUGACAACAGCCGCCAGGUUGUGA |
| | | CCGGCAUCCUGGUGAACGAGAGCAUCAGACCCACCAGAUGCUAC |
| | | AGAAAGAAGAUCAGAAGCGCCUUUGAUCACGCCCUGAAGGAGCA |
| | | GGACGGCUCCCAGCUGACAAUCAACAAGUUGAGGGGCUACCUCA |
| | | ACUACCUGAAGUCCUUCGAGACCUACGGCUUCAAGUUCAACGAG |
| | | AAGAAGUAUAAGGAGACCCUGGAUUUCCUGAUCGCUCUGAAGC |
| | | AGAGCccaccaaagaagaaaagaaaggucuga(SEQ ID NO: |
| | | 19167) |
| R6943_ncRN | R6943 ncRNA containing GFP | GCGGAGUGCUGGCCUCAACUGAUACAGAGAAUAUGGGCGGUGA |
| A_EMX1gR | gene insertion in EMX1 gene | UUCGCCGUCUUUACAGUUAAGGCACAAUUUAAAAGAGGUUCCGC |
| NA_GFP | fused to EMX1 sgRNA at 3′ | ACCCAAGCCUGUCUUGGGCUGCacaaacggcagaagcuggaggag |
| gene | end. Entire GFP cassette is in | gaagggccugaguccgagcagaagaacccauauguccuuccgagu |
| | antisense orientation and | gagagacacaaaaaauuccaacacacuauugcaaugaaaauaaau |
| | contains mini EFla promoter | uuccuuuauuagccagaagucagaugcucaaggggcuucaugaug |
| | and beta globin polyA signal. | uccccauaauuuuuggcagagggaaaaagaucucagugguauuug |
| | | ugagccagggcauuggccacaccagccaccaccuucugauaggca |
| | | gccugcaccugaggagugcggccgcuuuacuuguacagcucgucc |
| | | augccgagagugaucccggcggcggucacgaacuccagcaggacc |
| | | augugaucgcgcuucucguuggggucuuugcucagggggacuggg |
| | | ugcucagguagugguugucgggcagcagcacggggccgucgccga |
| | | uggggguguucugcugguaguggucggcgagcugcacgcugccgu |
| | | ccucgauguuguggggagaugcgguucaccagggugucgccccga |
| | | acuucaccuggggggggccuugaagaagauggugcgcuccuggac |
| | | guagccuucgggcauggcggacuugaagaagucgugcugcuucau |
| | | guggucgggguagcggcugaagcacugcacgccguaggucagggu |
| | | ggucacgagggugggccagggcacgggcagcuugccgguggugca |
| | | gaugaacuucagggucagcuugccguagguggcaucgcccucgcc |
| | | cucgccggacacgcugaacuuguggccguuuacgucgccguccag |
| | | cucgaccaggaugggcaccaccccggugaacagcuccucgcccuu |
| | | gcucaccaugguggcgaccgguggaucccgggcccgcgguaccgu |
| | | cgacugcagaauucgaagcuugagcucgagaucugaguccgguag |
| | | cgcuagcggaucugacgguucacuaaacccuguguucuggcggca |
| | | aacccguugcgaaaaagaacguucacggcgacuacugcacuuaua |
| | | uacgguucucccccacccucgggaaaaaggcggagccaguacacg |
| | | acaacuucucggggacugugggcgaugugcgcucugcccguucuc |
| | | ccaucacaucaaccgguggcgcauugccacgaagcaggccaaugg |
| | | ggaggacaucgaugucaGCAGCCCAAGACAGGCUUGGGUGCGGAU |
| | | CUACGAGCAAUUAAAUAUUGGUUCGAUGUCCAGUGAUGAGGCCAG |
| | | CACCCGCAAUAACAACgaguccgagcagaagaagaaguuucagag |
| | | cuaugcuggaaacagcauagcaaguugaaauaaggcuaguccguu |
| | | aucaacuugaaaaaguggcaccgagucggugcuuuuu(SEQ ID |
| | | NO: 19168) |
| R6943_ncRN | R6943 ncRNA containing 100 | GCGGAGUGCUGGCCUCAACUGAUACAGAGAAUAUGGGCGGUGA |
| A_EMX1gR | bp insertion in EMX1 gene | UUCGCCGUCUUUACAGUUAAGGCACAAUUUAAAAGAGGUUCCGC |
| NA_100bp | fused to EMX1 sgRNA at 3′ | ACCCAAGCCUGUCUUGGGCUGCacaaacggcagaagcuggaggaggaagggccug |
| | end | aguccgagcagaagaaaACUCGAGCUCUGAGCCCCACUGUCGAGAAGUAU |
| | | GUAUCUCGCUCCCGCAGCUUGCCAGCACUUUCAGUAUCAUGGGG |
| | | CCCAUGGUUGAAUGACUCCUAUAaaguucucccaucacaucaaccgguggcgcau |
| | | ugccacgaagcaggccaauggggaggacaucgaugucaGCAGCCCAAGACAGGCUUG |
| | | GGUGCGGAUCUACGAGCAAUUAAAUAUUGGUUCGAUGUCCAGU |
| | | GAUGAGGCCAGCACCCGCAAUAACAACgaguccgagcagaagaagaaguuuca |
| | | gagcuaugcuggaaacagcauagcaaguugaaauaaggcuaguccguuaucaa |
| | | cuugaaaaaguggcaccgagucggugcuuuuu(SEQ ID NO: 19169) |
| R6943_ncRN | R6943 ncRNA containing 75 | GCGGAGUGCUGGCCUCAACUGAUACAGAGAAUAUGGGCGGUGA |
| A_EMX1gR | bp insertion in EMX1 gene | UUCGCCGUCUUUACAGUUAAGGCACAAUUUAAAAGAGGUUCCGCACCCA |
| NA_75bp | fused to EMX1 sgRNA at 3′ | AGCCUGUCUUGGGCUGCacaaacggcagaagcuggaggaggaagggccug |
| | end | aguccgagcagaagaaaACUCGAGCUCUGAGCCCCACCGCAGCUUGCCAG |
| | | CACUUUCAGUAUCAUGGGGCCCAUGGUUGAAUGACUCCUAUAaaguucuc |
| | | ccaucacaucaaccgguggcgcauugccacgaagcaggccaauggggagg |
| | | acaucgaugucaGCAGCCCAAGACAGGCUUGGGUGCGGAUCUACGAGCAA |
| | | UUAAAUAUUGGUUCGAUGUCCAGUGAUGAGGCCAGCACCCGCAAUAACAA |
| | | Cgaguccgagcagaagaagaaguuucagagcuaugcuggaaacagcauag |
| | | caaguugaaauaaggcuaguccguuaucaacuugaaaaaguggcaccgag |
| | | ucgguguuuuu(SEQ ID NO: 19170) |
| R6943_ncRN | R6943 ncRNA containing 50 | GCGGAGUGCUGGCCUCAACUGAUACAGAGAAUAUGGGCGGUGA |
| A_EMX1gR | bp insertion in EMX1 gene | UUCGCCGUCUUUACAGUUAAGGCACAAUUUAAAAGAGGUUCCGC |
| NA_50bp | fused to EMX1 sgRNA at 3′ | ACCCAAGCCUGUCUUGGGCUGCacaaacggcagaagcuggaggaggaagggccug |
| | end | aguccgagcagaagaaaACUCGAGCUCUGAUCAGUAUCAUGGGGCCCAUGGU |
| | | UGAAUGACUCCUAUAaaguucucccaucacaucaaccgguggcgcauugccacga |
| | | agcaggccaauggggaggacaucgaugucaGCAGCCCAAGACAGGCUUGGGUGC |
| | | GGAUCUACGAGCAAUUAAAUAUUGGUUCGAUGUCCAGUGAUGA |
| | | GGCCAGCACCCGCAAUAACAACgaguccgagcagaagaagaaguuucagagcuau |
| | | gcuggaaacagcauagcaaguugaaauaaggcuaguccguuaucaacuugaaaaa |
| | | guggcaccgagucggugcuuuuu(SEQ ID NO: 19171) |
| R6943_ncRN | R6943 ncRNA containing 25 | GCGGAGUGCUGGCCUCAACUGAUACAGAGAAUAUGGGCGGUGAUUCGCCG |
| A_EMX1gR | bp insertion in EMX1 gene | UCUUUACAGUUAAGGCACAAUUUAAAAGAGGUUCCGCACCCAAGCCUGUC |
| NA_25bp | fused to EMX1 sgRNA at 3′ | UUGGGCUGCacaaacggcagaagcuggaggaggaagggccugaguccgag |
| | end | cagaagaaaACUCGAGCUCUGAAUGACUCCUAUAaaguucucccaucaca |
| | | ucaaccgguggcgcauugccacgaagcaggccaauggggaggacaucgau |
| | | gucaGCAGCCCAAGACAGGCUUGGGUGCGGAUCUACGAGCAAUUAAAUAU |
| | | UGGUUCGAUGUCCAGUGAUGAGGCCAGCACCCGCAAUAACAACgaguccg |
| | | agcagaagaagaaguuucagagcuaugcuggaaacagcauagcaaguuga |
| | | aauaaggcuaguccguuaucaacuugaaaaaguggcaccgagucggugcu |
| | | uuuu(SEQ ID NO: 19172) |
| R6943_ncRN | R6943 ncRNA containing 25 | GCGGAGUGCUGGCCUCAACUGAUACAGAGAAUAUGGGCGGUGA |
| A_AAVSI | bp insertion in AAVSI gene | UUCGCCGUCUUUACAGUUAAGGCACAAUUUAAAAGAGGUUCCGC |
| gRNA_25bp | fused to AAVSI sgRNA at 3′ | ACCCAAGCCUGUCUUGGGCUGCUCUGUCCCCUCCACCCCACAGU |
| | end | GGGGCCACUAGGGACAGAAAUGACAGUGGUUGGUGCUCUAAAA |
| | | AUUAAUGACAGAAAAGCCCCAUCCUUAGGCCUCCUCCUUCCUAG |
| | | UCUCCUGAUAUUGGGUCUAACCCCCAGCAGCCCAAGACAGGCUU |
| | | GGGUGCGGAUCUACGAGCAAUUAAAUAUUGGUUCGAUGUCCAG |
| | | UGAUGAGGCCAGCACCCGCAAUAACAACGGGGCCACUAGGGACAGGAUguuuc |
| | | agagcuaugcuggaaacagcauagcaaguugaaauaaggcuaguccguuauca |
| | | acuugaaaaaguggcaccgagucggugcuuuuu(SEQ ID NO: 19173) |
| R6943_ncRN | R6943 ncRNA containing 25 | GCGGAGUGCUGGCCUCAACUGAUACAGAGAAUAUGGGCGGUGA |
| A only_25bp | bp insertion in EMX1 gene | UUCGCCGUCUUUACAGUUAAGGCACAAUUUAAAAGAGGUUCCGC |
| | | ACCCAAGCCUGUCUUGGGCUGCacaaacggcagaagcuggaggaggaagggccug |
| | | aguccgagcagaagaaaACUCGAGCUCUGAAUGACUCCUAUAaaguucucccau |
| | | cacaucaaccgguggcgcauugccacgaagcaggccaauggggaggacaucgaug |
| | | ucaGCAGCCCAAGACAGGCUUGGGUGCGGAUCUACGAGCAAUUAAAUAUUG |
| | | GUUCGAUGUCCAGUGAUGAGGCCAGCACCCGC(SEQ ID NO: 19174) |
| AAVS1 | Contains chemical | GGGGCCACUAGGGACAGGAUguuucagagcuaugcuggaaacagcauagcaaguug |
| sgRNA | modifications from Synthego: | aaauaaggcuaguccguuaucaacuugaaaaaguggcaccgagucggugcuuuuu |
| | 2′-F, 2′-O-methyl, | (SEQ ID NO: 19175) |
| | phosphorothioates | |
| R1262_RT-1 | R1262 retron RT mRNA | AGGAUAAUGGGAAAUAAGAGAGAAAAGAAGAGUAAGAAGAAAU |
| (R1262 RT) | | AUAAGAGCCACCAUGAUCAGCUUCAGCGAGAUCAAGAGCAGAAA |
| | | CGAUUUUGCAGACGCUCUGCAGAUUCCUCGGAGCGUGCUGACGC |
| | | ACGUUCUGUACAUUGCCAAGCCCGAGAGCUUCUACGAGAGCUUC |
| | | ACCAUCCCCAAGAAGAAUGGGGAGGACAGAAUCAUCAUGGCCCC |
| | | CAAGGGCACCCUGAAGUCCAUCCAGACCAAGCUGAGCAAGCAGC |
| | | UGGUGGAGUACAGAGCCUCCAUCAGCCAGAAAGGCCAGGAGAAG |
| | | UCCAACAUCUCCCAUGGCUUCGAGAGGGAGAAGUCCAUCAUCAC |
| | | CAAUGCUCAGAUACACCGCAACAAGCGGUAUGUCAUCAACUACG |
| | | ACCUGAAGGACUUCUUCGACUCCUUCCACUUCGGCAGAGUGGUG |
| | | GGAUUCUUCGAGAAGAACAAGCACUUCCUGCUGCCCUACGAGGU |
| | | GGCCGUGAUCAUCGCCCAGCUGACCUGCUAUAAUGGCAGGCUGC |
| | | CCCAGGGCGCCCCCACAAGCCCUGUGAUCACCAACCUGAUCUGC |
| | | GAGAUCCUGGACUACAGGGUGCUCAAGAUCGCCAAGAGAUACAA |
| | | GCUGGACUACACCAGGUACGCUGACGACCUGACCUUCAGCACCA |
| | | ACUACUCCAGAUUCCUGGAGGUGUUCGACAGCUUCGCCAAGGAG |
| | | CUGCUCCAGGAGAUCAGCAACUCUGGUUUUACCAUAAACCAGAG |
| | | CAAGACCAGGCUGCUGUACAGAGACAGCCGCCAGGAGGUCACAG |
| | | GCCUCGUGGUGAAUAAGAAGAUCGGCGUGAACAGAGAGUACGU |
| | | CAAGAGCACUAGGGCGAUGGCCCAGGCUCUGUACAGCACCGGCG |
| | | AGUUCACCAUCAACGGCAUCCCCGGCACCAUCAAACAGCUGGAG |
| | | GGCAGGUUCGGCUUCAUCGACCAGCUGGACCACUACAACAACGU |
| | | GAUCGACGAUGCCAAGCACGACGCCUACUCCCUGAACGGCAGGG |
| | | AGAAGCAGUUCCAGGAGUUCCUGUUCUUCAAGACAUUCUUCUUC |
| | | AACGAGUACCCCCUGGUGAUCACCGAGGGCAAGACCGACAUCAG |
| | | AUACCUGAAGGCCGCCCUCAAGAGCCUGCACCAGAAGUACCCCG |
| | | AGCUGAUCUGCAAGGAGGACGACGGAACCUUUCGGUUCAAGAUC |
| | | AGCUUCUUCAGAAGAUCCAAGAGAUGGAAGUACUUCUUCGGCAU |
| | | CAGCAAGGAUGGCGCUGAUGCCAUGAAGCUGCUGUACCGGUUCU |
| | | UUACCGGACAGAAGGGCGUGAAGAACUACUACAGGCUGUUCGCC |
| | | GAGAAGUACAAGGCCGUGCAGAGAAACCCCGUGAUCAUGCUGUU |
| | | UGACAACGAGAUGGAGAGCAAGAGACCCCUCAACAAGUUCAUCU |
| | | CCGAGGAGGUGAAGAUUCCCUCCUCGGAGCAGCAGCUGUUCAAG |
| | | GAGCAGCUGUACUACCACCUGAUCCCCGGCAGCAAGACCUACCU |
| | | GAUGACCCACCCCUUGCCUCCUGGCAAGACAGAGGCCGAGAUCG |
| | | AGGACCUGUUCCCUACCGAGGUGUUGGGCGUGAAGCUCGACGGC |
| | | AAGAGCUUCAGCACCAAGGACAAGUUCGACACCAGCAAGUUCUA |
| | | CGGCAAGGACAUCUUCAGCAGCUACGUGUACGAGCACUGGAAGU |
| | | CCAUCGACUUCAGCGGCUUCAUCCCCCUGCUGGACAAGAUCAAC |
| | | AUGCUCGUGCAGAACGAGAAGAAGCCCGGGCUGAACACACCACC |
| | | AAAGAAGAAAAGAAAGGUCUGAGCUGGAGCCUCGGUGGCCAUGC |
| | | UUCUUGCCCCUUGGGCCUCCCCCCAGCCCCUCCUCCCCUUCCUG |
| | | CACCCGUACCCCCGUGGUCUUUGAAUAAAGUCUGAGUGGGCGGC |
| | | GAU (SEQ ID NO: 19176) |
| R1262_nc-5 | R1262 ncRNA containing 505 | GGGAUAAUGAGCGUGUGACAAGAUUUUGGGCUUGUGUUUCGCA |
| (R1262_ncR | bp insertion in EMX1 site | AGCUUUGAUUAAAAUGGUAGAUGGAUUUGCUAUCUAUCGUCAU |
| NA- | | UUCCAGUACUGUUAUGUACAAACGGCAGAAGCUGGAGGAGGAA |
| EMX1_505) | | GGGCCUGAGUCCGAGCAGAAGAAACUUCAGCUAAGGAAGCUACC |
| | | AAUAUUUAGUUUCUGAGUCUCACGACAGACCUCGCGCGUAGAUU |
| | | GCCAUGCGUAGAGCUAACGAGCCAGCGGAAAGCGUGAGGCGCUU |
| | | UUAAGCAUGGCGAGUAAGUGAUCCAACGCUUCGGAUAUGACUA |
| | | UAUACUUAGGUUCGAUCUCGUCCCGAGAAUUCUAAGCCUCAACA |
| | | UCUAUGAGUUAUGAGGUUAGCCGAAAAAGCACGUGGUGGCGCCC |
| | | ACCGACUGUUCCCAGACUGUAGCUCUUUGUUCUGUCAAGGCCCG |
| | | ACCUUCAUCGCGGCCGAUUCCUUCUGCGGACCAUACCGUCCUGA |
| | | UACUUUGGUCAUGUUUCCGUUGUAGGAGUGAACCCACUUGCCUU |
| | | UGCGUCUUAAUACCAAUGAAAAACCUAUGCACUUUGUACAGGGU |
| | | ACCAUCGGGAUUCUGAACCCUCAGAUAGUGGGGAUCCCGGGUAU |
| | | AGACCUUUAUCUGCGGUCCAACUUAGGCAUAAACCUCCAUGCUA |
| | | CAAAGUUCUCCCAUCACAUCAACCGGUGGCGCAUUGCCACGAAG |
| | | CAGGCCAAUGGGGAGGACAUCGAUGUCAGCAUAAUGAGUUGUC |
| | | ACACGCUCGAU (SEQ ID NO: 19177) |
| R1262_nc-3 | R1262 ncRNA containing 305 | GGGAUAAUGAGCGUGUGACAAGAUUUUGGGCUUGUGUUUCGCA |
| (R1262_ncR | bp insertion in EMX1 site | AGCUUUGAUUAAAAUGGUAGAUGGAUUUGCUAUCUAUCGUCAU |
| NA- | | UUCCAGUACUGUUAUGUACAAACGGCAGAAGCUGGAGGAGGAA |
| EMX1_305) | | GGGCCUGAGUCCGAGCAGAAGAACGACUACCAAAUCCGCAUGUU |
| | | ACGGGACUUCUUAUUAAUUCUUUUUUCGUGAGGAGCAGCGGAU |
| | | CUUAAUGGAUGGCCGCAGGUGGUAUGGAAGCUAAUAGCGCGGG |
| | | UGAGAGGGUAAUCAGCCGUGUCCACCAACACAACGCUAUCGGGC |
| | | GAUUCUAUAAGAUUCCGCAUUGCGUCUACUUAUAAGAUGUCUCA |
| | | ACGGUAUCCGCAACUUGCGAUGUGCCUGCUAUCCUUAAAUGCAU |
| | | AUCUCGCCCAGUAGCUUCCCAAUAUGAGAGCAUCAAUUGUAGAU |
| | | CGGGCCGGGAUAGUCAUGUCGUAAAGUUCUCCCAUCACAUCAAC |
| | | CGGUGGCGCAUUGCCACGAAGCAGGCCAAUGGGGAGGACAUCGA |
| | | UGUCAGCAUAAUGAGUUGUCACACGCUCGAU (SEQ ID NO: 19178) |
| R1262_nc-1 | R1262 ncRNA containing 25 bp | GGGAUAAUGAGCGUGUGACAAGAUUUUGGGCUUGUGUUUCGCA |
| (R1262_ncR | insertion in EMX1 site | AGCUUUGAUUAAAAUGGUAGAUGGAUUUGCUAUCUAUCGUCAU |
| NA- | | UUCCAGUACUGUUAUGUACAAACGGCAGAAGCUGGAGGAGGAA |
| EMX1_25) | | GGGCCUGAGUCCGAGCAGAAGAAAACUCGAGCUCUGAAUGACUC |
| | | CUAUAAAGUUCUCCCAUCACAUCAACCGGUGGCGCAUUGCCACG |
| | | AAGCAGGCCAAUGGGGAGGACAUCGAUGUCAGCAUAAUGAGUU |
| | | GUCACACGCUCGAU (SEQ ID NO: 19179) |
| R1262_nc-4 | R1262 ncRNA containing 405 | GGGAUAAUGAGCGUGUGACAAGAUUUUGGGCUUGUGUUUCGCA |
| (R1262_ncR | bp insertion in EMX1 site | AGCUUUGAUUAAAAUGGUAGAUGGAUUUGCUAUCUAUCGUCAU |
| NA- | | UUCCAGUACUGUUAUGUACAAACGGCAGAAGCUGGAGGAGGAA |
| EMX1_405) | | GGGCCUGAGUCCGAGCAGAAGAACUGCUAAAUCCGCGUGAUAGG |
| | | GGAUUUGAAGUUUAAUCUUCUAUCGCAAGGAACUGCCGAUCUU |
| | | AAUGGAUGGCCGGAGGUGGUAUGGAAGCUAUAAGCGCGGGUGA |
| | | GAGGGUAAUUAGGCGUGUUCACCUACGCUACGCUAACGGGCGAU |
| | | UCUAUAAGAUUGCACAUUGCGUCAACUCAUAAGAUGUCUCAACG |
| | | GCAUGCGCAACUUGUGAAGUGUCUACUAUCCUUAAACGCAUAUC |
| | | UCGCACAGUAACUCCCGAAUAUGUCGGCAUCUGAUGUUGCCCGG |
| | | GCCGAGUUAGUGUUGAGCUCACGGAACUUAUUGUAUGAGUAGU |
| | | GAUUUGUAAGAGUUGUCAGUUAGCUCGUUCAGGUAAUAGUUGC |
| | | CCACACAACGUCAAAAUAAGAGAACGGUCGUAACAUAAAGUUCU |
| | | CCCAUCACAUCAACCGGUGGCGCAUUGCCACGAAGCAGGCCAAU |
| | | GGGGAGGACAUCGAUGUCAGCAUAAUGAGUUGUCACACGCUCGA |
| | | U (SEQ ID NO: 19180) |
| R1262_nc-2 | R1262 ncRNA containing 205 | GGGAUAAUGAGCGUGUGACAAGAUUUUGGGCUUGUGUUUCGCA |
| (R1262_ncR | bp insertion in EMX1 site | AGCUUUGAUUAAAAUGGUAGAUGGAUUUGCUAUCUAUCGUCAU |
| NA- | | UUCCAGUACUGUUAUGUACAAACGGCAGAAGCUGGAGGAGGAA |
| EMX1_205) | | GGGCCUGAGUCCGAGCAGAAGAAAAAGCGGUCUUACGGUCAGUC |
| | | GUAUUCCUUCUCGAGUUCCGUCCAGUUGAGCGUGUCACUCCCAG |
| | | UGUACCUGCAAGCCGAGAUGGCUGUGCUUGGAGUCAAUCGCAUG |
| | | UAGGAUGGUCUCCAGACACCGGGGCACCAGUUUUCACGCCUAAA |
| | | GCAUAAACGACGAGCAGUCAUGAAAGUCUUAGUACUGGACGUGC |
| | | CGUUUCACAAAGUUCUCCCAUCACAUCAACCGGUGGCGCAUUGC |
| | | CACGAAGCAGGCCAAUGGGGAGGACAUCGAUGUCAGCAUAAUGA |
| | | GUUGUCACACGCUCGAU (SEQ ID NO: 19181) |
| R1262_nc-19 | R1262 ncRNA containing 205 | GGGAUAAUGAGCGUGUGACAAGAUUUUGGGCUUGUGUUUCGCA |
| (R1262_ncR | bp insertion in EMX1 site | AGCUUUGAUUAAAAUGGUAGAUGGAUUUGCUAUCUAUCGUCAU |
| NA- | combined with EMX1 sgRNA | UUCCAGUACUGUUAUGUACAAACGGCAGAAGCUGGAGGAGGAA |
| sgEMX1_205) | at 3′ end | GGGCCUGAGUCCGAGCAGAAGAAAAAGCGGUCUUACGGUCAGUC |
| | | GUAUUCCUUCUCGAGUUCCGUCCAGUUGAGCGUGUCACUCCCAG |
| | | UGUACCUGCAAGCCGAGAUGGCUGUGCUUGGAGUCAAUCGCAUG |
| | | UAGGAUGGUCUCCAGACACCGGGGCACCAGUUUUCACGCCUAAA |
| | | GCAUAAACGACGAGCAGUCAUGAAAGUCUUAGUACUGGACGUGC |
| | | CGUUUCACAAAGUUCUCCCAUCACAUCAACCGGUGGCGCAUUGC |
| | | CACGAAGCAGGCCAAUGGGGAGGACAUCGAUGUCAGCAUAAUGA |
| | | GUUGUCACACGCUCAAUAACAACGAGUCCGAGCAGAAGAAGAAG |
| | | UUUCAGAGCUAUGCUGGAAACAGCAUAGCAAGUUGAAAUAAGG |
| | | CUAGUCCGUUAUCAACUUGAAAAAGUGGCACCGAGUCGGUGCUU |
| | | UUUGAU (SEQ ID NO: 19182) |
| R1262_nc-20 | R1262 ncRNA containing 205 | GGGAUAAUGAGUCCGAGCAGAAGAAGAAGUUUCAGAGCUAUGC |
| (R1262_sgE | bp insertion in EMX1 site | UGGAAACAGCAUAGCAAGUUGAAAUAAGGCUAGUCCGUUAUCA |
| MX1- | combined with EMX1 sgRNA | ACUUGAAAAAGUGGCACCGAGUCGGUGCUUUUUAAUAACAACG |
| ncRNA_205) | at 5′ end | AGCGUGUGACAAGAUUUUGGGCUUGUGUUUCGCAAGCUUUGAU |
| | | UAAAAUGGUAGAUGGAUUUGCUAUCUAUCGUCAUUUCCAGUAC |
| | | UGUUAUGUACAAACGGCAGAAGCUGGAGGAGGAAGGGCCUGAG |
| | | UCCGAGCAGAAGAAAAAGCGGUCUUACGGUCAGUCGUAUUCCUU |
| | | CUCGAGUUCCGUCCAGUUGAGCGUGUCACUCCCAGUGUACCUGC |
| | | AAGCCGAGAUGGCUGUGCUUGGAGUCAAUCGCAUGUAGGAUGG |
| | | UCUCCAGACACCGGGGCACCAGUUUUCACGCCUAAAGCAUAAAC |
| | | GACGAGCAGUCAUGAAAGUCUUAGUACUGGACGUGCCGUUUCAC |
| | | AAAGUUCUCCCAUCACAUCAACCGGUGGCGCAUUGCCACGAAGC |
| | | AGGCCAAUGGGGAGGACAUCGAUGUCAGCAUAAUGAGUUGUCA |
| | | CACGCUCGAU (SEQ ID NO: 19183) |
| R1262_nc-13 | R1262 ncRNA containing 25 bp | GGGAUAAUGAGCGUGUGACAAGAUUUUGGGCUUGUGUUUCGCA |
| (R1262_ncR | insertion in AAVSI site | AGCUUUGAUUAAAAUGGUAGAUGGAUUUGCUAUCUAUCGUCAU |
| NA- | | UUCCAGUACUGUUAUGUUCUGUCCCCUCCACCCCACAGUGGGGC |
| AAVS1_25) | | CACUAGGGACAGAAAGCGGUCUUACGGUCAGUCGUAUUCCUUCU |
| | | CGAGUUCCGUCCAGUUGAGCGUGUCACUCCCAGUGUACCUGCAA |
| | | GCCGAGAUGGCUGUGCUUGGAGUCAAUCGCAUGUAGGAUGGUC |
| | | UCCAGACACCGGGGCACCAGUUUUCACGCCUAAAGCAUAAACGA |
| | | CGAGCAGUCAUGAAAGUCUUAGUACUGGACGUGCCGUUUCACAA |
| | | UUAAUGACAGAAAAGCCCCAUCCUUAGGCCUCCUCCUUCCUAGU |
| | | CUCCUGAUAUUGGGUCUAACCCCCAGCAUAAUGAGUUGUCACAC |
| | | GCUCGAU (SEQ ID NO: 19184) |
| R1262_nc-14 | R1262 ncRNA containing 205 | GGGAUAAUGAGCGUGUGACAAGAUUUUGGGCUUGUGUUUCGCA |
| (R1262_ncR | bp insertion in AAVSI site | AGCUUUGAUUAAAAUGGUAGAUGGAUUUGCUAUCUAUCGUCAU |
| NA- | | UUCCAGUACUGUUAUGUUCUGUCCCCUCCACCCCACAGUGGGGC |
| AAVS1_205) | | CACUAGGGACAGAAAGCGGUCUUACGGUCAGUCGUAUUCCUUCU |
| | | CGAGUUCCGUCCAGUUGAGCGUGUCACUCCCAGUGUACCUGCAA |
| | | GCCGAGAUGGCUGUGCUUGGAGUCAAUCGCAUGUAGGAUGGUC |
| | | UCCAGACACCGGGGCACCAGUUUUCACGCCUAAAGCAUAAACGA |
| | | CGAGCAGUCAUGAAAGUCUUAGUACUGGACGUGCCGUUUCACAA |
| | | UUAAUGACAGAAAAGCCCCAUCCUUAGGCCUCCUCCUUCCUAGU |
| | | CUCCUGAUAUUGGGUCUAACCCCCAGCAUAAUGAGUUGUCACAC |
| | | GCUCGAU (SEQ ID NO: 19185) |
| R1262_nc-15 | R1262 ncRNA containing 505 | GGGAUAAUGAGCGUGUGACAAGAUUUUGGGCUUGUGUUUCGCA |
| (R1262_ncR | bp insertion in AAVSI site | AGCUUUGAUUAAAAUGGUAGAUGGAUUUGCUAUCUAUCGUCAU |
| NA- | | UUCCAGUACUGUUAUGUUCUGUCCCCUCCACCCCACAGUGGGGC |
| AAVS1_505) | | CACUAGGGACAGACUUCAGCUAAGGAAGCUACCAAUAUUUAGUU |
| | | UCUGAGUCUCACGACAGACCUCGCGCGUAGAUUGCCAUGCGUAG |
| | | AGCUAACGAGCCAGCGGAAAGCGUGAGGCGCUUUUAAGCAUGGC |
| | | GAGUAAGUGAUCCAACGCUUCGGAUAUGACUAUAUACUUAGGU |
| | | UCGAUCUCGUCCCGAGAAUUCUAAGCCUCAACAUCUAUGAGUUA |
| | | UGAGGUUAGCCGAAAAAGCACGUGGUGGCGCCCACCGACUGUUC |
| | | CCAGACUGUAGCUCUUUGUUCUGUCAAGGCCCGACCUUCAUCGC |
| | | GGCCGAUUCCUUCUGCGGACCAUACCGUCCUGAUACUUUGGUCA |
| | | UGUUUCCGUUGUAGGAGUGAACCCACUUGCCUUUGCGUCUUAAU |
| | | ACCAAUGAAAAACCUAUGCACUUUGUACAGGGUACCAUCGGGAU |
| | | UCUGAACCCUCAGAUAGUGGGGAUCCCGGGUAUAGACCUUUAUC |
| | | UGCGGUCCAACUUAGGCAUAAACCUCCAUGCUACAAUUAAUGAC |
| | | AGAAAAGCCCCAUCCUUAGGCCUCCUCCUUCCUAGUCUCCUGAU |
| | | AUUGGGUCUAACCCCCAGCAUAAUGAGUUGUCACACGCUCGAU |
| | | (SEQ ID NO: 19186) |
| R1262_nc-18 | R1262 ncRNA containing 505 | GGGAUAAUGAGCGUGUGACAAGAUUUUGGGCUUGUGUUUCGCA |
| (R1262_ncR | bp insertion in AAVSI site and | AGCUUUGAUUAAAAUGGUAGAUGGAUUUGCUAUCUAUCGUCAU |
| NA-AAVSI- | MS2 stem loop at 3′ end | UUCCAGUACUGUUAUGUUCUGUCCCCUCCACCCCACAGUGGGGC |
| MS2_505) | | CACUAGGGACAGACUUCAGCUAAGGAAGCUACCAAUAUUUAGUU |
| | | UCUGAGUCUCACGACAGACCUCGCGCGUAGAUUGCCAUGCGUAG |
| | | AGCUAACGAGCCAGCGGAAAGCGUGAGGCGCUUUUAAGCAUGGC |
| | | GAGUAAGUGAUCCAACGCUUCGGAUAUGACUAUAUACUUAGGU |
| | | UCGAUCUCGUCCCGAGAAUUCUAAGCCUCAACAUCUAUGAGUUA |
| | | UGAGGUUAGCCGAAAAAGCACGUGGUGGCGCCCACCGACUGUUC |
| | | CCAGACUGUAGCUCUUUGUUCUGUCAAGGCCCGACCUUCAUCGC |
| | | GGCCGAUUCCUUCUGCGGACCAUACCGUCCUGAUACUUUGGUCA |
| | | UGUUUCCGUUGUAGGAGUGAACCCACUUGCCUUUGCGUCUUAAU |
| | | ACCAAUGAAAAACCUAUGCACUUUGUACAGGGUACCAUCGGGAU |
| | | UCUGAACCCUCAGAUAGUGGGGAUCCCGGGUAUAGACCUUUAUC |
| | | UGCGGUCCAACUUAGGCAUAAACCUCCAUGCUACAAUUAAUGAC |
| | | AGAAAAGCCCCAUCCUUAGGCCUCCUCCUUCCUAGUCUCCUGAU |
| | | AUUGGGUCUAACCCCCAGCAUAAUGAGUUGUCACACGCUCACAU |
| | | GAGGAUCACCCAUGUGAU (SEQ ID NO: 19187) |
| R1262_nc-17 | R1262 ncRNA containing 205 | GGGAUAAUGAGCGUGUGACAAGAUUUUGGGCUUGUGUUUCGCA |
| (R1262_ncR | bp insertion in AAVSI site and | AGCUUUGAUUAAAAUGGUAGAUGGAUUUGCUAUCUAUCGUCAU |
| NA-AAVSI- | MS2 stem loop at 3′ end | UUCCAGUACUGUUAUGUUCUGUCCCCUCCACCCCACAGUGGGGC |
| MS2_205) | | CACUAGGGACAGAAAGCGGUCUUACGGUCAGUCGUAUUCCUUCU |
| | | CGAGUUCCGUCCAGUUGAGCGUGUCACUCCCAGUGUACCUGCAA |
| | | GCCGAGAUGGCUGUGCUUGGAGUCAAUCGCAUGUAGGAUGGUC |
| | | UCCAGACACCGGGGCACCAGUUUUCACGCCUAAAGCAUAAACGA |
| | | CGAGCAGUCAUGAAAGUCUUAGUACUGGACGUGCCGUUUCACAA |
| | | UUAAUGACAGAAAAGCCCCAUCCUUAGGCCUCCUCCUUCCUAGU |
| | | CUCCUGAUAUUGGGUCUAACCCCCAGCAUAAUGAGUUGUCACAC |
| | | GCUCACAUGAGGAUCACCCAUGUGAU (SEQ ID NO: 19188) |
| R1262_nc-16 | R1262 ncRNA containing 25 bp | GGGAUAAUGAGCGUGUGACAAGAUUUUGGGCUUGUGUUUCGCA |
| (R1262_ncR | insertion in AAVSI site and | AGCUUUGAUUAAAAUGGUAGAUGGAUUUGCUAUCUAUCGUCAU |
| NA-AAVSI- | MS2 stem loop at 3′ end | UUCCAGUACUGUUAUGUUCUGUCCCCUCCACCCCACAGUGGGGC |
| MS2_25) | | CACUAGGGACAGAACUCGAGCUCUGAAUGACUCCUAUAAUUAAU |
| | | GACAGAAAAGCCCCAUCCUUAGGCCUCCUCCUUCCUAGUCUCCU |
| | | GAUAUUGGGUCUAACCCCCAGCAUAAUGAGUUGUCACACGCUCA |
| | | CAUGAGGAUCACCCAUGUGAU (SEQ ID NO: 19189) |
| R1262_nc-9 | R1262 ncRNA containing 305 | GGGAUAAUGAGCGUGUGACAAGAUUUUGGGCUUGUGUUUCGCA |
| (R1262_ncR | bp insertion in EMX1 site and | AGCUUUGAUUAAAAUGGUAGAUGGAUUUGCUAUCUAUCGUCAU |
| NA-EMX1- | MS2 stem loop at 3′ end | UUCCAGUACUGUUAUGUACAAACGGCAGAAGCUGGAGGAGGAA |
| MS2_305) | | GGGCCUGAGUCCGAGCAGAAGAACGACUACCAAAUCCGCAUGUU |
| | | ACGGGACUUCUUAUUAAUUCUUUUUUCGUGAGGAGCAGCGGAU |
| | | CUUAAUGGAUGGCCGCAGGUGGUAUGGAAGCUAAUAGCGCGGG |
| | | UGAGAGGGUAAUCAGCCGUGUCCACCAACACAACGCUAUCGGGC |
| | | GAUUCUAUAAGAUUCCGCAUUGCGUCUACUUAUAAGAUGUCUCA |
| | | ACGGUAUCCGCAACUUGCGAUGUGCCUGCUAUCCUUAAAUGCAU |
| | | AUCUCGCCCAGUAGCUUCCCAAUAUGAGAGCAUCAAUUGUAGAU |
| | | CGGGCCGGGAUAGUCAUGUCGUAAAGUUCUCCCAUCACAUCAAC |
| | | CGGUGGCGCAUUGCCACGAAGCAGGCCAAUGGGGAGGACAUCGA |
| | | UGUCAGCAUAAUGAGUUGUCACACGCUCACAUGAGGAUCACCCA |
| | | UGUGAU (SEQ ID NO: 19190) |
| R1262 nc-7 | R1262 ncRNA containing 25 bp | GGGAUAAUGAGCGUGUGACAAGAUUUUGGGCUUGUGUUUCGCA |
| (R1262_ncR | insertion in EMX1 site and MS2 | AGCUUUGAUUAAAAUGGUAGAUGGAUUUGCUAUCUAUCGUCAU |
| NA-EMX1- | stem loop at 3′ end | UUCCAGUACUGUUAUGUACAAACGGCAGAAGCUGGAGGAGGAA |
| MS2_25) | | GGGCCUGAGUCCGAGCAGAAGAAAACUCGAGCUCUGAAUGACUC |
| | | CUAUAAAGUUCUCCCAUCACAUCAACCGGUGGCGCAUUGCCACG |
| | | AAGCAGGCCAAUGGGGAGGACAUCGAUGUCAGCAUAAUGAGUU |
| | | GUCACACGCUCACAUGAGGAUCACCCAUGUGAU (SEQ ID NO: |
| | | 19191) |
| R1262_nc-6 | R1262 ncRNA containing P2A- | GGGAUAAUGAGCGUGUGACAAGAUUUUGGGCUUGUGUUUCGCA |
| (R1262_ncR | GFP insertion in EMX1 site | AGCUUUGAUUAAAAUGGUAGAUGGAUUUGCUAUCUAUCGUCAU |
| NA- | | UUCCAGUACUGUUAUGUACAAACGGCAGAAGCUGGAGGAGGAA |
| EMX1_P2A- | | GGGCCUGAGUCCGAGCAGAAGAAGGAAGCGGAGCCACUAACUUC |
| GFP) | | UCCCUGUUGAAACAAGCAGGGGAUGUCGAAGAGAAUCCCGGGCC |
| | | AGUGAGCAAGGGCGAGGAGCUGUUCACCGGGGUGGUGCCCAUCC |
| | | UGGUCGAGCUGGACGGCGACGUAAACGGCCACAAGUUCAGCGUG |
| | | UCCGGCGAGGGCGAGGGCGAUGCCACCUACGGCAAGCUGACCCU |
| | | GAAGUUCAUCUGCACCACCGGCAAGCUGCCCGUGCCCUGGCCCA |
| | | CCCUCGUGACCACCCUGACCUACGGCGUGCAGUGCUUCAGCCGC |
| | | UACCCCGACCACAUGAAGCAGCACGACUUCUUCAAGUCCGCCAU |
| | | GCCCGAAGGCUACGUCCAGGAGCGCACCAUCUUCUUCAAGGACG |
| | | ACGGCAACUACAAGACCCGCGCCGAGGUGAAGUUCGAGGGCGAC |
| | | ACCCUGGUGAACCGCAUCGAGCUGAAGGGCAUCGACUUCAAGGA |
| | | GGACGGCAACAUCCUGGGGCACAAGCUGGAGUACAACUACAACA |
| | | GCCACAACGUCUAUAUCAUGGCCGACAAGCAGAAGAACGGCAUC |
| | | AAGGUGAACUUCAAGAUCCGCCACAACAUCGAGGACGGCAGCGU |
| | | GCAGCUCGCCGACCACUACCAGCAGAACACCCCCAUCGGCGACG |
| | | GCCCCGUGCUGCUGCCCGACAACCACUACCUGAGCACCCAGUCC |
| | | GCCCUGAGCAAAGACCCCAACGAGAAGCGCGAUCACAUGGUCCU |
| | | GCUGGAGUUCGUGACCGCCGCCGGGAUCACUCUCGGCAUGGACG |
| | | AGCUGUACAAGUAGAAAGUUCUCCCAUCACAUCAACCGGUGGCG |
| | | CAUUGCCACGAAGCAGGCCAAUGGGGAGGACAUCGAUGUCAGCA |
| | | UAAUGAGUUGUCACACGCUCGAU (SEQ ID NO: 19192) |
| R1262_nc-22 | R1262 ncRNA containing 205 | GGGAUAAUGGGGCCACUAGGGACAGGAUGUUUCAGAGCUAUGC |
| (R1262_sgA | bp insertion in AAVSI site | UGGAAACAGCAUAGCAAGUUGAAAUAAGGCUAGUCCGUUAUCA |
| AVS1- | combined with sgAAVSI at 5′ | ACUUGAAAAAGUGGCACCGAGUCGGUGCUUUUUAAUAACAACG |
| ncRNA_205) | end | AGCGUGUGACAAGAUUUUGGGCUUGUGUUUCGCAAGCUUUGAU |
| | | UAAAAUGGUAGAUGGAUUUGCUAUCUAUCGUCAUUUCCAGUAC |
| | | UGUUAUGUUCUGUCCCCUCCACCCCACAGUGGGGCCACUAGGGA |
| | | CAGAAAGCGGUCUUACGGUCAGUCGUAUUCCUUCUCGAGUUCCG |
| | | UCCAGUUGAGCGUGUCACUCCCAGUGUACCUGCAAGCCGAGAUG |
| | | GCUGUGCUUGGAGUCAAUCGCAUGUAGGAUGGUCUCCAGACACC |
| | | GGGGCACCAGUUUUCACGCCUAAAGCAUAAACGACGAGCAGUCA |
| | | UGAAAGUCUUAGUACUGGACGUGCCGUUUCACAAUUAAUGACA |
| | | GAAAAGCCCCAUCCUUAGGCCUCCUCCUUCCUAGUCUCCUGAUA |
| | | UUGGGUCUAACCCCCAGCAUAAUGAGUUGUCACACGCUCGAU |
| | | (SEQ ID NO: 19193) |
| R1262_nc-8 | R1262 ncRNA containing 205 | GGGAUAAUGAGCGUGUGACAAGAUUUUGGGCUUGUGUUUCGCA |
| (R1262_ncR | bp insertion in EMX1 site and | AGCUUUGAUUAAAAUGGUAGAUGGAUUUGCUAUCUAUCGUCAU |
| NA-EMX1- | MS2 stem loop at 3′ end | UUCCAGUACUGUUAUGUACAAACGGCAGAAGCUGGAGGAGGAA |
| MS2_205) | | GGGCCUGAGUCCGAGCAGAAGAAAAAGCGGUCUUACGGUCAGUC |
| | | GUAUUCCUUCUCGAGUUCCGUCCAGUUGAGCGUGUCACUCCCAG |
| | | UGUACCUGCAAGCCGAGAUGGCUGUGCUUGGAGUCAAUCGCAUG |
| | | UAGGAUGGUCUCCAGACACCGGGGCACCAGUUUUCACGCCUAAA |
| | | GCAUAAACGACGAGCAGUCAUGAAAGUCUUAGUACUGGACGUGC |
| | | CGUUUCACAAAGUUCUCCCAUCACAUCAACCGGUGGCGCAUUGC |
| | | CACGAAGCAGGCCAAUGGGGAGGACAUCGAUGUCAGCAUAAUGA |
| | | GUUGUCACACGCUCACAUGAGGAUCACCCAUGUGAU (SEQ ID NO: |
| | | 19194) |
| R1262_nc-21 | R1262 ncRNA containing 205 | GGGAUAAUGAGCGUGUGACAAGAUUUUGGGCUUGUGUUUCGCA |
| (R1262_ncR | bp insertion in AAVSI site | AGCUUUGAUUAAAAUGGUAGAUGGAUUUGCUAUCUAUCGUCAU |
| NA- | combined with sgAAVSI at 3′ | UUCCAGUACUGUUAUGUUCUGUCCCCUCCACCCCACAGUGGGGC |
| sgAAVS1_205) | end | CACUAGGGACAGAAAGCGGUCUUACGGUCAGUCGUAUUCCUUCU |
| | | CGAGUUCCGUCCAGUUGAGCGUGUCACUCCCAGUGUACCUGCAA |
| | | GCCGAGAUGGCUGUGCUUGGAGUCAAUCGCAUGUAGGAUGGUC |
| | | UCCAGACACCGGGGCACCAGUUUUCACGCCUAAAGCAUAAACGA |
| | | CGAGCAGUCAUGAAAGUCUUAGUACUGGACGUGCCGUUUCACAA |
| | | UUAAUGACAGAAAAGCCCCAUCCUUAGGCCUCCUCCUUCCUAGU |
| | | CUCCUGAUAUUGGGUCUAACCCCCAGCAUAAUGAGUUGUCACAC |
| | | GCUCAAUAACAACGGGGCCACUAGGGACAGGAUGUUUCAGAGCU |
| | | AUGCUGGAAACAGCAUAGCAAGUUGAAAUAAGGCUAGUCCGUU |
| | | AUCAACUUGAAAAAGUGGCACCGAGUCGGUGCUUUUUGAU (SEQ |
| | | ID NO: 19195) |
| R1262_nc-10 | R1262 ncRNA containing 405 | GGGAUAAUGAGCGUGUGACAAGAUUUUGGGCUUGUGUUUCGCA |
| (R1262_ncR | bp insertion in EMX1 site and | AGCUUUGAUUAAAAUGGUAGAUGGAUUUGCUAUCUAUCGUCAU |
| NA-EMX1- | MS2 stem loop at 3′ end | UUCCAGUACUGUUAUGUACAAACGGCAGAAGCUGGAGGAGGAA |
| MS2_405) | | GGGCCUGAGUCCGAGCAGAAGAACUGCUAAAUCCGCGUGAUAGG |
| | | GGAUUUGAAGUUUAAUCUUCUAUCGCAAGGAACUGCCGAUCUU |
| | | AAUGGAUGGCCGGAGGUGGUAUGGAAGCUAUAAGCGCGGGUGA |
| | | GAGGGUAAUUAGGCGUGUUCACCUACGCUACGCUAACGGGCGAU |
| | | UCUAUAAGAUUGCACAUUGCGUCAACUCAUAAGAUGUCUCAACG |
| | | GCAUGCGCAACUUGUGAAGUGUCUACUAUCCUUAAACGCAUAUC |
| | | UCGCACAGUAACUCCCGAAUAUGUCGGCAUCUGAUGUUGCCCGG |
| | | GCCGAGUUAGUGUUGAGCUCACGGAACUUAUUGUAUGAGUAGU |
| | | GAUUUGUAAGAGUUGUCAGUUAGCUCGUUCAGGUAAUAGUUGC |
| | | CCACACAACGUCAAAAUAAGAGAACGGUCGUAACAUAAAGUUCU |
| | | CCCAUCACAUCAACCGGUGGCGCAUUGCCACGAAGCAGGCCAAU |
| | | GGGGAGGACAUCGAUGUCAGCAUAAUGAGUUGUCACACGCUCAC |
| | | AUGAGGAUCACCCAUGUGAU (SEQ ID NO: 19196) |
| R1262_nc-11 | R1262 ncRNA containing 505 | GGGAUAAUGAGCGUGUGACAAGAUUUUGGGCUUGUGUUUCGCA |
| (R1262_ncR | bp insertion in EMX1 site and | AGCUUUGAUUAAAAUGGUAGAUGGAUUUGCUAUCUAUCGUCAU |
| NA-EMX1- | MS2 stem loop at 3′ end | UUCCAGUACUGUUAUGUACAAACGGCAGAAGCUGGAGGAGGAA |
| MS2_505) | | GGGCCUGAGUCCGAGCAGAAGAAACUUCAGCUAAGGAAGCUACC |
| | | AAUAUUUAGUUUCUGAGUCUCACGACAGACCUCGCGCGUAGAUU |
| | | GCCAUGCGUAGAGCUAACGAGCCAGCGGAAAGCGUGAGGCGCUU |
| | | UUAAGCAUGGCGAGUAAGUGAUCCAACGCUUCGGAUAUGACUA |
| | | UAUACUUAGGUUCGAUCUCGUCCCGAGAAUUCUAAGCCUCAACA |
| | | UCUAUGAGUUAUGAGGUUAGCCGAAAAAGCACGUGGUGGCGCCC |
| | | ACCGACUGUUCCCAGACUGUAGCUCUUUGUUCUGUCAAGGCCCG |
| | | ACCUUCAUCGCGGCCGAUUCCUUCUGCGGACCAUACCGUCCUGA |
| | | UACUUUGGUCAUGUUUCCGUUGUAGGAGUGAACCCACUUGCCUU |
| | | UGCGUCUUAAUACCAAUGAAAAACCUAUGCACUUUGUACAGGGU |
| | | ACCAUCGGGAUUCUGAACCCUCAGAUAGUGGGGAUCCCGGGUAU |
| | | AGACCUUUAUCUGCGGUCCAACUUAGGCAUAAACCUCCAUGCUA |
| | | CAAAGUUCUCCCAUCACAUCAACCGGUGGCGCAUUGCCACGAAG |
| | | CAGGCCAAUGGGGAGGACAUCGAUGUCAGCAUAAUGAGUUGUC |
| | | ACACGCUCACAUGAGGAUCACCCAUGUGAU (SEQ ID NO: 19197) |
| R1262_nc-12 | R1262 ncRNA containing P2A- | GGGAUAAUGAGCGUGUGACAAGAUUUUGGGCUUGUGUUUCGCA |
| (R1262_ncR | GFP insertion in EMX1 site and | AGCUUUGAUUAAAAUGGUAGAUGGAUUUGCUAUCUAUCGUCAU |
| NA-EMX1- | MS2 stem loop at 3′ end | UUCCAGUACUGUUAUGUACAAACGGCAGAAGCUGGAGGAGGAA |
| MS2_P2A- | | GGGCCUGAGUCCGAGCAGAAGAAGGAAGCGGAGCCACUAACUUC |
| GFP) | | UCCCUGUUGAAACAAGCAGGGGAUGUCGAAGAGAAUCCCGGGCC |
| | | AGUGAGCAAGGGCGAGGAGCUGUUCACCGGGGUGGUGCCCAUCC |
| | | UGGUCGAGCUGGACGGCGACGUAAACGGCCACAAGUUCAGCGUG |
| | | UCCGGCGAGGGCGAGGGCGAUGCCACCUACGGCAAGCUGACCCU |
| | | GAAGUUCAUCUGCACCACCGGCAAGCUGCCCGUGCCCUGGCCCA |
| | | CCCUCGUGACCACCCUGACCUACGGCGUGCAGUGCUUCAGCCGC |
| | | UACCCCGACCACAUGAAGCAGCACGACUUCUUCAAGUCCGCCAU |
| | | GCCCGAAGGCUACGUCCAGGAGCGCACCAUCUUCUUCAAGGACG |
| | | ACGGCAACUACAAGACCCGCGCCGAGGUGAAGUUCGAGGGCGAC |
| | | ACCCUGGUGAACCGCAUCGAGCUGAAGGGCAUCGACUUCAAGGA |
| | | GGACGGCAACAUCCUGGGGCACAAGCUGGAGUACAACUACAACA |
| | | GCCACAACGUCUAUAUCAUGGCCGACAAGCAGAAGAACGGCAUC |
| | | AAGGUGAACUUCAAGAUCCGCCACAACAUCGAGGACGGCAGCGU |
| | | GCAGCUCGCCGACCACUACCAGCAGAACACCCCCAUCGGCGACG |
| | | GCCCCGUGCUGCUGCCCGACAACCACUACCUGAGCACCCAGUCC |
| | | GCCCUGAGCAAAGACCCCAACGAGAAGCGCGAUCACAUGGUCCU |
| | | GCUGGAGUUCGUGACCGCCGCCGGGAUCACUCUCGGCAUGGACG |
| | | AGCUGUACAAGUAGAAAGUUCUCCCAUCACAUCAACCGGUGGCG |
| | | CAUUGCCACGAAGCAGGCCAAUGGGGAGGACAUCGAUGUCAGCA |
| | | UAAUGAGUUGUCACACGCUCACAUGAGGAUCACCCAUGUGAU |
| | | (SEQ ID NO: 19198) |
| R1262_nc-23 | Same as R1262_nc-6 but with | GGGAUAAUGAGCGUGUGACAAGAUUUUGGGCUUGUGUUUCGCA |
| (R1262_ncR | longer homology arms | AGCUUUGAUUAAAAUGGUAGAUGGAUUUGCUAUCUAUCGUCAU |
| NA- | | UUCCAGUACUGUUAUGUGAGGCCCCAGUGGCUGCUCUGGGGGCC |
| EMX1 P2A- | | UCCUGAGUUUCUCAUCUGUGCCCCUCCCUCCCUGGCCCAGGUGA |
| GFP_LongIIA) | | AGGUGUGGUUCCAGAACCGGAGGACAAAGUACAAACGGCAGAA |
| | | GCUGGAGGAGGAAGGGCCUGAGUCCGAGCAGAAGAAGGAAGCG |
| | | GAGCCACUAACUUCUCCCUGUUGAAACAAGCAGGGGAUGUCGAA |
| | | GAGAAUCCCGGGCCAGUGAGCAAGGGCGAGGAGCUGUUCACCGG |
| | | GGUGGUGCCCAUCCUGGUCGAGCUGGACGGCGACGUAAACGGCC |
| | | ACAAGUUCAGCGUGUCCGGCGAGGGCGAGGGCGAUGCCACCUAC |
| | | GGCAAGCUGACCCUGAAGUUCAUCUGCACCACCGGCAAGCUGCC |
| | | CGUGCCCUGGCCCACCCUCGUGACCACCCUGACCUACGGCGUGC |
| | | AGUGCUUCAGCCGCUACCCCGACCACAUGAAGCAGCACGACUUC |
| | | UUCAAGUCCGCCAUGCCCGAAGGCUACGUCCAGGAGCGCACCAU |
| | | CUUCUUCAAGGACGACGGCAACUACAAGACCCGCGCCGAGGUGA |
| | | AGUUCGAGGGCGACACCCUGGUGAACCGCAUCGAGCUGAAGGGC |
| | | AUCGACUUCAAGGAGGACGGCAACAUCCUGGGGCACAAGCUGGA |
| | | GUACAACUACAACAGCCACAACGUCUAUAUCAUGGCCGACAAGC |
| | | AGAAGAACGGCAUCAAGGUGAACUUCAAGAUCCGCCACAACAUC |
| | | GAGGACGGCAGCGUGCAGCUCGCCGACCACUACCAGCAGAACAC |
| | | CCCCAUCGGCGACGGCCCCGUGCUGCUGCCCGACAACCACUACCU |
| | | GAGCACCCAGUCCGCCCUGAGCAAAGACCCCAACGAGAAGCGCG |
| | | AUCACAUGGUCCUGCUGGAGUUCGUGACCGCCGCCGGGAUCACU |
| | | CUCGGCAUGGACGAGCUGUACAAGUAGAAAGUUCUCCCAUCACA |
| | | UCAACCGGUGGCGCAUUGCCACGAAGCAGGCCAAUGGGGAGGAC |
| | | AUCGAUGUCACCUCCAAUGACUAGGGUGGGCAACCACAAACCCA |
| | | CGAGGGCAGAGUGCUGCUUGCUGCUGGCCAGGCCCCUGCGUGGG |
| | | CCCAAGCGCAUAAUGAGUUGUCACACGCUCGAU (SEQ ID NO: |
| | | 19199) |
| R1262_nc-24 | Same as R1262_nc-12 but with | GGGAUAAUGAGCGUGUGACAAGAUUUUGGGCUUGUGUUUCGCA |
| (R1262_ncR | longer homology arms | AGCUUUGAUUAAAAUGGUAGAUGGAUUUGCUAUCUAUCGUCAU |
| NA-EMX1- | | UUCCAGUACUGUUAUGUGAGGCCCCAGUGGCUGCUCUGGGGGCC |
| MS2 P2A- | | UCCUGAGUUUCUCAUCUGUGCCCCUCCCUCCCUGGCCCAGGUGA |
| GFP_LongHA) | | AGGUGUGGUUCCAGAACCGGAGGACAAAGUACAAACGGCAGAA |
| | | GCUGGAGGAGGAAGGGCCUGAGUCCGAGCAGAAGAAGGAAGCG |
| | | GAGCCACUAACUUCUCCCUGUUGAAACAAGCAGGGGAUGUCGAA |
| | | GAGAAUCCCGGGCCAGUGAGCAAGGGCGAGGAGCUGUUCACCGG |
| | | GGUGGUGCCCAUCCUGGUCGAGCUGGACGGCGACGUAAACGGCC |
| | | ACAAGUUCAGCGUGUCCGGCGAGGGCGAGGGCGAUGCCACCUAC |
| | | GGCAAGCUGACCCUGAAGUUCAUCUGCACCACCGGCAAGCUGCC |
| | | CGUGCCCUGGCCCACCCUCGUGACCACCCUGACCUACGGCGUGC |
| | | AGUGCUUCAGCCGCUACCCCGACCACAUGAAGCAGCACGACUUC |
| | | UUCAAGUCCGCCAUGCCCGAAGGCUACGUCCAGGAGCGCACCAU |
| | | CUUCUUCAAGGACGACGGCAACUACAAGACCCGCGCCGAGGUGA |
| | | AGUUCGAGGGCGACACCCUGGUGAACCGCAUCGAGCUGAAGGGC |
| | | AUCGACUUCAAGGAGGACGGCAACAUCCUGGGGCACAAGCUGGA |
| | | GUACAACUACAACAGCCACAACGUCUAUAUCAUGGCCGACAAGC |
| | | AGAAGAACGGCAUCAAGGUGAACUUCAAGAUCCGCCACAACAUC |
| | | GAGGACGGCAGCGUGCAGCUCGCCGACCACUACCAGCAGAACAC |
| | | CCCCAUCGGCGACGGCCCCGUGCUGCUGCCCGACAACCACUACCU |
| | | GAGCACCCAGUCCGCCCUGAGCAAAGACCCCAACGAGAAGCGCG |
| | | AUCACAUGGUCCUGCUGGAGUUCGUGACCGCCGCCGGGAUCACU |
| | | CUCGGCAUGGACGAGCUGUACAAGUAGAAAGUUCUCCCAUCACA |
| | | UCAACCGGUGGCGCAUUGCCACGAAGCAGGCCAAUGGGGAGGAC |
| | | AUCGAUGUCACCUCCAAUGACUAGGGUGGGCAACCACAAACCCA |
| | | CGAGGGCAGAGUGCUGCUUGCUGCUGGCCAGGCCCCUGCGUGGG |
| | | CCCAAGCGCAUAAUGAGUUGUCACACGCUCACAUGAGGAUCACC |
| | | CAUGUGAU (SEQ ID NO: 19200) |
| 6083 v1 RT | 6083 retron RT mRNA | AUGAGCAACCCUCAGCCCACCAGGGCUGAGAUCUUCGAGCGCAU |
| | | CAAACAGAGCUCGAAGCAGGAGGUGAUCCUGGAGGAGAUGCAG |
| | | AGACUGGGCUUCUGGCCAAGGUCAGAAGGCCAGCCUGAGGUCGC |
| | | UGCCGACCUCAUCCAGAGAGAAGGCGAGCUCCAAAGGGAGCUCG |
| | | CCGAACUCAACAAGAAGUUGGCGGUCAAACGCAACCCCGAGAGG |
| | | GCCCUCAGAGAAAUGAGGAAGCAGAGAAUGAAGGACGCCAGAG |
| | | ACAAGAGAGAGGUGACCAAGAGAGCCCAGGCUCAGCAGAGAUAC |
| | | GACAAGGCCCUGCUGUGGCACGAGAAGAGGGCCAGCCACGUGGC |
| | | CUAUCUUGGCCCUGGUGUGAGCGCCAGCUUACACGAGAACAGCU |
| | | CUGCUACCCAGGAGCAGGGCGACAAGGGGAAACCCAAGAGAGCC |
| | | CGAGAUCGGGCUGUGCCAGACCUGCAGAGGCUGACACUGAACGG |
| | | GCUGCCUGCUCUGAUUAGCGCAGCCCAACUCGCUGAGUCCAUGG |
| | | GAGUCAGCGUGGCUGAGCUGAGAUUCCUCAGCUUCCACAGGGAG |
| | | GUGGCUAGGACAAACCACUACCACAGCUUCACGCUCCCCAAGAA |
| | | GACAGGUGGGGAGCGUCUGAUCAGCGCCCCCAUGCCCAGACUGA |
| | | AGAGAGCCCAGUACUGGGUGCUGGACAACGUGCUGGCAAAGAUG |
| | | CCAGCGCACGAUGCGGCUCACGGCUUCCUGGCCGGCAGAAGCAU |
| | | CAUCAGCAAUGCCAAGCCCCAUGCGGGGCAGGAUGUGGUCAUUA |
| | | ACUUGGACGUUAAGGACUUCUUCCCCAGCAUCGCCUUCGGCAGA |
| | | AUCAAGGGCGUGUUCAGACAGCUGGGCUACGGCGAAAGCAUCGC |
| | | CACAGUGUUCGCCCUGCUGUGCAGCGAGAACAGAGCCCAGGCCU |
| | | GGCAAGUGGACGGAGAGAGACUCUUCGUCGGCGGCAAGGCCAGA |
| | | GAAAGAGUGCUGCCUCAGGGCGCUCCUACCAGCCCCAUGCUGAC |
| | | CAACCUGCUGUGCCGGCGGAUGGAUAGACGUCUGCUGGGUCUCG |
| | | CGAAGCAGCUGGGCUUCGUGUACACCAGAUACGCCGACGACCUG |
| | | ACCUUCAGCGCCUCCGGCGAACCCGCAAGGGAUAACGUCGGAAA |
| | | GCUGCUGAGCAGGGUCCGGUGGAUCCUGAGGGAUGAGGGGUUC |
| | | ACCCCUCAUCCCGAUAAGGAGAGAGUGAUGAGAAAGGGCAGAAG |
| | | ACAGGAGGUGACCGGCCUUGUGGUCAACUCCGACACUCCCAGCG |
| | | UGAGCAGGGAGACCAGAAGAAGGCUGAGAGCCGCUCUGCACAGA |
| | | GCCUCGCAGCCUGACGCUGCGAGCAAACCUGCACAUUGGCAGGG |
| | | CCAUACGGCCCAGCCAAGUCAGCUGCUGGGCCUGGCCACAUUCG |
| | | UGCAUCAGAUCGACCCCAAGCAGGGCAAGACCCUGCUCGCUGAC |
| | | GCUCAGCAACUGAUGCGCAGCCCUAUCGACCGCGCUAAUGACGC |
| | | GGCGAAGUCUGCUAGCAGGGCUGACGCUGCUCAGCAGAGCUUCA |
| | | GAGUGCUGGCUGCUGCCGGCAAGCCACCAGUUCUUGCCGACGGC |
| | | AAGAACUGGUGGCAACCUGCUCCUCCUGCCACACCUGUGCUGGA |
| | | GAAGACCGACCAGCAGAGAAGAGAGGAAAGGCAGGCUACCAGAA |
| | | GGCAGCAGGCCGCUGCUGCUGCUCCUCCUCCUAGCAGCACAAGA |
| | | AGAAACGAGCGGCCGCAACAGGCCGCUCAUGAGCAGCAGGGAGA |
| | | UGCCCAGCCUCAGAACGAGGCCCCUCCUAGAUUCGACCCCGACC |
| | | AGUACGCUCCUCCCCCGAGGAACGUGAUGACCUACUGGGCCCAG |
| | | AUCGCCAUCAGCUUCUUUCUGGGCAGCAUCCUGCACAACAGACU |
| | | GAUCACGAUCUUCGCCAUGGUGGCGGUGAUCGCUCUGUACUACA |
| | | UGAGAAGACAGAGAUGGGAUGUCUUCAUGGGCAUCCUGGUGGU |
| | | GGCCACCCUGCUGGGAUACCUGGUCAGGGGCAUGGGCccaccaaagaa |
| | | gaaaagaaaggucuga (SEQ ID NO: 19201) |
| 6083 | R6083 retron containing 25 bp | GCUCCGGAGCAAUGAGCAGGCUCUUGCAAUCCGGGCGGUGUUUC |
| vl_ncRNA_A | insertion at AAVSI site | GCCGCCCUUGUGAACUGCCGUUUCAUGCACCACGGGCGCCGUUU |
| AVS1 | | UCACUGUGCCACCCCAGCCACGGUAGUGCUUCUGUCCCCUCCAC |
| gRNA_25bp | | CCCACAGUGGGGCCACUAGGGACAGAAAUGACAGUGGUUGGUGC |
| | | UCUAAAAAUUAAUGACAGAAAAGCCCCAUCCUUAGGCCUCCUCC |
| | | UUCCUAGUCUCCUGAUAUUGGGUCUAACCCCCAAGCACUACCGU |
| | | GGCGGGGUGGCGUCGAGCGAACAGCUCCCGUCCCCUGAGCCCUA |
| | | CAGGCUCUUGGACGAGAUGCACAUUGCUCCGGAGCAAUAACAAC |
| | | GGGGCCACUAGGGACAGGAUguuucagagcuaugcuggaaacag |
| | | cauagcaaguugaaauaaggcuaguccguuaucaacuugaaaaa |
| | | guggcaccgagucggugcuuuuu (SEQ ID NO: 19202) |
| 6083 | R6083 retron containing 25 bp | GCUCCGGAGCAAUGAGCAGGCUCUUGCAAUCCGGGCGGUGUUUC |
| vl_ncRNA | insertion at EMX1 site | GCCGCCCUUGUGAACUGCCGUUUCAUGCACCACGGGCGCCGUUU |
| only_25bp | | UCACUGUGCCACCCCAGCCACGGUAGUGCUacaaacggcagaagcuggagga |
| | | ggaagggccugaguccgagcagaagaaaACUCGAGCUCUGAAUGACUCCUAUAa |
| | | aguucucccaucacaucaaccgguggcgcauugccacgaagcaggccaaugggg |
| | | aggacaucgaugucaAGCACUACCGUGGCGGGGUGGCGUCGAGCGAACAGCUCC |
| | | CGUCCCCUGAGCCCUACAGGCUCUUGGACGAGAUGCACAUUGCUCCG |
| | | GAGC (SEQ ID NO: 19203) |
| 6083 | R6083 retron containing 25 bp | GCUCCGGAGCAAUGAGCAGGCUCUUGCAAUCCGGGCGGUGUUUC |
| vl_ncRNA_E | insertion at EMX1 site and | GCCGCCCUUGUGAACUGCCGUUUCAUGCACCACGGGCGCCGUUU |
| MX1 | sgEMX1 at 3′ end | UCACUGUGCCACCCCAGCCACGGUAGUGCUacaaacggcagaagcuggagga |
| gRNA_25bp | | ggaagggccugaguccgagcagaagaaaACUCGAGCUCUGAAUGACUCCUAUAa |
| | | aguucucccaucacaucaaccgguggcgcauugccacgaagcaggccaaugggg |
| | | aggacaucgaugucaAGCACUACCGUGGCGGGGUGGCGUCGAGCGAACAGCUCC |
| | | CGUCCCCUGAGCCCUACAGGCUCUUGGACGAGAUGCACAUUGCUCCG |
| | | GAGCAAUAACAACgaguccgagcagaagaagaaguuucagagcuaugcuggaaa |
| | | cagca(SEQ ID NO: 19204) |
| 6083 | R6083 retron containing GFP | GCUCCGGAGCAAUGAGCAGGCUCUUGCAAUCCGGGCGGUGUUUC |
| vl_ncRNA_E | gene insertion at EMX1 site and | GCCGCCCUUGUGAACUGCCGUUUCAUGCACCACGGGCGCCGUUU |
| MX1 | sgEMX1 at 3′ end | UCACUGUGCCACCCCAGCCACGGUAGUGCUacaaacggcagaagcuggagga |
| gRNA_GFP | | ggaagggccugaguccgagcagaagaacccauauguccuuccgagugagaga |
| gene | | cacaaaaaauuccaacacacuauugcaaugaaaauaaauuuccuuuauuagc |
| | | cagaagucagaugcucaaggggcuucaugauguccccauaauuuuuggcaga |
| | | gggaaaaagaucucagugguauuugugagccagggcauuggccacaccagccac |
| | | caccuucugauaggcagccugcaccugaggagugcggccgcuuuacuuguacag |
| | | cucguccaugccgagagugaucccggggggucacgaacuccagcaggaccaugu |
| | | gaucgcgcuucucguuggggucuuugcucagggggacugggugcucagguagug |
| | | guugucgggcagcagcacggggccgucgccgauggggguguucugugguagggg |
| | | ggggcacgugcuccugauuugccgucguccuugaagaagauggugcgcuccugg |
| | | acguagccuucgggcauggcggacuugaagaagucgugcugcuucauguggucg |
| | | ggguagcggcugaagcacugcacgccguaggucaggguggucacgagggugggc |
| | | cagggcacgggcagcuugccgguggugcagaugaacuucagggucagcuugagc |
| | | ucgaccaggaugggcaccaccccggugaacagcuccucgcccuugcucaccaug |
| | | guggcgaccgguggaucccgggcccgcgguaccgucgacugcagaauucgaagc |
| | | uugagcucgagaucugaguccgguagcgcuagcggaucugacgguucacuaaac |
| | | ccuguguucuggggcaaacccguugcgaaaaagaacguucacggcgacuacugc |
| | | acuuauauacgguucucccccacccucgggaaaaaggcggagccaguacacgac |
| | | aucacuuucccaguuuaccccgcgccaccuucucuaggcaccgguucaauugcc |
| | | gaccccuccccccaacuucucggggacuguggggauguggcucugccguucucc |
| | | caucacaucaaccgguggcgcauugccacgaagcaggccaauggggaggacauc |
| | | gaugucaAGCACUACCGUGGCGGGGUGGCGUCGAGCGAACAGCUCCCGUCCCCU |
| | | GAGCCCUACAGGCUCUUGGACGAGAUGCACAUUGCUCCGGAGCAAUAACAAC |
| | | gaguccgagcagaagaagaaguuucagagcuaugcuggaaacagcauagcaa |
| | | guugaaauaaggcuaguccguuaucaacuugaaaaaguggcaccgagucggu |
| | | guuuuu (SEQ ID NO: 19205) |
| 6083 | R6083 retron containing 50 bp | GCUCCGGAGCAAUGAGCAGGCUCUUGCAAUCCGGGCGGUGUUUCGCCGCC |
| vl_ncRNA_E | insertion at EMX1 site and | CUUGUGAACUGCCGUUUCAUGCACCACGGGCGCCGUUUUCACUGUGCCAC |
| MX1 | sgEMX1 at 3′ end | CCCAGCCACGGUAGUGCUacaaacggcagaagcuggaggaggaagggccu |
| gRNA_50bp | | gaguccgagcagaagaaaACUCGAGCUCUGAUCAGUAUCAUGGGGCCCAU |
| | | GGUUGAAUGACUCCUAUAaaguucucccaucacaucaaccgguggcgcauu |
| | | gccacgaagcaggccaauggggaggacaucgaugucaAGCACUACCGUGG |
| | | CGGGGUGGCGUCGAGCGAACAGCUCCCGUCCCCUGAGCCCUACAGGCU |
| | | CUUGGACGAGAUGCACAUUGCUCCGGAGCAAUAACAACgaguccgagcag |
| | | aagaagaaguuucagagcuaugcuggaaacagcauagcaaguugaaauaa |
| | | ggcuaguccguuaucaacuugaaaaaguggcaccgagucggugcuuuuu |
| | | (SEQ ID NO: 19206) |
| 6083 | R6083 retron containing 100 bp | GCUCCGGAGCAAUGAGCAGGCUCUUGCAAUCCGGGCGGUGUUUC |
| vl_ncRNA_E | insertion at EMX1 site and | GCCGCCCUUGUGAACUGCCGUUUCAUGCACCACGGGCGCCGUUU |
| MX1 | sgEMX1 at 3′ end | UCACUGUGCCACCCCAGCCACGGUAGUGCUacaaacggcagaagcuggagga |
| gRNA_100bp | | ggaagggccugaguccgagcagaagaaaACUCGAGCUCUGAGCCCCACUGUCG |
| | | AGAAGUAUGUAUCUCGCUCCCGCAGCUUGCCAGCACUUUCAGUAUCAUGGG |
| | | GCCCAUGGUUGAAUGACUCCUAUAaaguucucccaucacaucaaccgguggcg |
| | | cauugccacgaagcaggccaauggggaggacaucgaugucaAGCACUACCG |
| | | UGGCGGGGUGGCGUCGAGCGAACAGCUCCCGUCCCCUGAGCCCU |
| | | ACAGGCUCUUGGACGAGAUGCACAUUGCUCCGGAGCAAUAACAA |
| | | Cgaguccgagcagaagaagaaguuucagagcuaugcuggaaaca |
| | | gcauagcaaguugaaauaaggcuaguccguuaucaacuugaaaa |
| | | aguggcaccgagucggugcuuuuu (SEQ ID NO: 19207) |
| 6083 | R6083 rctron containing 75 bp | GCUCCGGAGCAAUGAGCAGGCUCUUGCAAUCCGGGCGGUGUUUC |
| vl_ncRNA_E | insertion at EMX1 site and | GCCGCCCUUGUGAACUGCCGUUUCAUGCACCACGGGCGCCGUUU |
| MX1 | sgEMX1 at 3′ end | UCACUGUGCCACCCCAGCCACGGUAGUGCUacaaacggcagaagcuggagga |
| gRNA_75bp | | ggaagggccugaguccgagcagaagaaaACUCGAGCUCUGAGCCCCACCGCAGC |
| | | UUGCCAGCACUUUCAGUAUCAUGGGGCCCAUGGUUGAAUGACUCCUAUAaagu |
| | | ucucccaucacaucaaccgguggcgcauugccacgaagcaggccaauggggagga |
| | | caucgaugucaAGCACUACCGUGGCGGGGUGGCGUCGAGCGAACAGC |
| | | UCCCGUCCCCUGAGCCCUACAGGCUCUUGGACGAGAUGCACAUU |
| | | GCUCCGGAGCAAUAACAACgaguccgagcagaagaagaaguuucagagcuaugcu |
| | | ggaaacagcauagcaaguugaaauaaggcuaguccguuaucaacuugaaaaagug |
| | | gcaccgagucggugcuuuuu (SEQ ID NO: 19208) |
| Aco1_ncRNA- | Aco1 ncRNA containing 100 bp | GGGAUAAUGUAUAAAACCGGGAACGAUCAGACCGGGGUGAAUU |
| EMX1_100 | insertion in EMX1 gene | CGCCCCCUUGAUCAAACGGCACUAACCACUGUUUGCCGUGCGUG |
| | | CGUACAAACGGCAGAAGCUGGAGGAGGAAGGGCCUGAGUCCGAG |
| | | CAGAAGAAAACUCGAGCUCUGAGCCCCACUGUCGAGAAGUAUGU |
| | | AUCUCGCUCCCGCAGCUUGCCAGCACUUUCAGUAUCAUGGGGCC |
| | | CAUGGUUGAAUGACUCCUAUAAAGUUCUCCCAUCACAUCAACCG |
| | | GUGGCGCAUUGCCACGAAGCAGGCCAAUGGGGAGGACAUCGAUG |
| | | UCAACGCACGCACGGCAAACAGACAGAUCCAUUAUUAUUACAAU |
| | | UUAUUUAGUGAUCGUUCCCGGUUUUAUACGAU (SEQ ID NO: |
| | | 19209) |
| Aco1_ncRNA- | Aco1 ncRNA containing 205 bp | GGGAUAAUGUAUAAAACCGGGAACGAUCAGACCGGGGUGAAUU |
| EMX1_205 | insertion in EMX1 gene | CGCCCCCUUGAUCAAACGGCACUAACCACUGUUUGCCGUGCGUG |
| | | CGUACAAACGGCAGAAGCUGGAGGAGGAAGGGCCUGAGUCCGAG |
| | | CAGAAGAAAAAGCGGUCUUACGGUCAGUCGUAUUCCUUCUCGAG |
| | | UUCCGUCCAGUUGAGCGUGUCACUCCCAGUGUACCUGCAAGCCG |
| | | AGAUGGCUGUGCUUGGAGUCAAUCGCAUGUAGGAUGGUCUCCA |
| | | GACACCGGGGCACCAGUUUUCACGCCUAAAGCAUAAACGACGAG |
| | | CAGUCAUGAAAGUCUUAGUACUGGACGUGCCGUUUCACAAAGUU |
| | | CUCCCAUCACAUCAACCGGUGGCGCAUUGCCACGAAGCAGGCCA |
| | | AUGGGGAGGACAUCGAUGUCAACGCACGCACGGCAAACAGACAG |
| | | AUCCAUUAUUAUUACAAUUUAUUUAGUGAUCGUUCCCGGUUUU |
| | | AUACGAU (SEQ ID NO: 19210) |
| Eco3_ncRNA- | Eco3 ncRNA containing 205 bp | GGGAUAAUUGAUAAGAUUCCGUAAGAGCCAAACCUAGCAUUUU |
| EMX1 205 | insertion in EMX1 gene | AUGGGUUAAUAGCCCAUCGGGCCAUGAGUCAUGGUUUCGCCUAG |
| | | UAUUUUAGCUAUGCCCGUCGUUCAGUUCGCUGAACAAACGGCAG |
| | | AAGCUGGAGGAGGAAGGGCCUGAGUCCGAGCAGAAGAAAAAGC |
| | | GGUCUUACGGUCAGUCGUAUUCCUUCUCGAGUUCCGUCCAGUUG |
| | | AGCGUGUCACUCCCAGUGUACCUGCAAGCCGAGAUGGCUGUGCU |
| | | UGGAGUCAAUCGCAUGUAGGAUGGUCUCCAGACACCGGGGCACC |
| | | AGUUUUCACGCCUAAAGCAUAAACGACGAGCAGUCAUGAAAGUC |
| | | UUAGUACUGGACGUGCCGUUUCACAAAGUUCUCCCAUCACAUCA |
| | | ACCGGUGGCGCAUUGCCACGAAGCAGGCCAAUGGGGAGGACAUC |
| | | GAUGUCAUCAGCGAACUGAUCGACGUGCUCAAGUAGGUUUGGCU |
| | | CUUACGGAAUCUUAUCAGAU (SEQ ID NO: 19211) |

### Primer Sequences

| Description | Sequence |
|---|---|
| AAVSI_NGS_F | TCGTCGGCAGCGTCAGATGTGTATAAGAGACAGAGCTG |
| | GGACCACCTTATATTCC(SEQ ID NO: 19212) |
| AAVS1_NGS_R | GTCTCGTGGGCTCGGAGATGTGTATAAGAGACAGGTTC |
| | TGGCAAGGAGAGAGATG(SEQ ID NO: 19213) |
| EMX1_NGS_F3 | TCGTCGGCAGCGTCAGATGTGTATAAGAGACAGaggtg |
| | aaggtgtggttccag(SEQ ID NO: 19214) |
| EMX1_NGS_R3 | GTCTCGTGGGCTCGGAGATGTGTATAAGAGACAGtagt |
| | cattggaggtgacatcg(SEQ ID NO: 19215) |
| EMX1_NGS_F1 | TCGTCGGCAGCGTCAGATGTGTATAAGAGACAGaggtg |
| | aaggtgtggttccag(SEQ ID NO: 19216) |
| EMX1_NGS_R1 | GTCTCGTGGGCTCGGAGATGTGTATAAGAGACAGgcca |
| | gagtccagcttggg(SEQ ID NO: 19217) |

qPCR Primers

| qPCR Primers- NOT NGS | |
|---|---|
| EMX1 Forward Primer | aggtgaaggtgtggttccag |
| | (SEQ ID NO: 19218) |
| EMX1 Reverse Primer | tagtcattggaggtgacatcg |
| | (SEQ ID NO: 19219) |
| 5′ Junction GFP | ccccttgagcatctgacttc |
| Reverse Primer | (SEQ ID NO: 19220) |
| 3′ Junction GFP | catcactttcccagtttaccc |
| Forward Primer | (SEQ ID NO: 19221) |

### RT Variants (Coding Sequences)

| RT Variant | ORF Sequence | SEQ ID NO: |
|---|---|---|
| 6342S_N_465 | ATGATGGAGAATCAGGAGAACAACATGAACAACAGAAAGAACTACAGAGA | SEQ ID NO: |
| _K | GGCCGTGAACACCATGGGCAAGAAGGAATTCACCCTGATCAAGATGCAGG | 19222 |
| | AGTACGGCTTCTGGCCCAAGAACCTGCCTACTCCCTACGAGAGGCAGGAA | |
| | AGCGAGACCGAGGAGCAGTACAAGGAGAGAAAGTGCCTGCTCGAGAAGTA | |
| | CGAGAAGGTGATCGACGAGATCAGCAAGCTGTACGAAGAGAAGGACAAGA | |
| | TCAACCTGAAGCTGAGGGAGCTCCAGAAGAAGTACGACGAGACCTGGGAC | |
| | TATGAGCGCATCCGGCTGGATGTGAGCAAGACCATCATGCAGGAGAGCAT | |
| | CGAGAGGAGAGCTGAAAGAAAGCGCCAGCGGGAGCTGGAGAAGGAGCAGC | |
| | GCTCCGAGGAGTGGAAGAAGGAGAAGGAGAACAAGATCGTCTTCATCGGC | |
| | AAGGGGTACAGCAGCCTGCTGTACGACAAGGAGACCGACGAGAACAAGCT | |
| | GCTGCTGCAGGAGCTCCCTATCATCAAGGATGATAAGGAGCTGGCCAACT | |
| | TCCTGGGCATCGAGTACAAGAAGCTGAGATTCCTGGTGTACCACCGGGAC | |
| | GTGATCTCCGTGGACAACTACCACAGATACACCATCCCCAAGAAGAAGGG | |
| | CGGCGTGAGAAACATCGCCGCTCCCAAGAGCATCCTGAAGAACTCCCAGA | |
| | GGATTATCCTCGAGGAGATTCTGAGCAAGATCCCCACCTCCAACTACAGC | |
| | CACGGCTTCCTGAAGGGGAAGTCCGTGGTGAGCGCCGCCAAGGTGCACGT | |
| | GAAGAAACCCGACCTCCTGATCAACATCGATCTGGAGGACTTCTTCCCCA | |
| | CCATCACCTTCGAGAGGGTGAGAGGCATGTTCAAGAGCTTCGGCTACAGC | |
| | GGATACGTGGCCAGCATGCTGGCCATGATCTGCACCTACTGCGAGAGGAT | |
| | GAAGGTGGAGGTGAGGGGCGAGGAGAAGTACGTCAAGATCAGCGACAGAA | |
| | TTCTGCCCCAGGGCAGCCCTGCCAGCCCCATGATCACCAACATCATCTGC | |
| | GTGAAGCTGGACAAGAGACTGAACGGCCTGAGCACCAAGTATGACTTCAT | |
| | TTATACTCGGTACGCTGACGACATGTCGTTCAGCTTCACCGGCGACATCA | |
| | ACGAACTGAGCGTCGGCAGCTTCATGGGCCTGGTGAGCAAGATCGTGAAG | |
| | GAAGAGGGCTTCAACATCAACAAGGACAAGACCAAGTTCCTGAGAAAGAA | |
| | CAACAGACAGTGCATCACCGGCATCGTGATCAACAACGAGGAGATCGGCG | |
| | TGCCCAAGAAGTGGATCAAGATCCTGAGAGCCGCCATCTACAACGCCAAC | |
| | AAGGTGAAGAACAGCGGCGAGATCCTGAGCAACAAGGTGATCAAGGAGAT | |
| | CAGCGGCATGACCTCCTGGGTGAAGTCCGTCAACGAGGAGAGATACAAGG | |
| | ACATCATCAACGATGCCATGAACCTGATCAACAACccaccaaagaagaaa | |
| | agaaaggtctga | |
| 6342S_N_465 | ATGATGGAGAATCAGGAGAACAACATGAACAACAGAAAGAACTACAGAGA | SEQ ID NO: |
| _Q | GGCCGTGAACACCATGGGCAAGAAGGAATTCACCCTGATCAAGATGCAGG | 19223 |
| | AGTACGGCTTCTGGCCCAAGAACCTGCCTACTCCCTACGAGAGGCAGGAA | |
| | AGCGAGACCGAGGAGCAGTACAAGGAGAGAAAGTGCCTGCTCGAGAAGTA | |
| | CGAGAAGGTGATCGACGAGATCAGCAAGCTGTACGAAGAGAAGGACAAGA | |
| | TCAACCTGAAGCTGAGGGAGCTCCAGAAGAAGTACGACGAGACCTGGGAC | |
| | TATGAGCGCATCCGGCTGGATGTGAGCAAGACCATCATGCAGGAGAGCAT | |
| | CGAGAGGAGAGCTGAAAGAAAGCGCCAGCGGGAGCTGGAGAAGGAGCAGC | |
| | GCTCCGAGGAGTGGAAGAAGGAGAAGGAGAACAAGATCGTCTTCATCGGC | |
| | AAGGGGTACAGCAGCCTGCTGTACGACAAGGAGACCGACGAGAACAAGCT | |
| | GCTGCTGCAGGAGCTCCCTATCATCAAGGATGATAAGGAGCTGGCCAACT | |
| | TCCTGGGCATCGAGTACAAGAAGCTGAGATTCCTGGTGTACCACCGGGAC | |
| | GTGATCTCCGTGGACAACTACCACAGATACACCATCCCCAAGAAGAAGGG | |
| | CGGCGTGAGAAACATCGCCGCTCCCAAGAGCATCCTGAAGAACTCCCAGA | |
| | GGATTATCCTCGAGGAGATTCTGAGCAAGATCCCCACCTCCAACTACAGC | |
| | CACGGCTTCCTGAAGGGGAAGTCCGTGGTGAGCGCCGCCAAGGTGCACGT | |
| | GAAGAAACCCGACCTCCTGATCAACATCGATCTGGAGGACTTCTTCCCCA | |
| | CCATCACCTTCGAGAGGGTGAGAGGCATGTTCAAGAGCTTCGGCTACAGC | |
| | GGATACGTGGCCAGCATGCTGGCCATGATCTGCACCTACTGCGAGAGGAT | |
| | GAAGGTGGAGGTGAGGGGCGAGGAGAAGTACGTCAAGATCAGCGACAGAA | |
| | TTCTGCCCCAGGGCAGCCCTGCCAGCCCCATGATCACCAACATCATCTGC | |
| | GTGAAGCTGGACAAGAGACTGAACGGCCTGAGCACCAAGTATGACTTCAT | |
| | TTATACTCGGTACGCTGACGACATGTCGTTCAGCTTCACCGGCGACATCA | |
| | ACGAACTGAGCGTCGGCAGCTTCATGGGCCTGGTGAGCAAGATCGTGAAG | |
| | GAAGAGGGCTTCAACATCAACAAGGACAAGACCAAGTTCCTGAGAAAGAA | |
| | CAACAGACAGTGCATCACCGGCATCGTGATCAACAACGAGGAGATCGGCG | |
| | TGCCCAAGAAGTGGATCAAGATCCTGAGAGCCGCCATCTACAACGCCAAC | |
| | AAGGTGAAGAACAGCGGCGAGATCCTGAGCAACAAGGTGATCCAGGAGAT | |
| | CAGCGGCATGACCTCCTGGGTGAAGTCCGTCAACGAGGAGAGATACAAGG | |
| | ACATCATCAACGATGCCATGAACCTGATCAACAACccaccaaagaagaaa | |
| | agaaaggtctga | |
| 6342S_N_465 | ATGATGGAGAATCAGGAGAACAACATGAACAACAGAAAGAACTACAGAGA | SEQ ID NO: |
| _R | GGCCGTGAACACCATGGGCAAGAAGGAATTCACCCTGATCAAGATGCAGG | 19224 |
| | AGTACGGCTTCTGGCCCAAGAACCTGCCTACTCCCTACGAGAGGCAGGAA | |
| | AGCGAGACCGAGGAGCAGTACAAGGAGAGAAAGTGCCTGCTCGAGAAGTA | |
| | CGAGAAGGTGATCGACGAGATCAGCAAGCTGTACGAAGAGAAGGACAAGA | |
| | TCAACCTGAAGCTGAGGGAGCTCCAGAAGAAGTACGACGAGACCTGGGAC | |
| | TATGAGCGCATCCGGCTGGATGTGAGCAAGACCATCATGCAGGAGAGCAT | |
| | CGAGAGGAGAGCTGAAAGAAAGCGCCAGCGGGAGCTGGAGAAGGAGCAGC | |
| | GCTCCGAGGAGTGGAAGAAGGAGAAGGAGAACAAGATCGTCTTCATCGGC | |
| | AAGGGGTACAGCAGCCTGCTGTACGACAAGGAGACCGACGAGAACAAGCT | |
| | GCTGCTGCAGGAGCTCCCTATCATCAAGGATGATAAGGAGCTGGCCAACT | |
| | TCCTGGGCATCGAGTACAAGAAGCTGAGATTCCTGGTGTACCACCGGGAC | |
| | GTGATCTCCGTGGACAACTACCACAGATACACCATCCCCAAGAAGAAGGG | |
| | CGGCGTGAGAAACATCGCCGCTCCCAAGAGCATCCTGAAGAACTCCCAGA | |
| | GGATTATCCTCGAGGAGATTCTGAGCAAGATCCCCACCTCCAACTACAGC | |
| | CACGGCTTCCTGAAGGGGAAGTCCGTGGTGAGCGCCGCCAAGGTGCACGT | |
| | GAAGAAACCCGACCTCCTGATCAACATCGATCTGGAGGACTTCTTCCCCA | |
| | CCATCACCTTCGAGAGGGTGAGAGGCATGTTCAAGAGCTTCGGCTACAGC | |
| | GGATACGTGGCCAGCATGCTGGCCATGATCTGCACCTACTGCGAGAGGAT | |
| | GAAGGTGGAGGTGAGGGGCGAGGAGAAGTACGTCAAGATCAGCGACAGAA | |
| | TTCTGCCCCAGGGCAGCCCTGCCAGCCCCATGATCACCAACATCATCTGC | |
| | GTGAAGCTGGACAAGAGACTGAACGGCCTGAGCACCAAGTATGACTTCAT | |
| | TTATACTCGGTACGCTGACGACATGTCGTTCAGCTTCACCGGCGACATCA | |
| | ACGAACTGAGCGTCGGCAGCTTCATGGGCCTGGTGAGCAAGATCGTGAAG | |
| | GAAGAGGGCTTCAACATCAACAAGGACAAGACCAAGTTCCTGAGAAAGAA | |
| | CAACAGACAGTGCATCACCGGCATCGTGATCAACAACGAGGAGATCGGCG | |
| | TGCCCAAGAAGTGGATCAAGATCCTGAGAGCCGCCATCTACAACGCCAAC | |
| | AAGGTGAAGAACAGCGGCGAGATCCTGAGCAACAAGGTGATCCGGGAGAT | |
| | CAGCGGCATGACCTCCTGGGTGAAGTCCGTCAACGAGGAGAGATACAAGG | |
| | ACATCATCAACGATGCCATGAACCTGATCAACAACccaccaaagaagaaa | |
| | agaaaggtctga | |
| 6342S_E_466 | ATGATGGAGAATCAGGAGAACAACATGAACAACAGAAAGAACTACAGAGA | SEQ ID NO: |
| _K | GGCCGTGAACACCATGGGCAAGAAGGAATTCACCCTGATCAAGATGCAGG | 19225 |
| | AGTACGGCTTCTGGCCCAAGAACCTGCCTACTCCCTACGAGAGGCAGGAA | |
| | AGCGAGACCGAGGAGCAGTACAAGGAGAGAAAGTGCCTGCTCGAGAAGTA | |
| | CGAGAAGGTGATCGACGAGATCAGCAAGCTGTACGAAGAGAAGGACAAGA | |
| | TCAACCTGAAGCTGAGGGAGCTCCAGAAGAAGTACGACGAGACCTGGGAC | |
| | TATGAGCGCATCCGGCTGGATGTGAGCAAGACCATCATGCAGGAGAGCAT | |
| | CGAGAGGAGAGCTGAAAGAAAGCGCCAGCGGGAGCTGGAGAAGGAGCAGC | |
| | GCTCCGAGGAGTGGAAGAAGGAGAAGGAGAACAAGATCGTCTTCATCGGC | |
| | AAGGGGTACAGCAGCCTGCTGTACGACAAGGAGACCGACGAGAACAAGCT | |
| | GCTGCTGCAGGAGCTCCCTATCATCAAGGATGATAAGGAGCTGGCCAACT | |
| | TCCTGGGCATCGAGTACAAGAAGCTGAGATTCCTGGTGTACCACCGGGAC | |
| | GTGATCTCCGTGGACAACTACCACAGATACACCATCCCCAAGAAGAAGGG | |
| | CGGCGTGAGAAACATCGCCGCTCCCAAGAGCATCCTGAAGAACTCCCAGA | |
| | GGATTATCCTCGAGGAGATTCTGAGCAAGATCCCCACCTCCAACTACAGC | |
| | CACGGCTTCCTGAAGGGGAAGTCCGTGGTGAGCGCCGCCAAGGTGCACGT | |
| | GAAGAAACCCGACCTCCTGATCAACATCGATCTGGAGGACTTCTTCCCCA | |
| | CCATCACCTTCGAGAGGGTGAGAGGCATGTTCAAGAGCTTCGGCTACAGC | |
| | GGATACGTGGCCAGCATGCTGGCCATGATCTGCACCTACTGCGAGAGGAT | |
| | GAAGGTGGAGGTGAGGGGCGAGGAGAAGTACGTCAAGATCAGCGACAGAA | |
| | TTCTGCCCCAGGGCAGCCCTGCCAGCCCCATGATCACCAACATCATCTGC | |
| | GTGAAGCTGGACAAGAGACTGAACGGCCTGAGCACCAAGTATGACTTCAT | |
| | TTATACTCGGTACGCTGACGACATGTCGTTCAGCTTCACCGGCGACATCA | |
| | ACGAACTGAGCGTCGGCAGCTTCATGGGCCTGGTGAGCAAGATCGTGAAG | |
| | GAAGAGGGCTTCAACATCAACAAGGACAAGACCAAGTTCCTGAGAAAGAA | |
| | CAACAGACAGTGCATCACCGGCATCGTGATCAACAACGAGGAGATCGGCG | |
| | TGCCCAAGAAGTGGATCAAGATCCTGAGAGCCGCCATCTACAACGCCAAC | |
| | AAGGTGAAGAACAGCGGCGAGATCCTGAGCAACAAGGTGATCAACAAGAT | |
| | CAGCGGCATGACCTCCTGGGTGAAGTCCGTCAACGAGGAGAGATACAAGG | |
| | ACATCATCAACGATGCCATGAACCTGATCAACAACccaccaaagaagaaa | |
| | agaaaggtctga | |
| 6342S_E_466 | ATGATGGAGAATCAGGAGAACAACATGAACAACAGAAAGAACTACAGAGA | SEQ ID NO: |
| _N | GGCCGTGAACACCATGGGCAAGAAGGAATTCACCCTGATCAAGATGCAGG | 19226 |
| | AGTACGGCTTCTGGCCCAAGAACCTGCCTACTCCCTACGAGAGGCAGGAA | |
| | AGCGAGACCGAGGAGCAGTACAAGGAGAGAAAGTGCCTGCTCGAGAAGTA | |
| | CGAGAAGGTGATCGACGAGATCAGCAAGCTGTACGAAGAGAAGGACAAGA | |
| | TCAACCTGAAGCTGAGGGAGCTCCAGAAGAAGTACGACGAGACCTGGGAC | |
| | TATGAGCGCATCCGGCTGGATGTGAGCAAGACCATCATGCAGGAGAGCAT | |
| | CGAGAGGAGAGCTGAAAGAAAGCGCCAGCGGGAGCTGGAGAAGGAGCAGC | |
| | GCTCCGAGGAGTGGAAGAAGGAGAAGGAGAACAAGATCGTCTTCATCGGC | |
| | AAGGGGTACAGCAGCCTGCTGTACGACAAGGAGACCGACGAGAACAAGCT | |
| | GCTGCTGCAGGAGCTCCCTATCATCAAGGATGATAAGGAGCTGGCCAACT | |
| | TCCTGGGCATCGAGTACAAGAAGCTGAGATTCCTGGTGTACCACCGGGAC | |
| | GTGATCTCCGTGGACAACTACCACAGATACACCATCCCCAAGAAGAAGGG | |
| | CGGCGTGAGAAACATCGCCGCTCCCAAGAGCATCCTGAAGAACTCCCAGA | |
| | GGATTATCCTCGAGGAGATTCTGAGCAAGATCCCCACCTCCAACTACAGC | |
| | CACGGCTTCCTGAAGGGGAAGTCCGTGGTGAGCGCCGCCAAGGTGCACGT | |
| | GAAGAAACCCGACCTCCTGATCAACATCGATCTGGAGGACTTCTTCCCCA | |
| | CCATCACCTTCGAGAGGGTGAGAGGCATGTTCAAGAGCTTCGGCTACAGC | |
| | GGATACGTGGCCAGCATGCTGGCCATGATCTGCACCTACTGCGAGAGGAT | |
| | GAAGGTGGAGGTGAGGGGCGAGGAGAAGTACGTCAAGATCAGCGACAGAA | |
| | TTCTGCCCCAGGGCAGCCCTGCCAGCCCCATGATCACCAACATCATCTGC | |
| | GTGAAGCTGGACAAGAGACTGAACGGCCTGAGCACCAAGTATGACTTCAT | |
| | TTATACTCGGTACGCTGACGACATGTCGTTCAGCTTCACCGGCGACATCA | |
| | ACGAACTGAGCGTCGGCAGCTTCATGGGCCTGGTGAGCAAGATCGTGAAG | |
| | GAAGAGGGCTTCAACATCAACAAGGACAAGACCAAGTTCCTGAGAAAGAA | |
| | CAACAGACAGTGCATCACCGGCATCGTGATCAACAACGAGGAGATCGGCG | |
| | TGCCCAAGAAGTGGATCAAGATCCTGAGAGCCGCCATCTACAACGCCAAC | |
| | AAGGTGAAGAACAGCGGCGAGATCCTGAGCAACAAGGTGATCAACAACAT | |
| | CAGCGGCATGACCTCCTGGGTGAAGTCCGTCAACGAGGAGAGATACAAGG | |
| | ACATCATCAACGATGCCATGAACCTGATCAACAACccaccaaagaagaaa | |
| | agaaaggtctga | |
| 6342S_E_466 | ATGATGGAGAATCAGGAGAACAACATGAACAACAGAAAGAACTACAGAGA | SEQ ID NO: |
| _O | GGCCGTGAACACCATGGGCAAGAAGGAATTCACCCTGATCAAGATGCAGG | 19227 |
| | AGTACGGCTTCTGGCCCAAGAACCTGCCTACTCCCTACGAGAGGCAGGAA | |
| | AGCGAGACCGAGGAGCAGTACAAGGAGAGAAAGTGCCTGCTCGAGAAGTA | |
| | CGAGAAGGTGATCGACGAGATCAGCAAGCTGTACGAAGAGAAGGACAAGA | |
| | TCAACCTGAAGCTGAGGGAGCTCCAGAAGAAGTACGACGAGACCTGGGAC | |
| | TATGAGCGCATCCGGCTGGATGTGAGCAAGACCATCATGCAGGAGAGCAT | |
| | CGAGAGGAGAGCTGAAAGAAAGCGCCAGCGGGAGCTGGAGAAGGAGCAGC | |
| | GCTCCGAGGAGTGGAAGAAGGAGAAGGAGAACAAGATCGTCTTCATCGGC | |
| | AAGGGGTACAGCAGCCTGCTGTACGACAAGGAGACCGACGAGAACAAGCT | |
| | GCTGCTGCAGGAGCTCCCTATCATCAAGGATGATAAGGAGCTGGCCAACT | |
| | TCCTGGGCATCGAGTACAAGAAGCTGAGATTCCTGGTGTACCACCGGGAC | |
| | GTGATCTCCGTGGACAACTACCACAGATACACCATCCCCAAGAAGAAGGG | |
| | CGGCGTGAGAAACATCGCCGCTCCCAAGAGCATCCTGAAGAACTCCCAGA | |
| | GGATTATCCTCGAGGAGATTCTGAGCAAGATCCCCACCTCCAACTACAGC | |
| | CACGGCTTCCTGAAGGGGAAGTCCGTGGTGAGCGCCGCCAAGGTGCACGT | |
| | GAAGAAACCCGACCTCCTGATCAACATCGATCTGGAGGACTTCTTCCCCA | |
| | CCATCACCTTCGAGAGGGTGAGAGGCATGTTCAAGAGCTTCGGCTACAGC | |
| | GGATACGTGGCCAGCATGCTGGCCATGATCTGCACCTACTGCGAGAGGAT | |
| | GAAGGTGGAGGTGAGGGGCGAGGAGAAGTACGTCAAGATCAGCGACAGAA | |
| | TTCTGCCCCAGGGCAGCCCTGCCAGCCCCATGATCACCAACATCATCTGC | |
| | GTGAAGCTGGACAAGAGACTGAACGGCCTGAGCACCAAGTATGACTTCAT | |
| | TTATACTCGGTACGCTGACGACATGTCGTTCAGCTTCACCGGCGACATCA | |
| | ACGAACTGAGCGTCGGCAGCTTCATGGGCCTGGTGAGCAAGATCGTGAAG | |
| | GAAGAGGGCTTCAACATCAACAAGGACAAGACCAAGTTCCTGAGAAAGAA | |
| | CAACAGACAGTGCATCACCGGCATCGTGATCAACAACGAGGAGATCGGCG | |
| | TGCCCAAGAAGTGGATCAAGATCCTGAGAGCCGCCATCTACAACGCCAAC | |
| | AAGGTGAAGAACAGCGGCGAGATCCTGAGCAACAAGGTGATCAACCAGAT | |
| | CAGCGGCATGACCTCCTGGGTGAAGTCCGTCAACGAGGAGAGATACAAGG | |
| | ACATCATCAACGATGCCATGAACCTGATCAACAACccaccaaagaagaaa | |
| | agaaaggtctga | |
| 6342S_E_466 | ATGATGGAGAATCAGGAGAACAACATGAACAACAGAAAGAACTACAGAGA | SEQ ID NO: |
| _R | GGCCGTGAACACCATGGGCAAGAAGGAATTCACCCTGATCAAGATGCAGG | 19228 |
| | AGTACGGCTTCTGGCCCAAGAACCTGCCTACTCCCTACGAGAGGCAGGAA | |
| | AGCGAGACCGAGGAGCAGTACAAGGAGAGAAAGTGCCTGCTCGAGAAGTA | |
| | CGAGAAGGTGATCGACGAGATCAGCAAGCTGTACGAAGAGAAGGACAAGA | |
| | TCAACCTGAAGCTGAGGGAGCTCCAGAAGAAGTACGACGAGACCTGGGAC | |
| | TATGAGCGCATCCGGCTGGATGTGAGCAAGACCATCATGCAGGAGAGCAT | |
| | CGAGAGGAGAGCTGAAAGAAAGCGCCAGCGGGAGCTGGAGAAGGAGCAGC | |
| | GCTCCGAGGAGTGGAAGAAGGAGAAGGAGAACAAGATCGTCTTCATCGGC | |
| | AAGGGGTACAGCAGCCTGCTGTACGACAAGGAGACCGACGAGAACAAGCT | |
| | GCTGCTGCAGGAGCTCCCTATCATCAAGGATGATAAGGAGCTGGCCAACT | |
| | TCCTGGGCATCGAGTACAAGAAGCTGAGATTCCTGGTGTACCACCGGGAC | |
| | GTGATCTCCGTGGACAACTACCACAGATACACCATCCCCAAGAAGAAGGG | |
| | CGGCGTGAGAAACATCGCCGCTCCCAAGAGCATCCTGAAGAACTCCCAGA | |
| | GGATTATCCTCGAGGAGATTCTGAGCAAGATCCCCACCTCCAACTACAGC | |
| | CACGGCTTCCTGAAGGGGAAGTCCGTGGTGAGCGCCGCCAAGGTGCACGT | |
| | GAAGAAACCCGACCTCCTGATCAACATCGATCTGGAGGACTTCTTCCCCA | |
| | CCATCACCTTCGAGAGGGTGAGAGGCATGTTCAAGAGCTTCGGCTACAGC | |
| | GGATACGTGGCCAGCATGCTGGCCATGATCTGCACCTACTGCGAGAGGAT | |
| | GAAGGTGGAGGTGAGGGGCGAGGAGAAGTACGTCAAGATCAGCGACAGAA | |
| | TTCTGCCCCAGGGCAGCCCTGCCAGCCCCATGATCACCAACATCATCTGC | |
| | GTGAAGCTGGACAAGAGACTGAACGGCCTGAGCACCAAGTATGACTTCAT | |
| | TTATACTCGGTACGCTGACGACATGTCGTTCAGCTTCACCGGCGACATCA | |
| | ACGAACTGAGCGTCGGCAGCTTCATGGGCCTGGTGAGCAAGATCGTGAAG | |
| | GAAGAGGGCTTCAACATCAACAAGGACAAGACCAAGTTCCTGAGAAAGAA | |
| | CAACAGACAGTGCATCACCGGCATCGTGATCAACAACGAGGAGATCGGCG | |
| | TGCCCAAGAAGTGGATCAAGATCCTGAGAGCCGCCATCTACAACGCCAAC | |
| | AAGGTGAAGAACAGCGGCGAGATCCTGAGCAACAAGGTGATCAACCGGAT | |
| | CAGCGGCATGACCTCCTGGGTGAAGTCCGTCAACGAGGAGAGATACAAGG | |
| | ACATCATCAACGATGCCATGAACCTGATCAACAACccaccaaagaagaaa | |
| | agaaaggtctga | |
| 6342S_S_468 | ATGATGGAGAATCAGGAGAACAACATGAACAACAGAAAGAACTACAGAGA | SEQ ID NO: |
| _K | GGCCGTGAACACCATGGGCAAGAAGGAATTCACCCTGATCAAGATGCAGG | 19229 |
| | AGTACGGCTTCTGGCCCAAGAACCTGCCTACTCCCTACGAGAGGCAGGAA | |
| | AGCGAGACCGAGGAGCAGTACAAGGAGAGAAAGTGCCTGCTCGAGAAGTA | |
| | CGAGAAGGTGATCGACGAGATCAGCAAGCTGTACGAAGAGAAGGACAAGA | |
| | TCAACCTGAAGCTGAGGGAGCTCCAGAAGAAGTACGACGAGACCTGGGAC | |
| | TATGAGCGCATCCGGCTGGATGTGAGCAAGACCATCATGCAGGAGAGCAT | |
| | CGAGAGGAGAGCTGAAAGAAAGCGCCAGCGGGAGCTGGAGAAGGAGCAGC | |
| | GCTCCGAGGAGTGGAAGAAGGAGAAGGAGAACAAGATCGTCTTCATCGGC | |
| | AAGGGGTACAGCAGCCTGCTGTACGACAAGGAGACCGACGAGAACAAGCT | |
| | GCTGCTGCAGGAGCTCCCTATCATCAAGGATGATAAGGAGCTGGCCAACT | |
| | TCCTGGGCATCGAGTACAAGAAGCTGAGATTCCTGGTGTACCACCGGGAC | |
| | GTGATCTCCGTGGACAACTACCACAGATACACCATCCCCAAGAAGAAGGG | |
| | CGGCGTGAGAAACATCGCCGCTCCCAAGAGCATCCTGAAGAACTCCCAGA | |
| | GGATTATCCTCGAGGAGATTCTGAGCAAGATCCCCACCTCCAACTACAGC | |
| | CACGGCTTCCTGAAGGGGAAGTCCGTGGTGAGCGCCGCCAAGGTGCACGT | |
| | GAAGAAACCCGACCTCCTGATCAACATCGATCTGGAGGACTTCTTCCCCA | |
| | CCATCACCTTCGAGAGGGTGAGAGGCATGTTCAAGAGCTTCGGCTACAGC | |
| | GGATACGTGGCCAGCATGCTGGCCATGATCTGCACCTACTGCGAGAGGAT | |
| | GAAGGTGGAGGTGAGGGGCGAGGAGAAGTACGTCAAGATCAGCGACAGAA | |
| | TTCTGCCCCAGGGCAGCCCTGCCAGCCCCATGATCACCAACATCATCTGC | |
| | GTGAAGCTGGACAAGAGACTGAACGGCCTGAGCACCAAGTATGACTTCAT | |
| | TTATACTCGGTACGCTGACGACATGTCGTTCAGCTTCACCGGCGACATCA | |
| | ACGAACTGAGCGTCGGCAGCTTCATGGGCCTGGTGAGCAAGATCGTGAAG | |
| | GAAGAGGGCTTCAACATCAACAAGGACAAGACCAAGTTCCTGAGAAAGAA | |
| | CAACAGACAGTGCATCACCGGCATCGTGATCAACAACGAGGAGATCGGCG | |
| | TGCCCAAGAAGTGGATCAAGATCCTGAGAGCCGCCATCTACAACGCCAAC | |
| | AAGGTGAAGAACAGCGGCGAGATCCTGAGCAACAAGGTGATCAACGAGAT | |
| | CAAGGGCATGACCTCCTGGGTGAAGTCCGTCAACGAGGAGAGATACAAGG | |
| | ACATCATCAACGATGCCATGAACCTGATCAACAACccaccaaagaagaaa | |
| | agaaaggtctga | |
| 6342S_S_468 | ATGATGGAGAATCAGGAGAACAACATGAACAACAGAAAGAACTACAGAGA | SEQ ID NO: |
| _N | GGCCGTGAACACCATGGGCAAGAAGGAATTCACCCTGATCAAGATGCAGG | 19230 |
| | AGTACGGCTTCTGGCCCAAGAACCTGCCTACTCCCTACGAGAGGCAGGAA | |
| | AGCGAGACCGAGGAGCAGTACAAGGAGAGAAAGTGCCTGCTCGAGAAGTA | |
| | CGAGAAGGTGATCGACGAGATCAGCAAGCTGTACGAAGAGAAGGACAAGA | |
| | TCAACCTGAAGCTGAGGGAGCTCCAGAAGAAGTACGACGAGACCTGGGAC | |
| | TATGAGCGCATCCGGCTGGATGTGAGCAAGACCATCATGCAGGAGAGCAT | |
| | CGAGAGGAGAGCTGAAAGAAAGCGCCAGCGGGAGCTGGAGAAGGAGCAGC | |
| | GCTCCGAGGAGTGGAAGAAGGAGAAGGAGAACAAGATCGTCTTCATCGGC | |
| | AAGGGGTACAGCAGCCTGCTGTACGACAAGGAGACCGACGAGAACAAGCT | |
| | GCTGCTGCAGGAGCTCCCTATCATCAAGGATGATAAGGAGCTGGCCAACT | |
| | TCCTGGGCATCGAGTACAAGAAGCTGAGATTCCTGGTGTACCACCGGGAC | |
| | GTGATCTCCGTGGACAACTACCACAGATACACCATCCCCAAGAAGAAGGG | |
| | CGGCGTGAGAAACATCGCCGCTCCCAAGAGCATCCTGAAGAACTCCCAGA | |
| | GGATTATCCTCGAGGAGATTCTGAGCAAGATCCCCACCTCCAACTACAGC | |
| | CACGGCTTCCTGAAGGGGAAGTCCGTGGTGAGCGCCGCCAAGGTGCACGT | |
| | GAAGAAACCCGACCTCCTGATCAACATCGATCTGGAGGACTTCTTCCCCA | |
| | CCATCACCTTCGAGAGGGTGAGAGGCATGTTCAAGAGCTTCGGCTACAGC | |
| | GGATACGTGGCCAGCATGCTGGCCATGATCTGCACCTACTGCGAGAGGAT | |
| | GAAGGTGGAGGTGAGGGGCGAGGAGAAGTACGTCAAGATCAGCGACAGAA | |
| | TTCTGCCCCAGGGCAGCCCTGCCAGCCCCATGATCACCAACATCATCTGC | |
| | GTGAAGCTGGACAAGAGACTGAACGGCCTGAGCACCAAGTATGACTTCAT | |
| | TTATACTCGGTACGCTGACGACATGTCGTTCAGCTTCACCGGCGACATCA | |
| | ACGAACTGAGCGTCGGCAGCTTCATGGGCCTGGTGAGCAAGATCGTGAAG | |
| | GAAGAGGGCTTCAACATCAACAAGGACAAGACCAAGTTCCTGAGAAAGAA | |
| | CAACAGACAGTGCATCACCGGCATCGTGATCAACAACGAGGAGATCGGCG | |
| | TGCCCAAGAAGTGGATCAAGATCCTGAGAGCCGCCATCTACAACGCCAAC | |
| | AAGGTGAAGAACAGCGGCGAGATCCTGAGCAACAAGGTGATCAACGAGAT | |
| | CAACGGCATGACCTCCTGGGTGAAGTCCGTCAACGAGGAGAGATACAAGG | |
| | ACATCATCAACGATGCCATGAACCTGATCAACAACccaccaaagaagaaa | |
| | agaaaggtctga | |
| 6342S_S_468 | ATGATGGAGAATCAGGAGAACAACATGAACAACAGAAAGAACTACAGAGA | SEQ ID NO: |
| _Q | GGCCGTGAACACCATGGGCAAGAAGGAATTCACCCTGATCAAGATGCAGG | 19231 |
| | AGTACGGCTTCTGGCCCAAGAACCTGCCTACTCCCTACGAGAGGCAGGAA | |
| | AGCGAGACCGAGGAGCAGTACAAGGAGAGAAAGTGCCTGCTCGAGAAGTA | |
| | CGAGAAGGTGATCGACGAGATCAGCAAGCTGTACGAAGAGAAGGACAAGA | |
| | TCAACCTGAAGCTGAGGGAGCTCCAGAAGAAGTACGACGAGACCTGGGAC | |
| | TATGAGCGCATCCGGCTGGATGTGAGCAAGACCATCATGCAGGAGAGCAT | |
| | CGAGAGGAGAGCTGAAAGAAAGCGCCAGCGGGAGCTGGAGAAGGAGCAGC | |
| | GCTCCGAGGAGTGGAAGAAGGAGAAGGAGAACAAGATCGTCTTCATCGGC | |
| | AAGGGGTACAGCAGCCTGCTGTACGACAAGGAGACCGACGAGAACAAGCT | |
| | GCTGCTGCAGGAGCTCCCTATCATCAAGGATGATAAGGAGCTGGCCAACT | |
| | TCCTGGGCATCGAGTACAAGAAGCTGAGATTCCTGGTGTACCACCGGGAC | |
| | GTGATCTCCGTGGACAACTACCACAGATACACCATCCCCAAGAAGAAGGG | |
| | CGGCGTGAGAAACATCGCCGCTCCCAAGAGCATCCTGAAGAACTCCCAGA | |
| | GGATTATCCTCGAGGAGATTCTGAGCAAGATCCCCACCTCCAACTACAGC | |
| | CACGGCTTCCTGAAGGGGAAGTCCGTGGTGAGCGCCGCCAAGGTGCACGT | |
| | GAAGAAACCCGACCTCCTGATCAACATCGATCTGGAGGACTTCTTCCCCA | |
| | CCATCACCTTCGAGAGGGTGAGAGGCATGTTCAAGAGCTTCGGCTACAGC | |
| | GGATACGTGGCCAGCATGCTGGCCATGATCTGCACCTACTGCGAGAGGAT | |
| | GAAGGTGGAGGTGAGGGGCGAGGAGAAGTACGTCAAGATCAGCGACAGAA | |
| | TTCTGCCCCAGGGCAGCCCTGCCAGCCCCATGATCACCAACATCATCTGC | |
| | GTGAAGCTGGACAAGAGACTGAACGGCCTGAGCACCAAGTATGACTTCAT | |
| | TTATACTCGGTACGCTGACGACATGTCGTTCAGCTTCACCGGCGACATCA | |
| | ACGAACTGAGCGTCGGCAGCTTCATGGGCCTGGTGAGCAAGATCGTGAAG | |
| | GAAGAGGGCTTCAACATCAACAAGGACAAGACCAAGTTCCTGAGAAAGAA | |
| | CAACAGACAGTGCATCACCGGCATCGTGATCAACAACGAGGAGATCGGCG | |
| | TGCCCAAGAAGTGGATCAAGATCCTGAGAGCCGCCATCTACAACGCCAAC | |
| | AAGGTGAAGAACAGCGGCGAGATCCTGAGCAACAAGGTGATCAACGAGAT | |
| | CCAGGGCATGACCTCCTGGGTGAAGTCCGTCAACGAGGAGAGATACAAGG | |
| | ACATCATCAACGATGCCATGAACCTGATCAACAACccaccaaagaagaaa | |
| | agaaaggtctga | |
| 6342S_S_468 | ATGATGGAGAATCAGGAGAACAACATGAACAACAGAAAGAACTACAGAGA | SEQ ID NO: |
| _R | GGCCGTGAACACCATGGGCAAGAAGGAATTCACCCTGATCAAGATGCAGG | 19232 |
| | AGTACGGCTTCTGGCCCAAGAACCTGCCTACTCCCTACGAGAGGCAGGAA | |
| | AGCGAGACCGAGGAGCAGTACAAGGAGAGAAAGTGCCTGCTCGAGAAGTA | |
| | CGAGAAGGTGATCGACGAGATCAGCAAGCTGTACGAAGAGAAGGACAAGA | |
| | TCAACCTGAAGCTGAGGGAGCTCCAGAAGAAGTACGACGAGACCTGGGAC | |
| | TATGAGCGCATCCGGCTGGATGTGAGCAAGACCATCATGCAGGAGAGCAT | |
| | CGAGAGGAGAGCTGAAAGAAAGCGCCAGCGGGAGCTGGAGAAGGAGCAGC | |
| | GCTCCGAGGAGTGGAAGAAGGAGAAGGAGAACAAGATCGTCTTCATCGGC | |
| | AAGGGGTACAGCAGCCTGCTGTACGACAAGGAGACCGACGAGAACAAGCT | |
| | GCTGCTGCAGGAGCTCCCTATCATCAAGGATGATAAGGAGCTGGCCAACT | |
| | TCCTGGGCATCGAGTACAAGAAGCTGAGATTCCTGGTGTACCACCGGGAC | |
| | GTGATCTCCGTGGACAACTACCACAGATACACCATCCCCAAGAAGAAGGG | |
| | CGGCGTGAGAAACATCGCCGCTCCCAAGAGCATCCTGAAGAACTCCCAGA | |
| | GGATTATCCTCGAGGAGATTCTGAGCAAGATCCCCACCTCCAACTACAGC | |
| | CACGGCTTCCTGAAGGGGAAGTCCGTGGTGAGCGCCGCCAAGGTGCACGT | |
| | GAAGAAACCCGACCTCCTGATCAACATCGATCTGGAGGACTTCTTCCCCA | |
| | CCATCACCTTCGAGAGGGTGAGAGGCATGTTCAAGAGCTTCGGCTACAGC | |
| | GGATACGTGGCCAGCATGCTGGCCATGATCTGCACCTACTGCGAGAGGAT | |
| | GAAGGTGGAGGTGAGGGGCGAGGAGAAGTACGTCAAGATCAGCGACAGAA | |
| | TTCTGCCCCAGGGCAGCCCTGCCAGCCCCATGATCACCAACATCATCTGC | |
| | GTGAAGCTGGACAAGAGACTGAACGGCCTGAGCACCAAGTATGACTTCAT | |
| | TTATACTCGGTACGCTGACGACATGTCGTTCAGCTTCACCGGCGACATCA | |
| | ACGAACTGAGCGTCGGCAGCTTCATGGGCCTGGTGAGCAAGATCGTGAAG | |
| | GAAGAGGGCTTCAACATCAACAAGGACAAGACCAAGTTCCTGAGAAAGAA | |
| | CAACAGACAGTGCATCACCGGCATCGTGATCAACAACGAGGAGATCGGCG | |
| | TGCCCAAGAAGTGGATCAAGATCCTGAGAGCCGCCATCTACAACGCCAAC | |
| | AAGGTGAAGAACAGCGGCGAGATCCTGAGCAACAAGGTGATCAACGAGAT | |
| | CCGGGGCATGACCTCCTGGGTGAAGTCCGTCAACGAGGAGAGATACAAGG | |
| | ACATCATCAACGATGCCATGAACCTGATCAACAACccaccaaagaagaaa | |
| | agaaaggtctga | |
| 6342S_M_470 | ATGATGGAGAATCAGGAGAACAACATGAACAACAGAAAGAACTACAGAGA | SEQ ID NO: |
| _K | GGCCGTGAACACCATGGGCAAGAAGGAATTCACCCTGATCAAGATGCAGG | 19233 |
| | AGTACGGCTTCTGGCCCAAGAACCTGCCTACTCCCTACGAGAGGCAGGAA | |
| | AGCGAGACCGAGGAGCAGTACAAGGAGAGAAAGTGCCTGCTCGAGAAGTA | |
| | CGAGAAGGTGATCGACGAGATCAGCAAGCTGTACGAAGAGAAGGACAAGA | |
| | TCAACCTGAAGCTGAGGGAGCTCCAGAAGAAGTACGACGAGACCTGGGAC | |
| | TATGAGCGCATCCGGCTGGATGTGAGCAAGACCATCATGCAGGAGAGCAT | |
| | CGAGAGGAGAGCTGAAAGAAAGCGCCAGCGGGAGCTGGAGAAGGAGCAGC | |
| | GCTCCGAGGAGTGGAAGAAGGAGAAGGAGAACAAGATCGTCTTCATCGGC | |
| | AAGGGGTACAGCAGCCTGCTGTACGACAAGGAGACCGACGAGAACAAGCT | |
| | GCTGCTGCAGGAGCTCCCTATCATCAAGGATGATAAGGAGCTGGCCAACT | |
| | TCCTGGGCATCGAGTACAAGAAGCTGAGATTCCTGGTGTACCACCGGGAC | |
| | GTGATCTCCGTGGACAACTACCACAGATACACCATCCCCAAGAAGAAGGG | |
| | CGGCGTGAGAAACATCGCCGCTCCCAAGAGCATCCTGAAGAACTCCCAGA | |
| | GGATTATCCTCGAGGAGATTCTGAGCAAGATCCCCACCTCCAACTACAGC | |
| | CACGGCTTCCTGAAGGGGAAGTCCGTGGTGAGCGCCGCCAAGGTGCACGT | |
| | GAAGAAACCCGACCTCCTGATCAACATCGATCTGGAGGACTTCTTCCCCA | |
| | CCATCACCTTCGAGAGGGTGAGAGGCATGTTCAAGAGCTTCGGCTACAGC | |
| | GGATACGTGGCCAGCATGCTGGCCATGATCTGCACCTACTGCGAGAGGAT | |
| | GAAGGTGGAGGTGAGGGGCGAGGAGAAGTACGTCAAGATCAGCGACAGAA | |
| | TTCTGCCCCAGGGCAGCCCTGCCAGCCCCATGATCACCAACATCATCTGC | |
| | GTGAAGCTGGACAAGAGACTGAACGGCCTGAGCACCAAGTATGACTTCAT | |
| | TTATACTCGGTACGCTGACGACATGTCGTTCAGCTTCACCGGCGACATCA | |
| | ACGAACTGAGCGTCGGCAGCTTCATGGGCCTGGTGAGCAAGATCGTGAAG | |
| | GAAGAGGGCTTCAACATCAACAAGGACAAGACCAAGTTCCTGAGAAAGAA | |
| | CAACAGACAGTGCATCACCGGCATCGTGATCAACAACGAGGAGATCGGCG | |
| | TGCCCAAGAAGTGGATCAAGATCCTGAGAGCCGCCATCTACAACGCCAAC | |
| | AAGGTGAAGAACAGCGGCGAGATCCTGAGCAACAAGGTGATCAACGAGAT | |
| | CAGCGGCAAGACCTCCTGGGTGAAGTCCGTCAACGAGGAGAGATACAAGG | |
| | ACATCATCAACGATGCCATGAACCTGATCAACAACccaccaaagaagaaa | |
| | agaaaggtctga | |
| 6342S_M_470 | ATGATGGAGAATCAGGAGAACAACATGAACAACAGAAAGAACTACAGAGA | SEQ ID NO: |
| _N | GGCCGTGAACACCATGGGCAAGAAGGAATTCACCCTGATCAAGATGCAGG | 19234 |
| | AGTACGGCTTCTGGCCCAAGAACCTGCCTACTCCCTACGAGAGGCAGGAA | |
| | AGCGAGACCGAGGAGCAGTACAAGGAGAGAAAGTGCCTGCTCGAGAAGTA | |
| | CGAGAAGGTGATCGACGAGATCAGCAAGCTGTACGAAGAGAAGGACAAGA | |
| | TCAACCTGAAGCTGAGGGAGCTCCAGAAGAAGTACGACGAGACCTGGGAC | |
| | TATGAGCGCATCCGGCTGGATGTGAGCAAGACCATCATGCAGGAGAGCAT | |
| | CGAGAGGAGAGCTGAAAGAAAGCGCCAGCGGGAGCTGGAGAAGGAGCAGC | |
| | GCTCCGAGGAGTGGAAGAAGGAGAAGGAGAACAAGATCGTCTTCATCGGC | |
| | AAGGGGTACAGCAGCCTGCTGTACGACAAGGAGACCGACGAGAACAAGCT | |
| | GCTGCTGCAGGAGCTCCCTATCATCAAGGATGATAAGGAGCTGGCCAACT | |
| | TCCTGGGCATCGAGTACAAGAAGCTGAGATTCCTGGTGTACCACCGGGAC | |
| | GTGATCTCCGTGGACAACTACCACAGATACACCATCCCCAAGAAGAAGGG | |
| | CGGCGTGAGAAACATCGCCGCTCCCAAGAGCATCCTGAAGAACTCCCAGA | |
| | GGATTATCCTCGAGGAGATTCTGAGCAAGATCCCCACCTCCAACTACAGC | |
| | CACGGCTTCCTGAAGGGGAAGTCCGTGGTGAGCGCCGCCAAGGTGCACGT | |
| | GAAGAAACCCGACCTCCTGATCAACATCGATCTGGAGGACTTCTTCCCCA | |
| | CCATCACCTTCGAGAGGGTGAGAGGCATGTTCAAGAGCTTCGGCTACAGC | |
| | GGATACGTGGCCAGCATGCTGGCCATGATCTGCACCTACTGCGAGAGGAT | |
| | GAAGGTGGAGGTGAGGGGCGAGGAGAAGTACGTCAAGATCAGCGACAGAA | |
| | TTCTGCCCCAGGGCAGCCCTGCCAGCCCCATGATCACCAACATCATCTGC | |
| | GTGAAGCTGGACAAGAGACTGAACGGCCTGAGCACCAAGTATGACTTCAT | |
| | TTATACTCGGTACGCTGACGACATGTCGTTCAGCTTCACCGGCGACATCA | |
| | ACGAACTGAGCGTCGGCAGCTTCATGGGCCTGGTGAGCAAGATCGTGAAG | |
| | GAAGAGGGCTTCAACATCAACAAGGACAAGACCAAGTTCCTGAGAAAGAA | |
| | CAACAGACAGTGCATCACCGGCATCGTGATCAACAACGAGGAGATCGGCG | |
| | TGCCCAAGAAGTGGATCAAGATCCTGAGAGCCGCCATCTACAACGCCAAC | |
| | AAGGTGAAGAACAGCGGCGAGATCCTGAGCAACAAGGTGATCAACGAGAT | |
| | CAGCGGCAACACCTCCTGGGTGAAGTCCGTCAACGAGGAGAGATACAAGG | |
| | ACATCATCAACGATGCCATGAACCTGATCAACAACccaccaaagaagaaa | |
| | agaaaggtctga | |
| 6342S_M_470 | ATGATGGAGAATCAGGAGAACAACATGAACAACAGAAAGAACTACAGAGA | SEQ ID NO: |
| _Q | GGCCGTGAACACCATGGGCAAGAAGGAATTCACCCTGATCAAGATGCAGG | 19235 |
| | AGTACGGCTTCTGGCCCAAGAACCTGCCTACTCCCTACGAGAGGCAGGAA | |
| | AGCGAGACCGAGGAGCAGTACAAGGAGAGAAAGTGCCTGCTCGAGAAGTA | |
| | CGAGAAGGTGATCGACGAGATCAGCAAGCTGTACGAAGAGAAGGACAAGA | |
| | TCAACCTGAAGCTGAGGGAGCTCCAGAAGAAGTACGACGAGACCTGGGAC | |
| | TATGAGCGCATCCGGCTGGATGTGAGCAAGACCATCATGCAGGAGAGCAT | |
| | CGAGAGGAGAGCTGAAAGAAAGCGCCAGCGGGAGCTGGAGAAGGAGCAGC | |
| | GCTCCGAGGAGTGGAAGAAGGAGAAGGAGAACAAGATCGTCTTCATCGGC | |
| | AAGGGGTACAGCAGCCTGCTGTACGACAAGGAGACCGACGAGAACAAGCT | |
| | GCTGCTGCAGGAGCTCCCTATCATCAAGGATGATAAGGAGCTGGCCAACT | |
| | TCCTGGGCATCGAGTACAAGAAGCTGAGATTCCTGGTGTACCACCGGGAC | |
| | GTGATCTCCGTGGACAACTACCACAGATACACCATCCCCAAGAAGAAGGG | |
| | CGGCGTGAGAAACATCGCCGCTCCCAAGAGCATCCTGAAGAACTCCCAGA | |
| | GGATTATCCTCGAGGAGATTCTGAGCAAGATCCCCACCTCCAACTACAGC | |
| | CACGGCTTCCTGAAGGGGAAGTCCGTGGTGAGCGCCGCCAAGGTGCACGT | |
| | GAAGAAACCCGACCTCCTGATCAACATCGATCTGGAGGACTTCTTCCCCA | |
| | CCATCACCTTCGAGAGGGTGAGAGGCATGTTCAAGAGCTTCGGCTACAGC | |
| | GGATACGTGGCCAGCATGCTGGCCATGATCTGCACCTACTGCGAGAGGAT | |
| | GAAGGTGGAGGTGAGGGGCGAGGAGAAGTACGTCAAGATCAGCGACAGAA | |
| | TTCTGCCCCAGGGCAGCCCTGCCAGCCCCATGATCACCAACATCATCTGC | |
| | GTGAAGCTGGACAAGAGACTGAACGGCCTGAGCACCAAGTATGACTTCAT | |
| | TTATACTCGGTACGCTGACGACATGTCGTTCAGCTTCACCGGCGACATCA | |
| | ACGAACTGAGCGTCGGCAGCTTCATGGGCCTGGTGAGCAAGATCGTGAAG | |
| | GAAGAGGGCTTCAACATCAACAAGGACAAGACCAAGTTCCTGAGAAAGAA | |
| | CAACAGACAGTGCATCACCGGCATCGTGATCAACAACGAGGAGATCGGCG | |
| | TGCCCAAGAAGTGGATCAAGATCCTGAGAGCCGCCATCTACAACGCCAAC | |
| | AAGGTGAAGAACAGCGGCGAGATCCTGAGCAACAAGGTGATCAACGAGAT | |
| | CAGCGGCCAGACCTCCTGGGTGAAGTCCGTCAACGAGGAGAGATACAAGG | |
| | ACATCATCAACGATGCCATGAACCTGATCAACAACccaccaaagaagaaa | |
| | agaaaggtctga | |
| 6342S_M_470 | ATGATGGAGAATCAGGAGAACAACATGAACAACAGAAAGAACTACAGAGA | SEQ ID NO: |
| _R | GGCCGTGAACACCATGGGCAAGAAGGAATTCACCCTGATCAAGATGCAGG | 19236 |
| | AGTACGGCTTCTGGCCCAAGAACCTGCCTACTCCCTACGAGAGGCAGGAA | |
| | AGCGAGACCGAGGAGCAGTACAAGGAGAGAAAGTGCCTGCTCGAGAAGTA | |
| | CGAGAAGGTGATCGACGAGATCAGCAAGCTGTACGAAGAGAAGGACAAGA | |
| | TCAACCTGAAGCTGAGGGAGCTCCAGAAGAAGTACGACGAGACCTGGGAC | |
| | TATGAGCGCATCCGGCTGGATGTGAGCAAGACCATCATGCAGGAGAGCAT | |
| | CGAGAGGAGAGCTGAAAGAAAGCGCCAGCGGGAGCTGGAGAAGGAGCAGC | |
| | GCTCCGAGGAGTGGAAGAAGGAGAAGGAGAACAAGATCGTCTTCATCGGC | |
| | AAGGGGTACAGCAGCCTGCTGTACGACAAGGAGACCGACGAGAACAAGCT | |
| | GCTGCTGCAGGAGCTCCCTATCATCAAGGATGATAAGGAGCTGGCCAACT | |
| | TCCTGGGCATCGAGTACAAGAAGCTGAGATTCCTGGTGTACCACCGGGAC | |
| | GTGATCTCCGTGGACAACTACCACAGATACACCATCCCCAAGAAGAAGGG | |
| | CGGCGTGAGAAACATCGCCGCTCCCAAGAGCATCCTGAAGAACTCCCAGA | |
| | GGATTATCCTCGAGGAGATTCTGAGCAAGATCCCCACCTCCAACTACAGC | |
| | CACGGCTTCCTGAAGGGGAAGTCCGTGGTGAGCGCCGCCAAGGTGCACGT | |
| | GAAGAAACCCGACCTCCTGATCAACATCGATCTGGAGGACTTCTTCCCCA | |
| | CCATCACCTTCGAGAGGGTGAGAGGCATGTTCAAGAGCTTCGGCTACAGC | |
| | GGATACGTGGCCAGCATGCTGGCCATGATCTGCACCTACTGCGAGAGGAT | |
| | GAAGGTGGAGGTGAGGGGCGAGGAGAAGTACGTCAAGATCAGCGACAGAA | |
| | TTCTGCCCCAGGGCAGCCCTGCCAGCCCCATGATCACCAACATCATCTGC | |
| | GTGAAGCTGGACAAGAGACTGAACGGCCTGAGCACCAAGTATGACTTCAT | |
| | TTATACTCGGTACGCTGACGACATGTCGTTCAGCTTCACCGGCGACATCA | |
| | ACGAACTGAGCGTCGGCAGCTTCATGGGCCTGGTGAGCAAGATCGTGAAG | |
| | GAAGAGGGCTTCAACATCAACAAGGACAAGACCAAGTTCCTGAGAAAGAA | |
| | CAACAGACAGTGCATCACCGGCATCGTGATCAACAACGAGGAGATCGGCG | |
| | TGCCCAAGAAGTGGATCAAGATCCTGAGAGCCGCCATCTACAACGCCAAC | |
| | AAGGTGAAGAACAGCGGCGAGATCCTGAGCAACAAGGTGATCAACGAGAT | |
| | CAGCGGCCGGACCTCCTGGGTGAAGTCCGTCAACGAGGAGAGATACAAGG | |
| | ACATCATCAACGATGCCATGAACCTGATCAACAACccaccaaagaagaaa | |
| | agaaaggtctga | |
| 6342S_S_472_ | ATGATGGAGAATCAGGAGAACAACATGAACAACAGAAAGAACTACAGAGA | SEQ ID NO: |
| G | GGCCGTGAACACCATGGGCAAGAAGGAATTCACCCTGATCAAGATGCAGG | 19237 |
| | AGTACGGCTTCTGGCCCAAGAACCTGCCTACTCCCTACGAGAGGCAGGAA | |
| | AGCGAGACCGAGGAGCAGTACAAGGAGAGAAAGTGCCTGCTCGAGAAGTA | |
| | CGAGAAGGTGATCGACGAGATCAGCAAGCTGTACGAAGAGAAGGACAAGA | |
| | TCAACCTGAAGCTGAGGGAGCTCCAGAAGAAGTACGACGAGACCTGGGAC | |
| | TATGAGCGCATCCGGCTGGATGTGAGCAAGACCATCATGCAGGAGAGCAT | |
| | CGAGAGGAGAGCTGAAAGAAAGCGCCAGCGGGAGCTGGAGAAGGAGCAGC | |
| | GCTCCGAGGAGTGGAAGAAGGAGAAGGAGAACAAGATCGTCTTCATCGGC | |
| | AAGGGGTACAGCAGCCTGCTGTACGACAAGGAGACCGACGAGAACAAGCT | |
| | GCTGCTGCAGGAGCTCCCTATCATCAAGGATGATAAGGAGCTGGCCAACT | |
| | TCCTGGGCATCGAGTACAAGAAGCTGAGATTCCTGGTGTACCACCGGGAC | |
| | GTGATCTCCGTGGACAACTACCACAGATACACCATCCCCAAGAAGAAGGG | |
| | CGGCGTGAGAAACATCGCCGCTCCCAAGAGCATCCTGAAGAACTCCCAGA | |
| | GGATTATCCTCGAGGAGATTCTGAGCAAGATCCCCACCTCCAACTACAGC | |
| | CACGGCTTCCTGAAGGGGAAGTCCGTGGTGAGCGCCGCCAAGGTGCACGT | |
| | GAAGAAACCCGACCTCCTGATCAACATCGATCTGGAGGACTTCTTCCCCA | |
| | CCATCACCTTCGAGAGGGTGAGAGGCATGTTCAAGAGCTTCGGCTACAGC | |
| | GGATACGTGGCCAGCATGCTGGCCATGATCTGCACCTACTGCGAGAGGAT | |
| | GAAGGTGGAGGTGAGGGGCGAGGAGAAGTACGTCAAGATCAGCGACAGAA | |
| | TTCTGCCCCAGGGCAGCCCTGCCAGCCCCATGATCACCAACATCATCTGC | |
| | GTGAAGCTGGACAAGAGACTGAACGGCCTGAGCACCAAGTATGACTTCAT | |
| | TTATACTCGGTACGCTGACGACATGTCGTTCAGCTTCACCGGCGACATCA | |
| | ACGAACTGAGCGTCGGCAGCTTCATGGGCCTGGTGAGCAAGATCGTGAAG | |
| | GAAGAGGGCTTCAACATCAACAAGGACAAGACCAAGTTCCTGAGAAAGAA | |
| | CAACAGACAGTGCATCACCGGCATCGTGATCAACAACGAGGAGATCGGCG | |
| | TGCCCAAGAAGTGGATCAAGATCCTGAGAGCCGCCATCTACAACGCCAAC | |
| | AAGGTGAAGAACAGCGGCGAGATCCTGAGCAACAAGGTGATCAACGAGAT | |
| | CAGCGGCATGACCGGCTGGGTGAAGTCCGTCAACGAGGAGAGATACAAGG | |
| | ACATCATCAACGATGCCATGAACCTGATCAACAACccaccaaagaagaaa | |
| | agaaaggtctga | |
| 6342S_S_472_P | ATGATGGAGAATCAGGAGAACAACATGAACAACAGAAAGAACTACAGAGA | SEQ ID NO: |
| | GGCCGTGAACACCATGGGCAAGAAGGAATTCACCCTGATCAAGATGCAGG | 19238 |
| | AGTACGGCTTCTGGCCCAAGAACCTGCCTACTCCCTACGAGAGGCAGGAA | |
| | AGCGAGACCGAGGAGCAGTACAAGGAGAGAAAGTGCCTGCTCGAGAAGTA | |
| | CGAGAAGGTGATCGACGAGATCAGCAAGCTGTACGAAGAGAAGGACAAGA | |
| | TCAACCTGAAGCTGAGGGAGCTCCAGAAGAAGTACGACGAGACCTGGGAC | |
| | TATGAGCGCATCCGGCTGGATGTGAGCAAGACCATCATGCAGGAGAGCAT | |
| | CGAGAGGAGAGCTGAAAGAAAGCGCCAGCGGGAGCTGGAGAAGGAGCAGC | |
| | GCTCCGAGGAGTGGAAGAAGGAGAAGGAGAACAAGATCGTCTTCATCGGC | |
| | AAGGGGTACAGCAGCCTGCTGTACGACAAGGAGACCGACGAGAACAAGCT | |
| | GCTGCTGCAGGAGCTCCCTATCATCAAGGATGATAAGGAGCTGGCCAACT | |
| | TCCTGGGCATCGAGTACAAGAAGCTGAGATTCCTGGTGTACCACCGGGAC | |
| | GTGATCTCCGTGGACAACTACCACAGATACACCATCCCCAAGAAGAAGGG | |
| | CGGCGTGAGAAACATCGCCGCTCCCAAGAGCATCCTGAAGAACTCCCAGA | |
| | GGATTATCCTCGAGGAGATTCTGAGCAAGATCCCCACCTCCAACTACAGC | |
| | CACGGCTTCCTGAAGGGGAAGTCCGTGGTGAGCGCCGCCAAGGTGCACGT | |
| | GAAGAAACCCGACCTCCTGATCAACATCGATCTGGAGGACTTCTTCCCCA | |
| | CCATCACCTTCGAGAGGGTGAGAGGCATGTTCAAGAGCTTCGGCTACAGC | |
| | GGATACGTGGCCAGCATGCTGGCCATGATCTGCACCTACTGCGAGAGGAT | |
| | GAAGGTGGAGGTGAGGGGCGAGGAGAAGTACGTCAAGATCAGCGACAGAA | |
| | TTCTGCCCCAGGGCAGCCCTGCCAGCCCCATGATCACCAACATCATCTGC | |
| | GTGAAGCTGGACAAGAGACTGAACGGCCTGAGCACCAAGTATGACTTCAT | |
| | TTATACTCGGTACGCTGACGACATGTCGTTCAGCTTCACCGGCGACATCA | |
| | ACGAACTGAGCGTCGGCAGCTTCATGGGCCTGGTGAGCAAGATCGTGAAG | |
| | GAAGAGGGCTTCAACATCAACAAGGACAAGACCAAGTTCCTGAGAAAGAA | |
| | CAACAGACAGTGCATCACCGGCATCGTGATCAACAACGAGGAGATCGGCG | |
| | TGCCCAAGAAGTGGATCAAGATCCTGAGAGCCGCCATCTACAACGCCAAC | |
| | AAGGTGAAGAACAGCGGCGAGATCCTGAGCAACAAGGTGATCAACGAGAT | |
| | CAGCGGCATGACCCCCTGGGTGAAGTCCGTCAACGAGGAGAGATACAAGG | |
| | ACATCATCAACGATGCCATGAACCTGATCAACAACccaccaaagaagaaa | |
| | agaaaggtctga | |
| 6342S_W_473 | ATGATGGAGAATCAGGAGAACAACATGAACAACAGAAAGAACTACAGAGA | SEQ ID NO: |
| _F | GGCCGTGAACACCATGGGCAAGAAGGAATTCACCCTGATCAAGATGCAGG | 19239 |
| | AGTACGGCTTCTGGCCCAAGAACCTGCCTACTCCCTACGAGAGGCAGGAA | |
| | AGCGAGACCGAGGAGCAGTACAAGGAGAGAAAGTGCCTGCTCGAGAAGTA | |
| | CGAGAAGGTGATCGACGAGATCAGCAAGCTGTACGAAGAGAAGGACAAGA | |
| | TCAACCTGAAGCTGAGGGAGCTCCAGAAGAAGTACGACGAGACCTGGGAC | |
| | TATGAGCGCATCCGGCTGGATGTGAGCAAGACCATCATGCAGGAGAGCAT | |
| | CGAGAGGAGAGCTGAAAGAAAGCGCCAGCGGGAGCTGGAGAAGGAGCAGC | |
| | GCTCCGAGGAGTGGAAGAAGGAGAAGGAGAACAAGATCGTCTTCATCGGC | |
| | AAGGGGTACAGCAGCCTGCTGTACGACAAGGAGACCGACGAGAACAAGCT | |
| | GCTGCTGCAGGAGCTCCCTATCATCAAGGATGATAAGGAGCTGGCCAACT | |
| | TCCTGGGCATCGAGTACAAGAAGCTGAGATTCCTGGTGTACCACCGGGAC | |
| | GTGATCTCCGTGGACAACTACCACAGATACACCATCCCCAAGAAGAAGGG | |
| | CGGCGTGAGAAACATCGCCGCTCCCAAGAGCATCCTGAAGAACTCCCAGA | |
| | GGATTATCCTCGAGGAGATTCTGAGCAAGATCCCCACCTCCAACTACAGC | |
| | CACGGCTTCCTGAAGGGGAAGTCCGTGGTGAGCGCCGCCAAGGTGCACGT | |
| | GAAGAAACCCGACCTCCTGATCAACATCGATCTGGAGGACTTCTTCCCCA | |
| | CCATCACCTTCGAGAGGGTGAGAGGCATGTTCAAGAGCTTCGGCTACAGC | |
| | GGATACGTGGCCAGCATGCTGGCCATGATCTGCACCTACTGCGAGAGGAT | |
| | GAAGGTGGAGGTGAGGGGCGAGGAGAAGTACGTCAAGATCAGCGACAGAA | |
| | TTCTGCCCCAGGGCAGCCCTGCCAGCCCCATGATCACCAACATCATCTGC | |
| | GTGAAGCTGGACAAGAGACTGAACGGCCTGAGCACCAAGTATGACTTCAT | |
| | TTATACTCGGTACGCTGACGACATGTCGTTCAGCTTCACCGGCGACATCA | |
| | ACGAACTGAGCGTCGGCAGCTTCATGGGCCTGGTGAGCAAGATCGTGAAG | |
| | GAAGAGGGCTTCAACATCAACAAGGACAAGACCAAGTTCCTGAGAAAGAA | |
| | CAACAGACAGTGCATCACCGGCATCGTGATCAACAACGAGGAGATCGGCG | |
| | TGCCCAAGAAGTGGATCAAGATCCTGAGAGCCGCCATCTACAACGCCAAC | |
| | AAGGTGAAGAACAGCGGCGAGATCCTGAGCAACAAGGTGATCAACGAGAT | |
| | CAGCGGCATGACCTCCTTCGTGAAGTCCGTCAACGAGGAGAGATACAAGG | |
| | ACATCATCAACGATGCCATGAACCTGATCAACAACccaccaaagaagaaa | |
| | agaaaggtctga | |
| 6342S_W_473 | ATGATGGAGAATCAGGAGAACAACATGAACAACAGAAAGAACTACAGAGA | SEQ ID NO: |
| _K | GGCCGTGAACACCATGGGCAAGAAGGAATTCACCCTGATCAAGATGCAGG | 19240 |
| | AGTACGGCTTCTGGCCCAAGAACCTGCCTACTCCCTACGAGAGGCAGGAA | |
| | AGCGAGACCGAGGAGCAGTACAAGGAGAGAAAGTGCCTGCTCGAGAAGTA | |
| | CGAGAAGGTGATCGACGAGATCAGCAAGCTGTACGAAGAGAAGGACAAGA | |
| | TCAACCTGAAGCTGAGGGAGCTCCAGAAGAAGTACGACGAGACCTGGGAC | |
| | TATGAGCGCATCCGGCTGGATGTGAGCAAGACCATCATGCAGGAGAGCAT | |
| | CGAGAGGAGAGCTGAAAGAAAGCGCCAGCGGGAGCTGGAGAAGGAGCAGC | |
| | GCTCCGAGGAGTGGAAGAAGGAGAAGGAGAACAAGATCGTCTTCATCGGC | |
| | AAGGGGTACAGCAGCCTGCTGTACGACAAGGAGACCGACGAGAACAAGCT | |
| | GCTGCTGCAGGAGCTCCCTATCATCAAGGATGATAAGGAGCTGGCCAACT | |
| | TCCTGGGCATCGAGTACAAGAAGCTGAGATTCCTGGTGTACCACCGGGAC | |
| | GTGATCTCCGTGGACAACTACCACAGATACACCATCCCCAAGAAGAAGGG | |
| | CGGCGTGAGAAACATCGCCGCTCCCAAGAGCATCCTGAAGAACTCCCAGA | |
| | GGATTATCCTCGAGGAGATTCTGAGCAAGATCCCCACCTCCAACTACAGC | |
| | CACGGCTTCCTGAAGGGGAAGTCCGTGGTGAGCGCCGCCAAGGTGCACGT | |
| | GAAGAAACCCGACCTCCTGATCAACATCGATCTGGAGGACTTCTTCCCCA | |
| | CCATCACCTTCGAGAGGGTGAGAGGCATGTTCAAGAGCTTCGGCTACAGC | |
| | GGATACGTGGCCAGCATGCTGGCCATGATCTGCACCTACTGCGAGAGGAT | |
| | GAAGGTGGAGGTGAGGGGCGAGGAGAAGTACGTCAAGATCAGCGACAGAA | |
| | TTCTGCCCCAGGGCAGCCCTGCCAGCCCCATGATCACCAACATCATCTGC | |
| | GTGAAGCTGGACAAGAGACTGAACGGCCTGAGCACCAAGTATGACTTCAT | |
| | TTATACTCGGTACGCTGACGACATGTCGTTCAGCTTCACCGGCGACATCA | |
| | ACGAACTGAGCGTCGGCAGCTTCATGGGCCTGGTGAGCAAGATCGTGAAG | |
| | GAAGAGGGCTTCAACATCAACAAGGACAAGACCAAGTTCCTGAGAAAGAA | |
| | CAACAGACAGTGCATCACCGGCATCGTGATCAACAACGAGGAGATCGGCG | |
| | TGCCCAAGAAGTGGATCAAGATCCTGAGAGCCGCCATCTACAACGCCAAC | |
| | AAGGTGAAGAACAGCGGCGAGATCCTGAGCAACAAGGTGATCAACGAGAT | |
| | CAGCGGCATGACCTCCAAGGTGAAGTCCGTCAACGAGGAGAGATACAAGG | |
| | ACATCATCAACGATGCCATGAACCTGATCAACAACccaccaaagaagaaa | |
| | agaaaggtctga | |
| 6342S_W_473_ | ATGATGGAGAATCAGGAGAACAACATGAACAACAGAAAGAACTACAGAGA | SEQ ID NO: |
| R | GGCCGTGAACACCATGGGCAAGAAGGAATTCACCCTGATCAAGATGCAGG | 19241 |
| | AGTACGGCTTCTGGCCCAAGAACCTGCCTACTCCCTACGAGAGGCAGGAA | |
| | AGCGAGACCGAGGAGCAGTACAAGGAGAGAAAGTGCCTGCTCGAGAAGTA | |
| | CGAGAAGGTGATCGACGAGATCAGCAAGCTGTACGAAGAGAAGGACAAGA | |
| | TCAACCTGAAGCTGAGGGAGCTCCAGAAGAAGTACGACGAGACCTGGGAC | |
| | TATGAGCGCATCCGGCTGGATGTGAGCAAGACCATCATGCAGGAGAGCAT | |
| | CGAGAGGAGAGCTGAAAGAAAGCGCCAGCGGGAGCTGGAGAAGGAGCAGC | |
| | GCTCCGAGGAGTGGAAGAAGGAGAAGGAGAACAAGATCGTCTTCATCGGC | |
| | AAGGGGTACAGCAGCCTGCTGTACGACAAGGAGACCGACGAGAACAAGCT | |
| | GCTGCTGCAGGAGCTCCCTATCATCAAGGATGATAAGGAGCTGGCCAACT | |
| | TCCTGGGCATCGAGTACAAGAAGCTGAGATTCCTGGTGTACCACCGGGAC | |
| | GTGATCTCCGTGGACAACTACCACAGATACACCATCCCCAAGAAGAAGGG | |
| | CGGCGTGAGAAACATCGCCGCTCCCAAGAGCATCCTGAAGAACTCCCAGA | |
| | GGATTATCCTCGAGGAGATTCTGAGCAAGATCCCCACCTCCAACTACAGC | |
| | CACGGCTTCCTGAAGGGGAAGTCCGTGGTGAGCGCCGCCAAGGTGCACGT | |
| | GAAGAAACCCGACCTCCTGATCAACATCGATCTGGAGGACTTCTTCCCCA | |
| | CCATCACCTTCGAGAGGGTGAGAGGCATGTTCAAGAGCTTCGGCTACAGC | |
| | GGATACGTGGCCAGCATGCTGGCCATGATCTGCACCTACTGCGAGAGGAT | |
| | GAAGGTGGAGGTGAGGGGCGAGGAGAAGTACGTCAAGATCAGCGACAGAA | |
| | TTCTGCCCCAGGGCAGCCCTGCCAGCCCCATGATCACCAACATCATCTGC | |
| | GTGAAGCTGGACAAGAGACTGAACGGCCTGAGCACCAAGTATGACTTCAT | |
| | TTATACTCGGTACGCTGACGACATGTCGTTCAGCTTCACCGGCGACATCA | |
| | ACGAACTGAGCGTCGGCAGCTTCATGGGCCTGGTGAGCAAGATCGTGAAG | |
| | GAAGAGGGCTTCAACATCAACAAGGACAAGACCAAGTTCCTGAGAAAGAA | |
| | CAACAGACAGTGCATCACCGGCATCGTGATCAACAACGAGGAGATCGGCG | |
| | TGCCCAAGAAGTGGATCAAGATCCTGAGAGCCGCCATCTACAACGCCAAC | |
| | AAGGTGAAGAACAGCGGCGAGATCCTGAGCAACAAGGTGATCAACGAGAT | |
| | CAGCGGCATGACCTCCCGGGTGAAGTCCGTCAACGAGGAGAGATACAAGG | |
| | ACATCATCAACGATGCCATGAACCTGATCAACAACccaccaaagaagaaa | |
| | agaaaggtctga | |
| 6342S_W_473_ | ATGATGGAGAATCAGGAGAACAACATGAACAACAGAAAGAACTACAGAGA | SEQ ID NO: |
| Y | GGCCGTGAACACCATGGGCAAGAAGGAATTCACCCTGATCAAGATGCAGG | 19242 |
| | AGTACGGCTTCTGGCCCAAGAACCTGCCTACTCCCTACGAGAGGCAGGAA | |
| | AGCGAGACCGAGGAGCAGTACAAGGAGAGAAAGTGCCTGCTCGAGAAGTA | |
| | CGAGAAGGTGATCGACGAGATCAGCAAGCTGTACGAAGAGAAGGACAAGA | |
| | TCAACCTGAAGCTGAGGGAGCTCCAGAAGAAGTACGACGAGACCTGGGAC | |
| | TATGAGCGCATCCGGCTGGATGTGAGCAAGACCATCATGCAGGAGAGCAT | |
| | CGAGAGGAGAGCTGAAAGAAAGCGCCAGCGGGAGCTGGAGAAGGAGCAGC | |
| | GCTCCGAGGAGTGGAAGAAGGAGAAGGAGAACAAGATCGTCTTCATCGGC | |
| | AAGGGGTACAGCAGCCTGCTGTACGACAAGGAGACCGACGAGAACAAGCT | |
| | GCTGCTGCAGGAGCTCCCTATCATCAAGGATGATAAGGAGCTGGCCAACT | |
| | TCCTGGGCATCGAGTACAAGAAGCTGAGATTCCTGGTGTACCACCGGGAC | |
| | GTGATCTCCGTGGACAACTACCACAGATACACCATCCCCAAGAAGAAGGG | |
| | CGGCGTGAGAAACATCGCCGCTCCCAAGAGCATCCTGAAGAACTCCCAGA | |
| | GGATTATCCTCGAGGAGATTCTGAGCAAGATCCCCACCTCCAACTACAGC | |
| | CACGGCTTCCTGAAGGGGAAGTCCGTGGTGAGCGCCGCCAAGGTGCACGT | |
| | GAAGAAACCCGACCTCCTGATCAACATCGATCTGGAGGACTTCTTCCCCA | |
| | CCATCACCTTCGAGAGGGTGAGAGGCATGTTCAAGAGCTTCGGCTACAGC | |
| | GGATACGTGGCCAGCATGCTGGCCATGATCTGCACCTACTGCGAGAGGAT | |
| | GAAGGTGGAGGTGAGGGGCGAGGAGAAGTACGTCAAGATCAGCGACAGAA | |
| | TTCTGCCCCAGGGCAGCCCTGCCAGCCCCATGATCACCAACATCATCTGC | |
| | GTGAAGCTGGACAAGAGACTGAACGGCCTGAGCACCAAGTATGACTTCAT | |
| | TTATACTCGGTACGCTGACGACATGTCGTTCAGCTTCACCGGCGACATCA | |
| | ACGAACTGAGCGTCGGCAGCTTCATGGGCCTGGTGAGCAAGATCGTGAAG | |
| | GAAGAGGGCTTCAACATCAACAAGGACAAGACCAAGTTCCTGAGAAAGAA | |
| | CAACAGACAGTGCATCACCGGCATCGTGATCAACAACGAGGAGATCGGCG | |
| | TGCCCAAGAAGTGGATCAAGATCCTGAGAGCCGCCATCTACAACGCCAAC | |
| | AAGGTGAAGAACAGCGGCGAGATCCTGAGCAACAAGGTGATCAACGAGAT | |
| | CAGCGGCATGACCTCCTACGTGAAGTCCGTCAACGAGGAGAGATACAAGG | |
| | ACATCATCAACGATGCCATGAACCTGATCAACAACccaccaaagaagaaa | |
| | agaaaggtctga | |
| 6342S_K_ | ATGATGGAGAATCAGGAGAACAACATGAACAACAGAAAGAACTACAGAGA | SEQ ID NO: |
| 475_N | GGCCGTGAACACCATGGGCAAGAAGGAATTCACCCTGATCAAGATGCAGG | 19243 |
| | AGTACGGCTTCTGGCCCAAGAACCTGCCTACTCCCTACGAGAGGCAGGAA | |
| | AGCGAGACCGAGGAGCAGTACAAGGAGAGAAAGTGCCTGCTCGAGAAGTA | |
| | CGAGAAGGTGATCGACGAGATCAGCAAGCTGTACGAAGAGAAGGACAAGA | |
| | TCAACCTGAAGCTGAGGGAGCTCCAGAAGAAGTACGACGAGACCTGGGAC | |
| | TATGAGCGCATCCGGCTGGATGTGAGCAAGACCATCATGCAGGAGAGCAT | |
| | CGAGAGGAGAGCTGAAAGAAAGCGCCAGCGGGAGCTGGAGAAGGAGCAGC | |
| | GCTCCGAGGAGTGGAAGAAGGAGAAGGAGAACAAGATCGTCTTCATCGGC | |
| | AAGGGGTACAGCAGCCTGCTGTACGACAAGGAGACCGACGAGAACAAGCT | |
| | GCTGCTGCAGGAGCTCCCTATCATCAAGGATGATAAGGAGCTGGCCAACT | |
| | TCCTGGGCATCGAGTACAAGAAGCTGAGATTCCTGGTGTACCACCGGGAC | |
| | GTGATCTCCGTGGACAACTACCACAGATACACCATCCCCAAGAAGAAGGG | |
| | CGGCGTGAGAAACATCGCCGCTCCCAAGAGCATCCTGAAGAACTCCCAGA | |
| | GGATTATCCTCGAGGAGATTCTGAGCAAGATCCCCACCTCCAACTACAGC | |
| | CACGGCTTCCTGAAGGGGAAGTCCGTGGTGAGCGCCGCCAAGGTGCACGT | |
| | GAAGAAACCCGACCTCCTGATCAACATCGATCTGGAGGACTTCTTCCCCA | |
| | CCATCACCTTCGAGAGGGTGAGAGGCATGTTCAAGAGCTTCGGCTACAGC | |
| | GGATACGTGGCCAGCATGCTGGCCATGATCTGCACCTACTGCGAGAGGAT | |
| | GAAGGTGGAGGTGAGGGGCGAGGAGAAGTACGTCAAGATCAGCGACAGAA | |
| | TTCTGCCCCAGGGCAGCCCTGCCAGCCCCATGATCACCAACATCATCTGC | |
| | GTGAAGCTGGACAAGAGACTGAACGGCCTGAGCACCAAGTATGACTTCAT | |
| | TTATACTCGGTACGCTGACGACATGTCGTTCAGCTTCACCGGCGACATCA | |
| | ACGAACTGAGCGTCGGCAGCTTCATGGGCCTGGTGAGCAAGATCGTGAAG | |
| | GAAGAGGGCTTCAACATCAACAAGGACAAGACCAAGTTCCTGAGAAAGAA | |
| | CAACAGACAGTGCATCACCGGCATCGTGATCAACAACGAGGAGATCGGCG | |
| | TGCCCAAGAAGTGGATCAAGATCCTGAGAGCCGCCATCTACAACGCCAAC | |
| | AAGGTGAAGAACAGCGGCGAGATCCTGAGCAACAAGGTGATCAACGAGAT | |
| | CAGCGGCATGACCTCCTGGGTGAACTCCGTCAACGAGGAGAGATACAAGG | |
| | ACATCATCAACGATGCCATGAACCTGATCAACAACccaccaaagaagaaa | |
| | agaaaggtctga | |
| 6342S_K_ | ATGATGGAGAATCAGGAGAACAACATGAACAACAGAAAGAACTACAGAGA | SEQ ID NO: |
| 475_Q | GGCCGTGAACACCATGGGCAAGAAGGAATTCACCCTGATCAAGATGCAGG | 19244 |
| | AGTACGGCTTCTGGCCCAAGAACCTGCCTACTCCCTACGAGAGGCAGGAA | |
| | AGCGAGACCGAGGAGCAGTACAAGGAGAGAAAGTGCCTGCTCGAGAAGTA | |
| | CGAGAAGGTGATCGACGAGATCAGCAAGCTGTACGAAGAGAAGGACAAGA | |
| | TCAACCTGAAGCTGAGGGAGCTCCAGAAGAAGTACGACGAGACCTGGGAC | |
| | TATGAGCGCATCCGGCTGGATGTGAGCAAGACCATCATGCAGGAGAGCAT | |
| | CGAGAGGAGAGCTGAAAGAAAGCGCCAGCGGGAGCTGGAGAAGGAGCAGC | |
| | GCTCCGAGGAGTGGAAGAAGGAGAAGGAGAACAAGATCGTCTTCATCGGC | |
| | AAGGGGTACAGCAGCCTGCTGTACGACAAGGAGACCGACGAGAACAAGCT | |
| | GCTGCTGCAGGAGCTCCCTATCATCAAGGATGATAAGGAGCTGGCCAACT | |
| | TCCTGGGCATCGAGTACAAGAAGCTGAGATTCCTGGTGTACCACCGGGAC | |
| | GTGATCTCCGTGGACAACTACCACAGATACACCATCCCCAAGAAGAAGGG | |
| | CGGCGTGAGAAACATCGCCGCTCCCAAGAGCATCCTGAAGAACTCCCAGA | |
| | GGATTATCCTCGAGGAGATTCTGAGCAAGATCCCCACCTCCAACTACAGC | |
| | CACGGCTTCCTGAAGGGGAAGTCCGTGGTGAGCGCCGCCAAGGTGCACGT | |
| | GAAGAAACCCGACCTCCTGATCAACATCGATCTGGAGGACTTCTTCCCCA | |
| | CCATCACCTTCGAGAGGGTGAGAGGCATGTTCAAGAGCTTCGGCTACAGC | |
| | GGATACGTGGCCAGCATGCTGGCCATGATCTGCACCTACTGCGAGAGGAT | |
| | GAAGGTGGAGGTGAGGGGCGAGGAGAAGTACGTCAAGATCAGCGACAGAA | |
| | TTCTGCCCCAGGGCAGCCCTGCCAGCCCCATGATCACCAACATCATCTGC | |
| | GTGAAGCTGGACAAGAGACTGAACGGCCTGAGCACCAAGTATGACTTCAT | |
| | TTATACTCGGTACGCTGACGACATGTCGTTCAGCTTCACCGGCGACATCA | |
| | ACGAACTGAGCGTCGGCAGCTTCATGGGCCTGGTGAGCAAGATCGTGAAG | |
| | GAAGAGGGCTTCAACATCAACAAGGACAAGACCAAGTTCCTGAGAAAGAA | |
| | CAACAGACAGTGCATCACCGGCATCGTGATCAACAACGAGGAGATCGGCG | |
| | TGCCCAAGAAGTGGATCAAGATCCTGAGAGCCGCCATCTACAACGCCAAC | |
| | AAGGTGAAGAACAGCGGCGAGATCCTGAGCAACAAGGTGATCAACGAGAT | |
| | CAGCGGCATGACCTCCTGGGTGCAGTCCGTCAACGAGGAGAGATACAAGG | |
| | ACATCATCAACGATGCCATGAACCTGATCAACAACccaccaaagaagaaa | |
| | agaaaggtctga | |
| 6342S_K_475_ | ATGATGGAGAATCAGGAGAACAACATGAACAACAGAAAGAACTACAGAGA | SEQ ID NO: |
| R | GGCCGTGAACACCATGGGCAAGAAGGAATTCACCCTGATCAAGATGCAGG | 19245 |
| | AGTACGGCTTCTGGCCCAAGAACCTGCCTACTCCCTACGAGAGGCAGGAA | |
| | AGCGAGACCGAGGAGCAGTACAAGGAGAGAAAGTGCCTGCTCGAGAAGTA | |
| | CGAGAAGGTGATCGACGAGATCAGCAAGCTGTACGAAGAGAAGGACAAGA | |
| | TCAACCTGAAGCTGAGGGAGCTCCAGAAGAAGTACGACGAGACCTGGGAC | |
| | TATGAGCGCATCCGGCTGGATGTGAGCAAGACCATCATGCAGGAGAGCAT | |
| | CGAGAGGAGAGCTGAAAGAAAGCGCCAGCGGGAGCTGGAGAAGGAGCAGC | |
| | GCTCCGAGGAGTGGAAGAAGGAGAAGGAGAACAAGATCGTCTTCATCGGC | |
| | AAGGGGTACAGCAGCCTGCTGTACGACAAGGAGACCGACGAGAACAAGCT | |
| | GCTGCTGCAGGAGCTCCCTATCATCAAGGATGATAAGGAGCTGGCCAACT | |
| | TCCTGGGCATCGAGTACAAGAAGCTGAGATTCCTGGTGTACCACCGGGAC | |
| | GTGATCTCCGTGGACAACTACCACAGATACACCATCCCCAAGAAGAAGGG | |
| | CGGCGTGAGAAACATCGCCGCTCCCAAGAGCATCCTGAAGAACTCCCAGA | |
| | GGATTATCCTCGAGGAGATTCTGAGCAAGATCCCCACCTCCAACTACAGC | |
| | CACGGCTTCCTGAAGGGGAAGTCCGTGGTGAGCGCCGCCAAGGTGCACGT | |
| | GAAGAAACCCGACCTCCTGATCAACATCGATCTGGAGGACTTCTTCCCCA | |
| | CCATCACCTTCGAGAGGGTGAGAGGCATGTTCAAGAGCTTCGGCTACAGC | |
| | GGATACGTGGCCAGCATGCTGGCCATGATCTGCACCTACTGCGAGAGGAT | |
| | GAAGGTGGAGGTGAGGGGCGAGGAGAAGTACGTCAAGATCAGCGACAGAA | |
| | TTCTGCCCCAGGGCAGCCCTGCCAGCCCCATGATCACCAACATCATCTGC | |
| | GTGAAGCTGGACAAGAGACTGAACGGCCTGAGCACCAAGTATGACTTCAT | |
| | TTATACTCGGTACGCTGACGACATGTCGTTCAGCTTCACCGGCGACATCA | |
| | ACGAACTGAGCGTCGGCAGCTTCATGGGCCTGGTGAGCAAGATCGTGAAG | |
| | GAAGAGGGCTTCAACATCAACAAGGACAAGACCAAGTTCCTGAGAAAGAA | |
| | CAACAGACAGTGCATCACCGGCATCGTGATCAACAACGAGGAGATCGGCG | |
| | TGCCCAAGAAGTGGATCAAGATCCTGAGAGCCGCCATCTACAACGCCAAC | |
| | AAGGTGAAGAACAGCGGCGAGATCCTGAGCAACAAGGTGATCAACGAGAT | |
| | CAGCGGCATGACCTCCTGGGTGCGGTCCGTCAACGAGGAGAGATACAAGG | |
| | ACATCATCAACGATGCCATGAACCTGATCAACAACccaccaaagaagaaa | |
| | agaaaggtctga | |
| 6342S_S_476_ | ATGATGGAGAATCAGGAGAACAACATGAACAACAGAAAGAACTACAGAGA | SEQ ID NO: |
| K | GGCCGTGAACACCATGGGCAAGAAGGAATTCACCCTGATCAAGATGCAGG | 19246 |
| | AGTACGGCTTCTGGCCCAAGAACCTGCCTACTCCCTACGAGAGGCAGGAA | |
| | AGCGAGACCGAGGAGCAGTACAAGGAGAGAAAGTGCCTGCTCGAGAAGTA | |
| | CGAGAAGGTGATCGACGAGATCAGCAAGCTGTACGAAGAGAAGGACAAGA | |
| | TCAACCTGAAGCTGAGGGAGCTCCAGAAGAAGTACGACGAGACCTGGGAC | |
| | TATGAGCGCATCCGGCTGGATGTGAGCAAGACCATCATGCAGGAGAGCAT | |
| | CGAGAGGAGAGCTGAAAGAAAGCGCCAGCGGGAGCTGGAGAAGGAGCAGC | |
| | GCTCCGAGGAGTGGAAGAAGGAGAAGGAGAACAAGATCGTCTTCATCGGC | |
| | AAGGGGTACAGCAGCCTGCTGTACGACAAGGAGACCGACGAGAACAAGCT | |
| | GCTGCTGCAGGAGCTCCCTATCATCAAGGATGATAAGGAGCTGGCCAACT | |
| | TCCTGGGCATCGAGTACAAGAAGCTGAGATTCCTGGTGTACCACCGGGAC | |
| | GTGATCTCCGTGGACAACTACCACAGATACACCATCCCCAAGAAGAAGGG | |
| | CGGCGTGAGAAACATCGCCGCTCCCAAGAGCATCCTGAAGAACTCCCAGA | |
| | GGATTATCCTCGAGGAGATTCTGAGCAAGATCCCCACCTCCAACTACAGC | |
| | CACGGCTTCCTGAAGGGGAAGTCCGTGGTGAGCGCCGCCAAGGTGCACGT | |
| | GAAGAAACCCGACCTCCTGATCAACATCGATCTGGAGGACTTCTTCCCCA | |
| | CCATCACCTTCGAGAGGGTGAGAGGCATGTTCAAGAGCTTCGGCTACAGC | |
| | GGATACGTGGCCAGCATGCTGGCCATGATCTGCACCTACTGCGAGAGGAT | |
| | GAAGGTGGAGGTGAGGGGCGAGGAGAAGTACGTCAAGATCAGCGACAGAA | |
| | TTCTGCCCCAGGGCAGCCCTGCCAGCCCCATGATCACCAACATCATCTGC | |
| | GTGAAGCTGGACAAGAGACTGAACGGCCTGAGCACCAAGTATGACTTCAT | |
| | TTATACTCGGTACGCTGACGACATGTCGTTCAGCTTCACCGGCGACATCA | |
| | ACGAACTGAGCGTCGGCAGCTTCATGGGCCTGGTGAGCAAGATCGTGAAG | |
| | GAAGAGGGCTTCAACATCAACAAGGACAAGACCAAGTTCCTGAGAAAGAA | |
| | CAACAGACAGTGCATCACCGGCATCGTGATCAACAACGAGGAGATCGGCG | |
| | TGCCCAAGAAGTGGATCAAGATCCTGAGAGCCGCCATCTACAACGCCAAC | |
| | AAGGTGAAGAACAGCGGCGAGATCCTGAGCAACAAGGTGATCAACGAGAT | |
| | CAGCGGCATGACCTCCTGGGTGAAGAAGGTCAACGAGGAGAGATACAAGG | |
| | ACATCATCAACGATGCCATGAACCTGATCAACAACccaccaaagaagaaa | |
| | agaaaggtctga | |
| 6342S_S_476_ | ATGATGGAGAATCAGGAGAACAACATGAACAACAGAAAGAACTACAGAGA | SEQ ID NO: |
| N | GGCCGTGAACACCATGGGCAAGAAGGAATTCACCCTGATCAAGATGCAGG | 19247 |
| | AGTACGGCTTCTGGCCCAAGAACCTGCCTACTCCCTACGAGAGGCAGGAA | |
| | AGCGAGACCGAGGAGCAGTACAAGGAGAGAAAGTGCCTGCTCGAGAAGTA | |
| | CGAGAAGGTGATCGACGAGATCAGCAAGCTGTACGAAGAGAAGGACAAGA | |
| | TCAACCTGAAGCTGAGGGAGCTCCAGAAGAAGTACGACGAGACCTGGGAC | |
| | TATGAGCGCATCCGGCTGGATGTGAGCAAGACCATCATGCAGGAGAGCAT | |
| | CGAGAGGAGAGCTGAAAGAAAGCGCCAGCGGGAGCTGGAGAAGGAGCAGC | |
| | GCTCCGAGGAGTGGAAGAAGGAGAAGGAGAACAAGATCGTCTTCATCGGC | |
| | AAGGGGTACAGCAGCCTGCTGTACGACAAGGAGACCGACGAGAACAAGCT | |
| | GCTGCTGCAGGAGCTCCCTATCATCAAGGATGATAAGGAGCTGGCCAACT | |
| | TCCTGGGCATCGAGTACAAGAAGCTGAGATTCCTGGTGTACCACCGGGAC | |
| | GTGATCTCCGTGGACAACTACCACAGATACACCATCCCCAAGAAGAAGGG | |
| | CGGCGTGAGAAACATCGCCGCTCCCAAGAGCATCCTGAAGAACTCCCAGA | |
| | GGATTATCCTCGAGGAGATTCTGAGCAAGATCCCCACCTCCAACTACAGC | |
| | CACGGCTTCCTGAAGGGGAAGTCCGTGGTGAGCGCCGCCAAGGTGCACGT | |
| | GAAGAAACCCGACCTCCTGATCAACATCGATCTGGAGGACTTCTTCCCCA | |
| | CCATCACCTTCGAGAGGGTGAGAGGCATGTTCAAGAGCTTCGGCTACAGC | |
| | GGATACGTGGCCAGCATGCTGGCCATGATCTGCACCTACTGCGAGAGGAT | |
| | GAAGGTGGAGGTGAGGGGCGAGGAGAAGTACGTCAAGATCAGCGACAGAA | |
| | TTCTGCCCCAGGGCAGCCCTGCCAGCCCCATGATCACCAACATCATCTGC | |
| | GTGAAGCTGGACAAGAGACTGAACGGCCTGAGCACCAAGTATGACTTCAT | |
| | TTATACTCGGTACGCTGACGACATGTCGTTCAGCTTCACCGGCGACATCA | |
| | ACGAACTGAGCGTCGGCAGCTTCATGGGCCTGGTGAGCAAGATCGTGAAG | |
| | GAAGAGGGCTTCAACATCAACAAGGACAAGACCAAGTTCCTGAGAAAGAA | |
| | CAACAGACAGTGCATCACCGGCATCGTGATCAACAACGAGGAGATCGGCG | |
| | TGCCCAAGAAGTGGATCAAGATCCTGAGAGCCGCCATCTACAACGCCAAC | |
| | AAGGTGAAGAACAGCGGCGAGATCCTGAGCAACAAGGTGATCAACGAGAT | |
| | CAGCGGCATGACCTCCTGGGTGAAGAACGTCAACGAGGAGAGATACAAGG | |
| | ACATCATCAACGATGCCATGAACCTGATCAACAACccaccaaagaagaaa | |
| | agaaaggtctga | |
| 6342S_S_476_ | ATGATGGAGAATCAGGAGAACAACATGAACAACAGAAAGAACTACAGAGA | SEQ ID NO: |
| Q | GGCCGTGAACACCATGGGCAAGAAGGAATTCACCCTGATCAAGATGCAGG | 19248 |
| | AGTACGGCTTCTGGCCCAAGAACCTGCCTACTCCCTACGAGAGGCAGGAA | |
| | AGCGAGACCGAGGAGCAGTACAAGGAGAGAAAGTGCCTGCTCGAGAAGTA | |
| | CGAGAAGGTGATCGACGAGATCAGCAAGCTGTACGAAGAGAAGGACAAGA | |
| | TCAACCTGAAGCTGAGGGAGCTCCAGAAGAAGTACGACGAGACCTGGGAC | |
| | TATGAGCGCATCCGGCTGGATGTGAGCAAGACCATCATGCAGGAGAGCAT | |
| | CGAGAGGAGAGCTGAAAGAAAGCGCCAGCGGGAGCTGGAGAAGGAGCAGC | |
| | GCTCCGAGGAGTGGAAGAAGGAGAAGGAGAACAAGATCGTCTTCATCGGC | |
| | AAGGGGTACAGCAGCCTGCTGTACGACAAGGAGACCGACGAGAACAAGCT | |
| | GCTGCTGCAGGAGCTCCCTATCATCAAGGATGATAAGGAGCTGGCCAACT | |
| | TCCTGGGCATCGAGTACAAGAAGCTGAGATTCCTGGTGTACCACCGGGAC | |
| | GTGATCTCCGTGGACAACTACCACAGATACACCATCCCCAAGAAGAAGGG | |
| | CGGCGTGAGAAACATCGCCGCTCCCAAGAGCATCCTGAAGAACTCCCAGA | |
| | GGATTATCCTCGAGGAGATTCTGAGCAAGATCCCCACCTCCAACTACAGC | |
| | CACGGCTTCCTGAAGGGGAAGTCCGTGGTGAGCGCCGCCAAGGTGCACGT | |
| | GAAGAAACCCGACCTCCTGATCAACATCGATCTGGAGGACTTCTTCCCCA | |
| | CCATCACCTTCGAGAGGGTGAGAGGCATGTTCAAGAGCTTCGGCTACAGC | |
| | GGATACGTGGCCAGCATGCTGGCCATGATCTGCACCTACTGCGAGAGGAT | |
| | GAAGGTGGAGGTGAGGGGCGAGGAGAAGTACGTCAAGATCAGCGACAGAA | |
| | TTCTGCCCCAGGGCAGCCCTGCCAGCCCCATGATCACCAACATCATCTGC | |
| | GTGAAGCTGGACAAGAGACTGAACGGCCTGAGCACCAAGTATGACTTCAT | |
| | TTATACTCGGTACGCTGACGACATGTCGTTCAGCTTCACCGGCGACATCA | |
| | ACGAACTGAGCGTCGGCAGCTTCATGGGCCTGGTGAGCAAGATCGTGAAG | |
| | GAAGAGGGCTTCAACATCAACAAGGACAAGACCAAGTTCCTGAGAAAGAA | |
| | CAACAGACAGTGCATCACCGGCATCGTGATCAACAACGAGGAGATCGGCG | |
| | TGCCCAAGAAGTGGATCAAGATCCTGAGAGCCGCCATCTACAACGCCAAC | |
| | AAGGTGAAGAACAGCGGCGAGATCCTGAGCAACAAGGTGATCAACGAGAT | |
| | CAGCGGCATGACCTCCTGGGTGAAGCAGGTCAACGAGGAGAGATACAAGG | |
| | ACATCATCAACGATGCCATGAACCTGATCAACAACccaccaaagaagaaa | |
| | agaaaggtctga | |
| 6342S S_476_ | ATGATGGAGAATCAGGAGAACAACATGAACAACAGAAAGAACTACAGAGA | SEQ ID NO: |
| R | GGCCGTGAACACCATGGGCAAGAAGGAATTCACCCTGATCAAGATGCAGG | 19249 |
| | AGTACGGCTTCTGGCCCAAGAACCTGCCTACTCCCTACGAGAGGCAGGAA | |
| | AGCGAGACCGAGGAGCAGTACAAGGAGAGAAAGTGCCTGCTCGAGAAGTA | |
| | CGAGAAGGTGATCGACGAGATCAGCAAGCTGTACGAAGAGAAGGACAAGA | |
| | TCAACCTGAAGCTGAGGGAGCTCCAGAAGAAGTACGACGAGACCTGGGAC | |
| | TATGAGCGCATCCGGCTGGATGTGAGCAAGACCATCATGCAGGAGAGCAT | |
| | CGAGAGGAGAGCTGAAAGAAAGCGCCAGCGGGAGCTGGAGAAGGAGCAGC | |
| | GCTCCGAGGAGTGGAAGAAGGAGAAGGAGAACAAGATCGTCTTCATCGGC | |
| | AAGGGGTACAGCAGCCTGCTGTACGACAAGGAGACCGACGAGAACAAGCT | |
| | GCTGCTGCAGGAGCTCCCTATCATCAAGGATGATAAGGAGCTGGCCAACT | |
| | TCCTGGGCATCGAGTACAAGAAGCTGAGATTCCTGGTGTACCACCGGGAC | |
| | GTGATCTCCGTGGACAACTACCACAGATACACCATCCCCAAGAAGAAGGG | |
| | CGGCGTGAGAAACATCGCCGCTCCCAAGAGCATCCTGAAGAACTCCCAGA | |
| | GGATTATCCTCGAGGAGATTCTGAGCAAGATCCCCACCTCCAACTACAGC | |
| | CACGGCTTCCTGAAGGGGAAGTCCGTGGTGAGCGCCGCCAAGGTGCACGT | |
| | GAAGAAACCCGACCTCCTGATCAACATCGATCTGGAGGACTTCTTCCCCA | |
| | CCATCACCTTCGAGAGGGTGAGAGGCATGTTCAAGAGCTTCGGCTACAGC | |
| | GGATACGTGGCCAGCATGCTGGCCATGATCTGCACCTACTGCGAGAGGAT | |
| | GAAGGTGGAGGTGAGGGGCGAGGAGAAGTACGTCAAGATCAGCGACAGAA | |
| | TTCTGCCCCAGGGCAGCCCTGCCAGCCCCATGATCACCAACATCATCTGC | |
| | GTGAAGCTGGACAAGAGACTGAACGGCCTGAGCACCAAGTATGACTTCAT | |
| | TTATACTCGGTACGCTGACGACATGTCGTTCAGCTTCACCGGCGACATCA | |
| | ACGAACTGAGCGTCGGCAGCTTCATGGGCCTGGTGAGCAAGATCGTGAAG | |
| | GAAGAGGGCTTCAACATCAACAAGGACAAGACCAAGTTCCTGAGAAAGAA | |
| | CAACAGACAGTGCATCACCGGCATCGTGATCAACAACGAGGAGATCGGCG | |
| | TGCCCAAGAAGTGGATCAAGATCCTGAGAGCCGCCATCTACAACGCCAAC | |
| | AAGGTGAAGAACAGCGGCGAGATCCTGAGCAACAAGGTGATCAACGAGAT | |
| | CAGCGGCATGACCTCCTGGGTGAAGCGGGTCAACGAGGAGAGATACAAGG | |
| | ACATCATCAACGATGCCATGAACCTGATCAACAACccaccaaagaagaaa | |
| | agaaaggtctga | |
| 6342S_V_477_ | ATGATGGAGAATCAGGAGAACAACATGAACAACAGAAAGAACTACAGAGA | SEQ ID NO: |
| F | GGCCGTGAACACCATGGGCAAGAAGGAATTCACCCTGATCAAGATGCAGG | 19250 |
| | AGTACGGCTTCTGGCCCAAGAACCTGCCTACTCCCTACGAGAGGCAGGAA | |
| | AGCGAGACCGAGGAGCAGTACAAGGAGAGAAAGTGCCTGCTCGAGAAGTA | |
| | CGAGAAGGTGATCGACGAGATCAGCAAGCTGTACGAAGAGAAGGACAAGA | |
| | TCAACCTGAAGCTGAGGGAGCTCCAGAAGAAGTACGACGAGACCTGGGAC | |
| | TATGAGCGCATCCGGCTGGATGTGAGCAAGACCATCATGCAGGAGAGCAT | |
| | CGAGAGGAGAGCTGAAAGAAAGCGCCAGCGGGAGCTGGAGAAGGAGCAGC | |
| | GCTCCGAGGAGTGGAAGAAGGAGAAGGAGAACAAGATCGTCTTCATCGGC | |
| | AAGGGGTACAGCAGCCTGCTGTACGACAAGGAGACCGACGAGAACAAGCT | |
| | GCTGCTGCAGGAGCTCCCTATCATCAAGGATGATAAGGAGCTGGCCAACT | |
| | TCCTGGGCATCGAGTACAAGAAGCTGAGATTCCTGGTGTACCACCGGGAC | |
| | GTGATCTCCGTGGACAACTACCACAGATACACCATCCCCAAGAAGAAGGG | |
| | CGGCGTGAGAAACATCGCCGCTCCCAAGAGCATCCTGAAGAACTCCCAGA | |
| | GGATTATCCTCGAGGAGATTCTGAGCAAGATCCCCACCTCCAACTACAGC | |
| | CACGGCTTCCTGAAGGGGAAGTCCGTGGTGAGCGCCGCCAAGGTGCACGT | |
| | GAAGAAACCCGACCTCCTGATCAACATCGATCTGGAGGACTTCTTCCCCA | |
| | CCATCACCTTCGAGAGGGTGAGAGGCATGTTCAAGAGCTTCGGCTACAGC | |
| | GGATACGTGGCCAGCATGCTGGCCATGATCTGCACCTACTGCGAGAGGAT | |
| | GAAGGTGGAGGTGAGGGGCGAGGAGAAGTACGTCAAGATCAGCGACAGAA | |
| | TTCTGCCCCAGGGCAGCCCTGCCAGCCCCATGATCACCAACATCATCTGC | |
| | GTGAAGCTGGACAAGAGACTGAACGGCCTGAGCACCAAGTATGACTTCAT | |
| | TTATACTCGGTACGCTGACGACATGTCGTTCAGCTTCACCGGCGACATCA | |
| | ACGAACTGAGCGTCGGCAGCTTCATGGGCCTGGTGAGCAAGATCGTGAAG | |
| | GAAGAGGGCTTCAACATCAACAAGGACAAGACCAAGTTCCTGAGAAAGAA | |
| | CAACAGACAGTGCATCACCGGCATCGTGATCAACAACGAGGAGATCGGCG | |
| | TGCCCAAGAAGTGGATCAAGATCCTGAGAGCCGCCATCTACAACGCCAAC | |
| | AAGGTGAAGAACAGCGGCGAGATCCTGAGCAACAAGGTGATCAACGAGAT | |
| | CAGCGGCATGACCTCCTGGGTGAAGTCCTTCAACGAGGAGAGATACAAGG | |
| | ACATCATCAACGATGCCATGAACCTGATCAACAACccaccaaagaagaaa | |
| | agaaaggtctga | |
| 6342S_V_477_I | ATGATGGAGAATCAGGAGAACAACATGAACAACAGAAAGAACTACAGAGA | SEQ ID NO: |
| | GGCCGTGAACACCATGGGCAAGAAGGAATTCACCCTGATCAAGATGCAGG | 19251 |
| | AGTACGGCTTCTGGCCCAAGAACCTGCCTACTCCCTACGAGAGGCAGGAA | |
| | AGCGAGACCGAGGAGCAGTACAAGGAGAGAAAGTGCCTGCTCGAGAAGTA | |
| | CGAGAAGGTGATCGACGAGATCAGCAAGCTGTACGAAGAGAAGGACAAGA | |
| | TCAACCTGAAGCTGAGGGAGCTCCAGAAGAAGTACGACGAGACCTGGGAC | |
| | TATGAGCGCATCCGGCTGGATGTGAGCAAGACCATCATGCAGGAGAGCAT | |
| | CGAGAGGAGAGCTGAAAGAAAGCGCCAGCGGGAGCTGGAGAAGGAGCAGC | |
| | GCTCCGAGGAGTGGAAGAAGGAGAAGGAGAACAAGATCGTCTTCATCGGC | |
| | AAGGGGTACAGCAGCCTGCTGTACGACAAGGAGACCGACGAGAACAAGCT | |
| | GCTGCTGCAGGAGCTCCCTATCATCAAGGATGATAAGGAGCTGGCCAACT | |
| | TCCTGGGCATCGAGTACAAGAAGCTGAGATTCCTGGTGTACCACCGGGAC | |
| | GTGATCTCCGTGGACAACTACCACAGATACACCATCCCCAAGAAGAAGGG | |
| | CGGCGTGAGAAACATCGCCGCTCCCAAGAGCATCCTGAAGAACTCCCAGA | |
| | GGATTATCCTCGAGGAGATTCTGAGCAAGATCCCCACCTCCAACTACAGC | |
| | CACGGCTTCCTGAAGGGGAAGTCCGTGGTGAGCGCCGCCAAGGTGCACGT | |
| | GAAGAAACCCGACCTCCTGATCAACATCGATCTGGAGGACTTCTTCCCCA | |
| | CCATCACCTTCGAGAGGGTGAGAGGCATGTTCAAGAGCTTCGGCTACAGC | |
| | GGATACGTGGCCAGCATGCTGGCCATGATCTGCACCTACTGCGAGAGGAT | |
| | GAAGGTGGAGGTGAGGGGCGAGGAGAAGTACGTCAAGATCAGCGACAGAA | |
| | TTCTGCCCCAGGGCAGCCCTGCCAGCCCCATGATCACCAACATCATCTGC | |
| | GTGAAGCTGGACAAGAGACTGAACGGCCTGAGCACCAAGTATGACTTCAT | |
| | TTATACTCGGTACGCTGACGACATGTCGTTCAGCTTCACCGGCGACATCA | |
| | ACGAACTGAGCGTCGGCAGCTTCATGGGCCTGGTGAGCAAGATCGTGAAG | |
| | GAAGAGGGCTTCAACATCAACAAGGACAAGACCAAGTTCCTGAGAAAGAA | |
| | CAACAGACAGTGCATCACCGGCATCGTGATCAACAACGAGGAGATCGGCG | |
| | TGCCCAAGAAGTGGATCAAGATCCTGAGAGCCGCCATCTACAACGCCAAC | |
| | AAGGTGAAGAACAGCGGCGAGATCCTGAGCAACAAGGTGATCAACGAGAT | |
| | CAGCGGCATGACCTCCTGGGTGAAGTCCATCAACGAGGAGAGATACAAGG | |
| | ACATCATCAACGATGCCATGAACCTGATCAACAACccaccaaagaagaaa | |
| | agaaaggtctga | |
| 6342S_V_477_ | ATGATGGAGAATCAGGAGAACAACATGAACAACAGAAAGAACTACAGAGA | SEQ ID NO: |
| L | GGCCGTGAACACCATGGGCAAGAAGGAATTCACCCTGATCAAGATGCAGG | 19252 |
| | AGTACGGCTTCTGGCCCAAGAACCTGCCTACTCCCTACGAGAGGCAGGAA | |
| | AGCGAGACCGAGGAGCAGTACAAGGAGAGAAAGTGCCTGCTCGAGAAGTA | |
| | CGAGAAGGTGATCGACGAGATCAGCAAGCTGTACGAAGAGAAGGACAAGA | |
| | TCAACCTGAAGCTGAGGGAGCTCCAGAAGAAGTACGACGAGACCTGGGAC | |
| | TATGAGCGCATCCGGCTGGATGTGAGCAAGACCATCATGCAGGAGAGCAT | |
| | CGAGAGGAGAGCTGAAAGAAAGCGCCAGCGGGAGCTGGAGAAGGAGCAGC | |
| | GCTCCGAGGAGTGGAAGAAGGAGAAGGAGAACAAGATCGTCTTCATCGGC | |
| | AAGGGGTACAGCAGCCTGCTGTACGACAAGGAGACCGACGAGAACAAGCT | |
| | GCTGCTGCAGGAGCTCCCTATCATCAAGGATGATAAGGAGCTGGCCAACT | |
| | TCCTGGGCATCGAGTACAAGAAGCTGAGATTCCTGGTGTACCACCGGGAC | |
| | GTGATCTCCGTGGACAACTACCACAGATACACCATCCCCAAGAAGAAGGG | |
| | CGGCGTGAGAAACATCGCCGCTCCCAAGAGCATCCTGAAGAACTCCCAGA | |
| | GGATTATCCTCGAGGAGATTCTGAGCAAGATCCCCACCTCCAACTACAGC | |
| | CACGGCTTCCTGAAGGGGAAGTCCGTGGTGAGCGCCGCCAAGGTGCACGT | |
| | GAAGAAACCCGACCTCCTGATCAACATCGATCTGGAGGACTTCTTCCCCA | |
| | CCATCACCTTCGAGAGGGTGAGAGGCATGTTCAAGAGCTTCGGCTACAGC | |
| | GGATACGTGGCCAGCATGCTGGCCATGATCTGCACCTACTGCGAGAGGAT | |
| | GAAGGTGGAGGTGAGGGGCGAGGAGAAGTACGTCAAGATCAGCGACAGAA | |
| | TTCTGCCCCAGGGCAGCCCTGCCAGCCCCATGATCACCAACATCATCTGC | |
| | GTGAAGCTGGACAAGAGACTGAACGGCCTGAGCACCAAGTATGACTTCAT | |
| | TTATACTCGGTACGCTGACGACATGTCGTTCAGCTTCACCGGCGACATCA | |
| | ACGAACTGAGCGTCGGCAGCTTCATGGGCCTGGTGAGCAAGATCGTGAAG | |
| | GAAGAGGGCTTCAACATCAACAAGGACAAGACCAAGTTCCTGAGAAAGAA | |
| | CAACAGACAGTGCATCACCGGCATCGTGATCAACAACGAGGAGATCGGCG | |
| | TGCCCAAGAAGTGGATCAAGATCCTGAGAGCCGCCATCTACAACGCCAAC | |
| | AAGGTGAAGAACAGCGGCGAGATCCTGAGCAACAAGGTGATCAACGAGAT | |
| | CAGCGGCATGACCTCCTGGGTGAAGTCCCTGAACGAGGAGAGATACAAGG | |
| | ACATCATCAACGATGCCATGAACCTGATCAACAACccaccaaagaagaaa | |
| | agaaaggtctga | |
| 6342S_V_477_ | ATGATGGAGAATCAGGAGAACAACATGAACAACAGAAAGAACTACAGAGA | SEQ ID NO: |
| W | GGCCGTGAACACCATGGGCAAGAAGGAATTCACCCTGATCAAGATGCAGG | 19253 |
| | AGTACGGCTTCTGGCCCAAGAACCTGCCTACTCCCTACGAGAGGCAGGAA | |
| | AGCGAGACCGAGGAGCAGTACAAGGAGAGAAAGTGCCTGCTCGAGAAGTA | |
| | CGAGAAGGTGATCGACGAGATCAGCAAGCTGTACGAAGAGAAGGACAAGA | |
| | TCAACCTGAAGCTGAGGGAGCTCCAGAAGAAGTACGACGAGACCTGGGAC | |
| | TATGAGCGCATCCGGCTGGATGTGAGCAAGACCATCATGCAGGAGAGCAT | |
| | CGAGAGGAGAGCTGAAAGAAAGCGCCAGCGGGAGCTGGAGAAGGAGCAGC | |
| | GCTCCGAGGAGTGGAAGAAGGAGAAGGAGAACAAGATCGTCTTCATCGGC | |
| | AAGGGGTACAGCAGCCTGCTGTACGACAAGGAGACCGACGAGAACAAGCT | |
| | GCTGCTGCAGGAGCTCCCTATCATCAAGGATGATAAGGAGCTGGCCAACT | |
| | TCCTGGGCATCGAGTACAAGAAGCTGAGATTCCTGGTGTACCACCGGGAC | |
| | GTGATCTCCGTGGACAACTACCACAGATACACCATCCCCAAGAAGAAGGG | |
| | CGGCGTGAGAAACATCGCCGCTCCCAAGAGCATCCTGAAGAACTCCCAGA | |
| | GGATTATCCTCGAGGAGATTCTGAGCAAGATCCCCACCTCCAACTACAGC | |
| | CACGGCTTCCTGAAGGGGAAGTCCGTGGTGAGCGCCGCCAAGGTGCACGT | |
| | GAAGAAACCCGACCTCCTGATCAACATCGATCTGGAGGACTTCTTCCCCA | |
| | CCATCACCTTCGAGAGGGTGAGAGGCATGTTCAAGAGCTTCGGCTACAGC | |
| | GGATACGTGGCCAGCATGCTGGCCATGATCTGCACCTACTGCGAGAGGAT | |
| | GAAGGTGGAGGTGAGGGGCGAGGAGAAGTACGTCAAGATCAGCGACAGAA | |
| | TTCTGCCCCAGGGCAGCCCTGCCAGCCCCATGATCACCAACATCATCTGC | |
| | GTGAAGCTGGACAAGAGACTGAACGGCCTGAGCACCAAGTATGACTTCAT | |
| | TTATACTCGGTACGCTGACGACATGTCGTTCAGCTTCACCGGCGACATCA | |
| | ACGAACTGAGCGTCGGCAGCTTCATGGGCCTGGTGAGCAAGATCGTGAAG | |
| | GAAGAGGGCTTCAACATCAACAAGGACAAGACCAAGTTCCTGAGAAAGAA | |
| | CAACAGACAGTGCATCACCGGCATCGTGATCAACAACGAGGAGATCGGCG | |
| | TGCCCAAGAAGTGGATCAAGATCCTGAGAGCCGCCATCTACAACGCCAAC | |
| | AAGGTGAAGAACAGCGGCGAGATCCTGAGCAACAAGGTGATCAACGAGAT | |
| | CAGCGGCATGACCTCCTGGGTGAAGTCCTGGAACGAGGAGAGATACAAGG | |
| | ACATCATCAACGATGCCATGAACCTGATCAACAACccaccaaagaagaaa | |
| | agaaaggtctga | |
| 6342S_V_265_ | ATGATGGAGAATCAGGAGAACAACATGAACAACAGAAAGAACTACAGAGA | SEQ ID NO: |
| P | GGCCGTGAACACCATGGGCAAGAAGGAATTCACCCTGATCAAGATGCAGG | 19254 |
| | AGTACGGCTTCTGGCCCAAGAACCTGCCTACTCCCTACGAGAGGCAGGAA | |
| | AGCGAGACCGAGGAGCAGTACAAGGAGAGAAAGTGCCTGCTCGAGAAGTA | |
| | CGAGAAGGTGATCGACGAGATCAGCAAGCTGTACGAAGAGAAGGACAAGA | |
| | TCAACCTGAAGCTGAGGGAGCTCCAGAAGAAGTACGACGAGACCTGGGAC | |
| | TATGAGCGCATCCGGCTGGATGTGAGCAAGACCATCATGCAGGAGAGCAT | |
| | CGAGAGGAGAGCTGAAAGAAAGCGCCAGCGGGAGCTGGAGAAGGAGCAGC | |
| | GCTCCGAGGAGTGGAAGAAGGAGAAGGAGAACAAGATCGTCTTCATCGGC | |
| | AAGGGGTACAGCAGCCTGCTGTACGACAAGGAGACCGACGAGAACAAGCT | |
| | GCTGCTGCAGGAGCTCCCTATCATCAAGGATGATAAGGAGCTGGCCAACT | |
| | TCCTGGGCATCGAGTACAAGAAGCTGAGATTCCTGGTGTACCACCGGGAC | |
| | GTGATCTCCGTGGACAACTACCACAGATACACCATCCCCAAGAAGAAGGG | |
| | CGGCGTGAGAAACATCGCCGCTCCCAAGAGCATCCTGAAGAACTCCCAGA | |
| | GGATTATCCTCGAGGAGATTCTGAGCAAGATCCCCACCTCCAACTACAGC | |
| | CACGGCTTCCTGAAGGGGAAGTCCGTGGTGAGCGCCGCCAAGCCTCACGT | |
| | GAAGAAACCCGACCTCCTGATCAACATCGATCTGGAGGACTTCTTCCCCA | |
| | CCATCACCTTCGAGAGGGTGAGAGGCATGTTCAAGAGCTTCGGCTACAGC | |
| | GGATACGTGGCCAGCATGCTGGCCATGATCTGCACCTACTGCGAGAGGAT | |
| | GAAGGTGGAGGTGAGGGGCGAGGAGAAGTACGTCAAGATCAGCGACAGAA | |
| | TTCTGCCCCAGGGCAGCCCTGCCAGCCCCATGATCACCAACATCATCTGC | |
| | GTGAAGCTGGACAAGAGACTGAACGGCCTGAGCACCAAGTATGACTTCAT | |
| | TTATACTCGGTACGCTGACGACATGTCGTTCAGCTTCACCGGCGACATCA | |
| | ACGAACTGAGCGTCGGCAGCTTCATGGGCCTGGTGAGCAAGATCGTGAAG | |
| | GAAGAGGGCTTCAACATCAACAAGGACAAGACCAAGTTCCTGAGAAAGAA | |
| | CAACAGACAGTGCATCACCGGCATCGTGATCAACAACGAGGAGATCGGCG | |
| | TGCCCAAGAAGTGGATCAAGATCCTGAGAGCCGCCATCTACAACGCCAAC | |
| | AAGGTGAAGAACAGCGGCGAGATCCTGAGCAACAAGGTGATCAACGAGAT | |
| | CAGCGGCATGACCTCCTGGGTGAAGTCCGTCAACGAGGAGAGATACAAGG | |
| | ACATCATCAACGATGCCATGAACCTGATCAACAACccaccaaagaagaaa | |
| | agaaaggtctga | |
| 6342S_M470K | ATGATGGAGAATCAGGAGAACAACATGAACAACAGAAAGAACTACAGAGA | SEQ ID NO: |
| _V477W | GGCCGTGAACACCATGGGCAAGAAGGAATTCACCCTGATCAAGATGCAGG | 19255 |
| | AGTACGGCTTCTGGCCCAAGAACCTGCCTACTCCCTACGAGAGGCAGGAA | |
| | AGCGAGACCGAGGAGCAGTACAAGGAGAGAAAGTGCCTGCTCGAGAAGTA | |
| | CGAGAAGGTGATCGACGAGATCAGCAAGCTGTACGAAGAGAAGGACAAGA | |
| | TCAACCTGAAGCTGAGGGAGCTCCAGAAGAAGTACGACGAGACCTGGGAC | |
| | TATGAGCGCATCCGGCTGGATGTGAGCAAGACCATCATGCAGGAGAGCAT | |
| | CGAGAGGAGAGCTGAAAGAAAGCGCCAGCGGGAGCTGGAGAAGGAGCAGC | |
| | GCTCCGAGGAGTGGAAGAAGGAGAAGGAGAACAAGATCGTCTTCATCGGC | |
| | AAGGGGTACAGCAGCCTGCTGTACGACAAGGAGACCGACGAGAACAAGCT | |
| | GCTGCTGCAGGAGCTCCCTATCATCAAGGATGATAAGGAGCTGGCCAACT | |
| | TCCTGGGCATCGAGTACAAGAAGCTGAGATTCCTGGTGTACCACCGGGAC | |
| | GTGATCTCCGTGGACAACTACCACAGATACACCATCCCCAAGAAGAAGGG | |
| | CGGCGTGAGAAACATCGCCGCTCCCAAGAGCATCCTGAAGAACTCCCAGA | |
| | GGATTATCCTCGAGGAGATTCTGAGCAAGATCCCCACCTCCAACTACAGC | |
| | CACGGCTTCCTGAAGGGGAAGTCCGTGGTGAGCGCCGCCAAGGTGCACGT | |
| | GAAGAAACCCGACCTCCTGATCAACATCGATCTGGAGGACTTCTTCCCCA | |
| | CCATCACCTTCGAGAGGGTGAGAGGCATGTTCAAGAGCTTCGGCTACAGC | |
| | GGATACGTGGCCAGCATGCTGGCCATGATCTGCACCTACTGCGAGAGGAT | |
| | GAAGGTGGAGGTGAGGGGCGAGGAGAAGTACGTCAAGATCAGCGACAGAA | |
| | TTCTGCCCCAGGGCAGCCCTGCCAGCCCCATGATCACCAACATCATCTGC | |
| | GTGAAGCTGGACAAGAGACTGAACGGCCTGAGCACCAAGTATGACTTCAT | |
| | TTATACTCGGTACGCTGACGACATGTCGTTCAGCTTCACCGGCGACATCA | |
| | ACGAACTGAGCGTCGGCAGCTTCATGGGCCTGGTGAGCAAGATCGTGAAG | |
| | GAAGAGGGCTTCAACATCAACAAGGACAAGACCAAGTTCCTGAGAAAGAA | |
| | CAACAGACAGTGCATCACCGGCATCGTGATCAACAACGAGGAGATCGGCG | |
| | TGCCCAAGAAGTGGATCAAGATCCTGAGAGCCGCCATCTACAACGCCAAT | |
| | AAGGTTAAGAATAGTGGAGAAATTCTAAGTAATAAAGTCATAAACGAGAT | |
| | CAGCGGCAAGACCTCCTGGGTGAAGTCCTTCAACGAGGAGAGATACAAGG | |
| | ACATCATCAACGATGCCATGAACCTGATCAACAACCCACCAAAGAAGAAA | |
| | AGAAAGGTCTGA | |
| 6342S_M470K_ | ATGATGGAGAATCAGGAGAACAACATGAACAACAGAAAGAACTACAGAGA | SEQ ID NO: |
| V477W_V265P | GGCCGTGAACACCATGGGCAAGAAGGAATTCACCCTGATCAAGATGCAGG | 19256 |
| | AGTACGGCTTCTGGCCCAAGAACCTGCCTACTCCCTACGAGAGGCAGGAA | |
| | AGCGAGACCGAGGAGCAGTACAAGGAGAGAAAGTGCCTGCTCGAGAAGTA | |
| | CGAGAAGGTGATCGACGAGATCAGCAAGCTGTACGAAGAGAAGGACAAGA | |
| | TCAACCTGAAGCTGAGGGAGCTCCAGAAGAAGTACGACGAGACCTGGGAC | |
| | TATGAGCGCATCCGGCTGGATGTGAGCAAGACCATCATGCAGGAGAGCAT | |
| | CGAGAGGAGAGCTGAAAGAAAGCGCCAGCGGGAGCTGGAGAAGGAGCAGC | |
| | GCTCCGAGGAGTGGAAGAAGGAGAAGGAGAACAAGATCGTCTTCATCGGC | |
| | AAGGGGTACAGCAGCCTGCTGTACGACAAGGAGACCGACGAGAACAAGCT | |
| | GCTGCTGCAGGAGCTCCCTATCATCAAGGATGATAAGGAGCTGGCCAACT | |
| | TCCTGGGCATCGAGTACAAGAAGCTGAGATTCCTGGTGTACCACCGGGAC | |
| | GTGATCTCCGTGGACAACTACCACAGATACACCATCCCCAAGAAGAAGGG | |
| | CGGCGTGAGAAACATCGCCGCTCCCAAGAGCATCCTGAAGAACTCCCAGA | |
| | GGATTATCCTCGAGGAGATTCTGAGCAAGATCCCCACCTCCAACTACAGC | |
| | CACGGCTTCCTGAAGGGGAAGTCCGTGGTGAGCGCCGCCAAGCCCCACGT | |
| | GAAGAAACCCGACCTCCTGATCAACATCGATCTGGAGGACTTCTTCCCCA | |
| | CCATCACCTTCGAGAGGGTGAGAGGCATGTTCAAGAGCTTCGGCTACAGC | |
| | GGATACGTGGCCAGCATGCTGGCCATGATCTGCACCTACTGCGAGAGGAT | |
| | GAAGGTGGAGGTGAGGGGCGAGGAGAAGTACGTCAAGATCAGCGACAGAA | |
| | TTCTGCCCCAGGGCAGCCCTGCCAGCCCCATGATCACCAACATCATCTGC | |
| | GTGAAGCTGGACAAGAGACTGAACGGCCTGAGCACCAAGTATGACTTCAT | |
| | TTATACTCGGTACGCTGACGACATGTCGTTCAGCTTCACCGGCGACATCA | |
| | ACGAACTGAGCGTCGGCAGCTTCATGGGCCTGGTGAGCAAGATCGTGAAG | |
| | GAAGAGGGCTTCAACATCAACAAGGACAAGACCAAGTTCCTGAGAAAGAA | |
| | CAACAGACAGTGCATCACCGGCATCGTGATCAACAACGAGGAGATCGGCG | |
| | TGCCCAAGAAGTGGATCAAGATCCTGAGAGCCGCCATCTACAACGCCAAT | |
| | AAGGTTAAGAATAGTGGAGAAATTCTAAGTAATAAAGTCATAAACGAGAT | |
| | CAGCGGCAAGACCTCCTGGGTGAAGTCCTTCAACGAGGAGAGATACAAGG | |
| | ACATCATCAACGATGCCATGAACCTGATCAACAACCCACCAAAGAAGAAA | |
| | AGAAAGGTCTGA | |
| 6342S_ | ATGGAGAGGAGAGCTGAAAGAAAGCGCCAGCGGGAGCTGGAGAAGGAGCA | SEQ ID NO: |
| ntermtrunc_ | GCGCTCCGAGGAGTGGAAGAAGGAGAAGGAGAACAAGATCGTCTTCATCG | 19257 |
| whelix | GCAAGGGGTACAGCAGCCTGCTGTACGACAAGGAGACCGACGAGAACAAG | |
| | CTGCTGCTGCAGGAGCTCCCTATCATCAAGGATGATAAGGAGCTGGCCAA | |
| | CTTCCTGGGCATCGAGTACAAGAAACTGAGATTCCTGGTGTACCACCGGG | |
| | ACGTGATCTCCGTGGACAACTACCACAGATACACCATCCCCAAGAAGAAG | |
| | GGCGGCGTGAGAAACATCGCCGCTCCCAAGAGCATCCTGAAGAACTCCCA | |
| | GAGGATTATCCTCGAGGAGATTCTGAGCAAGATCCCCACCTCCAACTACA | |
| | GCCACGGCTTCCTGAAGGGGAAGTCCGTGGTGAGCGCCGCCAAGGTGCAC | |
| | GTGAAGAAACCCGACCTCCTGATCAACATCGATCTGGAGGACTTCTTCCC | |
| | CACCATCACCTTCGAGAGGGTGAGAGGCATGTTCAAGAGCTTCGGCTACA | |
| | GCGGATACGTGGCCAGCATGCTGGCCATGATCTGCACCTACTGCGAGAGG | |
| | ATGAAGGTGGAGGTGAGGGGCGAGGAGAAGTACGTCAAGATCAGCGACAG | |
| | AATTCTGCCCCAGGGCAGCCCTGCCAGCCCCATGATCACCAACATCATCT | |
| | GCGTGAAGCTGGACAAGAGACTGAACGGCCTGAGCACCAAGTATGACTTC | |
| | ATTTATACTCGGTACGCTGACGACATGTCGTTCAGCTTCACCGGCGACAT | |
| | CAACGAACTGAGCGTCGGCAGCTTCATGGGCCTGGTGAGCAAGATCGTGA | |
| | AGGAAGAGGGCTTCAACATCAACAAGGACAAGACCAAGTTCCTGAGAAAG | |
| | AACAACAGACAGTGCATCACCGGCATCGTGATCAACAACGAGGAGATCGG | |
| | CGTGCCCAAGAAGTGGATCAAGATCCTGAGAGCCGCCATCTACAACGCCA | |
| | ACAAGGTGAAGAACAGCGGCGAGATCCTGAGCAATAAGGTGATCAACGAG | |
| | ATCAGCGGCATGACCTCCTGGGTGAAGTCCGTCAACGAAGAGAGATACAA | |
| | GGACaTTATCAACGATGCCATGAACCTGATCAACAACccaccaaagaaga | |
| | aaCGGaaggtctga | |
| Sso7d-PASTE | ATGACCGTCAAGTTCAAGTACAAGGGTGAGGAACTTGAAGTTGATATTAG | SEQ ID NO: |
| (v2)_WT 6342S | CAAAATCAAGAAGGTTTGGCGCGTTGGTAAAATGATATCTTTTACTTATG | 19258 |
| | ACGACAACGGCAAGACAGGTAGAGGGGCAGTGTCTGAGAAAGACGCCCCC | |
| | AAGGAGCTGTTGCAAATGTTGGAAAAGTCTGGGAAAAAGTCTGGCGGCTC | |
| | AAAAAGAACCGCCGACGGCAGCGAATTCGAGCCCAAGAAGAAGAGGAAAG | |
| | TCGGGACAGGTGGCGGTGGTGTCGAGAATCAGGAGAACAACATGAACAAC | |
| | AGAAAGAACTACAGAGAGGCCGTGAACACCATGGGCAAGAAGGAATTCAC | |
| | CCTGATCAAGATGCAGGAGTACGGCTTCTGGCCCAAGAACCTGCCTACTC | |
| | CCTACGAGAGGCAGGAAAGCGAGACCGAGGAGCAGTACAAGGAGAGAAAG | |
| | TGCCTGCTCGAGAAGTACGAGAAGGTGATCGACGAGATCAGCAAGCTGTA | |
| | CGAAGAGAAGGACAAGATCAACCTGAAGCTGAGGGAGCTCCAGAAGAAGT | |
| | ACGACGAGACCTGGGACTATGAGCGCATCCGGCTGGATGTGAGCAAGACC | |
| | ATCATGCAGGAGAGCATCGAGAGGAGAGCTGAAAGAAAGCGCCAGCGGGA | |
| | GCTGGAGAAGGAGCAGCGCTCCGAGGAGTGGAAGAAGGAGAAGGAGAACA | |
| | AGATCGTCTTCATCGGCAAGGGGTACAGCAGCCTGCTGTACGACAAGGAG | |
| | ACCGACGAGAACAAGCTGCTGCTGCAGGAGCTCCCTATCATCAAGGATGA | |
| | TAAGGAGCTGGCCAACTTCCTGGGCATCGAGTACAAGAAGCTGAGATTCC | |
| | TGGTGTACCACCGGGACGTGATCTCCGTGGACAACTACCACAGATACACC | |
| | ATCCCCAAGAAGAAGGGCGGCGTGAGAAACATCGCCGCTCCCAAGAGCAT | |
| | CCTGAAGAACTCCCAGAGGATTATCCTCGAGGAGATTCTGAGCAAGATCC | |
| | CCACCTCCAACTACAGCCACGGCTTCCTGAAGGGGAAGTCCGTGGTGAGC | |
| | GCCGCCAAGGTGCACGTGAAGAAACCCGACCTCCTGATCAACATCGATCT | |
| | GGAGGACTTCTTCCCCACCATCACCTTCGAGAGGGTGAGAGGCATGTTCA | |
| | AGAGCTTCGGCTACAGCGGATACGTGGCCAGCATGCTGGCCATGATCTGC | |
| | ACCTACTGCGAGAGGATGAAGGTGGAGGTGAGGGGCGAGGAGAAGTACGT | |
| | CAAGATCAGCGACAGAATTCTGCCCCAGGGCAGCCCTGCCAGCCCCATGA | |
| | TCACCAACATCATCTGCGTGAAGCTGGACAAGAGACTGAACGGCCTGAGC | |
| | ACCAAGTATGACTTCATTTATACTCGGTACGCTGACGACATGTCGTTCAG | |
| | CTTCACCGGCGACATCAACGAACTGAGCGTCGGCAGCTTCATGGGCCTGG | |
| | TGAGCAAGATCGTGAAGGAAGAGGGCTTCAACATCAACAAGGACAAGACC | |
| | AAGTTCCTGAGAAAGAACAACAGACAGTGCATCACCGGCATCGTGATCAA | |
| | CAACGAGGAGATCGGCGTGCCCAAGAAGTGGATCAAGATCCTGAGAGCCG | |
| | CCATCTACAACGCCAACAAGGTGAAGAACAGCGGCGAGATCCTGAGCAAC | |
| | AAGGTGATCAACGAGATCAGCGGCATGACCTCCTGGGTGAAGTCCGTCAA | |
| | CGAGGAGAGATACAAGGACATCATCAACGATGCCATGAACCTGATCAACA | |
| | AC | |
| Sso7d- | ATGACAGTGAAGTTCAAGTACAAGGGCGAGGAAAAGGAAGTCGACATCAG | SEQ ID NO: |
| ncbiprotein | CAAGATCAAGAAAGTGTGGCGGGTGGGCAAGATGATCAGCTTCACCTACG | 19259 |
| (v1)_WT 6342S | ACGAGGGCGGAGGAAAGACCGGCAGAGGCGCCGTGTCTGAGAAAGATGCC | |
| | CCTAAGGAGCTGCTGCAGATGCTGGAAAAACAGAAGAAGCCCAAGAAGAA | |
| | GAGGAAAGTCGGGACAGGTGGCGGTGGTGTCGAGAATCAGGAGAACAACA | |
| | TGAACAACAGAAAGAACTACAGAGAGGCCGTGAACACCATGGGCAAGAAG | |
| | GAATTCACCCTGATCAAGATGCAGGAGTACGGCTTCTGGCCCAAGAACCT | |
| | GCCTACTCCCTACGAGAGGCAGGAAAGCGAGACCGAGGAGCAGTACAAGG | |
| | AGAGAAAGTGCCTGCTCGAGAAGTACGAGAAGGTGATCGACGAGATCAGC | |
| | AAGCTGTACGAAGAGAAGGACAAGATCAACCTGAAGCTGAGGGAGCTCCA | |
| | GAAGAAGTACGACGAGACCTGGGACTATGAGCGCATCCGGCTGGATGTGA | |
| | GCAAGACCATCATGCAGGAGAGCATCGAGAGGAGAGCTGAAAGAAAGCGC | |
| | CAGCGGGAGCTGGAGAAGGAGCAGCGCTCCGAGGAGTGGAAGAAGGAGAA | |
| | GGAGAACAAGATCGTCTTCATCGGCAAGGGGTACAGCAGCCTGCTGTACG | |
| | ACAAGGAGACCGACGAGAACAAGCTGCTGCTGCAGGAGCTCCCTATCATC | |
| | AAGGATGATAAGGAGCTGGCCAACTTCCTGGGCATCGAGTACAAGAAGCT | |
| | GAGATTCCTGGTGTACCACCGGGACGTGATCTCCGTGGACAACTACCACA | |
| | GATACACCATCCCCAAGAAGAAGGGCGGCGTGAGAAACATCGCCGCTCCC | |
| | AAGAGCATCCTGAAGAACTCCCAGAGGATTATCCTCGAGGAGATTCTGAG | |
| | CAAGATCCCCACCTCCAACTACAGCCACGGCTTCCTGAAGGGGAAGTCCG | |
| | TGGTGAGCGCCGCCAAGGTGCACGTGAAGAAACCCGACCTCCTGATCAAC | |
| | ATCGATCTGGAGGACTTCTTCCCCACCATCACCTTCGAGAGGGTGAGAGG | |
| | CATGTTCAAGAGCTTCGGCTACAGCGGATACGTGGCCAGCATGCTGGCCA | |
| | TGATCTGCACCTACTGCGAGAGGATGAAGGTGGAGGTGAGGGGCGAGGAG | |
| | AAGTACGTCAAGATCAGCGACAGAATTCTGCCCCAGGGCAGCCCTGCCAG | |
| | CCCCATGATCACCAACATCATCTGCGTGAAGCTGGACAAGAGACTGAACG | |
| | GCCTGAGCACCAAGTATGACTTCATTTATACTCGGTACGCTGACGACATG | |
| | TCGTTCAGCTTCACCGGCGACATCAACGAACTGAGCGTCGGCAGCTTCAT | |
| | GGGCCTGGTGAGCAAGATCGTGAAGGAAGAGGGCTTCAACATCAACAAGG | |
| | ACAAGACCAAGTTCCTGAGAAAGAACAACAGACAGTGCATCACCGGCATC | |
| | GTGATCAACAACGAGGAGATCGGCGTGCCCAAGAAGTGGATCAAGATCCT | |
| | GAGAGCCGCCATCTACAACGCCAACAAGGTGAAGAACAGCGGCGAGATCC | |
| | TGAGCAACAAGGTGATCAACGAGATCAGCGGCATGACCTCCTGGGTGAAG | |
| | TCCGTCAACGAGGAGAGATACAAGGACATCATCAACGATGCCATGAACCT | |
| | GATCAACAAC | |
| Sac7d- | ATGGTGAAGGTGAAATTCAAGTACAAGGGCGAGGAAAAAGAGGTGGATAC | SEQ ID NO: |
| ncbiprotein | AAGCAAGATCAAGAAAGTGTGGAGAGTGGGAAAGATGGTCAGCTTCACCT | 19260 |
| (v2)_WT 6342S | ACGACGACAACGGCAAGACCGGCAGAGGCGCCGTGTCTGAGAAGGACGCC | |
| | CCTAAGGAACTGCTGGATATGCTGGCTAGAGCCGAGCGGGAAAAGAAGCC | |
| | CAAGAAGAAGAGGAAAGTCGGGACAGGTGGCGGTGGTGTCGAGAATCAGG | |
| | AGAACAACATGAACAACAGAAAGAACTACAGAGAGGCCGTGAACACCATG | |
| | GGCAAGAAGGAATTCACCCTGATCAAGATGCAGGAGTACGGCTTCTGGCC | |
| | CAAGAACCTGCCTACTCCCTACGAGAGGCAGGAAAGCGAGACCGAGGAGC | |
| | AGTACAAGGAGAGAAAGTGCCTGCTCGAGAAGTACGAGAAGGTGATCGAC | |
| | GAGATCAGCAAGCTGTACGAAGAGAAGGACAAGATCAACCTGAAGCTGAG | |
| | GGAGCTCCAGAAGAAGTACGACGAGACCTGGGACTATGAGCGCATCCGGC | |
| | TGGATGTGAGCAAGACCATCATGCAGGAGAGCATCGAGAGGAGAGCTGAA | |
| | AGAAAGCGCCAGCGGGAGCTGGAGAAGGAGCAGCGCTCCGAGGAGTGGAA | |
| | GAAGGAGAAGGAGAACAAGATCGTCTTCATCGGCAAGGGGTACAGCAGCC | |
| | TGCTGTACGACAAGGAGACCGACGAGAACAAGCTGCTGCTGCAGGAGCTC | |
| | CCTATCATCAAGGATGATAAGGAGCTGGCCAACTTCCTGGGCATCGAGTA | |
| | CAAGAAGCTGAGATTCCTGGTGTACCACCGGGACGTGATCTCCGTGGACA | |
| | ACTACCACAGATACACCATCCCCAAGAAGAAGGGCGGCGTGAGAAACATC | |
| | GCCGCTCCCAAGAGCATCCTGAAGAACTCCCAGAGGATTATCCTCGAGGA | |
| | GATTCTGAGCAAGATCCCCACCTCCAACTACAGCCACGGCTTCCTGAAGG | |
| | GGAAGTCCGTGGTGAGCGCCGCCAAGGTGCACGTGAAGAAACCCGACCTC | |
| | CTGATCAACATCGATCTGGAGGACTTCTTCCCCACCATCACCTTCGAGAG | |
| | GGTGAGAGGCATGTTCAAGAGCTTCGGCTACAGCGGATACGTGGCCAGCA | |
| | TGCTGGCCATGATCTGCACCTACTGCGAGAGGATGAAGGTGGAGGTGAGG | |
| | GGCGAGGAGAAGTACGTCAAGATCAGCGACAGAATTCTGCCCCAGGGCAG | |
| | CCCTGCCAGCCCCATGATCACCAACATCATCTGCGTGAAGCTGGACAAGA | |
| | GACTGAACGGCCTGAGCACCAAGTATGACTTCATTTATACTCGGTACGCT | |
| | GACGACATGTCGTTCAGCTTCACCGGCGACATCAACGAACTGAGCGTCGG | |
| | CAGCTTCATGGGCCTGGTGAGCAAGATCGTGAAGGAAGAGGGCTTCAACA | |
| | TCAACAAGGACAAGACCAAGTTCCTGAGAAAGAACAACAGACAGTGCATC | |
| | ACCGGCATCGTGATCAACAACGAGGAGATCGGCGTGCCCAAGAAGTGGAT | |
| | CAAGATCCTGAGAGCCGCCATCTACAACGCCAACAAGGTGAAGAACAGCG | |
| | GCGAGATCCTGAGCAACAAGGTGATCAACGAGATCAGCGGCATGACCTCC | |
| | TGGGTGAAGTCCGTCAACGAGGAGAGATACAAGGACATCATCAACGATGC | |
| | CATGAACCTGATCAACAAC | |
| Sac7d-ncbigene | ATGGTCAAGGTGAAGTTCAAGTACAAGGGCGAGGAAAAAGAGGTGGATAC | SEQ ID NO: |
| (v1)_WT 6342S | AAGCAAGATCAAGAAAGTGTGGAGAGTGGGAAAAATGGTGAGCTTCACCT | 19261 |
| | ACGACGACAACGGCAAGACCGGCAGAGGCGCCGTGTCTGAGAAGGACGCC | |
| | CCTAAGGAACTGCTGGATATGCTGGCTAGAGCCGAGCGGGAAAAGAAGCC | |
| | CAAGAAGAAGAGGAAAGTCGGGACAGGTGGCGGTGGTGTCGAGAATCAGG | |
| | AGAACAACATGAACAACAGAAAGAACTACAGAGAGGCCGTGAACACCATG | |
| | GGCAAGAAGGAATTCACCCTGATCAAGATGCAGGAGTACGGCTTCTGGCC | |
| | CAAGAACCTGCCTACTCCCTACGAGAGGCAGGAAAGCGAGACCGAGGAGC | |
| | AGTACAAGGAGAGAAAGTGCCTGCTCGAGAAGTACGAGAAGGTGATCGAC | |
| | GAGATCAGCAAGCTGTACGAAGAGAAGGACAAGATCAACCTGAAGCTGAG | |
| | GGAGCTCCAGAAGAAGTACGACGAGACCTGGGACTATGAGCGCATCCGGC | |
| | TGGATGTGAGCAAGACCATCATGCAGGAGAGCATCGAGAGGAGAGCTGAA | |
| | AGAAAGCGCCAGCGGGAGCTGGAGAAGGAGCAGCGCTCCGAGGAGTGGAA | |
| | GAAGGAGAAGGAGAACAAGATCGTCTTCATCGGCAAGGGGTACAGCAGCC | |
| | TGCTGTACGACAAGGAGACCGACGAGAACAAGCTGCTGCTGCAGGAGCTC | |
| | CCTATCATCAAGGATGATAAGGAGCTGGCCAACTTCCTGGGCATCGAGTA | |
| | CAAGAAGCTGAGATTCCTGGTGTACCACCGGGACGTGATCTCCGTGGACA | |
| | ACTACCACAGATACACCATCCCCAAGAAGAAGGGCGGCGTGAGAAACATC | |
| | GCCGCTCCCAAGAGCATCCTGAAGAACTCCCAGAGGATTATCCTCGAGGA | |
| | GATTCTGAGCAAGATCCCCACCTCCAACTACAGCCACGGCTTCCTGAAGG | |
| | GGAAGTCCGTGGTGAGCGCCGCCAAGGTGCACGTGAAGAAACCCGACCTC | |
| | CTGATCAACATCGATCTGGAGGACTTCTTCCCCACCATCACCTTCGAGAG | |
| | GGTGAGAGGCATGTTCAAGAGCTTCGGCTACAGCGGATACGTGGCCAGCA | |
| | TGCTGGCCATGATCTGCACCTACTGCGAGAGGATGAAGGTGGAGGTGAGG | |
| | GGCGAGGAGAAGTACGTCAAGATCAGCGACAGAATTCTGCCCCAGGGCAG | |
| | CCCTGCCAGCCCCATGATCACCAACATCATCTGCGTGAAGCTGGACAAGA | |
| | GACTGAACGGCCTGAGCACCAAGTATGACTTCATTTATACTCGGTACGCT | |
| | GACGACATGTCGTTCAGCTTCACCGGCGACATCAACGAACTGAGCGTCGG | |
| | CAGCTTCATGGGCCTGGTGAGCAAGATCGTGAAGGAAGAGGGCTTCAACA | |
| | TCAACAAGGACAAGACCAAGTTCCTGAGAAAGAACAACAGACAGTGCATC | |
| | ACCGGCATCGTGATCAACAACGAGGAGATCGGCGTGCCCAAGAAGTGGAT | |
| | CAAGATCCTGAGAGCCGCCATCTACAACGCCAACAAGGTGAAGAACAGCG | |
| | GCGAGATCCTGAGCAACAAGGTGATCAACGAGATCAGCGGCATGACCTCC | |
| | TGGGTGAAGTCCGTCAACGAGGAGAGATACAAGGACATCATCAACGATGC | |
| | CATGAACCTGATCAACAAC | |

### Plasmid Sequences

| Name | Desc | Sequence | SEQ ID NO: |
|---|---|---|---|
| Eco1 RT | Coding sequence only. | AUGAAAUCUGCAGAGUAUCUGAAUACGUUCCGCCUU | SEQ ID NO: |
| | RNA was produced from a | AGGAAUUUGGGCCUCCCCGUGAUGAACAAUCUCCAC | 19262 |
| | CRO and proprietary 5′ cap, | GAUAUGAGCAAGGCGACUCGAAUAUCCGUGGAAACG | |
| | 5′ UTR, 3′ UTR and | CUGAGACUGCUCAUCUAUACAGCAGACUUUCGGUAC | |
| | encoded poly A of around | AGGAUCUACACGGUCGAAAAGAAGGGGCCUGAGAAA | |
| | 120 bases were added. Full | CGCAUGCGAACAAUUUAUCAACCUAGCCGAGAGCUC | |
| | substitution with 1N- | AAGGCGUUGCAGGGCUGGGUUCUUCGAAACAUCCUU | |
| | methyl-pseudouridine | GACAAACUCUCAUCAUCACCCUUUAGUAUUGGGUUU | |
| | | GAAAAGCACCAAAGCAUCCUUAACAACGCGACGCCA | |
| | | CACAUAGGUGCCAAUUUCAUAUUGAACAUCGACUUG | |
| | | GAGGAUUUUUUUCCGAGCCUCACAGCCAAUAAAGUG | |
| | | UUCGGUGUUUUUCACAGUCUUGGGUACAAUCGCCUU | |
| | | AUUAGUUCCGUUCUUACCAAGAUUUGUUGUUACAAG | |
| | | AAUCUCUUGCCCCAGGGAGCACCCAGCAGUCCGAAA | |
| | | UUGGCGAAUUUGAUUUGUUCCAAGCUCGAUUAUCGA | |
| | | AUACAAGGGUACGCGGGCAGCCGGGGACUCAUCUAU | |
| | | ACCCGCUACGCAGACGAUCUUACGCUGUCUGCCCAA | |
| | | UCAAUGAAGAAGGUCGUAAAGGCGCGGGAUUUCUUG | |
| | | UUUUCUAUCAUCCCGUCCGAGGGCUUGGUAAUUAAU | |
| | | UCCAAAAAGACUUGUAUCUCAGGACCACGAUCUCAG | |
| | | CGAAAAGUGACAGGACUCGUCAUUUCUCAAGAAAAA | |
| | | GUCGGUAUAGGGAGAGAGAAGUAUAAGGAAAUCCGC | |
| | | GCGAAGAUCCACCACAUAUUCUGUGGCAAGAGCAGC | |
| | | GAGAUAGAACACGUCCGAGGCUGGUUGUCCUUCAUA | |
| | | CUGAGCGUGGACUCAAAAAGCCACCGCCGGUUGAUC | |
| | | ACCUAUAUUUCAAAACUGGAAAAGAAAUAUGGAAAG | |
| | | AACCCACUCAACAAAGCUAAAACACCACCAAAGAAG | |
| | | AAAAGAAAGGUCUGA | |
| Eco1 ncRNA- | ncRNA-sgRNA fusion (6 | GAAAUGAUAAGAUUCCGUAUGCGCACCCUUAGCGAG | SEQ ID NO: |
| sgRNA | bp substition in EMX1 | AGGUUUAUCAUUAAGGUCAACCUCUGGAUGUUGUUU | 19263 |
| | gene) | CGGCAUCCUGCAUUGAAUCUGAGUUACUGUCUGUUU | |
| | | UCCUACAAACGGCAGAAGCUGGAGGAGGAAGGGCCU | |
| | | GAGUCCGAGCAGAAGAAAAAGUUCUCCCAUCACAUC | |
| | | AACCGGUGGCGCAUUGCCACGAAGCAGGCCAAUGGG | |
| | | GAGGACAUCGAUGUCAAGGAAACCCGUUUCUUCUGA | |
| | | CGUAAGGGUGCGCAUACGGAAUCUUAUCAGAGUCCG | |
| | | AGCAGAAGAAGAAGUUUCAGAGCUAUGCUGGAAACA | |
| | | GCAUAGCAAGUUGAAAUAAGGCUAGUCCGUUAUCAA | |
| | | CUUGAAAAAGUGGCACCGAGUCGGUGCUUUUUUUUU | |
| | | UUU | |
| Eco3 RT | Coding sequence only. | AUGCGCAUUUACUCUCUGAUCGACAGCCAAACCUUA | SEQ ID NO: |
| | RNA was produced from a | AUGACCAAAGGGUUCGCAUCCGAGGUCAUGAGGAGC | 19264 |
| | CRO and proprietary 5′ cap, | CCAGAACCCCCUAAGAAGUGGGACAUUGCGAAGAAG | |
| | 5′ UTR, 3′ UTR and | AAGGGCGGAAUGCGUACGAUAUACCAUCCCUCUUCU | |
| | encoded poly A of around | AAGGUGAAGCUGAUACAGUACUGGCUGAUGAACAAC | |
| | 120 bases were added. Full | GUGUUCUCCAAAUUGCCGAUGCACAACGCCGCGUAC | |
| | substitution with 1N- | GCUUUCGUGAAGAAUAGAUCUAUCAAGUCUAACGCA | |
| | methyl-pseudouridine | CUGCUGCACGCAGAGAGUAAGAACAAAUACUACGUU | |
| | | AAGAUUGACCUGAAGGACUUCUUUCCAAGCAUCAAG | |
| | | UUCACAGACUUCGAAUAUGCCUUUACCCGGUACCGU | |
| | | GACAGAAUAGAGUUCACGACCGAGUACGACAAAGAA | |
| | | CUGCUUCAGCUGAUUAAGACCAUUUGUUUCAUUUCU | |
| | | GACUCUACACUGCCAAUAGGCUUCCCCACUUCCCCUC | |
| | | UUAUAGCCAAUUUCGUCGCCAGGGAGCUGGACGAGA | |
| | | AGCUCACUCAGAAGCUGAACGCUAUAGACAAGCUCA | |
| | | ACGCUACGUACACUCGCUACGCAGACGACAUAAUCG | |
| | | UGAGCACGAACAUGAAGGGCGCCUCUAAGCUGAUCU | |
| | | UAGACUGCUUCAAGCGGACCAUGAAGGAAAUCGGAC | |
| | | CCGAUUUCAAGAUCAAUAUCAAGAAGUUCAAAAUAU | |
| | | GCUCUGCCAGUGGCGGCUCAAUUGUCGUGACGGGCC | |
| | | UUAAGGUCUGUCAUGACUUCCACAUAACUCUGCACC | |
| | | GGUCUAUGAAGGACAAGAUCCGCCUGCACCUCUCUC | |
| | | UCCUGUCCAAAGGUAUUCUGAAGGACGAGGACCACA | |
| | | ACAAGCUGUCCGGGUACAUCGCCUACGCUAAGGACA | |
| | | UCGAUCCACACUUCUACACCAAGCUCAAUAGGAAGU | |
| | | ACUUCCAGGAGAUCAAGUGGAUACAAAACCUGCAUA | |
| | | AUAAGGUGGAGCCACCAAAGAAGAAAAGAAAGGUCU | |
| | | GA | |
| Eco3 ncRNA- | ncRNA-sgRNA fusion (10 | GAAAUGAUAAGAUUCCGUAAGAGCCAAACCUAGCAU | SEQ ID NO: |
| sgRNA | bp insertion in EMX1 gene) | UUUAUGGGUUAAUAGCCCAUCGGGCCAUGAGUCAUG | 19265 |
| | | GUUUCGCCUAGUAUUUUAGCUAUGCCCGUCGUUCAG | |
| | | UUCGCUGAACAAACGGCAGAAGCUGGAGGAGGAAGG | |
| | | GCCUGAGUCCGAGCAGAAGAAUUACGUCUGCAAAGU | |
| | | UCUCCCAUCACAUCAACCGGUGGCGCAUUGCCACGA | |
| | | AGCAGGCCAAUGGGGAGGACAUCGAUGUCAUCAGCG | |
| | | AACUGAUCGACGUGCUCAAGUAGGUUUGGCUCUUAC | |
| | | GGAAUCUUAUCAGAGUCCGAGCAGAAGAAGAAGUUU | |
| | | CAGAGCUAUGCUGGAAACAGCAUAGCAAGUUGAAAU | |
| | | AAGGCUAGUCCGUUAUCAACUUGAAAAAGUGGCACC | |
| | | GAGUCGGUGCUUUUUUUUUUUU | |
| Eco5 RT | Coding sequence only. | AUGGACGCUACCAGAACGACUCUCCUUGCAUUGGAU | SEQ ID NO: |
| | RNA was produced from a | CUCUUCGGAUCUCCAGGUUGGUCCGCCGAUAAAGAA | 19266 |
| | CRO and proprietary 5′ cap, | AUUCAGAGGCUUCAUGCGCUCAGUAAUCAUGCUGGA | |
| | 5′ UTR, 3′ UTR and | AGGCAUUACAGAAGGAUUAUAUUAAGUAAAAGGCAC | |
| | encoded poly A of around | GGCGGACAGCGUCUUGUGCUUGCACCUGAUUACUUG | |
| | 120 bases were added. Full | UUAAAGACCGUUCAGCGCAACAUUUUGAAGAACGUU | |
| | substitution with 1N- | UUGAGUCAAUUUCCACUGUCACCAUUUGCUACAGCC | |
| | mcthyl-pscudouridinc | UACAGACCGGGAUGCCCAAUCGUGUCUAACGCGCAG | |
| | | CCACACUGCCAACAGCCACAGAUCUUGAAACUCGAU | |
| | | AUAGAAAACUUCUUCGAUUCUAUUAGUUGGUUGCAG | |
| | | GUGUGGCGGGUGUUUCGCCAGGCCCAGUUGCCCCGA | |
| | | AAUGUCGUAACGAUGCUCACUUGGAUAUGUUGUUAU | |
| | | AACGACGCACUUCCGCAGGGUGCCCCUACAUCCCCU | |
| | | GCAAUUUCCAAUCUCGUCAUGAGAAGGUUUGAUGAA | |
| | | CGGAUUGGAGAAUGGUGUCAGGCUCGAGGGAUUACC | |
| | | UACACUCGCUACUGCGAUGACAUGACGUUUAGUGGA | |
| | | CACUUCAAUGCAAGGCAGGUCAAGAAUAAAGUCUGC | |
| | | GGUCUCUUAGCUGAGCUGGGCCUUUCCCUGAAUAAA | |
| | | CGGAAAGGCUGCCUCAUAGCGGCUUGUAAGCGCCAG | |
| | | CAAGUCACCGGCAUUGUUGUGAAUCACAAGCCACAG | |
| | | CUUGCCCGAGAAGCCAGGCGUGCCCUGCGUCAGGAA | |
| | | GUGCACCUGUGCCAGAAAUAUGGAGUUAUCUCUCAU | |
| | | CUCUCACAUAGAGGUGAACUGGAUCCUAGCGGAGAU | |
| | | CUGCACGCUCAGGCGACAGCGUAUCUCUAUGCACUC | |
| | | CAGGGGAGAAUUAACUGGCUUCUUCAAAUUAACCCU | |
| | | GAGGAUGAGGCGUUUCAACAGGCCCGGGAGUCCGUU | |
| | | AAGAGGAUGUUAGUUGCCUGGCCACCAAAGAAGAAA | |
| | | AGAAAGGUCUGA | |
| Eco5 ncRNA- | ncRNA-sgRNA fusion (10 | GAAAUGAUAAGAUUCCGUACGCCAGCAGUGGCAAUA | SEQ ID NO: |
| sgRNA | bp insertion in EMX1 gene) | GCGUUUCCGGCCUUUUGUGCCGGGAGGGUCGGCGAG | 19267 |
| | | UCGCUGACUUAACGCCAGUAGUAUGUCCAUAUACCC | |
| | | AAAGUCGCUUCAUUGUAACAAACGGCAGAAGCUGGA | |
| | | GGAGGAAGGGCCUGAGUCCGAGCAGAAGAAUCCUUC | |
| | | GAGCAAAGUUCUCCCAUCACAUCAACCGGUGGCGCA | |
| | | UUGCCACGAAGCAGGCCAAUGGGGAGGACAUCGAUG | |
| | | UCAUACAGUUACGCGCCUUCGGGAUGGUUUAAUGGU | |
| | | AUUGCCGCUGUUGGCGUACGGAAUCUUAUCAGAGUC | |
| | | CGAGCAGAAGAAGAAGUUUCAGAGCUAUGCUGGAAA | |
| | | CAGCAUAGCAAGUUGAAAUAAGGCUAGUCCGUUAUC | |
| | | AACUUGAAAAAGUGGCACCGAGUCGGUGCUUUUUUU | |
| | | UUUUU | |
| Cas9 | Sequence taken from | GGGUCCCGCAGUCGGCGUCCAGCGGCUCUGCUUGUU | SEQ ID NO: |
| | Intellia patent. All U are N- | CGUGUGUGUGUCGUUGCAGGCCUUAUUCGGAUC | 19268 |
| | 1-methylpseudouridine. | CGCCACCAUGGACAAGAAGUACAGCAUCGGACUGGA | |
| | | CAUCGGAACAAACAGCGUCGGAUGGGCAGUCAU | |
| | | CACAGACGAAUACAAGGUCCCGAGCAAGAAGUUCAA | |
| | | GGUCCUGGGAAACACAGACAGACACAGCAUCAA | |
| | | GAAGAACCUGAUCGGAGCACUGCUGUUCGACAGCGG | |
| | | AGAAACAGCAGAAGCAACAAGACUGAAGAGAAC | |
| | | AGCAAGAAGAAGAUACACAAGAAGAAAGAACAGAAU | |
| | | CUGCUACCUGCAGGAAAUCUUCAGCAACGAAAU | |
| | | GGCAAAGGUCGACGACAGCUUCUUCCACAGACUGGA | |
| | | AGAAAGCUUCCUGGUCGAAGAAGACAAGAAGCA | |
| | | CGAAAGACACCCGAUCUUCGGAAACAUCGUCGACGA | |
| | | AGUCGCAUACCACGAAAAGUACCCGACAAUCUAC | |
| | | CACCUGAGAAAGAAGCUGGUCGACAGCACAGACAAG | |
| | | GCAGACCUGAGACUGAUCUACCUGGCACUGGCA | |
| | | CACAUGAUCAAGUUCAGAGGACACCUCCUGAUCGAA | |
| | | GGAGACCUGAACCCGGACAACAGCGACGUCGAC | |
| | | AAGCUGUUCAUCCAGCUGGUCCAGACAUACAACCAG | |
| | | CUGUUCGAAGAAAACCCGAUCAACGCAAGCGGA | |
| | | GUCGACGCAAAGGCAAUCCUGAGCGCAAGACUGAGC | |
| | | AAGAGCAGAAGACUGGAAAACCUGAUCGCACAG | |
| | | CUGCCGGGAGAAAAGAAGAACGGACUGUUCGGAAAC | |
| | | CUGAUCGCACUGAGCCUGGGACUGACACCGAAC | |
| | | UUCAAGAGCAACUUCGACCUGGCAGAAGACGCAAAG | |
| | | CUGCAGCUGAGCAAGGACACAUACGACGACGAC | |
| | | CUGGACAACCUGCUGGCACAGAUCGGAGACCAGUAC | |
| | | GCAGACCUGUUCCUGGCAGCAAAGAACCUGAGC | |
| | | GACGCAAUCCUGCUGAGCGACAUCCUGAGAGUCAAC | |
| | | ACAGAAAUCACAAAGGCACCGCUGAGCGCAAGC | |
| | | AUGAUCAAGAGAUACGACGAACACCACCAGGACCUG | |
| | | ACACUGCUGAAGGCACUGGUCAGACAGCAGCUG | |
| | | CCGGAAAAGUACAAGGAAAUCUUCUUCGACCAGAGC | |
| | | AAGAACGGAUACGCAGGAUACAUCGACGGAGGA | |
| | | GCAAGCCAGGAAGAAUUCUACAAGUUCAUCAAGCCG | |
| | | AUCCUGGAAAAGAUGGACGGAACAGAAGAACUG | |
| | | CUGGUCAAGCUGAACAGAGAAGACCUGCUGAGAAAG | |
| | | CAGAGAACAUUCGACAACGGAAGCAUCCCGCAC | |
| | | CAGAUCCACCUGGGAGAACUGCACGCAAUCCUGAGA | |
| | | AGACAGGAAGACUUCUACCCGUUCCUGAAGGAC | |
| | | AACAGAGAAAAGAUCGAAAAGAUCCUGACAUUCAGA | |
| | | AUCCCGUACUACGUCGGACCGCUGGCAAGAGGA | |
| | | AACAGCAGAUUCGCAUGGAUGACAAGAAAGAGCGAA | |
| | | GAAACAAUCACACCGUGGAACUUCGAAGAAGUC | |
| | | GUCGACAAGGGAGCAAGCGCACAGAGCUUCAUCGAA | |
| | | AGAAUGACAAACUUCGACAAGAACCUGCCGAAC | |
| | | GAAAAGGUCCUGCCGAAGCACAGCCUGCUGUACGAA | |
| | | UACUUCACAGUCUACAACGAACUGACAAAGGUC | |
| | | AAGUACGUCACAGAAGGAAUGAGAAAGCCGGCAUUC | |
| | | CUGAGCGGAGAACAGAAGAAGGCAAUCGUCGAC | |
| | | CUGCUGUUCAAGACAAACAGAAAGGUCACAGUCAAG | |
| | | CAGCUGAAGGAAGACUACUUCAAGAAGAUCGAA | |
| | | UGCUUCGACAGCGUCGAAAUCAGCGGAGUCGAAGAC | |
| | | AGAUUCAACGCAAGCCUGGGAACAUACCACGAC | |
| | | CUGCUGAAGAUCAUCAAGGACAAGGACUUCCUGGAC | |
| | | AACGAAGAAAACGAAGACAUCCUGGAAGACAUC | |
| | | GUCCUGACACUGACACUGUUCGAAGACAGAGAAAUG | |
| | | AUCGAAGAAAGACUGAAGACAUACGCACACCUG | |
| | | UUCGACGACAAGGUCAUGAAGCAGCUGAAGAGAAGA | |
| | | AGAUACACAGGAUGGGGAAGACUGAGCAGAAAG | |
| | | CUGAUCAACGGAAUCAGAGACAAGCAGAGCGGAAAG | |
| | | ACAAUCCUGGACUUCCUGAAGAGCGACGGAUUC | |
| | | GCAAACAGAAACUUCAUGCAGCUGAUCCACGACGAC | |
| | | AGCCUGACAUUCAAGGAAGACAUCCAGAAGGCA | |
| | | CAGGUCAGCGGACAGGGAGACAGCCUGCACGAACAC | |
| | | AUCGCAAACCUGGCAGGAAGCCCGGCAAUCAAG | |
| | | AAGGGAAUCCUGCAGACAGUCAAGGUCGUCGACGAA | |
| | | CUGGUCAAGGUCAUGGGAAGACACAAGCCGGAA | |
| | | AACAUCGUCAUCGAAAUGGCAAGAGAAAACCAGACA | |
| | | ACACAGAAGGGACAGAAGAACAGCAGAGAAAGAAUG | |
| | | AAGAGAAUCGAAGAAGGAAUCAAGGAACUGGGAAGC | |
| | | CAGAUCCUGAAGGAACACCCGGUCGAAAAC | |
| | | ACACAGCUGCAGAACGAAAAGCUGUACCUGUACUAC | |
| | | CUGCAGAACGGAAGAGACAUGUACGUCGACCAG | |
| | | GAACUGGACAUCAACAGACUGAGCGACUACGACGUC | |
| | | GACCACAUCGUCCCGCAGAGCUUCCUGAAGGACG | |
| | | ACAGCAUCGACAACAAGGUCCUGACAAGAAGCGACA | |
| | | AGAACAGAGGAAAGAGCGACAACGUCCCGAGCG | |
| | | AAGAAGUCGUCAAGAAGAUGAAGAACUACUGGAGAC | |
| | | AGCUGCUGAACGCAAAGCUGAUCACACAGAGAA | |
| | | AGUUCGACAACCUGACAAAGGCAGAGAGAGGAGGAC | |
| | | UGAGCGAACUGGACAAGGCAGGAUUCAUCAAGA | |
| | | GACAGCUGGUCGAAACAAGACAGAUCACAAAGCACG | |
| | | UCGCACAGAUCCUGGACAGCAGAAUGAACACAA | |
| | | AGUACGACGAAAACGACAAGCUGAUCAGAGAAGUCA | |
| | | AGGUCAUCACACUGAAGAGCAAGCUGGUCAGCG | |
| | | ACUUCAGAAAGGACUUCCAGUUCUACAAGGUCAGAG | |
| | | AAAUCAACAACUACCACCACGCACACGACGCAU | |
| | | ACCUGAACGCAGUCGUCGGAACAGCACUGAUCAAGA | |
| | | AGUACCCGAAGCUGGAAAGCGAAUUCGUCUACG | |
| | | GAGACUACAAGGUCUACGACGUCAGAAAGAUGAUCG | |
| | | CAAAGAGCGAACAGGAAAUCGGAAAGGCAACAG | |
| | | CAAAGUACUUCUUCUACAGCAACAUCAUGAACUUCU | |
| | | UCAAGACAGAAAUCACACUGGCAAACGGAGAAA | |
| | | UCAGAAAGAGACCGCUGAUCGAAACAAACGGAGAAA | |
| | | CAGGAGAAAUCGUCUGGGACAAGGGAAGAGACU | |
| | | UCGCAACAGUCAGAAAGGUCCUGAGCAUGCCGCAGG | |
| | | UCAACAUCGUCAAGAAGACAGAAGUCCAGACAG | |
| | | GAGGAUUCAGCAAGGAAAGCAUCCUGCCGAAGAGAA | |
| | | ACAGCGACAAGCUGAUCGCAAGAAAGAAGGACU | |
| | | GGGACCCGAAGAAGUACGGAGGAUUCGACAGCCCGA | |
| | | CAGUCGCAUACAGCGUCCUGGUCGUCGCAAAGG | |
| | | UCGAAAAGGGAAAGAGCAAGAAGCUGAAGAGCGUCA | |
| | | AGGAACUGCUGGGAAUCACAAUCAUGGAAAGAA | |
| | | GCAGCUUCGAAAAGAACCCGAUCGACUUCCUGGAAG | |
| | | CAAAGGGAUACAAGGAAGUCAAGAAGGACCUGA | |
| | | UCAUCAAGCUGCCGAAGUACAGCCUGUUCGAACUGG | |
| | | AAAACGGAAGAAAGAGAAUGCUGGCAAGCGCAG | |
| | | GAGAACUGCAGAAGGGAAACGAACUGGCACUGCCGA | |
| | | GCAAGUACGUCAACUUCCUGUACCUGGCAAGCC | |
| | | ACUACGAAAAGCUGAAGGGAAGCCCGGAAGACAACG | |
| | | AACAGAAGCAGCUGUUCGUCGAACAGCACAAGC | |
| | | ACUACCUGGACGAAAUCAUCGAACAGAUCAGCGAAU | |
| | | UCAGCAAGAGAGUCAUCCUGGCAGACGCAAACC | |
| | | UGGACAAGGUCCUGAGCGCAUACAACAAGCACAGAG | |
| | | ACAAGCCGAUCAGAGAACAGGCAGAAAACAUCA | |
| | | UCCACCUGUUCACACUGACAAACCUGGGAGCACCGG | |
| | | CAGCAUUCAAGUACUUCGACACAACAAUCGACAG | |
| | | AAAGAGAUACACAAGCACAAAGGAAGUCCUGGACGC | |
| | | AACACUGAUCCACCAGAGCAUCACAGGACUGUA | |
| | | CGAAACAAGAAUCGACCUGAGCCAGCUGGGAGGAGA | |
| | | CGGAGGAGGAAGCCCGAAGAAGAAGAGAAAGGU | |
| | | CUAGCUAGCCAUCACAUUUAAAAGCAUCUCAGCCUA | |
| | | CCAUGAGAAUAAGAGAAAGAAAAUGAAGAUCAA | |
| | | UAGCUUAUUCAUCUCUUUUUCUUUUUCGUUGGUGUA | |
| | | AAGCCAACACCCUGUCUAAAAAACAUAAAUUUC | |
| | | UUUAAUCAUUUUGCCUCUUUUCUCUGUGCUUCAAUU | |
| | | AAUAAAAAAUGGAAAGAACCUCGAGAAAAAAAA | |
| | | AAAAAAAAAAAAAAAAAAAAAAAAAAAAAAAAAAA | |
| | | AAAAAAAAAAAAAAAAAAAAAAAAAAAAAAAAA | |
| | | AAAAAAAAAAAAAAUCUAG | |
| EMX1 sgRNA | Contains chemical | GAGUCCGAGCAGAAGAAGAAGUUUCAGAGCUAUGCU | SEQ ID NO: |
| modified | modifications from | GGAAACAGCAUAGCAAGUUGAAAUAAGGCUAGUCCG | 19269 |
| | Synthego: 2′-F, 2′-O- | UUAUCAACUUGAAAAAGUGGCACCGAGUCGGUGCUU | |
| | methyl, phosphorothioates | UUU | |
| EMX1 sgRNA | No modifications | GAGUCCGAGCAGAAGAAGAAGUUUCAGAGCUAUGCU | SEQ ID NO: |
| unmodified | | GGAAACAGCAUAGCAAGUUGAAAUAAGGCUAGUCCG | 19270 |
| | | UUAUCAACUUGAAAAAGUGGCACCGAGUCGGUGCUU | |
| | | UUU | |
| Eco3 ncRNA | Eco3 ncRNA only with 10 | GGGAUAAUUGAUAAGAUUCCGUAAGAGCCAAACCUA | SEQ ID NO: |
| | bp insertion | GCAUUUUAUGGGUUAAUAGCCCAUCGGGCCAUGAGU | 19271 |
| | | CAUGGUUUCGCCUAGUAUUUUAGCUAUGCCCGUCGU | |
| | | UCAGUUCGCUGAACAAACGGCAGAAGCUGGAGGAGG | |
| | | AAGGGCCUGAGUCCGAGCAGAAGAAUUACGUCUGCA | |
| | | AAGUUCUCCCAUCACAUCAACCGGUGGCGCAUUGCC | |
| | | ACGAAGCAGGCCAAUGGGGAGGACAUCGAUGUCAUC | |
| | | AGCGAACUGAUCGACGUGCUCAAGUAGGUUUGGCUC | |
| | | UUACGGAAUCUUAUCAGAU | |
| Eco3 ncRNA- | Eco3 ncRNA only with 10 | GGGAUAAUUGAUAAGAUUCCGUAAGAGCCAAACCUA | SEQ ID NO: |
| MS2 | bp insertion and 3′ MS2 | GCAUUUUAUGGGUUAAUAGCCCAUCGGGCCAUGAGU | 19272 |
| | stem loop | CAUGGUUUCGCCUAGUAUUUUAGCUAUGCCCGUCGU | |
| | | UCAGUUCGCUGAACAAACGGCAGAAGCUGGAGGAGG | |
| | | AAGGGCCUGAGUCCGAGCAGAAGAAUUACGUCUGCA | |
| | | AAGUUCUCCCAUCACAUCAACCGGUGGCGCAUUGCC | |
| | | ACGAAGCAGGCCAAUGGGGAGGACAUCGAUGUCAUC | |
| | | AGCGAACUGAUCGACGUGCUCAAGUAGGUUUGGCUC | |
| | | UUACGGAAUCUUAUCAACAUGAGGAUCACCCAUGUG | |
| | | AU | |
| Eco3 cicular | Eco3 ncRNA only wih | UACCGGCGAAACAAAAGAAAAAACCAAAAAAACAAA | SEQ ID NO: |
| ncRNA | 10 bp insertion in circular | ACACAUGAUAAGAUUCCGUAAGAGCCAAACCUAGCA | 19273 |
| | format | UUUUAUGGGUUAAUAGCCCAUCGGGCCAUGAGUCAU | |
| | | GGUUUCGCCUAGUAUUUUAGCUAUGCCCGUCGUUCA | |
| | | GUUCGCUGAACAAACGGCAGAAGCUGGAGGAGGAAG | |
| | | GGCCUGAGUCCGAGCAGAAGAAUUACGUCUGCAAAG | |
| | | UUCUCCCAUCACAUCAACCGGUGGCGCAUUGCCACG | |
| | | AAGCAGGCCAAUGGGGAGGACAUCGAUGUCAUCAGC | |
| | | GAACUGAUCGACGUGCUCAAGUAGGUUUGGCUCUUA | |
| | | CGGAAUCUUAUCAAAAAAACAAAAAACAAAACGGCU | |
| | | AUUAUGCGUUACCGGCG | |
| Aco1 RT | Aco1 RT RNA sequence | AGGGGGAAAUAAGAGAGAAAAGAAGAGUAAGAAGA | SEQ ID NO: |
| | including 5′ and 3′ UTRs | AAUAUAAGAGCCACCAUGGAGCCCAAUGACUACGUA | 19274 |
| | | AAUAGGUUGCGACAUGCUAUGGAAAUAAGUGAAAAC | |
| | | CCGCGCUUUAGCCCUGAGUACAUUGCUCAAUGUUGU | |
| | | ACUUACGCCGAGAAUCUCCUCAAGCAAGGGCUGCCA | |
| | | GUUCUGUUCGAUCAAACGCAUAUUCGGAAAGUUCUG | |
| | | GGGAUGGCGGCACCUCGAUUGUGUGAUUAUCACAGA | |
| | | UUCACAAUCCCAAAGCACAACGGAUCUAGAAUUAUC | |
| | | ACGGCCCCAUCUAGGAAGCUGAAGCUUCGACAACAA | |
| | | UGGAUAUACCAGAAUAUCCUUAUACGAAAGGAGGCU | |
| | | UCACCGUACACGCACGGAUUUGUUCCUGAACGCAGC | |
| | | AUCGUGACUAACGCAAUCCUCCAUAUAGGAUACGCA | |
| | | UACACCUACUGCGUGGAUAUCACGGAUUUCUUUCCU | |
| | | AGCAUCACUAAGAAGCAGGUCUUGCCUAUAUUCCGA | |
| | | AAUAUGGGCUAUAGUGGUUCUGCUGCAAAUACUCUC | |
| | | UGCGACCUCUGUUGCUAUGACGGGGUCCUCCCCCAG | |
| | | GGGGCGCCUACUAGCCCAUACCUCAGUAACAUGAUU | |
| | | UGUCGCGAUCUUGAUGACGAAUUGGGGGCUAUGGCG | |
| | | CGGCGGUUCCGGGGGAUUUUUACACGGUAUGCGGAU | |
| | | GACAUAGCUAUCUCCACAAACCAACAACAGCCGCAA | |
| | | CUUUUGGAUGCCUUGGGACUUAUCCUCGGGAAGCAC | |
| | | GGAUUUCUUAUGAAUCUCGAUAAGUGUCGAGUCUAU | |
| | | AAUCCUGGACAGCCCAAAAGAAUUACUGGAUUGACC | |
| | | GUUCACAAUAGAGUAUCAGUUCCGAAAACCUUUAAG | |
| | | CGGAAAUUGCGGCAGGAAAUACAUUACUGUCAGAAG | |
| | | UUCGGAGUGACUGCACAUUUGGAAAACACGAAGGCU | |
| | | GCACGAUCCAUCCACUAUAGGGAACAUCUGUAUGGA | |
| | | AAGGCAUACUAUGUUAAAAUGGUUGAGCCUGAGCUC | |
| | | GGGGCGCACUUCCUCGAUGAGUUGUCAAAGGUAGAC | |
| | | UGGCCAGAGCCACCAAAGAAGAAAAGAAAGGUCUGA | |
| | | UAAUAGGCUGGAGCCUCGGUGGCCAUGCUUCUUGCC | |
| | | CCUUGGGCCUCCCCCCAGCCCCUCCUCCCCUUCCUGC | |
| | | ACCCGUACCCCCGUGGUCUUUGAAUAAAGUCUGAGU | |
| | | GGGCGGCCCUGCA | |
| Aco1 | Aco1 ncRNA containing 12 | guauaaaaccgggaacgaucagaccggggugaauucgcccccuugaucaaacggc | SEQ ID NO: |
| ncRNA_12 | bp insertion in EMX1 gene | acuaaccacuguuugccguggugcguCAGAAGAAGAAGGGCUCC | 19275 |
| | | CAUCACAUCAACCGGUGGCGCAUUGCCACGAAGCAG | |
| | | GCCAAUGGGGAGGACAUCGAUGUCACCUCCAAUGuuc | |
| | | gaacgaucgGGUGGGCAACCACAAACCCACGAGGGCAGA | |
| | | GUGCUGCUUGCUGCUacgcacgcacggcaaacagacagauccauuau | |
| | | uauuacaauuuauuuagugaucguucccgguuuuauacAAUAACAACG | |
| | | UCACCUCCAAUGACUAGGGguuucagagcuaugcuggaaacagca | |
| | | uagcaaguugaaauaaggcuaguccguuaucaacuugaaaaaguggcaccgagu | |
| | | cggugcuuuuu | |
| Aco1 ncRNA- | Aco1 ncRNA-sgRNA with | GGGGUAUAAAACCGGGAACGAUCAGACCGGGGUGAA | SEQ ID NO: |
| sgRNA_50 | 50 bp insertion | UUCGCCCCCUUGAUCAAACGGCACUAACCACUGUUU | 19276 |
| | | GCCGUGCGUGCGUACAAACGGCAGAAGCUGGAGGAG | |
| | | GAAGGGCCUGAGUCCGAGCAGAAGAAAACUCGAGCU | |
| | | CUGAUCAGUAUCAUGGGGCCCAUGGUUGAAUGACUC | |
| | | CUAUAAAGUUCUCCCAUCACAUCAACCGGUGGCGCA | |
| | | UUGCCACGAAGCAGGCCAAUGGGGAGGACAUCGAUG | |
| | | UCAACGCACGCACGGCAAACAGACAGAUCCAUUAUU | |
| | | AUUACAAUUUAUUUAGUGAUCGUUCCCGGUUUUAUA | |
| | | CGAGUCCGAGCAGAAGAAGAAGUUUCAGAGCUAUGC | |
| | | UGGAAACAGCAUAGCAAGUUGAAAUAAGGCUAGUCC | |
| | | GUUAUCAACUUGAAAAAGUGGCACCGAGUCGGUGCU | |
| | | UUUUCCUGCA | |
| Aco1 sgRNA- | Aco1 sgRNA-ncRNA with | GGGGAGUCCGAGCAGAAGAAGAAGUUUCAGAGCUAU | SEQ ID NO: |
| ncRNA_50 | 50 bp insertion | GCUGGAAACAGCAUAGCAAGUUGAAAUAAGGCUAGU | 19277 |
| | | CCGUUAUCAACUUGAAAAAGUGGCACCGAGUCGGUG | |
| | | CUUUUUGUAUAAAACCGGGAACGAUCAGACCGGGGU | |
| | | GAAUUCGCCCCCUUGAUCAAACGGCACUAACCACUG | |
| | | UUUGCCGUGCGUGCGUACAAACGGCAGAAGCUGGAG | |
| | | GAGGAAGGGCCUGAGUCCGAGCAGAAGAAAACUCGA | |
| | | GCUCUGAUCAGUAUCAUGGGGCCCAUGGUUGAAUGA | |
| | | CUCCUAUAAAGUUCUCCCAUCACAUCAACCGGUGGC | |
| | | GCAUUGCCACGAAGCAGGCCAAUGGGGAGGACAUCG | |
| | | AUGUCAACGCACGCACGGCAAACAGACAGAUCCAUU | |
| | | AUUAUUACAAUUUAUUUAGUGAUCGUUCCCGGUUUU | |
| | | AUACCCUGCA | |
| Eco3_EMX1 | Eco3 ncRNA containing 25 | GAGUCCGAGCAGAAGAAGAAGUUUCAGAGCUAUGCU | SEQ ID NO: |
| gRNA_ncRNA_ | bp insertion in EMX1 gene | GGAAACAGCAUAGCAAGUUGAAAUAAGGCUAGUCCG | 19278 |
| 25 | fused to EMX1 sgRNA at | UUAUCAACUUGAAAAAGUGGCACCGAGUCGGUGCUU | |
| | 5′ end | UUUAAUAACAACGAAAUGAUAAGAUUCCGUAAGAGC | |
| | | CAAACCUAGCAUUUUAUGGGUUAAUAGCCCAUCGGG | |
| | | CCAUGAGUCAUGGUUUCGCCUAGUAUUUUAGCUAUG | |
| | | CCCGUCGUUCAGUUCGCUGAACAAACGGCAGAAGCU | |
| | | GGAGGAGGAAGGGCCUGAGUCCGAGCAGAAGAAaAC | |
| | | UCGAGCUCUGAAUGACUCCUAUAaaguuCUCCCAUCAC | |
| | | AUCAACCGGUGGCGCAUUGCCACGAAGCAGGCCAAU | |
| | | GGGGAGGACAUCGAUGUCAUCAGCGAACUGAUCGAC | |
| | | GUGCUCAAGUAGGUUUGGCUCUUACGGAAUCUUAUC | |
| | | A | |
| Eco3_ncRNA | Eco3 ncRNA containing 25 | GAAAUGAUAAGAUUCCGUAAGAGCCAAACCUAGCAU | SEQ ID NO: |
| only | bp insertion in EMX1 gene | UUUAUGGGUUAAUAGCCCAUCGGGCCAUGAGUCAUG | 19279 |
| | | GUUUCGCCUAGUAUUUUAGCUAUGCCCGUCGUUCAG | |
| | | UUCGCUGAACAAACGGCAGAAGCUGGAGGAGGAAGG | |
| | | GCCUGAGUCCGAGCAGAAGAAUUACGUCUGCAAAGU | |
| | | UCUCCCAUCACAUCAACCGGUGGCGCAUUGCCACGA | |
| | | AGCAGGCCAAUGGGGAGGACAUCGAUGUCAUCAGCG | |
| | | AACUGAUCGACGUGCUCAAGUAGGUUUGGCUCUUAC | |
| | | GGAAUCUUAUCA | |
| Eco3_ncRNA_ | Eco3 ncRNA containing 25 | GAAAUGAUAAGAUUCCGUAAGAGCCAAACCUAGCAU | SEQ ID NO: |
| AAVS1 | bp insertion in AAVS1 | UUUAUGGGUUAAUAGCCCAUCGGGCCAUGAGUCAUG | 19280 |
| gRNA_25 | gene fused to AAVS1 | GUUUCGCCUAGUAUUUUAGCUAUGCCCGUCGUUCAG | |
| | sgRNA at 3′ end | UUCGCUGACUGUCCCCUCCACCCCACAGUGGGGCCAC | |
| | | UAGGGACAGAAAUGACAGUGGUUGGUGCUCUAAAAA | |
| | | UUAAUGACAGAAAAGCCCCAUCCUUAGGCCUCCUCC | |
| | | UUCCUAGUCUCCUGAUAUUGGGUCUAACCCCCAUCA | |
| | | GCGAACUGAUCGACGUGCUCAAGUAGGUUUGGCUCU | |
| | | UACGGAAUCUUAUCAAAUAACAACGGGGCCACUAGG | |
| | | GACAGGAUGUUUCAGAGCUAUGCUGGAAACAGCAUA | |
| | | GCAAGUUGAAAUAAGGCUAGUCCGUUAUCAACUUGA | |
| | | AAAAGUGGCACCGAGUCGGUGCUUUUU | |
| Eco3_ncRNA_ | Eco3 ncRNA containing 25 | GAAAUGAUAAGAUUCCGUAAGAGCCAAACCUAGCAU | SEQ ID NO: |
| EMX1 | bp insertion in EMX1 gene | UUUAUGGGUUAAUAGCCCAUCGGGCCAUGAGUCAUG | 19281 |
| gRNA_25 | fused to EMX1 sgRNA at | GUUUCGCCUAGUAUUUUAGCUAUGCCCGUCGUUCAG | |
| | 3′ end | UUCGCUGAACAAACGGCAGAAGCUGGAGGAGGAAGG | |
| | | GCCUGAGUCCGAGCAGAAGAAaACUCGAGCUCUGAA | |
| | | UGACUCCUAUAaaguuCUCCCAUCACAUCAACCGGUGG | |
| | | CGCAUUGCCACGAAGCAGGCCAAUGGGGAGGACAUC | |
| | | GAUGUCAUCAGCGAACUGAUCGACGUGCUCAAGUAG | |
| | | GUUUGGCUCUUACGGAAUCUUAUCAAAUAACAACGA | |
| | | GUCCGAGCAGAAGAAGAAGUUUCAGAGCUAUGCUGG | |
| | | AAACAGCAUAGCAAGUUGAAAUAAGGCUAGUCCGUU | |
| | | AUCAACUUGAAAAAGUGGCACCGAGUCGGUGCUUUU | |
| | | U | |
| Eco3_ncRNA_ | Eco3 ncRNA containing 50 | GAAAUGAUAAGAUUCCGUAAGAGCCAAACCUAGCAU | SEQ ID NO: |
| EMXI | bp insertion in EMXI gene | UUUAUGGGUUAAUAGCCCAUCGGGCCAUGAGUCAUG | 19282 |
| gRNA_50 | fused to EMX1 sgRNA at | GUUUCGCCUAGUAUUUUAGCUAUGCCCGUCGUUCAG | |
| | 3′ end | UUCGCUGAACAAACGGCAGAAGCUGGAGGAGGAAGG | |
| | | GCCUGAGUCCGAGCAGAAGAAaACUCGAGCUCUGAU | |
| | | CAGUAUCAUGGGGCCCAUGGUUGAAUGACUCCUAUA | |
| | | aaguuCUCCCAUCACAUCAACCGGUGGCGCAUUGCCAC | |
| | | GAAGCAGGCCAAUGGGGAGGACAUCGAUGUCAUCAG | |
| | | CGAACUGAUCGACGUGCUCAAGUAGGUUUGGCUCUU | |
| | | ACGGAAUCUUAUCAAAUAACAACGAGUCCGAGCAGA | |
| | | AGAAGAAGUUUCAGAGCUAUGCUGGAAACAGCAUAG | |
| | | CAAGUUGAAAUAAGGCUAGUCCGUUAUCAACUUGAA | |
| | | AAAGUGGCACCGAGUCGGUGCUUUUU | |
| Eco3_ncRNA_ | Eco3 ncRNA containing 75 | GAAAUGAUAAGAUUCCGUAAGAGCCAAACCUAGCAU | SEQ ID NO: |
| EMX1 | bp insertion in EMX1 gene | UUUAUGGGUUAAUAGCCCAUCGGGCCAUGAGUCAUG | 19283 |
| gRNA_75 | fused to EMX1 sgRNA at | GUUUCGCCUAGUAUUUUAGCUAUGCCCGUCGUUCAG | |
| | 3′ end | UUCGCUGAACAAACGGCAGAAGCUGGAGGAGGAAGG | |
| | | GCCUGAGUCCGAGCAGAAGAAaACUCGAGCUCUGAG | |
| | | CCCCACCGCAGCUUGCCAGCACUUUCAGUAUCAUGG | |
| | | GGCCCAUGGUUGAAUGACUCCUAUAaaguuCUCCCAUC | |
| | | ACAUCAACCGGUGGCGCAUUGCCACGAAGCAGGCCA | |
| | | AUGGGGAGGACAUCGAUGUCAUCAGCGAACUGAUCG | |
| | | ACGUGCUCAAGUAGGUUUGGCUCUUACGGAAUCUUA | |
| | | UCAAAUAACAACGAGUCCGAGCAGAAGAAGAAGUUU | |
| | | CAGAGCUAUGCUGGAAACAGCAUAGCAAGUUGAAAU | |
| | | AAGGCUAGUCCGUUAUCAACUUGAAAAAGUGGCACC | |
| | | GAGUCGGUGCUUUUU | |
| Eco3_ncRNA_ | Eco3 ncRNA containing | GAAAUGAUAAGAUUCCGUAAGAGCCAAACCUAGCAU | SEQ ID NO: |
| EMX1 | 100 bp insertion in EMX1 | UUUAUGGGUUAAUAGCCCAUCGGGCCAUGAGUCAUG | 19284 |
| gRNA_100 | gene fused to EMX1 | GUUUCGCCUAGUAUUUUAGCUAUGCCCGUCGUUCAG | |
| | sgRNA at 3′ end | UUCGCUGAACAAACGGCAGAAGCUGGAGGAGGAAGG | |
| | | GCCUGAGUCCGAGCAGAAGAAaACUCGAGCUCUGAG | |
| | | CCCCACUGUCGAGAAGUAUGUAUCUCGCUCCCGCAG | |
| | | CUUGCCAGCACUUUCAGUAUCAUGGGGCCCAUGGUU | |
| | | GAAUGACUCCUAUAaaguuCUCCCAUCACAUCAACCGG | |
| | | UGGCGCAUUGCCACGAAGCAGGCCAAUGGGGAGGAC | |
| | | AUCGAUGUCAUCAGCGAACUGAUCGACGUGCUCAAG | |
| | | UAGGUUUGGCUCUUACGGAAUCUUAUCAAAUAACAA | |
| | | CGAGUCCGAGCAGAAGAAGAAGUUUCAGAGCUAUGC | |
| | | UGGAAACAGCAUAGCAAGUUGAAAUAAGGCUAGUCC | |
| | | GUUAUCAACUUGAAAAAGUGGCACCGAGUCGGUGCU | |
| | | UUUU | |
| Eco3_ncRNA_ | Eco3 ncRNA containing | GAAAUGAUAAGAUUCCGUAAGAGCCAAACCUAGCAU | SEQ ID NO: |
| EMX1 | GFP gene insertion in | UUUAUGGGUUAAUAGCCCAUCGGGCCAUGAGUCAUG | 19285 |
| gRNA_GFP | EMX1 gene fused to EMX1 | GUUUCGCCUAGUAUUUUAGCUAUGCCCGUCGUUCAG | |
| gene | sgRNA at 3′ end. Entire | UUCGCUGAACAAACGGCAGAAGCUGGAGGAGGAAGG | |
| | GFP cassette is in antisense | GCCUGAGUCCGAGCAGAAGAAcccauauguccuuccgagugaga | |
| | orientation and contains | gacacaaaaaauuccaacacacuauugcaaugaaauaaauuuccuuuauuagcc | |
| | mini EF1a promoter and | agaagucagaugcucaaggggcuucaugauguccccauaauuuuuggcagaggg | |
| | beta globin polyA signal. | aaaaagaucucagugguauuugugagccagggcauuggccacaccagccaccacc | |
| | | uucugauaggcagccugcaccugaggagugcggccgcuuuacuuguacagcucg | |
| | | uccaugccgagagugaucccggcggcggucacgaacuccagcaggaccauguga | |
| | | ucgcgcuucucguuggggucuuugcucagggcggacugggugcucagguagug | |
| | | guugucgggcagcagcacggggccgucgccgauggggguguucugcugguagu | |
| | | ggucggcgagcugcacgcugccguccucgauguuguggggaucuugaaguuc | |
| | | accuugaugccguucuucugcuugucggccaugauauagacguuguggcuguu | |
| | | guaguuguacuccagcuugugccccaggauguugccguccuccuugaagucgau | |
| | | gcccuucagcucgaugegguucaccagggugucgcccucgaacuucaccucggc | |
| | | gcgggucuuguaguugccgucguccuugaagaagaugguggcuccuggacgu | |
| | | agccuucgggcauggcggacuugaagaagucgugcugcuucauguggucgggg | |
| | | uagcggcugaagcacugcacgccguaggucaggguggucacgagggugggccag | |
| | | ggcacgggcagcuugccgguggugcagaugaacuucagggucagcuugccguag | |
| | | guggcaucgcccucgcccucgccggacacgcugaacuuguggccguuuacgucg | |
| | | ccguccagcucgaccaggaugggcaccaccccggugaacagcuccucgcccuugc | |
| | | ucaccaugguggcgaccgguggaucccgggccegcgguaccgucgacugcagaa | |
| | | uucgaagcuugagcucgagaucugaguccgguagegcuageggaucugacgguu | |
| | | cacuaaacccuguguucuggeggcaaacccguugcgaaaaagaacguucacggcg | |
| | | acuacugcacuuauauacgguucucccccacccucgggaaaaaggeggagccagu | |
| | | acacgacaucacuuucccaguuuaccccgcgccaccuucucuaggcaccgguuca | |
| | | auugccgaccccuccccccaacuucucggggacuguggggaugugegcucugc | |
| | | ccguuCUCCCAUCACAUCAACCGGUGGCGCAUUGCCAC | |
| | | GAAGCAGGCCAAUGGGGAGGACAUCGAUGUCAUCAG | |
| | | CGAACUGAUCGACGUGCUCAAGUAGGUUUGGCUCUU | |
| | | ACGGAAUCUUAUCAAAUAACAACGAGUCCGAGCAGA | |
| | | AGAAGAAGUUUCAGAGCUAUGCUGGAAACAGCAUAG | |
| | | CAAGUUGAAAUAAGGCUAGUCCGUUAUCAACUUGAA | |
| | | AAAGUGGCACCGAGUCGGUGCUUUUU | |
| Eco3_NT_ | Eco3 ncRNA containing 25 | GAAAUGAUAAGAUUCCGUAAGAGCCAAACCUAGCAU | SEQ ID NO: |
| ncRNA_EMX | bp insertion (on opposite | UUUAUGGGUUAAUAGCCCAUCGGGCCAUGAGUCAUG | 19286 |
| gRNA_25 | strand of sgRNA cut) in | GUUUCGCCUAGUAUUUUAGCUAUGCCCGUCGUUCAG | |
| | EMX1 gene fused to EMX1 | UUCGCUGAugacaucgauguccuccccauuggccugcuucguggcaaugc | |
| | sgRNA at 3′ end | gccaccgguugaugugaugggagaacuuUAUAGGAGUCAUUCAGA | |
| | | GCUCGAGUuuucuucugcucggacucaggcccuuccuccuccagcuucug | |
| | | ccguuuguUCAGCGAACUGAUCGACGUGCUCAAGUAGG | |
| | | UUUGGCUCUUACGGAAUCUUAUCAAAUAACAACGAG | |
| | | UCCGAGCAGAAGAAGAAGUUUCAGAGCUAUGCUGGA | |
| | | AACAGCAUAGCAAGUUGAAAUAAGGCUAGUCCGUUA | |
| | | UCAACUUGAAAAAGUGGCACCGAGUCGGUGCUUUUU | |
| Aco1_EMX1 | Aco1 ncRNA containing 25 | gaguccgagcagaagaagaaguuucagagcuaugcuggaaacagcauagcaagu | SEQ ID NO: |
| gRNA_ncRNA_ | bp insertion in EMX1 gene | ugaaauaaggcuaguccguuaucaacuugaaaaaguggcaccgagucggugcuu | 19287 |
| 25 | fused to EMX1 sgRNA at | uuuAAUAACAACguauaaaaccgggaacgaucagaccggggugaauucgc | |
| | 5′ end | ccccuugaucaaacggcacuaaccacuguuugccgugcgugcguacaaacggcag | |
| | | aagcuggaggaggaagggccugaguccgagcagaagaaaACUCGAGCUC | |
| | | UGAAUGACUCCUAUAaaguucucccaucacaucaaccgguggcgcau | |
| | | ugccacgaagcaggccaauggggaggacaucgaugucaacgcacgcacggcaaac | |
| | | agacagauccauuauuauuacaauuuauuuagugaucguucccgguuuuauac | |
| Aco1_ncRNA | Aco1 ncRNA containing 25 | guauaaaaccgggaacgaucagaccggggugaauucgcccccuugaucaaacggc | SEQ ID NO: |
| only | bp insertion in EMX1 gene | acuaaccacuguuugccgugcgugcguacaaacggcagaagcuggaggaggaag | 19288 |
| | | ggccugaguccgagcagaagaaaACUCGAGCUCUGAAUGACUCC | |
| | | UAUAaaguucucccaucacaucaaccgguggcgcauugccacgaagcaggcca | |
| | | auggggaggacaucgaugucaacgcacgcacggcaaacagacagauccauuauua | |
| | | uuacaauuuauuuagugaucguucccgguuuuauac | |
| Aco1_ncRNA_ | Aco1 ncRNA containing 25 | guauaaaaccgggaacgaucagaccggggugaauucgcccccuugaucaaacggc | SEQ ID NO: |
| AAVS1 | bp insertion in AAVS1 | acuaaccacuguuugccguggugcguUCUGUCCCCUCCACCCCA | 19289 |
| gRNA_25 | gene fused to AAVS1 | CAGUGGGGCCACUAGGGACAGAAAUGACAGUGGUUG | |
| | sgRNA at 3′ end | GUGCUCUAAAAAUUAAUGACAGAAAAGCCCCAUCCU | |
| | | UAGGCCUCCUCCUUCCUAGUCUCCUGAUAUUGGGUC | |
| | | UAACCCCCAacgcacgcacggcaaacagacagauccauuauuuuacaauu | |
| | | uauuuagugaucguucccgguuuuauacAAUAACAACGGGGCCAC | |
| | | UAGGGACAGGAUguuucagagcuaugcuggaaacagcauagcaaguug | |
| | | aaauaaggcuaguccguuaucaacuugaaaaguggcaccgagucggugcuuuu | |
| | | u | |
| Aco1_ncRNA_ | Aco1 ncRNA containing 25 | guauaaaaccgggaacgaucagaccggggugaauucgcccccuugaucaaacggc | SEQ ID NO: |
| EMX1 | bp insertion in EMXI gene | acuaaccacuguuugccgugcgugcguacaaacggcagaagcuggaggaggaag | 19290 |
| gRNA_25 | fused to EMX1 sgRNA at | ggccugaguccgagcagaagaaaACUCGAGCUCUGAAUGACUCC | |
| | 3′ end | UAUAaaguucucccaucacaucaaccgguggegcauugccacgaagcaggcca | |
| | | auggggaggacaucgaugucaacgcacgcacggcaaacagacagauccauuauua | |
| | | uuacaauuuauuugugaucguucccgguuuuauacAAUAACAACgagu | |
| | | ccgagcagaagaagaaguuucagagcuaugcuggaaacagcauagcaaguugaaa | |
| | | uaaggcuaguccguuaucaacuugaaaaguggcaccgagucggugcuuuuu | |
| Aco1_ncRNA_ | Aco1 ncRNA containing 50 | guauaaaaccgggaacgaucagaccggggugaauucgcccccuugaucaaacggc | SEQ ID NO: |
| EMX1 | bp insertion in EMX1 gene | acuaaccacuguuugccgugcgugcguacaaacggcagaagcuggaggaggaag | 19291 |
| gRNA_50 | fused to EMX1 sgRNA at | ggccugaguccgagcagaagaaaACUCGAGCUCUGAAUGACUCC | |
| | 3′ end | UAUAaaguucucccaucacaucaaccgguggcgcauugccacgaagcaggcca | |
| | | auggggaggacaucgaugucaacgcacgcacggcaaacagacagauccauuauua | |
| | | uuacaauuuauuugugaucguucccgguuuuauacAAUAACAACgagu | |
| | | ccgagcagaagaagaaguuucagagcuaugcuggaaacagcauagcaaguugaaa | |
| | | uaaggcuaguccguuaucaacuugaaaaguggcaccgagucggugcuuuuu | |
| Aco1_ncRNA_ | Aco1 ncRNA containing 75 | guauaaaaccgggaacgaucagaccggggugaauucgcccccuugaucaaacggc | SEQ ID NO: |
| EMX1 | bp insertion in EMX1 gene | acuaaccacuguuugccgugcgugcguacaaacggcagaagcuggaggaggaag | 19292 |
| gRNA_75 | fused to EMX1 sgRNA at | ggccugaguccgagcagaagaaaACUCGAGCUCUGAGCCCCACC | |
| | 3′ end | GCAGCUUGCCAGCACUUUCAGUAUCAUGGGGCCCAU | |
| | | GGUUGAAUGACUCCUAUAaaguucucccaucacaucaaccggugg | |
| | | cgcauugccacgaagcaggccaauggggaggacaucgaugucaacgcacgcacgg | |
| | | caaacagacagauccauuauuauuacaauuuauuuagugaucguucccgguuuu | |
| | | auacAAUAACAACgaguccgagcagaagaagaaguuucagagcuaugcug | |
| | | gaaacagcauagcaaguugaaauaaggcuaguccguuaucaacuugaaaaagug | |
| | | gcaccgagucggugcuuuuu | |
| Aco1_ncRNA_ | Aco1 ncRNA containing | guauaaaaccgggaacgaucagaccggggugaauucgcccccuugaucaaacggc | SEQ ID NO: |
| EMX1 | 100 bp insertion in EMX1 | acuaaccacuguuugccgugcgugcguacaaacggcagaagcuggaggaggaag | 19293 |
| gRNA_100 | gene fused to EMX1 | ggccugaguccgagcagaagaaaACUCGAGCUCUGAGCCCCACU | |
| | sgRNA at 3′ end | GUCGAGAAGUAUGUAUCUCGCUCCCGCAGCUUGCCA | |
| | | GCACUUUCAGUAUCAUGGGGCCCAUGGUUGAAUGAC | |
| | | UCCUAUAaaguucucccaucacaucaaccgguggcgcauugccacgaagca | |
| | | ggccaauggggaggacaucgaugucaacgcacgcacggcaaacagacagauccau | |
| | | uauuauuacaauuuauuuagugaucguucccgguuuuauacAAUAACAA | |
| | | Cgaguccgagcagaagaagaaguuucagagcuaugcuggaaacagcauagcaag | |
| | | uugaaauaaggcuaguccguuaucaacuugaaaaaguggcaccgagucggugcu | |
| | | uuuu | |
| Aco1_ncRNA_ | Aco1 ncRNA containing | guauaaaaccgggaacgaucagaccggggugaauucgcccccuugaucaaacggc | SEQ ID NO: |
| EMX1 | GFP gene insertion in | acuaaccacuguuugccgugcgugcguacaaacggcagaagcuggaggaggaag | 19294 |
| gRNA_GFP | EMX1 gene fused to EMX1 | ggccugaguccgagcagaagaacccauauguccuuccgagugagagacacaaaaa | |
| gene | sgRNA at 3′ end. Entire | auuccaacacacuauugcaaugaaaauaaauuuccuuuauuagccagaagucaga | |
| | GFP cassette is in antisense | ugcucaaggggcuucaugauguccccauaauuuuuggcagagggaaaaagaucu | |
| | orientation and contains | cagugguauuugugagccagggcauuggccacaccagccaccaccuucugauag | |
| | mini EF1a promoter and | gcagccugcaccugaggagugcggccgcuuuacuuguacagcucguccaugccg | |
| | beta globin polyA signal. | agagugaucccggcggcggucacgaacuccagcaggaccaugugaucgcgcuuc | |
| | | ucguuggggucuuugcucagggcggacugggugcucagguagugguugucggg | |
| | | cagcagcacggggccgucgccgauggggguguucugcugguaguggucggcga | |
| | | gcugcacgcugccguccucgauguuguggeggaucuugaaguucaccuugaugc | |
| | | cguucuucugcuugucggccaugauauagacguuguggcuguuguaguuguac | |
| | | uccagcuugugccccaggauguugccguccuccuugaagucgaugcccuucagc | |
| | | ucgaugegguucaccagggugugcccucgaacuucaccuggggggucu | |
| | | uaguugccgucguccuugaagaagaugguggcuccuggaguagccuucgggc | |
| | | auggcggacuugaagaagucgugcugcuucauguggucgggguagggcugaa | |
| | | gcacugcacgccguaggucaggguggucacgagggugggccagggcacgggcag | |
| | | cuugccgguggugcagaugaacuucagggucagcuugccguagguggcaucgcc | |
| | | cucgcccucgccggacacgcugaacuuguggccguuuacguegccguccagcuc | |
| | | gaccaggaugggcaccaccccggugaacagcuccucgcccuugcucaccauggug | |
| | | gcgaccgguggaucccgggcccgcgguaccgucgacugcagaauucgaagcuug | |
| | | agcucgagaucugaguccgguagegcuageggaucugacgguucacuaaacccu | |
| | | guguucuggeggcaaacccguugcgaaaaagaacguucacggcgacuacugcac | |
| | | uuauauacgguucucccccacccucgggaaaaaggeggagccaguacacgacauc | |
| | | acuuucccaguuuaccccgcgccaccuucucuaggcaccgguucaauugccgacc | |
| | | ccuccccccaacuucucggggucugugggcguugugcgcucugcccguucuccc | |
| | | aucacaucaaccgguggcgcauugccacgaagcaggccaauggggaggacaucga | |
| | | ugucaacgcacgcacggcaaacagacagauccauuauuauuacaauuuauuuagu | |
| | | gaucguucccgguuuuauacAAUAACAACgaguccgagcagaagaagaag | |
| | | uuucagagcuaugcuggaaacagcauagcaaguugaaauaaggcuaguccguua | |
| | | ucaacuugaaaaaguggcaccgagucggugcuuuuu | |
| Aco1_NT_ | Aco1 ncRNA containing 25 | guauaaaaccgggaacgaucagaccggggugaauucgcccccuugaucaaacggc | SEQ ID NO: |
| ncRNA_EMX1 | bp insertion (on opposite | acuaaccacuguuugccgugcgugcguugacaucgauguccuccccauuggccu | 19295 |
| gRNA_25 | strand of sgRNA cut) in | gcuucguggcaaugcgccaccgguugaugugaugggagaacuuUAUAGGA | |
| | EMX1 gene fused to EMX1 | GUCAUUCAGAGCUCGAGUuuucuucugcucggacucaggcecuuc | |
| | sgRNA at 3′ end | cuccuccagcuucugccguuuguacgcacgcacggcaaacagacagauccauuau | |
| | | uauuacaauuuauuuagugaucguucccgguuuuauacAAUAACAACga | |
| | | guccgagcagaagaagaaguuucagagcuaugcuggaaacagcauagcaaguug | |
| | | aaauaaggcuaguccguuaucaacuugaaaaaguggcaccgagucggugcuuuu | |
| | | u | |
| R2042_EMX1 | R2042 ncRNA containing | gaguccgagcagaagaagaaguuucagagcuaugcuggaaacagcauagcaagu | SEQ ID NO: |
| gRNA_ncRNA_ | 25 bp insertion in EMX1 | ugaaauaaggcuaguccguuaucaacuugaaaaaguggcaccgagucggugcuu | 19296 |
| 25 | gene fused to EMX1 | uuuAAUAACAACGCGUUAAGGUGGUUAUAUUCUAGU | |
| | sgRNA at 5′ end | AUUUAUGAAGUGUAGUCGCUUCGAUCGUUAAGGCUG | |
| | | AUUUUAACCUCUGCAUAAUAAUAUCGGUAGAUAUUA | |
| | | UUAUGCACGCUCCCUUUAGCAGAGCUAAGAAUCGCU | |
| | | CACUCAGGCACAAGCUUUGAGGACAAACGGCAGAAG | |
| | | CUGGAGGAGGAAGGGCCUGAGUCCGAGCAGAAGAAa | |
| | | ACUCGAGCUCUGAAUGACUCCUAUAAAGUUCUCCCA | |
| | | UCACAUCAACCGGUGGCGCAUUGCCACGAAGCAGGC | |
| | | CAAUGGGGAGGACAUCGAUGUCACCUCAAAGCUUGU | |
| | | GCCUGAGUGAGAGCUAAAGAAAAGAAAAGUAGAAU | |
| | | AAGCCACCUUAACGC | |
| R2042_ncRNA | R2042 ncRNA containing | GCGUUAAGGUGGUUAUAUUCUAGUAUUUAUGAAGU | SEQ ID NO: |
| only_25 | 25 bp insertion in EMX1 | GUAGUCGCUUCGAUCGUUAAGGCUGAUUUUAACCUC | 19297 |
| | gene | UGCAUAAUAAUAUCGGUAGAUAUUAUUAUGCACGCU | |
| | | CCCUUUAGCAGAGCUAAGAAUCGCUCACUCAGGCAC | |
| | | AAGCUUUGAGGACAAACGGCAGAAGCUGGAGGAGGA | |
| | | AGGGCCUGAGUCCGAGCAGAAGAAaACUCGAGCUCU | |
| | | GAAUGACUCCUAUAAAGUUCUCCCAUCACAUCAACC | |
| | | GGUGGCGCAUUGCCACGAAGCAGGCCAAUGGGGAGG | |
| | | ACAUCGAUGUCACCUCAAAGCUUGUGCCUGAGUGAG | |
| | | AGCUAAAGAAAAGAAAAGUAGAAUAAGCCACCUUAA | |
| | | CGC | |
| R2042_ncRNA_ | R2042 ncRNA containing | GCGUUAAGGUGGUUAUAUUCUAGUAUUUAUGAAGU | SEQ ID NO: |
| AAVS1 | 25 bp insertion in EMX1 | GUAGUCGCUUCGAUCGUUAAGGCUGAUUUUAACCUC | 19298 |
| gRNA_25 | gene fused to AAVS1 | UGCAUAAUAAUAUCGGUAGAUAUUAUUAUGCACGCU | |
| | sgRNA at 3′ end | CCCUUUAGCAGAGCUAAGAAUCGCUCACUCAGGCAC | |
| | | AAGCUUUGAGGUCUGUCCCCUCCACCCCACAGUGGG | |
| | | GCCACUAGGGACAGAAAUGACAGUGGUUGGUGCUCU | |
| | | AAAAAUUAAUGACAGAAAAGCCCCAUCCUUAGGCCU | |
| | | CCUCCUUCCUAGUCUCCUGAUAUUGGGUCUAACCCC | |
| | | CACCUCAAAGCUUGUGCCUGAGUGAGAGCUAAAGAA | |
| | | AAGAAAAGUAGAAUAAGCCACCUUAACGCAAUAACA | |
| | | ACGGGGCCACUAGGGACAGGAUguuucagagcuaugcuggaaa | |
| | | cagcauagcaaguugaaauaaggcuaguccguuaucaacuugaaaaaguggcacc | |
| | | gagucggugcuuuuu | |
| R2042_ncRNA_ | R2042 ncRNA containing | GCGUUAAGGUGGUUAUAUUCUAGUAUUUAUGAAGU | SEQ ID NO: |
| EMX1 | 25 bp insertion in EMX1 | GUAGUCGCUUCGAUCGUUAAGGCUGAUUUUAACCUC | 19299 |
| gRNA_25 | gene fused to EMX1 | UGCAUAAUAAUAUCGGUAGAUAUUAUUAUGCACGCU | |
| | sgRNA at 3′ end | CCCUUUAGCAGAGCUAAGAAUCGCUCACUCAGGCAC | |
| | | AAGCUUUGAGGACAAACGGCAGAAGCUGGAGGAGGA | |
| | | AGGGCCUGAGUCCGAGCAGAAGAAaACUCGAGCUCU | |
| | | GAAUGACUCCUAUAAAGUUCUCCCAUCACAUCAACC | |
| | | GGUGGCGCAUUGCCACGAAGCAGGCCAAUGGGGAGG | |
| | | ACAUCGAUGUCACCUCAAAGCUUGUGCCUGAGUGAG | |
| | | AGCUAAAGAAAAGAAAAGUAGAAUAAGCCACCUUAA | |
| | | CGCAAUAACAACgaguccgagcagaagaagaaguuucagagcuaugcu | |
| | | ggaaacagcauagcaaguugaaauaaggcuaguccguuaucaacuugaaaaagu | |
| | | ggcaccgagucggugcuuuuu | |
| R2042_ncRNA_ | R2042 ncRNA containing | GCGUUAAGGUGGUUAUAUUCUAGUAUUUAUGAAGU | SEQ ID NO: |
| EMX1 | 50 bp insertion in EMX1 | GUAGUCGCUUCGAUCGUUAAGGCUGAUUUUAACCUC | 19300 |
| gRNA_50 | gene fused to EMX1 | UGCAUAAUAAUAUCGGUAGAUAUUAUUAUGCACGCU | |
| | sgRNA at 3′ end | CCCUUUAGCAGAGCUAAGAAUCGCUCACUCAGGCAC | |
| | | AAGCUUUGAGGACAAACGGCAGAAGCUGGAGGAGGA | |
| | | AGGGCCUGAGUCCGAGCAGAAGAAaACUCGAGCUCU | |
| | | GAUCAGUAUCAUGGGGCCCAUGGUUGAAUGACUCCU | |
| | | AUAaaguuCUCCCAUCACAUCAACCGGUGGCGCAUUGC | |
| | | CACGAAGCAGGCCAAUGGGGAGGACAUCGAUGUCAC | |
| | | CUCAAAGCUUGUGCCUGAGUGAGAGCUAAAGAAAAG | |
| | | AAAAGUAGAAUAAGCCACCUUAACGCAAUAACAACga | |
| | | guccgagcagaagaagaaguuucagagcuaugcuggaaacagcauagcaaguug | |
| | | u | |
| R2042_ncRNA_ | R2042 ncRNA containing | GCGUUAAGGUGGUUAUAUUCUAGUAUUUAUGAAGU | SEQ ID NO: |
| EMX1 | 75 bp insertion in EMX1 | GUAGUCGCUUCGAUCGUUAAGGCUGAUUUUAACCUC | 19301 |
| gRNA_75 | gene fused to EMX1 | UGCAUAAUAAUAUCGGUAGAUAUUAUUAUGCACGCU | |
| | sgRNA at 3′ end | CCCUUUAGCAGAGCUAAGAAUCGCUCACUCAGGCAC | |
| | | AAGCUUUGAGGACAAACGGCAGAAGCUGGAGGAGGA | |
| | | AGGGCCUGAGUCCGAGCAGAAGAAaACUCGAGCUCU | |
| | | GAGCCCCACCGCAGCUUGCCAGCACUUUCAGUAUCA | |
| | | UGGGGCCCAUGGUUGAAUGACUCCUAUAaaguuCUCCC | |
| | | AUCACAUCAACCGGUGGCGCAUUGCCACGAAGCAGG | |
| | | CCAAUGGGGAGGACAUCGAUGUCACCUCAAAGCUUG | |
| | | UGCCUGAGUGAGAGCUAAAGAAAAGAAAAGUAGAA | |
| | | UAAGCCACCUUAACGCAAUAACAACgaguccgagcagaagaa | |
| | | gaaguuucagagcuaugcuggaaacagcauagcaaguugaaauaaggcuagucc | |
| | | guuaucaacuugaaaaaguggcaccgagucggugcuuuuu | |
| R2042_ncRNA_ | R2042 ncRNA containing | GCGUUAAGGUGGUUAUAUUCUAGUAUUUAUGAAGU | SEQ ID NO: |
| EMX1 | 100 bp insertion in EMX1 | GUAGUCGCUUCGAUCGUUAAGGCUGAUUUUAACCUC | 19302 |
| gRNA_100 | gene fused to EMX1 | UGCAUAAUAAUAUCGGUAGAUAUUAUUAUGCACGCU | |
| | sgRNA at 3′ end | CCCUUUAGCAGAGCUAAGAAUCGCUCACUCAGGCAC | |
| | | AAGCUUUGAGGACAAACGGCAGAAGCUGGAGGAGGA | |
| | | AGGGCCUGAGUCCGAGCAGAAGAAaACUCGAGCUCU | |
| | | GAGCCCCACUGUCGAGAAGUAUGUAUCUCGCUCCCG | |
| | | CAGCUUGCCAGCACUUUCAGUAUCAUGGGGCCCAUG | |
| | | GUUGAAUGACUCCUAUAaaguuCUCCCAUCACAUCAAC | |
| | | CGGUGGCGCAUUGCCACGAAGCAGGCCAAUGGGGAG | |
| | | GACAUCGAUGUCACCUCAAAGCUUGUGCCUGAGUGA | |
| | | GAGCUAAAGAAAAGAAAAGUAGAAUAAGCCACCUUA | |
| | | ACGCAAUAACAACgaguccgagcagaagaagaaguuucagagcuaugc | |
| | | uggaaacagcauagcaaguugaaauaaggcuaguccguuaucaacuugaaaaag | |
| | | uggcaccgagucggugcuuuuu | |
| R2042_ncRNA_ | R2042 ncRNA containing | GCGUUAAGGUGGUUAUAUUCUAGUAUUUAUGAAGU | SEQ ID NO: |
| NT_EMX1 | 25 bp insertion (on opposite | GUAGUCGCUUCGAUCGUUAAGGCUGAUUUUAACCUC | 19303 |
| gRNA_25_ | strand of sgRNA cut) in | UGCAUAAUAAUAUCGGUAGAUAUUAUUAUGCACGCU | |
| dua1 guides | EMX1 gene fused to EMX1 | CCCUUUAGCAGAGCUAAGAAUCGCUCACUCAGGCAC | |
| | sgRNA at 3′ end | AAGCUUUGAGGugacaucgauguccuccccauuggccugcuucguggc | |
| | | aaugcgccaccuauaguuaguguacugcaacuuUAUAGGAGUCAUUC | |
| | | AGAGCUCGAGUuuucuucugcucggacucaggcccuuccuccuccagcu | |
| | | ucugccguuuguCCUCAAAGCUUGUGCCUGAGUGAGAGCU | |
| | | AAAGAAAAGAAAAGUAGAAUAAGCCACCUUAACGCA | |
| | | AUAACAACgaguccgagcagaagaagaaguuucagagcuaugcuggaaac | |
| | | agcauagcaaguugaaauaaggcuaguccguuaucaacuugaaaaaguggcacc | |
| | | gagucggugcuuuuu | |
| R2042_RT | R2042 RT mRNA | AUGAAGGACGACCAGUACUCUCAGUGGAAGAAGUAC | SEQ ID NO: |
| | sequence, coding sequence | UACGAGAGCAGGGGCAUCCUGCCCGAGAUCCAGGAC | 19304 |
| | only | AAGCUCCUGAACUACGCCAAGAUCCACAUCGACAAC | |
| | | AACACCCCGGUGAUCUUCAACUUCGAGCACCUGACC | |
| | | CUGCUGCUGGGCAGGGAGAAGAACUACCUGUCCAGC | |
| | | GUGGUGAACAGCCCCGACAGCCACUACAGAAAGUUC | |
| | | AAGAUCAAGAAGAGAUCCGGAGGCGAGAGGGAGAUC | |
| | | ACCGCUCCCUAUCUCAGCCUCCUGGAGAUGCAGUAC | |
| | | UGGAUCUACAGGAACAUCCUGAUCAACGUGAAGAUC | |
| | | CACUACGCCGCUCACGGCUUCGCUCAGGAUAAGAGC | |
| | | AUUAUCACCAACUCCAGGAACCACCUGGGGCAGAAA | |
| | | CAUCUGCUCAAGAUGGAUCUGAAGGAUUUCUUCCCC | |
| | | AGCAUCAAGCUGAACAGAAUCAUCUACAUCUUCAAG | |
| | | AGCCUGGGCUACCCCAAUAUCAUCGCCUUCUACCUG | |
| | | GCCAGCAUCUGCAGCUACAAGGGCCACCUGCCCCAG | |
| | | GGCAGCCCCACAAGCCCUAUCCUGAGCAACAUCGUG | |
| | | AGCAUCACCCUGGACAACAGACUGGUGAAGUUCGCC | |
| | | AGAAAGAUGAAGCUGAGAUACAGCAGGUACGCCGAC | |
| | | GACCUGACGUUCAGCGGGGACAAGAUCCCCACCAAC | |
| | | UACAUCAAGUACAUCACCGACAUCAUCAAUGAUGAG | |
| | | GGCUUCGAGGUGAACGACACCAAGACCAAGCUCUAC | |
| | | CUGAAGGCCGGGAAGAGAAUCGUGACGGGCAUUUCC | |
| | | GUGAUCGGAAAUGACCCGAAGCUUCCGCGGGAAUAC | |
| | | AAGCGGAAGCUGAAGCAGGAGCUGCACUACAUCUUC | |
| | | ACCUACGGCAUCGGCAGCCACAUGGCCAAGAAGAAG | |
| | | AUCAAGAAGAUCAACUACCUCUACAGGAUCAUCGGC | |
| | | AAGGUGAACUUCUGGCUGAACAUCGAGCCCGACAAC | |
| | | GAGUACGCCAGAAACGCCAAGGCCAAGCUGCUGCUG | |
| | | CUCAUCGACAACccaccaaagaagaaaagaaaggucuga | |
| R6943 RT | R6943 RT mRNA | AUGGAGGAGAGCACCAACUACAAGCUGCUGGUGUGG | SEQ ID NO: |
| | sequence, coding sequence | GGACUGAGCGUGAUCCAACCCGCUACCCCCAACGAG | 19305 |
| | only | GUGCUGAACUACCUCACCAGCACCCUGAACGAUAAC | |
| | | GGGCUGCUGCCCGACGUGGAGAAGAUGAUCCACUAC | |
| | | UUUGAGCUGCUGGACCAGCUGGGCUACAUCCACCAG | |
| | | GUGAGCAAGAGGAACAACCUCUACUCACUGACCCCC | |
| | | AGGGGCAACGAAAGGUUGACCCCUGCCCUGAAGAGA | |
| | | CUCAGGGACAAGAUCAGACUGUUCAUGCUGGACAAC | |
| | | UGCCACAGCAUCAGCAAGCUGGGCGUGCUGGCCAGC | |
| | | ACAGAUACAGAGAACAUGGGGGGCGACAGCCCCUCA | |
| | | CUCCAGCUGAGGCACAACCUCAAGGAGGUGCCUCAU | |
| | | CCCAGCCUUAGCUGGGCUGCUGGAACCCUGCCUAGC | |
| | | UCUCCUAGGCAGGCUUGGGUUCGGAUCUACGAACAG | |
| | | CUGAACAUCGGCAGCAUGAGCAGCGACGAGGCUAGC | |
| | | ACACCCACCACCGCCAGAAAUGCCCCCCUGAGCUUCG | |
| | | UGGGCAGGCUGGGCUUCAGCCUGAACUACUACAGCU | |
| | | UCAACAAGAUCGACGAGCCCCUGUUCAACAACGAUG | |
| | | GCGUGACCGCCAUCGCCAGCUGCAUCGGCAUCAGCC | |
| | | CCGGGCUGAUUACCGCUAUGGUGAAGUCACCAAAGC | |
| | | GGUACUACAGGACCUUCAACCUGAGAAAGAAGUCCG | |
| | | GGGGCUUCAGAUCCAUUCUGGCCCCCAGAAAGUUCA | |
| | | UCAAGACCAUCCAGUACUGGCUGAAGGAUCAUGUGC | |
| | | UGAACAGGCUCAAGAUCCACAGCUCCUGUUACAGCU | |
| | | ACAGGAGCGGCGUGUCCAUCAAGGACAACGCCAUCA | |
| | | ACCACGUGAAGAAGAAGUUCGUGGCCAGCAUCGACA | |
| | | UUUCCGAUUACUUCGGAAGCAUCAACAAGAAGAUGG | |
| | | UGAAGGACUGCUUUUACAAGAACAAUAUUCCCGAUC | |
| | | ACAUCGUGAAUACCAUCAGCGGCAUCGUGACCUACA | |
| | | ACGACGUGCUGCCUCAGGGCGCUCCCACCAGCCCUA | |
| | | UCAUUAGCAACGCCAUCCUGUUCGAGUUCGACGAGG | |
| | | AGAUGACGGCUCAUGCCCUCACUCUCGACUGUAUCU | |
| | | ACACCAGAUACAGCGACGACAUCUCGAUAUCCUCCG | |
| | | ACUAUAAGGAGAAUAUCGCCAUCCUGAUCAACAUCG | |
| | | CCGAGGCCAACCUGUUGAGCGCUGGAUUCACGCUCA | |
| | | ACAGACAGAAGCAAAGGAUUGCUUCUGACAACAGCC | |
| | | GCCAGGUUGUGACCGGCAUCCUGGUGAACGAGAGCA | |
| | | UCAGACCCACCAGAUGCUACAGAAAGAAGAUCAGAA | |
| | | GCGCCUUUGAUCACGCCCUGAAGGAGCAGGACGGCU | |
| | | CCCAGCUGACAAUCAACAAGUUGAGGGGCUACCUCA | |
| | | ACUACCUGAAGUCCUUCGAGACCUACGGCUUCAAGU | |
| | | UCAACGAGAAGAAGUAUAAGGAGACCCUGGAUUUCC | |
| | | UGAUCGCUCUGAAGCAGAGCccaccaaagaagaaaagaaaggucu | |
| | | ga | |
| R6943_ncRNA_ | R6943 ncRNA containing | GCGGAGUGCUGGCCUCAACUGAUACAGAGAAUAUGG | SEQ ID NO: |
| EMX1gRNA_ | GFP gene insertion in | GCGGUGAUUCGCCGUCUUUACAGUUAAGGCACAAUU | 19306 |
| GFP gene | EMX1 gene fused to EMX1 | UAAAAGAGGUUCCGCACCCAAGCCUGUCUUGGGCUG | |
| | sgRNA at 3′ end. Entire | Cacaaacggcagaagcuggaggaggaagggccugaguccgagcagaagaaccca | |
| | GFP cassette is in antisense | uauguccuuccgagugagagacacaaaaaauuccaacacacuauugcaaugaaaa | |
| | orientation and contains | uaaauuuccuuuauuagccagaagucagaugcucaaggggcuucaugauguccc | |
| | mini EFla promoter and | cauaauuuuuggcagagggaaaaagaucucagugguauuugugagccagggcau | |
| | beta globin polyA signal. | uggccacaccagccaccaccuucugauaggcagccugcaccugaggagugeggcc | |
| | | gcuuuacuuguacagcucguccaugccgagagugaucccggggggucacgaa | |
| | | cuccagcaggaccaugugaucgcgcuucucguuggggucuuugcucagggcgga | |
| | | cugggugcucagguagugguugucgggcagcagcacggggccgucgccgaugg | |
| | | ggguguucugcugguaguggucggcgagcugcacgcugccguccucgauguug | |
| | | uggcggaucuugaaguucaccuugaugccguucuucugcuugucggccaugau | |
| | | auagacguuguggcuguuguaguuguacuccagcuugugccccaggauguugc | |
| | | cguccuccuugaagucgaugcccuucagcucgaugcgguucaccagggugucgc | |
| | | ccucgaacuucaccucggcgcgggucuuguaguugccgucguccuugaagaaga | |
| | | uggugcgcuccuggacguagccuucgggcauggggacuugaagaagucgugc | |
| | | ugcuucauguggucgggguagcggcugaagcacugcacgccguaggucagggu | |
| | | ggucacgagggugggccagggcacgggcagcuugccgguggugcagaugaacu | |
| | | ucagggucagcuugccguagguggcaucgcccucgcccucgccggacacgcuga | |
| | | acuuguggccguuuacgucgccguccagcucgaccaggaugggcaccaccccgg | |
| | | ugaacagcuccucgcccuugcucaccaugguggegaccgguggauccegggccc | |
| | | gcgguaccgucgacugcagaauucgaagcuugagcucgagaucugaguccggua | |
| | | gcgcuagggaucugacgguncacuaaacccuguguucuggggcaaacccguu | |
| | | gcgaaaaagaacguucacggegacuacugcacuuauauacgguucucccccaccc | |
| | | ucgggaaaaaggeggagccaguacacgacaucacuuucccaguuuaccccgegcc | |
| | | accuucucuaggcacegguucaauugcegaccccuccccccaacuucucggggac | |
| | | ugugggcgaugugegcucugcccguucucccaucacaucaaccgguggcgcauu | |
| | | gccacgaagcaggccaauggggaggacaucgaugucaGCAGCCCAAGAC | |
| | | AGGCUUGGGUGCGGAUCUACGAGCAAUUAAAUAUUG | |
| | | GUUCGAUGUCCAGUGAUGAGGCCAGCACCCGCAAUA | |
| | | ACAACgaguccgagcagaagaagaaguuucagagcuaugcuggaaacagcau | |
| | | agcaaguugaaauaaggcuaguccguuaucaacuugaaaaaguggcaccgaguc | |
| | | ggugcuuuuu | |
| R6943_ncRNA_ | R6943 ncRNA containing | GCGGAGUGCUGGCCUCAACUGAUACAGAGAAUAUGG | SEQ ID NO: |
| EMX1gRNA_ | 100 bp insertion in EMX1 | GCGGUGAUUCGCCGUCUUUACAGUUAAGGCACAAUU | 19307 |
| 100 bp | gene fused to EMX1 | UAAAAGAGGUUCCGCACCCAAGCCUGUCUUGGGCUG | |
| | sgRNA at 3′ end | CacaaacggcagaagcuggaggaggaagggccugaguccgagcagaagaaaAC | |
| | | UCGAGCUCUGAGCCCCACUGUCGAGAAGUAUGUAUC | |
| | | UCGCUCCCGCAGCUUGCCAGCACUUUCAGUAUCAUG | |
| | | GGGCCCAUGGUUGAAUGACUCCUAU Aaaguucucccaucac | |
| | | aucaaccgguggcgcauugccacgaagcaggccaauggggaggacaucgauguc | |
| | | aGCAGCCCAAGACAGGCUUGGGUGCGGAUCUACGAG | |
| | | CAAUUAAAUAUUGGUUCGAUGUCCAGUGAUGAGGCC | |
| | | AGCACCCGCAAUAACAACgaguccgagcagaagaagaaguuucaga | |
| | | gcuaugcuggaaacagcauagcaaguugaaauaaggcuaguccguuaucaacuu | |
| | | gaaaaaguggcuccgagucggugcuuuuu | |
| R6943_ncRNA_ | R6943 ncRNA containing | GCGGAGUGCUGGCCUCAACUGAUACAGAGAAUAUGG | SEQ ID NO: |
| EMX1gRNA_ | 75 bp insertion in EMX1 | GCGGUGAUUCGCCGUCUUUACAGUUAAGGCACAAUU | 19308 |
| 75 bp | gene fused to EMX1 | UAAAAGAGGUUCCGCACCCAAGCCUGUCUUGGGCUG | |
| | sgRNA at 3′ end | CacaaacggcagaagcuggaggaggaagggccugaguccgagcagaagaaaAC | |
| | | UCGAGCUCUGAGCCCCACCGCAGCUUGCCAGCACUU | |
| | | UCAGUAUCAUGGGGCCCAUGGUUGAAUGACUCCUAU | |
| | | Aaaguucucccaucacaucaaccgguggcgcauugccacgaagcaggccaaugg | |
| | | ggaggacaucgaugucaGCAGCCCAAGACAGGCUUGGGUGCG | |
| | | GAUCUACGAGCAAUUAAAUAUUGGUUCGAUGUCCAG | |
| | | UGAUGAGGCCAGCACCCGCAAUAACAACgaguccgagcag | |
| | | aagaagaaguuucagagcuaugcuggaaacagcauagcaaguugaaauaaggcu | |
| | | aguccguuaucaacuugaaaaaguggcaccgagucggugcuuuuu | |
| R6943_ncRNA_ | R6943 ncRNA containing | GCGGAGUGCUGGCCUCAACUGAUACAGAGAAUAUGG | SEQ ID NO: |
| EMX1gRNA_ | 50 bp insertion in EMX1 | GCGGUGAUUCGCCGUCUUUACAGULAAGGCACAAUU | 19309 |
| 50 bp | gene fused to EMX1 | UAAAAGAGGUUCCGCACCCAAGCCUGUCUUGGGCUG | |
| | sgRNA at 3′ end | CacaaacggcagaagcuggaggaggaagggccugaguccgagcagaagaaaAC | |
| | | UCGAGCUCUGAUCAGUAUCAUGGGGCCCAUGGUUGA | |
| | | AUGACUCCUAUAaaguucucccaucacaucaaccgguggcgcauugcca | |
| | | cgaagcaggccaauggggaggacaucgaugucaGCAGCCCAAGACAG | |
| | | GCUUGGGUGCGGAUCUACGAGCAAUUAAAUAUUGGU | |
| | | UCGAUGUCCAGUGAUGAGGCCAGCACCCGCAAUAAC | |
| | | AACgaguccgagcagaagaagaaguuucagagcuaugcuggaaacagcauagc | |
| | | aaguugaaauaaggcuaguccguuaucaacuugaaaaaguggcaccgagucggu | |
| | | gcuuuuu | |
| R6943_ncRNA_ | R6943 ncRNA containing | GCGGAGUGCUGGCCUCAACUGAUACAGAGAAUAUGG | SEQ ID NO: |
| EMX1gRNA_ | 25 bp insertion in EMX1 | GCGGUGAUUCGCCGUCUUUACAGUUAAGGCACAAUU | 19310 |
| 25 bp | gene fused to EMX1 | UAAAAGAGGUUCCGCACCCAAGCCUGUCUUGGGCUG | |
| | sgRNA at 3′ end | CacaaacggcagaagcuggaggaggaagggccugaguccgagcagaagaaaAC | |
| | | UCGAGCUCUGAAUGACUCCUAUAaaguucucccaucacaucaa | |
| | | ccgguggcgcauugccacgaagcaggccaauggggaggacaucgaugucaGCA | |
| | | GCCCAAGACAGGCUUGGGUGCGGAUCUACGAGCAAU | |
| | | UAAAUAUUGGUUCGAUGUCCAGUGAUGAGGCCAGCA | |
| | | CCCGCAAUAACAACgaguccgagcagaagaagaaguuucagagcuau | |
| | | gcuggaaacagcauagcaaguugaaauaaggcuaguccguuaucaacuugaaaaa | |
| | | guggcaccgagucggugcuuuuu | |
| R6943_ncRNA_ | R6943 ncRNA containing | GCGGAGUGCUGGCCUCAACUGAUACAGAGAAUAUGG | SEQ ID NO: |
| AAVS1 | 25 bp insertion in AAVS1 | GCGGUGAUUCGCCGUCUUUACAGUUAAGGCACAAUU | 19311 |
| gRNA_25 bp | gene fused to AAVS1 | UAAAAGAGGUUCCGCACCCAAGCCUGUCUUGGGCUG | |
| | sgRNA at 3′ end | CUCUGUCCCCUCCACCCCACAGUGGGGCCACUAGGG | |
| | | ACAGAAAUGACAGUGGUUGGUGCUCUAAAAAUUAAU | |
| | | GACAGAAAAGCCCCAUCCUUAGGCCUCCUCCUUCCU | |
| | | AGUCUCCUGAUAUUGGGUCUAACCCCCAGCAGCCCA | |
| | | AGACAGGCUUGGGUGCGGAUCUACGAGCAAUUAAAU | |
| | | AUUGGUUCGAUGUCCAGUGAUGAGGCCAGCACCCGC | |
| | | AAUAACAACGGGGCCACUAGGGACAGGAUguuucagagc | |
| | | uaugcuggaaacagcauagcaaguugaaauaaggcuaguccguuaucaacuuga | |
| | | aaaaguggcaccgagucggugcuuuuu | |
| R6943_ncRNA | R6943 ncRNA containing | GCGGAGUGCUGGCCUCAACUGAUACAGAGAAUAUGG | SEQ ID NO: |
| only_25 bp | 25 bp insertion in EMX1 | GCGGUGAUUCGCCGUCUUUACAGUUAAGGCACAAUU | 19312 |
| | gene | UAAAAGAGGUUCCGCACCCAAGCCUGUCUUGGGCUG | |
| | | CacaaacggcagaagcuggaggaggaagggccugaguccgagcagaagaaaAC | |
| | | UCGAGCUCUGAAUGACUCCUAUAaaguucucccaucacaucaa | |
| | | ccgguggcgcauugccacgaagcaggccaauggggaggacaucgaugucaGCA | |
| | | GCCCAAGACAGGCUUGGGUGCGGAUCUACGAGCAAU | |
| | | UAAAUAUUGGUUCGAUGUCCAGUGAUGAGGCCAGCA | |
| | | CCCGC | |
| AAVS1 | Contains chemical | GGGGCCACUAGGGACAGGAUguuucagagcuaugcuggaaacag | SEQ ID NO: |
| sgRNA | modifications from | cauagcaaguugaaauaaggcuaguccguuaucaacuugaaaaaguggcaccga | 19313 |
| | Synthego: 2′-F, 2′-O- | gucggugcuuuuu | |
| | methyl, phosphorothioates | | |
| R1262_RT-1 | R1262 retron RT mRNA | AGGAUAAUGGGAAAUAAGAGAGAAAAGAAGAGUAA | SEQ ID NO: |
| (R1262_RT) | | GAAGAAAUAUAAGAGCCACCAUGAUCAGCUUCAGCG | 19314 |
| | | AGAUCAAGAGCAGAAACGAUUUUGCAGACGCUCUGC | |
| | | AGAUUCCUCGGAGCGUGCUGACGCACGUUCUGUACA | |
| | | UUGCCAAGCCCGAGAGCUUCUACGAGAGCUUCACCA | |
| | | UCCCCAAGAAGAAUGGGGAGGACAGAAUCAUCAUGG | |
| | | CCCCCAAGGGCACCCUGAAGUCCAUCCAGACCAAGC | |
| | | UGAGCAAGCAGCUGGUGGAGUACAGAGCCUCCAUCA | |
| | | GCCAGAAAGGCCAGGAGAAGUCCAACAUCUCCCAUG | |
| | | GCUUCGAGAGGGAGAAGUCCAUCAUCACCAAUGCUC | |
| | | AGAUACACCGCAACAAGCGGUAUGUCAUCAACUACG | |
| | | ACCUGAAGGACUUCUUCGACUCCUUCCACUUCGGCA | |
| | | GAGUGGUGGGAUUCUUCGAGAAGAACAAGCACUUCC | |
| | | UGCUGCCCUACGAGGUGGCCGUGAUCAUCGCCCAGC | |
| | | UGACCUGCUAUAAUGGCAGGCUGCCCCAGGGCGCCC | |
| | | CCACAAGCCCUGUGAUCACCAACCUGAUCUGCGAGA | |
| | | UCCUGGACUACAGGGUGCUCAAGAUCGCCAAGAGAU | |
| | | ACAAGCUGGACUACACCAGGUACGCUGACGACCUGA | |
| | | CCUUCAGCACCAACUACUCCAGAUUCCUGGAGGUGU | |
| | | UCGACAGCUUCGCCAAGGAGCUGCUCCAGGAGAUCA | |
| | | GCAACUCUGGUUUUACCAUAAACCAGAGCAAGACCA | |
| | | GGCUGCUGUACAGAGACAGCCGCCAGGAGGUCACAG | |
| | | GCCUCGUGGUGAAUAAGAAGAUCGGCGUGAACAGAG | |
| | | AGUACGUCAAGAGCACUAGGGCGAUGGCCCAGGCUC | |
| | | UGUACAGCACCGGCGAGUUCACCAUCAACGGCAUCC | |
| | | CCGGCACCAUCAAACAGCUGGAGGGCAGGUUCGGCU | |
| | | UCAUCGACCAGCUGGACCACUACAACAACGUGAUCG | |
| | | ACGAUGCCAAGCACGACGCCUACUCCCUGAACGGCA | |
| | | GGGAGAAGCAGUUCCAGGAGUUCCUGUUCUUCAAGA | |
| | | CAUUCUUCUUCAACGAGUACCCCCUGGUGAUCACCG | SEQ ID NO: |
| | | AGGGCAAGACCGACAUCAGAUACCUGAAGGCCGCCC | |
| | | UCAAGAGCCUGCACCAGAAGUACCCCGAGCUGAUCU | |
| | | GCAAGGAGGACGACGGAACCUUUCGGUUCAAGAUCA | |
| | | GCUUCUUCAGAAGAUCCAAGAGAUGGAAGUACUUCU | |
| | | UCGGCAUCAGCAAGGAUGGCGCUGAUGCCAUGAAGC | |
| | | UGCUGUACCGGUUCUUUACCGGACAGAAGGGCGUGA | |
| | | AGAACUACUACAGGCUGUUCGCCGAGAAGUACAAGG | |
| | | CCGUGCAGAGAAACCCCGUGAUCAUGCUGUUUGACA | |
| | | ACGAGAUGGAGAGCAAGAGACCCCUCAACAAGUUCA | |
| | | UCUCCGAGGAGGUGAAGAUUCCCUCCUCGGAGCAGC | |
| | | AGCUGUUCAAGGAGCAGCUGUACUACCACCUGAUCC | |
| | | CCGGCAGCAAGACCUACCUGAUGACCCACCCCUUGCC | |
| | | UCCUGGCAAGACAGAGGCCGAGAUCGAGGACCUGUU | |
| | | CCCUACCGAGGUGUUGGGCGUGAAGCUCGACGGCAA | |
| | | GAGCUUCAGCACCAAGGACAAGUUCGACACCAGCAA | |
| | | GUUCUACGGCAAGGACAUCUUCAGCAGCUACGUGUA | |
| | | CGAGCACUGGAAGUCCAUCGACUUCAGCGGCUUCAU | |
| | | CCCCCUGCUGGACAAGAUCAACAUGCUCGUGCAGAA | |
| | | CGAGAAGAAGCCCGGGCUGAACACACCACCAAAGAA | |
| | | GAAAAGAAAGGUCUGAGCUGGAGCCUCGGUGGCCAU | |
| | | GCUUCUUGCCCCUUGGGCCUCCCCCCAGCCCCUCCUC | |
| | | CCCUUCCUGCACCCGUACCCCCGUGGUCUUUGAAUA | |
| | | AAGUCUGAGUGGGCGGCGAU | |
| R1262_nc-5 | R1262 ncRNA containing | GGGAUAAUGAGCGUGUGACAAGAUUUUGGGCUUGU | 19315 |
| (R1262_ncRNA- | 505 bp insertion in EMX1 | GUUUCGCAAGCUUUGAUUAAAAUGGUAGAUGGAUU | |
| EMX1_505) | site | UGCUAUCUAUCGUCAUUUCCAGUACUGUUAUGUACA | |
| | | AACGGCAGAAGCUGGAGGAGGAAGGGCCUGAGUCCG | |
| | | AGCAGAAGAAACUUCAGCUAAGGAAGCUACCAAUAU | |
| | | UUAGUUUCUGAGUCUCACGACAGACCUCGCGCGUAG | |
| | | AUUGCCAUGCGUAGAGCUAACGAGCCAGCGGAAAGC | |
| | | GUGAGGCGCUUUUAAGCAUGGCGAGUAAGUGAUCCA | |
| | | ACGCUUCGGAUAUGACUAUAUACUUAGGUUCGAUCU | |
| | | CGUCCCGAGAAUUCUAAGCCUCAACAUCUAUGAGUU | |
| | | AUGAGGUUAGCCGAAAAAGCACGUGGUGGCGCCCAC | |
| | | CGACUGUUCCCAGACUGUAGCUCUUUGUUCUGUCAA | |
| | | GGCCCGACCUUCAUCGCGGCCGAUUCCUUCUGCGGA | |
| | | CCAUACCGUCCUGAUACUUUGGUCAUGUUUCCGUUG | |
| | | UAGGAGUGAACCCACUUGCCUUUGCGUCUUAAUACC | |
| | | AAUGAAAAACCUAUGCACUUUGUACAGGGUACCAUC | |
| | | GGGAUUCUGAACCCUCAGAUAGUGGGGAUCCCGGGU | |
| | | AUAGACCUUUAUCUGCGGUCCAACUUAGGCAUAAAC | |
| | | CUCCAUGCUACAAAGUUCUCCCAUCACAUCAACCGG | |
| | | UGGCGCAUUGCCACGAAGCAGGCCAAUGGGGAGGAC | |
| | | AUCGAUGUCAGCAUAAUGAGUUGUCACACGCUCGAU | |
| R1262_nc-3 | R1262 ncRNA containing | GGGAUAAUGAGCGUGUGACAAGAUUUUGGGCUUGU | SEQ ID NO: |
| (R1262_ncRNA- | 305 bp insertion in EMX1 | GUUUCGCAAGCUUUGAUUAAAAUGGUAGAUGGAUU | 19316 |
| EMX1_305) | site | UGCUAUCUAUCGUCAUUUCCAGUACUGUUAUGUACA | |
| | | AACGGCAGAAGCUGGAGGAGGAAGGGCCUGAGUCCG | |
| | | AGCAGAAGAACGACUACCAAAUCCGCAUGUUACGGG | |
| | | ACUUCUUAUUAAUUCUUUUUUCGUGAGGAGCAGCGG | |
| | | AUCUUAAUGGAUGGCCGCAGGUGGUAUGGAAGCUAA | |
| | | UAGCGCGGGUGAGAGGGUAAUCAGCCGUGUCCACCA | |
| | | ACACAACGCUAUCGGGCGAUUCUAUAAGAUUCCGCA | |
| | | UUGCGUCUACUUAUAAGAUGUCUCAACGGUAUCCGC | |
| | | AACUUGCGAUGUGCCUGCUAUCCUUAAAUGCAUAUC | |
| | | UCGCCCAGUAGCUUCCCAAUAUGAGAGCAUCAAUUG | |
| | | UAGAUCGGGCCGGGAUAGUCAUGUCGUAAAGUUCUC | |
| | | CCAUCACAUCAACCGGUGGCGCAUUGCCACGAAGCA | |
| | | GGCCAAUGGGGAGGACAUCGAUGUCAGCAUAAUGAG | |
| | | UUGUCACACGCUCGAU | |
| R1262_nc-1 | R1262 ncRNA containing | GGGAUAAUGAGCGUGUGACAAGAUUUUGGGCUUGU | SEQ ID NO: |
| (R1262_ncRNA- | 25 bp insertion in EMX1 | GUUUCGCAAGCUUUGAUUAAAAUGGUAGAUGGAUU | 19317 |
| EMX1_25) | site | UGCUAUCUAUCGUCAUUUCCAGUACUGUUAUGUACA | |
| | | AACGGCAGAAGCUGGAGGAGGAAGGGCCUGAGUCCG | |
| | | AGCAGAAGAAAACUCGAGCUCUGAAUGACUCCUAUA | |
| | | AAGUUCUCCCAUCACAUCAACCGGUGGCGCAUUGCC | |
| | | ACGAAGCAGGCCAAUGGGGAGGACAUCGAUGUCAGC | |
| | | AUAAUGAGUUGUCACACGCUCGAU | |
| R1262_nc-4 | R1262 ncRNA containing | GGGAUAAUGAGCGUGUGACAAGAUUUUGGGCUUGU | SEQ ID NO: |
| (R1262_ncRNA- | 405 bp insertion in EMX1 | GUUUCGCAAGCUUUGAUUAAAAUGGUAGAUGGAUU | 19318 |
| EMX1_405) | site | UGCUAUCUAUCGUCAUUUCCAGUACUGUUAUGUACA | |
| | | AACGGCAGAAGCUGGAGGAGGAAGGGCCUGAGUCCG | |
| | | AGCAGAAGAACUGCUAAAUCCGCGUGAUAGGGGAUU | |
| | | UGAAGUUUAAUCUUCUAUCGCAAGGAACUGCCGAUC | |
| | | UUAAUGGAUGGCCGGAGGUGGUAUGGAAGCUAUAA | |
| | | GCGCGGGUGAGAGGGUAAUUAGGCGUGUUCACCUAC | |
| | | GCUACGCUAACGGGCGAUUCUAUAAGAUUGCACAUU | |
| | | GCGUCAACUCAUAAGAUGUCUCAACGGCAUGCGCAA | |
| | | CUUGUGAAGUGUCUACUAUCCUUAAACGCAUAUCUC | |
| | | GCACAGUAACUCCCGAAUAUGUCGGCAUCUGAUGUU | |
| | | GCCCGGGCCGAGUUAGUGUUGAGCUCACGGAACUUA | |
| | | UUGUAUGAGUAGUGAUUUGUAAGAGUUGUCAGUUA | |
| | | GCUCGUUCAGGUAAUAGUUGCCCACACAACGUCAAA | |
| | | AUAAGAGAACGGUCGUAACAUAAAGUUCUCCCAUCA | |
| | | CAUCAACCGGUGGCGCAUUGCCACGAAGCAGGCCAA | |
| | | UGGGGAGGACAUCGAUGUCAGCAUAAUGAGUUGUCA | |
| | | CACGCUCGAU | |
| R1262_nc-2 | R1262 ncRNA containing | GGGAUAAUGAGCGUGUGACAAGAUUUUGGGCUUGU | SEQ ID NO: |
| (R1262_ncRNA- | 205 bp insertion in EMX1 | GUUUCGCAAGCUUUGAUUAAAAUGGUAGAUGGAUU | 19319 |
| EMX1_205) | site | UGCUAUCUAUCGUCAUUUCCAGUACUGUUAUGUACA | |
| | | AACGGCAGAAGCUGGAGGAGGAAGGGCCUGAGUCCG | |
| | | AGCAGAAGAAAAAGCGGUCUUACGGUCAGUCGUAUU | |
| | | CCUUCUCGAGUUCCGUCCAGUUGAGCGUGUCACUCC | |
| | | CAGUGUACCUGCAAGCCGAGAUGGCUGUGCUUGGAG | |
| | | UCAAUCGCAUGUAGGAUGGUCUCCAGACACCGGGGC | |
| | | ACCAGUUUUCACGCCUAAAGCAUAAACGACGAGCAG | |
| | | UCAUGAAAGUCUUAGUACUGGACGUGCCGUUUCACA | |
| | | AAGUUCUCCCAUCACAUCAACCGGUGGCGCAUUGCC | |
| | | ACGAAGCAGGCCAAUGGGGAGGACAUCGAUGUCAGC | |
| | | AUAAUGAGUUGUCACACGCUCGAU | |
| R1262_nc-19 | R1262 ncRNA containing | GGGAUAAUGAGCGUGUGACAAGAUUUUGGGCUUGU | SEQ ID NO: |
| (R1262_ncRNA- | 205 bp insertion in EMX1 | GUUUCGCAAGCUUUGAUUAAAAUGGUAGAUGGAUU | 19320 |
| sgEMX1_205) | site combined with EMX1 | UGCUAUCUAUCGUCAUUUCCAGUACUGUUAUGUACA | |
| | sgRNA at 3′ end | AACGGCAGAAGCUGGAGGAGGAAGGGCCUGAGUCCG | |
| | | AGCAGAAGAAAAAGCGGUCUUACGGUCAGUCGUAUU | |
| | | CCUUCUCGAGUUCCGUCCAGUUGAGCGUGUCACUCC | |
| | | CAGUGUACCUGCAAGCCGAGAUGGCUGUGCUUGGAG | |
| | | UCAAUCGCAUGUAGGAUGGUCUCCAGACACCGGGGC | |
| | | ACCAGUUUUCACGCCUAAAGCAUAAACGACGAGCAG | |
| | | UCAUGAAAGUCUUAGUACUGGACGUGCCGUUUCACA | |
| | | AAGUUCUCCCAUCACAUCAACCGGUGGCGCAUUGCC | |
| | | ACGAAGCAGGCCAAUGGGGAGGACAUCGAUGUCAGC | |
| | | AUAAUGAGUUGUCACACGCUCAAUAACAACGAGUCC | |
| | | GAGCAGAAGAAGAAGUUUCAGAGCUAUGCUGGAAAC | |
| | | AGCAUAGCAAGUUGAAAUAAGGCUAGUCCGUUAUCA | |
| | | ACUUGAAAAAGUGGCACCGAGUCGGUGCUUUUUGAU | |
| R1262_nc-20 | R1262 ncRNA containing | GGGAUAAUGAGUCCGAGCAGAAGAAGAAGUUUCAGA | SEQ ID NO: |
| (R1262_ | 205 bp insertion in EMX1 | GCUAUGCUGGAAACAGCAUAGCAAGUUGAAAUAAGG | 19321 |
| sgEMX1- | site combined with EMX1 | CUAGUCCGUUAUCAACUUGAAAAAGUGGCACCGAGU | |
| ncRNA 205) | sgRNA at 5′ end | CGGUGCUUUUUAAUAACAACGAGCGUGUGACAAGAU | |
| | | UUUGGGCUUGUGUUUCGCAAGCUUUGAUUAAAAUGG | |
| | | UAGAUGGAUUUGCUAUCUAUCGUCAUUUCCAGUACU | |
| | | GUUAUGUACAAACGGCAGAAGCUGGAGGAGGAAGGG | |
| | | CCUGAGUCCGAGCAGAAGAAAAAGCGGUCUUACGGU | |
| | | CAGUCGUAUUCCUUCUCGAGUUCCGUCCAGUUGAGC | |
| | | GUGUCACUCCCAGUGUACCUGCAAGCCGAGAUGGCU | |
| | | GUGCUUGGAGUCAAUCGCAUGUAGGAUGGUCUCCAG | |
| | | ACACCGGGGCACCAGUUUUCACGCCUAAAGCAUAAA | |
| | | CGACGAGCAGUCAUGAAAGUCUUAGUACUGGACGUG | |
| | | CCGUUUCACAAAGUUCUCCCAUCACAUCAACCGGUG | |
| | | GCGCAUUGCCACGAAGCAGGCCAAUGGGGAGGACAU | |
| | | CGAUGUCAGCAUAAUGAGUUGUCACACGCUCGAU | |
| R1262_nc-13 | R1262 ncRNA containing | GGGAUAAUGAGCGUGUGACAAGAUUUUGGGCUUGU | SEQ ID NO: |
| (R1262_ncRNA- | 25 bp insertion in AAVS1 | GUUUCGCAAGCUUUGAUUAAAAUGGUAGAUGGAUU | 19322 |
| AAVS1_25) | site | UGCUAUCUAUCGUCAUUUCCAGUACUGUUAUGUUCU | |
| | | GUCCCCUCCACCCCACAGUGGGGCCACUAGGGACAG | |
| | | AAAGCGGUCUUACGGUCAGUCGUAUUCCUUCUCGAG | |
| | | UUCCGUCCAGUUGAGCGUGUCACUCCCAGUGUACCU | |
| | | GCAAGCCGAGAUGGCUGUGCUUGGAGUCAAUCGCAU | |
| | | GUAGGAUGGUCUCCAGACACCGGGGCACCAGUUUUC | |
| | | ACGCCUAAAGCAUAAACGACGAGCAGUCAUGAAAGU | |
| | | CUUAGUACUGGACGUGCCGUUUCACAAUUAAUGACA | |
| | | GAAAAGCCCCAUCCUUAGGCCUCCUCCUUCCUAGUC | |
| | | UCCUGAUAUUGGGUCUAACCCCCAGCAUAAUGAGUU | |
| | | GUCACACGCUCGAU | |
| R1262_nc-14 | R1262 ncRNA containing | GGGAUAAUGAGCGUGUGACAAGAUUUUGGGCUUGU | SEQ ID NO: |
| (R1262_ncRNA- | 205 bp insertion in AAVS1 | GUUUCGCAAGCUUUGAUUAAAAUGGUAGAUGGAUU | 19323 |
| AAVS1_205) | site | UGCUAUCUAUCGUCAUUUCCAGUACUGUUAUGUUCU | |
| | | GUCCCCUCCACCCCACAGUGGGGCCACUAGGGACAG | |
| | | AAAGCGGUCUUACGGUCAGUCGUAUUCCUUCUCGAG | |
| | | UUCCGUCCAGUUGAGCGUGUCACUCCCAGUGUACCU | |
| | | GCAAGCCGAGAUGGCUGUGCUUGGAGUCAAUCGCAU | |
| | | GUAGGAUGGUCUCCAGACACCGGGGCACCAGUUUUC | |
| | | ACGCCUAAAGCAUAAACGACGAGCAGUCAUGAAAGU | |
| | | CUUAGUACUGGACGUGCCGUUUCACAAUUAAUGACA | |
| | | GAAAAGCCCCAUCCUUAGGCCUCCUCCUUCCUAGUC | |
| | | UCCUGAUAUUGGGUCUAACCCCCAGCAUAAUGAGUU | |
| | | GUCACACGCUCGAU | |
| R1262_nc-15 | R1262 ncRNA containing | GGGAUAAUGAGCGUGUGACAAGAUUUUGGGCUUGU | SEQ ID NO: |
| (R1262_ncRNA- | 505 bp insertion in AAVS1 | GUUUCGCAAGCUUUGAUUAAAAUGGUAGAUGGAUU | 19324 |
| AAVS1_505) | site | UGCUAUCUAUCGUCAUUUCCAGUACUGUUAUGUUCU | |
| | | GUCCCCUCCACCCCACAGUGGGGCCACUAGGGACAG | |
| | | ACUUCAGCUAAGGAAGCUACCAAUAUUUAGUUUCUG | |
| | | AGUCUCACGACAGACCUCGCGCGUAGAUUGCCAUGC | |
| | | GUAGAGCUAACGAGCCAGCGGAAAGCGUGAGGCGCU | |
| | | UUUAAGCAUGGCGAGUAAGUGAUCCAACGCUUCGGA | |
| | | UAUGACUAUAUACUUAGGUUCGAUCUCGUCCCGAGA | |
| | | AUUCUAAGCCUCAACAUCUAUGAGUUAUGAGGUUAG | |
| | | CCGAAAAAGCACGUGGUGGCGCCCACCGACUGUUCC | |
| | | CAGACUGUAGCUCUUUGUUCUGUCAAGGCCCGACCU | |
| | | UCAUCGCGGCCGAUUCCUUCUGCGGACCAUACCGUC | |
| | | CUGAUACUUUGGUCAUGUUUCCGUUGUAGGAGUGAA | |
| | | CCCACCUGCCUUUGCGUCUUAAUACCAAUGAAAAAC | |
| | | CUAUGCACUUUGUACAGGGUACCAUCGGGAUUCUGA | |
| | | ACCCUCAGAUAGUGGGGAUCCCGGGUAUAGACCUUU | |
| | | AUCUGCGGUCCAACUUAGGCAUAAACCUCCAUGCUA | |
| | | CAAUUAAUGACAGAAAAGCCCCAUCCUUAGGCCUCC | |
| | | UCCUUCCUAGUCUCCUGAUAUUGGGUCUAACCCCCA | |
| | | GCAUAAUGAGUUGUCACACGCUCGAU | |
| R1262_nc-18 | R1262 ncRNA containing | GGGAUAAUGAGCGUGUGACAAGAUUUUGGGCUUGU | SEQ ID NO: |
| (R1262_ncRNA- | 505 bp insertion in AAVS1 | GUUUCGCAAGCUUUGAUUAAAAUGGUAGAUGGAUU | 19325 |
| AAVS1- | site and MS2 stem loop at | UGCUAUCUAUCGUCAUUUCCAGUACUGUUAUGUUCU | |
| MS2_505) | 3′ end | GUCCCCUCCACCCCACAGUGGGGCCACUAGGGACAG | |
| | | ACUUCAGCUAAGGAAGCUACCAAUAUUUAGUUUCUG | |
| | | AGUCUCACGACAGACCUCGCGCGUAGAUUGCCAUGC | |
| | | GUAGAGCUAACGAGCCAGCGGAAAGCGUGAGGCGCU | |
| | | UUUAAGCAUGGCGAGUAAGUGAUCCAACGCUUCGGA | |
| | | UAUGACUAUAUACUUAGGUUCGAUCUCGUCCCGAGA | |
| | | AUUCUAAGCCUCAACAUCUAUGAGUUAUGAGGUUAG | |
| | | CCGAAAAAGCACGUGGUGGCGCCCACCGACUGUUCC | |
| | | CAGACUGUAGCUCUUUGUUCUGUCAAGGCCCGACCU | |
| | | UCAUCGCGGCCGAUUCCUUCUGCGGACCAUACCGUC | |
| | | CUGAUACUUUGGUCAUGUUUCCGUUGUAGGAGUGAA | |
| | | CCCACUUGCCUUUGCGUCUUAAUACCAAUGAAAAAC | |
| | | CUAUGCACUUUGUACAGGGUACCAUCGGGAUUCUGA | |
| | | ACCCUCAGAUAGUGGGGAUCCCGGGUAUAGACCUUU | |
| | | AUCUGCGGUCCAACUUAGGCAUAAACCUCCAUGCUA | |
| | | CAAUUAAUGACAGAAAAGCCCCAUCCUUAGGCCUCC | |
| | | UCCUUCCUAGUCUCCUGAUAUUGGGUCUAACCCCCA | |
| | | GCAUAAUGAGUUGUCACACGCUCACAUGAGGAUCAC | |
| | | CCAUGUGAU | |
| R1262_nc-17 | R1262 ncRNA containing | GGGAUAAUGAGCGUGUGACAAGAUUUUGGGCUUGU | SEQ ID NO: |
| (R1262_ncRNA- | 205 bp insertion in AAVS1 | GUUUCGCAAGCUUUGAUUAAAAUGGUAGAUGGAUU | 19326 |
| AAVS1- | site and MS2 stem loop at | UGCUAUCUAUCGUCAUUUCCAGUACUGUUAUGUUCU | |
| MS2_205) | 3′ end | GUCCCCUCCACCCCACAGUGGGGCCACUAGGGACAG | |
| | | AAAGCGGUCUUACGGUCAGUCGUAUUCCUUCUCGAG | |
| | | UUCCGUCCAGUUGAGCGUGUCACUCCCAGUGUACCU | |
| | | GCAAGCCGAGAUGGCUGUGCUUGGAGUCAAUCGCAU | |
| | | GUAGGAUGGUCUCCAGACACCGGGGCACCAGUUUUC | |
| | | ACGCCUAAAGCAUAAACGACGAGCAGUCAUGAAAGU | |
| | | CUUAGUACUGGACGUGCCGUUUCACAAUUAAUGACA | |
| | | GAAAAGCCCCAUCCUUAGGCCUCCUCCUUCCUAGUC | |
| | | UCCUGAUAUUGGGUCUAACCCCCAGCAUAAUGAGUU | |
| | | GUCACACGCUCACAUGAGGAUCACCCAUGUGAU | |
| R1262_nc-16 | R1262 ncRNA containing | GGGAUAAUGAGCGUGUGACAAGAUUUUGGGCUUGU | SEQ ID NO: |
| (R1262_ncRNA- | 25 bp insertion in AAVS1 | GUUUCGCAAGCUUUGAUUAAAAUGGUAGAUGGAUU | 19327 |
| AAVS1- | site and MS2 stem loop at | UGCUAUCUAUCGUCAUUUCCAGUACUGUUAUGUUCU | |
| MS2_25) | 3′ end | GUCCCCUCCACCCCACAGUGGGGCCACUAGGGACAG | |
| | | AACUCGAGCUCUGAAUGACUCCUAUAAUUAAUGACA | |
| | | GAAAAGCCCCAUCCUUAGGCCUCCUCCUUCCUAGUC | |
| | | UCCUGAUAUUGGGUCUAACCCCCAGCAUAAUGAGUU | |
| | | GUCACACGCUCACAUGAGGAUCACCCAUGUGAU | |
| R1262_nc-9 | R1262 ncRNA containing | GGGAUAAUGAGCGUGUGACAAGAUUUUGGGCUUGU | SEQ ID NO: |
| (R1262_ncRNA- | 305 bp insertion in EMX1 | GUUUCGCAAGCUUUGAUUAAAAUGGUAGAUGGAUU | 19328 |
| EMX1- | site and MS2 stem loop at | UGCUAUCUAUCGUCAUUUCCAGUACUGUUAUGUACA | |
| MS2_305) | 3′ end | AACGGCAGAAGCUGGAGGAGGAAGGGCCUGAGUCCG | |
| | | AGCAGAAGAACGACUACCAAAUCCGCAUGUUACGGG | |
| | | ACUUCUUAUUAAUUCUUUUUUCGUGAGGAGCAGCGG | |
| | | AUCUUAAUGGAUGGCCGCAGGUGGUAUGGAAGCUAA | |
| | | UAGCGCGGGUGAGAGGGUAAUCAGCCGUGUCCACCA | |
| | | ACACAACGCUAUCGGGCGAUUCUAUAAGAUUCCGCA | |
| | | UUGCGUCUACUUAUAAGAUGUCUCAACGGUAUCCGC | |
| | | AACUUGCGAUGUGCCUGCUAUCCUUAAAUGCAUAUC | |
| | | UCGCCCAGUAGCUUCCCAAUAUGAGAGCAUCAAUUG | |
| | | UAGAUCGGGCCGGGAUAGUCAUGUCGUAAAGUUCUC | |
| | | CCAUCACAUCAACCGGUGGCGCAUUGCCACGAAGCA | |
| | | GGCCAAUGGGGAGGACAUCGAUGUCAGCAUAAUGAG | |
| | | UUGUCACACGCUCACAUGAGGAUCACCCAUGUGAU | |
| R1262_nc-7 | R1262 ncRNA containing | GGGAUAAUGAGCGUGUGACAAGAUUUUGGGCUUGU | SEQ ID NO: |
| (R1262_ncRNA- | 25 bp insertion in EMX1 | GUUUCGCAAGCUUUGAUUAAAAUGGUAGAUGGAUU | 19329 |
| EMX1- | site and MS2 stem loop at | UGCUAUCUAUCGUCAUUUCCAGUACUGUUAUGUACA | |
| MS2_25) | 3′ end | AACGGCAGAAGCUGGAGGAGGAAGGGCCUGAGUCCG | |
| | | AGCAGAAGAAAACUCGAGCUCUGAAUGACUCCUAUA | |
| | | AAGUUCUCCCAUCACAUCAACCGGUGGCGCAUUGCC | |
| | | ACGAAGCAGGCCAAUGGGGAGGACAUCGAUGUCAGC | |
| | | AUAAUGAGUUGUCACACGCUCACAUGAGGAUCACCC | |
| | | AUGUGAU | |
| R1262_nc-6 | R1262 ncRNA containing | GGGAUAAUGAGCGUGUGACAAGAUUUUGGGCUUGU | SEQ ID NO: |
| (R1262_ncRNA- | P2A-GFP insertion in | GUUUCGCAAGCUUUGAUUAAAAUGGUAGAUGGAUU | 19330 |
| EMX1_P2A- | EMX1 site | UGCUAUCUAUCGUCAUUUCCAGUACUGUUAUGUACA | |
| GFP) | | AACGGCAGAAGCUGGAGGAGGAAGGGCCUGAGUCCG | |
| | | AGCAGAAGAAGGAAGCGGAGCCACUAACUUCUCCCU | |
| | | GUUGAAACAAGCAGGGGAUGUCGAAGAGAAUCCCGG | |
| | | GCCAGUGAGCAAGGGCGAGGAGCUGUUCACCGGGGU | |
| | | GGUGCCCAUCCUGGUCGAGCUGGACGGCGACGUAAA | |
| | | CGGCCACAAGUUCAGCGUGUCCGGCGAGGGCGAGGG | |
| | | CGAUGCCACCUACGGCAAGCUGACCCUGAAGUUCAU | |
| | | CUGCACCACCGGCAAGCUGCCCGUGCCCUGGCCCACC | |
| | | CUCGUGACCACCCUGACCUACGGCGUGCAGUGCUUC | |
| | | AGCCGCUACCCCGACCACAUGAAGCAGCACGACUUC | |
| | | UUCAAGUCCGCCAUGCCCGAAGGCUACGUCCAGGAG | |
| | | CGCACCAUCUUCUUCAAGGACGACGGCAACUACAAG | |
| | | ACCCGCGCCGAGGUGAAGUUCGAGGGCGACACCCUG | |
| | | GUGAACCGCAUCGAGCUGAAGGGCAUCGACUUCAAG | |
| | | GAGGACGGCAACAUCCUGGGGCACAAGCUGGAGUAC | |
| | | AACUACAACAGCCACAACGUCUAUAUCAUGGCCGAC | |
| | | AAGCAGAAGAACGGCAUCAAGGUGAACUUCAAGAUC | |
| | | CGCCACAACAUCGAGGACGGCAGCGUGCAGCUCGCC | |
| | | GACCACUACCAGCAGAACACCCCCAUCGGCGACGGCC | |
| | | CCGUGCUGCUGCCCGACAACCACUACCUGAGCACCCA | |
| | | GUCCGCCCUGAGCAAAGACCCCAACGAGAAGCGCGA | |
| | | UCACAUGGUCCUGCUGGAGUUCGUGACCGCCGCCGG | |
| | | GAUCACUCUCGGCAUGGACGAGCUGUACAAGUAGAA | |
| | | AGUUCUCCCAUCACAUCAACCGGUGGCGCAUUGCCA | |
| | | CGAAGCAGGCCAAUGGGGAGGACAUCGAUGUCAGCA | |
| | | UAAUGAGUUGUCACACGCUCGAU | |
| R1262_nc-22 | R1262 ncRNA containing | GGGAUAAUGGGGCCACUAGGGACAGGAUGUUUCAGA | SEQ ID NO: |
| (R1262_ | 205 bp insertion in AAVS1 | GCUAUGCUGGAAACAGCAUAGCAAGUUGAAAUAAGG | 19331 |
| sgAAVS1- | site combined with | CUAGUCCGUUAUCAACUUGAAAAAGUGGCACCGAGU | |
| ncRNA_205) | sgAAVS1 at 5′ end | CGGUGCUUUUUAAUAACAACGAGCGUGUGACAAGAU | |
| | | UUUGGGCUUGUGUUUCGCAAGCUUUGAUUAAAAUGG | |
| | | UAGAUGGAUUUGCUAUCUAUCGUCAUUUCCAGUACU | |
| | | GUUAUGUUCUGUCCCCUCCACCCCACAGUGGGGCCA | |
| | | CUAGGGACAGAAAGCGGUCUUACGGUCAGUCGUAUU | |
| | | CCUUCUCGAGUUCCGUCCAGUUGAGCGUGUCACUCC | |
| | | CAGUGUACCUGCAAGCCGAGAUGGCUGUGCUUGGAG | |
| | | UCAAUCGCAUGUAGGAUGGUCUCCAGACACCGGGGC | |
| | | ACCAGUUUUCACGCCUAAAGCAUAAACGACGAGCAG | |
| | | UCAUGAAAGUCUUAGUACUGGACGUGCCGUUUCACA | |
| | | AUUAAUGACAGAAAAGCCCCAUCCUUAGGCCUCCUC | |
| | | CUUCCUAGUCUCCUGAUAUUGGGUCUAACCCCCAGC | |
| | | AUAAUGAGUUGUCACACGCUCGAU | |
| R1262_nc-8 | R1262 ncRNA containing | GGGAUAAUGAGCGUGUGACAAGAUUUUGGGCUUGU | SEQ ID NO: |
| (R1262_ncRNA- | 205 bp insertion in EMX1 | GUUUCGCAAGCUUUGAUUAAAAUGGUAGAUGGAUU | 19332 |
| EMX1- | site and MS2 stem loop at | UGCUAUCUAUCGUCAUUUCCAGUACUGUUAUGUACA | |
| MS2_205) | 3′ end | AACGGCAGAAGCUGGAGGAGGAAGGGCCUGAGUCCG | |
| | | AGCAGAAGAAAAAGCGGUCUUACGGUCAGUCGUAUU | |
| | | CCUUCUCGAGUUCCGUCCAGUUGAGCGUGUCACUCC | |
| | | CAGUGUACCUGCAAGCCGAGAUGGCUGUGCUUGGAG | |
| | | UCAAUCGCAUGUAGGAUGGUCUCCAGACACCGGGGC | |
| | | ACCAGUUUUCACGCCUAAAGCAUAAACGACGAGCAG | |
| | | UCAUGAAAGUCUUAGUACUGGACGUGCCGUUUCACA | |
| | | AAGUUCUCCCAUCACAUCAACCGGUGGCGCAUUGCC | |
| | | ACGAAGCAGGCCAAUGGGGAGGACAUCGAUGUCAGC | |
| | | AUAAUGAGUUGUCACACGCUCACAUGAGGAUCACCC | |
| | | AUGUGAU | |
| R1262_nc-21 | R1262 ncRNA containing | GGGAUAAUGAGCGUGUGACAAGAUUUUGGGCUUGU | SEQ ID NO: |
| (R1262_ncRNA- | 205 bp insertion in AAVS1 | GUUUCGCAAGCUUUGAUUAAAAUGGUAGAUGGAUU | 19333 |
| sgAAVS1_205) | site combined with | UGCUAUCUAUCGUCAUUUCCAGUACUGUUAUGUUCU | |
| | sgAAVS1 at 3′ end | GUCCCCUCCACCCCACAGUGGGGCCACUAGGGACAG | |
| | | AAAGCGGUCUUACGGUCAGUCGUAUUCCUUCUCGAG | |
| | | UUCCGUCCAGUUGAGCGUGUCACUCCCAGUGUACCU | |
| | | GCAAGCCGAGAUGGCUGUGCUUGGAGUCAAUCGCAU | |
| | | GUAGGAUGGUCUCCAGACACCGGGGCACCAGUUUUC | |
| | | ACGCCUAAAGCAUAAACGACGAGCAGUCAUGAAAGU | |
| | | CUUAGUACUGGACGUGCCGUUUCACAAUUAAUGACA | |
| | | GAAAAGCCCCAUCCUUAGGCCUCCUCCUUCCUAGUC | |
| | | UCCUGAUAUUGGGUCUAACCCCCAGCAUAAUGAGUU | |
| | | GUCACACGCUCAAUAACAACGGGGCCACUAGGGACA | |
| | | GGAUGUUUCAGAGCUAUGCUGGAAACAGCAUAGCAA | |
| | | GUUGAAAUAAGGCUAGUCCGUUAUCAACUUGAAAAA | |
| | | GUGGCACCGAGUCGGUGCUUUUUGAU | |
| R1262_nc-10 | R1262 ncRNA containing | GGGAUAAUGAGCGUGUGACAAGAUUUUGGGCUUGU | SEQ ID NO: |
| (R1262_ncRNA- | 405 bp insertion in EMX1 | GUUUCGCAAGCUUUGAUUAAAAUGGUAGAUGGAUU | 19334 |
| EMX1- | site and MS2 stem loop at | UGCUAUCUAUCGUCAUUUCCAGUACUGUUAUGUACA | |
| MS2_405) | 3′ end | AACGGCAGAAGCUGGAGGAGGAAGGGCCUGAGUCCG | |
| | | AGCAGAAGAACUGCUAAAUCCGCGUGAUAGGGGAUU | |
| | | UGAAGUUUAAUCUUCUAUCGCAAGGAACUGCCGAUC | |
| | | UUAAUGGAUGGCCGGAGGUGGUAUGGAAGCUAUAA | |
| | | GCGCGGGUGAGAGGGUAAUUAGGCGUGUUCACCUAC | |
| | | GCUACGCUAACGGGCGAUUCUAUAAGAUUGCACAUU | |
| | | GCGUCAACUCAUAAGAUGUCUCAACGGCAUGCGCAA | |
| | | CUUGUGAAGUGUCUACUAUCCUUAAACGCAUAUCUC | |
| | | GCACAGUAACUCCCGAAUAUGUCGGCAUCUGAUGUU | |
| | | GCCCGGGCCGAGUUAGUGUUGAGCUCACGGAACUUA | |
| | | UUGUAUGAGUAGUGAUUUGUAAGAGUUGUCAGUUA | |
| | | GCUCGUUCAGGUAAUAGUUGCCCACACAACGUCAAA | |
| | | AUAAGAGAACGGUCGUAACAUAAAGUUCUCCCAUCA | |
| | | CAUCAACCGGUGGCGCAUUGCCACGAAGCAGGCCAA | |
| | | UGGGGAGGACAUCGAUGUCAGCAUAAUGAGUUGUCA | |
| | | CACGCUCACAUGAGGAUCACCCAUGUGAU | |
| R1262_nc-11 | R1262 ncRNA containing | GGGAUAAUGAGCGUGUGACAAGAUUUUGGGCUUGU | SEQ ID NO: |
| (R1262_ncRNA- | 505 bp insertion in EMX1 | GUUUCGCAAGCUUUGAUUAAAAUGGUAGAUGGAUU | 19335 |
| EMX1- | site and MS2 stem loop at | UGCUAUCUAUCGUCAUUUCCAGUACUGUUAUGUACA | |
| MS2_505) | 3′ end | AACGGCAGAAGCUGGAGGAGGAAGGGCCUGAGUCCG | |
| | | AGCAGAAGAAACUUCAGCUAAGGAAGCUACCAAUAU | |
| | | UUAGUUUCUGAGUCUCACGACAGACCUCGCGCGUAG | |
| | | AUUGCCAUGCGUAGAGCUAACGAGCCAGCGGAAAGC | |
| | | GUGAGGCGCUUUUAAGCAUGGCGAGUAAGUGAUCCA | |
| | | ACGCUUCGGAUAUGACUAUAUACUUAGGUUCGAUCU | |
| | | CGUCCCGAGAAUUCUAAGCCUCAACAUCUAUGAGUU | |
| | | AUGAGGUUAGCCGAAAAAGCACGUGGUGGCGCCCAC | |
| | | CGACUGUUCCCAGACUGUAGCUCUUUGUUCUGUCAA | |
| | | GGCCCGACCUUCAUCGCGGCCGAUUCCUUCUGCGGA | |
| | | CCAUACCGUCCUGAUACUUUGGUCAUGUUUCCGUUG | |
| | | UAGGAGUGAACCCACUUGCCUUUGCGUCUUAAUACC | |
| | | AAUGAAAAACCUAUGCACUUUGUACAGGGUACCAUC | |
| | | GGGAUUCUGAACCCUCAGAUAGUGGGGAUCCCGGGU | |
| | | AUAGACCUUUAUCUGCGGUCCAACUUAGGCAUAAAC | |
| | | CUCCAUGCUACAAAGUUCUCCCAUCACAUCAACCGG | |
| | | UGGCGCAUUGCCACGAAGCAGGCCAAUGGGGAGGAC | |
| | | AUCGAUGUCAGCAUAAUGAGUUGUCACACGCUCACA | |
| | | UGAGGAUCACCCAUGUGAU | |
| R1262_nc-12 | R1262 ncRNA containing | GGGAUAAUGAGCGUGUGACAAGAUUUUGGGCUUGU | SEQ ID NO: |
| (R1262_ncRNA- | P2A-GFP insertion in | GUUUCGCAAGCUUUGAUUAAAAUGGUAGAUGGAUU | 19336 |
| EMX1- | EMX1 site and MS2 stem | UGCUAUCUAUCGUCAUUUCCAGUACUGUUAUGUACA | |
| MS2_P2A- | loop at 3′ cnd | AACGGCAGAAGCUGGAGGAGGAAGGGCCUGAGUCCG | |
| GFP) | | AGCAGAAGAAGGAAGCGGAGCCACUAACUUCUCCCU | |
| | | GUUGAAACAAGCAGGGGAUGUCGAAGAGAAUCCCGG | |
| | | GCCAGUGAGCAAGGGCGAGGAGCUGUUCACCGGGGU | |
| | | GGUGCCCAUCCUGGUCGAGCUGGACGGCGACGUAAA | |
| | | CGGCCACAAGUUCAGCGUGUCCGGCGAGGGCGAGGG | |
| | | CGAUGCCACCUACGGCAAGCUGACCCUGAAGUUCAU | |
| | | CUGCACCACCGGCAAGCUGCCCGUGCCCUGGCCCACC | |
| | | CUCGUGACCACCCUGACCUACGGCGUGCAGUGCUUC | |
| | | AGCCGCUACCCCGACCACAUGAAGCAGCACGACUUC | |
| | | UUCAAGUCCGCCAUGCCCGAAGGCUACGUCCAGGAG | |
| | | CGCACCAUCUUCUUCAAGGACGACGGCAACUACAAG | |
| | | ACCCGCGCCGAGGUGAAGUUCGAGGGCGACACCCUG | |
| | | GUGAACCGCAUCGAGCUGAAGGGCAUCGACUUCAAG | |
| | | GAGGACGGCAACAUCCUGGGGCACAAGCUGGAGUAC | |
| | | AACUACAACAGCCACAACGUCUAUAUCAUGGCCGAC | |
| | | AAGCAGAAGAACGGCAUCAAGGUGAACUUCAAGAUC | |
| | | CGCCACAACAUCGAGGACGGCAGCGUGCAGCUCGCC | |
| | | GACCACUACCAGCAGAACACCCCCAUCGGCGACGGCC | |
| | | CCGUGCUGCUGCCCGACAACCACUACCUGAGCACCCA | |
| | | GUCCGCCCUGAGCAAAGACCCCAACGAGAAGCGCGA | |
| | | UCACAUGGUCCUGCUGGAGUUCGUGACCGCCGCCGG | |
| | | GAUCACUCUCGGCAUGGACGAGCUGUACAAGUAGAA | |
| | | AGUUCUCCCAUCACAUCAACCGGUGGCGCAUUGCCA | |
| | | CGAAGCAGGCCAAUGGGGAGGACAUCGAUGUCAGCA | |
| | | UAAUGAGUUGUCACACGCUCACAUGAGGAUCACCCA | |
| | | UGUGAU | |
| R1262_nc-23 | Same as R1262_nc-6 but | GGGAUAAUGAGCGUGUGACAAGAUUUUGGGCUUGU | SEQ ID NO: |
| (R1262_ncRNA- | with longer homology arms | GUUUCGCAAGCUUUGAUUAAAAUGGUAGAUGGAUU | 19337 |
| EMX1_P2A- | | UGCUAUCUAUCGUCAUUUCCAGUACUGUUAUGUGAG | |
| GFP_LongHA) | | GCCCCAGUGGCUGCUCUGGGGGCCUCCUGAGUUUCU | |
| | | CAUCUGUGCCCCUCCCUCCCUGGCCCAGGUGAAGGU | |
| | | GUGGUUCCAGAACCGGAGGACAAAGUACAAACGGCA | |
| | | GAAGCUGGAGGAGGAAGGGCCUGAGUCCGAGCAGAA | |
| | | GAAGGAAGCGGAGCCACUAACUUCUCCCUGUUGAAA | |
| | | CAAGCAGGGGAUGUCGAAGAGAAUCCCGGGCCAGUG | |
| | | AGCAAGGGCGAGGAGCUGUUCACCGGGGUGGUGCCC | |
| | | AUCCUGGUCGAGCUGGACGGCGACGUAAACGGCCAC | |
| | | AAGUUCAGCGUGUCCGGCGAGGGCGAGGGCGAUGCC | |
| | | ACCUACGGCAAGCUGACCCUGAAGUUCAUCUGCACC | |
| | | ACCGGCAAGCUGCCCGUGCCCUGGCCCACCCUCGUGA | |
| | | CCACCCUGACCUACGGCGUGCAGUGCUUCAGCCGCU | |
| | | ACCCCGACCACAUGAAGCAGCACGACUUCUUCAAGU | |
| | | CCGCCAUGCCCGAAGGCUACGUCCAGGAGCGCACCA | |
| | | UCUUCUUCAAGGACGACGGCAACUACAAGACCCGCG | |
| | | CCGAGGUGAAGUUCGAGGGCGACACCCUGGUGAACC | |
| | | GCAUCGAGCUGAAGGGCAUCGACUUCAAGGAGGACG | |
| | | GCAACAUCCUGGGGCACAAGCUGGAGUACAACUACA | |
| | | ACAGCCACAACGUCUAUAUCAUGGCCGACAAGCAGA | |
| | | AGAACGGCAUCAAGGUGAACUUCAAGAUCCGCCACA | |
| | | ACAUCGAGGACGGCAGCGUGCAGCUCGCCGACCACU | |
| | | ACCAGCAGAACACCCCCAUCGGCGACGGCCCCGUGCU | |
| | | GCUGCCCGACAACCACUACCUGAGCACCCAGUCCGCC | |
| | | CUGAGCAAAGACCCCAACGAGAAGCGCGAUCACAUG | |
| | | GUCCUGCUGGAGUUCGUGACCGCCGCCGGGAUCACU | |
| | | CUCGGCAUGGACGAGCUGUACAAGUAGAAAGUUCUC | |
| | | CCAUCACAUCAACCGGUGGCGCAUUGCCACGAAGCA | |
| | | GGCCAAUGGGGAGGACAUCGAUGUCACCUCCAAUGA | |
| | | CUAGGGUGGGCAACCACAAACCCACGAGGGCAGAGU | |
| | | GCUGCUUGCUGCUGGCCAGGCCCCUGCGUGGGCCCA | |
| | | AGCGCAUAAUGAGUUGUCACACGCUCGAU | |
| R1262_nc-24 | Same as R1262_nc-12 but | GGGAUAAUGAGCGUGUGACAAGAUUUUGGGCUUGU | SEQ ID NO: |
| (R1262_ncRNA- | with longer homology arms | GUUUCGCAAGCUUUGAUUAAAAUGGUAGAUGGAUU | 19338 |
| EMX1- | | UGCUAUCUAUCGUCAUUUCCAGUACUGUUAUGUGAG | |
| MS2_P2A- | | GCCCCAGUGGCUGCUCUGGGGGCCUCCUGAGUUUCU | |
| GFP_LongHA) | | CAUCUGUGCCCCUCCCUCCCUGGCCCAGGUGAAGGU | |
| | | GUGGUUCCAGAACCGGAGGACAAAGUACAAACGGCA | |
| | | GAAGCUGGAGGAGGAAGGGCCUGAGUCCGAGCAGAA | |
| | | GAAGGAAGCGGAGCCACUAACUUCUCCCUGUUGAAA | |
| | | CAAGCAGGGGAUGUCGAAGAGAAUCCCGGGCCAGUG | |
| | | AGCAAGGGCGAGGAGCUGUUCACCGGGGUGGUGCCC | |
| | | AUCCUGGUCGAGCUGGACGGCGACGUAAACGGCCAC | |
| | | AAGUUCAGCGUGUCCGGCGAGGGCGAGGGCGAUGCC | |
| | | ACCUACGGCAAGCUGACCCUGAAGUUCAUCUGCACC | |
| | | ACCGGCAAGCUGCCCGUGCCCUGGCCCACCCUCGUGA | |
| | | CCACCCUGACCUACGGCGUGCAGUGCUUCAGCCGCU | |
| | | ACCCCGACCACAUGAAGCAGCACGACUUCUUCAAGU | |
| | | CCGCCAUGCCCGAAGGCUACGUCCAGGAGCGCACCA | |
| | | UCUUCUUCAAGGACGACGGCAACUACAAGACCCGCG | |
| | | CCGAGGUGAAGUUCGAGGGCGACACCCUGGUGAACC | |
| | | GCAUCGAGCUGAAGGGCAUCGACUUCAAGGAGGACG | |
| | | GCAACAUCCUGGGGCACAAGCUGGAGUACAACUACA | |
| | | ACAGCCACAACGUCUAUAUCAUGGCCGACAAGCAGA | |
| | | AGAACGGCAUCAAGGUGAACUUCAAGAUCCGCCACA | |
| | | ACAUCGAGGACGGCAGCGUGCAGCUCGCCGACCACU | |
| | | ACCAGCAGAACACCCCCAUCGGCGACGGCCCCGUGCU | |
| | | GCUGCCCGACAACCACUACCUGAGCACCCAGUCCGCC | |
| | | CUGAGCAAAGACCCCAACGAGAAGCGCGAUCACAUG | |
| | | GUCCUGCUGGAGUUCGUGACCGCCGCCGGGAUCACU | |
| | | CUCGGCAUGGACGAGCUGUACAAGUAGAAAGUUCUC | |
| | | CCAUCACAUCAACCGGUGGCGCAUUGCCACGAAGCA | |
| | | GGCCAAUGGGGAGGACAUCGAUGUCACCUCCAAUGA | |
| | | CUAGGGUGGGCAACCACAAACCCACGAGGGCAGAGU | |
| | | GCUGCUUGCUGCUGGCCAGGCCCCUGCGUGGGCCCA | |
| | | AGCGCAUAAUGAGUUGUCACACGCUCACAUGAGGAU | |
| | | CACCCAUGUGAU | |
| 6083 v1 RT | 6083 retron RT mRNA | AUGAGCAACCCUCAGCCCACCAGGGCUGAGAUCUUC | SEQ ID NO: |
| | | GAGCGCAUCAAACAGAGCUCGAAGCAGGAGGUGAUC | 19339 |
| | | CUGGAGGAGAUGCAGAGACUGGGCUUCUGGCCAAGG | |
| | | UCAGAAGGCCAGCCUGAGGUCGCUGCCGACCUCAUC | |
| | | CAGAGAGAAGGCGAGCUCCAAAGGGAGCUCGCCGAA | |
| | | CUCAACAAGAAGUUGGCGGUCAAACGCAACCCCGAG | |
| | | AGGGCCCUCAGAGAAAUGAGGAAGCAGAGAAUGAAG | |
| | | GACGCCAGAGACAAGAGAGAGGUGACCAAGAGAGCC | |
| | | CAGGCUCAGCAGAGAUACGACAAGGCCCUGCUGUGG | |
| | | CACGAGAAGAGGGCCAGCCACGUGGCCUAUCUUGGC | |
| | | CCUGGUGUGAGCGCCAGCUUACACGAGAACAGCUCU | |
| | | GCUACCCAGGAGCAGGGCGACAAGGGGAAACCCAAG | |
| | | AGAGCCCGAGAUCGGGCUGUGCCAGACCUGCAGAGG | |
| | | CUGACACUGAACGGGCUGCCUGCUCUGAUUAGCGCA | |
| | | GCCCAACUCGCUGAGUCCAUGGGAGUCAGCGUGGCU | |
| | | GAGCUGAGAUUCCUCAGCUUCCACAGGGAGGUGGCU | |
| | | AGGACAAACCACUACCACAGCUUCACGCUCCCCAAG | |
| | | AAGACAGGUGGGGAGCGUCUGAUCAGCGCCCCCAUG | |
| | | CCCAGACUGAAGAGAGCCCAGUACUGGGUGCUGGAC | |
| | | AACGUGCUGGCAAAGAUGCCAGCGCACGAUGCGGCU | |
| | | CACGGCUUCCUGGCCGGCAGAAGCAUCAUCAGCAAU | |
| | | GCCAAGCCCCAUGCGGGGCAGGAUGUGGUCAUUAAC | |
| | | UUGGACGUUAAGGACUUCUUCCCCAGCAUCGCCUUC | |
| | | GGCAGAAUCAAGGGCGUGUUCAGACAGCUGGGCUAC | |
| | | GGCGAAAGCAUCGCCACAGUGUUCGCCCUGCUGUGC | |
| | | AGCGAGAACAGAGCCCAGGCCUGGCAAGUGGACGGA | |
| | | GAGAGACUCUUCGUCGGCGGCAAGGCCAGAGAAAGA | |
| | | GUGCUGCCUCAGGGCGCUCCUACCAGCCCCAUGCUG | |
| | | ACCAACCUGCUGUGCCGGCGGAUGGAUAGACGUCUG | |
| | | CUGGGUCUCGCGAAGCAGCUGGGCUUCGUGUACACC | |
| | | AGAUACGCCGACGACCUGACCUUCAGCGCCUCCGGC | |
| | | GAACCCGCAAGGGAUAACGUCGGAAAGCUGCUGAGC | |
| | | AGGGUCCGGUGGAUCCUGAGGGAUGAGGGGUUCACC | |
| | | CCUCAUCCCGAUAAGGAGAGAGUGAUGAGAAAGGGC | |
| | | AGAAGACAGGAGGUGACCGGCCUUGUGGUCAACUCC | |
| | | GACACUCCCAGCGUGAGCAGGGAGACCAGAAGAAGG | |
| | | CUGAGAGCCGCUCUGCACAGAGCCUCGCAGCCUGAC | |
| | | GCUGCGAGCAAACCUGCACAUUGGCAGGGCCAUACG | |
| | | GCCCAGCCAAGUCAGCUGCUGGGCCUGGCCACAUUC | |
| | | GUGCAUCAGAUCGACCCCAAGCAGGGCAAGACCCUG | |
| | | CUCGCUGACGCUCAGCAACUGAUGCGCAGCCCUAUC | |
| | | GACCGCGCUAAUGACGCGGCGAAGUCUGCUAGCAGG | |
| | | GCUGACGCUGCUCAGCAGAGCUUCAGAGUGCUGGCU | |
| | | GCUGCCGGCAAGCCACCAGUUCUUGCCGACGGCAAG | |
| | | AACUGGUGGCAACCUGCUCCUCCUGCCACACCUGUG | |
| | | CUGGAGAAGACCGACCAGCAGAGAAGAGAGGAAAGG | |
| | | CAGGCUACCAGAAGGCAGCAGGCCGCUGCUGCUGCU | |
| | | CCUCCUCCUAGCAGCACAAGAAGAAACGAGCGGCCG | |
| | | CAACAGGCCGCUCAUGAGCAGCAGGGAGAUGCCCAG | |
| | | CCUCAGAACGAGGCCCCUCCUAGAUUCGACCCCGACC | |
| | | AGUACGCUCCUCCCCCGAGGAACGUGAUGACCUACU | |
| | | GGGCCCAGAUCGCCAUCAGCUUCUUUCUGGGCAGCA | |
| | | UCCUGCACAACAGACUGAUCACGAUCUUCGCCAUGG | |
| | | UGGCGGUGAUCGCUCUGUACUACAUGAGAAGACAGA | |
| | | GAUGGGAUGUCUUCAUGGGCAUCCUGGUGGUGGCCA | |
| | | CCCUGCUGGGAUACCUGGUCAGGGGCAUGGGCccaccaa | |
| | | agaagaaaagaaaggucuga | |
| 6083 | R6083 retron containing 25 | GCUCCGGAGCAAUGAGCAGGCUCUUGCAAUCCGGGC | SEQ ID NO: |
| v1_ncRNA_ | bp insertion at AAVS1 site | GGUGUUUCGCCGCCCUUGUGAACUGCCGUUUCAUGC | 19340 |
| AAVS1 | | ACCACGGGCGCCGUUUUCACUGUGCCACCCCAGCCAC | |
| gRNA_25 bp | | GGUAGUGCUUCUGUCCCCUCCACCCCACAGUGGGGC | |
| | | CACUAGGGACAGAAAUGACAGUGGUUGGUGCUCUAA | |
| | | AAAUUAAUGACAGAAAAGCCCCAUCCUUAGGCCUCC | |
| | | UCCUUCCUAGUCUCCUGAUAUUGGGUCUAACCCCCA | |
| | | AGCACUACCGUGGCGGGGUGGCGUCGAGCGAACAGC | |
| | | UCCCGUCCCCUGAGCCCUACAGGCUCUUGGACGAGA | |
| | | UGCACAUUGCUCCGGAGCAAUAACAACGGGGCCACU | |
| | | AGGGACAGGAUguuucagagcuaugcuggaaacagcauagcaaguuga | |
| | | aauaaggcuaguccguuaucaacuugaaaaaguggcaccgagucggugcuuuuu | |
| 6083 | R6083 retron containing 25 | GCUCCGGAGCAAUGAGCAGGCUCUUGCAAUCCGGGC | SEQ ID NO: |
| v1_ncRNA | bp insertion at EMX1 site | GGUGUUUCGCCGCCCUUGUGAACUGCCGUUUCAUGC | 19341 |
| only_25 bp | | ACCACGGGCGCCGUUUUCACUGUGCCACCCCAGCCAC | |
| | | GGUAGUGCUacaaacggcagaagcuggaggaggaagggccugaguccgag | |
| | | cagaagaaaACUCGAGCUCUGAAUGACUCCUAU Aaaguucuc | |
| | | ccaucacaucaaccgguggcgcauugccacgaagcaggccaauggggaggacauc | |
| | | gaugucaAGCACUACCGUGGCGGGGUGGCGUCGAGCGA | |
| | | ACAGCUCCCGUCCCCUGAGCCCUACAGGCUCUUGGA | |
| | | CGAGAUGCACAUUGCUCCGGAGC | |
| 6083 | R6083 retron containing 25 | GCUCCGGAGCAAUGAGCAGGCUCUUGCAAUCCGGGC | SEQ ID NO: |
| v1_ncRNA_ | bp insertion at EMX1 site | GGUGUUUCGCCGCCCUUGUGAACUGCCGUUUCAUGC | 19342 |
| EMX1 | and sgEMX1 at 3′ end | ACCACGGGCGCCGUUUUCACUGUGCCACCCCAGCCAC | |
| gRNA_25 bp | | GGUAGUGCUacaaacggcagaagcuggaggaggaagggccugaguccgag | |
| | | cagaagaaaACUCGAGCUCUGAAUGACUCCUAUAaaguucuc | |
| | | ccaucacaucaaccgguggcgcauugccacgaagcaggccaauggggaggacauc | |
| | | gaugucaAGCACUACCGUGGCGGGGUGGCGUCGAGCGA | |
| | | ACAGCUCCCGUCCCCUGAGCCCUACAGGCUCUUGGA | |
| | | CGAGAUGCACAUUGCUCCGGAGCAAUAACAACgagucc | |
| | | gagcagaagaagaaguuucagagcuaugcuggaaacagcauagcaaguugaaau | |
| | | aaggcuaguccguuaucaacuugaaaaaguggcaccgagucggugcuuuuu | |
| 6083 | R6083 retron containing | GCUCCGGAGCAAUGAGCAGGCUCUUGCAAUCCGGGC | SEQ ID NO: |
| v1_ncRNA_ | GFP gene insertion at | GGUGUUUCGCCGCCCUUGUGAACUGCCGUUUCAUGC | 19343 |
| EMX1 | EMX1 site and sgEMX1 at | ACCACGGGCGCCGUUUUCACUGUGCCACCCCAGCCAC | |
| gRNA_GFP | 3′ end | GGUAGUGCUacaaacggcagaagcuggaggaggaagggccugaguccgag | |
| gene | | cagaagaacccauauguccuuccgagugagagacacaaaaaauuccaacacacua | |
| | | uugcaaugaaaauaaauuuccuuuauuagccagaagucagaugcucaaggggcu | |
| | | ucaugauguccccauaauuuuggcagagggaaaaagaucucagugguauuugu | |
| | | gagccagggcauuggccacaccagccaccaccuucugauaggcagccugcaccug | |
| | | aggagugcggccgcuuuacuuguacagcucguccaugccgagagugaucccggc | |
| | | ggcggucacgaacuccagcaggaccaugugaucgcgcuucucguuggggucuuu | |
| | | gcucagggggacugggugcucagguagugguugucgggcagcagcacggggc | |
| | | cgucgccgauggggguguucugcugguaguggucggcgagcugcacgcugccg | |
| | | uccucgauguuguggcggaucuugaaguucaccuugaugccguucuucugcuu | |
| | | gucggccaugauauagacguuguggcuguuguaguuguacuccagcuugugcc | |
| | | ccaggauguugccguccuccuugaagucgaugcccuucagcucgaugcgguuca | |
| | | ccagggugucgcccucgaacuucaccucggcgcgggucuuguaguugccgucgu | |
| | | ccuugaagaagauggugcgcuccuggacguagccuucgggcauggeggacuuga | |
| | | agaagucgugcugcuucauguggucgggguageggcugaagcacugcacgccgu | |
| | | aggucaggguggucacgagggugggccagggcacgggcagcuugccgguggug | |
| | | cagaugaacuucagggucagcuugccguagguggcaucgcccucgcccucgccg | |
| | | gacacgcugaacuuguggccguuuacgucgccguccagcucgaccaggaugggc | |
| | | accaccccggugaacagcuccucgcccuugcucaccaugguggcgaccggugga | |
| | | ucccgggcccgegguaccgucgacugcagaauucgaagcuugagcucgagaucu | |
| | | gaguccgguagcgcuagcggaucugacgguucacuaaacccuguguucugggg | |
| | | caaacccguugcgaaaaagaacguucacggcgacuacugcacuuauauacgguuc | |
| | | ucccccacccucgggaaaaaggeggagccaguacacgacaucacuuucccaguuu | |
| | | accccgcgccaccuucucuaggcacegguucaauugccgaccccuccccccaacu | |
| | | ucucggggacugugggcgaugugegcucugcccguucucccaucacaucaaccg | |
| | | guggcgcauugccacgaagcaggccaauggggaggacaucgaugucaAGCAC | |
| | | UACCGUGGCGGGGUGGCGUCGAGCGAACAGCUCCCG | |
| | | UCCCCUGAGCCCUACAGGCUCUUGGACGAGAUGCAC | |
| | | AUUGCUCCGGAGCAAUAACAACgaguccgagcagaagaagaag | |
| | | uuucagagcuaugcuggaaacagcauagcaaguugaaauaaggcuaguccguua | |
| | | ucaacuugaaaaaguggcaccgagucggugcuuuuu | |
| 6083 | R6083 retron containing 50 | GCUCCGGAGCAAUGAGCAGGCUCUUGCAAUCCGGGC | SEQ ID NO: |
| v1_ncRNA_ | bp insertion at EMX1 site | GGUGUUUCGCCGCCCUUGUGAACUGCCGUUUCAUGC | 19344 |
| EMX1 | and sgEMX1 at 3′ end | ACCACGGGCGCCGUUUUCACUGUGCCACCCCAGCCAC | |
| gRNA_50 bp | | GGUAGUGCUacaaacggcagaagcuggaggaggaagggccugaguccgag | |
| | | cagaagaaaACUCGAGCUCUGAUCAGUAUCAUGGGGCCC | |
| | | AUGGUUGAAUGACUCCUAUAaaguucucccaucacaucaaccgg | |
| | | uggcgcauugccacgaagcaggccaauggggaggacaucgaugucaAGCAC | |
| | | UACCGUGGCGGGGUGGCGUCGAGCGAACAGCUCCCG | |
| | | UCCCCUGAGCCCUACAGGCUCUUGGACGAGAUGCAC | |
| | | AUUGCUCCGGAGCAAUAACAACgaguccgagcagaagaagaag | |
| | | uuucagagcuaugcuggaaacagcauagcaaguugaaauaaggcuaguccguua | |
| | | ucaacuugaaaaaguggcaccgagucggugcuuuuu | |
| 6083 | R6083 retron containing | GCUCCGGAGCAAUGAGCAGGCUCUUGCAAUCCGGGC | SEQ ID NO: |
| v1_ncRNA_ | 100 bp insertion at EMX1 | GGUGUUUCGCCGCCCUUGUGAACUGCCGUUUCAUGC | 19345 |
| EMX1 | site and sgEMX1 al 3′ end | ACCACGGGCGCCGUUUUCACUGUGCCACCCCAGCCAC | |
| gRNA_100 bp | | GGUAGUGCUacaaacggcagaagcuggaggaggaagggccugaguccgag | |
| | | cagaagaaaACUCGAGCUCUGAGCCCCACUGUCGAGAAG | |
| | | UAUGUAUCUCGCUCCCGCAGCUUGCCAGCACUUUCA | |
| | | GUAUCAUGGGGCCCAUGGUUGAAUGACUCCUAUAaag | |
| | | uucucccaucacaucaaccgguggcgcauugccacgaagcaggccaauggggag | |
| | | gacaucgaugucaAGCACUACCGUGGCGGGGUGGCGUCGA | |
| | | GCGAACAGCUCCCGUCCCCUGAGCCCUACAGGCUCU | |
| | | UGGACGAGAUGCACAUUGCUCCGGAGCAAUAACAAC | |
| | | gaguccgagcagaagaagaaguuucagagcuaugcuggaaacagcauagcaagu | |
| | | ugaaauaaggcuaguccguuaucaacuugaaaaaguggcaccgagucggugcuu | |
| | | uuu | |
| 6083 | R6083 retron containing 75 | GCUCCGGAGCAAUGAGCAGGCUCUUGCAAUCCGGGC | SEQ ID NO: |
| v1_ncRNA_ | bp insertion at EMX1 site | GGUGUUUCGCCGCCCUUGUGAACUGCCGUUUCAUGC | 19346 |
| EMX1 | and sgEMX1 at 3′ end | ACCACGGGCGCCGUUUUCACUGUGCCACCCCAGCCAC | |
| gRNA_75 bp | | GGUAGUGCUacaaacggcagaagcuggaggaggaagggccugaguccgag | |
| | | cagaagaaaACUCGAGCUCUGAGCCCCACCGCAGCUUGCC | |
| | | AGCACUUUCAGUAUCAUGGGGCCCAUGGUUGAAUGA | |
| | | CUCCUAUAaaguucucccaucacaucaaccgguggegcauugccacgaagc | |
| | | aggccaauggggaggacaucgaugucaAGCACUACCGUGGCGGGG | |
| | | UGGCGUCGAGCGAACAGCUCCCGUCCCCUGAGCCCU | |
| | | ACAGGCUCUUGGACGAGAUGCACAUUGCUCCGGAGC | |
| | | AAUAACAACgaguccgagcagaagaagaaguuucagagcuaugcuggaaa | |
| | | cagcauagcaaguugaaauaaggcuaguccguuaucaacuugaaaaaguggcacc | |
| | | gagucggugcuuuuu | |
| Aco1_ncRNA- | Aco1 ncRNA containing | GGGAUAAUGUAUAAAACCGGGAACGAUCAGACCGGG | SEQ ID NO: |
| EMX1_100 | 100 bp insertion in EMX1 | GUGAAUUCGCCCCCUUGAUCAAACGGCACUAACCAC | 19347 |
| | gene | UGUUUGCCGUGCGUGCGUACAAACGGCAGAAGCUGG | |
| | | AGGAGGAAGGGCCUGAGUCCGAGCAGAAGAAAACUC | |
| | | GAGCUCUGAGCCCCACUGUCGAGAAGUAUGUAUCUC | |
| | | GCUCCCGCAGCUUGCCAGCACUUUCAGUAUCAUGGG | |
| | | GCCCAUGGUUGAAUGACUCCUAUAAAGUUCUCCCAU | |
| | | CACAUCAACCGGUGGCGCAUUGCCACGAAGCAGGCC | |
| | | AAUGGGGAGGACAUCGAUGUCAACGCACGCACGGCA | |
| | | AACAGACAGAUCCAUUAUUAUUACAAUUUAUUUAGU | |
| | | GAUCGUUCCCGGUUUUAUACGAU | |
| Aco1_ncRNA- | Aco1 ncRNA containing | GGGAUAAUGUAUAAAACCGGGAACGAUCAGACCGGG | SEQ ID NO: |
| EMX1_205 | 205 bp insertion in EMX1 | GUGAAUUCGCCCCCUUGAUCAAACGGCACUAACCAC | 19348 |
| | gene | UGUUUGCCGUGCGUGCGUACAAACGGCAGAAGCUGG | |
| | | AGGAGGAAGGGCCUGAGUCCGAGCAGAAGAAAAAGC | |
| | | GGUCUUACGGUCAGUCGUAUUCCUUCUCGAGUUCCG | |
| | | UCCAGUUGAGCGUGUCACUCCCAGUGUACCUGCAAG | |
| | | CCGAGAUGGCUGUGCUUGGAGUCAAUCGCAUGUAGG | |
| | | AUGGUCUCCAGACACCGGGGCACCAGUUUUCACGCC | |
| | | UAAAGCAUAAACGACGAGCAGUCAUGAAAGUCUUAG | |
| | | UACUGGACGUGCCGUUUCACAAAGUUCUCCCAUCAC | |
| | | AUCAACCGGUGGCGCAUUGCCACGAAGCAGGCCAAU | |
| | | GGGGAGGACAUCGAUGUCAACGCACGCACGGCAAAC | |
| | | AGACAGAUCCAUUAUUAUUACAAUUUAUUUAGUGAU | |
| | | CGUUCCCGGUUUUAUACGAU | |
| Eco3_ncRNA- | Eco3 ncRNA containing | GGGAUAAUUGAUAAGAUUCCGUAAGAGCCAAACCUA | SEQ ID NO: |
| EMX1_205 | 205 bp insertion in EMX1 | GCAUUUUAUGGGUUAAUAGCCCAUCGGGCCAUGAGU | 19349 |
| | gene | CAUGGUUUCGCCUAGUAUUUUAGCUAUGCCCGUCGU | |
| | | UCAGUUCGCUGAACAAACGGCAGAAGCUGGAGGAGG | |
| | | AAGGGCCUGAGUCCGAGCAGAAGAAAAAGCGGUCUU | |
| | | ACGGUCAGUCGUAUUCCUUCUCGAGUUCCGUCCAGU | |
| | | UGAGCGUGUCACUCCCAGUGUACCUGCAAGCCGAGA | |
| | | UGGCUGUGCUUGGAGUCAAUCGCAUGUAGGAUGGUC | |
| | | UCCAGACACCGGGGCACCAGUUUUCACGCCUAAAGC | |
| | | AUAAACGACGAGCAGUCAUGAAAGUCUUAGUACUGG | |
| | | ACGUGCCGUUUCACAAAGUUCUCCCAUCACAUCAAC | |
| | | CGGUGGCGCAUUGCCACGAAGCAGGCCAAUGGGGAG | |
| | | GACAUCGAUGUCAUCAGCGAACUGAUCGACGUGCUC | |
| | | AAGUAGGUUUGGCUCUUACGGAAUCUUAUCAGAU | |
| R2781 RT-1 | R2781 retron RT | AGGAUAAUGGGAAAUAAGAGAGAAAAGAAGAGUAA | SEQ ID NO: |
| | | GAAGAAAUAUAAGAGGAUCCGCCACCAUGGGUUACA | 19350 |
| | | ACUACGAGUACACCAUCAGGCUGUGUGAGACGCUCA | |
| | | AGUCCUUGAGCGCUGACGACGUGUACAUCAGCAAGU | |
| | | GCUGCAACUACGCCGAGGGACUCCUGGAUAAGGAGC | |
| | | UCCCUGUGAUCUUCGACCCCACCCACCUGAAGCAGA | |
| | | UCCUGAGGCUGGACGACAUCAGCCUCGACGAGUACC | |
| | | ACAUCUUCUAUAUCGACAAGAAGAACGGGGGCAGCA | |
| | | GAGAGAUCAAUGCCCCCAGCGAGGAGCUGAAGAAGC | |
| | | GCCAACGCUGGAUUCUCAAGAACAUCCUUGAGAAGA | |
| | | UCAGCAUCAGCCACAACGUGCACGGCUUCAUCAAGG | |
| | | GCAAGAGCAUUGUCAGCAAUGCUCGCAAGCACCUGA | |
| | | ACAAGGAGUAUGUGCUGAACAUCGACAUCAAGGACU | |
| | | UCUUCCCCAGCGUCACCAAAUACUCCGUGGAGAAGA | |
| | | UCUUCCGGAGAAUGGGCUACUGCAACAGCGUGGCCC | |
| | | AGCUGCUUGCCCGCGUCUGUUGUUACAGAGGCGGGC | |
| | | UGCCUCAGGGAGCUCCUACAAGCCCCUACCUGGCCA | |
| | | ACCUCGCUUUUGACGAGGUUGACCAGGAGAUCAUCA | |
| | | ACGUGGUGAGAAACCGGGACAUCACCUACACCAGAU | |
| | | ACGCCGACGACAUGACCUUCAGCGCCAACUACGACC | |
| | | UGAGCACCUUCAAGAAGGAGGUGUACAAGAGCCUGG | |
| | | GCAAAUACAGAUUCAGCCCCAACAUCAUGAAGACUC | |
| | | ACCAGAUGUCUGGCGAGAAGAGAAAGCUGGUGACCG | |
| | | GCCUGAUCGUGGACGACAAGGUGAAGGUGUGCAAGA | |
| | | AGUACAAGAGAAAGCUGCGGCAGGAGAUCUACUACU | |
| | | GCAAGAAGUUCGGCGUGACCAACCACCUGAGAAACU | |
| | | GCCACAGCGAGAAGUCCAUCAACUACAAGGAGUACC | |
| | | UGUACGGCAAGGCCUACUUCAUCAAGAUGGUCGAGG | |
| | | AGAUCGUCGGCGAGAAGUUCCUGGCCGACCUGGACA | |
| | | GCAUUGACUGGUACCCACCAAAGAAGAAAAGAAAGG | |
| | | UCUGACUCGAGGCUGGAGCCUCGGUGGCCAUGCUUC | |
| | | UUGCCCCUUGGGCCUCCCCCCAGCCCCUCCUCCCCUU | |
| | | CCUGCACCCGUACCCCCGUGGUCUUUGAAUAAAGUC | |
| | | UGAGUGGGCGGC | |
| R2781_nc- | R2781 ncRNA containing | GGGAUAAUAAGAGCAACUAGAUUGAGGCGAUUCGCC | SEQ ID NO: |
| 01_25 bp_49- | 25 bp insertion in EMX1 | UCCUUGGAAAAGGGUACUAAGUUUCUGUCACAAACG | 19351 |
| 65HA | gene with 49 and 69 bp | GCAGAAGCUGGAGGAGGAAGGGCCUGAGUCCGAGCA | |
| | homology arms | GAAGAAAACUCGAGCUCUGAAUGACUCCUAUAAAGU | |
| | | UCUCCCAUCACAUCAACCGGUGGCGCAUUGCCACGA | |
| | | AGCAGGCCAAUGGGGAGGACAUCGAUGUCAGACAGA | |
| | | AAUGAAAUAAAUAGUAGUUGCUCUU | |
| R2781_nc- | R2781 ncRNA containing | GGGAUAAUAAGAGCAACUAGAUUGAGGCGAUUCGCC | SEQ ID NO: |
| 02_205 bp_49- | 205 bp insertion in EMX1 | UCCUUGGAAAAGGGUACUAAGUUUCUGUCACAAACG | 19352 |
| 65HA | gene with 49 and 69 bp | GCAGAAGCUGGAGGAGGAAGGGCCUGAGUCCGAGCA | |
| | homology arms | GAAGAAAAAGCGGUCUUACGGUCAGUCGUAUUCCUU | |
| | | CUCGAGUUCCGUCCAGUUGAGCGUGUCACUCCCAGU | |
| | | GUACCUGCAAGCCGAGAUGGCUGUGCUUGGAGUCAA | |
| | | UCGCAUGUAGGAUGGUCUCCAGACACCGGGGCACCA | |
| | | GUUUUCACGCCUAAAGCAUAAACGACGAGCAGUCAU | |
| | | GAAAGUCUUAGUACUGGACGUGCCGUUUCACAAAGU | |
| | | UCUCCCAUCACAUCAACCGGUGGCGCAUUGCCACGA | |
| | | AGCAGGCCAAUGGGGAGGACAUCGAUGUCAGACAGA | |
| | | AAUGAAAUAAAUAGUAGUUGCUCUU | |
| R2781_nc- | R2781 ncRNA containing | GGGAUAAUAAGAGCAACUAGAUUGAGGCGAUUCGCC | SEQ ID NO: |
| 03_405 bp_49- | 405 bp insertion in EMX1 | UCCUUGGAAAAGGGUACUAAGUUUCUGUCACAAACG | 19353 |
| 65HA | gene with 49 and 69 bp | GCAGAAGCUGGAGGAGGAAGGGCCUGAGUCCGAGCA | |
| | homology arms | GAAGAACUGCUAAAUCCGCGUGAUAGGGGAUUUGAA | |
| | | GUUUAAUCUUCUAUCGCAAGGAACUGCCGAUCUUAA | |
| | | UGGAUGGCCGGAGGUGGUAUGGAAGCUAUAAGCGCG | |
| | | GGUGAGAGGGUAAUUAGGCGUGUUCACCUACGCUAC | |
| | | GCUAACGGGCGAUUCUAUAAGAUUGCACAUUGCGUC | |
| | | AACUCAUAAGAUGUCUCAACGGCAUGCGCAACUUGU | |
| | | GAAGUGUCUACUAUCCUUAAACGCAUAUCUCGCACA | |
| | | GUAACUCCCGAAUAUGUCGGCAUCUGAUGUUGCCCG | |
| | | GGCCGAGUUAGUGUUGAGCUCACGGAACUUAUUGUA | |
| | | UGAGUAGUGAUUUGUAAGAGUUGUCAGUUAGCUCG | |
| | | UUCAGGUAAUAGUUGCCCACACAACGUCAAAAUAAG | |
| | | AGAACGGUCGUAACAUAAAGUUCUCCCAUCACAUCA | |
| | | ACCGGUGGCGCAUUGCCACGAAGCAGGCCAAUGGGG | |
| | | AGGACAUCGAUGUCAGACAGAAAUGAAAUAAAUAGU | |
| | | AGUUGCUCUU | |
| R2781_nc- | R2781 ncRNA containing | GGGAUAAUAAGAGCAACUAGAUUGAGGCGAUUCGCC | SEQ ID NO: |
| 04_25 bp_ | 25 bp insertion in EMX1 | UCCUUGGAAAAGGGUACUAAGUUUCUGUCGGAGGAA | 19354 |
| 30HA | gene with 30 bp homology | GGGCCUGAGUCCGAGCAGAAGAAAACUCGAGCUCUG | |
| | arms on each side | AAUGACUCCUAUAAAGUUCUCCCAUCACAUCAACCG | |
| | | GUGGCGCAUUGCGACAGAAAUGAAAUAAAUAGUAGU | |
| | | UGCUCUU | |
| R2781_nc- | R2781 ncRNA containing | GGGAUAAUAAGAGCAACUAGAUUGAGGCGAUUCGCC | SEQ ID NO: |
| 05_205 bp_ | 205 bp insertion in EMX1 | UCCUUGGAAAAGGGUACUAAGUUUCUGUCGGAGGAA | 19355 |
| 30HA | gene with 30 bp homology | GGGCCUGAGUCCGAGCAGAAGAAAAAGCGGUCUUAC | |
| | arms on each side | GGUCAGUCGUAUUCCUUCUCGAGUUCCGUCCAGUUG | |
| | | AGCGUGUCACUCCCAGUGUACCUGCAAGCCGAGAUG | |
| | | GCUGUGCUUGGAGUCAAUCGCAUGUAGGAUGGUCUC | |
| | | CAGACACCGGGGCACCAGUUUUCACGCCUAAAGCAU | |
| | | AAACGACGAGCAGUCAUGAAAGUCUUAGUACUGGAC | |
| | | GUGCCGUUUCACAAAGUUCUCCCAUCACAUCAACCG | |
| | | GUGGCGCAUUGCGACAGAAAUGAAAUAAAUAGUAGU | |
| | | UGCUCUU | |
| R2781 nc- | R2781 ncRNA containing | GGGAUAAUAAGAGCAACUAGAUUGAGGCGAUUCGCC | SEQ ID NO: |
| 06_405 bp_ | 405 bp insertion in EMX1 | UCCUUGGAAAAGGGUACUAAGUUUCUGUCGGAGGAA | 19356 |
| 30HA | gene with 30 bp homology | GGGCCUGAGUCCGAGCAGAAGAACUGCUAAAUCCGC | |
| | arms on each side | GUGAUAGGGGAUUUGAAGUUUAAUCUUCUAUCGCAA | |
| | | GGAACUGCCGAUCUUAAUGGAUGGCCGGAGGUGGUA | |
| | | UGGAAGCUAUAAGCGCGGGUGAGAGGGUAAUUAGGC | |
| | | GUGUUCACCUACGCUACGCUAACGGGCGAUUCUAUA | |
| | | AGAUUGCACAUUGCGUCAACUCAUAAGAUGUCUCAA | |
| | | CGGCAUGCGCAACUUGUGAAGUGUCUACUAUCCUUA | |
| | | AACGCAUAUCUCGCACAGUAACUCCCGAAUAUGUCG | |
| | | GCAUCUGAUGUUGCCCGGGCCGAGUUAGUGUUGAGC | |
| | | UCACGGAACCUAUUGUAUGAGUAGUGAUUUGUAAG | |
| | | AGUUGUCAGUUAGCUCGUUCAGGUAAUAGUUGCCCA | |
| | | CACAACGUCAAAAUAAGAGAACGGUCGUAACAUAAA | |
| | | GUUCUCCCAUCACAUCAACCGGUGGCGCAUUGCGAC | |
| | | AGAAAUGAAAUAAAUAGUAGUUGCUCUU | |
| R1262_nc-46 | R1262 ncRNA containing | GAUAAUGAGCGUGUGACAAGAUUUUGGGCUUGUGU | SEQ ID NO: |
| (ncRNA- | EMX1 deletion (del1) | UUCGCAAGCUUUGAUUAAAAUGGUAGAUGGAUUUGC | 19357 |
| EMX1 site1- | | UAUCUAUCGUCAUUUCCAGUACUGUUAUGUUAACCC | |
| deletion) | | UAUGUAGCCUCAGUCUUCCCAUCAGGCUCUCAGCUC | |
| | | AGCCUGAGUGUUGAGGCCCCAGUGGCUGCUCUGGGU | |
| | | GGGCAACCACAAACCCACGAGGGCAGAGUGCUGCUU | |
| | | GCUGCUGCAUAAUGAGUUGUCACACGCUC | |
| R1262_nc-47 | R1262 ncRNA containing | GAGCGUGUGACAAGAUUUUGGGCUUGUGUUUCGCAA | SEQ ID NO: |
| (ncRNA- | EMX1 deletion (del2) | GCUUUGAUUAAAAUGGUAGAUGGAUUUGCUAUCUA | 19358 |
| EMX1 site2- | | UCGUCAUUUCCAGUACUGUUAUGUCAGAAGAAGAAG | |
| deletion) | | GGCUCCCAUCACAUCAACCGGUGGCGCAUUGCCACG | |
| | | AAGCAGGCCAAUGGGGAGGACAUCGAUGUCACCUCC | |
| | | AAUGACCGCAGCCUCCCAGCUGCUCUCCGUGUCUCC | |
| | | AAUCUCCCUUUUGUUUUGAUGCAGCAUAAUGAGUUG | |
| | | UCACACGCUC | |
| R1262_nc-61 | R1262 ncRNA containing | GGGAUAAUGAGCGUGUGACAAGAUUUUGGGCUUGU | SEQ ID NO: |
| (ncRNA- | sense sequence with | GUUUCGCAAGCUUUGAUUAAAAUGGUAGAUGGAUU | 19359 |
| EMXI sgRNA | tandem sgRNA target for | UGCUAUCUAUCGUCAUUUCCAGUACUGUUAUGUgagu | |
| tandem_sense)- | insertion into EMX1 | ccgagcagaagaagaagggAUAGGAGUCAUUCAACCAUGGGC | |
| 001 | | CCCAUGAUACUGAAAGUGCUGGCAAGCUGCGGGAGC | |
| | | GAGAUACAUACUUCUCGACAGUGGGGCUCAGAGCUC | |
| | | GAGUugaguccgagcagaagaagaagggGCAUAAUGAGUUGUCA | |
| | | CACGCUC | |
| R1262_nc-62 | R1262 ncRNA containing | GGAUAAUGAGCGUGUGACAAGAUUUUGGGCUUGUG | SEQ ID NO: |
| (ncRNA- | antisense sequence with | UUUCGCAAGCUUUGAUUAAAAUGGUAGAUGGAUUU | 19360 |
| EMX1 sgRNA | tandem sgRNA target for | GCUAUCUAUCGUCAUUUCCAGUACUGUUAUGUgagucc | |
| tandem_ | insertion into EMX1 | gagcagaagaagaagggAUAGGAGUCAUUCAACCAUGGGCCC | |
| antisense)-001 | | CAUGAUACUGAAAGUGCUGGCAAGCUGCGGGAGCGA | |
| | | GAUACAUACUUCUCGACAGUGGGGCUCAGAGCUCGA | |
| | | GUugaguccgagcagaagaagaagggGCAUAAUGAGUUGUCACA | |
| | | CGCUC | |
| R1262_nc-63 | R1262 ncRNA containing | GGGAUAAUGAGCGUGUGACAAGAUUUUGGGCUUGU | SEQ ID NO: |
| (ncRNA_NHEJ_ | sense sequence with | GUUUCGCAAGCUUUGAUUAAAAUGGUAGAUGGAUU | 19361 |
| sense)-001 | insertion into EMX1 | UGCUAUCUAUCGUCAUUUCCAGUACUGUUAUGUAUA | |
| | | GGAGUCAUUCAACCAUGGGCCCCAUGAUACUGAAAG | |
| | | UGCUGGCAAGCUGCGGGAGCGAGAUACAUACUUCUC | |
| | | GACAGUGGGGCUCAGAGCUCGAGUuGCAUAAUGAGU | |
| | | UGUCACACGCUC | |
| R1262_nc-64 | R1262 ncRNA containing | GGGAUAAUGAGCGUGUGACAAGAUUUUGGGCUUGU | SEQ ID NO: |
| (ncRNA NHEJ_ | anti sense sequence with | GUUUCGCAAGCUUUGAUUAAAAUGGUAGAUGGAUU | 19362 |
| antisense)- | insertion into EMX1 | UGCUAUCUAUCGUCAUUUCCAGUACUGUUAUGUaAC | |
| 001 | | UCGAGCUCUGAGCCCCACUGUCGAGAAGUAUGUAUC | |
| | | UCGCUCCCGCAGCUUGCCAGCACUUUCAGUAUCAUG | |
| | | GGGCCCAUGGUUGAAUGACUCCUAUGCAUAAUGAGU | |
| | | UGUCACACGCUC | |
| R6342S_nc-63 | R6342S ncRNA containing | GGGAUAAUCAUAGAUUUCUUGGCCUUUAUGCUGUGG | SEQ ID NO: |
| (ncRNA NHEJ_ | sense sequence with | UGUUGCGCCACGGUGGAGAUUUGUCAAAUACACAUC | 19363 |
| antisense)- | insertion into EMX1 | AUUAGGUUGCGaACUCGAGCUCUGAGCCCCACUGUC | |
| 001 | | GAGAAGUAUGUAUCUCGCUCCCGCAGCUUGCCAGCA | |
| | | CUUUCAGUAUCAUGGGGCCCAUGGUUGAAUGACUCC | |
| | | UAUCACAACCAAAUAUAAGAAUUGUUAGCAAGAAAU | |
| | | CUAUGACAUGAGGAUCACCCAUGU | |
| R6342S nc-64 | R6342S ncRNA containing | GGGAUAAUCAUAGAUUUCUUGGCCUUUAUGCUGUGG | SEQ ID NO: |
| (ncRNA NHEJ_ | anti sense sequence with | UGUUGCGCCACGGUGGAGAUUUGUCAAAUACACAUC | 19364 |
| sense)-001 | insertion into EMX1 | AUUAGGUUGCGAUAGGAGUCAUUCAACCAUGGGCCC | |
| | | CAUGAUACUGAAAGUGCUGGCAAGCUGCGGGAGCGA | |
| | | GAUACAUACUUCUCGACAGUGGGGCUCAGAGCUCGA | |
| | | GUuCACAACCAAAUAUAAGAAUUGUUAGCAAGAAAU | |
| | | CUAUGACAUGAGGAUCACCCAUGU | |

What is claimed:

1. A gene editing system comprising one or more delivery vehicles, wherein:
the delivery vehicle(s) comprise RNA cargo,
said RNA cargo comprises (a) at least one mRNA molecule encoding (i) a nucleic acid programmable nuclease and (ii) a retron reverse transcriptase, (b) an engineered retron ncRNA, and (c) guide RNA for the nucleic acid programmable nuclease,
each delivery vehicle contains (a)(i) and/or (a)(ii) and/or (b) and/or (c),
whereby one delivery vehicle or more than one delivery vehicle delivers (a)(i), (a)(ii), (b), and (c).

2. The gene editing system of claim 1,
wherein the engineered retron ncRNA comprises an HDR nucleotide sequence substituted into a retron ncRNA;
wherein the retron reverse transcriptase has an amino acid sequence comprising at least 90% sequence identity to a retron reverse transcriptase of Table A;
wherein the retron ncRNA has about 85% to 98% sequence identity to a retron ncRNA of Table B.

3. The gene editing system of claim 2, wherein the retron ncRNA and the retron reverse transcriptase are from the same clade.

4. The gene editing system of claim 2, wherein the retron ncRNA nucleotide sequence has about 85% to 98% sequence identity to SEQ ID NO:15327, and the retron reverse transcriptase has at least 90% sequence identity to a type I-C retron reverse transcriptase.

5. The gene editing system of claim 4, wherein the retron reverse transcriptase comprises an amino acid sequence at least about 90% identical to SEQ ID NO:1262.

6. The gene editing system of claim 2, wherein the retron ncRNA nucleotide sequence has about 85% to 98% sequence identity to SEQ ID NO:16411, and the retron reverse transcriptase has at least 90% sequence identity to a type III retron reverse transcriptase.

7. The gene editing system of claim 6, wherein the retron reverse transcriptase comprises an amino acid sequence at least about 90% identical to SEQ ID NO:2781.

8. The gene editing system of claim 2, wherein the retron ncRNA nucleotide sequence has about 55% to 90% sequence identity to SEQ ID NO:18731. and the retron reverse transcriptase has at least 90% sequence identity to a type XIII retron reverse transcriptase.

9. The gene editing system of claim 8, wherein the engineered retron ncRNA comprises a nucleotide sequence at least 90% identical to SEQ ID NO:19927 and an HDR template inserted therein.

10. The gene editing system of claim 8, wherein the engineered retron ncRNA comprises a nucleotide sequence at least 90% identical to SEQ ID NO:19928 and an HDR template inserted therein.

11. The gene editing system of claim 8, wherein the retron reverse transcriptase comprises an amino acid sequence at least about 90% identical to SEQ ID NO:6342.

12. The gene editing system of claim 1, wherein the retron reverse transcriptase comprises at least one amino acid substitution that increases processivity and/or fidelity.

13. The gene editing system of claim 12, wherein the retron reverse transcriptase comprises an amino acid substitution in an amino acid residue that corresponds to the following amino acid residues in Eco1 RT: Q190, E302, or T306.

14. The gene editing system of claim 12, wherein the retron reverse transcriptase comprises an amino acid substitution in an amino acid residue that corresponds to the following amino acid substitutions in Eco1 RT: Q190F, E302R, or T306K.

15. A gene editing system comprising one or more delivery vehicles, wherein:
the delivery vehicle(s) comprise RNA cargo,
said RNA cargo comprises (a) at least one mRNA molecule encoding (i) a nucleic acid programmable nuclease and (ii) an engineered retron reverse transcriptase, (b) an engineered retron ncRNA, and (c) guide RNA for the programmable nuclease,
each delivery vehicle contains (a)(i) and/or (a)(ii) and/or (b) and/or (c),
whereby one delivery vehicle or more than one delivery vehicle delivers (a)(i), (a)(ii), (b), and (c), and
wherein the engineered retron reverse transcriptase comprises a processivity enhancing domain or a fidelity enhancing domain.

16. The gene editing system of claim 15, wherein the processivity enhancing domain comprises Sso7d or Sac7d.

17. The gene editing system of claim 15, wherein the fidelity enhancing domain comprises a 3′ to 5′ exonuclease domain.

18. The gene editing system of claim 17, wherein the exonuclease domain comprises POLE1 POLD1, POLG, Pfu, or KOD.

19. The gene editing system of claim 15, wherein the engineered retron ncRNA comprises an HDR nucleotide sequence substituted into a retron ncRNA;
wherein the retron reverse transcriptase has an amino acid sequence comprising at least 90% sequence identity to a retron reverse transcriptase of Table A;
wherein the retron ncRNA has about 85% to 98% sequence identity to a retron ncRNA of Table B.

20. The gene editing system of claim 15, wherein the retron ncRNA and the retron reverse transcriptase are from the same clade.

21. A gene editing system comprising one or more delivery vehicles, wherein:
the delivery vehicle(s) comprise RNA cargo,
said RNA cargo comprises (a) at least one mRNA molecule encoding (i) a nucleic acid programmable nuclease and (ii) an engineered reverse transcriptase, (b) an engineered retron ncRNA, and (c) guide RNA for the programmable nuclease,
each delivery vehicle contains (a)(i) and/or (a)(ii) and/or (b) and/or (c),
whereby one delivery vehicle or more than one delivery vehicle delivers (a)(i), (a)(ii), (b), and (c), and
wherein the engineered reverse transcriptase comprises a Y region domain that is from a retron RT that corresponds to the engineered retron ncRNA.

22. The gene editing system of claim 21, wherein the engineered reverse transcriptase is a chimera comprising an MMLV RT fused to the Y region of the retron RT.

23. The gene editing system of claim 1, wherein (a)(i) and (a)(ii) comprise a single mRNA molecule encoding the nucleic acid programmable nuclease and the retron reverse transcriptase.

24. The gene editing system of claim 23, wherein (a)(i) and (a)(ii) are encoded and expressed as a fusion protein.

25. The gene editing system of claim 24, wherein the fusion protein comprises the C-terminal end of the nucleic acid programmable nuclease fused to the N-terminal end of the retron reverse transcriptase (nuclease:RT fusion).

26. The gene editing system of claim 24, wherein the fusion protein comprises the N-terminal end of the nucleic acid programmable nuclease fused to the C-terminal end of the retron reverse transcriptase (RT:nuclease fusion).

27. The gene editing system of claim 1, wherein (a)(i) and (a)(ii) comprise a first mRNA molecule encoding the nucleic acid programmable nuclease and a second mRNA molecule encoding the retron reverse transcriptase.

28. The gene editing system of claim 1, wherein (c) is separate from (a)(i), (a)(ii) and (b) or is provided in trans.

29. The gene editing system of claim 1, wherein (b) the engineered retron ncRNA, and (c) the guide RNA are fused or are provided in cis.

30. The gene editing system of claim 29, wherein the guide RNA is fused to the 5′ end of the retron ncRNA.

31. The gene editing system of claim 29, wherein the guide RNA is fused to the 3′ end of the retron ncRNA.

32. The gene editing system of claim 29, wherein the engineered ncRNA comprises a first guide RNA fused to the 5′ end of the retron ncRNA, and a second guide RNA fused to the 3′ end of the retron ncRNA, and the first and second guide RNAs target different sequences.

33. The gene editing system of claim 1, wherein the one or more delivery vehicles comprise a liposome or a lipid nanoparticle (LNP).

34. The gene editing system of claim 1, wherein (a) the at least one mRNA molecule encoding (i) the nucleic acid programmable nuclease and (ii) the retron reverse transcriptase, and (b) the engineered retron ncRNA are in the same delivery vehicle.

35. The gene editing system of claim 1, wherein the (a) the at least one mRNA molecule encoding (i) the nucleic acid programmable nuclease and (ii) the retron reverse transcriptase, and (b) the engineered retron ncRNA are in separate delivery vehicles.

36. The gene editing system of claim 1, wherein the nucleic acid programmable nuclease and the retron reverse transcriptase are encoded on separate mRNA molecules and those separate mRNA molecules of (a)(i) and (a)(ii) are contained in the same delivery vehicle.

37. The gene editing system of claim 1, wherein the nucleic acid programmable nuclease and the retron reverse transcriptase are encoded on separate mRNA molecules and those separate mRNA molecules of (a)(i) and (a)(ii) are contained in different delivery vehicles.

38. The gene editing system of claim 1, wherein the engineered retron ncRNA includes a sequence of interest encoding a donor polynucleotide comprising an intended edit to be integrated at a target sequence in a cell, and wherein the donor polynucleotide is flanked by a 5′ homology arm that hybridizes to a sequence 5′ to the target sequence and a 3′ homology arm that hybridizes to a sequence 3′ to the target sequence.

39. The gene editing system of claim 1, wherein the nucleic acid programmable nuclease comprises a Cas9 nuclease, a TnpB nuclease, or a Cas12a nuclease.

40. The gene editing system of claim 1, wherein the nucleic acid programmable nuclease comprises a Cas9 nuclease.

41. The gene editing system of claim 1, wherein the nucleic acid programmable nuclease comprises a Cas9 nickase.

42. An isolated cell comprising the gene editing system of claim 1.

43. The isolated cell of claim 42, wherein the isolated cell is a mammalian cell.

44. The isolated cell of claim 43, wherein the mammalian cell is a human cell.

45. A composition comprising:
a) the gene editing system of claim 1; and
b) a pharmaceutically or veterinarily acceptable carrier.

46. The composition of claim 45, wherein the delivery vehicle is a lipid nanoparticle comprising:
a) one or more ionizable lipids;
b) one or more structural lipids;
c) one or more PEGylated lipids; and
d) one or more phospholipids.

47. The composition of claim 46, wherein the one or more ionizable lipids comprises an ionizable lipid set forth in Table 2.

48. A method of genetically modifying a cell comprising:
contacting the gene editing system of claim 1 with the cell, thereby delivering the RNA cargo to the cell,
wherein:
the nucleic acid programmable nuclease forms a complex with the guide RNA, wherein said guide RNA directs the complex to the target sequence,
the nucleic acid programmable nuclease creates a double-stranded break in in the target sequence,
the retron reverse transcriptase and engineered retron ncRNA create RT DNA that comprises the donor polynucleotide, and
the donor polynucleotide becomes integrated at the target sequence,
whereby editing the cell is genetically modified.

The application's sequence listing, which the Patent Office published only in electronic form, follows.

SEQUENCE LISTING (20003 sequences)

SEQ ID NO: 1 - protein, 486 aa, unidentified
  source 1..486: note = Related to NC_015164.1; note = Phocaeicola salanitronis
MDKTEIVQIASQMSTREDLLALLNRIKQDEIRESGFDADKFYPFTMKQLLYYCNPNHAFHRYRQFKIKKKSGGFRLITTPRNRSFMMLLRSVNEILKAIYTPSDYAMGFTEKRSVVTNAAVHRNQNYVFNIDLKDFFPSVEQGRVMKRLTLEPFNFSPQIALLISGLCSMRVKREQPLETKRYDLDKQFMYVLPQGAPTSPVITNTICDTLDRRLAGLAKRFGLRYTRYADDITFSSMHYVYSKNSEFIKELIRIINTQGFMINEAKTRLQKLGSRQEVTGIIVSDKLNVTKKYVREIRSLLYIWDKYGYSAAMSRFFPKYKAEKGHIKKGNPELTNVLDGKLLYLKMVKGDTDSVYIKLYTKFQELVNRDSGPDKTNSYGISYIESFPILEFEKDKNTNITIFHKDGNKRYATFRMGETHQVASINKDVTPDDEQQKEKLAISCCKNFRGEQFWLIHLLDKVTVFKPKPVDIDELNNDLDLLLGI

SEQ ID NO: 2 - protein, 486 aa, unidentified
  source 1..486: note = Related to JAFSKF010000035.1; note = Bacteroidales bacterium
MDKTQIAQIASQMSTREDLLALLNRIKQDEIRDLGFDTDKFYPFTMKQLLYYCNPNHAFHRYRQFKIKKKSGGYRQITAPRNQSFMILLQSVNEILKSIYTPSEYAMGFTENRSVVTNAAVHRAQNYVFNIDLKDFFPSVEQGRVMKRLTLAPFNFSPQIALAVSGLCSMRVKREQPLETKQHDLDKQFMYVLPQGAPTSPIITNMICDTLDRRLAGLAKRFGLCYTRYADDITFSSMHYVYSEKGEFRNELARIISTQGFVINEAKTRLQKLGSRQEVTGVIVSEKLNVTKKYVREIRSLLYIWDKYGYSAAMSKFYPKYKAEKGHVKKGNPDLTNVLDGKLMYLKMVKGDDDSVYVRLYTKFQELVNRDTGSDKTNSYGITYVETMPLMKFEKDKNTNIIISQKDVNKRYATFELGKVHQIASINKAVTPEDEQHKEKLAISYCRNPKGELFWLIHLLDKATTFKGKPVDVDELNNDLDALLST

SEQ ID NO: 3 - protein, 486 aa, unidentified
  source 1..486: note = Related to JAFZXH010000011.1; note = Bacteroidaceae bacterium
MDKTQIAQIASQMSTREDLLALLNRIKQDEIRELGLDADKFYPFTMKQLLYYCNPNHAFHRYRQFKIKKKTGGYRQIDAPRNKSYMMLLKTVNEVLKSIYIPSTYAMGFTEKRSVVTNATVHKGQNYVFNIDLKDFFPSVEQGRVMKRLTLSPFLFSPEIALLISGLCSMRVKREILVEDKKHDLDKQFLYVLPQGAPTSPIITNMICDTLDRRLAGLAKRFGLHYTRYADDITFSSMHHVYSKEGEFRKELERIIESQGFTMNDKKTRLQKLGSRQEVTGIIVSDKLNVTRKYVREIRSLLYIWEKYGYTTAMSRFYPKYIAEKGHVKKVNPDMTNVLDGKLMYLKMVKGDSDSVYINLYTKFQELVARDSGSEKTNSYGLTYIESVPLLKFEKDKKTNVTISKKDGNKRYATFKLGEVHQIATINKAVTPDDELHKEKLVISYCRNPKGETFWLIHLLDKVTTFKPYPVNIDELNNDLDSLLST

SEQ ID NO: 4 - protein, 486 aa, unidentified
  source 1..486: note = Related to NZ_KQ957209.1; note = Prevotella corporis
MDKTQITQIASQMSTREDLLALLNRIKQDEIRELGYDTDKFYPFTMKHLLYYCNPNHVFHRYHQFKIKKKSGGFRQITAPRNQSFMMLLQTVNEILKAMYSPSDYAMGFTEERSVVTNASVHKGQNYVFNIDLKDFFPSVEQRRVLKRFGAKPFNFNPEIALLLSGLCSMRVKREQADETQTHDLDKEFVYVLPQGAPTSPIITNMICDTLDRRLAGLARRFGLRYSRYADDITFSSMHYVYAEKGEFRKELARIIGSQGFTINDTKTRLQKRGSRQEVTGIIVSDKLNVTKKYVREIRSLLYIWEKYGYSATMAKFLPKYKAEKGHVKKGNPDLTNVLDGKLMYLKMVKGESDIVYARLFEKFQQLVARDSGGDKKNPYGITYMETVPLLKFEQDKNTEVAIFHKEEGKRYATFEFNGVKQVVSINKDVSQNDEMQKEKLAISNCRNPKGEQFWLIHLVNKVTVYNLKPVDIDELNNDLDSLLST

SEQ ID NO: 5 - protein, 481 aa, unidentified
  source 1..481: note = Related to JAFWZP010000094.1; note = Bacteroidales bacterium
MDKAQIVQIASQMSTREDLLALLNSIKQDEISKSCSDGDKFYPFTMKHLLYYCNPNHVFHRYRKFRIKKKSGGFRQITSPRNRSFMMLLQSVNEILKAMYTPSDYAMGFTEKRSVVTNARIHQGQNYVFNIDLKDFFPSVEQPRIWKRLQLAPFNFPISIANVLAGLCSMREVRKDIDGKDVFVYVLPQGAPTSPIITNMICDTLDRRLVGLAKRFGLHYSRYADDITFSSMHYVYAKNGEFRKELIRIIKSQGFTINEEKTRLQKQGSRQEVTGIVVSESKLNVPKKYVREIRSLLYIWEKYGYSVAMSRFLPKYKLEKGHVKKGNPDLINVLEGKLMYLKMVKGDMDPVYVRLYSKFQELVAKDFSLNKTNSYGITYIETIPLLKFEEDNNTNVIIHLKDCNKRYAVFKLGGINQFASINKNVPSDYEQQKEKLGISNCRNSKGKQFWLIHLVDKVIVQNSNMVDIDELNNDLNLLLDI

SEQ ID NO: 6 - protein, 482 aa, unidentified
  source 1..482: note = Related to JAFSTV010000046.1; note = Bacteroidales bacterium
MDKNQIAQVANQIQEREDLLSLLNKIRKDIVGDNGSESKFFPFTMKHLLYYCNPNHTFHRYTQFKIKKKSGGFRLITSPRNSSYMFLLQSLNELLKSMYTPAQSAMGFTEGRSVVTNANVHKGQNYVFNLDLKDFFPSIEQPRIWKRLQLAPFNFPSSIANVIAGLCSMKETRTDTTGNDVVTYVLPQGAPTSPIITNMICDTLDRRLLGLSKRFGLRYTRYADDITFSSMHYVYAKDGVFRKELTRIIESQGFTINEAKTRLQKLGSRQEVTGIIVSDKLNVSKKYIRNIRNLLYIWERYGYSVAMSRFLPKYRADKGHVKKGTPNLINVLDGKLMYLKMVKGEFDSVYVRLHDKFQELVKRDFGAEKTNSLGITYIDTKPLLEFEKEMQTTISFQHKKNEKRAASFLIEGITHCASVNKNVTPDSEQQKEKLSISNCQNEKGEQFWLIHLVDKKTVFKSKPVDIDELNKDLDSLLNTYNG

SEQ ID NO: 7 - protein, 487 aa, unidentified
  source 1..487: note = Related to VVZB01000003.1; note = Phocaeicola dorei
MDKKQIVKQASQLKSKEDLLNLLNRIKRDEIEEMGFDAFKFHPFTMRHLNYYCNPNNVFHRYRQFHIKKKSGGSRVITAPRNRSFMMMLQAVNEILKAIYSPSDYAMGFTEGRSVVTNATIHKGQNYIFNIDLKDFFPSVEQSRVWKRLQLKPFNFSKQMANIIAGLCSMRQVKDVIDETKEHNNDKKFKYVLPQGSPVSPIITNMICDTLDRRLAGLARRFGLHYSRYADDITFSSMHYVYASNGKFRTELCRLITEQGFTINEDKTRLQKLGARQEVTGIIVSQKLNVTKEYVRDIRSILYIWDRYGYTAAIAQFLPKYTAAKGHVKKGNPDLQNVIDGKLMYLKMVKGDEDSVYTRLYSKFQSLIQRDTSSEKTNSYGISYVETTTVSKFEQINKTTINFVQDGDGKRHAEFTLGGKKQYATFMTIVKTDEIKDNLAISNCRNPKGEMFWLIHKVDKVTVPAKPIINIDELNNDLDTLLNLPHG

SEQ ID NO: 8 - protein, 486 aa, unidentified
  source 1..486: note = Related to NZ_JADNRM010000003.1; note = Phocaeicola sp.
MDKKQIVKQVSQIKSKEDLLNLLNCIKRDELEEMGFDASKFHPFTIRHLNYYCNPNNVFHRYRQFHIKKKSGGTRVITAPRNRSFMMMLQAVNEILKALYSPSDYAMGFTEGRSVVTNATIHKGQNYVFNIDLKDFFPSVEQFRVWKRIQLKPFNFPKQIANIVAGLCFMRQVRNVIDETKEHDNDKKFKYVLPQGSPVSPIITNMVCDTLDRRLAGLARRFGLHYSRYADDITFSSMHYVYAPNGKFHTELYRLITEQGFIINKDKTRLQKLGSRQEVTGIIISQKLNVTKKYVRDIRNILYIWDRYGYTTAISKFLPKYKAAKGHVKKGNPDLQNVIDGKLMYLKMVKGDEDSVYVKLYTKFQELVNRDSSSDKTNSYGITYIESLPFLKFEKDKNTIITIHHKDCNKRYATFKIGETTQIVSINKSVTPDDEQQKEKLAISYCRDSKGERFWLIHLVDKMTEFKPKPVDIDELNNDLDLLLSI

SEQ ID NO: 9 - protein, 484 aa, unidentified
  source 1..484: note = Related to BK014950.1; note = Myoviridae sp.
MDKKQIVKQASQLNSKEDLLNLLNRIKRDEIEEMGFDASKFHPFTMRHINYYCNPNNVFHRYRQFHIKKKSGGTRIITAPRNRSFMMILQAVNEILKAIYTPSDYAMGFTEGRSVVSNATIHKGQNYVFNIDLKDFFPSVEQFRVWKRLQLKPFNFPKQIANIIAGLCSMRQTREIIDETKEHKNDKRYKYVLPQGSPVSPIITNMICDTLDRRLAGLAHRFGLCYSRYADDITFSSMHYVYAPNGKFRTELCRIISDQGFTLNEDKTRLQKVGARQEVTGIIVSKKLNVTKKYVRDIRNILYIWDRYGYTAAIAKFLPKYKAAKGHVKKGNPDLQNVIDGKLMYLKMIKGEEDSVYIKLYTKFQSLVNRDTSLDKTNTYGISYVETTPILKFEHTNGTIVVFVHDEGGKRHAEFILGEKKQYATIMSVVKTEEVKENLAISNCRNSNGEMFWLIHSLDKVTTFKPEPVDIDELNNDLDLLLST

SEQ ID NO: 10 - protein, 479 aa, unidentified
  source 1..479: note = Related to JAFWQO010000014.1; note = Prevotella sp.
MDRTEITKMAMQMKTKEDLLSLLNLIKRAELEEIGLQDQFHPFTMKHINYYCNPNNAFHRYRQFKVKKKSGGFRLITTPRNRSFMMVLSAINELLKSLYTPSDYAMGFSEGRSVVSNASIHKGQNYVFNIDLKDFFPSIEQPRVWKRLQLAPFNFPEKIASLIAGMCSMKEIRSFEDGHQETFYVLPQGAPTSPIITNMICDTLDRRLAGLAKRFGLHYSRYADDITFSSMHYVYQEDGDFRKELRRIIADQHFTINDDKTRLQKKGARQEVTGIIVSDKLNVTQKYVRDVRNILYIWNRYGYPSALAKFIPKYKEEKGHVKKGNPNLENVIDGKLMYLKMVKGEEDSVYQRLHNKFVTLVEKMKEKSITTEQKVTYIETWALLEFEKKYSTEVVITTSENSHRYAHFIFGSKKAKASVNKNIIPDEEKDKKQLAISLCIDGKGDTFWFVHRIDKVIVPKKTEVDIDELNNDLNLLLNI

SEQ ID NO: 11 - protein, 534 aa, unidentified
  source 1..534: note = Related to FNHC01000010.1; note = Prevotella bryantii
MLFLLCYDVFMLYIICYIYIKKIVSGWDLSRPLINIFERRRQMDKEQIRQTALQMKTREDLLTLLNRIKRDEMEKLDFADKFHPFTAKHMNYYCNPKNAFHRYRQFKIKKKSGGFRQIMAPRNRSFMFMLDCLNEVLKAVYTPSQYAMGFTEGRSVVLNASKHKGANYVFNIDLKDFFPSIEQPRVWKRLQLQPFNFPVPVASAIAGLCCMKETREMSDGTKKDFYVLPQGAPTSPIITNMICDKLDHRLGGLARRFGLNYTRYADDITFSSMHNVYQENSEFRKELARIIGNQGFTMNEQKTRLLKRGSRQEVTGITISDRLNVSQKYVRDIRNILYIWEKYGYAVAYSKFLPKYKEEKGHVKKGNPDLMNVIDGKLMYLKMVKGKEDSVYKRMYAKFQILVEKSYDIKKTNEKNITYIETTPLLEFEKKIGSPVEIVISNQESQSEAEKKKNDKGRYAYYKLANGSKIKASISKYLSDAEIKTKDKLAISTCRDAKSKEFMFIHRAGIVTVPPPKPIDIDELNNELDSLLSS

SEQ ID NO: 12 - protein, 492 aa, unidentified
  source 1..492: note = Related to NZ_JNLA01000055.1; note = Bacteroides sp.
MDKEQIKHIALQMESREDLLSLLNRIKRDEMEELGYADKFHPFTIRHMNYYCNPKNAFHRYRQFKIKKKAGGFRQITAPRNRSFMFLLDCLNEVLKAVYTPSQYAMGFTEGRSVVTNACKHKGANYVFNIDLKDFFPSIEQPRVWKRLQLQPFNFPVSVANAIAGLCCMRETRITSDGIKKDYYILPQGAPTSPIITNMICDKLDHRLGGLAHRFGLNYTRYADDITFSSMHNVFQENSDFRKELLRIIGDQGFVMNEKKTRLQKRGSRQEVTGIIISDKLNVSQKYVRNIRNILYMWEKYGYTVAYAKFFPRYMEEKGHVKKGNPDLVNVIDGKLMYLKMVKGKDDSVYQRLYAKFQSLVAQMRDPKKTNDKHIAYVETMPLLDFEKKIGSSVEIVIPPKEEKNSEGEMSQSGKGRFAYYLLVGTKQLISISKYLSETEIKAKDKLAISQCRDGKGKEFMLIHRINIVTVPPPKPVDIDELNNELDSLLSS

SEQ ID NO: 13 - protein, 517 aa, unidentified
  source 1..517: note = Related to JAGBTN010000007.1; note = Bacteroidaceae bacterium
MDKEQIAKLAHQMETKDDLVTLLNRIKKEEMAEMGFADKYYPFSQKLMNYYCNPKNSFHRYKQFKIKKKSGGFRQITAPRNRSFMLMLSYVNVILKALYTPSKYTMGFTEGRSVVDNAQKHLGMNYVLNLDLKDFFPSIVQPRVWKRLQLKPFNFPVPVASAIAGLCCMKEIREDTDGKKTEHFVLPQGAPTSPIITNMICDKLDHRLAGLAKRFGLNYTRYADDITFSSMHNVYQKHGEFFAELYRIIEGQGFTVNEKKTRLQKNGSRQEVTGITVSEKLNVTQKYVNDLRNIIYIWDRYGYSVAYSKFFPKYKQEKGHVKKGNPDLVNVIDGKLMYLKMVKGDEDSVYKRLHGKFIKLLSNLNDPAKKTEQNITYVDTLPLLEFEKRNNTEVLVCFSEEKYELTFDNGIVVQMSEEHYEILKDKTPKEEIKSTRFVPSRRYAYFKLHNKKVYVSINKSVKPEEEHNKELLAISVCRDSKNKEFWLLHKLDKVTVSTQVELDLDELNNDLDSLLNS

SEQ ID NO: 14 - protein, 350 aa, unidentified
  source 1..350: note = Related to FR901644.1; note = Prevotella sp.
MEREQIAKMAAAMADKEDLLDLLNKIKQDEMIATGFGDKFYPFSIKHINYYCNPNNSFHRYRQFKIKKKSGGERIITAPRNRSFKLILSYINEILKSMYTPSTYAMGFAEGRSIADNAKKHRGMNYVFNLDLKDFFPSIEQARVWKRLQLAPFNFPLPVANIIAGMCCMKEVVQAEGGSQTARYVLPQGAPTSPIITNMICDNLDRRLAGVAKRFGLNYTRYADDITFSSMHNVYQENGEFRKEVRRIIEEQKFTINDKKTRLQKKGSRQEVTGIIVSDKINVTRDYVRDIRNILYMWEKYGYGVAFAKFFPKYKADKGHVKKGNPDLINVLDGKLQYLKMVKGEEDSVW

SEQ ID NO: 15 - protein, 486 aa, unidentified
  source 1..486: note = Related to JAGAGC010000402.1; note = Aeriscardovia sp.
MKREQIAQLARNMENRSDLLALLNRIKHDDVVEEGVQFFPFTMKQIRFYCNPNHAFHRYRQFKIKKKSGGFRLITTPRNRTYKMLLQYVNIILKALYSPSDYAMGFTEGRSVVTNAEKHLGQNYVLNLDLKDFFPSIDQARVWKRLQLAPFNFPVEIASIIAGLCCMKFKDDEVEKTRYVLPQGAPTSPIITNMICDKLDRRLVGLAKRFGLHYTRYADDITFSSMHNVYQPNGDFWTELRRIIADQNFTINEDKTRLQKRGSRQEVTGVMVTEKLNVSQKYVRDIRNILYIWERHGFNVAYSRFFPKYKSEKGHVKKGMPDLVNVLDGKLMYLKMVKGENDPVYLRLYRKFKALADQARDILTANNGGINYIETTPILEFEQKNNTEVVILWTEDKTDGDKMIPARRYAYFMLDGKRIKASVNKVITKEEESQKELLAISSCRDGNDKPFWLVHKKDKVTVFPPEPVNIEQLNNELDALLNKQDG

SEQ ID NO: 16 - protein, 496 aa, unidentified
  source 1..496: note = Related to NZ_JACJJF010000108.1; note = Bacteroides gallinaceum
MDKTEIAALAHRMESKDDILALLNHLKQDEMEEMGQIDKFYPFTMKHITFYCNPNHTFHRYKQFKIKKKSDGYRQITAPRNQSFMLLLRYVNEIFKAVYSPSDYAMGFTEQRSVVTNANVHKGQNYIFNIDLKDFFPSIEQPRVWKRLQLEPFNFPIPVANVLAGICSMKETRTLENGTKKDFYVLPQGAPTSPIITNMICDTLDRRLAGLAKRFGLRYTRYADDITFSSMHNVYQKDGDFRKELVRIIQSQGFTINEKKTRLQKIGGRQEVTGIIVSDKLNVTQKYVRDIRNILYIWDRYGYGVTYSKFFPKYKEEKGHVKKGNPDLVNVLDGKLMYMKMVKGENDSVYKRLHDKFEKLVRETRDPLKTTAHSITYVETTPLLDFEKQNTTEVIITESETSVEQTMTDSGEQARPHRYAYFMLDGKKIFASVNNGIKPEMEKRKEQLSISICRDKNDKQFWLIHLSKKVTVPPFEPIDVDELNKELDALLDIGHG

SEQ ID NO: 17 - protein, 396 aa, unidentified
  source 1..396: note = Related to JAFTVS010000063.1; note = Bacteroidaceae bacterium
YAMGFAEGRSVVTNANVHKGQNYVFNIDLKDFFFSIEQPRVWKRLQLKPFNFPLPVANVIAGLCSMKEVRELEDGTKQEIFVLPQGAPTSPILTNMICDKLDHRLAGLAKRFGLHYTRYADDITFSSMHNVYQPKSEFMKELQRIILDQGFHINNKKTRLQKLGSRQEVTGIIVSNKLNVTQKFIRDIRNILYMWDRYGYSVAYSNFFPKYKNEKGHVKKGNPDLINVIWGKLMYLKMIKGEEDSVYKRLHDKFISLVEKTFDENKTTDQHITYVETTPISEFEKRNNTQIFIEISQPYVELEKDENNPDKTKEVEKTSHRYAYFMLNGKKIYASVNKCIKTEEESKKDYLAISTCRDAKGKPFWLVHKIDKVTVPSQLAVDIDELNNELDSLLNM

SEQ ID NO: 18 - protein, 507 aa, unidentified
  source 1..507: note = Related to JAFXRB010000011.1; note = Bacteroidaceae bacterium
MNKGKIIKYATVMQTKVDLLKLLNSIKKMELEDCGLSKEFHPITMKQLNYYCNPKHTFHRYKQFVIPKKTGGKRIITAPQKGSFRLMLSALNQLFKFLYTPSDYAMGFTEGRSIVTNADVHKGQNYVFNIDLKDFFPSIRQPRVWKRIQLPPFNFTKEVANVIAGLCSMQIKKEDGTLDYVLPQGAPTSPIITNMICDKLDRRLAGLAKRFGLHYTRYADDITFSSLHYVYSLNGEFRKELERIIADQGFTINDKKTRLQTRAMRQEVTGITVSDKLNVTQKYVREIRNLLYIWEKYGYVDAVSKFLPKYKVEKQRKGNPDLINVLSGKLLYLKMVKGEEDSVYIRLSQKFNKLVADFMDVTRRSATGLMYIKTYTIDEFEKRFNTKIKIETFETNTKEKEINVKTENEGQAKKKTHRYASFILSNEEGEDIKQNISIRRNVKWNDDPKTKRKLAVSQCQKGNAKPFWLLHYRAEKQAVEQKDVSIEDLNNVLDNLLSTLDDGTTIS

SEQ ID NO: 19 - protein, 482 aa, unidentified
  source 1..482: note = Related to DVLS01000070.1; note = Candidatus Avibacteroides faecavium
MDKTRIARLAHLMKGKDDLLSLLNDIKRDMMAQAGAGGSFYPFTMKHINYYCNPGNTWHRYKSFQISKKSGGTRQITAPRNESFKLILRCLNELLKAVYSPSAYAMGFTEGRSVVTNAEVHKGMNYVFNIDLKDFFPSIEQARVWKRLQIAPFNFPVPVASVIAGLCSMQDARTMDDGTTAVRYVLPQGAPTSPIITNMVCDKLDRRLAGLAKRFGVRYTRYADDITFSSMHNVYQVGGEFRQELQRIIAGQGFTMNEAKTRLQKRGARQEVTGIVVNDKLNVTQAYVRSIRNILYIWDRHGYGVAYAKFLPVYKADKGHVRRGNPDLVNVIDGKLMYLKMVKGDADSTYLRLRAKFDKLSGDVHDPSKTTDHAITYVETTPLPEFERRNATTVVIATPEPCDGGAAAHRYAYFEIGGKKVYASVNKAVKPEDEGRKDLLSISSCRDKDDKPFWLVHLSSKTVTPALVDVDALNTELDSLLD

SEQ ID NO: 20 - protein, 446 aa, unidentified
  source 1..446: note = Related to RKDY01000002.1; note = Porphyromonadaceae bacterium
MNKELFLEEKYIKTKKKYRKIVTYVDGENLLREKHERIVSLLKQECSDSIFAKAYIEHSSIVKNAKAHMYNDIFLFFDVKDFFPSIHQARVWKRLQLKPLFFKQPIANILAGLCSMKEKAEDGSIRYVLPQGAPTSPVITNMICDNLDRRLAGLAKRFGVVYSRYADDITFSSMHNVYNTSGEFRKELKRIVEGQGFTMNEAKTRLQKLGSRQEVTGIIVSDKLNVSQKYVRDIRNILYIWRKYGYDTAFNKFFPKYKEAKGHVKKGNPDMVNVLDGKLMYLKMVKGEDDSVCKRLRSQFDELCNSLHDDTKTTQQGITYVETLPVLEFERKHNTTIAIMTTKPKEFFIVQKNQEATEDTQKSISENFIPHRYASFKLGGRMQKASVNKSLKKEEETQKDLLSISNCRDAKGKLFWLVHRSDKVTVPPAKPVDIDELNDDLDKLLN

SEQ ID NO: 21 - protein, 499 aa, unidentified
  source 1..499: note = Related to NZ_JACICA010000001.1; note = Alloprevotella rava
MDKNSISKATQQLETKEDLLRLLNQIKQDEMTEYGMSDKFYPFTMKHLNYYCNPNNSFHRYKQFKIKKKSGGFRLITAPRNQSFMLLLRYVNEVFKAVYTPSDYAMGFTEGRSVVTNANKHKGHNYVFNTDLKDFFPSIHQARVWKRLQLKPLLFKQSIANILAGLCSMKEKTEDGNIKFVLPQGAPTSPIITNMICDNLDRRLAGLAKRFSVVYSRYADDITFSSMHNVYQTSGEFRKELKRIIESQGFTMNEAKTRLQKFGSRQEVTGIIVSDKLNVSQKYVRDIRNILYIWHKYGYDTAFNKFFPKYKEAKGHVKKGNPDMVNVLDGKLMYLKMVKGEDDSVYKRLRSQFDALCNSLHDDTKTTLQGITYVETLPVLEFEKKNNTTITIVTTKPKEFYTEHTSQEATEDTQKSISENFIPHRYVSFKLGGRMQKASVNKSLKKEDEDRKELLSISNCRDAKGKLFWLVHRSDKVTVSPAQPVDIDELNDDLDKLLN

SEQ ID NO: 22 - protein, 483 aa, unidentified
  source 1..483: note = Related to JXQI01000021.1; note = Prevotella sp.
MDKNDIAKAAQLLETKEDLLHLLNKIKQDEMAECGMSDKFYPFTMKHLNYYCNPNNSFHRYKQFKIKKKSGGFRLITAPRNQSFMLLLRYVNEIFKAVYTPSDYAMGFTENRSVVTNANLHKGRNYIFNIDLKDFFPSIHQARVWKRLQLKPLSFKQPIANVVAGLCSMKEKMEDGSIRYVLPQGAPTSPIITNMICDNLDRRLAGLAKRFGVVYSRYADDITFSSMHNVYHPMGEFRKELKRIVESQGFVINKDKTRLQKLGSRQEVTGIIVSDKLNVSQKYVRDIRNILYIWRKYGYATAFNKFFPRYKDAKGHVKKGNPDMVNVLDGKLMYLKMVKGEDDSVYMRLKTQFDELRHKLHNTSQATPRGITYVETTPVLEFEKKNGATIEITRSKPSEKAIEPFVSHRYATFPLGGKRQWASVNKTLKPEEETQKDLLAISHCRDANGKLFWLIHRADKMMVRPPESVNIDELNKELDDLLA

SEQ ID NO: 23 - protein, 476 aa, unidentified
  source 1..476: note = Related to HF986315.1; note = Bacteroides sp.
METKEDLLDLLNKMKKDEMAESGMSHKFFPFTMTYLNYYCNPNNTFHCYKQFKIRKKSGGFRQITAPRNRGFILLLHYVNEIFKAVYSPSDHAMGFTEGRSVVTNAGMHKGQNYVFNIDLKDFFPSIQQARVWKRIQLKPLCFKQSIANMIAGLCSMKEILEDGSNRYVLPQGAPTSPILTNMVCDKLDRRLAGLAKRFGLNFSRYADDITFSSMHNVYQGNGEFRKELKRIIEDQGFTINEAKTRLQKLGSRQEVTGIIVSHKLNVTQKYVRDIRNILYIWKKYGYSTAFNLFFSKYKQDKGHVKKGKPDMVNVLSGKLMYLKMVKGAEDSVYVRLRTRFDELTIALKDAHNTTTQGVTYVETIPLLEFEKNNHTDVVITTFKAREEVNAEDENKVIAHRYAYFTLGGHKELASVNKSLRSEEEKDKSPLSISSCRDAKGKPFWLIHRSGKVVVPTLSPVNIDDLNNDLDTLLSI

SEQ ID NO: 24 - protein, 482 aa, unidentified
  source 1..482: note = Related to JAFULJ010000027.1; note = Muribaculaceae bacterium
MDKTHIIKHSLQLQQKEDLLNLLNQLKFDEMNAIGIGDKYHPFILKHIDYYCNPNNTFHRYRQFKIKKKTGGFREITAPRNRSYVLLLRYVNEILKALYMPSKYAMGFTDGRSIATNAGKHINSNYIFNIDLKDFFPSINRARIIKRLQIRPFNFSPKIALLIAGLCCMRKELLSDDGKIFYSYILPQGAPTSPIITNMICDKLDHQLAGLAKRFGLTYTRYADDITFSSNHNVYHDNSIFRKELERIIKSQGFNINEKKTRLQKLGHRQEVTGIIVSDKLNVSQHYVRDIRNILYIWDRYGYNIAYARFFSKYKAEKGHIKKGNPNLINVLDGKLMYLKMIKGEKDSVYQRLYSKFKMLSNYIDNNNPISPQSVKYIETMTISDFETKNNTEIVFKIDDNNSTPKRSAYFTLNRTKISISIKKNISNSKLNKEHLAISTCIDANNRQFWLIHPINVERTPSPIDIDALNNDLESLLNLQYG

SEQ ID NO: 25 - protein, 481 aa, unidentified
  source 1..481: note = Related to JAFRQB010000001.1; note = Prevotella sp.
MDRKQIAQQASQLKDKGDLLNLLNLIKKAEIEDMGFDSSMYHPFTEKQLNFYCNPNHTFHRYRQFKIKKKSGGTRQITAPRTQSFMMMLSAVNELFRSIYTPSEYAMGFTDGRSVVTNASAHLGMDYILNIDLKDFFPSIHQARVWKRLQVPPFNFNQPVANLLAGLCCMKESCEDENGNKKDVFVLPQGAPTSPIITNMICDKLDYYLSRLAKRFNMNYTRYADDITFSSMRYVYSKKGKFVLELERIIKEQGFTINEAKTRLQKRGDRQEVTGIIVSDKLNVTQKYVRDVRNILYMWDRYGYNVAYGKFFPKYKEEKGHVKKGNPDLINVIDGKLMYLKMVKGENDSVYEKLHAKFQKLANKDVISEKTNSKGVTYLETIGVKEFEKKNFTTVTFAISEKGKHYAYFMLNDKKMLVTVNKTLTIEEEQDKDVLAISSCRGKDEKPFWLIHRKDKVMVPPPPAIDVDELNAELDSLLNTC

SEQ ID NO: 26 - protein, 487 aa, unidentified
  source 1..487: note = Related to JAFQZK010000038.1; note = Muribaculaceae bacterium
MDRNYIAQQAAKMETKHDLLSLLNRIKISWFEDMGMTVKFHPFTMKQLNYYSNPNHTFHRYSQFKIKKKTGGFRQITAPRSKTFKLMLMCLNEMFKSIYSPSDFAMGFTEGRSVVSNASIHKGQNYIFNIDLKDFFPSIYRVRVRARLQAKPFCFNENIAMLLAGLCSMKISSGHNDGRDYVLPQGSPTSPIITNMICDNLDRRLAGLAKRFGLRYSRYADDITFSSMHNVYQTNGEFRTELRRIIEGQGFTINEAKTRLQKQGSRQEVTGLIVSDKLNVTQHYVRDIRNILFIWEHYGYNAAFTRFFPRYKAEKGHVKKGVPDLINVLDGKLMYLKMVKGAEDSVYIRLFSKYRTLADKAHSIDNTTEHGVTYVETIPLHDFEVNNSTEVIIDWVVPTSDDENGQPKPKRRTASFTLDGKRVYASVNKNVKKEDEQKKELLAISNCRDAKNKQFWLIHYVNKVTVPPAEPVNIEELSNELDALLNS

SEQ ID NO: 27 - protein, 474 aa, unidentified
  source 1..474: note = Related to JAFXWY010000545.1; note = Bacteroidales bacterium
MDREFIINYHGDFLTLLNKVKKVMLEENGMGDLFHPFSLRQITYYSNPNHTKNRYQQFEIKKKTGGMRLITAPRNKTFKMILQCLNEIFKAIYTPSDYAMGFTEGRSSVTNASIHKNQNYVLNIDLKDFFPSITQSRICNRLRTKPFEFPDKIALVISGLCCMKITTKDENGNDVVRYVLPQGAPTSPVITNMICDKLDRRLAGVAKRFGLKYSRYADDITFSSMHNVYQKDGEFWNELNRVITAQGFSINEKKTRLQTKRMRQEVTGIVVNKKLNVLQKYVRNIRNILYIWGKYGFIAAQSRFLPKYKADKGHVKKGNPDMINVLEGKLLYLKMVKGEDDSVYQRLREKFDRLKNDALGILKTNTFSNVTYIETLPLSDFENKNGEVVITYSEKKHKRYAYFNLDGNKKLVSVSLDITEEEEKAKDNFAISLCQDAKGKRFWLLHKKTKVTVPTPKPVDLDELNNDLDSLLNI

SEQ ID NO: 28 - protein, 483 aa, unidentified
  source 1..483: note = Related to RKEV01000037.1; note = Prevotella sp.
MVKNTIAMQARQITSKEDLLNLLNRMKMDEMAESGMADSFCPFTMKHINYYCNPNNVFHRYKQFCIKKKSGGTRQITAPRNKSFRLMLQYVNEIFKSLYEPSDYAMGFTEGRSVVTNANIHKGQNYVFNIDLKDFFPSIEQARVWKRLQLEPLNLQKQAANLLAGMCFMKVSSEDGAVKFVLPQGAPTSPILTNMICDKLDRRLGGLAKRFGLHYSRYADDITFSSMHNVYKMDGAFRKELERIINDQGFKMNPEKTRLQKLGARQEVTGLIVSDKLNVTQKYVRDIRNILYIWSRYGYDTAFNKFFPKYKAEKGHVKKGNPDMANVLDGKLMYLKMVKGEDDGVYLRLKTKFDILARRLNDTSNASARGVTYVETTALLDFEKKNGTSIEITMSKRPENATESFTPHRYAIFTLGGKNHMASVNKTLKPEEEKRKDILSISHCRDAKGKQFWLIHRTDKVMVRPDELVNIDELNKELDDLLS

SEQ ID NO: 29 - protein, 408 aa, unidentified
  source 1..408: note = Related to JAFXTE010000053.1; note = Bacteroidales bacterium
MDREEIANTIRLIETKNDFLELLNRIKRENIDFADNQDQKTYPFTMRQLNFYINPKHTTGRYKEFYIKKKSGGMRRITAPRTKTFQLMLSAVNEILKAVYVPTQFATGFVEGRSIVDNAVPHQNQYYVFNTDLKDFFPSIDQARVWKRLQVKPYIFPEKIANLIAGLCSMQMISKEDGEDTIRYVLPQGAPTSPILTNMICERLDRQLAGLAKRYGLRYTRYADDITFSSLHNIYQEGGEFRKELEHIIKEQRFTINNEKTRLQKAGERQEVTGLVVNQRVNVPNQYVRNIRNLLYIWDRYGYDVAYNCFLPKYQKEKGHVKKEKPNLSNVIEGKLLYLKMVKGENDPVYRRLFDKFNSLTTPDHAQEIEMSEGVSIEQLVALMEPDISDIDKLNNDLDELLMRSYGG

SEQ ID NO: 30 - protein, 399 aa, unidentified
  source 1..399: note = Related to NZ_KV793777.1; note = Porphyromonas sp.
MEKKILATKVRSLATVGDFLTLLNQMKREDQGVEEDPHPFTLKHINYYRNPSHEGRYRSFKIPKKSGGCRVISAPRNKTFRLILRYVNEMLKALYTPSEYAMGFAEGRSVVTNAQIHLRQNYVFNTDLKDFFPSVDQARVWARLQIKPLSLQRPIAGIIAGLCSVRLETDEGTVRYVLPQGAPTSPILTNMVCDTLDRRLGGVAKRFGLRYSRYADDITFSSMHNVYEVGGDFRSELRRIVEDQRFVINEKKTRLQKRGARQEVTGLTVGERLNVPQSYVRGIRNLLYIWRKYGEGEARARFEESYMAEKGHLREKCPDMILVLEGKLCYLRMVKGPNDSVYRRLSTDFDRLLHADEGAVEPLPSGGERLLAEGLALTASAPVDLEALNFDLDQLLNNG

SEQ ID NO: 31 - protein, 536 aa, unidentified
  source 1..536: note = Related to JAEUGO010000081.1; note = Muribaculaceae bacterium
MDKQTVINKAQDLETRHDLLNLLNEIKADMLGSAAYPFSMKKLLILCNPKNDGDKKQERYRTFSIPKKSGGERTISAPCGNLKWMQLCLNEIFKALYTSSPYAMGFAEGRSIVDNARMHTNQNYVFNIDLKDFFPSIDQTRVWKRLQLAPFNFNPKIASIIAGLCSMRTIRYRENLPFEEAFVLPQGAPTSPLLTNAICDTLDRRLHGLAKRFGLHYSRYADDITFSSMHNVYQPGSDFRKELERIIFDQRFTINAKKTRLQHCSVRQEVTGITVGQKLNVTRKYVKDVRAILHIWEKYGINAAYATFYPRYKSEKCQLHRGEPNLENVISGKLCYLKMVKGETDPAYARLSAQFSRLTSSANPTQKPRDIDYLFTMPLLAFEKKLGCKLEYRTRTHDNKPYACFHFQDRFFVVAVSKNLDVNNLPENVEISLTRMAVPIPFYLAPGEPIPEVKPTKAQVGYLLHKPYTGKKRKAVDNDQSASTGVPDSLREFVLDLATKFPKLQLQDEMGIIAGQQEDDMLSRLVDSNFDLSILP

SEQ ID NO: 32 - protein, 538 aa, unidentified
  source 1..538: note = Related to RIBI01000006.1; note = Muribaculaceae bacterium Isolate-102 (HZI)
MDKQTIKEKAKALETRFDLLNLLNEVKADLLGSTAYPFTMKKLLIFCNPKNDGEKKQERYRSFSIPKKSGGERTISAPCGNLKWMQLCINEIFQALYSPSPYAMGFAEGRSIVDNARMHTNQNYVFNIDLKDFFPSIDIKRVWNRLQRAPFNFNAKVAYTIAGLCTMRTIHYREDLPFEEAFVLPQGAPTSPLLTNAICDTLDRRLHGLAKRFGLHYSRYADDITFSSMHNVYQPDGDFRKELERIITTQRFMINAKKTRLQHCSVRQEVTGITVGQKLNVSRKYVKDVRAILHIWEKYGINAAYATFYPRYKSEKCQLHRGEPNIVNVISGKLCYLKMVKGESDSVYTKLFAQFTRLTSTEKPVTKPNDIDYLFTMPLIAFEKKLGCKLEYRTRSHDNKPYACFNFQDRFFIVAVSKNIDINNLPGNVEISLTRMAAPLPFYVAEGDPIPEIKPTKIQVGYLLHKHYTGKKRKNEIVTITSDESNDVSDGLREFVLGLAEQYPEFQFRDDMGIIESQQENDILSRLVDSNFDLSILP

SEQ ID NO: 33 - protein, 538 aa, unidentified
  source 1..538: note = Related to BK020991.1; note = Siphoviridae sp.
MDKQTLIEKAQALETRRDLLKLLNEVKAELLGSSAYPFTMKKLLILCNPKNDGDKKQERYRSFSIPKKSGGERTISAPCGNLKWMQLCLNEIFKALYTASPYAMGFVEGRSIVDNARMHTNQNYVFNIDLKDFFPSIDQARVWKRLQLSPFNFNAKVASVITGLCCMRTIRYRVDLPFEEAFVLPQGAPTSPLLTNAICDTLDRRLHGLAKRFGLHYSRYADDITFSSMQNVYQPNGDFRKELERIISDQHFTINSKKTRLQHCSQRQEVTGITVGQKLNVARKYVKDVRALLHIWEKYGINAAYATFYPRYKSEKCQLHRGEPNIVNVISGKLCYLKMVKGETDPVYTKLFAQFTRLTSTENPVAQTKDIDYLFTIPLIAFEKKLGCKLEYRTRIHDNKPYACFQFQDRFFIVAVSKNLDINNLPGNVEISLVHTAHYNTNFHSSEDTDLNFKISQLKVGYLLHKHYTGKKRIDEASAPSPNTTLDVPDSLREFVLGLAEQFPELQLRDDMGIIESQQETDILSRLVDSNFDLSILP

SEQ ID NO: 34 - protein, 530 aa, unidentified
  source 1..530: note = Related to JAGAST010000027.1; note = Muribaculaceae bacterium
MDKETLVSKARALETPKDFLYLMNEIKADLLGDNSYPFSVRQLHILCNPKNDKKRYFSFEIPKKSGESRQICTPSGNLKWFQICLNELFKALYTPSPYAMGFAVGKSIVDNARMHTNQNYVFNIDLKDFFPSIDQARVWKRLQIAPFNFNAKIAGIMAGLCSIKSLRYSGEEPFQECFVLPQGAPTSPLLTNAICDTLDRRLHGLAKRYGLHYSRYADDITFSSMHNVYQSDSVFRKELQRIITEQRFTINPKKTRLNHCSLRQEVTGLTVGLKINVSRKYVKDIRAILHIWEKYGYNAAYATFYPRYKSEKCQLHRGEPNLENVISGKLCYLKMVKGESDPVYSKLYSQFIRLTEATIIAQDKHNIDYLFTMSKCDFENKLGVSIEFRERADDKKKYGCFYFQDRFFVVAVSKNIDINNLPENLQISLTRMQKPVEFYLRPGEPRAAALPTITRIGYLLHKPLRGYKPEPKAGNISNDISNELKSFVINLANTYPELQLKDDMGIIESSNEDNLLARLVQSNFDLSILP

SEQ ID NO: 35 - protein, 513 aa, unidentified
  source 1..513: note = Related to JAFXFD010000128.1; note = Muribaculaceae bacterium
MEKRYLTEKAQALNTTVDLFNLLNEIKCDILGDNSFPFKWNRFLALSTPGDYLHRYYSFKIPKKSGGFRSIYAPLYNLRWIQICLNEIFKAIYTPSPYAMGFAAGRSIVDNARMHTNQNYVFNIDLQDFFHSIDRHRVYKRLQFAPFNFNPEIANVIAGFCTIKSFVRSGGSSSIDCYVLPQGAPTSPLLTNAICDTLDRRLQGLAKRFGLHYSRYADDITFSSMHNVYQEQSEFRQELERIIADQGFTINPKKTRLSHCSKRQEVTGLVVSQKVNVNPKFVKDIRAILHIWEKYGYNAAYSSFYPKYLSEKCQLNRGYMNLANVISGKLCFLKMVKGAKDPIYIKLNEQFASILKSQKSTKGESERIKYLMTMTKRDFEKKIGTKIHFNRSRYDAKIYGYFYYHGKSFLVAVSQNLDITNLPDETQISLCEFVKYLDCEYDSDPRKLKSSQRYYGVVYLLHKPHYGLNMKNKKIPKQVKEMVINFANRFPELELKDEFGIIDEYNKTQIDKN

SEQ ID NO: 36 - protein, 544 aa, unidentified
  source 1..544: note = Related to VULT01000011.1; note = Sodaliphilus pleomorphus
MDKELLISKIRNTTTRWKLLDLLNEIKADLAGTAAYPFTMSKMMRLCNPRIGLDRYHSFEIPKKSGGVRLIFAPEGNLKWMQLCLNEIFKALYTPSPYAMGFTQGRSIVSNAVRHLHQNYVFNIDLCDFFPSISQARVWKRLQLPPFNFTKDVASVVAGLCSIRMLDIVDGNVRLVSYKLPQGAPTSPLLTNAICDTLDRRLAGLARRFGLHYTRYADDITFSSMHNVYQDGSPFRHELERIVSGQHFKINAKKTRLNHRGERQEVTGLTVGEKVNVARRYVKDVRAILHIWERYGMNAAVAKFYPRYKTEKGSLHNGDPDMENVIAGKLCYLKMVKGQHDPVYVKLQEQFDRLTSAKPEAHDLEISWEYLQTLPTSDFEAQLGVKIDYGISNLGKQYASFVFNGKKIYASVSRNISISNLPKSLYISLCRQIDYKVKYTGEASQRHAVIDPGTPYGRMMLGCPLPEDLAVRYIYVVHRALPKDKPLKYVHTPQVAPELKDIVGKLNELMPGALTADGALLAGDRPKDTLTQLVESGFDLSILP

SEQ ID NO: 37 - protein, 544 aa, unidentified
  source 1..544: note = Related to JAAVDT010000061.1; note = Bacteroides sp.
MDKELLVSKIRSTTTRMELLDLLNEIKVDLAGSAAYPFTMQKMMRLCNPKLGENRYRRFEIPKKSGGVRTIFAPNGNLKWMQLCLNEIFKTLYTPSSYAMGFTQGRSIVDNAKKHLNHNYVFNIDLSDFFPSIDQARVWKRLQMPPFSFSKEIANVIAGLCAIEMVYDEDDKDPVKTYKLPQGAPTSPLLTNAICDTLDRRLAGLAKRFGLHYTRYADDITFSSLHNVYQEGSAFRNELERIVIGQNFRINPRKTRLQHRSKRQEVTGLSVGEKINVCRMYVKDLRALLHIWEKYGINAAIAKFYPRYKAEKGYIHKGEPNIENVLSGKLCYLKMVKGKFDPVYCRLQEQFNRLTLTSTNKKNVELSWEYLQTTPVNDFETQLGVKIEYAVSKRGKPYSYFMLKGERIMISVSQNISIDKLPKNLYISLCRQVDYKLRYTKQQFSVPEVIDNTTAYGRMKLGCPRMEDLAVRYLYVIHRQLPKNHPSKYIRTPEVTPELKDVVNKLSELIPSLFDVDCVQATDVEPKDTLTRLVESGFDLSILS

SEQ ID NO: 38 - protein, 544 aa, unidentified
  source 1..544: note = Related to JAAVCQ010000011.1; note = Bacteroides sp.
MDKELLISKIQNTTTRWELLNLLNEIKADLVSSTAYPFTIQKMMRLCNPKLGNNRYRKFEIPKKSGGVRTIFAPNGNLKWMQLCLNEIFKALYTPSPYAMGFVEGRSIVNNAEKHLKQNYVFNIDLSDFFPSIDQARVWRRLQLPPFNFSKEVANIIAGLCSIEMKKEGDETPPVKSYKLPQGAPTSPLLTNAICDTLDRRLAGLAKRFGLRYTRYADDITFSSMHNVYQNGSQFRIELERIISGQHFKINPKKTRLHHRGQRQEVTGLTVGEKINVCRSYVKDIRAILHIWGKYGINAAVAKFYPRYKAEKGYLNKGEPNIANVISGKLCYLKMVKGEMDPVYSRLNDQFSRLVDTNSGAKDIEISWEYLQTLSTDDFEKQLGVKIKFSVSKQSKQYAYFILKDEKIMVSVSRNISIDHLPKNLYISLCRQIDYKLKYTGELYTRPDVIDNSTAYGRMKLGCPIPGDLAVRYIYVIHRAIAKDKPTKYIHTPEVAPEIKNVINKLNEFMPGAFTVGRVESTSVKPKDTLTRLVESGFDLSILP

SEQ ID NO: 39 - protein, 605 aa, unidentified
  source 1..605: note = Related to JAGHUA010000031.1; note = Bacteroidales bacterium
MENNEIVARVSKISDVESLYKLLDDIRKSDRETYIRKMDFTLAHIKRYANPNLTYKRFSLVNIPKKSGGTRQICIPNVRLGVILHCLNEVFKALYTPNEFATAFCVGRSIVNNAKVHIGHNYVYSIDLEDFFGSIQQARVWKRLQLPPFNFRQPLVNAIAGMCCVKMQPSIKNNRSTADYILPQGAPTSPLLSNAICDTLDRRLTGLAKRFGLCYSRYADDITFSSNHNVFQDNSDFCNELNRIIADQKFTINVKKTRLQKRGSRQEVTGLIVCEKVNLCRKYVRSIRQILYIWKWYGVHDAYSSYRKNNNISEYKGEEGFKLIILGKLNYLKMVKGETDPVYIKLRTEYDNIVNGTYHHQSSSIHFKFVNTQSLEDFESEHGRIGIAVGKSGKRYAYWKKLNRYLRFISISNSIKEFNREDLCISECATAGGGKFYLLRNKSKRKKYTDVLEADFKKSLIWETCSKLSQSKPYEFDIVTMWNSGMFDVGEYSHDDSYHYINIAETQYTGTWTNLQQELTRELKRICFDIKFINGQTSFIVKGKSIGLSLQWPWNPPYEEELNNTAVLVQAKIPKNKYPEMEAFIKSYFELVVSEQMYYDSLNIF

SEQ ID NO: 40 - protein, 526 aa, unidentified
  source 1..526: note = Related to NZ_CP007034.1; note = Barnesiella viscericola
MEKNVIIKRASNLETKEDLLLLLNDIVKDELGKDDAFSFSMKQLMYYCNPNNVRGRYSHFSIPKKSGGCRNIAVPSRGLGNLLHYVNIMLKAIYQPSDYAMGFVEGRCVVDNAMRHVGQNYIFNTDLENFFPSIEQPRVWKRFQLSPFNFKRPIANILAGLCCIKEKNDDGSFIYVVPQGAPTSPLITNSICDVLDRRLNGLARRFNLHYSRYADDITFSSMHNVYKVGGDFRTELKRIVEDQHFRMKESKTRLQKIGERQEVTGLIVSSKVNTSAAYVAEIRNLLHIWEKYGYNEVYKRFYPKYKADKGYIKKGEPLLENVLYGKLQYLKMVKGYKDSVYAALQARYDRLTSPINASSEQKYDYLRSFTLAEFEEIVGNQIRYSLSKNGNLYGRVNLNDNDIIVSITNAAKVQLVKNKIITDESMIASVKTSKSTIPANSRPGLYVVLTAKNGKSLFWMMTYYDPTVTDIDLSSVSVSELVDIWEQEGINAAIEAYENGILFKQDNKSFEKLKGGKQKFYRPSSF

SEQ ID NO: 41 - protein, 594 aa, unidentified
  source 1..594: note = Related to nan
MEKSEIRKRATEIESKEDLLLLLNDIVKDELGKDDAFSFSMQQLNYYSNPNNVRGRYHHFSIPKKSGGKRNIAAPSKGLGHILYYVNILLKSIYQPSDFAMGFVEGRCVVDNAMRHIGQNYVFNTDLENFFPSIEQPRVWKRFQLKPFNFKQPIANLLAGLCCIKEKHDDGTFKYVVPQGAPTSPLITNAICDTLDRRLNGLARRFNLHYSRYADDITFSSMRNVFKAGGDFRMELKRIIEGQNFKMNEAKTRLQKKGERQEVTGLTVSNKVNTSSAYVAEIRNILHIWEKFGYNDAYKRFYPKYKESKGHVKKGEPLLENVLYGKLQYLKMVKGVKDPVYVALQARYDKLTSPVNAEVKQKYDYLRSFTLAEFEEIVECQISYALSKEDNLYGKVILNGKDIIISISNEAKTQLVKNKIVTDEALVASVKPIKNVISVNSKPGLYVVLTAKNGKAPFWMMTYYDPTVTDIDLSQVSVAELVNIWEKNGIDAAIKAYEDGILLTSEDASMANKNSKDKKNTPMQKRKSASSKDESVYMGDIDFIDVADIAAIEEEIKSGNLGEVKLSFSKNDEADNSGNDELDTIIDEGSFDDL

SEQ ID NO: 42 - protein, 592 aa, unidentified
  source 1..592: note = Related to NPIZ01000015.1; note = Prevotella sp.
MEKSVIRKRAAELQSKEDLLLLLNEIVKDELGKDDAFSFSMQQLTYYSNPNNVRGRYRHFSIPKKSGGKRNIAAPSKGLGHILYYVNILLKAIYQPSDYAMGFVEGRSVVDNAIRHIGQNYVFNTDIENFFPSIEQPRVWKRFQLKPFNFKKPIANILAGLCCIKEKNDDGTVKYILPQGAPTSPLITNAICDTLDRRLSGLARRFNLHYSRYADDITFSSMHNVYKEDGDFRTELKRIIEGQNFTMNEAKTRLQKIGERQEVTGLTISNKVNASTAYVAEIRNLLHIWEKYGYNEAYKRFYPIYKESKGHVKKGEPLLENVLYGKLQYLKMVKGYKDPVYAALQARYDKLTSPVNAEVEQKFDYLRSFTLAEFEEIVDGQINYALSKEGNLYGKVVLNGKDIIISISNDAKSQLVKNKIVTDETLVASVKPTKSAIPVNSKPGLYVVLTAKNGRVPFWMMTYYDPTVTDIDLSEVPVTELVNIWEKNGIDAAIEAYENGILLKGEGANKAAKDAKGKKKTKKPQKGVFLPSMSESVSLDVDYIDVADIAAVEEEIRSGKPTKLSSSFTDEYNDLDSDELDTIVDEGSFDDL

SEQ ID NO: 43 - protein, 562 aa, unidentified
  source 1..562: note = Related to JAFRTY010000007.1; note = Bacteroidaceae bacterium
MEKREIAQRASMLQNKEDLLQLLNDILKDEISSDHSFSFSMRQLSYYCNPNNVRGRYRHFSIPKKSGGQRHISAPSRGLSHILYYVNIMLKAVYLPSDYAMGFVEGRSVVDNASRHIGQNYVFNTDLENFFPSIAQPRVWKRFQLAPFNFNQQIASILAGLCCIREKQEDGKFTFILPQGAPTSPLITNAICDKLDRRLSGLARRFRLHYSRYADDITFSSMCNVYHENGDFRTELKRIIEDQGFHMNIAKTRLQKRGERQEVTGLTVSNRVNTSREYVAEIRNLLHIWEKYGYNDVFKRFYPQYKANKGHVKKGEPMLENVLYGKLQYLKMVKGYKDPVYAALQARYDRLTSPVNAEAKQGLDYLRSFTIAEFEEIVGSPISYYLSKDNKIYGKSMLNGKEIAISITRAAKHQLAKSKIITDESLLASIKPVKYNVTANSNPGLFVVLAARNGHTPFWLMTYYDPTVTDIDMSNVPPTELINIWEEKGIDAAILAYTEGKDQGPNKKQEKSKKKGKRSETKKLVSNIDLLDFDIDGALDIDDISSLVADFDEASAISLDDL

SEQ ID NO: 44 - protein, 506 aa, unidentified
  source 1..506: note = Related to JAFXXQ010000016.1; note = Bacteroidaceae bacterium
MEKREIVHRASQLQNKEDLLQLLNDIVKDELSNERAFSFSLKQLSYYCNPNNVRGRYRHFSIPKKSGGQRNIAAPSRGLSHLLYYVNIMLKAIYRPSDYAMGFVEGRNVVDNASRHIGQNCVFNTDLENFFPSIAQPRVWKRFQLPPFNFNKQVASILAGLCCIREKHVDGKLTYILPQGAPTSPLITNAICDNLDRRLSGLAHRFGLHYSRYADDLTFSSMHNVYQENGEFQTELKRIIEGQGFRMNIGKTRLQKLGERQVVTGLTVSNRVNTSSEYVAEIRNLLHIWEKYGYNDAFKNFYSHYKDKKGHIKKGEPMLENVLYGKLQYLKMVKGSNDPVYAALQARYDKLTSPVNAEIKQSLDYLRSFTIAEFEEIVGSPINYRLSKDNNLYGQAMLNGKEIAISITGAAKHQLAKSKIITDETLLSSIKPIKYSVTSKSKPGLFVVLTARNGHAPFWMMTYYDPTVTDIDMSNVPASELVDIWEKEGIDAAINAFEEGFLEDFV

SEQ ID NO: 45 - protein, 553 aa, unidentified
  source 1..553: note = Related to JABZTC010000018.1; note = Prevotella nanceiensis
MEKSELLKKILALQTKEDLLQLLNLIVKDELRQENAFTFSMAQLMYFCNPNNVRGRYTHFSIPKKLGGKRQIAAPTAGLRNILYYINIMLKAVYTPSDYAMGFVEGRNVVSNATLHVGKNYVFNTDLENFFSSIEQPRVWKRLQLPPFNFSRPIANIIAGLCCIREKQENGQFIYVLPQGAPTSPLLTNAICDSLDRKLAGLARRFGLHYSRYADDITFSSMHNVYQNNREFITELKHIIIGQNFHINEAKTRLQKHRERQEVTGLTVNSGVNTSKKYKAEIRNLLHIWEKYGYKEAYKRFYPHYKETKGHTKKGEPMLENVLYGKLQYLRMVKGAKHPVYVALQERYNKLTSPINGHSKESFDFLRAFSLSDFEIMTNNPVQFAISSTHNLYAYTMLEGKKILISLTNAVKEILIKKGDITNNTATSHEEIIKSYIPFNSTTQLYVVLTAKKGHAPFWLMTDYDPTTTGLHFCSMPISQLIDIWETKGIDEAIATYEKNSTFTKVKNIESSSEKNESVFDKFPIKENSDEDIQFLHKLFEDGTQKNDTLFTL

SEQ ID NO: 46 - protein, 790 aa, unidentified
  source 1..790: note = Related to JABVZU010000003.1; note = Phocaeicola sartorii
MDKGEIAKKARILQTKTDLLALLNEIKADDLGEKGYPFVLRQINYYCNPKNTKGRFVTFAILKKSGGIRNIAAPSNGLKMLQTYLNVILGSLYTPSSHVMGFVKGRSVITNASRHLNQNYVFNIDLKDFFSSIPQARVWKRLQLPPFSFPQEIANVIAGLCCIEMIVQDEQGQVRTKYVLPQGAPTSPVITNMICDTLDRRLSGLAARFGLNFSRYADDITFSSLHYVYSENGAFRKELKRIVEGQNFTINEAKTRLQKKGDRHEVTGLIVSDRVNVSRTYVRNLRSLLYIWEKYGYDAANEKFVYYYLDDKPASSTCMPNMVNVIEGKLQYLKMVKGGDNPVYLNLYSKFELLQYIYHNKDNGEEQSMSDVESMLHQSSMSVEGVVAQWKNRDIFSITGTLLNECKRSVSPLIVKKVAASLMAYLSASLVNNIKKRAELQWYMLRDINDAMNGQPRTRKIDGEEEKIHRPKLVVAFLKQFTSTENLKYTTHTWERMIDGKYKWTDFDQFFHSYESELKDKTGSGIPIFDIYNCNIHLYNLVRNFLLPPSKEEYPWQTDYGLKLSYCTPEGVIQNWMKENPDKQPMEIPLSVFPESYRPKQRVQGQTLVDFRDVIDIFKNAIEYRDDNLYWDVSDIFKLTDFSLDDSVLDTLSGITFYTDTILVREALKIIADNIIVRPQHRHLKVQAIRGKDGDQKYVSLEILHVESFSNKSLDDDKLQLKGNKGQLSAVKQKLVSLCDFSVESRFRKGDEMGDYRIDYLYSEEVNAEPRVTKLDAPAEGFKYILKFYL

SEQ ID NO: 47 - protein, 476 aa, unidentified
  source 1..476: note = Related to JAFVAP010000165.1; note = Bacteroidales bacterium
MDLPQIKKKATELETKENLLDLLNEIKQEDLQEQAYPFTIKQLNYYCNPNRTKNRYITFEIPKKAGGTRVISSPSNGLKSILHYLNYILQSIHTPSKFAMGFVKGKSIIDNASQHTNQNYVFNIDLKDFFPSIHQARVWKRLQLPPFNFNKEIASIVAGLCCMKVEPQEENEKPLYVLPQGAPTSPTITNIICDNLDRRLGGLAKRFGLRYSRYADDITFSSMHNVYQNDSDFRKELERIITDQHFTINEKKTRLQKLGSRQEVTGLIVSHKINVTKKYVREIRSLLYMWEKYGYNVAYCKFFPKYTEEKGRIYEGIPDLISVIAGKLMYLKMVKGDGDTMYTRLFAKFQKLANKETIAEKTNLAGVTYLGTIGILEFEKYISTTIIFEITEKCNLYAYFKFNEKKIMVSVNKSLKHSLTLEEAMDKGELAISLCRGKEGKPFWLIHRKDKVLVPPLPLVDVDELNVKLDSLLLFS

SEQ ID NO: 48 - protein, 506 aa, unidentified
  source 1..506: note = Related to JAGBAX010000023.1; note = Alistipes sp.
MERSEIHYQASGVKTTLDLAQLLSEIKEDALGIIKARAFQEKQITYYCNPKRTDRKRYINFTIPKKSGGERTISAPVRGLKSILFSLNTLLQALYEPSKYAMGFTQGRSVVDNAKIHIGQRYIYNIDLKDFFPSIDKSRVWKRLTLPPFNFNSDIAHTIAGLCTMRIVEDGKERFVLPQGAPTSPILTNAICDTLDRRLGAVAKRFGLRYSRYADDITFSSMHYVYGKDSEFIKELHRVIKSQNFTINESKTRLQSLGYRQEVTGVIISDKINVAKRYTREIKTLLHIWDRYGYMAACESYTKSHHVKNDNFKRVGYPKLESVIAGKLQYMKMVKGAEDAVYQTLQTKFSTLVKGIKKIEFTIGGRDIAYLQTMTREQFRKEKLADITIDATNKVAYYEFGDQKHNIVISRSISEDILSQLATSPANDECWNKYRISLCENNNVQFYLLHKCFKERKFRVRTDIKLEDIDNIFTYLDSPNNRNENNKITDKKSSNIFERVIGWLRR

SEQ ID NO: 49 - protein, 497 aa, unidentified
  source 1..497: note = Related to JAFYXB010000050.1; note = Alistipes sp.
MISTDEIKHDFAAIEAPKDLLNLLNKVKRSVLGGKYHPFSFDQLFYYSNPRREDVVRYHSFTIPKRSGGTRTISSPVAGLKSILTTLNDIFQAIYRPSKQAMGFAAKRSVVTNAQIHVGQRYIFNTDLKDFFTSINRSRVWRRLTLKPFSLSDDIADIVAGLCTMRDRDANGRVRYVLPQGAPTSPIITNMICDRLDAKLARLAKRFGLRYSRYADDITFSSMHFVYGKGGRFISELHDIITAEGFEINDTKTRLQHLGIRQKVTGLVVSERVNVSKEYARELKLLIHIWLRYGYLHALDSYTQKHQHTKGGIANLEAIIKGKLNYMRMVKGANDAMVQRLQAAFNELKHDSIRLEHRFDSWLPTLTFNATYTRSEIEALEGISLKLRVDTTKVCAYLAIDGNEYPVTISRHISSATRLELMHSESNSAVWRNHRISICSNEAGSFILLHKRLRRYKPKAEAETESYKVIDIDTFIAMLNATEQDFHLETLCLNAPF

SEQ ID NO: 50 - protein, 503 aa, unidentified
  source 1..503: note = Related to JAFVXG010000004.1; note = Rikenellaceae bacterium
MNRQEIQQAVAAIKSTEDFVLLLNKVKREALGGKAYDFKLKQITYYCDPKRENIERYRHFTIPKKGGGERQISAPVPPLKSILFSLNTILQAIYEPSSHVMGFVQGRSVVDNAKMHIGQTYVYNIDLKDFFPSIDKSRVWKRLTLPPMNLSSDLAHLVAGLCTMRLEEGENVRYVLPQGAPTSPVITNMICDNLDRQLLKLAKRFGLRYSRYADDITFSSMHYVYNENGAFVKALRRIIEKQRFTINPRKTRLQQPNQRREVTGLVVSDKVNVTRQYTRELKTLLHIWQTYGYMDARESYRRARIKSMTVFDKKEGFDLAAVVSGKLLYMKMVKGEDDPVYRRLYKQYRDVYVNKQSEIYEAQATYIEYIQTMTKAEFEEKMQTRISINLDKSLNWAATYGEGESRGRLRLSSKITKEVLAELAADTTGEGAWSKYCISLCNNGASQFYMVHRPLVPKQYTTAVRFLMEELQAELEEIGIDNLLEELDDLKANPEKLNVVKTL

SEQ ID NO: 51 - protein, 503 aa, unidentified
  source 1..503: note = Related to JAFWYW010000205.1; note = Alistipes sp.
MNTQEIRQTVKAMKSTEDLLHLLNQVKQDALGDKSHPFHLKQITYYCNPKRENVVRYRHFTIPKKGGGERQISAPVNGLKSILFSLNTILQAIYEPSSYAMGFVAGRSVVNNAKMHIGQRYVYNIDLKDFFPSIDKSRVWKRLTLPPMNLSSDLAHLVAGLCTMRLEEGENVRYVLPQGAPTSPVITNMICDSLDRQLAKLAKRFGLRYSRYADDITFSSMHYVYSENGAFVQALNKIIEKQHFTINPRKTRLQQPNQRREVTGLVVSNKVNVTRQYTRELKTILHIWEKYGYMAARESYRRARIKSMTFFDKKDGFDLAPVVLGKLLYMKMVKGENDSVYKRLMGQYRDLTKADNGVTYQAKHTKLTYLQTMAKAEFERQLLTSLMIDVEAPKLRKVYFAEGESNRYLRTSGKITDEVLAELAADVEGVGIWSKYRISLCDNGHSQFYMLHKKLVEVQYTEAVLLQLEELQAELEEIGIDNLMAEFANFQAHPEQYEVLLTL

SEQ ID NO: 52 - protein, 536 aa, unidentified
  source 1..536: note = Related to JAFXAS010000015.1; note = Alistipes sp.
MGREQIRTAALEIKNIKDLRRVLNLVKRDALGDKAHPFHLKQITYYSNPRRAEVVRYKDFTIPKKCGGVRNISAPVAGLKSILTSLNTILQAIYEPSKYAMGFVPGRSVVDNAKIHLGQNYIYNIDLQDFFPSIDKSRVWKRLTLPPFNFTSELADVIAGLCAMRMEIEGNGSRCVLPQGAPTSPTLTNIICEKLDRQLGGLAKRFGARYSRYADDITFSSMQYIYAADGEFMAELHHIIATNRFTINEKKTRLQKKGERQEVTGLVLSDKVNVMRRYARELRTLLHIWEKYGHLAACESYMKVRKANPVYRHKGGMPTLDAVLMGKLQYLKMVKGEEDTTYKALYARFCKLTNKAPQGVKYPTPYSSHIVYLHTMSRSEFEEALRTTIKYREDKEPKLYFVIGDVERPITWSHSVPIGQLLENSEDGYKLWGKYQISLCDNGTTQFYMLHKRLVAPPYTNDGRKLTERLQKELAALVDSDIFTQVLGVDEEPMCPKIDPSEGEQLALKNEKWNDALDIMARLEDMDIPEPPEVTL

SEQ ID NO: 53 - protein, 458 aa, unidentified
  source 1..458: note = Related to JAGBZI010000078.1; note = Proposed Tidjanibacter sp.
MRDIRDLRSLLNRVKRDALGDNAHPFHLRQITYYSDPRRTDVVRYKSFAIPKKSGGVRAISAPVAGLKSILTSLNTILQAAYEPTRYAMGFVEGRSVVDNARVHLGQNYVFNIDLEDFFPSIDKSRVWRRLTLPPFNFSVELADVVAGLCTMRVEAECEGDKPRYVLPQGAPTSPTISNIICESLDRQLAGLAKRFGAKYSRYADDITFSSMTYIYSAEGEFVAELRRIIAANRFTINEKKTRLQKVGQHQEVTGLVLSDKVNVARNYTRELRTLLHIWDKHGFMNATVCLMRARDKNPVHRHKWGKPSLEAVVGGKLNYLKMVKGEKDSTYRNLYEIFERCYSRDKRYFAREDTKVGGLKFLITMDVFTFMATMNILLEYNKGGSPEVFFRWGDYKCPISVSRMVPVAKLFENAGEGICKMNNFELSLCDDGSTRFFLLHRRLPISSWMKFKLVDEL

SEQ ID NO: 54 - protein, 529 aa, unidentified
  source 1..529: note = Related to JAFTUI010000023.1; note = Proposed Tidjanibacter sp.
MERTEIRTTALAMKNIKDLRRLLNQVKQDALGDKFRPFHLNQITYHCNPKRATHQRYKNFTIPKKSGGERVISAPVAGLKSILFSLNTILQAIYEPSKYAMGFVQGRSVVDNAKLHLGQNYIYNLDLKDFFPSIDKSRLWKRLTLPPFNFPSELSDVIAGLCTMRLEEDGKETRYVLPQGAPTSPTITNIICEKLDRQLGGLAKRFGAKYSRYADDITFSSMNYIYSNEGEFIKELHRIIADNHFTINEKKTRLQKVGERQEVTGLILSDKVNVVRTYTREVRTLLHIWEKFGHMAACESYMRARKLNPTHRHKGGMPSLDAVLMGKLQYLKMVKGAEDATYKALNSRFAKLQGQELAPIKYAKKPLAYVHTMNREEFEETLSSQIEYNPETTPALFFKVGDDIRPITVSQTVPVKELFAKGDEAAELWRKYQISLCDNGISLFYMLHKKLVAPQHTKAGKRKTVELQEELSALVESDIFSQVLNEDKVDGKNYKVVSMEDIASDRVEIANRERLIALMEADIPEPDNL

SEQ ID NO: 55 - protein, 518 aa, unidentified
  source 1..518: note = Related to JAFNYI010000087.1; note = Alistipes sp.
MRDVRDLRLLLNRAKRGALGAKAYPIHLRQITYYADPRREDVLRYRNFPIPKKSGGERLISLPVDGLKSILRALNTLLQALYQPTAYAMGFVQGRSVVDNARVHLGQNYVYNIDLKDFFTSIDKSRVWRRLTLPPYNLPSQLADIVAGLCTMRLEEGDKVRYVLPQGAPTSPTLTNIICEKLDRQLAGLARRFGLRYTRYADDITFSSMHYVYSSDGEFVTSLRQIIEQNHFVINETKSRLQYRGERQEVTGIVLSDRLNVARQYTRELRTLLHIWQRYGYLAARESYLNHHAEGSKCRLCIRDTRLESSIMGKLQYLRMVKGETDALYMRLKQRFDELMKEKGSAVKYAKYGEFSYLYTVDVPLFESTFNTRICYNAESDVKLYFVDGGVIKPIALSSRLDAGKLFASDNDENRWHGLQISLCESHSTQFYMLHRRLVNPLFSKPRHKKRSSPMDEYVELFNSNANSALIDEFFFRNYGRRMTIDDLGDVVAQSDESGAISELAHILDADITVLAPK

SEQ ID NO: 56 - protein, 473 aa, unidentified
  source 1..473: note = Related to JAFUSZ010000030.1; note = Bacteroidaceae bacterium
MEREVLIMRVERMKDKEDLLALLNDVKADELGDKSYPFTMKQINFYCNPTSVPNSKRYNDFFIAKKSGGMRHISAPVNGLKSIQTYLNIIFQAIYEPSQWAMGFAQHRSVVNNAQMHIGQNYVFNLDIKDFFPSIPQARIWGRLQVKPFNFNKQLANVIAGLCCMKVVTEESERYILPQGAPTSPLLTNAICDKLDFKLSRLAQRYGLNYSRYADDITFSSMHNVYQKESRFLRTLFQIIQEQGFCINEAKTRLQKRGSRQEVTGLIVSNKVNVTRKYTEDIRNILYIWQRYGLTVAYQKFSKYYKKEKGHVKQGEPTMENVLAGKLDYLKMVKGESDSTYLKLKGTYDTLMNHILEGADGSIKYIDTHSISDFEKNLKTKIEIKKSKKGKQFASFILDGDEKIVSISKNAEDITRDKLFISLCEDNEKKRFYFIHRQMWKRGLETKRTEENSLDLDEILAQLCNSNFDLSLL

SEQ ID NO: 57 - protein, 473 aa, unidentified
  source 1..473: note = Related to SUYG01000053.1; note = Prevotella sp.
MDREKIKLRVEHMKDKTDLLALLNDIKADELGDRGFPFTMKQINFYCNPFSIPNSKRYHDFFIAKKSGGARHISAPVNGLKSIQTYLNIIFQAIYEPSRWAMGFAQNRSVVDNAQMHIAQNYVFNMDLKDFFPSIPQARVWGRLKVPPFNFNPELASVIAGLCCMKLVNEDSEKYILPQGAPTSPLLTNAICDKLDYKLAKLASHYGLIYSRYADDITFSSMHNVYQKDSRFMKTLFKIIQEQGFQVNEVKTRLQKKGSRQEVTGLIVSDKVNVTRKYVEDIRNILYIWQKYGLTTAYQRFIVHYQLEKGHIKKGAPHLENVIAGKLDYLKMVKGEDDSTYVKLRKLYNVLMGVPLYGNSETAIKYLDTQRITDFEKRIGTKVEMKLSKNGKKYASFLIDGEKQVATISKNSEKLEFTNLVISLCENQQKERFYFVHRPFGKDVDVKKKKHSSMTLDEILAKLCETNFDLSYL

SEQ ID NO: 58 - protein, 382 aa, unidentified
  source 1..382: note = Related to SUWU01000046.1; note = Lentimicrobiaceae bacterium
MDKERIIETLNTHDCKTALLTLLNDAKQEYLGDKAYPFELRQITFYSNPASDVKRYKDFEIPKKSGGTRKISAPVEGLKIILKCMNMILQEIYEPSKYAMGFAKNRSVVDNAKRHINQNYVFNIDLKDFFPSITRARICARLKVKPFEFSDDIARMISGLCTMKVTDGENIKYVLPQGAPTSPTLTNIICDKLDHKLAGLAKRFGLNYSRYADDITFSSSHNVYQEESDFRKELQRIITEDGFVINDKKTRLQKRGGRQEVTGVIVCEKANVTKKYVKEIRNLLYIWERYGYDEAVKRFHPRYKAEKGYTKKGNPNLDAVLGGKLLYLKMVKGENDSVYKRLQGKYDHLMEVKNPIINQTDNQTNNEALISELENLLDELLK

SEQ ID NO: 59 - protein, 789 aa, unidentified
  source 1..789: note = Related to JAFUDU010000007.1; note = Prevotella sp.
MTQSDIISLVSQLETKEDLLALLNKLKFEDLGERSFSFNIRQLNYYANPNHTKGRYRSFEVPKKKKGAMRTISAPSNGLKMLLRYVNVILQALYRPGENTMGFVHGRSVRDNASRHNHQNYILNLDLADFFPSISQARVWKRLQCPPYNLAKPIADIIAGLTAVKEVTTDESGNECVRYVLPQGAPTSPVLTNIICERLDRRLQGVGKRFGANYTRYADDITFSSMHNIYQQDGEFMQEVIRIIQDQGFAVNKEKTRLLKKGSRQEVTGVIVGDKVNVGRDYIRSIRSLLHIWEAFGYTAASAKFRQQHLKDKNGYVKGEPAMESVIAGKLQYVRMLKGYDDPVYQRLRQKLDWLLGMSDPEAAILQNPDYKVLETMPLPTFEEQNACQVQFSMSPNGNRYAFYHQRDNRMTVSVSHDITQTVKPFLAISLCQRRDGSRFHLIHKPIPQVPVRQEPAVKEIEIRHWHQPAMVTGFLRRFTEKGALKYTTHLWTPAEDGSYQWQDFETFYQSYRKELYEKKDDQININDLYHYVPTLNALIRNFLIESKSPSLYWSKEYKLAVSYGSPKGFIADWMRQTGKQPFEMPLAELPKEYVPAAPVQGRTLVYFNDVVGIFKNAIEFRDDQFYYAVKGIFKSVYHHVDQQKLSTLRGLSFYTDTFQVKKALRLIASNMESRTEYPEVEISAQYIDGDDNSPRRLRVTILQRDSFSDKSIYDDKLLLRHGSGQMGSIKSLLRSLCDFSVESRFRAHDDFLHYRIDYLYTTDADAPPCLVQLDKPTEGFKYILTFAL

SEQ ID NO: 60 - protein, 515 aa, unidentified
  source 1..515: note = Related to JAFRXO010000051.1; note = Bacteroidales bacterium
MTKEAIVTAASKVQTTRDFLNLLNKIKMDDLGDKGHPFIMPHLNYFIHPARNKKSYKEFRIPKKTGGFRVISAPKALLKSFLTYTNKLLQAFYDAPDYVTGFVPEKSVVDNAEKHIGMNYVFNTDLQDFFPSISKSRVWATLKFPPFNFNDTVADAISGLCCTEIYVNGETRRALPQGSPCSPILTNIVCRNLDRRLHRLAKEYNLRFSRYADDITFSSNRNVFQKGSEFRNKLEGIITEQHFIFNEKKTRLQTKCQRQEVTGLIVSDRVNVTREFVRELDNLLFIWEKYGEADAYAKFLLHYTPKQNFHSYKPNMQAVIQGKLLYIKMVKGADNEVWRRLQRRFNKLSGAKPSTVEATLKYKYTIADFEKKIGQALDFELNKDGVIYCTFSLNGKKTSVALSHYVRTRISNILAKSDTAALEKFKTSYMLVFYEQDNTNFWRIERKRTWVKTNLADLIDTSSLAEALLSASAISEKGDELTSTPMKSTDEVLAALVDSDFDLKILDEWDKIRSS

SEQ ID NO: 61 - protein, 521 aa, unidentified
  source 1..521: note = Related to JAFQZW010000007.1; note = Bacteroidales bacterium
MNKEAIVEEASKLESTHDLLILLNKIKMDELGDKGYPFTMPQLNYYINPIRNKKSYRNFRIPKKSGGYREISAPKAILKSLLTYTNKILQALYEAPGSITGFVTGKSVVDNAEKHIGRNYIFNIDLQDFFPSISKSRVWATLKLPPYKFNDTIADAIAGLCCTEIVIDGETRRALPQGSPCSPILTNIVCRNLDRQLNKLAKKYNLTYSRYADDITFSSNHNVYQKDSEFRQELDDIIKKQNFSINSKKTRLQQKNHRQEVTGLVVSDRVNVTKDYVRDIDNILYIWDHYSEDDAYARFLTHYSPKHNLKHRIPNLSSIIQGRLNYLKMVKGADNEVWRRLQRKFNKLTGTNKSSNDENANIKYIYSIPDFEKKVETQIIVTLGSNDNVYCYFTINNYKTSVNLSKYVKTRLKNIVSENNQDLLKRFMANCILIFYEKEGSCYWKIERRRKHSMISDPKDFDLNLLLLKIEEVTLEPKKSSIAQTDNTSTSKSTTDEILDELVDSGFDLNILDKWDKIKSS

SEQ ID NO: 62 - protein, 515 aa, unidentified
  source 1..515: note = Related to JAFZZI010000013.1; note = Bacteroidaceae bacterium
MTKEAIVAAAAKVKSTHDLLILLNKIKMDDLGGKGYPFIMPHLNYFIHPARNKKSYKEFRIPKKSGGFRVISAPKNMLKSFLTYTNKLLQAFYEGPEYVTGFVPEKSVVDNAERHVGMNYVFNTDLKDFFPSITKSRVWATLKRPPFNFNDTVADAIAGICCTEMVIDGETRWVLPQGSPASPILTNIVCRNLDRMLHKLAKKYNLRYSRYADDITFSSNRNVFHKNGDFQKELIKIISSQNFSINEKKTRVQNKNQRHEVTGLVVSDRVNVTREYVRGLDNLLYIWEKHGEADAYAKFLAHYTPKQNLHPHKPNMRVVIQGKLLYLKMVKGADNEVWRRLQRRFNKLSGAKPSTVEATLKYKYTIADFEKKIGQTLAFEPNIDGVIFCSFNLNGKKTSVTLSQYVRTRLSNILVKNDAAALEKFKTSYMLVFYEHDNSGFWRIERKRTWVKTNLADLIDTSSLVEAPLSAAAIPEEREESTNTAGKSTDEVLAALVESDFDLKTLDEWDKIKSN

SEQ ID NO: 63 - protein, 454 aa, unidentified
  source 1..454: note = Related to JAFSJL010000028.1; note = Paludibacteraceae bacterium
MTKEAIIAAAKDIKTTHDLLKLLNNIKMSELGDKGYPFIMPHLNYFIHPARNKNSYKTFSIPKKSGGERTISAPTRLLKSFLTFTNRLLQAFYEAPDYVTGFVPEKSVVDNAERHIGMNYVFNTDLKDFFPSITKSRVWATLKHQPFNFNDTIADAIAGLCCTEMEIGGKSQWVLPQGSPCSPVLTNIVCRTLDHKLHKLAKKFNLRYSRYADDITFSGNRNVFHKDGEFIKKLNRVIAQQNFTVNEKKTRIQNKNQRQEVTGLVVSDRVNVTREYVRSLDNLLYIWEKHGESEAYTKFIVHYIPKQNPYKERPNMRSVILGKLQYLKMVKGSDNEVWRRLQSRFNQLSGVTPSIESAVIKYLYKVSDFEKKIGQKLKFEIFDKKVVRCFFPLNNQHTDVMLSRYARTRFSNLIVQDDFVKLEQIKSSYMLIFYEQGGSGFWRIERKRRQKLKT

SEQ ID NO: 64 - protein, 526 aa, unidentified
  source 1..526: note = Related to JAFUYF010000001.1; note = Bacteroidales bacterium
MTDKAIVAAASKLESTFDLLTLLNKIKEDELGDKAYPFKMDHLNYFINPKRNRASYRTFTIPKKSGGVRTISAPVKLLKSFLTYTNILLRAFYEAPDCVTGFVPAKSVVDNAEKHVGMNYVFNTDLKDFFPSISKSRVWATLKTRPFCFNDTVADAIAGLCCTYVNEKGEEDNIALPQGSPCSPILTNIVCHNLDWKLSGLARRFGLNYSRYADDITFSSMHNVYQEGGEFMAELRRIIEGQHFRINEKKTRLQKKGERQEVTGLVVSDRVNVAREYVRDLDNLLYIWKKHGRAAAFAKFSGRYIPKQDLKAPAFDMDRVVAGRLAYLRMVKGEESQVWRRLQKRYNTLSGKKEKTVGTDIKYLNFYTIENFSAATGLELHLVMDTISIPRETPEEAGVMRVPVAYFMSGDRRIDVELSHYMQTRLRNILESGDGKALAEFKHKYIIAYCHSSTGYFWMIIRSMPKMGNNADVSEKGAGFILSDLFCSEGESVLSDDKSTDQILSQLVASNFDLKILDQWDKIKNS

SEQ ID NO: 65 - protein, 487 aa, unidentified
  source 1..487: note = Related to JAFZME010000158.1; note = Bacteroidales bacterium
MTDTAIRQAASLMECQSDLLSLLNHIKVDELGGKAFPFTHDQLYHFCSPRRNRKHYHTFTIPKKSGGVRTISAPTKMLKSLLRCTNTLLKAFYDAPEDVTGFVRERSIVDNARAHAGMNYVFNTDLKDFFPSISKSRVWATLKTSPFNFNDRIADAVAGLCCTCLNGEDEPERIALPQGSPASPVLTNIVCRNLDRRLRGLARRFGLHYTRYADDITFSSMHNVYQEGGEFMAELRRIVLGQHFELNEKKTRLQVRSARQEVTGLVVNDKVNISRAYIRDLDNLLYIWQRHGRSAAFLKFVGRYVPKGVWFGQAHNMERVVAGRLAYIRMVKGECRAWRRLQDRFDRLIARGNHPVGSGGKDFIYTSFYTLDNFMKFSGLELQFILEDGRPKVFFVKDGVRTDITLSHYVRTRLRNILQSGSKEELRKFTARYIIAHCAFTYMSDAEGLFWLIIRSVPRKKIASLGNKDLAELITDLSLEKVEDEAL

SEQ ID NO: 66 - protein, 556 aa, unidentified
  source 1..556: note = Related to JAFUDT010000010.1; note = Bacteroidales bacterium
MNRDAIIKAASQMETLEDLRRLLNEIKEDEFGDKAYPFSERQLKYYINPKRNKQSYRQFTIPKKSGGVRAISAPIRILKSLQLCTNRILQAFYEAPDYVTGFVPARSVVDNAERHLGMNYVFNTDLKDFFPSISKSRVWATLKTRPFSFNDTIADAIAGLCCTELELDGETRVALPQGSPCSPVLTNIVCHNLDWKLNGLARRFHLRYSRYADDITFSSNHNVYQPEGEFMIELRRIVNDQRLTINEKKMRVQKKGQRQEVTGLVVSDRVNVTREYVRSLDSLLFIWEKHGEDVAFSNFLKHYVPKHNRRFRSPDMSKVILGKLMYLKMVKGEDSPVWQRLQVCYENLAHREPAASSDIQYLHSFAIDVFEKGSGVQLTFSMTDGKLKCLMEYKGREIRVCLSQYVQKRLAPIVESNNLEALEKLKKQLHIGYCMASLLETSVVNHFWLLYRKRPVVKDLPITLTEEKEIQSHIERYLKESAGVRKASDRNINAGESMKESVSVTSEIGTEEKKVKAESEADSKTGKTIDEVLDVLVSKNFRDLSILDKWDKIKTN

SEQ ID NO: 67 - protein, 517 aa, unidentified
  source 1..517: note = Related to JAFYYM010000038.1; note = Bacteroidales bacterium
MTREAIVHAASKLETTHDLLVLLNRIKMDELGDKGHPFTMPQLNYFINPKRNSSHYKTFYIPKKSGGQREISAPTHILKSLQTYMNRILQAFYEAPEYVTGFVPSKSIVDNAERHIGMRYIFNSDLKDFFPSIPQARVWGTLQTRPFSFSKEIASAIAGLCCVEARDENGKLIHVLPQGSPCSPTLTNIVCHNLDWKLNGLAKRFHLKYSRYADDITFSSDHYVYQDDGEFFREFRRIVAEQHFKLNEKKTRTQKRGERQEVTGLVVSDRANVAREYVRDLDNLLYIWEKHGHNAAFAKFIARYTPKQDLKQSSPDMKSVIMGRLMYLRMVKGEDSLVWRRLQKRFNRLADKKESCGGTNIQYLHAYPIEAFEKAVGTDVSFTLEDDFVRCSFTLNGSAHSARLGKYAKTRIRSILESGNEDAMLKFKEKFHIGFCHMDGTPEEDHFWLIFRRPPRAKGLEITDVDEILSLTDYVGLPENGETDSADSLTTDATLEALVSSDFDLNTLDKWDKIKSN

SEQ ID NO: 68 - protein, 360 aa, unidentified
  source 1..360: note = Related to JAGBPC010000032.1; note = Bacteroidales bacterium
MTNLEIAHAASRVANLPGLLALLNRIKEDEFGNRVYPFTLQELNYYINPKRSRSGYRIFSIPKKNGGDRTIASPVKILKSFQICVNRLLQALYEVPECVCGFVPGRSVADNAARHTGMRFVFNADLQDFFTSIPQARVWGALKTRPFSFPPVIASALAGLCCMEVDGADGPRYVLPQGGPASPVITNIVCHNLDWKLSGLARRFHLHYSRYADDITFSGDHFVYEEGGVFLTEFRRIVAEQNFRLNDKKTRLNRRGERQEVTGLVVSDRVNVPREYVRDLDNLLFIWERYGRDAAYAKFLSRYTPKKGRMVKKPDMEAVVRGRISYLKMVKGADSPVWKRLRKRFDILIGRAYFSTTTCS

SEQ ID NO: 69 - protein, 503 aa, unidentified
  source 1..503: note = Related to JAAYJQ010000010.1; note = Bacteroidales bacterium
MNRQEIIAATAKLETRYDLLILLNRIKVDELGEKAHPFTIRQLNHFCHPHRNTCSYKVFTIPKKSGGFRTISAPGRLLLSLLTYTNRIFQAVYEAPSCTVGFVPGRSVVDNAKMHVGRDYVFNTDLQDFFPSITQARVWATLQLPPFSFNKTIANALAGLCCSEILINGEIRNALPQGAPTSPVLTNIICQKLDRRLTGLAKRFHVHYSRYADDITFSSDHDVYQEGGPFLTELKRIIGEQHFTINESKTRVQKKGARQEVTGLVVSDKVNVTREYVRGLDSLLYIWERYGRKEAVSSFLRHYTAKHNLKKQVPSMERVLRGRLMYMRMVKGEDDPVWRRLQRKFNGLSERETFPGNDVKYEASYRIEEFEQAIGTKVEFLSSGTESSTSRPSNAQPQAVFSLHGIIRSIYLSKYCKTRLEKVLDSGSEEEMDKFRKQCIISLCHRADDPDYHFWLIHRPGRVRSSVTVLEILGADEVFHSAESAAKDILNKLIDSNFDLSVL

SEQ ID NO: 70 - protein, 556 aa, unidentified
  source 1..556: note = Related to JAFOQL010000759.1; note = Bacteroidales bacterium
MVRNDLIIQECSRLASLKDLLFLLNRVKREEYGFGAHPFTMEQMLHFSDPRRNRRHYDTFAIPKRSGGQRTITAPRGMLKSFQKVANRVFQAFYNAPPCVQGFVTGRSVVGNAGIHVGMNYVFNSDLKDFFPSITQARIWTVLQAPPFNFPKRIASVLAGLCCTDLEYVMARCADGGTSVKGTSKAKSVLPQGSPASPILSNVVCKNLDRRLSGLAKRFGLRYSRYADDITFSSQHNVYQKDGPFMKEFQRIVRTEGFTINENKTRLSRRGQRQAVTGLTVNDMVNVPRKYVRDLDCLIHIWKRYGASDAYAKFLSRNMAKVSGAGLTYFPKMEDVLKGRLAYIGMVKGRHSPVYQRLLGKMDTVRHRTSLGAFRYVHSWRISEFESLTGFSLDMEKDPSGKWYCRFGPEGHRVFVCMSRWCRSRLTGILETNDQAALNEFKRMNRIGLCFDARSMNMEARCESQIVDELSPYLDGPYSGHRFFWMIFRRVSPNSGPHKSFFELVDKRVSKEGRELMKTLGLKPVSISKGPLLTNTDPVSPTDCFDDTYDFYIRPF

SEQ ID NO: 71 - protein, 491 aa, unidentified
  source 1..491: note = Related to JAFRXO010000051.1; note = Bacteroidales bacterium
MERQEIREAASLMTNRHSLLTLLNSLKKDDLGDKAHPFTMAQLNYFCHPTRNAKHYKVFTIPKKSGGVREISAPVKMLKSFQTYTNMLLQALYEPTSAAMGFVPGRSVVDNAMNHVGMNYVLNLDLKDFFPSIPQARVWGALKSKAIGFNQEVASAVAGLCCTEIDFYDGKPVLTTVDLPKGAKTEKRNVLPQGAPTSPILTNIVSRNLDRRLKHLAARFGLNYTRYADDITFSSMHNVYQEEGEFMTELRKIVAEQNFTINEKKTRFQKKGSRQEVTGLIVSDRVNVTREYVRSIGSLLYIWERYGYDSAFARFFQHYTLKVNRVSPPSMERVLQGKLMYLKMVKGEESLVWQRLQDRFDKVCSKKPVKVSDINYVAAYTMPAFEKQFSTEISFFAKEIPGKKEKGPVISYGASFKSGNEGIIISVSDSCKELIASAIGDEKAVTDLKKMLYVAYCKRGEFPYWLVMKSRPRNIYASTVRRKEGDLFFHG

SEQ ID NO: 72 - protein, 607 aa, unidentified
  source 1..607: note = Related to JAFYOT010000249.1; note = Bacteroidales bacterium
MNIILHNIIYYFRLNGNKLPVHKEKTIQVCLERFINVSMTQKQIIGKVHGLKTKMDLLNLLNALKKEDLGKDYHRFTLAQLNYYCNPNRTPHKRYRNFTIPKKSGGVRNISAPVRGLKSMLTYLNIVLQAMYQPTDAAMGFVPGRSIADNAAMHTCRNYVFNTDLKDFFPSIQQPRIWKILQLKPFSLNKELASVIAGLCCMQDANGNGVLPQGSPCSPILTNIVCRNLDRRLTGLAKRFNLKYSRYADDITFSSDYNVFQDDSEFMNEFMRIVADQNFTINEKKTRLQKSGQRQEVTGLIVNKKVNIAKEYYRDIRSLLYIWSRYGKEQAYAKFCVRYKASKAYNAKKKGMPSMPAVISGKLLYLKMVMGEDSTAYAKLRDNFLKLCPEQKNVLKNTNLTYLASYRLDEFESAFGTNVKFEYKPFSNVSGKSKTMGSFLLEEEIVSVSVNVRCDSIVDKYLANPDEKELEKIKRRLYISLSERGNDRFWLITIARMNNEHKKSYKGSYVAKVKVRPEEIKKEGIELKREVYAEIIRPTEILENNDLDPTHPGPHYYNSTYRKWVPVDDEQFEDIPDSEEIDAMLASLVSSGFDLNTLKEWDKIKKN

SEQ ID NO: 73 - protein, 550 aa, unidentified
  source 1..550: note = Related to JAGBVU010000006.1; note = Bacteroidales bacterium
MSRTFISVGMNKQQIIEKVRGLKTKVDLLNLLNALKRDDLGKDCYRFTLNQINFYCNPNHNPSRRYKDFTIPKKSGGVRTISAPKGSLKSILTYLNVIFQAMYEPSEAAMGFVPGRSIADNAAMHVGRNYVFNTDLKDFFPSIHQARIWKMLQLKPFSLSTELASVIAGLCCMQDPNGTVDKSGKIIGVLPQGSPCSPILTNIICRNLDRKLLGLAKRFNIRYTRYADDITFSSDYNVFQEGSEFMKEFTRIVTEQRFKINGSKTRLQKSGQRQEVTGLVVNKKVNVTRDYYRDLRSLLYIWQRYGKEQAYAKFCIRYKESKTYKRKQNEMPDIVAVVSGKLLYMKMVMGEESTAYLSLKNKFISLCPEQKQILDTNLHYLASYRLDEFERAFNTQVVFAYKPQNRVVGKSKTMGTFVLGEEKHVVAINIRCDSIIDKYLSAPDDKLMKGLRKRLYITLSERGSERFWLVTIARMNNEHSRSFNESYKAKVRNEIETNSGEPVDVIDSMYEMDVYDCFPENIDIDGLLSEFVKSEFDFNTLNSWDKIRKN

SEQ ID NO: 74 - protein, 664 aa, unidentified
  source 1..664: note = Related to NPJH01000006.1; note = Prevotella sp.
MKDISTLRCEIKKMRTHLDLFYVLNEVKKHYAETEGISFYPINRSNFEYYISSKTNRNQYYKEFDIRKKYNDGKRHIIAPFMGLKDIQKAISLMLQLIYTPYNNVNGFVQGRCIMQNAYPHVFQNYIFNIDIKDFFPSIHQARVWKKLQLPPLNFPVAIANAIANVCCYELINDDDTKIGVLPQGAPSSPILSNIVCERLDWKLRKLARENNLIYTRYADDMTFSGMYNAFSPKSEFIIKLYATIHEENFVVNESKTSLMKRGAHQEVTGLVISDKVNVPRSYIREIRSLLYIWERFGEKTASYRFALHNSNRKDKTLSEIGTLENVLLGKIEYVKMVKGANDSTYLALKGRLDKLLGAELSKKEKRRESREKKLRKVVPHNLEETQKFFHLFDYPEGFKYLTHDFPEGEEWSVDKLKEQCIGILKNYSNYSQIPTSLWALVNVFVIGKYYKKTDWIDYEGHDQRITYSDFVGGEGHPILGDHKEVIERFKNTIRVRMRCLYNLCVSWNDPKYGLNITMDKNELNKADFYTNVFILKKSVQRIFQMFASRNDKKDVNIHYHKEDIKNRRCHILTITQQDSYSEKGVDELRPKLHGGGGDFATLKHDLSGYCNWSVLSVWNEKPAKWNILRESDVDEIEEVTDKPVGFTHILTFYGNKLEEDIHH

SEQ ID NO: 75 - protein, 628 aa, unidentified
  source 1..628: note = Related to NZ_LT985324.1; note = Prevotella sp.
MAKEFGVEYYPISWEDYCYFSSPKRSVRNYISFEIPKKSGGYRHISAPVRGLKEIQKCLNYLLELMYYPKDNVTGFVRGKSIVDNASPHIGKNYIFNVDLQDFFPSIDQARVWKKLQLRPLCLTKEVASAIAGLCSMEIEDEKGNKRYVLPQGAPTSPMLSNIVCERLDWKLSGVARRFGLTYTRYADDITFSSMHNVYQHDGDFCKELRHIIEDEHFTLNTSKVKLQKRGGHQEVTGLVISDKVNVPKAYVREIRSLLFMWECYSYAVASQKYALYHNAYVKHRTYGEFVSLENVLDGKIEYLKMIKGCKNPLYLTLRSRLDKLIGKSTKKNKDCEVIEVVNNKKEVKKHDIEATYEVLHLFEEPNGLKFLTHDFPDASWSIDKLLKQCRTVFNEEAKGHPNIPQSLYSLVHTFMSGVSNNIKGWLGYDEKLHTETWNDWEKKKEHPIKRYGDIIDIFRNTIRIRSPKLFDLIKALEGQNTQFVFDYDSKELKKADFYTNVYMLRWCLVHVLLMFGQYPEHKELNISCTRSSMNGWIVYTIQFTQVGSFPSADINDAIKRVNEGAGDLGVIKEKMRSYCNWSIISKWNDKNLRWNILRSEGVKEIEEIAEQTIGFTHEFVFYKIKSN

SEQ ID NO: 76 - protein, 380 aa, unidentified
  source 1..380: note = Related to JAFZIR010000019.1; note = Bacteroidales bacterium
MNRETIAEKAEKMTEKQDLLHLLNEVKVDMLGDKAHPFSLRQLCYYCNPRVNRKRYTDFEIPKKSGGKRRISAPVNGLKSILSCLNIIFQAMYEPSENAMGFAVGKSVVDNAKIHVGKNYVFNTDLKDFFPSIHQARVWKRLQLPPFNFNQNIANVMAGLCCMKVSSPEGDKYVLPQGAPTSPIITNMICDKLDRRLNGLANRFGLTYTRYADDITFSSMHNVYQEDGEFIKELRRIIEDQNFTINDSKTRLQRKGSRQEVTGLTVCAAPNVTKQYVHNIRSLLAIWEHHGYDIAYRRFLPRYIGEKGHVKKGSPNLDSVLAGKLLYLKMVKGADNPLYAKLQCRFDNLIGTMNGEMTSDTELRFLYTMGAKEFDFTHSK

SEQ ID NO: 77 - protein, 523 aa, unidentified
  source 1..523: note = Related to NZ_CP091788.1; note = Prevotella sp.
MDKFETRKRVSSLQTKADLLKLLNDLKVNDLQENAYPIPMKAINFYCNPAHEKRYKSFSIPKKSGGQRVISAPCRGLMSILTYLNVMFEAMYEPAPCVCGFAIGKSVVDNANNHVGKNYVFNLDMKDFFPSIQQARVWARLQAAPYNMKKDVANIIAGLCCMKTSDGKFVLPQGAPTSPILTNMICERLDRRLTGLARRFGLSYSRYADDITFSSMHFVYSGDGDFMKELNRIVSEEHFSLNDKKTRLQKNNVRQEVTGITVNEKANVTRKYVREIRQLLYIWKKYGYNDAYSKFYPKYKAEKGHVKKGEPVLENVLSGKLLYLKMVKGEEDSTYLRLRKQFDKLSGDTILHKSTSDEFKYILTYDLSNFIAVNSIIPFKLHIKDEDLQTTASGNYKGKMELNGEYMSVFISKGVLKQIRTAEQGDYTDMWKCYISLCESAKGRFWLIHRGKHDEATHNPAPQKTISQIIDIWAKKGLEKAKEVFENVHYPTGDSIDIKAILDVWEEKGADAAEQLYEQYVKQ

SEQ ID NO: 78 - protein, 555 aa, unidentified
  source 1..555: note = Related to HF989231.1; note = Prevotella sp.
MIAERAAQMKTRADLLLLLNDIRHDELAEAGREEDYHPFTQPKFNFYINPNHTQGRYREFYIPKRSGGRRRISAPRTGTYKYMLHALNLLLGSLYTPSLSAMGFAPGRSIVTGAEKHVGQHYVFNTDLRDFFPSVRRARVKARLLLPPFGFTEEVAIAVAGLCTVRVEAPGDDGQPARPIYVLPQGAPTSPLLTNAVCDRLDRRLTGLARRCGANYTRYADDITFSSPHNLCVEGSAFRAELARILAVEGFEMNEAKTRVQRSGQRQEVTGLVVNRRVNVCRHYVRSLRAVLYVWRRYGYDAALAALLRHDRVVPERRGRRRLPDLTRVIEGRLLFVRQVRGTADPLYARLQAAFDALVASMSAQKCENGLTFIWTVPLEQFEKQYGATVKIHFFPAEPTSQPTSSDSAAETNAPSADAQSAPTAMASCRFTLPRNRAKGGDTYDAQVELPLTVSRRLTPQTPREGMAVSFCRATKGIPFLLLHRQGAVTVAIITGSGMAGGSQPAGNAPGIFATLPVYGKRRLASAVQADQGEPPVDVDALLAELENYLTDHNG

SEQ ID NO: 79 - protein, 468 aa, unidentified
  source 1..468: note = Related to JAFZPB010000162.1; note = Muribaculaceae bacterium
MLYLLNDIITDAYGSQAATINMWQFNYFSNPNRCKGRYRSFQIPKKSGGARTISAPCKSLKYILRIVNILLQAIHKPSTAAKGFVPRLSIVDNAAPHVGKNYVLNLDLKDFFPSISEARVRARLMAKPFNFTDEVATTLAGLCSYRPYSKETAHQRIAPCVLPQGAPTSPTLTNAICDRLDMLLSGVARRFNLTYTRYADDITFSSNHYVFSRDGEFMTEVRRIIADQGFEINEKKTRLQRRHEHQEVTGLTVNEKVNTARRYARDIRNLLYIWNYHGIADAERSFLWNYDKRQRRVPDMINAISGKLEYLKMVKGANDPVYVRLSKKFESLQNGNTVLGYKIHKTWTINRFRFTHGYISVGYERNELLDRLKYDDIPDLFKNAVCIDGPHPYFYIEKRIKYQGQLYLHRQFLRVLRNIETEFLEFLNGGECRRTFFVSECTRKNKDGRLWKGFLVHHAISRDGSHFL

SEQ ID NO: 80 - protein, 575 aa, unidentified
  source 1..575: note = Related to MNQV01000214.1; note = Phocaeicola vulgatus
MNDLRTLISKINNLSDLTKVLNYFKHRETNSEENLFTEDVLESYANPSKKVARRYKTFYIPKKNGKLREISAPNRNLKEILHYLNMMLAEVYQAGPSAMGFVKGRSIVDNANLHVGQNYVLNLDLSDFFTSISQSRICKRLQLAPFNFNENVAKAISGLCCKKVVKGGKKGYALPQGSPTSPILTNAVCDFLDKKLRHLSTRNGVKYSRYADDMTFSSMHNIYQENDTFMKNLFSIIKEERFTVNPDKTRLQKRGERQEVTGLTVNDKVNTAHKYTRELRNVLYMWEKYGYKDTYTSFYKHYKATKGHIKKGEPVLENVIIGKLDFLKMVKGENDVVYTKLRSRFEALNPNIYDSKNTNSRSKVNYIELYSVVEFEKAFKTKIKFIMSGEGKLSAVYKNGKKENSIYVSNAVKDIVFTEKAKPRKNCRFTISSMESFFVALCRSNCVNYWMMLANEPARERHIHPKYNNLPINQLLKEWEEKGLEAAADLLSSILVDETFSSNGDRKEPALPKLGKKKRKKKSSMGVLEELMIEDYMDDMELQASLTDFEDEETIEYNTKAIMKLLKGDKDGKEE

SEQ ID NO: 81 - protein, 580 aa, unidentified
  source 1..580: note = Related to JAFRRT010000017.1; note = Muribaculaceae bacterium
MMERDKIFELSQKMKTVRHLAFILNKMKCEEFGTMEFPITAKQLRHFSSPKIADKRYKTFQIKKKSGGIREINAPCYQLKIILYFLNKILKAVFTPNDCVNGFAEGRSVVSNAQCHVGHHYVFNIDLKDFFPSIPQPRVWARLQLPPFNFSQEIANVVAGLCCHPNADGTNVLPQGAATSPLLTNAICDTLDRRMKGVAKRFGLHYSRYADDMTFSSMHNVYHEGSDFRLEIKRIIEEQGFKMNEKKTRLLRDGQRQEVTGLTVNSTVNVSRHYVKYLRWILHIWETEGYSKAYSKFYPKYKKEKGYIKKGEPVMENVIGGKLNYLRMVRGSNNAAYLKLQARYDKLQQLVFIDNETDKGESYIYVQPYKMAEFCQDFSTSIVLEISARNKLVGRCVLCGMDKTIAISKSTQKKLCPDLEKKKPGDVITSDLLPECHVTLCRSKGKNFWLITEFKPLRSIYLSIQNAQVNIDELLDIWDTLGLDSAVSAFMNSINVSNFKNNNSKEGSNINENGVLSKENNPGVLESSQEKHEQYIVGLGEKLPQNTKKVIDQHRQYDTGTDSSIIDVDDVDWDVLEYSI

SEQ ID NO: 82 - protein, 573 aa, unidentified
  source 1..573: note = Related to JAGCXD010000267.1; note = Paludibacteraceae bacterium
MKTVKHLAVLLNKMKCDEFGSRKHPITAKQLLHFSTPKIALKRYKTFQIRKKSGGVREINAPCYQLSIILYFLNQLLKAIFTPNECVNGFTEGRSVVTNAQRHIGHHYVFNIDLKDFFPSIPQPRVWARLQLPPFNFSQEIANVVAGLCCHPNADGTMNVLPQGAATSPLLTNAICDTLDRRMRGVAKRFGLHYSRYADDMTFSSMHNVYQDGSDFRLELKRIIEEQGFKMNEKKTRLLRDGQRQEVTGLTVNSSVNVSRKYIKDLRWILHIWETEGYAMAYSRFYPKYKKEKGYIKKGEPVMENVIGGKLNYLRMVRGDNNAAYLKLQARYDKLQQLVFVDNETDKGESYIYVQPYSIADFCNDFATSISLEVSTRKNLIGKCDLFGIEKIIAISKSTQRKLCPNLDSKEPGDIISSELLTKCHVTLCRSKGRNFWLITEFLPHRSKCLSIQNAQVDIDELLEIWDELGVEAAIKAFTDSFVADCVNLKTTVEPKDGPASKNTNAVVQVSGINPTDIERLLAMAGQAEQDPISFAEPISADDWDELNMGTDVDDVDFDDLNDIDKDNPIASI

SEQ ID NO: 83 - protein, 568 aa, unidentified
  source 1..568: note = Related to NZ_CP033459.1; note = Pseudoprevotella muciniphila
MEKAEIRDKAMVMKTTKNLARLLNTIKQEEFGSKRYKITPRQLYHFAYTNIAPNRYKTFHIHKKSGGLREINAPCYQLGIILYFLNKVFKSLYTPSSSVTGFTEGRSVYDNAKMHVGHHYVFNIDLKDFFPSISQGRVWTRLQLPPFNFTQEIANVVAGLCCHKNAGSTLNVLPQGAATSPILTNAVCDKLDRRMRGVAKRFGLHYSRYADDMTFSSMHNVYQEGSEFRCEVKRIIEEQGFQMNDAKTRLLRDGVRQEVTGLTVNSVVNVSRKYISDLRWIIRVWEKEGYAKAYSKFYPKYKKEKGYIKKGEPIMENVIGGKLNYLKMIRGENNPAYKKLQERYNRLQQVVYVDNETDKGTSYVYVQSYTMKEFQKYFATTVTLEVSAKGKLVGKCLLAGMEKIIPISLSTQKKLCPDLESKKSGEQVISKMLTKCHVTLCRAKGKNFWLITKYEPKRSKCFSIQNTKIDIDTLLNIWEQYGTEGAVDVFQQSIYNGQRISKEGIDGLILNFILESKYPKLDTNKTQKPQKSESETLSEEEMAQLSEFADLIDSSDIDELPFTIQLNP

SEQ ID NO: 84 - protein, 569 aa, unidentified
  source 1..569: note = Related to JAGCXD010000191.1; note = Paludibacteraceae bacterium
MEKNEIKYRLKNVKNLEDFAKLLNDVKIDEFKTAKYKITEKQLLHFCNPKTVPNRYKAFYIKKKSGGLREINAPCYQLGTILYILNIVFKAVYTPSESAMGFTEERSVVTNATFHIGHHYVFNIDLENFFPSIPQARVWKRIQHPPFNFPKEVANVVAGLCCHTNADKTKNVLPQGAATSPLLTNAICDTLDRRMRGVAKYYGLHYSRYADDMTFSSMHNVFEEGGDFRLEIKRIIEDQGFKINDKKTRLQRDNERQEVTGLTVNQRVNVSRKYVHDIRWILHCWEKDGYGKAYALFYDYYKRTKGYIKKGEPVMENVIGGKLNYMRMVKGENNATYRKLLERFLKLQGLVYVDTETDKGMSYIYVYSYPVSEFNALFKTDLSLEVSAKNKLIGKFQIEQRDKVLAISKRTQDYLCKDIAQKQPGEEVKTERLTSCFVTLCRAKGKNFWLLTKSEMKRSKCLSLLNAHIDIDKLLDIWEKRDINEASEALNYAITEGKPILTFEERMFENLNLSGFGILETVKGKSHSKSVSFESIADQLSKFESLENIEELLMENDLDDSLDIGEFKD

SEQ ID NO: 85 - protein, 530 aa, unidentified
  source 1..530: note = Related to FR900399.1; note = Prevotella sp.
MKLLNEIKLHEFGTNKHPITVKQLMHFSNAKLGDKRYTVFSIKKKSGGLREISKPCYQLKCILYVLNIFLRSLYTPRECVMGFTTGRSVVGNAAVHAAHHYVFNIDLKDFFPSIPQARVWARLQLKPFYFSKEVASIIAGLCCNRNSEGKNVLPQGAATSPLLTNAICDKLDRRMCGVAKRFGLHYSRYADDMTFSSMHNVYKDDSDFRKEIKRIIEDQGFTMNDKKTRLLRDGRRQEVTGLTVNSKVNVSRKYMQDLRWYISMWEKEGYAKAYSRFYISYKKEKGYIKKGEPVMENVIGGKLNYLRMVRGASDAAYQKLQQRFDKLQELVFVDNQTDKGAQFVYVQPYTYKEFTSLFNTDIQLEVSAGNKLVGKCTIDGIDKFISIVKAAQRQLCPTLDGRKAGDIVESSGLSKCYIALCRSKGKNFWLMSLKPLRRSKTLSIQNAKVNVDDLFALWNNEGFEKAAAAFDDFVNKSKAIPECKEKPKKEYLDGNNTLDIQSENNIVERSTSGCNFSEDDLLAAGADVDF

SEQ ID NO: 86 - protein, 955 aa, unidentified
  source 1..955: note = Related to JAFPVK010000006.1; note = Bacteroidales bacterium
MKKGNDILIPPAYFLNDYKEGFYIERPERDWSQCELWKNLPFVLEVGDNTIATIVKGADKRRLKYVYVHIYQSTNDGRWFLSPTWSDKILTEYPFQEVKTQEEIESRIAILKEKVKKLNEEQEQEIKLPIDEFIKKHISEIDTTRKLALFITKLMKTLFSEKHFVTEKQLLYFSTPKAGKRYKTFKIRKKNGGLREINAPVHHLDKILFVLNIIFKSLYTPNNAVMGFTEGKSIVDNAARHTGQHYVFNIDLKDFFTSIPQARVWGRIQCAPFNFSRAVANVVAGLCCATNSETGKNVLPQGAPTSPLLTNAICDRLDRQLTALSKKYGLHYSRYADDITFSSMHNVYQEDSDFRKKLKTIIEDQNFCINDKKTRLLRTGQRQEVTGLTVNSKVNVTRKYVRDIRYILHLWESKGYAFAYSKFYKFYKTEKGYIKKGEPVMENVIGGKLNYLRMIKGAGNECYQKLLQCYNKLQQIIYVDNNTDKGHNYVYVQQYTLTDFENDFKTKITLQISDDEKLVGKCNLFGMDKTISISHKTQEELCPIISHLKVGDTFTSELLKNCFVTLCRQKGKNFWLITHKELDRSRCLSIQNAQIESEKLLKEWEQKGFEFVVKQFQTEILKKSDVPDYVSERDIKEFIYFVTHSKNFDRKQKLQRDSLLARDMAKRKAQPQEFKPMSVSYTANFLANFNRPDGFKYLTHDFDTESNMTLPDLREQSYKLLESEKGKIPDSLYVLIYAYLSGKTWRDAFGDNNNISINDKKWIQWSKENDNAHPITNSDFESEILKFKKAIRIVPPLLQTIVDKICEKYELHVTTKKLDKADFYTNTYILSNVLDRILQMMKRRNENVDYQRDVEVSYKREITNDVVYKKIIILQKDSFPENTFEDVSTRMNNNTEAGDLGAIRKILNGYCYWSIETKWDDKSLRWNILSDDDAPETEPIEDTLAVGFRHILTFM

SEQ ID NO: 87 - protein, 1037 aa, unidentified
  source 1..1037: note = Related to JAFYAR010000035.1; note = Bacteroidales bacterium
MDKNKYITIKNAVFDNYNEDCFFFEIPSMDLSNANSWHHPFLLYDGTNIYSILRGADKSKLRFAYCYIHQSKKSGQFFFNISLTDKIIQKYNCKKISTKDEFETLKEQLKQKVKLLNKEYSQDVLPLDEFIKKNINSLNNTRDLAFFLTKIMKVIFSENHFVTENQLKYFCSPNIPNRYKTFKIQKKSGGLREINAPTNRLNKILCALNIVFKTIYTPHNAVSGFTQGKSIADNAIKHIGQNYVFNIDLKDFFTSIPQKRIWGRLHVHPFNLRGQVANVVAGLCCCKNSETGENVLPQGAPTSPLLTNAVCDKLDKQLFKLSKKYGLHYSRYADDITFSSMHNVYQEDSDFRRELKIIIEGQNFCINDKKTRLLRSGQRQEVTGLIVNSKTNVTRKYVRDLRYILHVWETKGYAVAYSIFYRFYKKEKGYIKKGEPVMENVIGGKLNYLRMIKGTSNECYQKLAQQFDRLQQIIYVDEDTDNSKQYVFVQSYTINEFEHLFNTKITLQISARKKLVGKCELYGSEKIIPISHLTQDELCPEITKFHVGDIVKNEKLDSFYITLCRQKGKNFWLIINKELIRSRCLSINDIIIDTENFFHLWETEGFIIVVKLFQFVLNKYGNFDTEKVVNFINDLSKRNEISKKKRLTKKRKLQIEEALKDDSFKKIKETEIQEFVYFITHYKQFTYKQKMYVNRLLTRDLATKYIEKTEIVIDDGKHRCGVRCEYISPKKLQKFLFDFNQDEVLKYTCHPIDSEEVIEEINKQCKTDIYSVEAHSKLILERFESKFKNVKSSRNMQGLIFAYLKGPKEWSSNRVVINWSSNELISWSNENKGKIASPGKNIAAKQKNYGFKLPNPFVSSINGQRVATFTNLVIFFKTLFHIRRDNSLKNIITYNNKSIENVNITFSSNFNENIELFTDVDKLLQAYKNIIKICTDCSLEGEQPVFEISFYKEENNVYFCIHHINTKYGKTLDDSLKRIGESQSNLIKNQINGLCDLFIEADFGNKEYARINLWDESDELKAQNIAEMQGVKYILRF

SEQ ID NO: 88 - protein, 892 aa, unidentified
  source 1..892: note = Related to JAFZLC010000057.1; note = Paludibacteraceae bacterium
MNFCFPDKMITNCENNILENERNLKISLKEHFEPIENIEEQGVSNKDNTKSLSIDKLIKEHIFKTDSPNKLAWLISKIMKEVISENYFVTEKQLKYLSTPKVSNRYKTFKIKKKSGGTREINAPTNRLNNILYSLNLIFKSLYSPHEAVCGFTEGRSIRDNALRHVGHHYVFNIDLKDFFTSIPQARIWARIQCAPFNFSPSVANVVAGLCCVYNEELGKNVLPQGAPTSPLLTNAICDKMDRKLAALAKKYGLHYSRYADDITFSSMHNVYQEESEFRKEMKNIIEGQGFCLNDKKTRLLKSGQRQEVTGLTVNSKVNVTRKYVKDLRCLLHIWETKGYNTAYSYFYPLYKKEKGHIKKGEPVMENVIGGKLNYLRMIKGESNACYQKLQQRYDKLQKIIYIDNNIDKDITFVYQQFVLQDFEKNFSTKISLQISPKEKLIGKCNIFGMEKMLSITLNTQKELCPNLNTLNVGDTVNSPILKDCYVSLCCQRGRNFWLISHKQLEGSKYLTIPYIKINPDILLKKWEETNLEYVAWKFYFAISNKIDISTLENSIQEFVYFVTHNKHFNNTQKLQVAKLLARDYQKSCEEQNDKLIYSQENKNNEGKIIEQQKIFDPIDTARFLSLFNEPTGLKYLTHDFDPDNCPETINELIEQTENVLKTKKRIPESLYALIENFSFGKKEWLDTFGKSHSSSIDKTDWIEWSENFHSHPINNPNFRNEIEIFRGTVRIDKGLLSKIIDVAAQNTALKIEKEKIDTADFYTNTYLLYLSIKRIFEMMNHRTEFPNVFVSYKRGHDENGAMLRKIIISQKGSFPQKTLQESIDRLNNHKEAGDFGAIKKYLNGYCFWSVETRWEGKSSRWNILRNANTPETEELDLESDGFTHILTFYLV

SEQ ID NO: 89 - protein, 649 aa, unidentified
  source 1..649: note = Related to JAAVFW010000009.1; note = Bacteroidales bacterium
MNLKDQNLINSDSKNKTKKRVLAHQFQGIFFNMGNSDLTEKRKKISTAEELAAVLDEIKQIEFASVRYSISVKMLRHFSSDKITPKRFRTFHIRKKSGGLREIKAPCKQLDVILTCVNILLKSIYEPSDVAMGFAPGRSVLNNAQVHVGHNYVFNIDLKDFFPSIPQARVWKRLQLAPFNFSQEIANILAGLCCSYDANVNANVLPQGSPASPLLTNTICDKLDRRMKGVAKRFGLHYSRYADDMTFSSMHNVYQAGSEFRLEIQRIISEQGFRMNDSKTRLQKRGFRQEVTGLTVNDIANVSRKYISDLRWMLHVWEKEGYAKAYALFYPKYKHEKEYIKKGEPVMENVIGGKLNYLRIVRGENNPAYRKLQARYNALQELVFVDNETDKSKSYVYVQPYALADFQELFNTTISLTVTREKKLVGKCIIDNREKTLSISKSTQKTLCPNLGNLNTGELVNSEELAECYVTLCRHKGKNFWLITKFEPKRSRCLSIQNLKITPDEILDYWDRYGLEKTIEDLTQFIQYADPEDSFKDWRLLADFEHTIDRGKFKISKKDLIVFFLKNKNVTSLHRKKAMQLMIDSIPINTDSENIDIEKLLDIWEEKGLDEAVLAWKEMSRKKKSKKKNPDPDPIVNDDAPQFDLVFDW

SEQ ID NO: 90 - protein, 650 aa, unidentified
  source 1..650: note = Related to JAAVDW010000016.1; note = Bacteroides sp.
MEKLDLTEKLKNINTAEQLATVLDEIKQIEFGSVRYSISVKMLRHFSSDTIAPKRFRTFHIRKKSRGLREIKAPCKQLDVILTCVNILLKSIYEPSDVVMGFTSGRSVLNNAQVHIGHNYVFNIDLKDFFPSIPQARVWKRLQLAPFNFSQEIANILAGLCCSYDANVKANVLPQGSPASPLLTNAICDKLDRRMKGVAKRFGLHYSRYADDMTFSSMHNVYQEGSEFRLEIQRIVSDQGFRMNDSKTRLQKTGSRQEVTGLTVNAIANVSRKYLSDLRWILHVWEKEGYAKAYAIFYPKYKDEKGYIKKGEPVMENVISGKLNYLRMVRGENNPAYRKLQARYDSLQELVFVDNETDKSKSYVYVQPYTVVDFEELFKTKLTLTVTRDKKLVGKCEIDNREKTLAISKTTQKLLCDNLDNLNAGDIVHSEELSECYVTLCRHKGKNFWLITKFEPKRSRCLSIQNLRIAPEEILDYWEKYGIEKTTEKLVLFVQFANPGDSLKDWNPSENSEHTIDRGSFKISKDDLIVFFLKNKNVTSLQRKKAMQLMIDSIPVNRYSENIDIEKLLDIWEEEGLDAAVLAWKEMSKINKSKPISHKKKANTKNQSSQDTFLEEIGISEEELASIQQEMAKCGGKPIGKPIAGSYSLV

SEQ ID NO: 91 - protein, 661 aa, unidentified
  source 1..661: note = Related to JAAVCY010000011.1; note = Bacteroides sp.
MENSNLTEKLKYISTAQELAVVLDEIKQIEFGSVRYSISVNMLKHFSSDTIAPKRFRTFHIRKKSGGLREIKAPCKQLEVILTCVNILLKTIYKPSDVAMGFTSGRSVLNNAQVHVGHNYVFNIDLKDFFPSIPQARVWKRLQLAPFNFSQEIANILAGLCCSYDPNVNANVLPQGSPASPLLTNAICDKLDRRMKGVAKRFGLHYSRYADDMTFSSMHNVYQEGSKFRIEIQRIISEQGFYMNERKTRLQKTGSRQEVTGLTVNAIANVSHKYISDLRWILHVWEKEGYAKAYAMFYPKYKHEKGYIKKGEPVMENVIGGKLNYLRMVRGENNPAYRKLQTRYDALQELVFVDNETDKSKSYVYVQPYTLVDFQELFSTTISLAVTREKKLVGKCVIDNREKTLAISKSTQKSLCPNLDNLNAGDLVISEELAKCYVTLCRHKGKNFWLITKFEPKRSCCLSIQNLRIAPEDILDYWEKYGIEKTVEELTLFVQFANSGDSLQNWNHSENFEQTIDRGGFNISKNDIIDFFLKNKNVTSLHRKKAMQLMIDSIPVNTDSENIDIVKLLDIWEEKGLDAAVLAWKEMSKTKKLKPNSTKKKATERDRSSQNTFLKEIGISVEDLAALQQEIGEGGGTPIDLDIDWDDIPFADDDSEIIGEL

SEQ ID NO: 92 - protein, 657 aa, unidentified
  source 1..657: note = Related to MNQI01000006.1; note = Bacteroidales bacterium 43_36
MNKTDILEQLKTMKTVEDLAVLLDAIKQDEFGSVRYSISAPMLKHFSSDKIAPKRFRVFHIRKKSGGEREIKAPCQQLYVILTCLNVMLKACYEPSDAAMGFTSGKSVLNNAQVHVGHNYVFNIDLKDFFPSIPQARVWKRLQLSPFNLSQDVANVLAGLCCAFDAEAGHNVLPQGSPASPLLTNSICDKLDRRMKGVAKRFGLHYSRYADDMTFSSMHNVYQDGSEFRQEILRIIEEQGFCMNDKKTRLQKKGARQEVTGLTVNAVANVSHKYISDLRWILHVWEKDGYAKAYALFYPKYKHEKGYIKKGEPVMENVIGGKLDYLRMVRGENNPAYQRLQARYYALQQLVFVDNETDKSNSYVYVQPYSMPEFHELFHTEVKLVITREGKLVGKCEIDGREKTLAISKSTQKSLCPDIESMHTGEIITSDELAKCFVTLCRNKGKNFWLITKFEPKRSRCLSIQNLNVSPEDILTLWEKEGLASTVEELTLYIQYANPTDSILSWNPLADSKNTIDRGSFNFTKEDIIAFFLKNKNVTASHRKRAMQLMMANIHEQSDGDGINVVELLNIWEKDGLDAAVKAWKESTNKQVQQKTKAKKSKSNSASKFTRETGFSKEAFGTFRQEIALDGGTPVEIDIDWDDIPFDIDDSGVIGGL

SEQ ID NO: 93 - protein, 488 aa, unidentified
  source 1..488: note = Related to JAAVFD010000014.1; note = Barnesiella sp.
MDKLVVIEQLKKMKTVKDVAVILDTIKRYEFGSISYNISEKMLKHFSSDTIARKRFRTFYIRKKSGGFREIKAPCQQLQVILTCLNILFKSIYEPSDVAMGFTSGRSVLNNAQIHVGFNYVFNIDLKDFFPSISQARVWKRLQLPPFNFSLEIANVLAGLCCTYDESLKLNVLPQGSPTSPLLTNAICDKLDRRMKGVAKRFGIHYSRYADDMTFSSMHNVYQEDGDFRVEISRIIDEQGFHINESKTRLQKKDTRQEVTGLTVNAVANVSRKYISDLRWILAIWEKDGYDKAQALFNPKYQQEKGYIKKCEPALVNVISGKLNYLRMIRGESNFAYQKLAKRFEVLQEIIFIHHKNDVKNFRINTKFELKYSRCLRNQNLKVSLDGLLDIWEKGGIESAVEELAESGYMSITSRDSIVSGNEHLLNYFLNNPKLTMTHRKRLIRLLLAYIPSKPLKTDIEQLLSIWEKEGLDAAVREWKKLKDNKAN

SEQ ID NO: 94 - protein, 523 aa, unidentified
  source 1..523: note = Related to JAFUKZ010000065.1; note = Muribaculaceae bacterium
MKKLEIRNRLIAIKTVEDLAELLNEIKKDEFGTNRYEITDKQLKFYSSDKYTSKRYRTFHIRKKSGGLREIKAPCYQLNIILRILNIALGAVFEPDSVAMGFAPGRSVVNNAQKHVGHNYVFNIDLKDFFPSIPQARVWKRLQLAPFNFSQEIANVVAGLCCSYNEERGQNVLPQGAPTSPLLTNAICCNLDRKMKGLAKRFGLHYSRYADDMTFSSMHNVYQEGGEFRKELLKIISEQGFTINDKKTRLLKTGCRQEVTGLTVNAIANVSRKYIQELRWILNAWEKYGYAKAYALFYPRYKSEKGYIKKGEPVMENVIGGKLDYMRMVRGANNVAYKRLQTRFDKLQQVVFIGSEEEQTQAKKFMYVQPYTMAEFKEYFHTEVSLTVTKNGKLVGKCTIAEMEKTLAISHATQDYLCPDLKQHKEGDCVESKKLEKCNVILCRAKGKNYWMITNKDHKRDKILSIQNVKINPDDLLDLWEKEGYKAAAEEITIDNRKGMPVLLTLPGLELERSFDIKRKDNE

SEQ ID NO: 95 - protein, 466 aa, unidentified
  source 1..466: note = Related to JAFYUK010000058.1; note = Muribaculaceae bacterium
MEKLEIRNSLIAIKSVEDLAELLNNIKNDKFKTSRHKITDKQLKYYSNNKYAPKRYRTFHIRKKNGGLREIKAPCYQLNIILRMLNIAFESVFEPDSVAMGFAPGRSVVNNAQMHIRHNYVFNLDLKDFFLSIPQARVWKRLQLAPFNFSLEIANVVAGLCCSYNEERDQNVLPQGAPTSPLLTNAICGNLDRKMKGLAKRFGLHYSRYADDMTFSSMHNVYKEGGEFRTELLKIISEQGFTVNDKKTRLHKAEHRQEVTGLTVNTKANVSRKYIQELRWILNVWDKYGYAKAYALFYPRYKSEMGHIKKGEPVMENVIGGKLDYLRMVRGATNPAYKKLQERFDKLQQVVFLETEEEQPKTQKFMYVQPYTMTEFKEYFLTEVSLIVTKKGKLVGKCTIAGMEKNLSISHAAQDFLCPKLNLCKEGDSVVNEKLNNCYVILCRAKGKNYWMIGLIGQKRNILKMK

SEQ ID NO: 96 - protein, 529 aa, unidentified
  source 1..529: note = Related to JAAVBM010000118.1; note = unidentified bacterium
MDNNTIIDRYKKIHDAGAFLGLLNAMKIEEYGEKTEKFSTRDLKVFIWPNNPERYSTFTIPKKSGGVRHISKPCPKLKYMLRYVKQFLQAFYNPMPCVQGFTTGRSVVGNAGMHLHQNYVYNVDLSDFFPSISQGRVWKRLQLPPYNFPVGLCNIIAGLACAPYETPEGVKYNALPQGAPTSPILSNIVCEQLDRRLTGLAKRFGLHYSRYADDMTFSSMHNVYQDNSEFIRELQRLITQQGFRFNEKKTRLQIRGSRQEVTGLTVGTKVNVSRRYIKELRSVLHVWEKFGYSEAFAWFYSRYKRDKGSLKKGEPVLEQVIEGKLNYLKMVKGNSDSTYKTLAGRIEACMTALDEERPKHGKRNVLVSYELKDFSTRFSNVSMDFSTSPDGIVSGSLTVDSVATPIYFDKIFRKLSSANKAKVLKAISQDTSDWFISEIEDLDKRYRNKFNHFWLISRYRPHQSTTVDKSEITRLLLELWEKDGLDAAVDEWKKLIKYDPSQKSESMQATSLQNPQNVLDSFFYEHLNK

SEQ ID NO: 97 - protein, 486 aa, unidentified
  source 1..486: note = Related to JABUTH010000081.1; note = Veillonella sp.
MERTEIANRVKAMISQEDLLQLINELKAEDLGDNAYPFSMRQLRYFCNPNNESRRYIHFDIKKKSGKEPRHITAPQKTLKMILTYLNQILQAVYEPLPCVMGFVSNRSVADNASKHIGKLYVYNIDLKDFFPSIDQARIWKKMQCPPFNFCNQEDPNAPQRRVLADMIAGFCCMKKPMEDGEIKQRYVLPQGSPCSPVLTNIICERMDRRLTGLAIRFGATYTRYADDMTFSSMHNIYQDDSEFIKELHRIISDQNFRINPAKTRLCTTKMRQEVTGLTVNEKANVSRKYLKELRRNLHNWEYYGYNEAYKRFYARYKMEVGHKKHGEPVMENVLGGKLLYLKMVKGESDPTYQKLQKRFDILVEAKEGRMSQYADSKFRYIVTYRIAEFEDIISTKIQIGVSDNGYKYAFYENGSKRTYISLSKNIGKEGIHTLFISLCENQKGKRFYLIHRAIEEKAKVETKQTLHLDAMLDKLLETNFDIDSI

SEQ ID NO: 98 - protein, 529 aa, unidentified
  source 1..529: note = Related to JAFZQM010000005.1; note = Bacteroidales bacterium
MTPNEIANEAKSLQTPTDLLELINKIRLSEDAQTHRALSLKELALYCNPDSSKVKRFRTFFIPKKSGGKREISAPVSKLDAFLWPLDLILKSVYEPKSCVMGFTYGRSIVDNAKAHLGQNYVLNLDLENFFPSITQGRVWKRLQVAPYNFAPKVASVIAGLCSIKKVNDDGETRYVLPQGAPTSPVLTNIICERLDRRLLGVAKRFNLRYTRYADDITFSSMHNALKIGGEAFQEIKHVIEEQGFAINSKKTRLQKVGERQEVTGLILSEKVNTPRSYVRDLDQILYVWDKWGYEKAYARMMLVKGEKAYRKNGLTTLERVIGGKLDYLKMVKGENDKVYLKYLSLFNRLKKQGAHSDDSLNYVATYTVASFQELFKTDLIFKEEGEHIRASFRLNDVFHPVRITSFASKAISDKGKEKESLYISLCEDENLFWLIHIREPKAAPSTDLILPIKKIIKIWEEKGLAAAIKAEEEARKKQSRAEETKKPTLRAMMMAKYFPELAEIEGEFKDLPSLMDMINHLEEDGETN

SEQ ID NO: 99 - protein, 584 aa, unidentified
  source 1..584: note = Related to JAFXVO010000013.1; note = Paludibacteraceae bacterium
MDENEIKDRVGKLRTKEDLLDLLNSLKVAEYGEGVHLFTMKQLNFYCNPKYGKRYQSFRIPKKKKGEFRTISAPVAALKSIQHFINVILSVLYKPTDVVTGFVKNKSVVDNALRHVGMNYVLNIDLENFFPSIPQVRIWWLLQQKPYGFSKEIANVIAGLCAIKQPKKEVESPKNAIEDYDYVLPQGSPTSPILSNISCEHLDHKLQKLARSFGMNYSRYADDITFSSEEYVYSRKGKFWTQLRRIISEHKFSINENKTRLLRKGVRQEVTGLTVNKTANVSKKYIKEIRRHLNTWEKYGYAIAFKNFYPIYKLEKGHVKKGEPDLMNVLSGKLLYLKMVRGESDPVYSKLNTRFKNLTTGEDSSIVFGSMSYHNTQKVTEFEKTMDTEIKINRTQGTLKSYFFETKSIATKKRRKKENSPSEPQVTKVDVRISENANFEHKKDLFISLCRNEKGETFYLMHKELFSTDEKNERKLELDKMLSALVRGGKVHLEVLEKDIVNEEKPIYEDTMSVVEFEKKHRCKVELSEDKKYAVAKYKVKRENIKISPKVNPEEYREHSISKYTKGSDSSYYLIHRKPRTDKK

SEQ ID NO: 100 - protein, 445 aa, unidentified
  source 1..445: note = Related to JAFXDI010000014.1; note = Bacteroidales bacterium
MEIDIVSSVKKLRTKSDLLRLINRIKEIKFVEVGLQKKFSPVTIKQLEYYSDPNNTYRRYRKFSIPKKSGELREIHAPRNANYKVILRTLNEILNTVYEPSEYTMGFVRGKSVVTNALSHVGKNYVYNIDLKDFFPSIDYLRIAKRLQLSPFCFPRQIAIIIAGLASIRTDEGDAVLPQGSPLSPILTNIICDKLDRKLSRLAEKFGLSYSRYADDITFSSYHNVYHQDGEFCKKLKSIIEKQGFKINENKTRLQKRGQRQLVTGIKVNTETNVDRSYINQIRNLLYIWKRYGYSVAEQRYYEWRLKNKPLSYKRTSLASYLNGKIQYLRAVKASGYSTAYIHFLFEYEYLYKETFKKKKRYGINYIETTPLEQFEKKLGVQIDINKKVDADGQSHRFSVFEYKFIPTFISVSKDITPEDETNKSKLSISRCIDQRKKEFWLIHY

SEQ ID NO: 101 - protein, 321 aa, unidentified
  source 1..321: note = Related to JAGBVR010000009.1; note = Bacteroidales bacterium
MDIKDTNTLVSTIETIAPYNVGWALTDRVGDINNLASARLRTLSYKEFDIPKKSGGTRRITAPVGKLKDVLKCLSVILTPYYEPGGCVHGFTTQRSVASNASVHMGKNYVLNIDLKDFFPSITATRVQKALQKHGLNSEVAHLISRLTTLPMAIEDSQTLRNVLPQGSPCSPLLSNMVCSDLDRKLMGLARRFRVDYTRYADDMTFSSNHHVYAAGGEFFAELRSIIEDCGFTINERKTRLQKRGSRQEVTGVIVNEKTNAHRSFRKNLRAAVFAAETFGCTRKEYNSIMGKISYLSMLLNEERGCIYKYKAIMSKVMIKK

SEQ ID NO: 102 - protein, 321 aa, unidentified
  source 1..321: note = Related to JAFYOT010000249.1; note = Bacteroidales bacterium
MELKDTDALTRAIEEIAPYCAGWALTEKVGDINRLASARHRILAYKEFKIPKKSGGTRKITAPTGKLKGVLKCLSQILTTYYEPHESAHGFMPGRSVATNADVHVGKNYVLNIDLKDFFQSISSQRITRALTRHGLSQDVAELISRLATIPTVKEGSDISIHALPQGSPCSPILSNMVCVDLDKRLSGLAKQFRVDYTRYADDMTFSSNHNVYSADGRFFEALRSIVVECGFVLNEKKTRLQKRGSRQEVTGILVNTKRNSHRSFRKNLRAAVFSAETNGCTHREYMRIMGRISYLSMLRGKEDPCVKRMQAIMSKVAVTK

SEQ ID NO: 103 - protein, 338 aa, unidentified
  source 1..338: note = Related to JABUTR010000154.1; note = Bacteroidales bacterium
MSFTVPITVPLPETLPQLHEEMARIAVSTSGWAVHNPGGREFLSKAESRSFRQRFYREFSIPKKSGGRRRITAPTGYLKGAQKAIAVLLERLYEAPDMVNGFTGDRSVLTNAEAHVGRNYVFNTDLRDFFPSITAGMVRKTLEKEGVSPEVARYISVVCTITTGDGDLSEDVLPQGSPASPILSNMVCLQMDRHLDWLARRYGLTYTRYADDITFSSMHSVYGKNSPFLKGLKEIIEEYGFSINEEKTRLQKKGSRQEVTGLIVSDRVNVCRRYLKNLRAEVFRMEMQGFTIEEYRRVMGKIAFVGMVRGREDPLYRKLHNRIRSIKRHPEGFLAQPR

SEQ ID NO: 104 - protein, 338 aa, unidentified
  source 1..338: note = Related to JAFXUH010000085.1; note = Candidatus Methanomethylophilaceae archaeon
MKAMKPFKNIPDTLEQMCERIMIRLPLVCRKPQLLGMDDILPYRRRKVRMNSYHEFGIPKRSGGMRVIQAPCEELNYIQKAVNSLLREQWTPADEVCGFVQGRSVGMGAAQHVGMHYVFNTDLHDFFPSITAPKVFEMLMRELGMKPAVARLICDLCTIPVKEGYDVLPQGSPASPILSNIACARMDRRLKGLAECFGLTYTRYADDITFSAPYNAFKEGGTFRICLERIIREEGFSLNEAKTRLQKRGGRQEVTGLTVNEKVNVPRKWLKGLRACIHRMEVDGFSPEEMDAARGKVAWLRHARGGLDPLSQKMVMRLNALEVALYFDELPDEDGSKI

SEQ ID NO: 105 - protein, 328 aa, unidentified
  source 1..328: note = Related to JAFUHQ010000138.1; note = Bacteroidales bacterium
MNAFLYNLGPESLPVGTPDELCMSIMLALPAVCRRTLLPGTGSIRKFRHPARRTAAYRRFEIPKKSGGVRTIMAPTGDLKDILTTVNSLLSLYWEPKHSYVHGFTSGRSVVSGAEPHVGKNYVFNLDLKDFFPSITKQMVARGLERAGFDRRTARFLSEICTVPGDDGREILPQGAPTSPLLSNISCMMLDLRLAGLAAEFSLDYTRYADDMTFSAQYNAFGPRGDFRSLMETVIREEGFRINEKKTRLQKRGSRQEVTGLTVCRKVNVARKWIKDLRAQIHRMETVGFTPAEYRSVCGKVGWIRQVRGAVPMYRKLRARLRALPLPA

SEQ ID NO: 106 - protein, 337 aa, unidentified
  source 1..337: note = Related to JAFYCU010000158.1; note = Muribaculaceae bacterium
MTEDLRDYLRGCISTASIADMCVSINEIGPFVSGLSISNPVSVSLLLYYTDVRVRRAAYHEFQIPKKSGGFRNILSPCGELKEIMHTLAFILKELYVATPPAMAYIAGKSIVDNACCHLGRNYVFNVDLSDFFPSITAMMVEHHLVKIGVSPLVATVIATLCTYPTIIDHHVVNIVPQGAPTSPVISNICATTLDHRLSGLAKRFHLSYTRYADDITFSSNHNVYHPDGDFMIELCRIIDECHFTINRNKTHLQKRGDRQMVTGLLVCEKPNVGRKFIKDLRAHIHKIKFEEEPTLHDINVVRGKLNFLRMVKGAEDTTYLSHIKKLNMAIKGKHFV

SEQ ID NO: 107 - protein, 342 aa, unidentified
  source 1..342: note = Related to JAFRPT010000056.1; note = Muribaculaceae bacterium
MNAELREELRSHINVDTIEGLCKSINEIGPYVSFLGMDSSISVSTLKYFTQVSARRDAYRQFHIPKKTGGVRTITAPDGQLKDIMFTLAFILSELYIPSPEAMAFVPQRSIVDNAQQHLCKNYVLNLDLCDFFTSITSYMVERGLCELGISPVVAQCLSTICTYPEFKENRVQNVVPQGAPTSPVISNICARRLDRRLSGLARSFHLSYTRYADDITFSSNHNVYHQDGAFMAELYRIITDCHFAVNEKKTRLQKRGARQEVTGLSVSEKPNVSRKHVKNLRALIHKISLEGAPEMHDINVARGKLNFLRMVKGETDSTYIRLIIKLNKAVAGKHFADSIKA

SEQ ID NO: 108 - protein, 341 aa, unidentified
  source 1..341: note = Related to JAFUDZ010000100.1; note = Muribaculaceae bacterium
MSLQEYLIDHICLDTRESLCESINEIGPYVSGLSIDNTITVKHLRRHANARIRLGCYHEFRIPKKSGGFRTITAPDGQLKHIMTALAFILTYIYHPTPTAMAFVPCRSIVDNARMHVNHNYVFNIDLCDFFSSITADMIEYSLIRQGINSMVARDISTICCYPVSDGTHTRNILPQGAPTSPVLSNICAQTLDQRLTGLAQRFHLTYTRYADDITFSSDHNVYHDNGAFIQELRAIIAECHFVINTKKTRLQKRGSRQEVTGLTVNERPNVSRRYIKNLRAMIHHIELDEHPSCHAINVARGKLNFLRMVKGENDSTYIRLVIKLNLAVRGKHFASDTPTV

SEQ ID NO: 109 - protein, 338 aa, unidentified
  source 1..338: note = Related to JAFYQJ010000016.1; note = Paludibacteraceae bacterium
MDIDVSSRDALYNSIYKVMPYVSNTLLASPSVLYKKIRFYNNVKNRLSAYHEFLIPQKTGGTRKILAPNSDLKSLMSAIAFILNTMYMPSDSVMGFVKQRSVLTNAKKHVGNNYVFNIDLSDFFPSITDSMIEAQLLKMNIPPLATRIISSVCTYPQKMEGGTYRQVLPQGSSASPILSNICCISLDKALEGLAKRFHLTYSRYADDITFSSNHSVYQEDGEFMTELQKIIATHHFFINPKKTRLQKRGTRQEVTGVSVNEKTNVSRKYVKNLRALIHQIALAKKLSTKKVNVARGKLNYLRMIKGVNDNTYKTLCIKLNLALKGKHFTPKKKRSYVK

SEQ ID NO: 110 - protein, 393 aa, unidentified
  source 1..393: note = Related to CP039547.1; note = Duncaniella sp.
MHSLVHSAHCRSLDHPAHTKVRPMFSLLSQIDKIMRDQIVKYLKDITIGNPKELFDVLNFIAPLIDGWSLTEPKSGRQIMRFASVKARQSAYVDFTIPKKSGGYRKISAPVKPLKAIQSAINILLQAIFVPDEHATGFVLNRSVKENALIHVGQTCIFNMDLENFFPSITKLMVRQALHRELGDRLQSNDVINIICRLCTVSDSEGVEVLPQGAPTSPVLSNIVLKSLDKDMSKLAERMECKYSRYADDITFSHSKSIRRMSPFWQSRLYNIIAKYGLKVNEKKTKTFVPGTRREVTGVVVSDKINVPRSYIKQLRVLLHLWEKYGYAQAQIIFTRDFCKGMEKNLVNVIDGKINYLEMIKGKDDPTYRKFKSRFSHLQWKEKQYSNQIQNAI

SEQ ID NO: 111 - protein, 359 aa, unidentified
  source 1..359: note = Related to JAAVDH010000018.1; note = Bacteroides sp.
MREQVAEYLKNVTISSRKQLFDALNFIAPLIDVWSLAAPKSGQQFLRFSSAKSRTTGYVDFTIPKKTGGVRKISAPVKPLKEVQSAINTLLQLIFIPDEHATGFVLGKSVKDNALIHVGQTCIFNTDLENFFPSITKKMVRRALHTELGHILNSNDVINTICRLCTVPNSDGIEVLPQGAPTSPILSNIVLAGLDRDMAKLADRMECKYSRYADDITLSHSKPVRKMSSYLQSKIHRIILKYGLKVNEIKTKTYVPGRRQEVTGVVVSSKINVARTYVKNLRILLHLWEKYGYIQAQLIFIRDFCHGKEKNLENVIDGKINYLEMIKGKDDSTYLKFKRRLKLLQYKERQKTTYTKRAI

SEQ ID NO: 112 - protein, 359 aa, unidentified
  source 1..359: note = Related to NZ_CP039393.1; note = Muribaculum gordoncarteri
MRTQIADYLKDLTIGNRKELFEVLNFIAPLVDCWSLAEPKSGKQIMRYASANARKSAYVEFSIPKKSGGQRTISAPIKPLKAIQSAINILLQSIFVPDNHATGFVLDRSVKDNALIHVGQTCIFNTDLENFFPSITKIMIRKALHRELGDKLQSKEVINIICRLCTVPNSSGIEVLPQGAPTSPALSNIVLKSFDKDMSKLAERMGCKYSRYADDITFSHSKSIRRMSLFWQSRIYNIIAGYGLKVNEKKTKTLVRGTRQEVTGVVVGDKINVPRSCVKHLRVLLHLWKKYGYTQAQIIFTRDFCKGKEKNLVNVIDGKINYLEMIKGKDDSTYRKLKSWFNRLQWKEKQRSNQMQKAI

SEQ ID NO: 113 - protein, 359 aa, unidentified
  source 1..359: note = Related to DVIH01000092.1; note = Candidatus Avibacteroides excrementipullorum
MLDQIADYFKDKTIGNRKDFFDALNFISPLIDGWGLCEPLSGRRILRFVTKKSRQNGYVDFTIPKKSGGVRKISAPVKPLKEIQSAINILLQSIFIPSDSAMGFVAGRNVMDNALIHVGQTCIFNTDIENFFPSITKIMVRKALQRELSNKLTSHDVINIICSLCTVPNNVGVEVLPQGAPSSPILSNIVLKSLDNEMSKLAGRAGFRYSRYADDMTFSHSKPIRRMNPFWKSRILNIIEQHGLKINDSKTKTFVRGIHQEVTGVIVSDKLNVSRQYVKQLRVLLHLWEKYGYEQAQTIFSRDFCKGGTKNLCNVIDGKINYLEMIKGKEDSTYCRFKQRLKTLIWKQKQLSTNKTASV

SEQ ID NO: 114 - protein, 339 aa, unidentified
  source 1..339: note = Related to JAEKDI010000013.1; note = Muribaculaceae bacterium
MTGISGNYIRRFLSKNSRRKAYKSFKIPKKSGGFRSISSPVNDLKDIQRAINALLLSIFEPSPYAMGFCRNRGVDTNAKIHIGQTCIFNTDLENFFPSITKQMVRKALHRELGDVISSNEAINYICSLCTVPNDEGIEVLPQGSPASPVLSNIVLKALDRKLALYAELWECRYTRYADDITFSHNSTVRKFSQFKQLRIRSIIEEFGLKINEKKTKVLVQGERLEVTGVTVSSNKANVARKYIKQLRTLMHLWDKYGYEQAQHIYVRDFCGGIEKSLTSVINGKINYLCMIKGKQDSTYRRFKSRYETAEKKRKALSKTKVVLYRRSRNWNKKSSPAHL

SEQ ID NO: 115 - protein, 321 aa, unidentified
  source 1..321: note = Related to NZ_NFHT01000005.1; note = Alistipes sp.
MTDRPERTVRHFLPARVRAASYVEFTIPKKTGGTRLICAPVQPLKAVQRALGTMLQTLFQPSDAAMGFVTDRSVATNARCHLHQNCVLNLDLENFFPSITKARVRRALERELADRIPSSEVRSLICSLCTIPNQSGIEVLPQGAPTSPVLSNIVLKGLDRRLAAFAGAHGYNYTRYADDITFSHDRPIRRFSPFFMERVRTIIEEYGLKINDRKTKVSVKGERLEVTGLTVGEKVNVPKNYIKRLRTLLHLWEHYGYEQARLIYSRDFSQGTGKSLKTVIYGKINYLAMVKGREDPTVVGYRNRFRRLVRIAKAEERTSIS

SEQ ID NO: 116 - protein, 322 aa, unidentified
  source 1..322: note = Related to DWXH01000006.1; note = Candidatus Alistipes merdigallinarum
MTERPERIVRRFLPARVRADSYVEFTIPKKAGGSRSICAPIQPLKKVQRALGTLLQALFQPSEEAMGFVAGRNIAANARCHLNQSCILNLDLENFFPSITKTLVRQALKRELADRIPSSEVRNLICRLCTIPNQSGIEVLPQGAPTSPVLSNIVLKGLDRRLSAFAEAHGYNYTRYADDITFSHNHPIRRFSPFFIEKIRSIIEEYGLKINDEKTKVSIKGERQEVTGLTVGEKVNVPRNYIKQLRTLLHLWEHYGYEQAQLIYDQDFCQGTGKSLKTVIYGKINYLAMVKGRDDSTVIGYRNRFRKLVRVTKAKEQASFTS

SEQ ID NO: 117 - protein, 351 aa, unidentified
  source 1..351: note = Related to JAAVDA010000014.1; note = Bacteroides sp.
MKESHIAEAAREYLGTGTVKSPRDLAVAICRCGELLDLWPLGELTLSHLRRLSTKAVRKECYRTFSIPKRSGGARQIAAPTGRLRDIQRAINLLLQARVGVMECATGFVCGRSVTDNALPHIGSHVVVNLDIENFFPSVTKRMVRESLKRETREWLESHEAVNMLCSLVSMPDGEKGEMLPQGAPSSPMISNIVLGRLDRRLAGFARERGYAYTRYADDLTLSGREIRKMSAADMKLIERIVAEEGFKLNRRKIKQQGAGHRQSVTGLTVNERINVSRDFVKNLRVCLHLWETRGYEEASGIYRRDFRGGEDVDFARAIKGKINYIAMVKGRRDPVFMAFSRRLRLLTGRK

SEQ ID NO: 118 - protein, 441 aa, unidentified
  source 1..441: note = Related to NZ_CP072358.1; note = Prevotella multiformis
MATRTINGREYTKADFENQLRYLNDAQELANLLNELKAPYIYSDFRGKQLSFFADTNNIRRRCKTFRLRKKHGGYREITAPKGRLHDVLHILNIVLQTYDEPTPWAYGFVCGRSVVDNARPHVGKRYILNLDLKNFFPTITRRQVADCLMAEPFGFSSLAAELVSGLATVRTDNGEEVLAQGFATSPTLSNFICREMDKEIAGVAAAQGVTFTRYADDLTFSSDADILRPQGELAQQVKTIVERYGFILNEAKTHLQRRGRRQEVTGLMVTEKVNVSRRYVREIRSLLYIWERYGYEDACQAAWKSYKQQHGKTKGHQHHVPLNKVLGGKLHYMKMVRGSDDPLYLRFASRYTSLQQRSKGDIKEVEYKAYMGKCLSKSGKDRVTRTTVLSNDNTSTRQRGVTSSNPYDPGKKNKRILNFIVMVIIFAAIILIKLFLKSRL

SEQ ID NO: 119 - protein, 441 aa, unidentified
  source 1..441: note = Related to CP023863.1; note = Prevotella jejuni
MATRIINGREYTKADFENKLCHLSDAQELAAMLNELKLPWYYSDFRGKQLSFLADTNNVQRRCKTFRLRKKHGGYREITAPKGGLRGILNALNILLQTYDEPTPWAYGFVCGRSVVDNARPHVGKRYILNLDLKDFFPTITRQQVADCLTAEPFGFSSLAAKLISGLATVRTKNNEEVLAQGFATSPTLSNFICREMDKEIASIATAQGITFTRYADDLTFSADTDILRPQGELVQQVKAIVERYGFRLNEEKTHLQRRGRRQEVTGLMVTEKVNVSRRYVREIRSLLYIWERYGYEDACQAAWKSYRQQHGKTKGHQHCVPLNAVLRGKLNYMKMVRGADDPLYQRFVSRYTSLQQRSKGDIKEVAYKAYMGKYLSISAKDRTTSANVLPNDNTSSRQLGATSSNPYDPRKKSKRILNFIVMVIILVAIILIKLFLKSLL

SEQ ID NO: 120 - protein, 330 aa, unidentified
  source 1..330: note = Related to NZ_BAKO01000003.1; note = Prevotella fusca
MATRTVNGREYTKADFENRLRYLNDAQELAKLLNELKAPYIYSDFRGKQLSFFADTNNIRRRCKTFRLRKKHGGYREITAPKGRLHDVLHILNIVLQTYDEPTPWAYGFVCGRSVVDNARPHVGKRYILNLDLKNFFPTITRRQVADCLMAEPFGFSSLAAELVSGLATVRTDNGEEVLAQGFATSPTLSNFICREMDKEIAGVAAAQGVTFTRYADDLTFSSDADILRPQGELAQQIKTIVERYGFILNEAKTHLQRRGRRQEVTGLMVTEKVNVSRRYVCEIRSLLYIWERYGYEDACQVRGRATSCSTERQRGIRTTYLLIKFWVVS

SEQ ID NO: 121 - protein, 440 aa, unidentified
  source 1..440: note = Related to NZ_CP072374.1; note = Prevotella denticola
MATRTVNGNEFTKTDFDSRLRWLNEPKELSALLNEVLDAFCFTKSRPAQLRFFANTYNTQRRCRTFRLRKKHGGYREIIAPKGKLRDILHALNIVLQTFDDPTPWAYGFVCGRSVVDNARPHVGKRYVLGLDLKDFFPSITRRQVADCLTTEPLGFSSVAADLVAGLASVRTDEGQEVLAQGFATSPTLSNFVCQEMDREIADVAAAQNITFTRYADDLTFSSDADILRPQGAFVQQIKTIVERHGFRLNEAKTHLQRRGRRQEVTGLMVTEKVNVSRRYVREVRSLLYIWERYGYENACKAAWKSYKLQHGKTKGHLHHVPLNRVLAGKLNYMKMIRGASDPLYQRLAGRYAALRDANRDGIMNVEYNAYMGEYVPNSHRRRPAGDDGLYTENTAGRHRRSGTRDIYSPERKGNRILKFILKVAMWAAIILAYLYFRSR

SEQ ID NO: 122 - protein, 437 aa, unidentified
  source 1..437: note = Related to FOHY01000003.1; note = Prevotella sp.
MTSKTFARTDFDRQLRQLSSPAELAALLNGVLPAFFYAICRPAQLRFFANTANIERRTRTFRLRKKHGGYREIIAPKGAFADISRVLNTVLQTYDEPTPWACGFVRGRSVVDNARPHVGKRYVLSLDLKDFFPSITRQQVADCLAAEPFGFSPGAVELVSGLCTARLDGQDVLAQGFATSPTLSNFVCRKMDEQLAELAGQQAVTYTRYADDLTFSSDADVLRPTGDFVQRVEDIVRSHGFELNGSKTHLQRRGRRQAVTGLMVTDKVNVARRYVRQVRSQLYIWERYGYAEACNAAWKHYRLQHGKTKGQGHFVNLDAVLRGKLNYLKMVRGAEDALYQRLQSRYDRLWAKDRSAIGHAVRKAYAENYEAKQGQHGRQSWLTVGSKPTSAPAEDRYRAGSIDNPLPAEGSRSGVKRILKIALWVAALAAVAYFLLH

SEQ ID NO: 123 - protein, 478 aa, unidentified
  source 1..478: note = Related to FNBQ01000003.1; note = Bacteroidales bacterium KHT7
MIRQKQNLKFDKETVDRQLKNLESAKQLAQILYDAVNDVRREPYWLRTNSKNGYLYDSMPLEWRSVSQLNYYVDTAKDDYNRLRIFNIPKRKGGFREIVAPKPAFRVRLKAILKILQSYEEATPWAYGFVQGRSVADNAALHTGKNFVLNIDLSNFFPSITREQVKQVLSAKPFEFSPFAVDFISGLCTYRKDGVDVLAQGFPTSPLLSNFVCRQMDEDIAKVAAENNVTFSRYADDITFSSDVNVFDFNGAFYNKIKEIISSYGFVINQKKVRLQSKTRHQEVTGIVVNKKLNVSRRYIREIRTLLFVWKKYGYEAACCCAYRNNRKKDYHKYYHSIEVSKFLRGKINYLGIVRGKDDSIYLRFKAQFDELYKNESDVMKSYSDMLEKHRLRRENNSECEEMSDKSCGVSTNDEAGNSVSANSSTDGNGYQTRIDRNSYLRDADDKERRKKDRRTIILICFAFLIIFRLLVFIFFKA

SEQ ID NO: 124 - protein, 401 aa, unidentified
  source 1..401: note = Related to NZ_BAIZ01000017.1; note = Prevotella shahii
MAQVNRDVDLKALVGNQLQYIYSAEELTNVLNTLASNVGVPSDFRRNQMLCFADTRNDYRRVKRYFMHKKHGGRRPIVAPHHSLMHMLQGFNVLLQQYNPPTPWCYGFVRGRSVVQNAQLHVGKRYILNVDIKDFFPSITRQMVEDVLTAAPLRCSTEAAQLLSGLCTVIEPVGDVLPQGFPTSPTLSNMVCRKMDEELAAAAQRIGATYSRYADDMTFSCDNDVLRTTGSFYLQVSTIVEKYGFRLNDRKTRLQRRGRRQQVTGIVVSHKVNVSREYARQIRSLLYMWERYGYWETAKAALHAYREQNGKTRRHGEYLTLYTVLRGRLNYMKMVKGETDPTYLKLWNKYNQLMLRDKPKRRRVLTALTRIDQRLQAPTIILANRNERVARVLWQSLWRLH

SEQ ID NO: 125 - protein, 412 aa, unidentified
  source 1..412: note = Related to NZ_HE999452.1; note = Prevotella sp.
MARNHRDVNLKALIGNQLQYIYSADELTNVLNTLAYNIGEHSGFRRNQMLCFADTTKDNRRAKRYRMHKKHGGTRAIVAPHQSLLYMLKGFNALLQQYYEPTTWCYGFVKGRSVVQNAQQHVGKRYILNIDIKDFFPSITRQMVEDVLLAEPLKCSTEAARLLSGLCTAAEPQGDVLPQGFPTSPTLSNMVCRKMDEELAAAAQRIGATYSRYADDMSFSSDKDVLRPTGSFYLQVSGIVEKYGFRLNDRKTRLQRRGRRQQVTGVVVSNKVNVAREYARQIRSLLYMWERYGYWETAKAALRGYCEQYGKTRGHGEYLTLYAVLRGRLNYMKMVKGGTDPTYLKLWNKYNQLMQRDTPKRRRGTYGTNAHRPEPSSTNDYLGEPQRKGCAGVVALFVVLTLAGLLACNLLA

SEQ ID NO: 126 - protein, 412 aa, unidentified
  source 1..412: note = Related to KL205516.1; note = Prevotella loescheii
MARRNQNINLKTTIGNQLQYIYSADELTNVLNDVAKQIGVQAGFRTNQLQCFADTGKDDRRTTRYRMRKKHGGTRAIVAPHSSLLFMLQAFNALLQDFYVPTPWCYGFVRDKSVAQNAQQHVGKRYILNIDLKDFFPSITRQMVEDVLLAEPIKCSTEAAKLLSGLCTATEPQGDVLPQGFPTSPTLSNMVCRKMDEELAAAAQRIGATYTRYADDMTFSSDNDVLRTTGSFYMQLSTIVEKYGFRLNERKTRLQRRGRRQQVTGVVVSDKVNVTREYARQIRTLLYMWERYGYEDASEKALWNYRNQHGKTKGHSKRINLSAVLRGRLSYMKMVKGEADPTYLKLWNKYCALHAAGYPKSKTRKRGMRPANDDSMHVGGYLGDPPRRGCALVIAFFALLTFAGLLAWNLYA

SEQ ID NO: 127 - protein, 1015 aa, unidentified
  source 1..1015: note = Related to JAFWXI010000025.1; note = Alistipes sp.
MMTFIGFWTAINGLAAVNNQAAFGKLECLRYGDTTLPDRYKMYNIPKKFQKKGLSVRAIYAPNDRLKYFLKFANNILSEQYVQNNYAYGYVKGRNIVSNARLHTNKHYVCNLDLKDFFPSISYDRAYLAAKKHFKDIEPSILELCIKASCVSVDHKCFLAQGSPLSPLLSNVVCIDLDNRLYSYCSDNGFSYSRYADDMTFSTNHTDKSAIELHINTIKQIIKQSSFNINEEKCRIQSNQYNQSVTGLTVNEFPNVKKEYIKDLRNILYIWERYGYIDANRRYQRKYRIAKRIKPLSDIILPRMEDVIRGRIQFLKTVKGSNDNQYQRFNNKYTSLLNRDCNFIPTHKPNKYIEGSNFKIYHSILKDQDGNNYIQLDKFERAIVPDNCLSLLKLCQSNAWSKIIKTIFNIRPINKANYKWALQLNSNTRKNAVKYGLRAYNKREGGYEDAANLLRIAIELGNYNYFDQYLISCKLSNQSHNLIPENIEYLEANEYGTLLKKYAGYYSAKGFKISQIIGKSNGDSTVDLYKTPIHPIREEHNVTENIQWHNTTGVGIYLGVNEYRCLDIDNVNGDIERVIIMMLHLLHLPLDYSWVIKSGSGKGFHIIFKAENIEGFKADIVAFSTNKKNHRAFERIELRWQECFLVLPPSLHRSGNFYGFRNGDIPTYNPMHVKHNDINTLLDYFCGWTKFIELKYNNIDFDLVYRSKWGADSSCGSVSINLPIEWLSACNSPVCANELAIRYLIGESVSPDNNKAVQLFRKANNTLSAYNLASLIAIGYIDDIGEFNSLISKCKDHIDEIDVHFNNSKHRIERVIQIFNQTHQKKLYVFFDTETTGIPLDYNAPISDIDNWPRLVQLSWMITDEDGKLIKENDYIVYPKGFDIPTSSSAIHGITNEYANKKGIDIETVLAEFIEDLKGVSLVIGHNINFDINIVQAELFRLGMTDIFNDKRKVCTMKSSVDFCAIPNKYGYKWPTLQELHQKLFGEIFTDSHNALSDIRATKRCYFELKEKGIL

SEQ ID NO: 128 - protein, 656 aa, unidentified
  source 1..656: note = Related to JAFQZD010000117.1; note = Bacteroidales bacterium
MDEVIYFSDSDITERYRLASIPKRDSNGRFTKRRKVYMPTPRLKFFLQQANSLLSAIYSPPPCSFAFIKGRTIVGNATPHTNKKYILSLDIKDFFNSISIQKAVNAIKSAFPWQFRGEFIQAIVGASSLNGHLVQGSPLSPTISNIVCLNLDKRISSYCESLKISFTRYADDFTFSSNDFDFKRDSSFLDNITKLISEEGFALNNEKTHIQLYNNKQVVTGLVVNSKVNVARRYIKEIRNILYIWKRFGYDEALESFRFHYLHISRKIGSSLRSRISYEDEKRILHSRMVKKATNYSPRLDQHILGRLNFLKMVRGENDYQYLQLTQKFNELSKKLPYKKDKDGSYSFKSIQHFEWALGCLVLTDDVKNENGTQFFKMNNGGKAIISTKLLSFLSSVEPEYYSVALSLIKSKCRVKAINLEANLFIIWATPLDLKKYRWAIIDAVYRAARDRYESIHCLAKVERSEIESLHKDFQFAMNNGNYAMIHAYLDICNFLNLDSGLYPENFDLLNSNDKSILLQKWGWNYYSLYIDTVPTDKDGVPLSESTFDNYRRQWGSNFAHLRWKGADGIALVAGTNKWVIEVTDRNLDEDDVMRELLSNKEIEVCIIRKPTLLLVVNKDVLQEKEYQGFTIHKSGYYSIYPYKGEPMEIKTIELS

SEQ ID NO: 129 - protein, 489 aa, unidentified
  source 1..489: note = Related to JAFQCA010000048.1; note = Alistipes sp.
MPNCSNCYKTLDEGLNFCPYCGARVSHSGDKLCPSCNQIFNEYDGSFCGRCGSRLIVYEREQSTNGQHVINSVDDLIATINSFIPKIDSKADSISKEELLSFGNINNDRRYEIFYIPKKRRKYRMISSPTPRLKLILRCLNEIIYQHFAPAGYVTGFVRNLSIVDNGRIHVGQRYVYTIDLANFFESVTPDMIIPYLCKAPYNLNPEVADIVAKISCVKNRRKNSIGLSQGSPLSPVLSNIVCADLDKKLNGLASLYRAKYSRYADDITFSSSNNLYLQVNDFEKRIIEAVESSNFKINYNKIHLCGPQSRHYVTGIVTNSKVNVPREYISNIRNLLYIWSRYGVKEAYKRFDVWYKKYRKGKPTPFIGDFLRGKIEYLGAVRGKNDPIYKKFKNCLESLSQINFKTFYERPKRMKVSFNLSEPLVKYGRTYYTAETRYRGELVLISPKLNAYIESGVDYSPARVLATNCVVYKIFDKDGVKLLMTTEN

SEQ ID NO: 130 - protein, 381 aa, unidentified
  source 1..381: note = Related to JAFSDP010000008.1; note = Alistipes sp.
MATHLSTICSAEELRQAINRSITQSGYSPLSPARYKFLTTSVTMPYLYRHFTIPKRHGGGRKIDAPKKMMQAIQSALLPLLEGSFVPSSAVCGFVKNRSVVNNALPHIGCGVLLNIDIKDFFPSITHQMVTDALVSELKMGQEAAHALGWLCTIPKKGQRVLPQGSCTSPILSNIVCSRMDRELLTLCAAHGVTYTRYADDLSFSAKENCFEAGSEFRQRMEEIIKATSLKLNNRKTHIAYPGRRMEVTGLVVERRANVARDYILELRQLLYIWEKYGEKEAAISFSKHHGERTHRSPIRQIIQGKLAFMSQVRGNDDPIVKRYSSWFERLKKRPRKQQRKATPPPQPTPVTPPAKGGYLGMVALLVGLSMLMVVAVAAVF

SEQ ID NO: 131 - protein, 377 aa, unidentified
  source 1..377: note = Related to JAFPOK010000749.1; note = Alphaproteobacteria bacterium
MKSVDDFIKLLNGLRYSRYGEKCKPITRNLLYYYASNKVPISNLYTDIYIPKKSGGKRKIQIPCRGLKEIQGYIAEILNALFTPQSCVTGFVRGKNIIDNAKPHVGHKYLLSWDIKDFFSSIYAKLVKYCLVNDPFNFPDDIANLITNICGVRIEEDSCKRVLPQGSPCSPILSNIVFAVFDKYIVDHCTWRGVIYTRFADDMTFSADHDFYYDSRFSWGRVLPSNGQFYHNKHLRQFFYLAKRLNINKKKTRKCKQGQRKIVTGIVVNDKLNVKREYVREIRNLLFIWEKYGYNDAKARFNNHVHKSTPNAKPSELLNVLVGRIYFIKQVKGKNDPIFLRFKTKLKYLCSIMNTSKAVSIRLKTGLFIKGNLISLD

SEQ ID NO: 132 - protein, 424 aa, unidentified
  source 1..424: note = Related to JAFYYM010000038.1; note = Bacteroidales bacterium
MEDIDTKPRSGPSTVFHLLGLLNKAKRQEFGYRAWPFTLEQLFFFSDPKKNHIYYLHHFIPKKSGGVREISSPSWMLKMFQASAKRLLQDKYVAPDNVMGFVSGRSVADNAARHIGKNYVFNADLKDFFPSITRDRVISSLMKPPFCFGKEAALLLSGICCAHADLTQKGKDTYWVVRGEGKRGKLMDASNYHPAVPATLPQGAPSSPVLSNAVCLTLDKRLDGLAKRYKVTYTRYADDITFSSNHNVFREGDSFLKEFRNIIKSEGFILNEDKLRLQNKGQRQEVTGLIVNKKISVSRQYIRSIGSLLYIWERYGVDAAYGRFLKYKTDLEVTADNRQLCTYVHPHLLETMQGRIAYVRMVRGEDDPVWKRLNERFLKLKAQYESRGVIGNPTRILHSWTIKRFEQLSGFHLRYGPLYSFMSP

SEQ ID NO: 133 - protein, 521 aa, unidentified
  source 1..521: note = Related to JAFVPD010000015.1; note = Muribaculaceae bacterium
MTYEEKALREKAFDIETKEDLLSLLNDIKADLTHETSYPFTMQTMMRYSRPGVYSWRYKKIFVPKKTGGAREVYASWGTLKWLQVCVNELLQALYDPSDYAMGFVKRRSVVDNAKAHVYQNYVFNIDLKDFFPSITYSQVKNSLQQLPFGFNEEIAKIIAGLCTISDDTPDLMPKGKKERKRYFLPQGAPSSPVLSNAVCISLDRKLAGLARRFGLTFTRYADDITFSSMHNVYQEGSAFRIELENIIFKQGFRINAQKVRLHHRSRRQEVTGLIVGRKVNVPKQYIKDLRAVLHIWKKYGEGAAAASYYPRYRAGIKKETQFNLKAVMLGKLCYLKMVRGEDDPVYKRLSDQFDEVTSKRKKKCQPGVEYLGSCTLKTFERRLNVVIDIGEEVCKNKFTRIRLKNGTTLPIYISRLMPPNSRKDRVWVSLCRRTFEAGGFSVFYMLHNSYAIKSFVPPLKSDIFDETVSKVVDLVVAFPILHVEDECGVIQPKYIPQKISEVIDQFLAEKNISHKENIPF

SEQ ID NO: 134 - protein, 377 aa, unidentified
  source 1..377: note = Related to JAFSQF010000025.1; note = Bacteroidales bacterium
MNRTAILPPKKAVATAVTTRICDLWGCLHTKKDLLKLVNVALEGLYGERVCSVSMAQLNKAAYSSLNPDRYCTFKIPKKKKGEFRTIDAPEHSLKYIQQGLNMVLQTIYAPHPAAMGFVPRRSVVTGARMHLGQRLVYNIDLKDFFHTITSGRLYSRLTSKPFCLDGKVAGIIADICCYSGPDGRNVLPMGAPTSPTITNIICERMDTKLTRLAKAYGMQYSRYADDITFSGMANVFGEDSRFIKSLRNIIEREEGFTINPDKTRLCHRGMRQEVTGVTVNEKENVPRWYVGQLRTMLHNWEMDGHDRAQAVFERHYVPKFTRPSSGLPPIHHIENVIAGKLLYLKMVKGETDTTYKALNRRFAALMDCFIQTSQTI

SEQ ID NO: 135 - protein, 371 aa, unidentified
  source 1..371: note = Related to JAGCUU010000036.1; note = Bacteroidales bacterium
MRLDRNILDREAAKNAVKCRISDLCGCLHTKKDLLKLINVALEGLYGEKASMVTMSQLDKSLKSSPNTVRYYRFLIPKKKKGELRTIDAPEPTLKYIQQGLNLVLQTIYSPHSAAMGFVSHRSVVTGARMHIGQRFVYNIDLKDFFHTVTSGRLYNRLTTKPFNLDRKVAGIITDLCCYAGPEGKNVLPMGAPTSPTITNIICERMDIKLTRLAKAYGLKYTRYADDITFSGMANVFDEGSHFIQSMRNIIENEEGFTINPEKTRLCHRGMRQEVTGVTVNEKENVPREYAKQLRTMLHNWEMDGYDKAQAVFEHHYQADNPRYAATHSDFRPNLESVVAGKLLYLKMVKGETDATYKALNRRFNALRCDV

SEQ ID NO: 136 - protein, 380 aa, unidentified
  source 1..380: note = Related to JAGCVI010000021.1; note = Bacteroidales bacterium
MKKVAEITDRRAEVKAAETRIHDLWSCLHTKRDLLRLVNVALEGLYGMDARTVTMRQLNLSAYSSLNAHRYRTFQIPKKRKGEFRTIDAPDPTLKYIQQGLNFVLQTVHTPHPAAMGFVPHRSTVTGAKVHLGQRFVYNIDLKDFFHTVTSGRLYKRLTLEPFCLDGEVAGLITDLCCYMGPDGRNVLPMGAPTSPAVTNIICERMDGKLSRLARVYGLKYSRYADDITFSGMADVFAEDGRFIMSMRNIIVNEEGFTINPEKTRLCHWGMRQEVTGITVNSRENVPRKYVKQLRTMIHNWEMDGHDKAQAVFEKYYMEQNYTHNPDVKHHIENVVAGKLLYLKMVKGETDPTYRALDRRFRALTETGGRDTQGTGKNRL

SEQ ID NO: 137 - protein, 457 aa, unidentified
  source 1..457: note = Related to JAFYBP010000010.1; note = Bacteroidales bacterium
MKLDEHIKRQELLVQPDAKGASNGQLPDAQAAERGNVFERLPYYGKSSPEARQKAAERMPDLWRCLNTKGDLLHLLNVALGGLYGEWPQKITIQQLNKFAYTSLGAKRYTSFKIPKKRQGEFRTIDAPVPMLKYIQRGLNFALQCHYTPHMSAMGFVQHRSVVDNAKVHVGQRLVYNIDLKDFFPSITAGRLHKRLMAKPFSLSKEMASIITDLCCYTNAEGKHVLPQGAPTSPTLTNIICERMDRKLSRLAKAYGLKYTRYADDITFSGMANVFHENSRFLKSMRNIIENEEHFTINTDKTRLCHQGMRQEVTGLSVNRQENVSRKYVKQLRTMLHNWEMNGYEKAQEVFAKHYSETKKSNLLMKGTHHIENIIDGKLMYLKMVKGGNDCTYKSLDARFRALMDHLPATRIDGNNSPKVTVEIPMVPKEDDECWETIYNLEKILNNENNNNDGRQV

SEQ ID NO: 138 - protein, 470 aa, unidentified
  source 1..470: note = Related to JAFWTB010000069.1; note = Bacteroidales bacterium
MEIDEHIKQQEQQTHADSLEVTLGEPLEFTFVENANVFAQLPVHGVSANPNKNGISDTIVRVQDLWRCMKTRKDLLHLLNVALAGMYGEQSTILTMKQLCGYAYSTIEAKSYTTFQIPKKKKGEFRTIDAPVPMLKYIQRGLNFILQCVYTPHTAAMGFVQHRSVVDNAKVHTGQRLVYNIDLKDFFPSITAGRLYHRLMSKPFSLNEKVASIITDLCCYTNADGKHVLPQGAPTSPTITNIICERLDRKLARLARAYGLKYTRYADDISFSGMGNVFAEDSRFVKSMHNIIEQEEHFIINKDKTRLCHRGMRQEVTGLSVNQQENVSRTYIKQLRTLLHNWEMNGYDKAQEVFAKHYAETNTRNLKNKGTHHVENIIAGKLMYLKMVKGETDCTYKNLFARFKLLLENHTDTKIDKSKFSDDQAQNIPVDEGPKHVTNNETVQSVDIENSDEILSTFSSLEELLNNENE

SEQ ID NO: 139 - protein, 382 aa, unidentified
  source 1..382: note = Related to JAFTCA010000013.1; note = Bacteroidales bacterium
MNVAKHGQSKSLVPKPLELTQEKRRALADRVAILWPRLKTKADLKQLLNITLSGLFGPHSTFLTMNQLNYSIYSTIESKRYSSFRIPKKNKGEFRTIDAPMPLLKYVQQGLNFILQSVYTPHIAAMGFVPRRSVVDNAKVHTGQRLVYNIDLQDFFPSITAGRLFKRLMAKPFSLNKEVASLITDLCCHTHENGKNVLPQGAPTSPTISNIICEQLDRKLSQLAKAYGLKYTRYADDITFSGMANLFAENSKFCKSLKHIIEDEEGFVINPNKTRLCHQGMRQEVTGLSVNRFENVPRTYVKQLRTLIHNWEMNGYDKAQAVFAKHYTKNDPRHLLRKYAGRIENVISGKLMFLKMVKGENDDTYKSLVGRYNALMMAAGCL

SEQ ID NO: 140 - protein, 1078 aa, unidentified
  source 1..1078: note = Related to JAFXCG010000006.1; note = Bacteroidales bacterium
MEDLHIKNGIKTLWQNMSSKNELLSILNKAASILYGDDAKKIEMSHLTYHSYSTNNKKRYISFQIPKKKKGEYRIIDAPCKGLKLIQQCLNVLFHEIYAPNVAAVGFVQNKSIVDGAKIHLQQKFVYNIDLKDFFPSITSGRLFKRLQSKPFCLNEEIASIITDLCCNTNAEGKSVLPQGAPTSPTITNFICERLDQKLTNLAHAYGLKYTRYADDITFSGMANVFAESGKFCKSLRHIIEEEEKFKINTSKTRLLHRGNRQEVTGITVNERLNVSRRYIKQLRTMIHNWETKGYIEAQYIFQKKYNETNIKNSNGIHYIENIICGKLDYLKMIKGEKDRTYIKLKERFDKLLFGNTYSPLNNHIDKIFETLIASRFNEYKDKNASDENENKKEGKNYVNKSINTLVSELDSPMTLEEATETLVEGIDVISVRNGFTSTESRVIVEVSTIKKDTKSPSINLAVLTVPIGETSLIINDEIQEGKLFIDELKSLNDNPEDSNNLNIAKNIMGQNSRIRSVHAILNNVLNKLSEDPNNFRIYNNGRVGFTEDAQAFIRKELNRISRHLYLSDSATPMLGLTNNNEIVFTILDDNTFEDVLVPTGIVLGNTNVADAANSIKGAENIFHKNATKLTEYTTARIVRDLITKVEGNERVVRKNGKGYEAVKWQLRYDRLQKEADISNTSNKTAKEQIDAHNESREAYIRTAVKEGIIIINFNKDSLESNNYLKHKYLNRKNIAKILLNKMGKCFVTEEQVLNIVSQKKYVTEERAIELIRKYGGHNKKEIGKSNVVEYPDPKQTYQFLSFFSQNDGGLKNLTHDFNYGYIDYDVFIAQCKKEFEEIKKRFPNVQESVVRRIEEFAFKESPNWYIRLGNDKKYIRYGWSEPSFVEWYRTNKIHPAKDTHYNAEMIVPFKNSIQVRADNKNLIGLLSSLVTMAFGQNPCCNVEITQNVGEAQFYTDVDRLGQAIYQIFSTIKDYSEQNFCDKVIVDYYTENDFKILTITHIDSKPTKKSDDKDYLGGNGTTIKKALFGLCNYEVQAEFPDGAYRKIILSDNYEDFKKGRYLIDKDSIDGYKHIMKFY

SEQ ID NO: 141 - protein, 480 aa, unidentified
  source 1..480: note = Related to JAFPVH010000008.1; note = Bacteroidales bacterium
MSKKKANSKSDLKKVLDRNRHKEEKVAAKVGMQMEAEEEVAIIDFDDDSASSSEDVQIETTGNPKTEQKEDGVKQVTHPLSEEEKKECLEEIRERWPRIKTKESLLSILNIALILLYGRDARKLTLRMLNYYAYSSHNKKRYITFQVPKKKKGEFRTIDAPCAGLKMIQRALNLIFQTIYTPHEAAMGFVPHRSVVTNARVHVGQKYVYNIDLKDFFPSITSGRLFKRLLVAPFSMDKKMASIVTDLCCYTNADGKNVLPQGAPTSPTITNFISEHLDRKLSKLARAYGMKYTRYADDITFSCSSNMFAEDGKFCKSLRNIIENEEHFKINTDKTRLCHSGERQEVTGLTVNEQTNVTRKYVKQIRLFLHIWEAKGLPEAQRLFEKHYTPKTTRPNVGIPHIENVIAGKLLYLKMVIGEDRDMYKRLASRLDILVGNTQESNSTDISPKDKGVLSVPEKGKLPAEKEILIELNTLIELLE

SEQ ID NO: 142 - protein, 491 aa, unidentified
  source 1..491: note = Related to JAFSJF010000074.1; note = Bacteroidales bacterium
MAKKKNITKKQNLKKKLGQTSASKKTEVSELVSSGSEKAEEVLFAIEPIEDDLVRVAAAVTELEDIDSAKVSDEETISTQADALSKIDELPKYGGSPLTGEDLKQQLAKIVEGWHSMNGIDDLCVVLNMALQALHGMDAVKTTVGRLKLMVRKGRYVTFKIPKKKKGEFRTIDAPCSELKNIQQALNFVLQEVYSPNAAAMGFVKGKSVVTNAQVHLGQNYVYNIDLKDFFPSITSGRVFKRLLVKPFCLNEKVASLISDLCCYQKGENKVLPQGAPTSPTITNIICEKLDFKLTRLAKAYGLKYTRYADDITFSGMKNVFAEDGKFCTSLRNIIENEEGLKINSDKTRLCHRGMRQEVTGLTVNSKTNVSRKYIKQLRPLIHNWEVKGYDEAQAIFAKHYAETNIRNLRFKGEHHVENIISGKLMYLKMVKGETDSTYKSYANRFEKLCNDTFGAGSQKSQTLLTPLMDDGNVLSVLNDLATLIETNTSE

SEQ ID NO: 143 - protein, 436 aa, unidentified
  source 1..436: note = Related to JAFZPH010000008.1; note = Bacteroidales bacterium
MKNRIKNDMDYNTVINEIWRNLESKTDIVALINVSLKDLYGDKASKISLRKLNYYAYSKVNANRYVSFDIPKKDGSMRRIDAPCRGLRTIQRALNHVFQIVYTPHEAAMGFVPGKSVATNAKMHIGQRYVYNLDLKDFFPSISSGRVFKRLQAKPFGLKEDISRIITDLCCYENGEHRHVLPQGAPTSPTITNFICERLDVKLSRLAKAYGLNYTRYADDITFSGMNDLFDIDGKFCKSLHHIIEDEEHFVINQKKTRRCHAGMRQEVTGVTVNQNTSVSRKYVKQLRTLIHNWEVKGHDEAQAIFLSNYSSTKYHNFRGVHHIENVIEGKLLYMSMINGNEDSTYSQLVVRFKSLLETIVSGKANAEKGLGNDTSSLGKGGNCITISDILDIWGKSGMVDALEVFKENIGILTQKDTFPTGFKTSDGDPFLDSNL

SEQ ID NO: 144 - protein, 386 aa, unidentified
  source 1..386: note = Related to JAFPVX010000018.1; note = Bacteroidales bacterium
MRLTDCIGLQAQPQSVSPAPKDVSVRLRDLWRCLESKQDLLRLINIALEGLYGDMAQMITMKQLINMVYTANGEHRYTSFQIPKKKKGEFRTIDAPIPTLKNIQRGLNSVLQAVYKPHQAAKGFVKGFSVVDNARAHISQRYIFNIDLKDFFPSIHSGRVYARLLAKPFSLPPEIASIICDLCCFTNSEGHKALPQGAPTSPTLTNIICERMDRKLLKLAKAYNLQYTRYADDITFSGSTFMFAPEGRFCTLLQHIIEEEEHFTINRNKTRMGHRGTRQEVTGLTVNNKPNVSRNYVRQLRTLLHNWEMKGYQKAQTEFLAHYAEINTKNLQWDGTHKIENIIAGKLLYMKMVKGETDSTYKGLKIRFDQLMQNRRKYIKSLTNPI

SEQ ID NO: 145 - protein, 397 aa, unidentified
  source 1..397: note = Related to JAFZTV010000005.1; note = Bacteroidales bacterium
MTKQEIDEKIKAQWSAMETKQDFLRLLNLSNCALYAEKAQPFTFRQLLFHAHTTRNKKRYVSFKIPKKKKGEFRVIDAPNPTLKSMQRALNYALQVIYEPHAAAMGFVPGRSIVSNAQSHTNKRFVYNIDLKNFFPSISSGRVFARFQAKPFSCNKEVASLIADLCCYRNDFGTVLPQGAPTSPTITNIICDRLDVKLTRLATAYGLHYTRYADDITFSGMSNMFAEDGRFCQSVKHIVEDEEHFTINKDKTRLCHRGIRQEVTGITVNEKPNVTREYVKQLRTMIHNWESQGYERAQARFLEIYNKTNTRYHKAKGNHHIENIISGKLLFLKMVKGENNAQYKKLDERLVALESTHTDPIPQNRSNAVIPPAMGDNIISNEKEILEEFMTLNKLLE

SEQ ID NO: 146 - protein, 337 aa, unidentified
  source 1..337: note = Related to JAGCFV010000210.1; note = Salinivirgaceae bacterium
MDKDKLSLLSSLSKEELFNLFSTFVESQNAVQNTDSETVDFANQAKEMWHKLSNEADLRALINTVSVKVFGKFQYTEAQFGHCFNINHSRYTTFEIPKKKPGEYRTIKAPNPTLMGMQQCLNYVFQQLYQPIECATGFVPGRSIVDGARVHLSQKYVYNIDLKDFFTSVTAQRLVNRLQIEPFGLSEDMAQLVANLCCDKTKYDKFVLPQGAPTSPTITNFICDSLDRKLIKLAAAHNLRYSRYADDITFSGMQNVFAANGRFCKSLRHIIEREERFTINPAKNASLSSRNAARSNRHNCKPKTECFASLYQTVTCAVKQLGEKRIRHSASRILETL

SEQ ID NO: 147 - protein, 405 aa, unidentified
  source 1..405: note = Related to JAFUVT010000003.1; note = Bacteroidales bacterium
MPESEQKTEEKEAKVELLRILNVMKKKLYGDNSYPITMKQLNYHAYSKNNPKRYVQFQIPKKKAGEFRTITAPNAGLKAIQRCINALLLEQFEAHPAANGFVPGKSIVDNARVHLGQKYVYNIDLKDFFPSVTIGRVFACLQLPPFSFDKHTASLIADLCCHEGVLPQGAPTSPTLTNIVCSRLDWRLSKLARRFDLRYSRYADDITFSGMSNIFHEDGAFVKDLRHFVEKEGFLINETKTRTNSYYQRQEVTGLTINEKPNVTQRYVKQIRTMLHNWEASGYEAAQSVFFKHYHPTKNVNAEHHIENIIGGKLDYLKMVKGVDDATYIKLRDRFGDLLSGREKTNSTARPGNVIPVVDISVLNEGNIIDIELVNEEEQKSKDTHGLLDEKLQQLCESGFDLSIL

SEQ ID NO: 148 - protein, 357 aa, unidentified
  source 1..357: note = Related to JAFXXO010000127.1; note = Bacteroidales bacterium
MEQLNKFKKELYGENCHAITMQQLNFHAYSEHNSKRYIQFQIPKKKKGEFRTITAPNKGLKCIQRCLNAMLLRQFAPHPAANGFVPGKSIVDNARVHVGQKYIYNIDLKDFFPSVTIGRVFACLQLPPFKYDRETASLIADLCCHEGVLPQGAPTSPTITNIVCQRLDWRLSRLALRYNLHYSRYADDITFSGMTNLFHEDGDFVKALHHFVEKEGFTINEAKTRVNSYYQRQEVTGLTINEKPNVTQRYVKQIRTMLHNWEVNGYKYAQSEFLKHYHTTKYINFKGEHHIENVISGKLDFMKMVKGEKDHTYLKLKERFDRLTIIDVSGILDVWEKEGIDAAMDLFMNVKKHNGDE

SEQ ID NO: 149 - protein, 432 aa, unidentified
  source 1..432: note = Related to NZ_MJLH01000003.1; note = Campylobacter sp.
MEKSLKDEINAIIDDCCAKYSSFSIETFIDIVNEIHSKVFQESYLIEIETLKKIANSVDKYDKFEIPKRSGGVREIYAPKKNLKKILYYLNFIFQNIYVRNFSLYISPNGFIPNRSVVTNAKRHLCKNYVFNIDLEDFFPSIKQYKVSFMLQIAPFNMSKNDANLMAKLICYQDQNGESFLPQGAPTSPIISNFACRFLDIKLVNLAKQFRLTYSRYADDITFSSNYNVYDDKFMDALTLVIEEEGFKINKNKTRLQKRNMRQEVTGVIVNYKLNVYRTYIKKLRVLLHMVKKYGYEKANEIYNQKEQSDKQKDLKSTIAGKLNYLKMIKGSNDTTYMGLMNSYVELFDIKQKNKPPIPDDESLIVCETAEKLLKELTASNNLILTNIKNESNYLNLPKTQNVSNSKVANSEKAITTESLVDRILSKLREIL

SEQ ID NO: 150 - protein, 663 aa, unidentified
  source 1..663: note = Related to NZ_NHYM01000017.1; note = Helicobacter sp.
MNIKSINGIKNINDLIDIIYYYNDEHNIENNLHIETSTINFLAFYAKKKYKKFEIPKNNGEFRTIYAPTKYLKTILKSLNYAFQAIYKNNQVAHGFLPNKSVATNAKKHISKNYVFNMDLKDFFQSIHQARIWKMLQISPFNLPKDMANLLAGLLCYQYPRESKEKSFLPQGAPTSPIISNFICYRLDKSLLELAKKHNAIYTRYADDITFSSNINLYKKDSEFLQKIYRIINNEGFSINENKIRLQGKGYRQEVTGIIVNEKINVSKKYIKNLRALIYMLEKYGEKEANEFYYTNHAKSLNMVISGKLNYLKMIKGESDSTYLKLKEKFEKLAKNDVLIKEPNKESAQKTKRNPKQNPNAKHNPKALVDILRKFSQSDSPFKATVHNESNYPSYNGYDNFMTSLNKEWNEIQKDLNAYSYRLYNKLLGFLFKSTEELTNADNYKGWGESNVKIGWSSSEISEYCKANDKNNPFEYKLPDRYIIEHKNGSITTFGDICMKIFKYEIEFRDENQQFFKLIQDNRKKLGSGFNVKIDEKIQGVSFYSDTHLVSEAINKIFNQFIERKKYINIRVSMETTDEYHKFIFSQLESKCNKGSKEMLKEIKDGDFEDIKKRLFSLCDWSIEAKCSDGNFRINYLKSDNEKDIDKLPDAPEGFTHILRFYK

SEQ ID NO: 151 - protein, 545 aa, unidentified
  source 1..545: note = Related to JACXTV010000190.1; note = Campylobacterales bacterium
MSKTRVYELAKILKVTSKEIISKANELNIAVKSHSSSLDEDALKLITDAFATKPQIKNNTSATIKITLKDKEQTSLNEHIQKAFNELRNIEDLASLINKVNKTIYEHTHKIKVKHLTYHAYHSKDKYQVFKIPKKSGGEREIYSPSKGLKYILKTLNIIFQALYKPQSVAHGFLPNRSVVTNAKLHVNKNYVYNIDLENFFPNIHQARIWKRLQHPPFNLNGKRIEIANLLANLVCFQYEKSSNEKNFLPQGAPTSPMLSNIICHRLDKKLLELAKAYNVKYTRYADDMTFSSDHNVYQKNSEFLQKLFSIIQSENFKINPKKIRLQKRGYKQEVTGLIVNEKINVSRSYIKNTRALIHLVEKYGDEKAQKIFVEKNGSKNLDLVIFGKLQYLKMVKGSEDSTYTTLYQKAMNAYKMIEVEVTKSNNDEKKQTEIIKKNTINEQHNPKELVKILRNFTTCEKPPCALKAAVHSEEEYYQFNGYEDYIRNLKSAWRKIDNPLRNLSKRLHGKIYAFLFASDLGTQERVDKSKSKNSGWGDSGMTFG

SEQ ID NO: 152 - protein, 668 aa, unidentified
  source 1..668: note = Related to JAKKOW010000003.1; note = Aliarcobacter butzleri
MPINKVTPDQKNKIEILFNKISNIDDFLSLINKVNKIQYQEYKKLELKQLTYYAFINKSKYTTFEIKKKSGGNREIYSPKTGLKYILSAINIILQSVYKPTIATHGFINHRSIVTNAKNHTDKIYVYNIDLENFFPSIHQARVWKKLQLPPFNLCENKIQISELIANLVCYQHIEKTTEKNFLPQGAPTSPIISNIICERLDRRLLGLAKRFNLKYTRYADDITFSSNHNVYQKNSDFIKELNSIISKENFKINSKKTRLQKKEYKQEVTGIIVNKKTNVSKKFIKELRTQIYLLEKYGVKKSKSIYKEYYKKINGDIELIPNMMNVIYGKLKYLKMVKGQNDSTYLKLNNRFENCFKNKKHFASQNFTSYELKEFSNHQPQKMVELLKKFTSEEPLKSSTHPTKNNECYLDFIKELRVTWKIYEEEYKDFINEKLISKIYTFLCNPNPKNGWGIDNIKLGWTSSKLKKWCEKNPNLMPNKFPIENTIYTFQDIINYFKMEIEITPNRNNLYSFLFDIMDNELCQFEKLTDEETEEILDEAKFFIDTQWIKEGLELIFNEINQRSSVSKRIRIQAKKNKEFIELKITHINSFSKFSPEKLLERLENGVGSFPYIQQKFTSLCDIALQSKYHSSIFKINILNNYNDEEKLIKDINTEEEGFTYIFRFYR

SEQ ID NO: 153 - protein, 569 aa, unidentified
  source 1..569: note = Related to DQSZ01000242.1; note = Flavobacteriaceae bacterium
FVLNKSNVTNAKVHIDKNYIYTIDLKDFFSSIHQARFWKRLQFPPYNLDGTKIELANLIANLVFLQTEKQEEKNFLPQGAPTSPIVSNIICERLDRRLLGLAKRFNVKYTRYADDITFSSNHNVYQKDSELIIELNRIIANENFEINPKKTRLQKKGYRQEVTGIVVNSKANVRRKYIKEVRTYFYLIEKYGLEKAERVFVQHQYKNNPNLKNYKYLSSVLLGKLEYLKSVKGKEDSTYLKLKNRYDICFPKEETSKEKNLKLKKEPIHNPKEVVAILNLFTQNNNILKYTTHNWDKEELDSLDNFLKEIKIEWNKVNNRLKELTPRLHAKIISFLFSKKLGTLNLTDNRNKVWRWGMSQIQFGWSSPKLREWTKEGNSPFSYVLDEKYRKKIDGKSIDRFSDIVEVFKNEIEIRSDNNQLKKLFISKQKKYLGFDFNVEFVNLEGVDFYTDVQHLDFGLNEIFKEIKQRKLFPKIKIEAIKNIEAGFIELCITHIDSFPNKTKEEMIKEVEDGDFSKIKEKFTSICDWSIASKLSDGNYKINYLGGEESFEKLNEEPIGFTHILKFYK

SEQ ID NO: 154 - protein, 690 aa, unidentified
  source 1..690: note = Related to NZ_KE387264.1; note = Chryseobacterium gregarium
MELDSKDKIYIYNSFYKMNNKLDLLQLINFCKKKIYGEEAHPISLKQFNYHINPLYNNFRYNSFIVKKKSGGDRIIFSPNNGLKVIQKCLNLILQVVYKNPSKYATGFISGRSIVDNAKIHVNRNYVFNIDLKDFFYSIDQARVWGRLQVQPFNFSKKENKLELANIVASLCCHSIEVERFVEGTWIKNQKNVLPQGAPTSPVISNIICERLDYYLSAVAKRFGLKYTRYVDDITFSSDQNVYQVDGDFRKELEKIVQQEGFYFNVNKTRLQKRGFRQEVTGVIVNEKVNTNKHFVKRLKKWIYLWENYGYERASIFFKSEYEADKLNFKTTPSLVSVLRGKLNYLKMLKGDKDSLYLNLNSKFDKLLNGSIDQKSSLIKITKPAIPVIHQPQKLVAILKKFTTNNTALKYSTHTWDGGKDTEIFANIEDFLIMAEREYKTISYDLSILSKPLNAKIWTFLFSDNFSKNGWGMFNVRFGWNSMELHKYLNGNPNNKPESYILPEEFQQNIKKYGKSFLIQSFKNVIDLFKNEIEIRDENSTLEDIVISLHKTYLNGFNILKIENLANKNFYTDVDYLYKALELVFHNIQKRPQYPNVGYIGYDFEDYFCLEIMHFESNAKGKSFKDSKFTLKEGDFGTISNYLKNLCDWSIESSFSEGTYQVNFLSSKNISPYKLKSSSEGFKYIFKFYK

SEQ ID NO: 155 - protein, 690 aa, unidentified
  source 1..690: note = Related to NZ_QDFZ01000026.1; note = Chryseobacterium sp.
MELNSNDKRYIQATFFKMKNKADLLYLINFCKKKIYGEDAYDISMVQFNYHIVPSYNNYRYITFKVKKKSGGDRTIFSPNNGLKVIQKCLNLIFQIIYNLPSKSTTGFVPGRSIVDNAKVHINRNYVFNVDLKDFFNSIDQARIWGRLQIQPFYFSKKEKRLELANIIASLCCHPIEVERFVDGCWIKQIKNVLPQGAPTSPIISNIVCERLDFYLNAVARRFNLKYTRYVDDITFSSDHNVYQSDGEFRKELVRIITKEGFYFNTNKTRLQKRYFRQEVTGVIVNEKVNANKRFTKRLKKWIYLWENYGYRKASLFFISEYKDDKINLTSIPALEDVIRGKINYLKMLKGDKDSLYLTLKSRFDKLLNGPINHESQIIKIIKPPIPIIHTPKELVSILKKFSSNNTALKYSTHTWDGGKDNEVFDSIDDFLIKAEMEYKLISYELSILSKWLHAKIWTFLFSTDFSKKGWGMFNVRFGWSSIELRDFLNANPYNRPENYILPEKYQQGIKRYGRNFIINNFKNVIDLFKNEIEIRDENSILEDIIISLHKTHLNGFNIDKLENLSNKNFYTDVDYLYKALELVFHNIQKRPQYPKVGYYGYDFEDYFCLEIIHYESNAKGKSFKDSKFKLKEGDFGTISVYLRNLCDWSIESGFLEGDYRINFLASESIMPYEKIDFSEGFKYIFKFYK

SEQ ID NO: 156 - protein, 400 aa, unidentified
  source 1..400: note = Related to SEAO01000540.1; note = Chryseobacterium sp.
MTILPDQKDYIQKHFEAMQNKIEFLSLLNYAKSILFGEKGEPFVIRQLNYYINTASKAASYQAFEIKKKNGGTRNILAPNQGLKAIQSCLSLILQEIYIVNAAAKGFVKGRSIVDNASIHIQQYYVFNIDLKDFFSSIDQARVWARLKMAPINLNSSTNRQELSNIIAKLCCHELEVERLNMEGEWEKQKKNVLPQGAPTSPVLSNLICEKLDKRLTGVARRFGLRYSRYADDITFSSLHHVYNNEGDFVREITRIINEQNFHIKETKTRMQGQGYRQEVTGLIVNERVNVPKRYTKELRKWLYLWENYGHDRAYLFFKQSYLNDKIRDNRFKPDMIKILAGKLDFLKMIRGAEDHMYKKLQQRFLALIPKTSSLSKVLDTWEELGIEKAMEEYYAHRTA

SEQ ID NO: 157 - protein, 701 aa, unidentified
  source 1..701: note = Related to NZ_BMKD01000001.1; note = Mucilaginibacter rubeus
MELQKPQVEYIRKSFRKMQSKKDFLTLLNYVKNILYGEKFHPIVLKSLNYHSNPANNNRRYIKFSIKKKSGGSRIIHAPNKGLKVIQRCLNIILQALYDVDEHAFGFVPGRSIADNAHLHIGKAYVYNIDLKDFFTGVDQARIWARLKVKPFQLNGSVGRHELANLIAGLCCQSMIVERKGEDGAWLKEVRNVLPQGAPTSPVLTNIICQQLDYYLGRVALRFGLTYSRYADDITFSSSHFVYQKEGEFINELERQITDHGFYIKYSKTRLQKRGYRQEVTGLVVNSKLNVQRRYIKDLRKWLYYWENYGYKKASVFFESAYSADKGYLGATNPVMAKVIRGKLDFLKMVKGKDDPTFFKLNQRFEILTDIVKEELQNQNTAEPNCVAVPVIDGLPVLHTPLEVVKILKMFSINESALKFATHSWEAGLDDKIFKNYPDFIRKAKKEFNVVSSSLNELNPQLRAKILSFLFNKRVGIKWGMRRVRFGWSSPELKEAMERTPEMMPENMVLPEHAQFRVTSQRGGTQTIQKFKQVIDIFKNEIEIRNDGPVLEELIYDYHFKHLQSFEIMEFTNLNDKNFYTDVDYLHKALDLVFGNIAKYPGNEKLVGYRLIDDPSYYQLAIINYGSRLRGVSIASEKFLLTKGDFGTIKKRLNNLCDWSIETEFAEGSYRLNFLASDPNTASVEPIQYAVGFTYLFTFYK

SEQ ID NO: 158 - protein, 405 aa, unidentified
  source 1..405: note = Related to NZ_QMDV01000006.1; note = Pontibacter arcticus
MKLAEEKSQHILTAFSNLKSKEDFLELLNYTKIIIYGDKAIPFTLKQVNYYSNPRINIERYAAFTIKKKSGATRVIHAPTKGLKAIQKCLNLILQIVYEQHQHKAATGFIPSKSIVDNALLHVRSIYVYNIDLKDFFPSIDQARIWGRLKFPPFNLNDKTGRLEIANIIASLCCHEMEVERIKPDGSWQKEKRNVLPQGAPTSPTLTNIICQQLDFYLTAVAKRFNLKYSRYADDITFSSHHNVYQEGSIFLHELHRIIAAQNFHIKPSKTRLQKQGYRQEVTGIVVNEDVNVPKRFVKQLRMWLYYWEQYGYERAYTYFLQQYSADKGHTKKGRPDMANVILGKLKYLKMVRGADNHMYQKLAYRFEQLSKENLNQEDRPAHLNKVLSILIHKGLDEAMDFYKR

SEQ ID NO: 159 - protein, 742 aa, unidentified
  source 1..742: note = Related to NZ_LVWA01000005.1; note = Pontibacter flavimaris
MSIKEEQSQYILSSFSSMKSKEDFVGLLNYAKVIIYGDKAVPFTLKHLNYHSNPQVSKNRYTAFTIKKKSGANRTIHAPSKGLKAIQKCLNLLLQIVYAQHQHKAATGFVPGKSIVDNAKLHTNSIYVYNLDLKDFFPSIDQARVWGRLKFPPFNLNEKSGRLELANMIASLCCHQLEVERLQPDGSWQKDVRNVLPQGAPTSPTLTNIICQQLDFYLSAVAKRFNLKYSRYADDITFSSQHNVYHEGGEFLNELHRIIAAQNFHVKPSKTRLQKRGYRQEVTGIVVNEHASVPKRYIKQLRMWLYYWEQYGYDRAYSYFVQQYKVDKGYTKKGKPNMANVIKGKLDYLKMVKGSDSAVYQKLTERYDLLRKEEPAKTKLTIFSTISETSESDSSFIKIVVENSASPSIPDKLTREINIPKDTVLPHVLLIDNKLVIEGTTPTKKLLPHNPMHTVSFLKKFKIADGSGFKELVHDVILSDEIVDDIISKVKSHPNFIYHYKQERVSNIEYINVGIQSEVIQLINLFESEGIPFYKETGKHPFNNDEKYTEFAKKFKKKYRYGSGSEYSKLHQDILNIAIDQKIPQDCIEFLPDERAFNIRSGFFTWQPLIYRGLRHIFQCIADHSNIHGESLKHVDDKEVLVKAEKGDADGHKFIEVSILDKNSKATIDSDLLLHFYKESTAFKQDFRNLCDWFIECDFTAEPPKRINLLIARRLGSESVEIEPLSNPVGGFKHVLRFYDVR

SEQ ID NO: 160 - protein, 724 aa, unidentified
  source 1..724: note = Related to NZ_LRML01000007.1; note = Rufibacter roseus
MKTKKDFLGLLNYTKGILLGDKAVPFELKHLNYHSNPKANPKRYVAFAVKKKAGGTRTIHSPAKGLKAIQKCLNLILQVVYANHQHKAANGFVPNKSIVDNARVHANSLYVYNLDLKDFFPSIDQARVWGRLKFPPFNLNEKTGRLDLAGIIASLCCHSMEVERLDDAGNWKKEIRNVLPQGAPTSPTITNIICQQLDFYLTAVARRFQLKYSRYADDITFSSQHNVYHKDGEFLQELHRLIAAQNFHIKESKTRLQKQGYRQEVTGLVVNEEPNVPKRYIKQLRMWLYYWEQYGYDRAYSYFMQQYKADKGHLIKGKPDMANVIKGKLDYLKMVKGTESTGYQKLAERYILLTKQEPVAEEFTVSNDISGMSELVSSVIKVTLENSGLPSNPNKLIKAINIPKDTILPSVLLIDNKITTESTSSNKLFPHNPLHTVSFLKKFKIADGSGFKELVHDIILSDEVVKDIITKVKSHPNFIYHYKKERVLSIDYLNIGIRGEVIQLIDLFESEGIPFYKETGKHPFNNDEVYTVFAKEFKKKYRYGSGSEYSKLQQDILSIASDQKIALDCIEFLPDERAFNIRSGFFTWQPLIYKGLRHIFQGIADHSNINGEDIKCINGREVQVRAEKGEANFCKFIEISILDKNSKAKIESDLLLHYYKESTAFKQDFRNLCDWIIECDFTVEPSKRINLLTASHFNYNIDEIEPLDHLVGGFKHILRFYDIR

SEQ ID NO: 161 - protein, 705 aa, unidentified
  source 1..705: note = Related to PPEG02000007.1; note = Chryseobacterium viscerum
MKLDQATINHINTTFHKMKSKNDFLSLLNFVKGKIYGEKIHAFEIKNLNYYINTKSKQNRYTKFIIKKKSGEDRIIHSPAPGLKAIQKCINVIFQSIYEVNPAATGFVIGKSIVDNGIVHSGKNYVFNLDLKDFFSSIDQARIWGRLKVPPFNLNEQNGNLEIANIIASLCCHEMEVERFDAINNKWEKVIKNVVPQGAPTSPTLINIICQKLDFYLSAVAKRFSLRYTRYADDITFSSDHNVYHNNGEFLTEIKRIIKSERFDIKDSKTHLQKRGYRQEVTGLVVNVKPNVHSKYVKQIRHWLYIWEKHGYEYASKFFINPYLKNKINPKDNIPDLYIILRGKLNYLKMIKGSDNSTYIKLSNRFDLLNSSEKKVLQEQSERIILSKILPTTENDKVYILPIIHTPKEVVKILNKFTLNNSALKYSTHNWDSGQNEDIFKDLADFIKKARSEFYPASEQLKMLKKELHAKIFSFLFNEKVAEKGWGIHRIKFGWSSPELLKEMENNIIKPENCILPKNAQFILKTNTGNQTIQKFKQVIDIFKNEIEIRDENSILLNLLLEKHDMHLNGFEIKEAKDLENTNFFTDVDYFSKALTLVFENIQKRPEHKIVSYVIKEKSDSYILEIMHHNSTAKGKSYKDKKLSLQSGDFGTIKMHLLNLCEWSVESEFKEGPTRINFLHSNEDTLPYEKIDDVKGFKHVFKFYK

SEQ ID NO: 162 - protein, 689 aa, unidentified
  source 1..689: note = Related to NZ_JPRO01000006.1; note = Chryseobacterium luteum
MKSKNDFLSLLNFVKGKIYGGKIHAFELKNLNYYINTKSKQNRYTKFTIKKKSGEDRIIHSPVPGLKAIQKCINVIFQSIYEVNSAATGFVIGKSIVDNGIVHSGKNYVFNLDLKDFFSSIDQARVWGRLKVSPFNLNEQNGNLEIANIIASLCCHEMDVERYDAINNRWYNVTKNVVPQGAPTSPTLINIICQRLDYYLSAVAKRFSLNYTRYADDITFSSNHNVYQSGGEFITEIERIIRSEKFDIKDSKTNLQKRGYRQEVTGLVVNIKPNVHSKYIKQIRHWLYAWEKHGYEYASNFFIKQYLKDKINPKTNTPDLYSVLRGKLNYLKMVKGFENSTYLKLSNRFNLLIDFSDKNVTLTQSNQVTVSEVLPDLKNNKISKLPIIHTPKEVVRILNKFTLNNSALKYSTHTWDAGQNEDVFKDLPDFLKKANREFNPVSESLKTLRKELHAKIISFLFYDKVAEKGWGIHRVKFGWSSPELLAEMQITNIKPENFTIPEKAQFSLETTRGIQTIQKFKQVIDIFKNEIEIRDENSVLRELLIEKHNTHLNGFNIREMRNLENTNFFTDVDYFSKALTLIFENIQKRPQHKFVSYILKDEEDSYILEIIHHDSTAKGKSIKDNKLSLESGDFGTVRMHLLNLCEWSVESEFREGPTRINFLDSNQDTPPYVKIDQAEGFKYIFKFYK

SEQ ID NO: 163 - protein, 706 aa, Flavobacterium sp.
  source 1..706: note = Related to QJQY01000044.1; note = Flavobacterium collinsii
MKLDQTVIDYINTTFHEMKSKDDFLSLLNFVKKKIYGELTHPFEIKNINYYISSKSKQNRYTRFVIKKKSGGDRIIHSPVPGLKALQKCINIIFQCTYKVNPAATGFVIGKSIFDNAIVHSGKNYVFNLDLKDFFSSIDQARLWGRLKAAPFNLNESSGRLELANIIACLCCHEMEVERYDPINNQWYKAIKNVVPQGAPTSPTLINIICQRLDYYLSAVAKRFSVNYTRYADDITFSSDHNVYQKNGEFITEVERIIKVENFNIKDSKTHLQKRGYRQEVTGLVVNHNPNVHNKYIKQIRHWLYAWEKDGYEYASNFFIEAYLKDKINPKATTPDLSNVLSGKLNYLKMIKGFDNPTYIKLNARFESLLIKGDKKNKETTADQSLTMDGLSEIEYSKVSNLPVEHTPKEVVRILNKFTLNNSALKYSTHNWDAGQDDGIFKDLPSFLKKANSEFNPVSEHLKMLRKELHAKIISFLFYDKVAEKGWGTYRIKFGWSSPELLLEMQNNNIKPENFILPQSVQFLLETNTGVQTIQKFKQVIDIFKNEIEIRDENSMLRDLLLEKHDKHLEGFNIREMKNLENTNFFTDVDYFGKALTLIFENIQKRPEHRFVSYVLIDESDGYILEIIHHGSNAKGKSIKDKKLSLESGDFGTIKTHLLNLCEWSVESEFKEGPTRINFLDSDKNTLPYVKLDQADGFKYIFKFYT

SEQ ID NO: 164 - protein, 705 aa, Flavobacterium sp.
  source 1..705: note = Related to NZ_VAHC01000003.1
MKLDQTLIDYINTTFHEMKSKDDFLSLLNFVKKKIYGEDTHPFEIKNINYYISSKSKQNRYTRFVIKKKSGGDRTIHSPVSGLKALQKCINLIFQSTYKVNPAATGFVIGKSIVDNAIVHSGKNYVFNLDLKDFFSSIDQARLWGRLKVAPFNLNEQTGRLELANIIACLCCHEMEVERFDTINNQWNKVIKNVIPQGAPTSPTLINIVCQRLDYYLLAVAKRFSLNYTRYADDITFSSDHNVYQKNGEFIAEVQRIIEKENFNIKDSKTRLQKRGYRQEVTGLVVNHKPNVHNNYIKQIRHWIYVWEKFGYEYASNFFIKQYLKDKINPKTNTPDLSNVLSGKLNYLKMIRGFDNSTYIKLNDRFELLLNISIQKNENIVADQSTLLGMPEVENNENFKLPVLHTPKELVRILNKFTLNNSALKYSTHNWDAGQDEDIFKDLPDFLKKASKEFNPVSEYLKSLKKELHAKIMSFLFNEKVGEKGWGIYRVKFGWSSPELLKEMQISDIKPENFTLPQNAQFRLETNRGNETIQKFKQVIDIFKNEIEIRDENSILQDLLLEKHDKHLNGFEIKEMQNLENTNFFTDVDYFSRALTLIFENIQKRPEHRFVSYILVDEPDSNILEIIHHGSTAKGKSIKDKKLSLESGDFGTISMHLRNLCEWSIESEFKEGPIRINFLDSDKDTPPYVKIDQVDGFKYIFKFYK

SEQ ID NO: 165 - protein, 686 aa, unidentified
  source 1..686: note = Related to MTQF01000001.1; note = Flexibacter sp.
MILKTENIIFIKETFQNMKSKHDFLDLLNYVKPFIYGEKTQSFDLNHLNFHSNSNTKKYKSFIVKKKSGADRTINSPSKGLKAIQKCLNLIFQTIYDVHPSVYGFVKSKSIVNNANIHSGNHYIYNIDLKDFFSSIDQARIWGRLQYPPFNLNKERDLLEVANMISSLCCFKIDVERLDENNEWQIVNRNVLPQGAPTSPTITNIICQQLDFYLTAVAKRFGLRYSRYADDITFSSMHNVYNENSDFIKELNRVISSQNFHIKQSKTRLQKKGYRQEVTGLIVNAKPNVNSRYIKQLRMWLFYWENHGYEKANLFFGSQYFKDRGYVKKRVPNLEFVLDGKLNFLKMVKGAENGTYLKLYERFRVLSEKKISFQAVQISNIKEVKHDPQETVKLLKFFKYDNKYSFKQLVHKPVNENDFNFIEILKTANKQFMDFSVDNNNKLNIPKDLISGVQNLFEILRTSGIDFYNINNLHPLEDKNIGAKIQLFKGDYRFGNEKSESSILSDLIIRTALKKEFSDQINNIVYSFGENDNSGLFDYKQIIFYPELQKFQSKANFFTWVPNVKIALSIIFESILKHSNVNGNRNFTLEEKGIIINIERKAVNDLIKIELSILDKNSLLMGSIDNILSDMRRDFFPVLVGICDFKVQFKSIMEENYECRVLPYASKVKPIDEDPQGFKYIFTFYD

SEQ ID NO: 166 - protein, 692 aa, Flavobacterium sp.
  source 1..692: note = Related to NZ_LEKS01000017.1
MKLTQTDISFIKESFEKMRDKSDLVALLNYIKPILYGEKTYLFTVHDLNYHINNKNDNRYEKFEIRKKSGKSRVIHSPNNVLKSFQKCLNLVFQTVYKFHSSATGFIGGKSIVDNAKIHVGSNYVYNIDLRDFFPSIDQARLWGRLQYPPFNLNKENDNIQLANIIAYLCCHKYKVKRLIDGKWKIVEKSVLPQGAPTSPVVSNIICQRLDFYLSAVAKRFGAKYSRYADDITFSSVHHIYKENHAFILEVQKIIANENFTINPQKTRLQEGAYKQMVTGLVVNQNVNVSKKYIKELRMWLFFWETYGVQKATVKFNLYRAGQDIGSSSNMIKVIRGKLDFLKMVKGANNLAYLKLLKRFTELVSAQNSMQKKLDKQKHIETFKISDFNLHQKTTHHEPQKLVSLLNNFTAGSNLKYATHGWEEHETYDEFIIKLTRDWQKIEDDLFDLKKTFATKISVFLDSEKVEEIGWGAKTANERIYFGWKSKSLVEWSHANPNKSPFYFPIPQDKKVFFDGIQTNYFYDVTEIFKRQIEIREENNHLHNLFMDLRKNYLGYDFKLTSINTKGITFFTDVNTLKNGIIKIFESIKKRPQFPKIKIVVEHLENSIEIKIIHVDSICNRPINDNKILLANTGDFADLNKYFTNLCDWSIESNFIDGKSYRINYLDSRVGIDKISTISKREGFTFILRFYL

SEQ ID NO: 167 - protein, 442 aa, Flavobacterium sp.
  source 1..442: note = Related to NZ_CP089095.1
MILTPEFKFQVQTAFKEMQSKSDFLELLNIAKQMMYGDKTVPFSEKQLNYFITKDSQVIKSRVDFRIDLSKFEPFIEENVVIEKKNINRKDCYVPFIIKKKSGQDRTIHAPVKGLKEFQKALNIILQCLHEPHTAATGFVIGKSIVDNAKKHIGQTYVYNIDLKDFFPSVDRSRVWGRLLVAPFNLGTTVERKNIANFIATLCCTPMEVERFKEGNWIKITTSVLPQGAPTSPTLTNIICEKLDKRLNGVAKRFGLNYSRYADDITFSSKHNAYEVSPTKVEKIFASGTTFDCEVRKIITEQNFHIKETKVRLQKRGYRQEVTGLVVNDKINVTRLYVKQLRQWLYLWERYGYDKSYAIFLNIYLADKGHVKSEQPNMAMVIEGKLLYLKMVKGADDGTYLKLKKRFDLLLGTTSKNNSEAVNILDLIFDVGLDEAMTHYKK

SEQ ID NO: 168 - protein, 425 aa, Flavobacterium sp.
  source 1..425: note = Related to NZ_QLSZ01000003.1; note = Flavobacterium aciduliphilum
MQTKSDFLSLLNLAKLEIYGEKTIPFSEKQFNYYLTKDSSTFKSKIDFQIDLSGDSVVINENVIVEKKNQQRKSCYTSFAIKKKSGKDRTIHAPIKGLKEFQKALCLVLQCLYEPHSAATGFVLGKSIVDNAKKHVGQTYVYNIDLKDFFPSIDKSRVWGRLLVAPFNLGNSNERRTLANFIATICCTPMEVERFQEGKWITVTTSVLPQGAPTSPAITNIICEKLDRRLTGVAKRFGLNYTRYADDITFSSKHNTYEVSDSKVEKIFVAGSSFDCEVRKIISEQNFHIKESKVRLQKRGYRQEVTGLVVNDKINVTRRYVKQLRQWLYFWERYGYDKAYAFFLNYYLSDKGHIKFEKPNMAMVVEGKLLYLKMVKGANDGTYLKLKERFDLLVGTASKNNNEKATIVDLIFDVGLDEAMTHYKK

SEQ ID NO: 169 - protein, 452 aa, Flavobacterium sp.
  source 1..452: note = Related to NZ_OU957226.1
MKITLEQSKTIQEAFKKMDSKNDFLALLNEAKKLMYGDKTIPFEEKQLNYYISKDSIKNKSVKSEKNISTVLLKEETSFKASVRKPSYTSFTIKKKSGSDRTIYAPVKGLKELQKALNIILQAIHEPHIAATGFVLGKSIVDNAKVHVGQIYVYNLDLKDFFPSVDKARVWGRLLVAPFNLNTSDERKKIANMIAGLSCTPMEVERFIDNNWVKITTAVLPQGAPTSPTLTNTICERMDKQLSGVAKRFGLNYTRYADDITFSSKHNSYEVSPNKFEKIFVSGSTFDKEVRKIIANQNFHVKESKVRLQQEGFRQEVTGLVVNEKVNVTRRYIKQLRLWLYYWETYGYDKSYSFFLQKYCREKGNVKKGQPNMAMVLDGKLLYLKMVKGEKDETYLKMKNRFDVLVLNTTPSKSLVPNKLLEVKDTKENIGKNIVDLILEIGLEGAMKNYKS

SEQ ID NO: 170 - protein, 452 aa, Flavobacterium sp.
  source 1..452: note = Related to JABSNN010000002.1
MKLALEQINNLKTAFEKMDSKEDFLALLNLAKSFLYGENTVVFEMKQLNYYINKDQKTTNKKVNLEGLLNTGDDRFKTAVRKPAYTSFSIKKKSREDRILHAPVKGLKEFQKALNLIFQCVYEPHKAATGFVLGKSIVDNAKLHVNQNYVYNLDLKDFFPSIDQARVWGRIKAAPFNLETTVERQKIANMIAALCCTPMEVERNTNGEWKKITLPVLPQGAPTSPTLTNAICERLDLRLAGVAKRFGLNYSRYADDITFSSKHNSFEKTKNVFENIYLKDSTFDKEVRKIIASQNFHIKESKVRLQKQGYRQEVTGIVVNDKVNINQKYIKQLRQWLFYWETFGYDRAYQYFLQKYVANKGHVKKGQPNMAMVLDGKLLYLKMVKGETDPAYLKLRERFEKLIGSKSNISEILDLWETKGIDEAMKAFYFAKQQDVLPKVSTRLNVEDIFYL

SEQ ID NO: 171 - protein, 426 aa, unidentified
  source 1..426: note = Related to LMQN01000015.1; note = Chryseobacterium sp.
MKFTQEQKSQIRSLFDKMNSKSDFLFLLNKAKMIEYEDKMIDFEEKQLNFYINKDSTNKKDAESLTKNSKNFFYNSFSIKKKSGKERIINAPVTGLKNFQKSLNIILQCVFDCHDAATGFVPGKSIVDNAKIHVGQTYVYNIDLKDFFSSIDKSRIWGRLLFPPFNLNTSSQRKKIANMIAGLACTPMEVERFIDGYWCNIENSVLPQGSPMSPIITNIICERLDRQLTGVSKRFGLNYSRYADDITFSGKHNTYLKGLGVVEKIFEKNSTFDLEVRRIINNEKFHIQEDKVRLQKEGYRQEVTGLVVNNKVNVSKRYIKQLRQWIYYLETYGYDKSYSLFLSNYIDGKKNSSSQTPNMLMVIRGKLLYLKMVKGDKNETYLKLKNRFDSVIMPHSSISFIIDIWKNDGIEKAMEIYYNQKVKNEK

SEQ ID NO: 172 - protein, 442 aa, Flavobacterium sp.
  source 1..442: note = Related to NC_016001.1; note = Flavobacterium branchiophilum
MKTNVDQQTEIKELFQNMKKEADLWHLINVAKKHIHGTKASNFKPKLLQHLILKDAKEFNLENSTSVFYHQFEIKKKSGGIRTIHAPHPKLKEVQEALNYIFQCVYLPHPNATGFVVGKSIVDNAKKHVNQKYVYNLDLKDFFPSIDKSRVWGRLLIAPFNLKNSPKGIKIANMIASICCTKLDVERIKDGVSHTILTSVLPQGAPTSPTLTNAICEKMDIRLAGAAKRFGLQYSRYADDITFSSNHNACEYAKGKFEKIYKKNSVFDKEVRRIITDQNFRINESKVRLQVKNVKQEVTGITVNEKLNVSRDYIKQLRKWLYYWESYGFDKASTFFTQNYMAEKGHLVSKKPNMTHVLEGKLLYLKMVKGAEDSTYIGLKTRFEKLSGRVNKIDQLLDVWEKEGVEAAISFYNFGKKAKKIATIVDFESFLIDNINIDNKIL

SEQ ID NO: 173 - protein, 460 aa, unidentified
  source 1..460: note = Related to NZ_CP060695.1; note = Polaribacter pectinis
MKLAIDQEKKIKQLFAKMNSKEEFLQLLNFSKKIIYKEETIPFTITQLNFYISKDSNKFNSKKKYYHTFEIKKKSGAPRTIHAPCKGLLEFQKSLNIILQALHKPHEAATGFVPNKSIVENAKKHINKNYVYNIDLKDFFPSVDAARVWGRLKVAPFNLGSSDNRKQIANMIKSLCCHKMKVERFVDNNWIKLEKLVLPQGAATSPTLTNAICERMDIKLTGLANRFNLDYTRYADDITFSSNHNTYKISLEKEEAIFEKDTTFDIELRRIIKEQNFHIKETKVRLQKRGYRQEVTGLVVNDKINIKRSYIKSVRHNLYLWERFGYDKAYELFLNNYLKEKGHTKKGNPNMLMVLEGKLLYLKMVKGESDSTYLKLKSRFDKLSITPQPVEKIKKRLTLKEKRLKTDNAKNKSDISSIEFMKLVAKAKAKKEANKKKNINKILDVLFEKGLDEAMKLYDK

SEQ ID NO: 174 - protein, 440 aa, unidentified
  source 1..440: note = Related to NZ_SLUP01000001.1; note = Mariniflexile fucanivorans
MKPTPNQKYTIRQLFAEMKTKEDFLSLLNYSKEVLYREKMIPFSMKQLNFYGSPKFNIHRFDKKFYHEFEIPKKSGLKRLIHAPTKGLKEFQKALNLILHCVYEPHYAATGFVPDKSIVDNSKPHVGKLYVYNIDLKDFFPSIDASRVWGRLLVTPFNLGTTNERRYIANMIKILCCHYLPAERFVDNVWVTEKRHVLPQGAATSPTLTNAICERLDIRLSGVAKRFGLTYTRYADDITFSSMHNSFPNKEGVAETIFKKGSTFDLELRKVIESQNFHIKENKVRLQKKGYKQEVTGLVVNDKINVPRSYIKDLRHWIYFWERYGYDKAYELFLKKYSNNRGHVKKGKPNMGMVIEGKLLYLKMVKGSEDSTYLGLRERFKTICDENSNDNNKTVNTHIEGLLEEFFLKMDKPIENTNTQKILDLIFEEGLDRAMELYKT

SEQ ID NO: 175 - protein, 434 aa, unidentified
  source 1..434: note = Related to NZ_CP019333.1; note = Gilvibacter sp.
MKLNTYQTEYIRDLFANMSSKKDFLFLLNKVKELIYKEKTIAFSEQQLNYYINLNPNVKMEKKYFSFSIEKKSGGTRTIHAPSEGLKEFQKAVSIILSAIHQPHDNATGFIQNRSIVNNARKHIGKNYVYNIDLKDFFPSIDANRVWARLLIEPFNLGTSVERKKIANMIKAICCTNMEVQRLIDDKWESVNLNVLPQGASTSPVLTNIICDRLDKRLTGVAKRFGLNYTRYADDITFSSNHNVYRLDSGDTETIYTANSSFDREVRRIIVGQKFHVKESKVRLQKRGYRQEVTGLTVNEKVNVPKRYIKEIRHWIYFWERYGYDKATELFRVKYRKDKGHIKNDSPNLIMVLEGKLLYLKMVKGEYDPTYVKLRSRFRELLNPDSAITINLSDDNYESIILDTIFSDGLDEAMKEYDPVYIEIMSPEQRNKDV

SEQ ID NO: 176 - protein, 377 aa, unidentified
  source 1..377: note = Related to NZ_JAFIDN010000022.1; note = Proposed Natronogracilivirgula saccharolytica
MEDLLSLIKLVNEMLYGETAKAVKLKSLTYYSNPSLRGDVYEKFKIPKKSGGVRVIHSPVSGLKSIQKAIAHILQSVFEPHPNATGFVTDKSVVDNAKPHTGKNFVFNTDLKDFFPSIDKPRFWKRLQYPPFNLNRNNGRLELANRISAICFTDLEVERKVEGHWKKQVKDVLPQGAPTSPIITNIICYRLDVKLTSLAEQFGCAYTRYADDITFSSNHNIYNKDGEFRASLKKLIKEENFHVKHQKTRLNTKTERQEVTGLTVNEKVNVNRRYIKQLRHWIYFWEQYGKEKAEELILNNYKADKGHVKNGEPDIENVIDGKLRYLKMVKGANDHSYRKLQHRFEVLTGISINFNPDRLFEVWDSDGIVAAMEYYYG

SEQ ID NO: 177 - protein, 454 aa, unidentified
  source 1..454: note = Related to SEFL01001225.1; note = Sphingobacteriales bacterium
MQFSAEHITHIRQEFATMATKEEFVALLNYAKEILIGDKYQPFELKQITYYANAKVSGVRYKKFEIKKKSGGVRVIHSPIKGLSIIQRCLNAILQCVFTPHDAAKGFVLGRSIVDNAKKHVGRNYVYNIDLKDFFPSVDQARVWKCLQLPPFNLVDSEKSQIVTRKTIKSEVLALMKANGLGEDRQTLNRALDKVSPQINKGRIHLAHIIASLSCTEMIVERCIDGEWQEVKKNVLPQGAATSPILTNLVCQRLDYLLTGVAKRFGLRYTRYADDITFSSQHNIFKEDGEFIKELRRIIAEQGFHIKESKVRLQQAAFRQEVTGLIVNKTVNVNQNYIKQLRMWLYNWERYGYDRAYNYFLPSYFASKTTPVKGKPDMANVIGGKLNYLKMVKGENNEMYLKLKERFDFLISNCLPIRSILDIWEHEGIEKAMGSFYNVKADQQVLSIIKGDLL

SEQ ID NO: 178 - protein, 401 aa, unidentified
  source 1..401: note = Related to NZ_BDCW01000118.1; note = Tenacibaculum ovolyticum
MKIEKKHINYIRNAFEKMQSSNDFLKLLNYTKPLVYGENYVPFELKQIVFYSNPKNTSKAYTEFQIKKKSGGIRTINAPDNHLKIIQKVLAFILQCIFQPHEAAKGFVKGKSIIDNAREHTGKNYVYNIDFKDFFSSIDKARIKGSLKNEPFNLNNKQALANIISEICCTEMDVEHKNEKGNWIRIKSNVLPQGAPTSPIFSNIICKEVDVKLTGVAKRFNLKYTRYADDITFSSMHNIYQENGDFLKELNRVIKVESFHIKESKTRLKKTGYRQEVTGLVVNDSVNVRKRYVKQIRMWLYYWEKYGYNKAKTIFLRDYIKDKGLLKSMKPNFKNVLSGKLEYLKMVKGASNSTYISLNLRFEKLSNKNNHIDRVLEEWERNGINKAILEYYRKPQQLFIQ

SEQ ID NO: 179 - protein, 480 aa, unidentified
  source 1..480: note = Related to NZ_JHZZ01000001.1; note = Polaribacter sp.
MKIEKEHIKYIQDEFATMQSREDFLDLLNYAKPLIYGDNYIPFELKQITYYANPKRSRKAYKEFQIKKKSGGVRTIYAPENGLKTIQKTIALILQCVFEPHEAAKGFVMGKSIVDNAKDHVGKNYVYNIDLKDFFPSIDQARVWACLKLAPFNLIDQKTSKEFDFKKLETGIRRFTTEFDEEIFYQLKGGTFLLVNDKKGNYKAYQKRLKKLDKDVFKDAAKYITTDANLKELEKLTVHREKLANMIASLSCTKMQVERKDENGSWVKVIRNVLPQGAPTSPVFSNIICQRLDKKLSGVAKRFHLNYTRYADDITFSSMHNVYQENGKFLKELTKVIKGQNFDIKESKTRLQKTGYRQEVTGLIVNDKVNVRKRYVKQVRMWLYYWEKYGYNKAESIFLKDYFIDKGHVKNAKPNFGNVLSGKLEYLKMVKGFENTTYLSLNKRFEKLLGVIDPIERILNEWENNGIDSAMKIYKTDIHE

SEQ ID NO: 180 - protein, 752 aa, unidentified
  source 1..752: note = Related to NC_015510.1; note = Haliscomenobacter hydrossis
MQLEQEQVEIIRTMFQQIKSKNDLLKLINFAKKLLFGEAAHAVPLKTLTYYGNANLASDAYRTFSIRKKSGGKRPIHAPVKGLKPIQKALNLILQCLFTPHHAANGFVPERSIVDNAKVHQGAHYVYNIDLKDFFPSIDLSRVAACLRLPPFNLIDTAEEPLAFLVANLCCTPILVERQNESGEWINKILNVLPQGAPTSPTITNIVAQRLDKRLTGLARRFGANFSRYADDITFSSMHNIYKQDEAFTIELTRIIESQGFYINPSKTRLQKTGFRQEVTGLVVNEKVNVHRRYVKQIRHWLYLWERYGYAQAEQIFKREYVKDKGYAKKGNPKLENVLEGKLLFMKMVKGGEDGTFLGLWRRFDHLLIELNEVRDNTSIPEEAFTEKEQLTRTIKISLLPIDDGKFIQTLQHDKLIPMGVALPYEETFENNIEETYEKPSLQHNPINTMNFLKNFKYDNASGFKELVHAPFDVDNFDFEKILDTVKNHPNFILTFKNTRAEKFTGELPLGLWKKAKELINHLSTEGLDLFKLTKQHPIESEKFLTEIQDFKKNYRFSSDDTESSILKKLIIHVAKKAEHKNSDKNIVFSFGNTDQSGQFSDDQLVFLPDERIFGLRSGFFTWVPNVRNTLAWIFKGILQHSNVNGSRTFEKKSKKIVVEINRFRDKDIGLTKVQLTISDEFSVLKKSPDQFLEDLLNSEPCKHYLRNIADWAIECDCDNGESYLFQILPKNDYKRLERKVNSFKHIITFYD

SEQ ID NO: 181 - protein, 418 aa, unidentified
  source 1..418: note = Related to JACJYR010000001.1; note = Lewinellaceae bacterium
MQINQEHIDTIKARFQQMKTKEELLELVNFAKTLVYGEKAKPVPLRTLTYYGNIQVAGSAYKEFSIRKKSGGVRKIHSPVKGLKPIQKALNLILQCVFTPHQAATGFVPEKSIVDNARVHRGMNYVYNIDLKDFFPSVDMNRVKACLRLPPFNVIYTDEAPLAFLIANLCCTPIEVERKNDKGEWEKKVMNVLPQGAPTSPTVTNIICQRLDRKLTGLARKYGAQYTRYADDITFSSMHNIYEESSEFIKLNEGYRNFIRDMVKIIEGQRFSINPKKTRLQKSAYRQEVTGLVVNEKVNVRRRYVKQIRRWLYLWERYGYVQAEAIFRNDYRADKGHVKKGEPSLQNVLDGKLLFLKMVKGGGDGTFSKLLERFTKLTDSLEQVRSENVDLDSVLDVLLNKGLDDAMNLFDKFKSLGQ

SEQ ID NO: 182 - protein, 429 aa, unidentified
  source 1..429: note = Related to NZ_JAAORA010000001.1; note = Candidatus Chlorobium masyuteum
MKIEQSHILEVRSVFEKMHSREDFLNLLNQVKPLVYGVKTVPIELKQLTWYANPNLGGKRYSDFSIKKKSGADRLIHAPVSGMKSIQKALSFILQCVFEPHKAATGFVIGRSIVDNARIHQGCNYVFNIDLKDFFPSINQSRVWACLQMEPFNLNEKKSIAPTESADKYFMVRSRTIAGRKQIANMIAAICCTEMTVERQDEKGEWVQVKQNVLPQGAPTSPVITNIVCKKLDHRLTGVANRFGLRYSRYADDITFSSMHNVYQKDGEFLKELHRIITDQGFHINEKKTRLQKTGHRQEVTGLVVNEKVNVQKRYIKQLRMWLYYWERYGYEKAERIFLEQYMDDRGHLLDGGKPNMINVLAGKLDYLRMVKGADNSAYKKMKKHFDNLIIENRSNVITDPLRVKELDDVLNTFFESGFDVAMNKYSMN

SEQ ID NO: 183 - protein, 382 aa, unidentified
  source 1..382: note = Related to JADJUM010000002.1; note = Saprospiraceae bacterium
MTNREDLLTLLNLANKHLHSNKALDFELKQLNWYSNPAINKRRYKTFSIQKKSGAERKIHAPVKTLKYIQQALCFVLECVFEPHKAAYGFVKNKSIVDNAQNHVGQIYVYNIDLKDFFPSIEAGRLFSRLQYPPFSLSDKRDVANVITWLCTEKLEVERFNKENSTWEAKELNVLPQGAPTSPLITNIICYKLDYVLSAVAKRFGLKYSRYADDITFSSMHNVYQKNSEFLTELKRVIQDQNFHIKESKTRLQKDGFRKEVTGLLVHESANVHKRYIKQLRMWLYYWERYGYEKAYGFFLPQYVGDRGNVKKGNPNMENVIGGKLEYLKMVKGVENELYLKLKDRLSILIGYTEPINQILDVWEIEGIEKLWKFIIRINETK

SEQ ID NO: 184 - protein, 716 aa, unidentified
  source 1..716: note = Related to JACJZT010000003.1; note = Flavobacteriales bacterium
MKLEEAHIKSIKSSFEKMKDKEDLLQLLNFVKPLVYGEKTIPFKLKQLTWYANSTLKGRRYKEFNIKKKSGEHRTINSPVSGLKAIQRILNFILQCVYEPHKAAMGFVNGKSIVDNARLHTGNHYVYNIDLKDFFPSIEAGRIWSRFQHPPFNLNDRTNRKELANIITWLCCCEMEVERLDEKNQWHIVKRNVLPQGAPTSPTISNIVCHQLDFYLSAVAKRFGLKYSRYADDITYSSMHNVYQKGSEFLSEVHRIISAQSFHINVNKTRLQKAGYRQEVTGLLVNENVNLQTRYIKQLRMWLYYWERYGYERASGFFLQQYVADKGHVKNGKPDLANVISGKLDYLKMVKGSENDLYLKLKNRFNQLTTKTIDQIDLSKVKKISKPSERESIIEENIDINNNNSYPILHNPQKTITLLKSFSVNEKDLKYSTHSWEEGKYNSYEEYIEKIRIEWNEIKDELKNQSPRLFAKISNFLFNNKLGQKNEEGYYISWGEKRLKFGWSSANLKDHMSDPGNSPFSCPIPDQIRELDKRHDLLYFKDYADVFKNEIEFREDSNNFKKMILELWEKELSYDFNIKGVEQFAGFSFFTDVHLVKESLRTVFRDMYKVKPQFPTIIIEKISSFNERGYHLIKVTQKDSFITRDVNDPKLTSPSGNLFSIIRNLKNLSDYSIVSRFRDGRNYRLNYLTSTKTDFIETLTQDENTLGFSHEFKFYL

SEQ ID NO: 185 - protein, 755 aa, unidentified
  source 1..755: note = Related to SEAO01000392.1; note = Chryseobacterium sp.
MITEKDKEYIDIAFHKMRNREDLLSLLNYAKTILFGQEASQIALHQLSYYANPKAGGKRYHTFRIAKKTGGSRKIHAPVEGLRVIQQCLNLILKCVYKTQQQAHGFAQGKSIKTNAAMHVGSYYVFNIDLKDFFPSIDQARVWKVLQLEPFNLLNREPAEQEGIDNYEIANLTAALCCTSMMVERIDEEGELIKVRRNVLPQGAPTSPLLSNVICQRLDFLLAGVAKRFGLKYSRFADDITFSSLHNVFQSHSPFTKELTRIIYDQGFRINEQKVRLQRSAYRQMVTGIVVNEKTNLTKKYLVSLRKWIYLWETYGFARTLEIYRQEYKLEQIKPLDIDLVAILRGKIAFLKNVLGDTNPRYKQYKYRFDALNAPTLAENMPVQGDAREMAKKLDRIDELLKSNKIPSVDASIEELREFVSLVHLRSEIPLIDNPSKETNLEDDIHDPRFVVSLLSKFTEETNLKYTVHMWDSENRYGSFQDFSSAIFADIRQYKLRSLPRYNSRLYWKIIYPFIIQEHTLKKKSGEPFEYAWGRYNLKLGYHYPSTLAQWMDSNPNKSPFMMPISKDLRPAEPIKGRSISYFEDVVDIFKQAIEFRGNDLYYLFKELTGSLLFDFNIELLNLKGISFFTDTHQVEKALRIIFSSIRKYTESPQIRVSGTYISEAHYFDIEILQLGSFCDKPIDDPKITLKGNKGDFNTIRTLLHSLCNWSVESRFRVGDKYKFYRLNYLNSSASDEIEEMDAAEGFKHRLRFYI

SEQ ID NO: 186 - protein, 739 aa, unidentified
  source 1..739: note = Related to NZ_CAKKMW010000005.1; note = Pedobacter sp.
MKSREDLLDLINYSKKALYGEDVEPITISQLTFYSNPSAGGKRYRQFNIAKSSGQYRAIHAPVQGLLLIQRCLNLILSCIYKPTPQAHGFTPGRSVKTNAFVHVGNYYVFNVDLKDFFPSIDQARIWRMLQLPPFNLVAKNDSRISPKNRYELASMISAICCTSMLVDRIDRKGNLTRVVRNVLPQGAPTSPFFSNMICQRLDQRLMGVAKRFGLKYTRYADDITFSSLHNVFHSHNPFIVEMRRIITEQGFTVNEDKVRLQRTGYRQMVTGLVVNEKVNVTREFIKSLRKSLYLLERYNEEKASQAYIKDNKLDDVSINDIDIQAIVTGKIAYLKDILGKNSPRYLSYKTRIDQLYPGKGTTVPVEKVDAKTLARNIDRVKHNLLNNELPTENASFEELRAFVRLLRDENSVSALLVDKAGQAEEDEIHDPNFVVSVLEKFTSETHLKYATHYWDTQDRYKNYNVFRKSIMEDVRLFKLRLLPRYNSHLYWKVIHPFLIRDKPDEKKSGEKFEYQWGRHKLKVGLQYPGILEEWMQENPGKSPFSMPIPKELRPPFRISGKSLTYFEDFVDEFKNEIEFRRNDLHYLIKDITSSMEFDFDISITNLKGLSFYTDTYQVEQALRIIFNAIRKYPGAPKIIVNGSYDTEAKFIDIDILHIDSFCDRPLNDRKLQLMDKRGDFFTIRKLLNSLCDWSIQSRFRVGNEYTSYTIHYLNSTGAQNPEKSADALGFLHKLRFYL

SEQ ID NO: 187 - protein, 761 aa, unidentified
  source 1..761: note = Related to NZ_JAFVME010000001.1; note = Pedobacter sp.
MKIEKDQKDYVVKAFHSMRDRDDFVKLLNYAKKIIYGEKTVFFDLRQLTYYSNPNVNFKRYKSFEIAKKNGKSRKIHAPVKGLLVIQKCLNLILNCIFQPTVFATGFVMGKSIVDNAAFHAGNYYVYNIDLKDFFHSVDQARVWKCLQLKPINLSLFQNPEDNKYNSSLEIVNIISALTCTELLVTRTDRNGKEIEVNKNVLPQGAPTSPLITNLVCQKLDYLLSATAKRFGLKYSRYADDITFSSLHNVYQQNSDFLIELNRIIKDQGFVINEEKVRLQKDGFKQMVTGLVVNKHPNVSKSFINNIKIDLYYWEHYGYVKATKFFLRRYKHTKESTKKVNVDMSNVICGRLQYLKMIKGANNKTYTSLALKYQKLLAKKQKSELNPEDVHFKSVESSGYDLTENGLINPDLKTFMVSILNSDQIALAEKQEIFANVNLELSRLVNNDNTGKNSLGSSSSINSSSVTTDGWKSEHSPKDVARFMSLFNKRDGLKYLTHDFDEEGKFEISFFLEKWRSIFEQSLRGKNGFEIPSSLYRIVNEFAFSGKPNWTSVNDRLVNEGWSTDKWIKWSSKNMLHPFRNTGLKVIIEDFRRLIRVESPNLEFLVNEAFSDALIDENNKYSLKLDQVSKADFYTHIPSLKRALFAIFSAMGKYGGDRDISVSYQRSTEDDFFVRKLIISQTNSYPTKELEQILIEWNTDKGAMGGIKHNLYGYCDWSIETKIDNTPYRINILKDKKTPKFDVIGMEEIIGFKHILKFYYI

SEQ ID NO: 188 - protein, 765 aa, unidentified
  source 1..765: note = Related to NZ_QEAS01000037.1; note = Pararcticibacter amylolyticus
IQRMKQQASKNIYIMKLTKNQCEYIVKRFREMRTREDFLHLANYAKKIIYGEKAYDFKLNQLTYYSNPRVNPNRYRTFTVKKKSGGVRMIHAPTKGLMEIQKSLNLILNCVFNAHSSAFGFVPGKSIRDNAAVHAGNYYVYNIDLKDFFFSIDQARVWKCFQLAPFLLGKKTDTLNDEKGKNLEVVNMISALCCAEIETGMQQTDGTLNIVKKNVVPQGAPTSPIVTNIVCQRLDFLLAAAAKRFGLKYSRYADDITFSSLHNVYQTDSDFIAEIKRVIKEQGFQINSSKTRLQKMDERQTVTGLVVNKNVNVPRNYIKKMRSWLYLWERYGYEKTYSFFLNDYIRDKGHLKKRTPDMANVLRGKLEFLKIVKGTDDKVYQQLNNRYTVLIARNRKDSLNDRLLNYWELHGLHAAWEHFKAETGIMTIDKFLDKLLKETVTDDERKNKLLKLIQSSLNTSSLLTKSTSKFTIPDNEKLNMPKRVADFMSLFDDPAGLKYLTHDFDESDQIFDIESFLPQTRKVFEDKTKPGNLTIPSSLWKIVYEFAFSETPDWNKGCKDGWSLPDRIKWSIDSKKHLKRNEGFAATIESFRKLTRIEAPELKRLINQIVKEKLGDKYPECTIKLKDCEKADFYTHVAYFSEAIKLLLDGFNKRIGECKEIAITYTRKNDDPYRLRIITLEHVGSFPMKPLDDFFRDLGNGKGELADARNKLTGYCDWAIETIWDSKLVRITLLGAGNEIEYLPNTKEVSNRITGFTHILTFYQK

SEQ ID NO: 189 - protein, 461 aa, unidentified
  source 1..461: note = Related to NZ_CP049834.1; note = Aquirufa sp.
MKPTKEQIDSIKTKFSAMQTTEDLLDLLNFSKSIIYGEKVIPFKLKDITFYCNPKRTIDHKWKFFHQYQEFTIAKKSGGTRTIYAPKKGLKAVQRSIAFVFQCIFEPHKSTMGFTKERSIVHNAQLHINSYYVLNIDLKDFFPSVDQARVWKCLQQAPFNLNQATSKVFETFAIDEFKIKYPEQSKKIHPNKKFVISDIDSNYFKATNRIPKAARLELANMLAAICCTEMEVESILADGSVEKIKKNVLPQGAPTSPILSNVVCQKLDLRLAGVAKRFGLLYSRYADDITFSSLHNVFQVDSEFKKELYRIILDQGFRINEKKTRLQKDGYKKEVTGLLVHGQVNVQKSFIKDLRMWLNLWERYGYEKANNIFLNENGPLLNTTAKIKKAELRNTLEGKLNYLSMVKGLNNITYVKLNNRFRTLKPTIKIHTEDRSAHIEKTLELLLNNGINDAMAFYQPQ

SEQ ID NO: 190 - protein, 402 aa, unidentified
  source 1..402: note = Related to NZ_CP094531.1; note = Chryseobacterium sp.
MDTKEITIEQKKKIVEFFGVVNTSFGFCVLLNYCQRILYPKTVYQISQFELRTLAHPDSKKRYKTFTIRKKNGGTRTIHAPKPELKMVLRCINLILQCVYTVHENANGFVEGKSVVDNAKLHCNNNYIFNIDLKDFFPSIEIGRVLNRLSYPPFNFKKEKGTEEIGNYIAWLACENTLVERELDGNIIKTVKRVLPQGSPTSPILSNIICERLDRRLTGLANRFGLRYSRYADDVTFSSMHNVYQKDGEFRKEMERIISEQYFTINQSKVRLQKSIMRQEVTGITVNKQVNVSQKYIKQLRMWLYYWESYGTVKGLSLFLQSYIKDKSHVKKVVPTPEFMEAVIGGKLNYLSMVKGTENSTYLKLKERFDKLSSNYVDIDNILSVWEENGIDEAINLYSKTV

SEQ ID NO: 191 - protein, 402 aa, unidentified
  source 1..402: note = Related to CP033935.1; note = Chryseobacterium balustinum
MVTKEITIEQKKIISDTFRWVKNVSDFCLVLNYCQSIVYPQTYFDISEYLLKTLAHPNSKNRYKTFKIKKKNGGTRTIHSPKPELKILLRCINLILQCTYTVHQNAYGFVEGKSVVDNAKLHCNNNYVFNIDLKDFFPSIEIGRVLNRLSFPPFNLKKENGNEKIGNYIAWLACENILVERELNGKIIKTVKRVLPQGSPISPILTNIICERLDRRLTGLANRFGVRYSRYADDITFSSMHNVYQKDGEFRKEMERIISEQYFTINQSKVRLQKSTVRQEVTGITVNKQVNVSQKYIKQLRMWLYFCETYGTNKGLSLFLKSYIKDKTHVKKAIPTPEFMEAVIVGKLNYLSMVKGVENSTYLKLKERFDNLSSTYVDVENILAVWEENGIDEAMDLYSKIV

SEQ ID NO: 192 - protein, 417 aa, unidentified
  source 1..417: note = Related to VOXE01000004.1; note = Chryseobacterium sp.
MVKNISIEQAEFIKKFFKSMKDLRDFCMLIDICQDILYPEFKDRTRIDEYVIKTLAHPKSKNRYHSFEIKKKNGGMRTIHAPQPELKVVLQCINLMFQTVFTPHSAAYGFVKDASVVDNANLHCGNNYVFNIDLKDFFPSIEIGRVLNRLSFPPFNFNKENGREELGNYIAWLACENTIVERLVDGKIQKAEKRVLPQGSPLSPILTNIICERLDRRLTGLAKRFGVKYSRYADDITFSSMQNVYQEEGAFRKELGRIVSDQYFIINQDKVRLQKSGTRQEVTGITVNEFSNVTRTYVKRIRLWLSFWEKFGAEKAFNLFLNGYIKDKGHVKNLGKTSFFMENVIEGKLNYLKMVKGENNSTYLGLKERFEKLSLRNKSVDQLLDTWEKNGIDEAMSKFYADPSPRVDKVADQIALL

SEQ ID NO: 193 - protein, 401 aa, unidentified
  source 1..401: note = Related to nan
MEVKDISAEEKSLIARFFRICDSEKMFCHLLTYCQRLLYQQKIVNIIPQTLKALSHPNSSRRFKTFEISKKNGGKRTIHAPKADLKVVLKCLNLIMHSLYEPHNAAYGFVHGKSVVDNAKLHSNSLYVFNLDLKDFFPSIEIGRILNRLNHPPFNLKGEGKDKIALYIAWLSCENMIVEREIEGKLQKTVRRVLPQGSPVSPIFTNIICERLDYLLSAVAKRFGAVYSRYADDITFSSNHNIYQKDGAFRQEVERIIADQHFQINRSKVRLQKSNVRQEVTGITVNKEPNVARRYIKQIRMWLYFWETYGTDKAFSLFLKSYLKGKGHVKVPGNTPLFMEAVIRGKLDYLKMVKGESNSTYSQLLSRFEKVSSTPNHIDHILDVWENDGIETAIIKFETDG

SEQ ID NO: 194 - protein, 367 aa, unidentified
  source 1..367: note = Related to NZ_LR134503.1; note = Kaistella jeonii
MYPFELVKIDEYKVRTLAQQNSVLRYKTFEIKKKNGGVRHIHAPKSELKVLLKCINLIFHCIYTPHDSAYGFVDGRSVVDNARLHCRNNYVFNLDLKDFFPSIEIGRILKRFNFPPFNLNKENGRQEIGNYIAWLCCENMMVERELMGETKKVFKRVLPQGSPVSPILTNIICERLDYKLSAVAKKFGIKYTRYADDITFSSMHNVYHKEGDFRKEVERIIKEQYFVINQSKVRLQKTNVRQEVTGITVNSETNVPRRYVKQIRMWLYYWENYGDSKALSLFLQSYMKDKSHIKKAVPTLGFMTAVIGGKLNYLSMVKSEGNSTYLKLKDRFEIIAEKQIKISGISENTNDEKLKKFVSSSFNYDFL

SEQ ID NO: 195 - protein, 399 aa, unidentified
  source 1..399: note = Related to JAFIBT010000001.1; note = Chryseobacterium sp.
MNKYISSEDKVKIKEKFEKMSDLKEFCNLLNHCYSILFSDESNFIDEEKLKRFANQNSQNRYHYFEIKKKDGSTRIIHAPSSELKVLLKCLNLIFHSIFIPHHASYGFIYGRSILDNAKIHCKNNYVFNLDLQDFFSSIEIGRILKRFNYPPFSLNKDNGREIIGNYIGWIACEEIDLEEEVNGKLLKIKKKVLPQGSPLSPILTNIICERLDYKLTGVAKRFNVTYSRYADDITFSSMHNVYQEKSIFRNEVEKIIGEQYFRIKEKKTRLQKRNVRQKVTGIVVNEKVNVTKNYIKLIRLWLSMWEKYGAEKAYHLFINSYIKEKGFTKYIGSTPVFMENVIDGKLNYLKMIKGESNSTYQSLRERFNRLSIKNAKMNKILDLWEFESIEKAIEYYYR

SEQ ID NO: 196 - protein, 413 aa, unidentified
  source 1..413: note = Related to JADJJD010000012.1; note = Saprospiraceae bacterium
MKIKQSHIEHIRKQFTELQSKDDLVNLLSDAKNILWGEESTPVQLKSLTYYANPALCKKRYRTFTIKKKSGADRIIHAPVKGLKSILRSLNFVFQCMYKPHEAATGFIPEKSIVDNAKKHVGHHYVLNMDLKDFFHTFDLYRVKYGLLTEVWGINSIKKFKEHNEERFLEIDKIAFLIASLCTHPFKIDGEEKTVLPQGSPTSPTLTNILCKKLDSRLTGLAKRFGATYTRYADDITFSSPHNIYNDEAFNQELKRIIEEDQKLVINPKKTRLQKSVYRQEATGLIVNDKVNVRRRYVKQIRMWLYYWEKYGYGKAEEKFKRDYIADKGHVKNINAHLVNVLDGKLEFLKMVKGKEDDTYKKLKKRLDGLTDRESPITKILNIWENEGIEAAMATRDITEDDLSTNGRIIVIF

SEQ ID NO: 197 - protein, 457 aa, unidentified
  source 1..457: note = Related to QKTX01000002.1; note = Algoriphagus aquaeductus
MNLLIKNIQRFISIQIEYQAGVFKVLNIFKMKIEQVHIDQIRKQFAGLQTKEDLAKLLSFADIVLYGEARKPVRLKALTYYANPALCKKRYQTFIIKKKSGADRTIHAPVKGLKSLLQSLNLVLQCIHEPHEAATGFVLEKSIVDNAKKHVGHHYVLNIDLKDFFHSFDLYRVKFGLLNEVWGIKTISKFRKENGASFQKMDELAFLMASLCTHSFEIDGELKTVLPQGSPTSPTMTNILCKKLDRRLTGLANRFGATYTRYADDITFSSPHNIYEEVENPVLNQKGAYDDFLSELKRLIKEEKLTINPKKTRLQKAGYRQEATGLIVNDKVNVRRRYVKQIRMYLNFWEKYGYEKAEQIFKRDYLHDRGNVKLLKEGKLKVNFPKMKDVLGGKLEFLKMVKGVEDNTYLSLKDRLNNLNTTIVQNPIPKSVDLNSVLEVFTRKGLMEAMELFKKCK

SEQ ID NO: 198 - protein, 402 aa, unidentified
  source 1..402: note = Related to JADZFD010000065.1; note = Saprospiraceae bacterium
MKIEQTHIDQIRKQFAELQSKEDLVKLLSGAKNILYGKECKPVQLKSLTYYANPTLCKKRYQTFTIKKKSGADRTIHAPVKGLKSILRSLNYVLQCVNEPHEAATGFVLEKSIVDNAKKHVGHHYVLNMDLKDFFHSFDLYRVKFGLLHEAWSIGNISKYRETNEQQFQQKEELAFLLACLCTHPFKIDGEEKTVLPQGSPTSPTLTNILCKKLDRRLTGLANRFGATYTRYADDITFSSPHNIYTNGEFNKELKRIIEEDQKLVINPKKTRLQKAGYRQEATGLIVNDKVNVHRRYVKQIRMWLYYWEKYGNEKAEQIFKRDYIADKGHVKNINAHLVNVLDGKLEFLKMVKGVNDRTYIKLKNRYDKLTEKDSPINQLLDIWDTDGIDQAMSIYYKDKLE

SEQ ID NO: 199 - protein, 396 aa, unidentified
  source 1..396: note = Related to VGMK01000021.1; note = Bacteroidetes bacterium
MKIEQAHINQIRQQFAELQSKEDLVKLLSEAKNLLYGEKCKPVQLKSLTYYANPELCKKRYQTFTIKKKSGADRTINSPVKGLKSILRSLNFVLQCVYEPHEAATGFVLEKSIVDNAKKHVGHHYVLNMDLKDFFHTFDRNRVKMGFIYEPFNLSGDKEPLAFLLASLCTHPFEIDGKEKTVLPQGSPTSPTLTNILCKKLDRRLTGLANRFGATYTRYADDITFSSQHNIYTDEVFNNELKRIIEEDQKLIINPKKTRLQKAGYRQEATGLIVNDKVNVHRRYVKQIRMWLYYWEKYGYEKAEQIFKRDYLVDKGNVKNLNAKLENVLDGKLEFLKMVKGIEDVTYKGLKERFDLLNGIKVKKENEKIDLENVVNTILNKGLIEGINLYDRYKKS

SEQ ID NO: 200 - protein, 396 aa, Flavobacterium sp.
  source 1..396: note = Related to NZ_NOXV01000174.1; note = Flavobacterium cyanobacteriorum
MKIEQAHIDQIRKQFAELQSKEELVKLLSDAKNMLYGEECKPVQLKSLTYYANPTLCKKRYQTFTIKKKSGADRIIHAPVKGLKSILRSLNFVLQCVYESHEAATGFVLEKSIVDNAKKHVGHHYVLNMDLKDFFHTFDRNRVKMGFIYEPFNLNGDKEPLAFLLASLCTHPFEIDGEVKTVLPQGSPTSPTLTNILCKKLDRRLTGLANRFGATYTRYADDITFSSPHNIYTDEEFNKELKRIIEEDQKLIINPKKTRLQKAGYRQEATGLIVNDKVNVRRRYLKQIRMWLYYWEKYGYEKAEQIFKRDYIADKGHVKNINAHLVNVLDGKLEFLKMVKGTEDGTYKRLKERFDNLTGFKETKDQSKIDLSSVLNTLVNQGLNKAMSLYSRFKNQ

SEQ ID NO: 201 - protein, 403 aa, unidentified
  source 1..403: note = Related to QNTX01000003.1; note = Elizabethkingia miricola
MKIEQIHIKQIRKQFAELKSKEDLVILLSDAKNILHSEECKPFQLKSLTYYANPKLCKKRYQTFTIKKKSGADRTINAPVKGLKSILRSLNFVLQCVYEPHEAATGFVLQKSIVDNAKKHIGHHYVLNMDLKDFFHTFDRNRVKMGFIYAPFNLNGDKEPLAFLLASLCTHSFGIEGEVKTILPQGSPTSPTLTNILCSKLDRRLNGLANRFGATYTRYADDITFSSPHNIYNNEDFNKELKRIIEEDQKLVINPKKTRLQKAGFRQEVTGLIVNDKVNVQRRYVKQIRMWLYLWEKWGYEIAQQKFLNDYIVDKGHVKNINAHLVDVLDGKLEFLKMVKGIEDGTYMGLKQRFDRLVGVTDPINQLLDIWEKAGIESAMNNYYKNETTSLDKGSSNIEDLFK

SEQ ID NO: 202 - protein, 396 aa, unidentified
  source 1..396: note = Related to JAGPCT010000008.1; note = Saprospiraceae bacterium
MKIEQAHIEQIRKQFIELQSKEDLVKLLSDAKNMMYGEVCKPIQLKSLTYYANPSLCKKRCQTFTIKKKSGADRTIHSPVKGLKSILRSLNFVLQCVYEPHEAATGFVLEKSIVDNAKKHVGHHYVLNMDLKDFFHTFDRNRVKMGFMYEPFALNGDKEPLAFLLASLCTHPIEIEGEGKTVLPQGSPTSPTVTNILCKKLDRRLTGLANRFGATYTRYADDITFSSPHNIYTDEDFIKELKRIIEEDQKLVINPKKTRLQKTGHRQEVTGLIVNDKVNVHRSYVKQIRMWLYYWEKYGYEKADQIFKRDYIADKGHVKNKNAHLDNVLDGKLEFLKMVKGIEDRTFKGLKKRFDKLTGMNDPMNQLLDLWENKGIEDAMKNYYKSPPEMTIIFTL

SEQ ID NO: 203 - protein, 718 aa, unidentified
  source 1..718: note = Related to JAAZMS010000454.1; note = Bacteroidales bacterium
MKIEQAHIDQIRKEFAELQSKEDLVKLLSDAKNMLYGKECKPVQLKSLTYYANPTLCKKRYQTFTIKKKSGADRTINAPVKGLKSILRSLNFVLQCVCDPHEAATGFVLGKSIVDNAKKHVEHHYVLNMDLKDFFHTFDRNRVKMGFMYEPFNLNGDKEPLAFLLASLCTHPFEIDGEVKTVLPQGSPTSPTLTNILCKKLDRRLTGLANRFGATYTRYADDITFSSPHNIYTNEAFNKELKRIIEEDQKLVINPEKTRLQKAGYRQEATGLIVNDKVNVRRRYVKQIRMWLYYWEKYGYEKAQQIFILDYTTDKGHVKKGKPNLANVLDGKLEFLKMVKGENDSTYETLKKRFDKLYVIENSFSKVLDIWENEGILKNTDKNTGQKTSEHIIHNPKHITKFLRQFKENTDLKWTTHSWDNIKYASIDDFINALNENKKEFNRLYKHNRDLYNLIQYFIYQPKSNPIENGIPKYGWVNLQAMKFGWQFPDNKFLLWCKENYDNKSYDERKKPFQYLLPKELRPSKTVKGKEIKYFQDVVEIFKTEIQFREEYLYKEIRKRIHRISDFNFSGLDELKKLDFYTYTPGVLSAIDHIFEQIKRNETAIDINISYIIHNQKIILSITQINSFPSKELDINNTKSFLGGHLNAIAESLFSLADFSIESNFKYNGKIIPGELQITYENMIGKRVASNITLTQEPIFIESNNKLPGFTYKLTFYI

SEQ ID NO: 204 - protein, 389 aa, unidentified
  source 1..389: note = Related to NZQO01000147.1; note = Flavobacteriaceae bacterium
MKIDQSHIDHIRKQFADLQSKEELVILLSEAKNLLYGEECKPVQLKSLTYYANPEICKKRYQTFTIKKKSGADRTINAPVKGLKSILRSLNFVLQCIYEPHKAATGFVRDKSIVDNAKKHVGHHYVFNLDLKDFFHSFDRNRVKMGFIYEPFNLGGDKEPLAFLLASLCTHPFEVDGELKTVLPQGSPTSPTLTNILCKKLDRRLNGLANRFGATFTRYADDITFSSPHNIYNDEAFNNELKRIIEEDQELAINPKKTRLQKEGYRQEATGLIVNEKVNVRRKYVKQIRMWLYYWEKYGYEKAEQIFKRDYIADKGHVKNTNAHLMNVLDGKLEFLKMVKGGNDSTYLTLKNRFEKQIGLAAPISSVLNIWQNEGIEKAMKIFNQLQRN

SEQ ID NO: 205 - protein, 717 aa, unidentified
  source 1..717: note = Related to BMWX01000006.1; note = Echinicola pacifica
MKVEQEHIDQIRKQFAELHNKEELINLLSYAKNMFYGEECKPVQLKSLTYYANPEICKKRYQTFTIKKKSGADRTINAPVNGLKSILRSLNFVLQCMYEPHEVATGFVMDKSIVDNAKKHLGHHYVLNLDLKDFFHTFDRNRVKMGFIYEPFNLSGDKEPLAFLLASLCTHPFEIDEELKTVLPQGSPTSPTLTNILCKKLDRRLNGLANRFGATFTRYADDITFSSPHNIYNDEAFNNELKRIIEEDQELAINPKKTRLQKAGYRQEVTGLIVNEKVNVGRRYVKQIRMWLYYWEKYGYEKAEQIFTRDYIADKGHVKKGGANMANVLDGKLEFLKMVKGAADTTYLGLKGRLDKLVINQDTNKTEIAELTNKGLRFSNENEVLHDPDFVVKRLKQFTIDPIMKWTTHFWDIPTETDTDVHSLRDIADHFAAVNSRFDEFVALQKYNNNLWWKVIYPFIFQKKPKKNENKDNPYRWGEYNLHIGWQYPKFVAEWSKDNYDIPPPALKKTPFEMPLPSELITDLANQKYRELFGKEIRYFGDAIQMFKREIEFREDTKDLYYEVKVLARQELTEFSVNGLESLKQLSFFTYTAPVLKAIRRIFRMIQSRTEQREVIIECKKLTDLRLIELRIIHKNSLSHRESTDDKITKPSGDLLEVIKNLISICNFEIESSFNDGIFRITYLRPNTNVIKLNHLRPLKQSLDSLHGFTYVLKFPI

SEQ ID NO: 206 - protein, 735 aa, unidentified
  source 1..735: note = Related to NZ_CP080025.1; note = Echinicola sp.
MKIDQTHINQIQKQFNELESKEDLVKLLSDARNMLYGQECKPFQLKALTYYSNPKVCRKRYKTFNIKKKSGADRTINAPVKGLKAILRSFNFVLQCLYKPHENAIGFVLDKSIVDNAQKHVGHHYVLNLDLKDFFHSFDKKWVKYGLMSPPFNLHGDKEPLAFLLASLVTHPFEVEGEVKNVLPQGSPTSPTLTNILCQKLDRRLNGLANRFGATFTRYADDITFSSPHTIYNDEAFNNELKRIIEEDQKLAINPKKTRLQKADYRQEATGLIVNDKVNVRRRYVKQIRMWLYYWEKYGYEKAEQIFKRDYIADKGHVKNINAHLVNVLDGKLEFLKMVKGIEDGTYKGLKERFDKLTQSYPSPTILKLSDDNQNRMLENETVSISNGTPSELLNNNKINNIELIVRPLGNSTVEELMVDKYLVKGLKLPHIEIFENPDKYKPSLPHNPEQTTILLTEFKNDGSGFKELVHKPFDEITPYKVLEEVKNHPNFSEYFKKGRKSGFKGNINREVQNSVIGLINSFERIGNMHWDQFKEYPFGEHGSSEYTTYAMNFKKNYRFGPRQDGYTSLEELIRFTFLKEITRFDSKLIFLPDDRRFNLRGSFYTWVPSVKKGLEFIAQGINEHSNICGSSSFSTKEIYFELRRDTFLNTISLLITDSDSVAKRPAEDILKDLRLSEVFKKYFRSICDWTIYLKNEDGNFQLRVLKRIQDTGKEDIISIEGTKGFTHKITFYGT

SEQ ID NO: 207 - protein, 389 aa, unidentified
  source 1..389: note = Related to NZ_JACYTQ010000004.1; note = Echinicola sp.
MNIEPFQKEQIRKNFAELQNKEDLVNILSDAQRMLYGENCKDVQLKSLTYYANPEICKMRYQTFTIKKKSGADRTIHAPVKGLKSILRSLNFVFQCISEPHEAATGFVLDKSIVDNAKKHVGNHYVLNMDLKDFFHSFDRNRVKMGLMYEPFSLGGDKEPLAFLLASLCTHPFEIDGEVKTVLPQGSPTSPTITNILCKKLDRRLNGLANRFGATFTRYADDITFSSPHNIYNDETFIKELKRIIEEDQNLVINPKKTRLQKAGYRQEATGLIVNDKVNVRRRYVKQIRMWLYYWEKYGYEKAEQIFKRDYMADKGHVKNVNAHLVNVLDGKLEFLKMVKGSEDGTYQRLKERFDFLVGFTEPINDVLDIWEKYGIDKAMDVYYKNKLG

SEQ ID NO: 208 - protein, 398 aa, unidentified
  source 1..398: note = Related to JADYZM010000024.1; note = Flavobacteriales bacterium
MKIEQAHIDQIRKQFAELQSKDDLVKLLSDAKNMLYSEECKPIQLKSLTYYANPVLCKKRYQTFIIKKKSGADRIIHAPAEGLTSILRALNFVLQCMYVPHKAVTGFVLEKSIVDNAKKHVGHHYVLNIDLKDFFHSFDRNRVKMGFMFEPFNLNGDKEPLAFLLASLCTHPFEIDGEVKTVLPQGSPTSPTITNILCKKLDRRLTGLANRFGVTYTRYADDITFSSPHNIYNDEAFNKELKRIIEEDQKLVVNPKKTRLQKTGYRQEVTGLIVNDKVNVRRRYVKQIRMWLYYWEKYGYAKAEQIFKRDYVADKGHVKNINVHLVNVLDGKLEFLKMVKGTKDETYKKLKERYENLAEEINPISQLLNVWEKEGIEKAMEVYYDKEENSNILIEDLF

SEQ ID NO: 209 - protein, 725 aa, unidentified
  source 1..725: note = Related to NZ_CP041345.1; note = Tenuifilum thalassicum
MKVDKVHIEQLRKQFAEMQSKDDLLKLLNNAKKMLYGENSMPFQKKSLTYYANPDLCKKRYQTFTIKKKSGEDRIIHSPVSGLKSILRVLNFVLQCIYEPHKAATGFVLNKSIVDNAKKHLGQNYVYNIDLKDFFHSFDRNRVKIGFMYEPFNLKGDKESLAFLLACLCTHPLEVDGEIKTVLPQGSPTSPTLTNILCKKLDRRLTGLAKRFGATYTRYADDITFSSLHNIYKDDDFIKELKRIIEEDQKLVINPNKTRLQKAGYRQEATGLIVNEKVNVHRRYIKQIRMWLYYWEKYGYEKAEQIFKRDYIADKGHVKNMNAHLVNVLDGKLEFLKMVKGFKDSTYQGLKKRFDRLTKSENPIENNEIIEQNRTQEHLNVLSEDKKAIFHDPKLVINKLEQFTSDPIMKWLTHFWDTSPDINSESNSSTENYFKAVNSRYEEFVFLQKYNANLWWNVIYPFVFQKKISTNKEGKEIPFKWGKYGIKIGWQYPDSVINWIVENYDNKPHALKKTPFEMSISDDLVSAEANQKYRLMYGKEIRFFGDIINLFKREIAFREETRDFYYEINNLVLQELREFKVSGLETLKYESFTVYTVPVLKAIRRIFRMIQTRTENREVEISCNRLSNQNLILLKIIHIGSHPLKNSEHSKFMKPSGDLEEVIKPLISICDFEVAAHFTDGDFVLKYLYPNVKISHENSQFHIAEIKKEDCIVKGFTYILKFYLP

SEQ ID NO: 210 - protein, 396 aa, unidentified
  source 1..396: note = Related to QMPL01000018.1; note = Bacteroidetes bacterium
MKIEQQHIDHIRQRFAEMQTKEELVSLLSDAKNIMYGKECKPFHLKSLTYYANPKLCKKRYTKFSIKKKSGKERIINAPVGGLKSLLRSLNFVLQCIYEPHHAATGFVLDKSIVDNANLHTGNHNVYNLDLKDFFHSFDRNRVKMGYIYEPFNLGGDREPLAFLLASLCTHPFEIEGEIKTVLPQGSPTSPTITNILCKKLDRRLTGLANRFGAKYSRYADDITFSSPHNIYKDEEFLRELSRIIEDDQKLAINPDKTRLQKAGYRQEVTGLIVNEKANVRKRYVKQIRMWLYYWEKYGYEKAQQIFKRDYLTDKGHVKKGEPNFANVLDGKLEFLKMVKGLEDSTYKTLKKRFDKLTDVKEKTQQEKVDLDAVIDTIINKGLDQGISLYDKYKST

SEQ ID NO: 211 - protein, 409 aa, unidentified
  source 1..409: note = Related to JAGPFM010000063.1; note = Bacteroidales bacterium
MKIEQQHIDQIRQKFASMQNKADLVSLLSEAKNILYGKECKPFELKSLTYYANPDLCKKRYAKFTIKKKSGGERTINAPVSGLKSILRSLNFILQCVYEPHNAATGFVLGKSIVDNAKVHVGNHHVYNLDLKDFFHSFDRNRVKLGFIYEPFNLNGEREPLAFLLASLCTHPFEVNGEIKNVLPQGSPTSPTITNILCKKLDRRLTGLANRFGAKYTRYADDITFSSPHNIYNEEEFQKELERIIADDNLLKINGKQKEIGPQLNINTDKTRLQKSVYRQEVTGLIVNEKVNVRQRYIKQIRMWLYYWEKYGYEKAQQIFTRDYITDKGHVKKGKPNLINVLDGKLEFLKMVKGAEDSTYLTLKNRFDKLPQVKEKIQSEKVDLDAVLNTLINKGLNPAMVLYDRYKNG

SEQ ID NO: 212 - protein, 402 aa, unidentified
  source 1..402: note = Related to NZ_WOFO01000011.1; note = Cyclobacterium sp.
MKIGHEQTERIRKQFKNLQTRQDLVDLLSEAKDMMYEDKTKPFKLKTLTYYANPENCKFRYSTFFVKKKSGGQRTIHAPTKGLRSVLRSLNYVLQCMHVPHQAATGFVRDRSIVDNAQKHVGHHYVLNLDLKDFFHSYDRNKVKLAFMYSPFNLRGCTEKEKLAFFLACLCTHPFEIEGATKTLLPQGSPTSPTITNILCERLDRRLTGLANRFGATYTRYADDITFSSPHNIYQEETNPSLNPKGSYENFRAELERLIEEEKLTINPKKTRLQKSGYRQEATGLIVNEKVNVRRRYVKQIRMWLYYWEKYGYERAEQIFRSDYMIDKGHVKKGKPDLMNVLDGKLEFLKMVKGKEDGTYKGLKERFYELIGHEDPINRVLNVWETEGIDQAINIYYKDKLE

SEQ ID NO: 213 - protein, 409 aa, unidentified
  source 1..409: note = Related to AMZY02000008.1; note = Mariniradius saccharolyticus
MKIDPQHIAQVRKQFENLQSKEDLLQLLNAAKKMMYGEKFKPLELRALTYYADPKLCTRRYSKFSIKKKSGGVRTIHAPTNGLKSILRSLNFVLQCIHEPHRTATGFVLDKSIVDNAKNHVGNHYVLNLDLKDFFHSFDRNKVKLAFMFTPFNLGVSKEKEKIAFLLASLCTHPLEVDGITKLVLPQGSPTSPTITNILCERLDRRLNGLAKRFGANYSRYADDITFSSPHNIYHIEDNPSLNQKGRFDNFRAEFGRLIEEEKLSINPKKTRLQRSGFRQEATGLIINDKVNVRRQYVKELRMWLYYWESYGYEKAEQIFKQDYMADKGHVKNMNAHLVNVIKGKLEFLKMVKGNEDGTYKGLKERFSKLDLAKGKQDFEKIDLETVVTTILNKGLDEGINLYERFKNS

SEQ ID NO: 214 - protein, 718 aa, unidentified
  source 1..718: note = Related to nan
MKIEYKYIKQIKEQFANIQNKQDLANLLSFANKILYGNKSKPIKLNALTYYANPSICKNRYYSFSIKKKSGDKRIIHAPSKGLKTILQTLNFVFQCLYSPPKVATGFVTGKSIVDNARKHEGHRYILNLDLKDFFYSFDRNRVKLAFMYEPFNLIGEKEPLAFLLASLCTHPIEVNGETKVVLPQGSPASPILTNILCKKLDRRLNGLAKRFGASYSRYADDITFSSQYNFYNNKEFVDELNRIIEIDQKLNINSKKIRIQKSTFRQEVTGLIVNEKVNVRRRYIKLIRMWLYYWEKYGYDKAEQIFQKDYIADKGHVKKGNAKLIDVLKGKLAFVKMVKGYEDTTYQKLKKRFDSLIKNKIIQNLNKNKVVGMKLENNKSSNSILSESLLEYLEKHLKEFLNKKTYPIIHTPQKTIEILKLFSSNDKHLKYTTHSWEEEKYETYNNFMGKIKDEWEDIDKNLKGLSNRLHAKISNFLFNKKLGQKKSKGDYISWGDKRLKFGWSSKELMEFMKKNPSSSPFDCPIPENIKNLDNDYGKFFRDYVDVFKNEIEFREDTKYFKNMVISLYEDILRPNGFSIEGLENLDGFSCYTDTQQIKNAIKRIFEMFVNGEYKNYNKIIIERSSNLTGQSFHLIKITQLNSFIKRSGDDPKIKEPTGDLGNIIELLKNLADYSIVSKFNNKDCYRINYLSADQKDQIEKIDCNEINGFTHEIKFYL

SEQ ID NO: 215 - protein, 400 aa, unidentified
  source 1..400: note = Related to JADJXZ010000008.1; note = Crocinitomicaceae bacterium
MTFEKTYIDQIKEDFANMQDVSDLAVVLSKARNILYDKECKPFNSETLYYFAYPQNCKHRFKEFSIKKKSGAIRTIHSPTRELKSILRALNFVFQCIFTPHSAATGFVPKKSIVDNAKKHTGKHYVLNMDMKDFFYSFDRNRVKMGFLAEPFNLKGTKEPIAFLIACLCTHPVEIGSEIIHVLPQGSPCSPIVTNILCARLDRRLKGLANRHGVVYSRYADDITFSSLHNAFNREAEPVIGEKGHYNNFIAEFERLIGQEKLNINHKKTRLQKSGYCQEATGLIVNEKVNVRRRYVKQLRMWLYYWEKYGYEKAEQIFKRDYITDKGHVKNINAHLVNVLDGKLEFLKMVKGAEDGTYKGLKERFDILVGFTDPINQILNAWQTEGIDQAMSIYYKDKLE

SEQ ID NO: 216 - protein, 400 aa, unidentified
  source 1..400: note = Related to JAJTAY010000029.1; note = Bacteroidia bacterium
MKIEQANINQIRKQFSELQTREDLAKLLSDAKNMLYGEKCSPVQLKSLTYYANPLICNDRYTTFSIRKKSGASRTIHAPVKGLKSILRALNFVLQCMTEPHAAATGFVPDKSIVDNAARHVGHRYVYNLDLRDFFHSFDRNRVKLAFMNEPFNLRDGREPLAFLLASLCTHPMEIEGEIKSVLPQGSPTSPTLTNILCKKLDRRLSGLAKRFGATYTRYADDITFSADRNVFNDEEFLNELRRIIEDDQKLAINPQKTRLQKADYRQEATGLVVNEKVNVRRRYVKQIRMWLYYWEKYGYETASRHFGKFYRADKGHLKKSNAQLINVLDGKLEFLKMVKGADDSTYKALKKRLDKLTGIKQKTDAEKVDLDLVVDTILIKGLDAGIELYERFKNTLNDG

SEQ ID NO: 217 - protein, 389 aa, unidentified
  source 1..389: note = Related to DOXR01000029.1; note = Bacteroidales bacterium
MQIEQKHIDTLRAHFAEMQNKEELALLLSAAKNILYGKVCKPISVKSLNYYANPEYCKQRYKTFAIKKKSGGTRTIHAPVEGLKTKLRALNFALQCLYDPHKAATGFVREKSIVDNAKCHVGHNYVFNIDLKDFFHSFDRNRVKIGFMSEPFNLNGEKEPLAFLLASLCTHPFEIDGIQQIVLPQGSPTSPTITNILCRKLDHRLSGLAKRFGATYTRYADDMTFSSDHNIYGNEDFRNELVRIIEEDQKLKINPDKTRLQKTGYRQETTGLVVNDKVNVTRRYVKQIRMYIYYWEKYGYEKAEQVFKKDYTLDKGSTKKKTPSLINVIDGKLNFLKMVKGSEDGTYKGLRGRFDSLAGVFDPINEVLDAWEKNGIDEAVSLYFKLNAD

SEQ ID NO: 218 - protein, 424 aa, unidentified
  source 1..424: note = Related to JAHUUM010000008.1; note = Weeksellaceae bacterium TAE3-ERU29
MKIEQQHIDFVKEEFAKIQTKEDLLCLLNNAKKIIYKGKCTPISLRQLTYFANPNFCKERYRSFTIKKKSGADRLIHAPEKGLKSILRPLNFILQCIDDPHKSATGFVLDKSIVDNAKKHIDKPYVYNIDIKDFFHSFTKSWVKYGFMTAPFNLGKEKEDLAFLLASLCTHPFEIDGKIQNVLPQGSPTSPTITNILCKRLDRRLSGLAKRFGATYTRYADDITFSAMYNIFKEEENPQLNEKGRYDNFIAELERLITQENLIIKEEKVRLQNKDARQEVTGLVVNDKVNVRRRYVKQLRMWLYYWEKYGYNKASEIFSRDYKADKGHVKKGTPNFANVLDGKLQFLKMVKGEQDATYKKLKERFDVLKAEIDPINEVLDIWEEEGIEKAMDFYSKRKKTQPKKKKNPVVRTMTMEKLMALFGK

SEQ ID NO: 219 - protein, 392 aa, unidentified
  source 1..392: note = Related to JACIVM010000140.1; note = Bacteroidales bacterium
MNIEQAKVDEIKKLFAEMQTKEDLVSLLNFANNLLYDNECLLINPKTLSYYANPLISKNRYREFTIKKKSGSNRTIHAPVKELKHILRSLNLVLQCVSDPHPSATGFVLNKSIIDNAKKHVGHRYVYNLDLKDFFYSFDGNSLKLAFMYKPFNLNGEREYLAFLLASLCTHPIEIDGEIKFVLPQGSPTSPTLTNILCRRLDRRLSGLAKRFGAVYTRYADDITFSSYHNIFKKDENPQLNDRGCYDNFIAELERLLQEEGLKINPQKTRLQKSGWHQEATGLVVNEKVNVKRRYVKQLRMWLYYWEKYGYKKAEQIFIQDYISDRGHVKKRKPNLANVIKGKIEFLKMVKGCEDSTYQGLRERFDKLVLNQPPKKTEKKTITTNVFRPSNE

SEQ ID NO: 220 - protein, 399 aa, unidentified
  source 1..399: note = Related to NZ_AJYA01000040.1; note = Nitritalea halalkaliphila
MKPEPHQNQQIREAFAALRTKKDLAELLNLANQFLYGEEAAPLYLKTLTYYADPRKAKDRYQTFTIQKKSGAERLIHAPVKGLKTILRALNFILQCIHSPHQAATGFVTDKSIVDNARQHIGSPYVYNLDLKDFFHSFDRNRVKLGLMYAPFHLNGPREPLAFLLASLCTHPLDCDGEVRTVLPQGSPTSPTLTNILCQKLDHRLNGLAKRFGLVYTRYADDITFSSGYDCFRNPEFQSELRRIIEEDQQLRIHPDKTRLQRLGYRQEATGLIVNEKVNVRRRYVKQLRMWIYFWERYGYAKAQQIFLRDYLRDKGHLKDVSTSSLQQVCSGKLEFLKMVKGPEDSTYQQLASRFHALTTKEKASASGATNLERVVDTILGQGLEQGLRLYDSFKTNKR

SEQ ID NO: 221 - protein, 390 aa, unidentified
  source 1..390: note = Related to NZ_CAKLPZ010000001.1; note = Lewinella maritima
MNITPEQVKQITTQLAAVETKTDLAALLSEAQNILHGKTCKPITATAFAYHMNPYMNKNRYRNFTIKKKSGGARVIYAPTNDLKAILRALNLILQCMYTPARVVTGFVPGRSIVDNAKCHIGHRYVYNIDVKDFFHSFDRNRVKLAFMYAPFNLRDKREPLAFFLASLCTQAFRFPGEVVKAILVQGSPTSPTLTNIICATLDRRLTGLARRFGVTYSRYADDITFSSEHCPYNREDFQRELLRIIEGQGLTLNPDKTRLQNLAHRQEVTGLIVNEKVNVRRRYVKQLRMYLYYLEKYGFYKAEAIFLRDYLADRKHNVKGNPQMLNVLGGKLDFLRMVKGQEDSTYISLLQRFQRFDFRPTKISKTLDAWEMGGIKEGMKIYYGQDKEK

SEQ ID NO: 222 - protein, 443 aa, unidentified
  source 1..443: note = Related to NZ_JAATJH010000004.1; note = Lewinella antarctica
MKATEAQREEIKSLVAELSSKKGLVNLLSKARTMLYGQETKPVKLKLLTYYANPTICPRRYRKSTIPKKSGGVRTIHAPVKGLKAILQPLNFVLQCMHTPHCAATGFVQGRSIVDNARKHVGQNYVLNLDLKDFFHSFNRNRVKLGFMFGPLQLNGSKEPLAFLLASLCTQPLYENGDIKVGHRPPSRFVGESIFMSEDDPNYELIMQILQENEVINSKRRVKLRIARGAVKTVLPQGSPTSPTITNMLCEKLDRRLTGLGNRFGATYSRYADDITFSSLHNIYNQDEFNDELVRIIEEDQGFKINPKKTRLQRRGYCQEVTGLSVSEKVNVRRRYVKQLRMWLYYWEKYGIEKAEDIFARDYVGDKGHVKMHVPEMSRVIGGKLEFLRMVKGETDSTYLGLKDRYEKLMLPLDPLTKILDLWEEKGIDAAMNAYYGEEVTEE

SEQ ID NO: 223 - protein, 396 aa, unidentified
  source 1..396: note = Related to PXTU01000456.1; note = Bacteroidetes bacterium SW_10_40_5
MPINQEDKAYIRDKFAAMQTKEDLVNLLSEAKDMRYRERTKPFKLNYFTYYANPKLCKQRYKTFTISKKSGGQRVIHAPVMGLNFLLQSVNFVLNCMYEPHKAATGFVPEKSIVDNARGHAEKPFVYNIDLQDFFHSFGKPRVKYGFMRSPFNLNGDREYLAFLLASLCTHPFEVNGEVKRVLPMGSPTSPTITNILCHTLDRRLNGLAKRFGATYSRYADDITFSSIHNIYRKKDFQKELYRIVEANQGLKIKPEKTRLQKEGYRKEATGLVVNEKVNVKRRYVKDLRKWLYLWEKYGNEKAQQLFTKDYVADKGHVKKGEPNLENVLDGKLDFMKMVKGVQDGTYLKLRDRFDKLTQQSSTSNSKKVSLDDVLDTILNQGLIQGIDLYQKLRKP

SEQ ID NO: 224 - protein, 391 aa, unidentified
  source 1..391: note = Related to NZ_FNQK01000004.1; note = Bizionia paragorgiae
MKLEKQHTEQLIKQFRSLKTKDDLLVLINKVNLLLYGDDFKSLTLKGLNYYTNPNYSDKRYSSFSIKKKSGGERIINSPVNGLKHILKPLNVILNCIATPHPKATGFVLGKSIVDNAKQHVGNHYVYNIDLKDFFHSFDRNRVKLGFMYPPFNLSGDLEPLAFLLASLCTHPFEVEGKLKTVLPQGAPTSPTITNILCVKLDRRLNGLAKRFKVNYSRYADDITFSSHVNVFKNEVFLKELNRIIVEDQNLILNDKKTRLQQTGTRQEVTGLTVNTKVNVNSKYIKQLRMWLYYWEKYGFNKAESIFLRDYAKDKGHIKTGKPNFQNVLMGKLEYLKMVKGHGDSTYVKLNARFTRLTRTESMLEKTLMAWEENGIEKAMEIYKFNNTTMF

SEQ ID NO: 225 - protein, 389 aa, unidentified
  source 1..389: note = Related to NZ_CP039451.1; note = Psychroserpens sp.
MKLEKQHTEQIIKQFKALRTKDDLVVLINKVNLILYGDKFISLTVKGLNYYANPEYSDKRYSSFSIKKKSGGERIINAPVNGLKHILRPLNIILNSIAMPHAKATGFVLGKSIVDNAQAHVGYNYVYNIDLKDFFHSFDRNRVKLGFICAPFNLNGLLEPIAFLLASLCTHPFEIDGVINTVLPQGAPTSPTITNILCVKLDRRLNGLAKRFKANYTRYADDITFSCNVNIFKNDEFLKELNRIIAEDQNLILNDKKTRLQQTGNRQAVTGLTVNTKVNVNSKYIKQLRMWLYYWEKYGFNKAESIFLRDYAVEKGQLKKGKPNFKSVLGGKLEYLKMVKGFNDSTYLKLNTRFTKLSKTESKLEQTLKAWENNGIEKAMEIYKLAKIN

SEQ ID NO: 226 - protein, 395 aa, unidentified
  source 1..395: note = Related to FTMA01000004.1; note = Maribacter ulvicola
MGFKSFINLIMKTTKEDIALIREKFNSLSTKEDLVNLLNVANVLLYGEDAFTLKESTLAYYANPAFCTERYTSFEINKKSGGTRTINAPVKGLKSILKTLNFVLQCISEPHHKATGFVINKSVVTNAKFHVGNHYVYNIDLKDFFHSFDRNRVKLGFMQKPFNLNKDREPIAFLLSCLCTHPFKVDDNLKIVLPQGAPTSPTISNILCSTLDRRLNGLAKKFKINYSRYADDITFSSQVSVFKRKDFQKELLRIITEDQGLVLNEKKTRLQQSGYRQEVTGLIVNEKVNVSRRYIKNLRMWLYYWEKYGFKRAEIIFKKNYILDRGHIKKSEPNFINVITGKLEYLKMVKGPFDSTFIKLNSRFELLLQNESMLEQILKVWENQGIEKAMELYNK

SEQ ID NO: 227 - protein, 464 aa, unidentified
  source 1..464: note = Related to NZ_WXXU01000001.1; note = Tenacibaculum finnmarkense
MNNDNKDYQVSILKEFIKIDKMEIQQKHIEKMKSLFSKMENKQDLVNLLNGVYNLLYKKNETTDNSYDPFKIVSDTKTVYFNLMFSEEEFNLKSKTKKNTYIQLSSLSYYANYSLCKKRYSQFKIKKKSGAERIINAPVEGLKIILKLLNFVLQHVYKPHKSATGFVLNKSIVDNAKKHIDSNYVYNIDLKDFFHSFDIKRVKLGFMEELFNSKTDREPLAFLLACLCTHPFEVAGEIKNVLPQGSPTSPTITNILCKTLDNRLTGLANRFGLRYTRYADDITFSSQHNVYNKEDFQKELKRIIENNQNLLINHKKTRLQKRGYKQEVTGLVVNDKVNVRKRYVKQVDKYLYLWEKYSFEKAKQIFIREYPQEKAHLRNYKPNLTNVLRGKLDFLKMVKGAEDSTYLKLKKRFDKLTGKQNPINEILDIWEKEGIEQAIKAFEIATEVNQNSIDLSKFFKNERD

SEQ ID NO: 228 - protein, 517 aa, unidentified
  source 1..517: note = Related to JAAGBU010000002.1; note = Tenacibaculum finnmarkense
MKIEQQHIELIRTTFSTLQTKEDLLSLLNLANTLLYPKNSFKFELKQLTYFANPKLVKNRYAEFTIKKKSGANRIINAPTQGLKSILKTLNFVLQCMCEPHKAATGFVRGKSITDNAKKHIDSNYVYNIDLKDFFHSFDLNRVKLGFMQTPFNLRNESFPIAFILACLSTYTFKIDGEIKQVLPQGSPTSPTITNILCRRLDKRLTGLANRFGLRYTRYADDITFSSQHNVYNKEDFQNELHKIIVTDEKFAFNTKKTRLQKHGYQQEVTGLIVNEKVNVRSRYVKQVRMWLYYWEKYGYNKAEQVFRKDYIKDKGHVKKTLPNLDNVLEGKLLFLKMVKGEYDGTYMKLQNRFEKLNRKQNHIDEILALWDSKGIDLAKNKFYNNDDDDENSHNTIVTDTEKLSKINETDKQYDIANFCFRNITGFKKLYLKKVIIDHDILYKYWENSSRTMILVSEEAFKVLSEASNFDSKNIVQSIEKYNISENKKTKKTEKGDYNQRSFFVKKKSIEKYKLMF

SEQ ID NO: 229 - protein, 403 aa, unidentified
  source 1..403: note = Related to NZ_CP042476.1; note = Antarcticibacterium arcticum
MKTNPDQKTYIRKKFAAMTCKRDLLVLLNEAQGMMYGEKGRHFRLKDLTYYANPDLCKKRYSTFIIAKKNGGERTINAPVKGLRIILRSLNFILQAISEPHAAATGFVPDRSIVDNARAHVGKHYVYNLDIKDFFHSFDRNRVKMGFMRKPFNLKANENKEKLAFFLSCLCTHPFEVEGEMKTVLPQGSPTSPTITNILCKNLDRRLNGLAKKYNLSFTRYADDITFSSSHNIFKDEEFQKELQRIIEEDQQLVINPTKTRLQKTCYRQEATGLIVNEKVNVKRDYVKQLRMWLYYWEKYGEVRAEQIFQRNYNLDKGHVKPEHPGMANVIAGKLEFLKMVKGDEDPTYKKLRERFLKLHPGSPFVEKLLQTWETRGIDEAIKIHTLRIKTSKVILNTNMYTL

SEQ ID NO: 230 - protein, 402 aa, unidentified
  source 1..402: note = Related to JAJSON010000015.1; note = Gramella sp.
MKASPDQQTYIRKKFALLESKEDLLVLLNEAKRMMYGDECKVFRLKALNYYANPDFCKKRYTSFDIPKKNGAKRIINAPVKGLRSILRVLNFILQAVYEAHPAATGFVQEKSIVDNAQPHVDKHYVYNLDLQDFFHSFDRNRVKLGFMKKPFNLRKDRNKEQLAFFLSCLCTHPFKIDGNIKTVLPQGSPTSPTISNILCRDLDRRLKGLAKRFNLNFTRYADDITFSSSHNVYNKNEFQSELTRIIEEDQLLKINPSKTRLQKTGFRQEATGLVVNEKINVPKNYTKQLRMWLYYWEKYGTKKAEQIFTQDYLKDKGHVKPDHPEMENVLAGKLEFLKMVKGTDDPTYKKLQGRFLKLSMGSPLVDRVLKVWDEEGLNKAMELYYEKKESSEALTTTILTL

SEQ ID NO: 231 - protein, 669 aa, unidentified
  source 1..669: note = Related to DMXI01000354.1; note = Microscillaceae bacterium
MKIKQTEINLLRAQFAAIQSKEDLVKILTKAKKLLYGEKATKIHLKSLTYYANPAICKSRYTPFHVKKKSGDNRVIHAPVRGLRIVLSSLNFLLQCLHEPHKTATGFVPGKSIVDNARIHTNSNYVYNIDLKDFFHSFNRNKVKMAFMYQPFGLKKSQEPLAFLLASLCTHPIEIDGKTQMILPQGSPTSPTLSNILCIKLDRRLNGLAKRFGAKYTRYADDITFSSSDNIYTQADFQAELQRIIVDDQKLTINAQKTRLQTKYERQQVTGLVVNDKNVNVHRAYVKQIRMWLYYWETYGKIKAERLFQQDYQKSAVNAQKKAPPLQRILEGKLNFLKMVKGKKNNTYRRLKQRFDELASVAGNNDTKPKKPKRKSSKPLPRPQETKGFLSLFNNSKGLKYLTHKFNDITPPDYTEFMALCKEEFDQGQKKYPNVPTALLERIQQYTFASAPEWFTRKGEEKNYHHMGWSEPKFVEWYQKSSLHPASNAKWNQEMILPFKHTIEVRAGYLPAIIDEAITLALGDSRSSFDIQISNDTIKVAEFYTDVDRFQLALYHIFSTIKTHGEANFCYGLTIDFIKEKSGSTHIKKLIITHVDSEATKPANDEGFIKGDLNTIKTLLWGLCNYNIEAKFPDGFQSKTILADKQNLGKSSEEEEKHIKGFTHILKFY

SEQ ID NO: 232 - protein, 426 aa, unidentified
  source 1..426: note = Related to NZ_KB908302.1; note = Empedobacter brevis
MKNKITALQISEIKADFLKIESLDDLCNVLNLINELTQFKNKIEINQLVKLSNPSLAKNRYKEFTIKKKSGTNRTINAPIRELNTILKSLNNLFNLIYNPHTNAFGFVTGKSIVDNAKIHTNKKYVYNIDLKDFFHSFDRNRVKMGIWYQLFGGDKSKEKISFILACLTTHPLMIDGVSGIVLPQGSPTSPFLTNLLCYKLDRQLKGLAKRFRLMYSRYADDITFSSNYDVYSNPTFTLELNRIITTQNLVINPTKTRLQGNGYRKEVTGVIVNEQINVSQNYIKQLRMWIYYIEKYGIEKATEIFKKDYAKEKGHIKSMQASMQNVIEGKLLYLEMVRGKDDKKFLTLKRRFYKSIGKVSKIDKVLIAWDEKGISKAMDIYYNYNRISLAAFLDNDATNVILDELRFEAKDSNNNRKKSNIIFTL

SEQ ID NO: 233 - protein, 425 aa, unidentified
  source 1..425: note = Related to CP053698.1; note = Empedobacter stercoris
MKNSLTVAQITEIKENFLKIESLNDLCIVLNQTNELTQIKHTIEVEQLAKLSNPALAKNRYREFTIKKKSGADRKINAPISELNLILKSLNQLFNFIYTPHTNAFGFVSGKSIVDNAKMHTNKKYVYNIDLKDFFHSFDRNRVKMGIWYQLFEGDKSKEKISFILACLTTHPLMIEGETKIVLPQGSPTSPSLTNLLCYKLDRQLKGLAKRFKLTYSRYADDITFSSNYDVYSNPIFTLELNRIITAQNLMINPAKTRLQGNGYRKEVTGITVNEYANVSQKYVKQLRMWIFFIEKYGIEKATEIFKKDYSKEKGHVKSMNASMLNVIEGKLLYLGMVRGKDDEKFLTLKNRFYKSIGKVSKIDKVLNAWEEAGISKAMDIYFNNKRISLADFLDNDAINSILDIMGFDADDSNNKKNSNIIFTL

SEQ ID NO: 234 - protein, 407 aa, unidentified
  source 1..407: note = Related to NZ_RJUG01000002.1; note = Kaistella daneshvariae
MRTRLTEEQKEVIKDQTALLQSKSDFVALLNDVAVMIYGDDGKKAFHLKHLTYYGNPKISSKRYATFEIKKKSGKTRIIHSPSSGLKSILKCFRYVLESVYEPHPAAMGFAPGRSVVDNAQKHVQMLYVYNIDLQDFFHNFDRNRVKMGLWRNLFNVEKNKEELSFFLAALCTHPIEINGEVKIVLPQGSPVSPVLTNMLCVSLDRRLQGLAKRYRIRYSRYADDITFSSNRNVFVETEFQLELHRIIEEDQKLKINPDKTRLQKRGYRQEVTGVIVNEKLNVHRKYVKQVRMWLYYMEKYGPEKAEQLFRADYIREKSHVKNITNPMLSVLIGKLQYLKMVKGQHDPTYLSLLNRFTKLLDKSNFPLRQKSTDLADKSAMLKNKNIIDLIIELGVEKALQNYVINE

SEQ ID NO: 235 - protein, 423 aa, unidentified
  source 1..423: note = Related to JAAFAH010000017.1; note = unidentified bacterium
MEQQVKQLKEGFLQMQTKQELADVLNLAKKVLYPNDDQKIELKNITYHGNSKFSKNRYKTFVVKKKSGGERIIQAPKKEFKSILKPLNLVFQTVFEPHKNAFGFVPQKSIVDNANRHVSKNFVYNLDLKDFFHSFDRNAVKMGIWFYGFKMDKTKESLAYLLACLCTHETEIGGKSEFVLPQGNPCSPTLTNLLCTKLDRRLNGLARRFGAEYSRYADDITFSANKNAFKNEDFQKELKRIIEDDQQLEIQPKKTRLQGRNYRQDATGLTVNEKVNVQPRYTKQIRHYLYLWKKYGYNKAATIFTAGYSDNRGHVKSPNAKLENVLSGKLEYLKMVKGEDDSTYQTLKKRFDILANRDVEIEKIVAIWEKEGIEAAAKANEKRKQSKTANKLNNKKFSTFTDINELFDFSDDLAAEKVETYGK

SEQ ID NO: 236 - protein, 395 aa, unidentified
  source 1..395: note = Related to CP068107.1; note = Myroides odoratus
MSLDQEQIEELKQEFLAIKSKEDLLIILNKTSALLAKDNPDFNPSPIELKTLTYYANPKLCKQRYSSFKIKKKAGDDRTIYAPCPGLKRILRTLNYLLQITFESHDFAMGFVQGKSIVDNAILHVNKNFVYNVDLEDFFYSFDFYKVKFAFEGAPFNFNKEKEPLAFFLACLCTHPLELEKGTKVTLPQGAPTSPFITNILCYRMDRKLRGLAKRFDLVYSRYADDITFSGRFNFSLSKDFTNELERIITKEKLKLKPSKTRMQSSFYRQSVTGIVVNEKVNNYKSYIKDLRMWIFYLERHGLEKTQTIYRQRVQDDKNKGRDILNVISGKLLYMKMVKGQTNPAYIKLVDRMEAFLIGSGTKKEDSKPKPDKFERVVNSLLKDGDIEKAMKLFR

SEQ ID NO: 237 - protein, 398 aa, unidentified
  source 1..398: note = Related to CP010817.1; note = Myroides profundi
MKLEQEQVIELRRLFLKANTKEDLLKVINKSIKYQNNGTKEFKYISLKTLTYYANANVCKDRYTSFEILKKSGSKRTIHSPHLILNKILKALNLILQCSFEPHQAAMGFVKNRSIVDNAKYHLNHSYVYNIDLKDYFYCFDLKRVKFGFFNVPFDFSKNQESLAFFIACLCTHPLDINGELKTVLPQGAATSPTLTNILSYRLDRKLTGLAKRFNLLYSRYADDITFSGDFDFSKNKDFIAELDRIITKEGFEINKDKTRMQSKAFRQQITGLVVNEKVNVHKGFIKQLRMWIHYIEKYGLEKAQSIFDKSEIKPLNAKYDLANVLKGKIEFLKHVKGQEDPTYIKLNQRLRACLIKAGRIEENLTEKKSSEDIKFEKAISLLIKQGDIESAMNLFFK

SEQ ID NO: 238 - protein, 411 aa, unidentified
  source 1..411: note = Related to UYIV01000001.1; note = Bergeyella zoohelcum
MKKLTKEQKLYIKNSFENLQSLDDLVSIINYTLTEVFSFVGITKKNILFNTNPSNQRYRSFTIKKKTGGERVINAPKLLLVRTQKALSVIFTICMEIHPKAMGFTEGKSVVTNAQLHIGKNYVYNIDLKDFFHSFKKWQIKRIFTQTSFQFSEEIANCLTNLCVYALAIDDKKEFVLPQGAPTSPILTNILCRKMDIALDKLAKKYKATYSRYADDITFSSNKAVFNNPNFLQELEAIIHKNKLQINPKKTRLQKKSERQEVTGITVNEKLNTTRKYVKQIRMWLYLIEKYGVEKAETIFRKDYIKEKGHIKYNQNPMFSVIGGKLLYLKMVKSQEDSTYQKLAQRFDKICGFNVDTILDVWEKEGKEKAMEVFEATKSEKWKKSQNIGVSVFEFSDDDELSEMILDKDIL

SEQ ID NO: 239 - protein, 439 aa, unidentified
  source 1..439: note = Related to BOQK01000032.1; note = Capnocytophaga canis
MKTLTTEEKQELKNRFENILSIDDLVEVINYVYQELLAGNEISKDDVLSNADLSNKRYHTFSIRKKTGGERIINAPESSLEKIQKALNTILNECVTVHPKAMGFAKGKSVVTNARLHLGKNYVYNIDLKDFFHSFKKWQVKRVFAQSPFQFPEEVANCLTNLCVYDLEIDDKKAFVLPQGAPTSPILTNILCRKMDIALDKLAKKYKATYSRYADDISFSSNVSVFNNSVFLEELEAIISRNKLEINPKKTRLQKKNTRQEVTGITVNEKLNTTRKYVKQIRMWLYLIEKYGAKKAETIFRKDYAKEKGHTKPEKNPMLSVIGGKLLYLKMVKGAEDSTYLKLAQRFDKVCGFDADKILDTWQQKGEKEAQKLFEETKNNKWKNLAAGRPKPKRQKLGKHLMEKSRSMEEQAEYVAQIRKNIAERQAKRKAAMKKIRGE

SEQ ID NO: 240 - protein, 393 aa, unidentified
  source 1..393: note = Related to NZ_CDOI01000090.1; note = Capnocytophaga canis
MKTLTTEEKQELKNRFENILSIDDLVEVINYVYQELLAGNEISKDDVLSNADLSNKRYHTFSIRKKTGGERVINRPMGALGMMQKALSVIFTICMKIHPKAMGFTEGKSVVTNAQLHIGKNYVYNIDLKDFFHSFKKWQIKRIFTQTPFQLPEEIANYLASLCVHTIDIDGKKEQVLPQGAPTSPILTNILCKKMDIALDKLAKKYKATYSRYADDITFSSNKSVFNNPIFLQELEAIIHKNKLQINPKKTRLQKKTNRQEVTGITVNEKLNTTRKYVKQIRMWLYLIEKYGAKKAETIFRKDYIKEKGHIKYNQNPMFSVIGGKLLYLKMVKSQEDSTYQKLAQRFDKICGFNVDAILDVWEKEGKEKAMEVFEATKSEKWKKIQNIRSFYF

SEQ ID NO: 241 - protein, 433 aa, unidentified
  source 1..433: note = Related to NZ_JAGDYP010000005.1; note = Capnocytophaga sp.
MTTFTNEELKDIAEKGDELIIEKFASLNSYKDILEMFNIAQVILYGEKATLFKLEDLIFYASLNFSEKDRYFTFTIKKKSGGERIINAPCEELKGLLQCFNYILQVLFTPHIKAMGFVRERSVVSNAQLHTNKNYVYNIDLKDFFHSFGRQWVKWVLMQEPFNLSGEREPLAFWLASLCTHSLEIEGSTKIVLPQGAPTSPTLTNILCYPLDKKLNGLAKRFGATYSRYADDITFSSNKSIFKNEVFLKELERIVKSQKLTINEKKTRLQKKEYRQEVTGLIVNEKVNTYRHYVKQLRMWLYYIEKYGMEKAEAFFRRDYIKEKGHIKWKENPMKNVLQGKLLYLKMVKGAEDATYLNLVQRFDRAFGFDVEAILKIWEEKGIAAAEGLYYNSKPNRLIKYKKADFHYILSEEEIAELRTNYPELFMEEGFLQ

SEQ ID NO: 242 - protein, 457 aa, unidentified
  source 1..457: note = Related to ALNN01000005.1; note = Capnocytophaga sp.
MKTLTTEQISYIQTTFASLKRKESFLDLLNEVKKFMEGENATPFSLSFFTQYANPKFCEYDRYYIFKIKKKSGGERTIMAPYDTFGELLRYFNVVLQTLFTPHTNAMGFVPGKSIATGAQMHIGKNYVYNIDLKDFFHSFERKRVKWMFTQAPFNLSGEREPLAFFLASLCTHPIEIEGQTRIILPQGAPTSPTLTNILCYGLDKKLSGLAKRFGATYSRYADDITFSSNKSIFKKEAFLSELQRIITSQGLTINEKKTRLQQKEYRQEVTGLIVNEKVNTYRRYVKQLRMWLHYIETYGYKKAEILFKKDYVKDKGHIKEASSMKLVLEGKLLYLKMVKGEQDSTYLKLQDRFNKAFGLDIEKLLQVWETYGIEKAEQVYREMGIENFKICSGATEKEAASFITLLEENGMKNSLLNIRISRNRIGKLLSPSEMIEIFDKEDPKEIMESMKGRIIK

SEQ ID NO: 243 - protein, 409 aa, unidentified
  source 1..409: note = Related to NZ_RJJL01000016.1; note = Ornithobacterium rhinotracheale
MEIIQQHKDYIKEKFKLIKSGSDLVQILIFVSKEVLKSKQDLNLDLFKKCLDTEAKDRYQTFKIKKKSGGFRTINAPNIHLKHILSCVNIVIQCVDEPHRAATGFVRGKSVIENAKMHIGKNYVLNIDLKDFFHSFDKEKVKECFMRKPFNFNGEKEILAIFLAELCTHPFEIDCVKKAVLPQGAPSSPTITNVICKSMDWDLTELANRYGATYTRYADDMTFSSNHDLYSDAFYEELFQIINSHELTVNSKKTRLQKKGYKQEVTGLVVNEKVNVPRRYVKQLRMWIYLWEKYGYEKAESLFAKDYRKDKGHVKKDKNTMLSVIKGKLNYLKMVKGETDPTYKKLYLRYFHLTNYLFIDEILGVWETEGLNAAISVYEKHKRKEMNYPEPIDVNKLLELFAKAGIKFE

SEQ ID NO: 244 - protein, 398 aa, unidentified
  source 1..398: note = Related to BMFD01000020.1; note = Belliella aquatica
MDKFREEFNPEIHPIQKIKGKSDFVRLINYLRLTNISGNIKPIPLKHFTFYANHLLSPNRFESFEIVKKNGGNRTIHAPKRGLKSILTGLNLFFKQHYKTHPNVTGFAEGKSIVDNAKPHIGKKYVLNIDLKDFFHAFERKHVKWAMMNAPFFIKEEKEPLAFFIASLCTHPIEINGETKFILPQGSPCSPILTNLLCRRLDKQLKNLAQEYQAKYTRYADDITFSSNHHKISEKDFYNKLEYVISNHNHQINTKKVRLQKEGYKQEVTGIIVNEKPNLPKRYIKQLRMWLAYWEKYGYLKADKLFKNDYLKERGHRIEGTPHLLSVMDGKLQFLKMVKGDKDPTYKKLESRFHKLNGDKKLTQAHLELMKINPFKPSLKNQQSLEEVLIKLARKKIL

SEQ ID NO: 245 - protein, 415 aa, unidentified
  source 1..415: note = Related to JAFYGY010000028.1; note = Bacteroidales bacterium
MKDNVDIQAIIRDEFPKMETQEDLLVLMNKVKRYLEKGSKEEFIPLIMQSLNYYKNIKVSGERRYKTFSIKKKSGAFRTINAPCTGLKVFQYCLNYMLQTLYQSNPNACGFVPGRSIADGAKKHVGKNFVLNIDLKDFFDTIELHRVKAIFTLPPFNLKDDKENSNSLPYILANLCCHPKEVTRIDKDGNPYQCVRNVTPQGAPTSPIITNLICRQLDRRLLGLAKRFRVSYSRYADDITFSSNNKDVFEEGSAFRVELKRIIEEDQKFRINEEKTRVQSRAYRQEVTGLVVNNKVNVTKRYVKQIRMWLYLWERYGYNKASEHFQKDYNRYKGQAEHGTRMENVIGGKLNYMKMIVGADNAAYRKLAERFEKLVLDIIGENKTLNTDVKIETSICKEDLNAILNELKELDKLLK

SEQ ID NO: 246 - protein, 412 aa, unidentified
  source 1..412: note = Related to JAFXYI010000020.1; note = Bacteroidales bacterium
MDNNADIKTTILDEFPKMKTQEDLLALLNKVKRVIDSNHQRDFTPINEKSFNYYKNIKASKNKRYKTFSIKKKSGKLRTINAPCAGLKIIQTCLNYILQVFYQPNNYACGFVPGRSIADGAKKHVHKQYVLNIDLKDFFDTIEHHRVKSLFTLPPFNLKDDKENPNSVPYILANLCCHPKDVTRFDKDGNTFVCKRNVTPQGAPTSPIITNLICAQLDRRLAGLAKRFKLSYSRYADDITFSSNYKNIFKEGSAFRLELTRIIESDQKFRINEEKTRIQSNAFRQEVTGLIVNEKVNVTHRYVKQIRMWLYLWEHYGYDKAFKCFSKDYSLSKGSAAHGTNMDNVIAGKLNYMKMIVGAENPTYKNLSKRFKKLINIQENGINVTAILDVWENEGIESALETYKRFKDYNNK

SEQ ID NO: 247 - protein, 419 aa, unidentified
  source 1..419: note = Related to JAFWPN010000020.1; note = Bacteroidaceae bacterium
MNNSAEDIHRLILDEFPRVRTQEDLLALLNKIKQLLVGCADEETCKSLTMSSLNYYKNVKVSLRHRYHLFNIKKKSGKLRQICAPVEGLKILQSCLREIFNAFYEPTPNVCGFVNARSIADGAKRHIGKNYVLNIDLKDFFDSIEYHRVKAMLCCAPFNLRDNRDSTQSLPFVIANLCCTPKEVIRFDKDGKEYRCRRSVLPQGAPTSPILTNLICRQMDRKLYLLAKKYHCAYSRYADDITFSANKNIFKVDSDFYSELRHIIEVECKLKINEEKTRIQSRKYRQEVTGLVVNKKVNVAKRYIKQIRMWLYLWETYGYKKAQNLFIHDYLHDKGHVKPETVHLENVLRGKLDYLKMIVGEENHTYSSLCERYEKLIECENKPNPSVVKQEKTGKKNNLQELTEDCSIVELLEMLIDKI

SEQ ID NO: 248 - protein, 448 aa, unidentified
  source 1..448: note = Related to JAGCWE010000009.1; note = Paludibacteraceae bacterium
MNQQKANIQQIIRKEFPKITTEADLLQLLNRINSELHKEFFAAKDKKVPPIKLATLKYYKNYKVSGAKRYKTFTIKKKSGKDRFINAPAKGLKLIQQCLNEILQTYYQINDNACGFIPDRSIVYGAKLHTDKPYVLNIDLKDFFDTITFPRVKKVLALPPFNLTGSKEPVAYIITSLCCHPKAVAKVDENGEKITEIKQVLPQGAPTSPILTNIVCRNLDRHLAGLAKRFKANYSRYADDITFSAHKNIFQQDSVFMLELKRIIEDEQGLTINPEKTRVQSKRQRQEVTGLVVNKKVNVPQRYVKQLRLWIHYWEKFDIEKAQHFFLQQYITQRGNVKSHKSHIENVIGGKLDYMRMVVGESNPAYKKLRRRLDNLIQIEEHKKSTSAPQQTSSYKQKQCAKTNKEYIADGNGIQSLSSEQLPFTHKDDLEVLLDGLINDLSKENQSL

SEQ ID NO: 249 - protein, 474 aa, unidentified
  source 1..474: note = Related to JAACZX010000460.1; note = Chitinophagaceae bacterium
MILTVEHIKAIRDQFQLLRTKEDLLALLNFIAYPQLYATGYVPDDIDFSKIELPDDATTAEKLGLVFNSSSKKRRKQITAKQLTYFSTSFSDAEKKRKRYYRFHILKKSGKKREIHAPVSKLKQIQSCIYHMLQSVYETQPQAYGFVAGKSIADNASLHTGKAFVLNVDLKDFFPSVHFRRVKAMLEKPPFYLSGEKEPLAYLISNLCTENGVLPQGAPTSPFFTNVICQRLDQKLERLAKKFQTTYSRYADDLTFSANAYVFSKRFMLELEQIVKGERFQINEEKTRVQGSAYRQEVTGLTVNEKVNVNKHYLRSYRTLLHLYKTKGPLVAYEYHYKRMPESVRVIKQQRTVTSATSHIQNVIWGKYLFLKMIKGDSVPMPPFTRNKYAKMVIEKSISLIKPEPENITGDDDTKTETKKYHQPVVQTILLEASVPNEPVEPNTKKETVVEQLLTAWEKEGLEKAIELLKTKTT

SEQ ID NO: 250 - protein, 671 aa, unidentified
  source 1..671: note = Related to CP014773.1; note = Mucilaginibacter sp.
MNNPFNDLKPEQVEGINERFHGLNSSKDFYLLLVDLLDILNVKDEEKEIFKAWITQFIRLRFPRRYTYFTIRKASGKDRIIHSPNDILKFIQRLFNLVLNTVFVPHPNSFGFSKSQSIRDNAAVHVNYNYVFNIDLIDFFTTIDAERIKSAFKESPFNLSGEKRELINHLVYLTCIPIKLGQDKENDTSIGTLKVLPQGAPTSPIISNIVCYAMDHQLAELADKFKINYTRYADDITFSSNRNLYQEGSKFRHMLESIVISQGFALNGNKTRLQKKHSRQVVTGLVVNERTNVNRDYIRSLRMYLHYWEKYGYQKAEQLYNKDVDTELFFGEPKSLFDLLKGRIDFLKMVKGADDNVYKNLKKRWLRLTNPDSRTIEFRDEYFNTHKPKDVANFLRLFQDSAGLKYLTHDFDTPGAKFSYEKIMDTANTEFSTGFTKYAITRALYARIKQFAFTERPSWWRWVNGEKSTYNLGWKSTKLKNWINENPGVHPIRFKIFRDELITPFKDSIQIRAPKFKELIENSIKEKFQDYKSEFNISFKYLETAEFYTDVDIIMGGIRHLFDGIIERLSLSNEIIISFKRTEINGRLIKVVEITHVNSSCFKEAKINDLLSGNFIEAKRAFQGLCNWSITASFADGNYKLNMLNDSDPYIEREPIASDEILGFTHSLYFY

SEQ ID NO: 251 - protein, 671 aa, unidentified
  source 1..671: note = Related to JACWMW010000002.1; note = Mucilaginibacter rigui
MNSPFSDLKPEIITDIRGRFEALRTKDDLYDLFQSVIRELPAGETKREHFEQEIAWLYKNGYPRDYHFFKIKKTSGKDRQIASPQGPLKTVQRIIAVILSSVFQPHPHSFGFRKGSSVVDNARMHVGFHYVFNIDLADFFTSISLKRVKRSLEGSPFGLDLSREPIAAQLARICCIELIVPGANSRRAFLPQGAPSSPVLSNIVCQKMDERLNGLAKRFHLNFSRYADDITFSANHNVFREGSEFRLELADIVTASGFQINPIKTRLQRQKNRQEVTGLTVNQKVNICRKYVKELRRYLYYWERYGLTKAYELYLKDQHEFLLSGSGVPMAAIIKGKLDFLHMVKGDTGDYLKLLARFHKMDKGGPRKVVKGENATHHQEAEQFQQHQPHNVAIFLRLFQDSAGLKYLTHEFDIGDEVFNLEQTVELAGREFQAAYQKHPITRALYARIKQFAFEKNPKWWRWQDGKMREINLGWSAPSVRTWAQKFPGTHPMLLLPYREEMILPFKESIRIRAPKLKELINANIKAKFREAAADWDVELNDLERADIYTDVDMLLGGIRHLLDGILERGEVSRKLLITYRKTVVSGREMKMIEIIHTASICYKDAAISELLNGNFLEAKNAFYGLCNWSVTAIFNDGAYRLNILKDDVDMPEREAVMVKVLGFTHHLYFY

SEQ ID NO: 252 - protein, 669 aa, unidentified
  source 1..669: note = Related to NZ_WNXD01000002.1; note = Pedobacter planticolens
MAEEHRSELKAKFQEVATKKDFFDLLMRAIECLPISNSETHRFKERLKNFHITDSRENYHSFTVRKSSGKDRLINAPVAPLKFFQRLVNVVLSCVFEAHPNAFGFRKNGSIVQNASLHVNQHYVFNIDLKDFFTSIDDVMLISALENAPFGFKGKKSLLGQEIVRLCTMKMDLAMPGQGTQSSKEVRVLPQGAPTSPLLSNVVCLNLDIKLTGLAKRFGITYSRYADDITFSSNRMVFGQSSSFLQELKKIIIEQKFSINESKTRLQHMSQRQEVTGLVVNKKINVEQKFIKAVRMYLYYWEKYGYPNAQGKYYADQGIDYYYPESKSLLDTLDGRLNFLKMVKGEDDSTYVKLAQRFKKLSGSLSTRKHANLNPTSSEVFEEHRPVDVATFLRLFQHGEGLKYLTHDYDLPGREFQYDKIMDLAGREFNGAFRSYSITRSLYARAKHFCFERRPKWWRWENGKKIDINVGWGSPELKEWIADNPGVHPIRMKVFRDQFIRPFKESIQFRAPMLHQAVVQTLEEKFGEEFQNFEIELINLESAEFFTDVDIFLGGVRHILDGILERVDVSKRIRIEFKRQIFGNHNMKILEITHIRSKCHRDANIVDLMNGNFREVARAFKGLCNWSITSSFSDGNYTLKVLDDNPGSPSKMSVDEDAVYGFTHTLSFY

SEQ ID NO: 253 - protein, 688 aa, unidentified
  source 1..688: note = Related to SNYC01000005.1; note = Pedobacter metabolipauper
MTYYIEFASPHPFTNLKDPLKQITQEQRQEVASKFHACASQQEFYQILVHLVSLLDINDLGQTYCCQILSQFEIGEDSPTYSNFSIKKRSGRYRHISAPSEELMLIHRLINFLLSCVFQGHQCSHGFKKGSSVVSNAVVHVGKKYVFNIDLKDFFPSIDSEMVKEALMRPPFNLSGERKSIAEHLSGLCTMRAPLKKGIRNSSRKFILPQGAPTSPLLSNAVCQNLDNLLESLAKANQLVYTRYADDITFSGNNNVFEEGSAFLIELVRIISEQGFQINESKTRLLGKSARQEVTGIVVNEKTNVKREYLKPLRMYIYYWEKYGYHEAEIKFFNDRSLISDKEMESTLHSTLDGRLNYMKMVTGENHPTYLKLSKRFKKLANKRFAEKKQKSSSTHKGDFSEHRPKDLARFLRFFQDSDGLKYLTHDFDMVDAVFDYDRIMMYAVRDFFRGVKENYITKQLYARVYQFAFEEEPNWWKYEDGKRIEINIGWSSKQIKEWVRLNPGTHPIRSKLIRDNLIRPFKESIQFRPPALRNRIESTVREKFGEDYDELQIDYSNLEAAEFYTDVELVLSGVRHLLDGILERIGISKTIHIAFSKQEVNGSLMKVLEITHVGSRCYKNALPKELLNGNFSDALKLFHGLCNWAVRASFADGDFEVDMLSDKEKLSQKRPVNKELISGFTHLLRFY

SEQ ID NO: 254 - protein, 426 aa, unidentified
  source 1..426: note = Related to JAFDXN010000025.1; note = Bacteroidetes bacterium
MAKKIENTDLIIQRFAAMQSITDLLELLNLVKKELYGEKANPFSLRQLNYYSLSKLQAQHYRQWSIPKKNGGERTIHAPVNGLKHVQACLNAILQVLFEPHYAAMGFLPGKSIVDNAKKHASKGFVYNLDLKDFFPSIPRERVWACLLLPPFNLGSSTERRQLANRISFLCTASIEITDAERGKILNTFLPQGAPTSPTITNIIARKLDRRLQGVANKYHLTYSRYADDITFSGNSNVFKKSGEVVLEIRRIIEDQKFQVNDKKVRLQQQGYRQEVTGLIVNEKVNVPRRYYRQLRNWLYLWETYGKEKASKLFLKDYRADKGYKRDGLPDMDCVIGGKLDYLKMVKGQDDPLFAKLNARYLRLSNIESQQGESRSYIKTSQESSKKEKKKNVEEGKEPRKLIETVLEMINRDSFEKAMEYFLSKK

SEQ ID NO: 255 - protein, 423 aa, unidentified
  source 1..423: note = Related to JACJYQ010000002.1; note = Lewinellaceae bacterium
MKADPEKIPEIRASFARMETKDDLVKALNLAKEILYGKGVNEFSLKNITYYADTRFQRKRYSEFQIPKKQGGTRTIHAPVPGLKAILRCLNLLLLSVYEDGYENEAMGFIPGKSIKNNAEWHTGKSFVFNIDLKDFFPSIDLYRVKTIFQLPPFNLKGEKEPLAYLMARLCCEKMEVVRKDNLGAEIKKVATVLPQGAPTSPAITNFIARKMDRRLKGVAKRFGVAYTRYADDITFSSNHNVYKKGGDFLLEVEKIISEQGFCINESKVRLQQREYRQEVTGLIVNEHPNVPRKFVKQMRQWIYLWEHYGYEKANLFFRRDYSQKAGRVLAFIPPLDLVLDGKLKYMKMVVGPEHTTWMKLNSRYSLLTQDRVISDPDLLDINKALESLFVEMRKNIDEFIAEVNYHQETNQAINIDDNEATD

SEQ ID NO: 256 - protein, 404 aa, unidentified
  source 1..404: note = Related to JAGOPY010000019.1; note = Bacteroidales bacterium
MKADQKQIQEIRDRFAKMQNKTDLLDLLNFAKGILFLQKSNSKSLRLSTLNWYADPRLSAGKRYIEFSIPKKNGGQRKIHSPARSLKTIQRCLNLILQCIYDPHPAAMGFRPGFSVVDNATKHTGKNFVYNLDLKEFFPSIELHRVKACFKNPPFNLTGDREPLAFFLANLCCHEQEVEREGKPLVLSVLPQGAPTSPTITNIVANKLDRKLSGLANRFGACYSRYADDITFSSIHYIYGRNGDFINELKKIIANQKFKINSLKTRLQTKSKRQEVTGLIVNEHVNVNNIYLKNIRQTLHIWKKFGIDNAWKYYTENEDTRTTNKENSSLLVQIMNGKLQYALTVRGKEDFLINKYFTILKDLMADKRSIPDQNLELILQVLLTEGLDEAMEKYTNNISQGNGK

SEQ ID NO: 257 - protein, 401 aa, unidentified
  source 1..401: note = Related to JAFGOZ010000659.1; note = Bacteroidales bacterium
MKLTKENIEEIGKDFFEMKSREDLLNLLNKTKFYLFGDKSKPIQLKILTYYANPNIAGKRYVEFTIPKKSGSIRRINAPVKSLKYIQMCLNVILNIVFKPSPFAMGFVPGRSIVTNAMIHQNCRYVYNIDLSDFFHSIELHRVKAVLKLKPFNLCSEREPLAFLIANLCCTELDVNRLENGNQIAVVRSVLPQGAPTSPVLTNIVAQRLDRRLYGLAKRFNINYSRYADDITFSASMNIFKQKGEFNHELTRIIANEGFSINKDKIRLQDRCFRQEVTGLIVNEKVNIRRRYIKNIRLWLYYWERYGYEKAAQYYEQYYRKDKMYIKIVPSLEKSILGKLTFIKMVKGDKDPVFRGLWTRFETLVKRFKESKSAMLDYNIILEILFNQGITAAMEAYSKVK

SEQ ID NO: 258 - protein, 741 aa, unidentified
  source 1..741: note = Related to JAFTKP010000042.1; note = Bacteroides sp.
MTTYEEQHIRKQVALSFSEMESTNDLVRLINKVWSFFSGENYQPIPAKVIYHFSNHQHSQDAYRSFEIPKKNGKMRTIQSPCHALKRIQFCLNFILSSVYDDPHPAAKGFVRGRSILDAARPHVKMPYIYHVDLKDFFPSISFFRIKACLEIPPFNLSGSKKNIAFCIANLCCLYDGEQSRLPQGAPTSPILSNIVCQRLDKKLTGLAKRFNARYTRYADDLTFSSYINLAGEKDFQEELARIIDGQQFCVQEDKTHQENRQYRQRVLGLTVNEKLNISKEYVKSIKMYLYLWESYGYGRACRLFEADWDKSAKNTRSIPSLRNYLSGKLEYMRLVKGSDDPTFQSLYQRFTDVCMENDIPDWKQFKKEMELFCQKAYNPTYDAKELLRWYQERLVDIDVRLLKESNLYFSITKAFTYLSKKLYANQPLMTKVAVHDARRLPFFLYTHFSKQEPLKFLTHTWDQYAESTSFTDYEDFIQKTNEAFKRITPEFKELDRQLYACFYAFLNNDGNGRGWGQYHLKTSWKSDWIKAWCNKHTDSSPWDCPIPEAYKQINDNLRVNYFSDIIELFKEEFQIRTENQQLKRMVRRLVNKHLNPGFNVRINVPPTKLYTNVSLLSHALDTLLYNLSQRKEFTDIEITTIDQSDYIDLSVCQIGSIYYADREQLLQETESGDFEEIRKKLTNRCDWMVQTTCKDGGNYQIAYLNSLAPNGSTKELDKVKGFTHILRFYKPQAYEKNTDY

SEQ ID NO: 259 - protein, 691 aa, unidentified
  source 1..691: note = Related to NZ_VJZV01000025.1; note = Bacteroides koreensis
MTYFSNYKLAKDAYYKFLIPKKNGKTREIQAPVKDLKRLQICLNFILSSLYHPHPAAKGFILGQNISDAAKPHVRMPYVFHLDLKDFFTSISLYRVKACLSLPPFNLNGDKERIAYCIANICCTNDGSRTFLPQGAPTSPILSNIVSLRLDRKLTGLAKRFSARYTRYADDITFSSYQDIASDTEFQQELARIISGQNFQIQPSKTRAEGRGYRQTVCGLTINEKVNVSKSYVKEIRLYLYLWERYGYERAQMYLDSDIKKTKENHSDIPQLSHYLNGKIQYMRMIKGNSDDTYKTLRNKFIYLYIPQWKEWEKNILDFCDAVQNSKLSIEELNKWYKTISTNINIHLLKDTPLYTSLTKALSCLTLKASDIPTQTVFKEPIHNATLLPSFLYENFSKNDPLKFITHIWDGNADNCKFEGYEDFIRKEQMAFKEITGRFKTIDKNLFYCFYGFLHNPLNNRGWGQYKIKSGWSSSWLKAWCSEHPERSPFDCPIPENKREIANNVKLNYFSDIVELFKSEFQLRPETRQLKKLLRELVRQYLNFDFHVTFELTDVKLYTNVYMIRNILSDILHDMAQRKQFPDILVRVEDLGSDYVDIILCQKDSDYYATHLQLIQETESGDFCELKRKMANLCDWYVETQCKDGAFRINYLDSIQPDRTIAEPLLSDGVKGFTHRIRIYKHYAYENPNYR

SEQ ID NO: 260 - protein, 394 aa, unidentified
  source 1..394: note = Related to JACMPG010000245.1; note = Spirosoma sp.
MLVDQPQIDHLRQQFASLQSKADLLALLNEAKAMLFEKGDQYPLQLTSLTWYANTSLGVKRYTAFEIPKKRGGHRLIFAPKDPLKVIQRCLNLVLQCVFSPHKAATGFVPGKSITDNARPHVGKHYVYNLDLKDFFTSVDLHRVKACLKLPPFNLTGDREPLAFLIANLCCIRQVGEPSRAFLPQGAPTSPLLTNVVCQQLDRRLTGLAKRFGATYTRYADDMTFSSFVNIYQPDSAFCVELNRIITDQRFVINPAKTRLQRPGYRQEVTGLVVNERVNVPRRFWREIRALLHNWETLDYDEANTRFQKLYALNKARPSQKAPALANVLSGKLLFMKMVRGANDELYQHYARQLDALTNQTTDEISVDVERILDIWEKQGLEKAMTAFEQYKDL

SEQ ID NO: 261 - protein, 394 aa, unidentified
  source 1..394: note = Related to NZ_JACXAA010000017.1; note = Spirosoma sp.
MSLDQQQIDSIRQQFASMQNKEELLVLLNLAKSLLFEKGTEKSIKLHSLTWYSNTSLNAVRYQSFTIRKKSGGERTIHAPVGPLKTIQQCLNFVLQCVFVPHPAATGFVIAKSIADNARPHVGHPYVYNLDLKDFFPSVNFQRVKACLKLPPFNLNETREPLAFLIANLCCVRNPIDPKQAFLPQGAPTSPVLTNIVCQQLDRRLTGLAKRFGASYTRYADDMTFSSFTNVYQPGSEFCQELNRIISGQRFVINPSKTRLQRTGYRQEVTGLVVNNKVNVNRRYLRTLRAMLHNWETLGYDEADRRFKQAYALDRAYTGKKAPALLNVLMGKLEFTKMVRGQEDVLYSHYKQVFETLLAETTDQKPVELEQILDIWEEQGIEKAMILFERYKAL

SEQ ID NO: 262 - protein, 395 aa, unidentified
  source 1..395: note = Related to NZ_QGGO01000004.1; note = Arcicella aurantiaca
MQLTEEQKETIKICFSTMESIDDLVVLLNFVNPLLYPENYEGKINAIQKKSVTFYANPKLSGDKRYAEFSIRKKSGGDRKIAAPHKSLKLIQSALNFIFSVIYEPKEYVTGFVPEKSIVDNAKVHVGRNYVYNIDLENFFPSIELNRVKAVLKLPPFSLEGTEREKIAYLIACLACKDGRLPQGSPTSPVLSNIVCQKMDRRLRGFAKAFHCRFTRYADDITFSANKDVFNQTFKTELKRIIEDQNFTINEKKVRLQGRGYKQEVTGLIVNEKLNVSKKYVREVRAMLNNWDKLGYEKASEKFKKHYYEDKGHVKKGEASMQNVVWGKLQFLKMVKGEEDAVVLKYEAQYKKLNPQPLQVNLDNPTLSDILAIWENDINGKGIEDAMELYYSKFK

SEQ ID NO: 263 - protein, 381 aa, unidentified
  source 1..381: note = Related to DMIU01000281.1; note = Runella sp.
MIRLKFNTLNSIEDIATLINEVYALLFPNAKPLPKTKKPFHISLTSLNYLAYSEHFRQKRYKTFRIPKKKKGEFREISAPTYTLKAVQRCLNAVFFCLFEPYKANELPENQQHLTGKKIFPHKAAKGFLPNRSIVDNAKLHVGKRFVYNIDLEGFFPNTSFARVRQVLKLAPFNLKNERDDLGKLITALCCQDDCLPQGAPTSPTLTNMVCQRLDRKLYKLAKENHANYTRYADDITFSSDKTIFNEHLKEAIEKTINEEGYKINKAKERLQGKGIHQEVTGIVVNKKLNVTRRYIRDLYFWFSHWEKDGYASTKAYFDLKYVNQKGYLRYKGKIPPMENVLWGKIQFLGMVRGKNDELYQKFLEKWKVCSQSKDVPIIEN

SEQ ID NO: 264 - protein, 396 aa, unidentified
  source 1..396: note = Related to NZ_CP068224.1; note = Sphingobacterium multivorum
MSNDNLFQENIKSIFYSIDSIEDFCNLLNQIYQHIFPSRDTKLNVVISVKDLNYYAFDRSRNKYKTFAIRKKDGGSRIIKAPNYKLKTILKCLNWLFNTLFIPHNNAYGFVRNKNVANNAVPHVGKLFVYNIDLLNFFPSTSFRRVKSVFELPPFYLNGDKSKLANREKLGFLIANLCCDAGFLPQGAPTSPVLTNIVCRRMDKKLYKFSKQNNCTYTRYADDITFSSYKQVFDESFKKGIKSIIENEENYKINDKKERLQSYGERQIVTGLVVNQKLNVTRDYNKDIRFWLWSWKKWGYEQTQLRFAEEFVYKKSYQKYNGKAPSFVNYLSGKIRYLSMIRGRDDERVKRYIDNFNKMVSDTVKTFTTVDLLQIFRKIDTHGKDSIDYSFKKNIA

SEQ ID NO: 265 - protein, 425 aa, unidentified
  source 1..425: note = Related to JADJRO010000003.1; note = Saprospiraceae bacterium
MRLTPENIEEIKVRFAKTETVEELAQLLSWVYALKFPKRSEKTTIIIEAKHLNYYAFKPVNRYKQFTIKKKSGGERTISAPRYKLKTIQKCIHEILNAVFTPHFTATGFVPRKSIVDNAKVHIGKQFVFNTDLKDFFPSTEFRRIKAVLGLAPFNLTDANEINSNKDKKKTSDEKGKGYLGYLIANLCCDNGCLPQGAPTSPTLTNLICQRLDKKLYKYAKSINATYSRYADDITFSANKPVFDETFKKILIDLIEVQEKFKINFEKERLQGGGERQSVTGIIVNRKSNVDRKYLKDVRFWLMCWKKFGTNATQQKFLVQFPEKKGFLRYNGTTPQFYNYLNGKILFLGMVRGAKDEIFLKQKMNFDELYSEVTGKNNKTEIGTVIQRDSNYESSDLSKGILEILNELDRNGYTNANNKLKTIFK

SEQ ID NO: 266 - protein, 315 aa, unidentified
  source 1..315: note = Related to JADKCE010000010.1; note = Bacteroidetes bacterium
MKLSETIQQEINQKFQTIKSVEDLVILMTFVYGHLYPNIQTKIEINKRKLHFIAFSKKERYKSFTIPKKSGGERKIFAPIYTLKVYQKILNEILQIVFTPHKSSHGFLPGKSIVSNANLHYGKQHVYNIDLKDFFPSTSFRRVKTVLQLSPFNLNQDRESLGFLIANLCCNDNGLPQGAPTSPILTNIVCQRLDRKLLRFAAQYKSSYTRYADDITYSSNQNKFSAEFESKLQEIIHEEGFEINSNKTRLQDFKRRQEVTGLIVNRKVNLNIEFIKQVRFWLYVWEKFGYASFHERLSSDYIKSGNTSKRKGGIH

SEQ ID NO: 267 - protein, 590 aa, unidentified
  source 1..590: note = Related to NZ_JQNQ01000001.1; note = Salegentibacter sp.
MSGVFLDKLLIENTKKRFDQMTNLTDFVSLLNYIEQRVFKNKKKPLTVPHLYYLSKTKNTRYEEFEIPKKNGKPRKIKSPENRLKRVQSLINILLQIIFEDHSHYSANGFLFGKDIRRNALPHINKNYLLNIDIKNFFPSIPFRRVKVVLEFAPFNLIDDRERIGFLIANLGTFKNALPQGAPTSPILSNIVTQNLDRNILKYCLNKKIKYTRYADDLSFSSNWNIFDQQVIKEIEAIIIAENFILNPKKTRVRNFMQRQEVTGLIVNTKLNVKREYLQKVRAMINNWEKGGLSFAISQFRKHQPPEKVNYNFKEVLLGHISFLKLIKGDTNSVVQNLQIRYNFLVNLLDYSFIEEDNVRLKLEEDDQKMEKIAFENDQTKKETFISFCTSAFHQIENLLNYYFWKKFPEIDDLKDYMWHNNPLFQDRWKKLKKLDKKERLNRLNNFKTVRDFDINTLVYLFEKEFYFDQHLSYGKKLTHLREIRNDESHRCTVLDTNEQVIINQFEEIKKERKAKKEKGKQFILSPKQKKEEMNYLTLKYIEEKNYKNVRNILREVKNNIKNTLPNIEPLQITGKVEQKEILETSEVFN

SEQ ID NO: 268 - protein, 543 aa, unidentified
  source 1..543: note = Related to CP015125.1; note = Dokdonia donghaensis
MKNLTDFVALLNYLEFRIYKTNLKPLNIKYLYYLSKTKDDRYVVFEIPKKNGKTRKIKSPDKLIKRAQSLINLLLQIIFENHSHYSTNGFLLGKDIRRNAVPHINKNYLLNIDIKNYFPSINFRRVKVVLELAPFNLRNERETIGFLIANLCTHGNSLPQGAPTSPILSNIVTQNLDRKLSKFSNENRIKYTRYADDLSFSSNWNIFKPTFIKEIEKIVNSENFSLNSKKTRVRSFMQRQEVTGLIVNTKLNVKREYLQKVRAMLNNWEKGGLYFATSRFKAHQTKSKKNLDFKEVLLGHLSFLKLIKGEDNQLIKRLLEKYNNLYNQIEYGYIDIENVEKKLIEDNLKMEKIFLDQELPDKDKFISFCTIAFHQIENLLNYYYYRKFENFEDLLNELIINNPKFKKRYRTTEKANQSFKKISDLNINVLVFIYEKEFFFDKKISYDKHITMLREIRNDDSHRCSVIDFDKEEIIKEYQKIEKERKGKESRGKNFEYSNQQARIKLNYDTLKFLDRKNYKSVRYNLKNISSNIRNTLHKKELS

SEQ ID NO: 269 - protein, 566 aa, unidentified
  source 1..566: note = Related to JAAZUI010000052.1; note = Lutibacter sp.
MSSIFLDKKIKDNIKQKFYKVKDLEEFATLLNFVERQFFKNFKAEKLIDVDYLYYLSKTKSSRYTQFEIPKKNGSVRVINSPDTTLKRIQKLINIILQIIFEDYSHYNSNGFILGKDIRRNAIPHINKNYVLNIDIKNFFPSINFRRIKVVLELSPFKLNNNREKISFLIANLATTDGTLPQGSPISPIISNIVTQKLDRKLSKFCLKSKIKYSRYADDLTFSSNKKVFNSEFIEKIEGILNQENFLINNQKTRIKSSMERQEVTGLVVNKKLNIKREFLQKTRAMLNNWEKGGLNYAKKEFKKHQPESKKNYEFKDVLLGQISFIRLVKGIESPIVNKISLKFNYLNNLIDYTFISNENVKKKLINDNIKMEKLLFDKNESEEDIFIPFCTSAFHQIENLLNYYYWRKFPVFLDLLKTLLENNPNFKRRYRNLKNANNHFKKISDLNINVLVYLYEKEFFFDKNRYYDKRITHLREVRNDDSHRCQIIDIDKDSLKKDYELLQDKIKIQDKKGKQFDYKKEDKKLIRSYETLKFIEKKDFKKVRNSLRIMSYQIKNTLPNNVHKK

SEQ ID NO: 270 - protein, 562 aa, Flavobacterium sp.
  source 1..562: note = Related to NZ_QGGJ01000001.1; note = Flavobacterium araucananum
MAGVFLNDLFKSEIKVRFERIRNVREFVSLLNYIESQISTSTEEIFELTFSHLYYLSKSKDSRYTEFAILKKSGKLRQINSPDKLLKRVQSLINILLQIIFESQSHYCSNGFLLGRDIKRNAIPHTNKKFVLNVDIEDFFPSINFRRVKVVLGLSPFNLIDEREKIAFIIANLGTYKNYLPQGSPLSPLLSNIVTQKLDRKISKFCLTHRIKYSRYADDLSFSTNRNILDESFVKSIKNIVEDENFRINDEKTRLRTSRESQEVTGLVVNEKVNIKREYLQKVRAMLNNWEKGGLRSAEETFKKHQPPNKLNYDFRSVLLGHLSFLKLIRGDDDQTVKRLRLKFSFLNNLIDYSFIDNEKVKVRLEKDNKTMEKIFFDIDMSEDKFISFCTSAFHQIENLMNYFYWKKFEHDELLNELLINNARFKKRYKTLEKAQEEIKTIRNLDINVLVYLYEKEFFFDKKVYYNKHITMLREIRNDGSHRCSIFGLDVQKLKDDYVLIENERNDKKKRGKNFELSLDQAKKELNFLTYSFLERQNYKEVRENLRNITKTINGALKLKIK

SEQ ID NO: 271 - protein, 565 aa, unidentified
  source 1..565: note = Related to NZ_RCCS01000004.1; note = Tenacibaculum discolor
MPGIFLDDVSREKVIQKFNKISSINEFASLLNFIEKNNTHLLDKKKFTPINSKYLYHLSITKDKRYKEFSISKKSGNLRKIETPDELLKRVQKLINFLLQVIFEPYSHYSSNGFLFGKGILRNAKPHVNKNYVLNLDIKDFFPSINFRRVKVVLELNPFNLKDERERISFLIANICTYKNHLPQGVPTSPILSNIVTQRLDRKLTKECLDLNIKYTRYADDLTFSSNQNILNPNFVKKVEQIIQSENFELNNNKTRLQTSMQRQQVTGLIVNEKLNIKREYLQKVRAMLNNWEKGGLDYAEQIFRNHQPIEKKEYPFKNVLLGYISFIKQIKGSDNGISLKLVEKYTLLNNLIDYSFIKNSAVKEKLISDNYKMEQIPLFNNQPENDKFISFCTSAFHQIENLLNYYYWSKFSDFINLLEHLLLHNPSFKKRYKNLDKAKSHFKKISDLNINLIVYLYEKEFFFDKKIYYKQEITKLREIRNDDSHRCSVIGVNKDEINNEYAKLEAKKNDFKKRGKNLIYSNKEKKFILKYETFLFLEDKNYKEVRRILKHITLNIKNTLPKTS

SEQ ID NO: 272 - protein, 421 aa, unidentified
  source 1..421: note = Related to NZ_MDJD01000054.1; note = Algibacter aquaticus
MSGIFLDENSREKVIKKFNKINSVNEFVSLLNFIEKNNDNLKDKNAFKPINSKQLYHISKTKDKRYLEFSIPKKNGGKRKIKTPDEILKRVQKLINYLLQLVFEPYAHYSSNGFLFGKGIIRNATPHIGKEYVLNLDIKDFFPSINFRRVKVVLELNPFNLKNEREPISFIIANLCTHKDQLPQGAPTSPILSNIVTQKLDRKLTKISLSKNIKYTRYADDVTFSKKNILKHIFINKVSKIIQEENFIVNEDKTRLQKSTERQQVTGLIVNKKLNVKREYLQKVRAMLNNWEKGGLEYAINVFKKHQPTEKVDYPFKEVLLGHISFIRQIKGIDNNVSIKLTEKFSLLNNLIDYNFIKNDIVKKRLIDDNHKMERFLLVENLTDNDKFISFCTSAFHQIENLVNYYYWSKFDNIELLLNYL

SEQ ID NO: 273 - protein, 561 aa, unidentified
  source 1..561: note = Related to JAEINU010000004.1; note = Bacteroidales bacterium
MTHEEITIEFEKLKTTSQLATLLNKVEKNRALQTEKLQKLKAKDLNFLAISKDSRYREFKIFKKSGKERIIDAPDNYLKRVQTLINDLLQIIFEPKVHNATNGFLLNRDIVRNARVHVNKRYLLNLDIEDFFPTISFRRVKSVLELAPFNLNTEKENLAFIIANICSLKGKLPQGAPTSPILSNIVTQQLDRRITKYCLKKNVKYSRYADDLSFSSNLDVFDKAFIKGLTIIVKKEGFKINKEKTRMNSNMERQQVTGIIVNEKLNVKRDYIQKVRAMLNNWEKGGLDYAKAQFIKHYGKSKYKPDFRKALKGHINFIGLVRGKEDPLFSRLLLKYNYLNYQIDCNYISNKVVQEVLERDNKEMESIPLRSVRINEDNFIAFCTSAFHQIENLLNYFYWRKFPEIEDLLQYIMDYNEAFHWKSIEKCKKRFPKISKIQIWAKVYIFEKEFYFDKKIPYNKDITILREIRNDDSHRCAVISYNRDGIKMDYKELKIKCMQYKEEHKKNMEKSSGENILEQKYKVIKFLEERNYNSVRRILKGVSDNIKNYPFVKPVELEESN

SEQ ID NO: 274 - protein, 845 aa, unidentified
  source 1..845: note = Related to REAZ01000005.1; note = Cytophagales bacterium
MKIEFKKVILIKQYFDTTENIDGLADLLNFVGNTLYEKTFSKKQLSKKLLTFFAFKKEDKYQRFTIKKKSGENRFILAPHRYLKLIQKCLNVVLNVVFEPHWASHGFVLDKNIVTNARKHIGKNYVLNVDLEDFFPSISFRRVKTVLQLPPFNLNDELAFLIANLCCYENSLPQGAPTSPTLSNIVCQKLDRKLARFAKENRVSYSRYADDITFSARTDLFDEDFLNRLKEIILSENFKVNENKTRIQSFAQRQIVTGLTVNQKVNVSQQYIKEIRAILNNWEKKGFEQAQYVFIKNYIKDNPNIKNPSMIEVLRGKLNFLGMVRKKDNLYQKYFNQFNKLLDSYNQKEEGDIIYIKNVLSKYKTETNTSKTNRDVRKSCKHNPIRVTEFLRVFSEDRNFGLNMLVHEAEDIDLEEKLKEINLEFAKYGKQFEEEKYQIPIWLYTHIKKDLIDLYNGKGLSIYRELGKHPFQNDREFTKTIFDFKKTYRFGQDKGEETSLRDTIIRCLSKVRYGDRDILSKFQIAVFEPINQLDFDLIAAIKTDVIRVELAIRIILSSYLKHSNGSGRLKFELQEIQNQIILNIIDLDSICTKNYENLQGGDFNEIIQKLWSLCDVNVISKFKDGKTRIVPILPENKDSKLYDKEVEGFTFQLVFYNLPRVLLLDNKGRVKEVNNEYKPYIAIESDISENDLLRYNALIIHKSIPNYVNLFKRAIKENIPVVSSGGGSGGEEGIVENVGNISIAFDLMQKNLPLFLKKIKEDYVVDINIFLFANKINYKKAVKIKEEIINIIENHNLLFPELSLEVINKIKVLAKSNDIPSFENKKSLSKFLQEKLKLIEYETAN

SEQ ID NO: 275 - protein, 551 aa, unidentified
  source 1..551: note = Related to NZ_VIKU02000001.1; note = Pelagihabitans pacificus
MEPIDIKSENILKQFNSISGIHDFVEVLNEIYKLYFPEGEKKLFRVGSINYYAFHAQKRYYTFDIPKKNGSTRRINAPVYQLKLLQQCINQLLHLIFKPHHTAHGFLLGRNVVTNAGIHAGKQEVLNVDLQDFFSSIKFRRVKAVLELPPFNLTGKKEKVAFLISNLCCNNGVLPQGAPTSPLLTNIVCQRLDRKLFQLAKTSKARYSRYADDITFSSNNAIFNDEFIKELNYQIENEGFLLNEAKTRIQDRRQRQEVTGLVVNKKVNINRDFIRKIRAIFHNYQKGGQKFAQKQFAKHWSKPITPPDFRSSLKGQIEYLGMVRGKSDSIYLKYKQTYLRLFSSNFIDYSFISHKGVRAQLELDYKRMEAARIRLTMSDEERFTEYCLTAAFQLEELVNYYLAQKMDFDKLVNELVTHTWATTSGLNGKNNVSEIPAVYKYFLFEKYFYYKPGVFYDSVITKLRNIRNQKLHRATVVQRSEEQILMEYKALMAKASNHKINSDGRVYQMSKSEARLNNEAKAVYFFREKNYKAVFEAVKDVSDKIRMDLAN

SEQ ID NO: 276 - protein, 377 aa, unidentified
  source 1..377: note = Related to NZ_FYEW01000004.1; note = Hymenobacter gelipurpurascens
MSIPPSSSNTNGNEQPASVPATKVDLTASFQKVTDVHQLARVLNVALTLELAENPEHKDKPISAKLLNYYAYHKKETRYRTFRIPKRTRGEVRIIKAPDRGLLRLQRLLLSCLTATFTTSHPASHGFVLGRSVLTNAQPHAGHRFVLNLDLRDFFPSTSIGRVVAVLQLPPFSLSKEGAYLIANLCCDQGCLPQGAPTSPLLTNAVCQRLDRRLQQLATHHRCTYTRYADDLTFSCNRPVFRDRFHQELNTIITAEGYQQNEQKQRLQTPEIRQEVTGIVVNERPNVPREYVRQIRAMLHNWETRGYEAATSTLQQHYATSKAHARHRGNVPKLERVLAGKIAYWGMVRGWEDVNYISSLLKLRKLTDKQKRHERYT

SEQ ID NO: 277 - protein, 372 aa, unidentified
  source 1..372: note = Related to NZ_JNLX01000031.1; note = Hymenobacter sp.
MFVHVPSSTNNGAVQPASGPVTEAVLATNFRLITDVHQLAQVLNSALLLDLAENPTHQDKPISAKLLNYYAYHKKETRYRTFQIPKRTRGEVRTIKAPDRGLLRLQRLLLSCLTAAFTGNHPASHGFVPGRSILTNAQPHAGHRFVLNLDLRDFFPSTSIGRVIAVLQLPPFGLVKEVAYLIANLCCDQGCLPQGAPTSPLLTNVVCQRLDRRLQQLAIRHRCTYTRYADDLTFSSNRPVFRDRFHQELNTIIAEEGYQQNQQKQRLQTPEFRQEVTGVVINERPNVPREYVRQIRAMLHNWETKGYETAAATLREKYTISKAKARHKGQVPKIERVLAGKIAYLGMIRGKNDALFLELSMKLMQVMKKQKL

SEQ ID NO: 278 - protein, 333 aa, unidentified
  source 1..333: note = Related to NZ_CP094534.1; note = Hymenobacter monticola
MAFALNAALQQDLDENPQHKPKLITPKLLNYYAYHKKETRYRTFQIAKRTRGEFRTIKAPDHGLLRLQRLLLRCLTAAFTTSHPASHGFVPGRSVLTNALPHVGHRFVLNLDLRNFFPSTSVGRVMAVLQLPPFSLAKESAYLVANLCCDQGSLPQGAPTSPLLTNAVCQRLDRRLQQLATRHRCTYTRYADDLTFSCNRPVFRAAFHQELNATLAAEGYQQNEQKQRLQTPETRQEVTGIVVNDRPNVPREYVRQIRAMLHNWETKGYEAASATLRQHYPTSKAHARHNGKVPKLERVLAGKIAYLGMVRGQNDSAFLNLIKSFLRIKDAGQ

SEQ ID NO: 279 - protein, 458 aa, unidentified
  source 1..458: note = Related to NZ_JAHLZY020000001.1; note = Hymenobacter sp.
MSEQDPPEQPTDEPGPGQEEFEGAFEESQREHSEEEAELLAEIKAELQAELYADLEADLRSEMQNELASESLFGTYSANKSLSDDVIEEIKRWGAFMAVLTAATTLNDLAEPFRRATNAKYLAAVLNAVLRLNLLENPSRKAKPVSFKLLNYYAFHKGERRYRTFLISKRTPGEQREIKAPDYGLMRLQRLLLGCLTAAFSTCDDAAHGFVSGRSVLTNALPHAGRRYVLNLDLENFFPNTPVQRVVKVLQLQPFGLVKPVAHLIASLCCDQGSLPQGAPTSPLLTNAVCQRLDRRLRQLAFRHRCTYTRYADDLTFSSNRPAFQELFHKELNAILTLEGYKQNPNKQRLQTPNQRQEVTGVVVNQRPNVTREYARQIRAMLHNWETKGYAVASTTLRQFYPQTKAHARHEGKVPKLEKVLAGKIAYLGMLRGKADVMFLDFKSKLSTLSAAALPHDN

SEQ ID NO: 280 - protein, 426 aa, unidentified
  source 1..426: note = Related to JAFLQZ010000025.1; note = Hymenobacter sp.
MAETPDQLPTPPHDNEPAAGGPADHPGNPLAGFVIKNGWLQQVKPGYQPALPAAEELAELAEHFRAVTDAISLARVLNAALELHRKQHPKGSPKTVSPGLLLYYAHHKKERYQTFQVPKRTRGQFRDIKAPEHGLRRIQRLLLLCLTAAFTTCDEAAHGFVPGRSVLTNAQTHAGRRFVLNLDLKDFFPSTRVGRVLKVLQLEPFDLPKEAAHLIANLCCDQGSLPQGAPTSPLLTNVVCVWLDRKLRALAKRHRCHYTRYADDITFSSQRPAFTAAFQAELNAVLVDEGYEQNPAKQRLQTPETRQEVTGVVVNERPNVPREFVQDIRFLLHVWQKHGYAAASKAMGQNYGGSKAHARYRGNIPKLEKVLAGKIAYLGMVRGKKGIVYASLYEQLQDLNGVTALHILEELTIIGLQVEFDKNQNL

SEQ ID NO: 281 - protein, 411 aa, unidentified
  source 1..411: note = Related to JAIZZH010000003.1; note = Hymenobacter sp.
MAETPDQLPPTPNENEPAAGAPADQPGEPLAGFIVTDDKLQPALPAATELAELAEHFRAVTDATSLALVLNSALELHRKRHPKGRTKTVAPGLLLYYAHHKKERYRTFQVPKRTRGQFRDIKAPEHGLLRIQRLLLLCLTATFTTCDEAAHGFVPGRNVLTNAQPHAGRRFVLNLDLKDFFSSTRVGRVLKVLQLAPFNLPKEAAHLIANLCCDQGSLPQGAPTSPLLTNVVCVWLDRKLRALAKKHRCRYTRYADDITFSSQRPAFTPAFHAELNAVLADEGYEQNPAKQRLQTPETRQEVTGVVVNERPNVPREFVQDIRFLLHVWQKHGYVEASKAMTRKYGSSKAHARYKGSTPKLEKVLAGKIAYLGMVRGKEDVAFEQFAHSLVTLSSPEYREIEMLISILSRIG

SEQ ID NO: 282 - protein, 432 aa, unidentified
  source 1..432: note = Related to MVBC01000032.1; note = Hymenobacter sp.
MPQPPDDLFPPSPDAAAGREEDAAGIPNQGSSMPDEPASIPQPDRIRDAADLLAMLDALDDIQPDPLTDNLAAQPFPLPVPTKLADLAEPFRAVTSAVSLARVLNAALHLHRLRYPRSQAKPVSAKLLRYYAHHKQARYHTFQIPKRTRGQFRDIKAPDHGLRRVQRLLLLCLTAAFTTCDEAAHGFVPGRSVLTNAQPHTKRRFLLNLDLKNFFPSTSVGRVLAVLQLAPFNLNKEAAHLVANLCCDAGVLPQGAPTSPLLTNAVCQRLDKKLRRLAARHHCRYTRYADDLTFSSQRPAFTPTFHAELNAVLTEEGYEQNPAKQRLQTPATRQEVTGVVVNERPNVPREYVRDIRFLLHVWQKHGYAVATQAMRAKYGSSKAHARYQQKIPKLEKLLAGKITYLGMVRGKEEVVYRTLLRKLEIVKKKQKL

SEQ ID NO: 283 - protein, 445 aa, unidentified
  source 1..445: note = Related to NZ_SRLD01000019.1; note = Hymenobacter elongatus
MPEDLPPDAISATPDQPDAGTEEAAGQALEAVQHAELLRVLSPEYQAGFWAMLNAQKGRQPRPAPLLEIIDTAGLAVPFREVMDADTLARVLNAALALDVAENPQHKPKPLIGKVLNYYAFHKKTTRYSTFEIPKRTRGEMRVIKAPDHGLRRIQRLLLLCLTAAFTTCDKAAHGFVPGRSVLTNAQPHAGRRFVLNLDLKDFFTNTHYGRVERVLQLPPFSLLPAVARLVANLCCDQGSLPQGAPTSPLLTNAVCQRLDRRLRQLAKCHRATYTRYADDLTFSSQRPAFREPFYAELKVILDAEGYQENAQKRRLQLPNARQEVTGIVVNDQPNVPREYVRQIRAMLHNWETKGYEAASTTLRAHYRESKAGARHKGTAPKLEQVLAGKIAYLGMVRGSDSVEYTVFSQKLKSLGFDKENLAIMGILKVIKEKGVKEAIASKQV

SEQ ID NO: 284 - protein, 432 aa, unidentified
  source 1..432: note = Related to NZ_QYCN01000007.1; note = Hymenobacter rubripertinctus
MPEDLPPDAASATPDQPDAGIGEAAEQAPEVAQHAELLRILSPEYQAGFWAMVNAQKDQQQRPLPLPEIIDTAGLAVPLGEVKDADTLAQVLNAALKLDVVENPLHKPKPLTGKVLNYYAFHKKATRYSTFQIPKRTRGEMRVIKAPDHGLRRIQRLLLLCLTAAFTTCDEAAHGFVPGRSVLTNAQPHAGRRFVLNLDLKDFFTNTHYGRVESVLRIAPFGLQPAVARLVANLCCDQGSLPQGAPTSPLLTNAVCQRLDRRLRQLATRHRATYTRYADDLTFSSQRPAFREQFHSELKEILDAEGYQENALKRRLQLPNTRQEVTGIVVNEQPNVPREYVRQIRAMLHNWETKGYEVASATLRSHYRESKAGARHKGTVPNLERVLAGKIAYLGMVRGIENPEFINFTRVLQELTITQKFRFSLDLVMPKL

SEQ ID NO: 285 - protein, 354 aa, unidentified
  source 1..354: note = Related to NZ_AUIF01000011.1; note = Runella zeae
MEFTSDEIQTIKTALQSGKNLADLTDLLNLVSDWIAQKLVLEYKPFSIKQVYHYYYNLESKYKEHRISKKSGGERVIHAPEETLKRIQRRLNVILSHLYKPTEAAHGFVMNRSIVSNAQPHLGKKNVFNLDLQDFFPTIHFGRIKAVLQLPEYGLTSEFAHIVANFCCFQGKLPQGSPVSPILTNIVCRRMDYRISGLAAKHGFTYTRYADDITLSFDELSKEAKQKMGLGLGKILKEEGFKVNSKKTRLLKPNQRQEVTGVVVNEKLNVNREYVRTIRAILHNWQKHGLEVTQAKFLNHYPEEKGFKRNKTIPDLRKVLLGKIQFLRMVRGGSDEAFKEYLIIFDKLAKNNLK

SEQ ID NO: 286 - protein, 354 aa, unidentified
  source 1..354: note = Related to NZ_SWJG01000001.1; note = Spirosoma lacussanchae
MEFTPDELQTITNTLRSGRNLADLTTLLNLTGELIAKKLELEHKSFSVRQVYHYYYNLESKYKEHRMPKKSGGERIIHAPEERLKQIQRLLNVVFSHLYQPSEAAHGFVRNRSIVTNARPHVGKQHVFNIDLKDFFPTIHFGRVKAVLQLPDYGLTPELAHIVANFCCLQGRLPQGSPASPIITNLVCKRLDYRISGLAAKHGLTYTRYADDISLSFDQLSHESRKSFSYGLGKILDEEGFMVNGKKTRLLRPNQRQEVTGVVINEKINVNRDYIRNLRAILHNWQKQGEETTQVRFEQLYPKTAVFQRKRKIPKLQNVLYGKIQFLKMVRGGEDKDIQNFLIQINLLSNNVRK

SEQ ID NO: 287 - protein, 348 aa, unidentified
  source 1..348: note = Related to NZ_BJYS01000005.1; note = Adhaeribacter aerolatus
MELSQYYIDEIKARVANGTTLEDVTSLINFIINIQNETLGTTYRFISTKRLAYYFVHRDERYLSFEIPKKSGGVRQITAPDPFLKKVQRRLNFILEVLFRPKAAAHGFVTGRSIVTNAKVHVGKNYVYNVDLKDFFPTIHYGRIKAVLQLNSFRMKPDFAHIIAHLCCYKGILPQGAPTSPIITNITCQQLDKNLVDYAKLNSCYYTRYADDITFSADKNVFKDKFHENLKLHLEAAGFKLNDKKTRKQKRTQRQEVTGIIVNEKLNLQRTYIKKIRAMLYNWERDGLPACQREFNKYYPLEKGFVKSRILPPFENVLMGKILFLGMVRGKEDKYFMEFTSKYQSLKS

SEQ ID NO: 288 - protein, 348 aa, unidentified
  source 1..348: note = Related to NZ_JAFFJV010000014.1; note = Rufibacter sp.
MELSHKQTEYIKYFVSNGETLEDLKSLINYIIKLQNDTLGTTYKPVSIKQLTFYFANRDKQYFNFEIPKKTGGVRKITAPDLFLKKIQRRINFALDLLFKPKAAAHGFVTGRSIVSNAKVHVGKKYVYNVDLKDFFPTIHFGRIKAVLQLHPFKMKPKFAQLIAHICCFEGILPQGAPTSPIITNIICQQLDKNLVSFAKFYKCYYTRYADDLTFSSDKNSFKEKFYEDLVLHLTNAGFALNEKKTRKQTRTQRQEVTGIIVNEKLNLQRSYIKKIRAMLYNWEKDGLHACQKNFNQYYPLEKGFFKNKSVPPFENVVMGKILFLGMVRGKDDKYFLEFFSKYQNLSK

SEQ ID NO: 289 - protein, 354 aa, unidentified
  source 1..354: note = Related to NYVE01000064.1; note = Flavobacteriaceae bacterium
MDLTNKHIEYIKLLLHKGSTRDDLVSLINFVIELQNEQLQTNYKTISNNQLGYYLAKRDEKYIHFEIPKKSGGVRRISSPSKVLKKIQRRIAFVLEVLFTPRLSTNGFVKQRSIVTNAKGHIGRKYIYNIDIKDFFPSTHYGRVKAVLQIFPFKASEEMAHLIAHLSCYKGILPQGSPLSPILTNIVCQSLDYHLVKLAQDHKCFYSRYADDITFSSNKNIYLNEKFLIKLKKVVNDQGFNINEKKTRLRSNAQRQEVTGVIVNTKPNLKRTYIKKLRAMLYNWENKGLKYCQNKLTIHYPYEKGFIRNKVVPDFENVLQGKIQFLGMIRGKDDHYYKTFNRKFNELKKVKNGY

SEQ ID NO: 290 - protein, 353 aa, unidentified
  source 1..353: note = Related to JADKEM010000006.1; note = Bacteroidetes bacterium
MDFTQTEISEILTQLQQGQKIEDLVELLNHVIKLQNEKDKTTYKPLTNKRVKFYYANINKRYVNFEIPKKTGGKRTITAPDKYLKKVQRRIDLILRLLFVPKPAAHGFLANRSIVSNAKIHVGKKYVLNIDLKDFFPSVHFGRIRAVLQLYPFRLKPEYAHVVANFCCFESKLPQGAPTSPIITNIVCQKLDYKLVQLAKEHHCYFTRYADDITFSCDKARFDDEFLKKLDEIVKAEGFVINEKKTRIQKRAFRQEVTGVTVNEKLNLQPDYIRNVRAMLHNWEKYGYEIANAKFAKFYPKEKGFLRNKIIPPLESVVSGKIMFLGMVRGKEDALYLRYSNQLKTLTDLKNTK

SEQ ID NO: 291 - protein, 330 aa, unidentified
  source 1..330: note = Related to MKTC01000008.1; note = Bacteroidetes bacterium 37-13
MYKKISAKRLKHYYANINKKYINFEIPKKTGGKRTITAPDKFLKAIQRRINLLLTLFFEPKPAAHGFLENRSIVTNAKIHVGKKYVLNIDLKDFFPSIHFGRIKAVLQLPVFGIKANQFKQGDSISFELLAKFGLKPEFAQIIANFCCFESKLPQGAPTSPIVTNIVSQRLDYKLVKLAKEYHCFYTRYADDITFSCDKNRFKEEFMIKLDEIIKSEGFVMNDKKTRTQKKAVRQEVTGITVNEKLNLQRTYVKKVRAALSNWEKYGYEKANAKFASSYPQEKGFLRNKTIPPMEAVLSGKVMFLGMVRGQDDTLYLKYKNKLSELLITK

SEQ ID NO: 292 - protein, 359 aa, unidentified
  source 1..359: note = Related to JADHMR010000076.1; note = Bacteroidia bacterium
MKERKEMIMQLVKNCDNLKDFCELINSSNLLVSKIQSQKPLYTSGKQFGYLLANKEHLYKQFDIPKKSGGRRKINAPLDNLKVVQYMIKNLLQLFYNTPFEWQEKLEEISKNNATVLPCVHGFVNGRGIVSNAYLHLKQDFVLNFDLKDFFPSIGNGKIIETLCLAPFNFSRFTSKIIANLCTLENHLPQGACTSPLLSNIVSQRMDNRFMSLANKYPTMQFSRYADDITFSCMYHVFDDSFMEIIEDIVRAESYVINPKKTRLQRQSQRQEVTGLIVNERLNIPRKKIRMLRAVLHNWKVNGYESAQAKFKDAFGMKKDLKLSIGGFLNFLKMVRGDQDALYQKYYEEFKILTNEITN

SEQ ID NO: 293 - protein, 328 aa, unidentified
  source 1..328: note = Related to JAJTDX010000012.1; note = Cryomorphaceae bacterium
MEITKEKIKELLEKGKTMEDFLEAYNCFLLYLNSRDGKDRKLWEKNSFLYLYRSVNRQYIEFSIPKKSGEERKICAPKKQLKLVQKKITQILELYYKPNANCHGFVKQRSIVTNAEIHTNKTFVLNLDLEDFFPSIKTNRIIDSLIIEPFNFSTEMAKIISRIACKEGGLPQGSPMSPMISNVCCEKMDLDLKDFSKKYKLNYSRYADDLTFSGYRKIFNNTFFSELGRIIGKKHHFRIKKSKTRIQNRNNRQEVTGVVVNDKLNVNRKYIRELRALIHYHKLGKAEENALYVISGKLEFLKMIKGKDRVYRNLLIQFKSQKNGQRNN

SEQ ID NO: 294 - protein, 356 aa, unidentified
  source 1..356: note = Related to JAGAYZ010000097.1; note = Muribaculaceae bacterium
MEKYRTARWRLTMYSERHIITILNRIRRRRDILNCKGYFKLSTLQKYASGNYYKFFSIPKKNGGKRIISAPERELAFIQLCIAVLFNSIYKPNKCVFGFVDKRSIVQNAQQHINKEILFNIDLKDYFSSISYNDIIEKLIRQPYYFSYPAAKFLTDILVVETQDGKRVLPQGAPSSPIVTNMIADHLDVRLSKFAEKHDLTYTRYADDITFSFSRSKLRGWRSHGLTKGIRDIIFDIIETEGFLINKRKTRISFINQRHEVTGLVVNKKVNVKREYIKRLRTEIHNWERDGYVIASYKFLKHYEKTHLGKLKSMENVIEGKLSFIKMVKGENDTTFMKLYNRFMLLMQRDKVFINS

SEQ ID NO: 295 - protein, 580 aa, unidentified
  source 1..580: note = Related to NZ_JACSIT010000096.1; note = Lewinella lacunae
MPRPALLSSSFGLLSVQDLCQYLNSIPVSEPLLKQAYTPLSLQALSEVASSCYKELHLPKKNGSLRIIHGPNPHLKAVQKGLCTLLNEYQKELKSPSAYGFVPGRNIVDNAARHTGKNVVINLDLLNFFPTINSSMVAEALAKPPASIPLVSQLNQVMTNLMCREDRLPQGAPSSPAMANLVCHSLDLNLRALAQKHRFTYTRYADDLTFSSNYPKVAEEVFINIIYQRCEKLGFKVNKEKTRIQRSSGRQSVTGLVVNSKVSVKKKYCRITRAMLHNWKKLGYEEAEALFKANYPKGPLYNLSNVLLGRIEFIGMVDNHKLPLRQRKNQLLSDTRYMKLLAEYWELMNGQNYSFIQNQKIFQRLVRFNRLAENVAMIKNNQFSSRDRFIRYCTYTFVQLEELYKVYFLIKFQEDYSKIGRHFFDNNDAFKRMLLGKKKEDHSPEDVERARKEAENKTSFADYKTYMLESQFLNDCYYAKGRNPPKLPRLLRQLRNFYVHGSEFTKRDEASLKQTLEGIPAKNAAYKKKHQKDRVMPKDEVKAQEEYLVFKWIDGGDYDSVRAFLGDIVALVRYEFEDRN

SEQ ID NO: 296 - protein, 679 aa, unidentified
  source 1..679: note = Related to JAFMYU010000013.1; note = Fibrella aquatilis
MISTQYDTNVLISLLREGESLDDLLTLLNGVVEWQNFVHQSKRRLFTRKQLSFFYKNVDKKYHSFQVPKKSGALRTINAPDGTLKAIQRCITDLLQIIYQPPFSVNGYVKGRSVVSNALMHTNKNFVLNIDLQDFFPNIKFGRVSAVLKLKPIAVKPKFAYLLTKYCCYNGALPQGAPTSPVLSNLICQRLDFRLTELTRSEHLSYSRYADDLTFSSDQPFQNGFLTRLEEIIQEEGFLINPGKVRLLGRDVRQEVTGVTVNDKTNVSRKYIRKIRAMLYNWTNLGYEKAQDRFLSSYKPPANVVKNKKSDPQLSNVVGGKIDYLKMVRGADDSIYRQCKEAFEQLLKGELIFQISEKILRTQTVEHQPRQVVSFLRNFKVINQTGFRELLHDPDVSDFDFKTNLAKVNEQMPALSAVLPASLYTKLESFVAVYNTDGQAYHEKYGLLPLKGQKKTNPNNLIDILSRKKKNKVVEDMVLTTRVQAEDILPDNKVTQAAKDFRTQIRIGNDYFHDWILINSLKPIVNELNSRELVSISYEPSEEEFSLNCEFFTDTKEVWKAIRSLLKDLAENPYYDVKDERIILLRSATIKRNLNGESFFATIIYLNLQNAFIVNELKAFQQSRLTKNQQRLHKLADWSTVYQDESGQLSEHLFLASPETRSDNQLTEGITHKLTFYHS

SEQ ID NO: 297 - protein, 665 aa, unidentified
  source 1..665: note = Related to CP002859.1; note = Runella slithyformis
MAPIQSDIVTLQNSLQKAEDFHDFLSVLNDALEFPFSQKKLYFHLKNVDKLYHSFQVPKKSGGLRTINAPNKSLKFIQHCLAFILQGAYQPTYSVNGYVTGRSVVSNAHVHANKKFVLNLDLENFFPSITFGRVHAVLQLKPILAKPNVAQMIAKLCCYEGVLPQGAPTSPVLSNMICQRLDRRIESLVSGYQITYTRYADDLTFSSDKPFENGFLSRLDEIIKAEGFTINLEKVRLQLKNSRQEVTGLTVNEKVNVTQRFIREIRAMLHNWGTLGYDSAQAKFLTHYSPKVSKKKKSEPQLRNVVAGKINYLKMVRGNEDTVYQQFKAELTRLEKGEEIPQKKPKLPVWQPSIDHNPRRVVQFLRNFRVVNDTGFRELLHDPDVSDFDFMANLAKVNTQMDGLKSVLTPKLHQKLSVFVNAYNTAGVTYFQEHGLLPLKGRPKQTVSLLARLLLKKAKMPVLEQQTTEQVAVAPDRAVSKAAKVFREQIRVGSDYFQDLILVNALKPIVETLNASDSVNVSFQPGENEFGINCSFFTDTWESVKTLRSVLKDLAQNTDYQTPTNQRNIWLRSAVIQREAEKEAFFATVIYIHLEGGKIESENAFKHIRLLKTQQRLCSLADWSVLYQDANSQTQEFFFLNSDANRSHQAPNYEGITHKLTFYHS

SEQ ID NO: 298 - protein, 498 aa, unidentified
  source 1..498: note = Related to NZ_WBWZ01000001.1; note = Brucella anthropi
MSEAEMKKIWWFRNRMYNQFVVTSKHGKARRINAPDLRLKMLQRSIAKLLDQLYAPRNPVHGFVNDRSVITNASSHLRSKFIVNLDIENFFPSISENRVEGLLRAIGIDDNVSSIIARICTRQGVLPQGAPTSPVLSNMICFRLDRELLALSKASRCIYTRYADDITFSSYQKPELLFGAGVPPTGRFSPELLATNLSAAFTDNGFTLNADKSQYGDKHSRRIVTGLKINSGLNVDRRFVRNIRAALYSVEARGLAAAQKKFKDRHNGTTDLELHLKGKISWLGSVKGQFDPVFRAIASRFNAAFPAHMIKINPSPEDIRSRAVWVLEHFHGDFAQGTAFFLKGVGLVTAAHCVSDALGEEIDVHHHSKPSNTFKVKVKQHHVIRDLAILEHTIPSNEYYELELTKQALNIGDSVRAIGYPGYAPGDGLNIRPGQISSFSVKSTVPLVEVTQKLTQGMSGGPIIDDQNGVIGIIHKGGPHEGRDFAVNVEALVAWLDE

SEQ ID NO: 299 - protein, 530 aa, unidentified
  source 1..530: note = Related to NZ_LT599047.1; note = Brucella sp.
MPKPFIMFGSLNLRTSIPPELADYSTFLGYLCLSQAELKKIWWFRKKMYKDFKITSKYGKTRRINAPDRRLKMLQRNISPLLDKLYSPRNPVHGFIHERSVMTNASSHLSNKFVVKLDIENFFPSISENRVAGLLHALGVDESVSAIIARLCTNRGVLPQGAPTSPVLSNMICFRLDKELLKLAKTARCIYTRYADDVTFSSYQKPELLFEVGAPQPGRFSPELLASNISAAFTNNGFKLNANKSQYADKNSRRVVTGLKINSGLNVDRRFVRNIRSALYSVETLGLSAAQKKFADQYGGKCDLTQHLKGKISWLGSVKGHSDPVFRATVLRFNSSFPSQPIKMNPSSDEIRNRGVWVLEHFHGDFAQGTAFFMKGVGLVTAAHCVADAIGEEIDVHHHTKPSNSFKVKVKRHHFIKDLAILEHAIPSNEYYELELTDQDLQVGDTVTAVGYPAFAPGDGLNVRSGQISSFSVKSTVPLVEVTQKLTQGMSGGPILDEKNRVIGIIHKGGPNEGRDFAVHVKALMEWLQE

SEQ ID NO: 300 - protein, 458 aa, unidentified
  source 1..458: note = Related to NZ_JACIEE010000022.1; note = Rhizobium azooxidifex
MLQRALVPLLGEIYSPRKPVHGFVRDRSVITNAASHLKSKFVINLDIERFFPSISENRVIGLLKALGVDEDVSSIIARLCSNQGTLPQGAPTSPVLSNMICFRLDKEMQVIAKAAHCIYTRYADDITFSSYQPLSALFAAGVPSTGNFAPDLLAPQLLAAFINNGFKVHPDKTHYGDRHSRRIVTGLKVNSGLNVDRRFVRNVRSTLFSIETTGLAAAQKKFDDHYGGRRDIARFLRGRISWIGNVKGQSDPVYRSIATRFNASFPMQPIMVLPTRTEIRRRAVWILEHAHGEWAQGSAFFLKDVGLVTAAHCVQDAIGKEIDVYHPTKPANIFKVKVKKHHKIRDLALLEHSIPSNEFYELEMTNTTYVIGDVLTAAGYPGFAPGDGLNERLGHISSFSVKSGVPLIEVTQKLTQGMSGGPVFDDNDLVAGVIHKGGPDEGRDFAVHIDALTAWLDE

SEQ ID NO: 301 - protein, 531 aa, unidentified
  source 1..531: note = Related to NZ_CP083370.1; note = Ensifer sp.
MPHPLRVFGGVSFRVRIPSEMTDLTTFLDHLCLSEAELRKIWWFRGRMYKDFPLLSKSGKPRIISAPDRRLKMLQRTIAPLLDQIYSPRNPVHGFVPDRSVRTNATSHLKSKFVVNLDVERFFPSISENRVAGLLKAVGIDESVAVVVARLCTNQGVLPQGAPTSPVLSNMVCFKLDKELQAIAKAAHCIYTRYADDVTFSSYQPPGGLFAEGVPPTGNFVPDLLSPRLIGAFTNNGFKLNPSKSHYGDKHSRRIVTGLKINSGLNVDRRFVRNIRSTLYSIETLGADTAQKKFEVEYGGKCRLSQHLKGEISWLGSVKGQSDPIFRAIAARFNSSFPTQPIKVSPTRAQIRSRAVWVIEHFEGKFAQGSAFFLKDVGLVTAAHCIEEALGQEIDVYHPSKPSNVFKARVKQHHTVRDLAILDHEIPAHEFFELEMATRAPSLGDALTAVGYPGYGPGDSLNVRSGHISSFAVKSAVPLIEVTQKLTQGMSGGPVLDDEDRVAGVIHKGGPEEGRDFAVHIDALTAWLDGR

SEQ ID NO: 302 - protein, 540 aa, unidentified
  source 1..540: note = Related to MEDN01000012.1; note = Agrobacterium sp.
MPTPRSMFGGNLTRSRVPLELTSIDELLRHLCVSEAELQKIWWYRSRMYSEFNISKKAGKSRLISAPDRRLKMIQRALAQLLDGMYQRRNAVHGFVADRSVMTNARSHMRSKFVLNLDIENFFPTISENRVVGVLKALGVIEDVARIVARLCCNNGVLPQGAPTSPVLSNMICFRLDKDLHGVAKASHCIYTRYADDITLSSYQPPVALFAGGVPPTGNFSTELLAPVLVEAFAHNGFKLNAHKAHYGDRNSRRIVTGLKINEGLNVDRRFIRNVRSALYSIETLGIETAQAKFKSEYGGKCGVANHLRGKISWIKSVKGQSDPVFRGIAARFNKLFPAEPIKVQPTRTEMRDRAVWVLEHTHGDWAQGSAFFLEGVGLVTAAHCIQDAVGQEIDLYHPSRPSNIFKVKVRAHHAVRDLALLDHSIPSTEYFELQLSARTHAVGDYLIAVGYPGFAAGDNINVRSGQISSFSVKSTVPLIEVTQKLTQGMSGGPVLDIDGRVAGVIHKGGPDEGRDFAVNTDALMAWLSELVTAVGAPVS

SEQ ID NO: 303 - protein, 485 aa, unidentified
  source 1..485: note = Related to SGOC01000001.1; note = Agrobacterium rhizogenes
MYSDFEIAKPSGKSRVINAPDDRLKMLQRYIANLLDQIYKPRNPVHGFVLDRSVRTNASSHLRSKFVVNLDIENFFGSISENRVIGLLKALGVDEGAAEIVARICCNKGHLPQGAPSSPVLSNMICFRLDKDLQQIAKKVYCIYTRYADDITFSSYQPLSSLFEAAVPPAGNFDFDMLVPELKQSFLNNGFKVNASKVHYADRNSRRIVTGLKINEGLNVDRRFIRDIRSALFSVEKDGLVVAQQKYAEKYGGTCSIDLYLKGKISWIGSVKGRSDPVFRGLASRFNLSFSFNRVKLLATQAEIRERAVWVLEHWEGNCAQGSAFFLEDVGLVTAWHCVAEAANKGEIDVYHPTKRSNIFKVKVASHCAVRDLAILEHSIPDNEFYELQASTHVVGIGDSVTAIGYPSYGPGDGINVRSGQVSALPVKSAVQLVEVTQKLSQGMSGGPVLDDEDKVAGVIHKGGPHEARDFAVSIKALIDLAAGK

SEQ ID NO: 304 - protein, 488 aa, unidentified
  source 1..488: note = Related to WIEG01000017.1; note = Rhizobium leguminosarum
MYNDFEVAKPSGKKRVINAPDERLKMLQRYIAELLDHIYRPRDPVHGFVFDRSVRTNASSHLRSKFSLNLDIENFFGSISENRIIGLLKALGIEDDAAEIVARICCNKGQLPQGAPSSPVLSNMICFRLDKELQRIAKKTHCIYTRYADDITFSSYQPLSGLFDGVPPPAGNFDVELLTAELKQSFANNGFKVNAAKVHYADRNSRRIVTGLKINEGLNLDRRFIRDVRSALYSVEKDGLAAAQKKFEDAYGGKCPIDFYLKGKIAWIGSVKGRSDPVFRGLASRFNASFLKNRIKLQATPSEIRERAVWVLEYWEDNGDGAQGTAFFLKDVGLVTAWHCVAKAETVGLDIDVYHPTKRSNVFKVKVVKHCAVRDLAILEHSIPDNEFYELEPSTRNSVIGDGVTAIGYPSFGPGDGINIRSGQISALTMKSAVPYIEVTQKLAQGMSGGPVTDIDHKVVGVIHKGGPQEARDFAVDVKALMNLAVGK

SEQ ID NO: 305 - protein, 512 aa, unidentified
  source 1..512: note = Related to SIJW01000001.1; note = Rhizobium leguminosarum
MTSEAALLDYLGVTSAELKKIWWFRGRMYQTFEIAKAVGKSRIISAPDRRLKMLQRNIATLLDAIYKPRHPVHGFVPDRSVLTNASSHLRSKFVVNLDIEGFFSAISENRVAGLLKALGVQSRAADIVARICCNRGCLPQGAPSSPVISNMICFGMDKELQRFAKTAHCIYTRYADDISFSSYQPLTALFDGAVPSSGNFDHDTLAPRLRAAFVNNGFTINKAKAHYADKHSRRIVTGLKINEGLNVDRRFIRDVRSTLYSIDSLGLADAQKKFEDKYGGTCDLSSFLKGKISWIGSVKGRSDPVFRSLAGHFNVKFPTRAFKLQPTRDEVRKRAVWVIEHFEGEFAQGSAFFLKGVGLVTASHCVAEAAAAGAEIDVYHPTKPSNIFKATVKQHCEIRDLAILDHNIPENEFYELEVSGEKFAVGDPLTALGYPKFAPGDGMNIRSGNISAFSVKSSVPLIEVTQMLTQGMSGGPVIDRHDKLAGIIHKGGPEEGRDFAVHVKALMDWLTS

SEQ ID NO: 306 - protein, 498 aa, unidentified
  source 1..498: note = Related to JAIUOD010000004.1; note = Proteobacteria bacterium
MSKSELKKIWFYRERMYHNFNVSGAKETKRLISAPDHRLKMLQRKIAASLDTLYCPRKSVHGFVRHRSVKTNAASHLSAKYLLNLDLSDFFGSISENRVNGLFVSLGIDKEVALILARLSCYKNHLPQGAPTSPVISNMICFRLDKELLSIAKQNRCIYTRYADDITFSSYKPLTVLFDGVTPNTGKCDIKLLGGRLLTTFQNNGLIINPEKMYYADKSARQTVTGLRVNELVNVDRKYVRNVRSALHVVEKSGVLEAQRVLKDKYLRNSTIEAHLQGKIAWLGHVKGRSDPVFRKLAAKYNNLFPKKAIKLEPTKEEVRNRAVWIVEYSDHENYSQGSAFFLKGVGLVTAWHCVNGHESYDLYHPSKPSNKFTVTVSRSCKSRDLALLNHNIPFTEFYELSLPDRTFHVGESLYAAGYPGFGPGDKLNVRLGAISSFPIKFGIQMVEVTQKLPSGMSGGPLVDSANRVAGIIHKGGEDEPRDFAVHIDVLKAWVSLP

SEQ ID NO: 307 - protein, 496 aa, unidentified
  source 1..496: note = Related to WBWG01000001.1; note = Brucella intermedia
MSPDELNKIRWFRGRMYRKFDISKGKSKKRTINSPNYRLKMLQKKISIQLAKIYKPRNSVHGFVSHRSVKTNAQSHIKQKYILNIDIKDFFPSITESRVRGLLEAIGLDENVSAAITWICCNDGCLPQGAPSSPLISNMICFRLDKNLQAFAKRTRCIYTRYADDITFSSHQPLSLLFAESVPRAGHFPVIQLSEGLRNLFTSNGFTLNDNKAHYADKHSRRTVTGIRVNEVLNIDRKFIRNVRAALYKIETIGLKDAQKELMSRFSSNASIEDYLRGKIAWLGHIKGVSDPIFRGLAARFNRSFAKSAIKIQPTQAEMRDRAVWVIEHFDGEMCQGSAFFLESVGLVTAAHCVEGSTEIELYHPSKPSNKFSGKIKSICSHRDLAIIEHNIPSVEYFELRRSLKDAQIGEELIAAGYPGFGPGDKLNIRPGTVSSRPVKSAVNYIEVTQKLAQGMSGGPLLDTDNNVSGVIHKGGALENRDFAVHIGELYLWLGI

SEQ ID NO: 308 - protein, 532 aa, unidentified
  source 1..532: note = Related to VKHP01000048.1; note = Bradyrhizobium sp.
MPSFASFFVTPVRVSVPNELTSEAELLKFLALSTAELKKIWWFRGRMYQKFEISKGEGKKRVISAPDHRLKMLQTKIASSLTPICRPRNPVHGFVDGRSVKTNATAHRRSKFVMNLDIEGFFSAITEGRVSGLMSALGIDSRVAEILARICCNEGVLPQGAPSSPIISNMICFRMDKELQTIAKESRCIYTRYADDITFSSYQPLTLLFEGPTPPAGKFSPELLKDRLRGAFRSNGFAINPQKVHYADKYSRRTVTGLKINELVNVDRKFVRNIRAALFVTEKQGATSAQKILKDKYGREAALASHLRGRISWVGHIKGPSDPIFRGLALRYNKLFPSEKLEILPTIFEIRERAVWVVEHWGDTTTEGSVQGTAFFLKSVGLVTASHCVEGATEIEIYHPSKPSNKFKVTVAKNDTHRDLAVLTHEIPATEYYEFDISKRTLKVGDITTALGFPSFGAGDKINVRSGPITSLPTKSAVPMIEVTQKLSQGMSGGPLLDEDGAVAGINHKGGPGEARDFAVHVKALTDWLSGA

SEQ ID NO: 309 - protein, 531 aa, unidentified
  source 1..531: note = Related to NZ_LUFV01000044.1; note = Ensifer sp.
MTNPFAFLDIAYRIDLPDELKDEERLLLHLGVSQAELKKIWWYRSRMYHHFDVAKGKRKKRIISAPDPRLKMLQRTIAASLNVVYKPRRPVHGFVIDRSVKSNALSHLNSKFVLNLDLKDFFPSITENRVSGLLNALGIDARVSEIIARICCDKSQLPQGAPSSPVISNMICFKLDKELQVIAKAARCIYTRYADDITFSSYQPLTLLFEGVAPPAGNISPELLSKQLREAFQNNGFTINSEKAHYADRHSRRTVTGLKVNEILNVDRKYVRNVRAALYTVEKAGVEAAQKRLEEKYNKRSSIASHLRGRIAWIGNIKGWNDPTFRSIALRFNNCFPKDQLKIEPDREEIINRSVWLVEHSLGSVKKMAQGTAFFLKGVGLVTAAHCVQNGKGIVVYHPSKPSNKFPVNVANSCKYRDLAILSHSISDQEFYELNASERSFKAKDNLTAYGYPGFGPGDKLNVRPGYVNSLPVKSSIQLIEVSQKLAQGMSGGPILDDDGHVAGVIHKGGPEEARDFGVHIEVLMKWLKEL

SEQ ID NO: 310 - protein, 537 aa, unidentified
  source 1..537: note = Related to NZ_FOWZ01000002.1; note = Qipengyuania nanhaisediminis
MTNGWLGFGIPTSIHLPIPPELSSKTALLSYLGVSPAEMKKIWYHREKMYHCFDVAKKSGKPRLINAPDRRLKFLQRRIANLLDQLYRVRNPVHGYVQGKSVKSNATSHLKQRFILNLDIRDFFGSISERRVFGVLHAIGVPRDAAETVARICCYSGHLPQGGPASPVLSNMVCFRLDRALLKLAKDSKCIYTRYADDISLSSLRPLTALFDGTLPTTGRVDPELLSAALQAAFTSNGFALNPEKIHYADRHSRRVVTGLKVNEGLNVDRRFVRNIRAALYEVEKDAVAAQARYAADFGGKADISSHLKGKIAWLGNVKGLADPVYRALALRFNTAFPKRAIKVQPTRHERLDRSVWVIEHHLNDIEKYAQGSVFFLAGVGLVTAAHCVAGVKDAIVHHPSRPSNKFKVSVAHYSKHRDLAILTHSIPATDFYELSKSAAAAVTGDPIVAIGYPDFSPADKVNFREGTVSSTTVKSLINLLEVNFKFIQGMSGGPVINSNDEVVGIVHKGGPKEKRDFAIVIEEFDSWNAAGLPSDY

SEQ ID NO: 311 - protein, 395 aa, unidentified
  source 1..395: note = Related to SLXW01000017.1; note = Sphingomonas sp.
MPNGWQRFGIPAPVHVPIPPELVSKAALLVHLSVSPAELKKIWYHREKMYENFDVAKKSGKPRPINAPDRRLKFLQRQIAELLDTLYPVRKPVHGYVSGKSVKSNATSHLKQRFILNLDIKDFFGSITERRVSGILNAIGVPSDVAETVARICCYGGHLPQGGPASPVLSNMVCFRLDRALLKLAKDAKCIYTRYADDISLSSLRPLAPLFDGALPPTGQVAPELLSDALQAVFANNGFTLNPDKIHYADKHSRRVVTGLKVNEGLNVDRRFVRNVRAALYAVEKDVAAAQTRYAADFGGKADVGTHLKGKIAWLGNVKGLADPVYRALALRFNTAFPKQSIKVQPTRHERLNRSVWVDLLPINHAIGKLARQMETSDAARPIYRGSDHWRAARA

SEQ ID NO: 312 - protein, 535 aa, unidentified
  source 1..535: note = Related to NZ_CP039250.1; note = Sphingopyxis sp.
MPSVWSMFGTAVQIPLPPEFGDEGTLLAYLGLSQAELKKIWYHREKMYKNFNVAKKSGKPRPINSPDRRLKFLQRQIATKLDMIYPRRNPVHGYVKERSVKSNAAAHQNQRFVLNLDIKDFFLTITEGRIVGVLTAIGVPDRVSAIIARICCYGGRLPQGGPASPVLSNMICFRLDRALLKVAKEGRCIYTRYADDISLSGLRPLSPLFENGLPPSGPISPELLSSALQSAFANNGFVLNPEKIHYADKFSRRVVTGVKVNEGLNVDRRFVRNIRAALFEVEKDHLAAQARYLSKFGGSTTISAHLKGKIAWLGFIKGSADPVYRSLALRFNKSFQSQAITVQATREEQIDRSVWVIEHGSVLDDTYRQGSVFFLDGVGLVTAAHCVAGVKEATVHHPSRPSNKFKVQVLHYSKHRDLAILSHAIPPTDFFQFAKSLIPAAAGDAVTAFGYPDFNPADKINIRSGTVSSTTVKSLIPLVEVNFKLSQGMSGGPLINSSDAVVGIIHKGGPEMPRDFAIVISELDKWIAAGCPDDF

SEQ ID NO: 313 - protein, 528 aa, unidentified
  source 1..528: note = Related to MIAM01000006.1; note = Sphingopyxis sp.
MPSPAMMFGPPPRVTIPPALETEAALLAHLGLSSAELKRIWWFRHRMYRDFNIAKGAGKLRIITAPQDRLKHLQRRIADLLTPMYRVRHPVHGFVADKSVKTNARSHVKSKFVLNLDIRDFFGAITENRVEGLFRSLGIDRRVAEILARLCCNQNRLPQGAPSSPVISNMVCFRLDKELLAVAKATRCIYTRYADDISFSSYRPLSGLFEAALPPTGNVSPDLLSTDLRSAFETNGFAINPEKAHYADRHSRRIITGVRINEGLNLDRRFIRNLRSGLYSIEKLGETAAEAKYHAKHGGTASLESHLRGKLSWLSDIKGASDPVFRNLAKRFNLLFPKAPIGIEPTPAEVRDRAVWVIEHSGPKGRQGTAFFLKDYGLVTAAHCVSEASEPIIVYHPSRLSNKIPVTVAKTCPHRDLAIIAHAVPPNEYYELEVTEKPPAVEDHVTSVGYPQFGFGDRLNVRKGTVSSLPVKHAVQQIDVGIRITEGMSGGPLLAEDGKVIGINHKGGIDEDRDLAIHIQQLVKFASE

SEQ ID NO: 314 - protein, 434 aa, unidentified
  source 1..434: note = Related to NZ_LHZT01000034.1; note = Acetobacter tropicalis
MHIVIARIICLTWRDWKGDPVPRSASIFGRAIRVKLPPELLTEVNLLTHLGMSRGELNVINWYARRMYHSFDIKKKSGKPRVINAPERRLKLLQRKIADLLMPLYRRRNPVHGFVADRSVKTNAQSHLNSKFVVNLDLKDFFPSISQKRIVGVLRSLGIDRGVADAISTICCLNGCLPQGAPSSPVLSNMICFRLDKELLEFAKQAKCIYTRYADDLSFSSYQPLGSLFQTSPPSPGHFSPDLLGEKLRHIFTANGFILNPDKAHYADRHSRRTVTGIRINELLNVDRRFVRNLRAALYSVEAQGIATAEAKFHASYNGKSDIGKHLQGKIAWLGYIKGASDPVFRGIASRFNKAFPSLKLEIQPTPQEIRERAVWLIEHWERTGDQGTAFFLEGVGLVTAEHCVSPSGIVELYHPSKPSTRKSHRRVVHRVRL

SEQ ID NO: 315 - protein, 513 aa, unidentified
  source 1..513: note = Related to NZ_JH992904.1; note = Sphingobium yanoikuyae
MKLPPELMSEASLLAHLGVGRAELNVISWYAGRMYHKFDIKKKSGKARVINAPDRRLKMLQRKIADLLTPLYRRRNPVHGFVIGRSVKTNAQSHLGSKFIVNLDLKDFFPSISYGRVTGVLRSLGMKREVAEAIATICCLNGTLPQGAPSSPILSNMVCFRLDRRLRELAKDARCIYTRYADDLSFSSYQPLMGLFETTPPASGHFSPDLLSEKLKQIFSGNGFVLNPDKAHYADKHSRRTVTGIRINEALNVDRRFVRNLRAALYSVETLGLAAAQAKFKSLHGGKADVGQHLQGKVSWLGYIKGASDPVFRSVASRFNAAFPPLALDILPSPQEIRERSVWLIEHWETGGDQGTAFFMKGVGLVTAEHCISPSGIVELYHPTKPSNKFAASVKHRCPDRDLAVLDHAIPNNEFYELETAGKAAATGDATTAIGYPGYGPGDRLNIRPGAVTSLPTKSAVKMVEVQQMLTPGMSGGPLLDVDDRVVGVVHKGGHDHGRQLAIAISELHAWLP

SEQ ID NO: 316 - protein, 526 aa, unidentified
  source 1..526: note = Related to JAAVJH010000001.1; note = Sphingomonas corticis
MPRPARAFGPPIRVKLPVEVASEGAILAHLAVSPAEAKKIRYYRARMYRTFSIQKKSGKARIITAPDRRLKMLQRRICDLLTPVYRRRNPVHGFVADRSVRTNAEAHLGSKYVVNIDLKDFFPSISERRVTGVLMSLGIGRDVAEILSSICCVNGCLPQGAPSSPLLSNMICFRLDKELMAFAKRTRCIYTRYADDITFSSYQPLAGLFEAVPPSPGRFAPDLLSAEVAAIFAANGFVINPEKAHYADRHSRRTVTGLRVNEAINVDRRFVRNLRAALFSVEKLGAAAAQAKFHATHGGRVALGNHLQGKLSWLGYVKGQSDPVFRSMASRFNRSFPDRALTIQPTRDEIRDRAVWLVEHWENGGDQGTAFFLRGVGLVTASHCVSPSGAVEVYHPSKPSNKFTANVKHRCEHRDLAVLDHAIAATEFFELEAAATAVVTGDATVAVGYPGFGPGDKLNVRTGNVTSLPIKSGVQMVEVQQMLTQGMSGGPLTDPDDGVIGIIHKGGPEHGRQLSVAIEVLRDWLA

SEQ ID NO: 317 - protein, 500 aa, unidentified
  source 1..500: note = Related to NZ_JACYUG010000002.1; note = Sphingomonas sp.
MKHLGLGAAEAKKIRYYRSKMYRTFDIRKKSGKARVINAPDRRLKILQRKICDLITPLYRRRNPVHGFVADRSVKTNAQSHLGGKFIVNLDLKDFFPSISERRIVGVLMALGLKRDVAERLSSICCVDNGLPQGAPSSPILSNMICFRMDKQLMAFAKSARCIYTRYADDITFSSYRPLTGLFESVPPPSGSFPPELLSSELLGIFGSNGFTIHPDKAHYADRNSRRTVTGLRVNENLNVDRRFVRNLRAALYSVEKLGEKPAETKFHADHGGRAPIGRHLQGKLAWLGHIKGPADPVFRSIASRFNAAFPSLALKILPTQLEIRERTVWLIEHWEGTGAQGTAFFLTGVGLVTADHCVSPSGAVEMYHPSKPSNRFAAMAKHRSSDRDLAVLDHAIPPNEFYELDASNVGSVTGDATVAIGYPGFGPGDKVNVRSGNVTSLPTKSGIQKIEVQQTLTPGMSGGPLLNSIGQVIGVIHKGGAEEERQLAIDISVLQKWVP

SEQ ID NO: 318 - protein, 526 aa, unidentified
  source 1..526: note = Related to NZ_NSBT01000026.1; note = Actibacterium ureilyticum
MPSAFYLFGGTSRTIIPAELSTKSELLKHLGVSPAELKKIWWFRGRMYSHFNISKRSGKVRLISAPDYRLKMLQQKIARSLSGLYNPRNPVHGFVPDRSVRSNAEAHLRRRFILNVDIKNFFPAITEARVQGLLESIGVDTDVAETITRICTNNGCLPQGAPSSPVISNMICFRLDKSLMNFSKEHRLLYTRYADDITLSSFQPPTALFEGDRPDSGRLPPEKLSGELLSILGNNGFELNPEKIHYADKNSRRMVTGIKINEGLNVDRRYVRKIRSALFKVESASVAAAEAELKTRFGKSCKIQAHLQGKISWVGFVKGQSDPVFRGLAERYNACFPASPIKVHPTQAELLDRSVWVLETEKNTGTAFFLRGVGLVTAAHCVNGASSIEVFHPGKPANTFMVGVQHICTHRDLALLSHSIPSTDYFELEEFGGFPATGANTIAAGFPSYGPGDRLNIRPGTISSLTIKHAVNLIEVTQKLSQGMSGGPLMTQDHAVMGVIHKGGPDEPRDFAVTLSEMKSWIATLP

SEQ ID NO: 319 - protein, 547 aa, unidentified
  source 1..547: note = Related to QFVT01000013.1; note = Litorivita pollutaquae
MCTWGDWRGNLVPSPFNLFGGASRTKIPPELTSKDELLKHLGVSPAELKKIWWFRGRMYSHFNISKRSGKTRLISAPDYRLKMLQQKIARSLAKLYNPRKPVHGFVPDRSVRSNAESHLRRRFILNVDLKNFFPTITEPRVQGLLESIGINKDVAETVARICANNDCLPQGAPSSPVISNMICFRLDKALMKFSKEHRLLYTRYADDITLSSFQPPTALFEGDRPDPGKVAEEKLSDELRSIIRNNGFELNPEKIHYADKNSRRIVTGIKINEGMNVDRRYVRNVRTALFKVEKHGPAAAQAELEARFGKTCKIQAHLQGKISWVGFVKGQSDPVFRGLAKRYNACFPACPIKVHPTQAEIVDRAIWVVETEDDTGTAFFLKGVGLVTAAHCVNSASEIEVFHPLKTANRFKVTIKHICAHRDLAILEHSISSTEYFELESFTGSPVVGTNTLAAGFPTYGPGDQLNIRQGSISSLTTKSAVPLIEVSQMLGQGMSGGPLMNKNNEILGIIHKGGPVAYVAKDGSVSPQRQLAVAISELKAWVSALP

SEQ ID NO: 320 - protein, 367 aa, unidentified
  source 1..367: note = Related to CH959310.1; note = Sulfitobacter sp.
MICFRLDKTLINFSKEHRLLYTRYADDITLSSFQPPTALFEGDRPDPGRLALEKLSDDLRMIFKNNGFELNPEKVHYADKNSRRMVTGIKINEGLNVDRRYVRNVRSALFRVETTGLAAAQAELKTRFGKSCKVQAHLQGKISWIGFVKGQSDPVFRGLAKRYNASFPASPIKVHPTKDEIFDRAVWVVETDDDTGTAFFLDGVGLVTAAHCVNGASEIEVFHPLRTSNKFKVTIKHICAHRDLAILEHLIPSTEFFGLEAFEGSVTVGTNTLAAGFPTYGPGDRLNVRQGSISSLTTKSAVPLIEVSQMLGQGMSGGPLMDEDHAVFGIIHKGGPVAYVTKDGSVSPQRQLAVAISELKAWVATFP

SEQ ID NO: 321 - protein, 533 aa, unidentified
  source 1..533: note = Related to NZ_JAKFZM010000082.1; note = Leisingera sp.
MFYLFGGTSRAKIPGELSSRSELLKYLGVSPEELKKIWWFRGRMYSHFDISKRSGKSRTISAPDYRLKMLQQKLARSLSGLYSPRNPVHGFVPDRSVRTNAETHLRRRFILNIDIQNFFPSITEARVQGLLTSIGVDTNVAEIVARICSNNGCLPQGAPSSPVLSNMICFRLDKSLMRFSKEHRLLYTRYADDITLSSFQPPTSLFEGERPAPGRLSPEKLHAELRMIFQNNGFELNPEKIHFADRNSRRIVTGIKVNEGLNVDRRYVRNVRSALFKVERSGLAAAQTELKSRFGKSCKIQSHLQGKISWVGFVKGQSDPVFRGMAKRYNACFPANPIKVHPTRAEIVDRAIWVVETEFDNGTAFFLDGVGLVTAAHCVDGASKIDIFHPLRTSNRFKVTIKNICTHRDLAILEHSVASTEYFELGSFTGSPTIGANTRAAGFPTYGPGDQLNVRQGSISSLTTKSAVPLIEVSQMLGQGMSGGPLMTEDDSVLGIIHKGGPVAYVAKDGSVSPQRQLAVAISELSAWVATLP

SEQ ID NO: 322 - protein, 546 aa, unidentified
  source 1..546: note = Related to JACZKS010000020.1; note = Rhodospirillales bacterium
MPEDVRQSWRDWKEGLVSYRGALFGKPIRITIPAELADEAALLAYLGLGAAELKKIWHFRGRMYQHFSIAKGPNKVRLISAPDQRLKFLQRRLADKFTELYRPRHPVHGFVVGRSVKTNALAHLHRRFVVNIDLKDFFPTIAQNRVEGMLFSLGIDARVAEIIARICCNRGHLPQGAPSSPVLSNMICFRLDKQLLDVAKETRCIYTRYADDITFSGHRPPTALFDAALPPAGRFSPDLLAPKLLDIFQQNGFSINPDKAHYADRHSRRTVTGLKVNQLLNVDRRYVRNIRAALHSIATLGLKEAEKKFHEKHGGNSGLAAHLRGKISFLSHIKGQSDSVVRSLTLRFNKCFPAQPIKVMPTSTEIRDRAVWVVEHNLDRDHGKQGTAFFLKGVGLVTAAHCVEGVSEIEVFHPSKHANAFKATVRKRDEHRDLAILDHSIPATEYFELDPVSHAIVTGDSMTAVGYPAWAPGDPLNIRPGFVSTLTVRSAVQYIEVTQKLTPGMSGGPLLDANDAVAGIIHKGGPEEGRDFAVHIEVLEAWLKEG

SEQ ID NO: 323 - protein, 527 aa, unidentified
  source 1..527: note = Related to JADGCC010000015.1; note = Alphaproteobacteria bacterium
MTYWGALFGKPIRITIPPEFANEAALLAYLGLGPNELKKIWYFRARMYRHFSIAKAQNKVRLISAPDERLKFLQHKIAEKLTDLYRPRKQVHGFVAGKSVKTNALAHLGRRFVVNIDLKDFFPTITQKRVAGLLLSLGLDNQVTTLIAHICCNDGNLPQGAPSSPVISNMICFRLDKKLLGIAKEARCVYTRYADDITFSSHQPPTALFEVALPPAGRFSPDLFTPKLLEVFQQNGVAINPNKTHYADRNSRRIVTGLKINELVNVDRRFVRNIRAALHAVEAQGIVEAQKTFQEKYGGSSLVAHLQGKISFLSHIRGQSDPVVRSVTLRFNKCFPKHLIKVTPTPSEIRDRSAWVIEDKNGDVVQGTAFFLKDIGLVTAAHCVEPNTEFQIYHPSKPANKFAVRVKKKCTHRDLALLEHEIPATEFFELARSLNAASQGDQLTAVGYPCFGPGDGVNTRLGTVSSLPVKRDVKLIEVTQTLTQGMSGGPLLDANNGVVGVIHKGGPEEGRNFAIAIEVLSEWIESS

SEQ ID NO: 324 - protein, 525 aa, unidentified
  source 1..525: note = Related to WHTM01000007.1; note = Hyphomicrobiales bacterium
MPRWGALFGQPARVAIPAELADEAALLAYLGLGAGELKKIWYYRGRMYQHFSIAKGPNKVRTISAPDGRLKFLQRKLADKLTELYRPRNPVHGFVAERSVKTNALAHMHRRFVVNIDLKDFFPTISQNRIEGMLASLGIDARVAEILARICCNNGHLPQGAPSSPVLSNMICFRLDKKLMGIAKEARCIYTRYADDITLSSHQPPTALFEATIPQAGRFSPDLLAPELRNAVHQNGFAINPNKAHYADRHSRRTVTGLKINELLNVDRRYVRNIRAALHSIETLGIKDAEKKFHEKHSGRASLAAHLHGKISFLTHIKGHSDPVVRSVTLRFNKCFPTRTIMVAPTPSEMRDRAVWVVEHSENHGTAFFLKGVGLVTAAHCVEGVDEVEIFHPSKHANKFKATVRKSDEHRDLAILDHQIPATEYFELDSISRTIAISDPMTALGYPSWGPGDRLNIRPGVVSTVTVKSAVQLIEVTQKLTQGMSGGPLLDGNGAVAGIIHKGGPNEGRDFAVHIEMLQDWLREG

SEQ ID NO: 325 - protein, 426 aa, unidentified
  source 1..426: note = Related to JAIEST010000134.1; note = Beijerinckiaceae bacterium
MGAIFGQPIRIIVPAELANEAALLAYLGVSADELRKIWYYRKRMYRHFSISKKPNKNRLISAPNDRLKFLQRALAVKLNELYSRRNPVHGFVPDRSIRTNALAHLRRRFIVNLDLKDFFPTIGQKRIEGVLVSLNIDARVAEIISCICCVNGHLPQGAPTSPVLSNMICFRLDKKLMDFAKEARCIYTRYADDITFSSHQPPTALFETTIPAAGRVAPDRLAPRLRDLFQQNGFVINPTKVHYADSHSRRIVTGIKVNEMLNVDRRFVRNIRAALHSIETLGIEAAEEKFHDKHGGRSNLVAHLRGKISFLNYIKGQSDPVVRSIALRFNSRFPAIPIKTAPTPSEIRDRAIWIVEQSKSQGTAFFLNGVGLVTAAHCVEGFAEVDVFHPSKLANKFKARVGKLDRHRDLAILDHGIPATEYFELQ

SEQ ID NO: 326 - protein, 426 aa, unidentified
  source 1..426: note = Related to NZ_NRRL01000154.1; note = Rhodovibrio sodomensis
MFGKTVHISIPPELADEASLLTYLGLGADELKKIRYYRASMYHNFPIGTDGRKRRIINAPDARLKFLQRRISDKLADIYRRRNPVHGFVAERSVKTNALAHMRRKYVVNIDLANFFPTISQNRVEGMLLSLNLDASVAQIIGIICCNKGILPQGAPSSPLLSNMICFKLDKGLMNFSKEARCIYTRYADDLTFSSFHPPAALFETAPPPAGRLSSEQLASQLRRLIIQNGFSINERKLHYADRDSRRLVTGLKINQILNVDRRYVRNIRAALFSVERNGIKGAEKTYHKEHGGRGSLAEHLRGKISFLSHIKGQHDPVVRGLAIRFNQCFPHWPITVTPTKNEVRDRAVWVVENETSSQGTAFFLRGVGLVTAAHCVEGVNEVDIFHPSKPSNKFKAKIFKREPHLDLAVLSHAIPENEYFELSKS

SEQ ID NO: 327 - protein, 527 aa, unidentified
  source 1..527: note = Related to NZ_LMUJ01000012.1; note = Acidisphaera sp.
MPLFGAFFGAPVRVTIPEALADETSLLTYLNLSGPELKKIWFYRARMYRHFSIAKSSTKVRLISAPDQRLKFLQRQLADKLDELYRPRNPVHGFVADRSVKTNALSHLHRRFLLNIDLAEFFPTITENRVQGLLISLGIDSRVADIIARICCNDGQLPQGAPSSPVLSNMICFRLDKQLMTIAKDTRCIYTRYADDITFSSYQPPVGLFEATLPPSGRFLPDLLTPALRGVIQQNGFVINPEKAHYADRHSRRIVTGLKVNELLNVDRRYVRNIRATLYSVEKLGAKEAEQKFHDSHGGRSSLAAHLQGKIAFLTHIKGRWDPVVRGITLRFNKCFPERALKVRPTPQEIRGRSVWVVENDPAQQQGSAFFLKDVGLVTAAHCVENTDEVEVYHPTKPANKFVARVSKKCEHRDLALLEHSISSTEFLELIRSERAVSQGDPLTAVGYPRFHVGDRLNARPGNVISLVARSGVEMIEVNQTLTQGMSGGPVLNGDDGVVGIIHKGGPGEGRDFAVSIAMLNKWLEEK

SEQ ID NO: 328 - protein, 526 aa, unidentified
  source 1..526: note = Related to SUEQ01000018.1; note = Mesorhizobium sp.
MPSAARIFGKHFPIPIPPQLADEATLLAHLGLSTKELKKIWWYRGRMYHQFSIAKGAGKVRLITAPDRRLKILQSKLAPLLDQLYSVRHPVHGFVPARSVKTNAEAHGRRRFVVNLDLQDFFPTITENRVRGLLTSLNVDARVTEIIARLCCFNNHLPQGAPTSPVISNMICYRLDTELLRIGKGARAIYTRYADDITFSSYQPPALLFEGALPPVGRFSRDLLALPLRGTFQSNGFTINPDKSHYADRNSRRIVTGVKINAGLNVDRRYVRHIRALLHSIETLGLADANAKFVAAGGKGSIAAHLRGKISYIAHLKGRTDPVVRTLALRYNTSFSHQPIKLVPTVEERRDRSVWIVEHSANGGEQGTAFFLKDVGLVTAAHCVEGVSDFIVYHPTKPSNQASVTVLKRCEHRDLAILGHAIHDTEYFELGAASRAIAVDDVVKAYGYPGYGPGDKINVRSGAVSSLPIKSAVQMIEVTQELAQGMSGGPILDAHGEVIGVIHKGGPNEGRQLAIHIGVLQKWAQE

SEQ ID NO: 329 - protein, 526 aa, unidentified
  source 1..526: note = Related to REES01000140.1; note = Rhodospirillales bacterium
MPSVMRIFGNLIPIAIPPELAAEPPLLTHLGLSAKELKKIWWYRGRMYKQFSIAKNSGKVRLITAPDRRLKILQRKLAPLLDQLYLVRNPVHGFVPARSVKTNAEAHGRRRYVVNLDLQDFFATITENRIRGLLISLDIDTRVADIVARLSCVHGHLPQGAPTSPVLSNMICYRLDTELLRVAKGARAIYTRYADDITFSSYQPPAPLFEGALPAVGRFSPEVLAPRVRQTFDTNGFTINPDKAHYADRNSRRIVTGVKINAGLNVDRRYVRHIRALLHSIETMGLADAQAKYTATGGKGSLAAHLRGKISYITHLKGLTDPVVRALALRYNRSLGHRPIKLAPTIEERRERSIWIVENSAKAGKQGTAFFLKDVGLVTAAHCVEGDSDITVYHPTKPTNHAKVTVLKRCKHRDLAILGHTIHETDYFELEPTDHVVVVGDFVIAYGYPGYGPGDKINVRGGSVTSLPMKSAVHIIEVDQELAPGMSGGPILDARGDVIGIVHKGGPDEGRQLAVHLDELQTWVQE

SEQ ID NO: 330 - protein, 507 aa, unidentified
  source 1..507: note = Related to RCVT01000005.1; note = Sphingomonas sp.
MADEASLLRHLGLSPRELKKIWWYRGRMYQQFSIAKGGGKVRLIMAPDRRLKILQSKLAPLLDQLYRVRNPVHGFVQLRSVKTNAEAHGRRRFVINLDLQDFFPTITENRVKGLLKSILIDPRVAEIVARLCCVESHLPQGASTSPVLSNMICFRLDTQLLQIAKSARAIYTRYADDITFSSYQPPAPLFEGALPAVGRFSPDMLAAPLRGAFESNGFIINPVKAHYADRNSRRIVTGVKINGGLNVDRRYVRRIRALLHSIELLGLDDAQQKYGSGGGKGAIADHLRGTISYITHLKGSVDPVVRSLATRYNRSFPARPIMLAPTVEERRDRAVWIVEHSADGGQQGTAFFLKNVGLVTASHCVEGDSDFVVYHPSKPSNRSKVTVLKRCAHRDLALLGHAAHSTDYFDLDVAARSAAVGDDVVAFGYPGFGPGDKINVRGGSVTSLPIKSGVPMIEVSQELAQGMSGGPILDAHGAVVGIVHKGGPEEARQLAIEIGVLLKWLAE

SEQ ID NO: 331 - protein, 524 aa, unidentified
  source 1..524: note = Related to NZ_SSTI01000022.1; note = Sphingomonas olei
MSSAARIFGKRIPIPIPPEFADESTLLAFLGLSPRELKRIWWFRGRMYHQFEIAKGGGKSRLITAPDQRLSILQSKLRPLLNTLYRVRNPVHGFVPARSVKSNAEAHGRRRFIVNLDLQHFFPTITENRVRGVLEALGVDQRVAEIIARLCCFESHLPQGASTSPVLSNMICYRLDTDLLRLAKTGRAIYTRYADDITFSSNQPPAPLFDGALPTVGRFSPELLASALRDAFQTNGFILHPDKAHYADRNSRRMVTGVKINDGLNVDRRYIRRIRALLHSIETLGLADAQSKFAGLGGRGALAAHLRGKIAYISHLKGATDPVVRALAQRYNKSFGATPITLVPTPQERRDRSVWVVDHIDQYGSAFFLKGVGLVTAAHCVKGLSEVEILHPSKHTTTFSAKVLKRHDHRDLALLDTSTIPATEYFELDLATTPPLVGDPVTAVGYPNWAPGDRLNHRPGVVSLITPQAGVRKIEVSQMLTQGMSGGPILDANAGVVGIIHKGGPGEGRQLAIHLSVLQEWLKE

SEQ ID NO: 332 - protein, 536 aa, unidentified
  source 1..536: note = Related to JAGMXV010000066.1; note = Rhizorhabdus sp.
MGDWRDWKGDLVSVARIFGKHFPLQIPQELADEASLLAHLGLGPKELKKIWWYRGRMYERFDIAKGGGKIRQITAPDKRLKILQSKLTPLLDQLYRVRNPVHGFVPERSVKTNAEAHGRRRFVVNLDLKDFFPTITESRVKGLLGALAVDDRVAEIIARLCCVNDHLPQGAPTSPVLSNMICFRLDTELLRVAKAARSIYTRYADDITFSSYQPPAPLFEGALPAVGRFSPDTLAPTLRNVFAGNGFVVNPDKAHYADRNSRRIVTGVKINASLNVDRRYVRHIRALLHSVETLGLGDAQQKYTDAGGKGVIAEHLRGKIAYVTHLKGLTDPVVRSLAMRFNKSFTARPIRLAPTVEEQRDRAVWIVEHSANGGKQGTAFFLKDIGLVTASHCVEGESDFTVYHPSKPSNQFKVSVAKRCEHRDLALLGHAIPTTDYFELVVATHPVAVGAVVTAFGYPGFGPGDKLNVRGGSVTSLPIKGGVQRVEVSQELAQGMSGGPVVDAQDCVVGIVHKGGPEEARQLAVAISALQDLAAE

SEQ ID NO: 333 - protein, 526 aa, unidentified
  source 1..526: note = Related to NZ_CP093335.1; note = Sphingopyxis granuli
MPSAARIFGKHFPLPIPPELADESSLLAHLGLSPQELKKIWWYRGRMYAQFSIAKGGGKVRQITAPDKRLKILQNKLAPLLNQLYRVRNPVHGFVPARSVKTNAEAHGQRRFVVNLDLKDFFPTITENRITGLLRSLGVDDRVAEIIARLCCFNSHLPQGAPTSPVLSNMICFRLDTELLRAAKGARSIYTRYADDITFSSYQPPAPLFEGALPAVGRFSPDTLAPSLRDTFTRNGFAVNPDKAHYADRNSRRVVTGVKINAGLNVDRRYVRRIRALLHSVEKLGLRDAQQKYADAGGKGVIAEHLRGKISYITHLKGATDPVVRSLAIRFNKNFRARPIKLAPTIEEQRDRAVWLVEHSANCGQQGTAFFLKDIGLVTASHCVEGVSDFTVYHPSKPSNRFEVTVAKRCPHRDLAVLDHAIPASDYFELEAAAQSVAVGDAVTAFGYPGFGPGDKMNVRGGSVTSLPVKSGVHLVEVSQELAQGMSGGPIVDGHDGVVGIVHKGGPEEARQLAIAIGVLQKWVAE

SEQ ID NO: 334 - protein, 501 aa, unidentified
  source 1..501: note = Related to CP038440.1; note = Brevundimonas sp.
MTSARRMFGKQIRIPLPPELANPDALLAYLEVSPAELKKIWWFRGRMYSEFNIAKRSGKVRTITAPDRRLKIIQSKLAPLLDQLYRPRHPVHGFVPNRSVKTNAEAHGRRRFVVNLDLKDFFPTITEKRVVGLLRALGVEKGVAEIVARLCCHMGQLPQGAPTSPVLSNMICYRLDTDLQQVAKSARAIYTRYADDITFSSYQPPTTLFETAVAGAGRFSPEVLAPQLRGAIASNGFLINPDKAHYADRNSRRMVTGVKINAGLNVDRRYIRRIRAMMHSFERVGLAEAQAKYASGGGKGSLAAHLRGKIAYVAHLKGQTDPVVRSLAQRYNKSLPAKPIRLTPTVEERRDRAVWVIEVPLKHNGTAFFLAGVGLVTAAHCVEGLSEVEVLHPSRHTTTFTVKVRHYDKHRDVAVLDHGTIPATEFYELEPATKPAAVGDAVVALGYPLWGLGEGLNIRPGEVSSLTVRSTSAGFSARRPSKRSERGPSLSGVDCASASRS

SEQ ID NO: 335 - protein, 360 aa, unidentified
  source 1..360: note = Related to NZ_VLKT01000135.1; note = Mesorhizobium tianshanense
MSNMICYRLDTELLRVAKSARAIYTRYADDITFSGYQPPAPLFEAGPPPVGRFSSDLLSTALRVAIEGNGFTINPQKAHYADRNSRRIVTGVKINSGLNVDRRYVRDIRAKLNSVEKHGLKASQARHSAKNGKGDICSHIRGKIAYVVHLKGLADPVVRSLALRYNRSFADQPMKVTPTDSERRDRSVWIVEHSGNEGEQGTAFFLSGVGLVTAAHCVENPEDLLLYHPSTPSNQTRVSVRKRCEHHDLAILDHAIHPNEFFEMEAATVAAAVGDDVTACGYPGYGPGDRLNIRNGTVTSLPRKSAIDRVEVSQELSQGMSGGPVLDAGGRVVGIIHKGGPNEGRQIATAIHELKKWAAS

SEQ ID NO: 336 - protein, 526 aa, unidentified
  source 1..526: note = Related to NZ_CP018171.1; note = Aquibium oceanicum
MPSAARVFGKLYPINIPAALGDEATLLAHLGMSPPELKKIWWYRGKMYRRFSITKGSGKTRTICAPDSRLKILQRKLAPLLGQIYRVRNPVHGFVLDRSVKTNAEAHGARRFVVNLDLQDFFPTITENRIVGLLTSVGLERRVAEIVARVACYDGHLPQGAPTSPVLSNMICYRLDKALLRIAKSARTIYTRYADDITFSGYQPPVALFEAGPPSVGNFSPELLSAALRTAVQGNGFIINPHKLHYADRNSRRIVTGVKINSGLNVDRRYVRDIRAKLSSIERHGLKASQATYFSKGGKGDIGTHIRGKIAYVGHLKGLADPVVRSLALRYNRSFADHPVKITPTESERRDRSVWIVEHSGNGGEQGTAFFLSGVGLVTAAHCVEDPEDLLVYHPSTPSNQANVSVRRRCQHRDLAILDHAISSNEFFEMEAATTAVAVGDDVIAYGYPGYGPGDRLNIRSGKVTSLPRKHAIDRVEVSQELSQGMSGGPVLDASGKVVGVIYKGGPNEGRQIATAIHELKKWTAV

SEQ ID NO: 337 - protein, 524 aa, unidentified
  source 1..524: note = Related to NZ_QAYG01000015.1; note = Breoghania corrubedonensis
MPRNPFGPPIRAAVPAELASEAALLAHLGMTVGELNKIRWYRDQMYQTFEIAKSGGKSRLISAPNKRLKHIQRQLLPLLYQLYQTRSPVHGFVFNRSVKTNAQSHLRRRFVLNLDLQDFFPTITENRVVGMLKAIGIGATVAVAIGYLCCIHGHLPQGAPTSPVLSNMICFRLDRELLAFAKASRCIYTRYADDITLSSHQPMSALFEGSPPPAGNFANDLLVSALTAIVVGNGFTINPMKAHYANRHSRRMVTGLKINDLLNVDRRYIRNIRAVLHSVETLGFVGAQTKYATSGGTGSLAAHLRGKIAWISHIKGPSDPVVRSIALRFNTCFADRKIMVTPTPIERRERSVWIVEHDDGQGTGFFLSGVGLVTAAHCVTGKREVEVFHPSKHANTFKATVLQRDDHLDLAILGHEIPATEYYELNRAALPVVTGDPMTAVGYPKWAPGDPLNVRPGVVSTVTIKSAVRLIEVTQKLTQGMSGGPLLDANGDVAGVVHKGGPEEGRDFAIHVEVLNSWLAHLAS

SEQ ID NO: 338 - protein, 495 aa, unidentified
  source 1..495: note = Related to JAIETD010000062.1; note = Methylobacterium sp.
MTAKELNKIRWHRGGMYQSFEIAKNKDKGRLISAPDDRLKHLQRQLLRLLDPLYTVRNPVHGFVLQRSVKTNALSHLRRSFVLNLDLQDFFPTITENRIVGMLEALGIGSSVAAAIGYLCCINGHLPQGAPTSPLLSNMICFRLDRELLNFAKVTRCIYTRYADDITFSSHRPMTALFEGPLPLAGHFAPNLLVPSLVALFAGNGFTINPSKAHYADRHSRRMVTGLKVNELLNVDRRYIRNIRAALHSVETLGTVGAQAKYEASGGSASLASHLLGKIAWISYIKGSSDPVVRSIALRFNWCFPDCKIEVLPTPIERRDRAVWVVEHDDGQGTGFFLNGVGFITAAHCVAGKKEVEIFHPSKHSNSFKAIVLKSDDDMDLAVLSHEIPATEYYKLDQAALPIATGALMIAVGYPKWAPGDPLNVRPGVVSTITVKSAVRLIEVTQKLTQGMSGGPLLDADGAVAGVIHKGGPEEGRDFAIHIDVLNSWLAAAAP

SEQ ID NO: 339 - protein, 560 aa, unidentified
  source 1..560: note = Related to JAFBAI010000383.1; note = Xanthobacteraceae bacterium
MSREDVRAIRLLREWRDWRGDLVPQNPFGPPVRIDIPAELASEAALLSHLGLSVMELKKIRWCRGRMYQSFDIAKVKNKIREINAPDSRLKHLQRQLLPLLDQLYRVRKPVHGFVADRSVKTNALAHLRKHFVLNLDLKDFFPSITENRVVGVLKALGIDGSVAAVIGYLCCVNGQLPQGAPTSPVLSNIICFRLDRKLLAFAKDARCIYTRYADDITFSSYQPMTTLFEGPLPPAGHFVPDLLAAAFASIFVVNGFAINPAKAHYADRHSRRMVTGLKINELLNVDRNYVRNIRAALHSIETIGGIAAQRKFEARGGTGSLAAHLLGKLSWLRHIRGQTDPVFRSVAVRFNNAFPTHKIDVTPTPAEVRDRAVWVIEHYEGDIDQWYQGSAFFLRGVGLVTAAHCVTGASEAEVYHPGKPANKFKVTVLKIDDHRDLAILAHMIPETEYLELERSTQVITVGMLLTAVGYPSFGSGDRLNVRDGNVSSLPVKHGVQYIEVQQKLSPGMSGGPLLDAYNAVTGVVHKGGPSEPRDFAIHIDVLNAWLASASASFGPNGSA

SEQ ID NO: 340 - protein, 419 aa, unidentified
  source 1..419: note = Related to NZ_CP021912.1; note = Erythrobacter sp.
MVAYLSLTEAELKKIRWFRRGMYHYFELAKGNGKRRRIMAPDARLKHLQRALLPLMENLYRVRNPVHGFVRDKSVKTNAAAHLRRRNLLNIDLKDFFGAITENRVVGVLEAIGVPGDVAAAIGYLCCCEGSLPQGAPSSPLLSNMVCFRLDRELMRYAKEHRCIYTRYADDITLSSHQPMASAFDGPIPPAGTVQSELLDPELRGIIGSNGFELNPDKIHYADRNSRRMVTGLKVNELLNVDRRFVRNLRAMLHSIEIKGHADAKARFASLGHSGSMSAHIRGKIEWLASIKGTSDPVVRGIILRYNACFPGKAIAVSPTDEERQDRATWITENKNGQGSLFFLKGVGLVTAAHCVADLLNLEIFHPSKHANRFGATVTKYDKDRRRLRLGLKRVLDPIEAEMCACLTAPLFGTGPRIL

SEQ ID NO: 341 - protein, 545 aa, unidentified
  source 1..545: note = Related to JAGOQV010000032.1; note = Alphaproteobacteria bacterium
MHNPFGPSTPPRISIPQELENKESILAYLDVNPEELKKIWWFREKMYQAFEIQKRGGKARVISAPDDRLKYLQHKILLLLNRLYRVRNPVHGFVPQKSVKTNATAHLRKRFILNIDLKDFFPSITENRIIGVLKSIGIDDQVAQIISRICCSNGCLPQGAPTSPVLSNIICFRLDKNLMSLAKDTRCIYTRYADDLTFSSHQPMIKLFEGVITPAGHVSPELLSLHLRNIFLANGFIINPDKVHYADRNSRRMVTGLKVNEFVNLDRRYIRNIRAILHSIKVSDVKAVETKYKQDYGGKVDLGKYLRGKITWLGFIRGQSDPIFRAIAIRFNEEFPDLKIETTPTFIEIRDRAVWVIEYCVDTLAGLKAFQGSCFFLKDVGLVTAAHCVLDENEPMKELELELHHPSKPANKFKAKICMFDKHRDLAILSHKIPATEYYELELSTKTISVDDELTAVGYPSFGPGDQTNIKKGTVSSLPKKSDVQLIEVTQKLAQGMSGGPLHDSNFAVVGVIHKGGPSEGRDFAVHFDELNKWLSTPPISKILG

SEQ ID NO: 342 - protein, 500 aa, unidentified
  source 1..500: note = Related to SUEX01000026.1; note = Mesorhizobium sp.
MSGKELKKIWWFRGRMYHQFEIAKREGKTRIINAPDKRLKHLQRQIAPLLDQLYSVRNPVHGFVTGKSVKTNALAHLRNRFVLNIDLKDFFPSITENRINGVLESLGVDSGVSRIIARLCCHNAQLPQGAPTSPVLSNMICFRLDKELLAFAKSMRCIYTRYADDITFSSHQPMVALFEGSAQPSGAFALDLLSSTLRNIVNGNGFAINPEKAHYADRHSRRTVTGIKINEFLNVDRRYVRNIRAALHSVEQVGKKAAQEKFEKDHKGKCDLGAHLGGKLSWLRYIRGQSDPVFRAIAIRFNANFPDRKIDVTPTSHEVRDRAVWVVEYCEGEGENLKMLQGTCFFLKDVGLVTAAHCVEGVEEVEVYHPSKRSNVFTATVVKRDKDRDLAILEHSIPTTEYFEIERSAQAVAMGDELTAVGYPSFGPGDGLNVRDGKVSSLPVKSSLKLIEVTQKLSQGMSGGPLLNGDNTVVGVIHKGGPGEARDFAIHIEMLNAWLS

SEQ ID NO: 343 - protein, 542 aa, unidentified
  source 1..542: note = Related to CP019966.1; note = Rhodopseudomonas palustris
MRAWRDWKGDLVTLPLFNSSIRTSIPAELADETAFFLYLQMSPREMIKIWWFRRRMYHQFEIAKGKGKTRIIEAPDDRLKHLQRKLLPLLDQLYCVRHPVHGFVAGKSVKTNAQAHLRKRFVLNIDLKDFFPSITENRVAGVLEALNIDGRVSRLIARLCCHNGHLPQGAPTSPILSNMICFRLDKELLVFAKSMRCIYTRYADDITFSSHQPMAAMFEGAAAPLGRFNSDLLIQPFRNIIASNGFSLNADKAHYADRNSRRMVTGIKVNELLNVDRRYVRNIRAALYSVEKLGKKGAQDKFESEHGGTSKLAAHLAGKIAWLAHIRGQSDPVFRAIAVRFNKNFPEARIAVTPTSEEIRDRAVWVVEHEEAQGTAFFLKGVGLITAAHCVEGVKEAQLYHPSKRANEFTVRVVNRDKDRDLALLEHTIPSTEYFELDRSNQPVAVGQELTAVGYPSFGPGDRLNVRDGKVSSLTVQHGVRLIEVTQKLPQGMSGGPLLSSQCAVVGIIHKGGPDEGRDFAIHMDVLAAWLAEKPPGDGCTS

SEQ ID NO: 344 - protein, 525 aa, unidentified
  source 1..525: note = Related to NZ_WOAC01000030.1; note = Mesorhizobium sp.
MPPSFFGIPVVRVAIPPELASEAALLAYLGVSAKELKKIWWFRGRMYHQFEIAKGNGKSRIINAPDKRLKYLQRKIAALLYHLYRVRNPVHGFVAGKSVKTNALAHLRKRFVLNIDLKDFFPSITENRVTGVLESLGIDSRVASIIGRLCCHNSHLPQGAPTSPVLSNMICFRLDKELLAFAKASRCIYTRYADDITLSSHQPMTALFEAVPPSGHFAPDQLKPAFRNIIVTNGFAINHDKAHYADQHSRRTVTGLKINELLNVDRRYVRNIRAAIYSVENLGKKTAQKKFESSHGGTSDLGKHLEGKITWLRHIRGQSDPVFRSIAVRFNTSFPERKIEVTPTAAEVRDRAVWVVEHFEGDMAQGSAFFLKDVGLVTAAHCVAGVEEVEVYHPSKPSNAFKAKVLKRDEPRDLAILEHAIPPTEYFELEQSNHSVVVGEGLVAVGYPSFGPGDRLNVRDGKVSSLPVKHGVKLIEVTQKLSQGMSGGPLLDHNDAVAGIIHKGGPGEGRDFAILIEMLNDWLAE

SEQ ID NO: 345 - protein, 513 aa, unidentified
  source 1..513: note = Related to JAIOIW010000047.1; note = Notoacmeibacter sp.
MDNETALLKYLGVSADELKKIWWFRVRMYHQFEIAKGKDKTRTITAPDERLKYLQRQIAPLLDQLYRVRNPVHGFVDGKSVKTNALTHLRKRFVLNIDLKSFFPSITENRVIGLLEALGIDNCVASITARLCCYNSHLPQGAPTSPVLSNMICFRLDRELLAFAKGTRCIYTRYADDITFSSHQPMAALFEGSAPPSGHFSPDLLIPALRNTFASNGFTINPHKAHYADRHSRRMVTGLKVNELLNVDRRYVRNIRAALYSVETLGKAAAQTKFASNHGGTSDLGAYLQGKITWLRFIRGQSDPVFRAIAVRFNASFPDRKIEVTPTADEVRDRAVWVVEYCEGEGEKLKTLQGSGFFLKDVGLVTAAHCVEGVDEVEVHHPSKPANKFKATVVKRDKDRDLAILEHTIPATEYFQLNGATQAVAVGDELTAVGYPGFGPGDRVNVREGKVSSLATKHAVELIEVTQKLSQGMSGGPLLNSDNAVVGVIHKGGPDEGRDFAVRIEMLNTWLAE

SEQ ID NO: 346 - protein, 527 aa, unidentified
  source 1..527: note = Related to CP021181.1; note = Rhizorhabdus wittichii
MPNLPPPFGASIRLALPRELADENALLVYLGLSPKELRKIWWCRARMYQHFDIAKGRDKVRTISAPDKRLKYLQRKLAALLTQIYRPRHPVHGFVVGRSVKTNAVAHLQKRYILNIDVKDFFPSITENRVEGLLHSLGVDMRVAAIITRIVCNEGCLPQGAPTSPILSNMICFTLDRRLMALARDNRCIYTRYADDITFSSHQPLASLFEGASPSAGQITPDLLSPALRDTFVHNGFALNPDKAHYADRHSRRTVTGLKVNELLNVDRRFVRNLRAALHSVETLGIAAAQQVYQDRYGGSASLGAHLEGKIGWLRHIRGQSDPVFRALALRFNACFPDRELRLTPTVSEIRDRAVWLVENDETIEQGTAFFLAGAGLVTAAHCVEKATELTLYHPSKPANKFVATVLKCDAHRDLALLGHDIPPTEYFELERSTAAVLVGQELTAAGYPGFGPGDRLNVRLGTVTSLPIKRGVHMIEVSQKLGQGMSGGPVLDEMLGLVGVIHRGGPGEARDFAIHLDVLNCWLAEE

SEQ ID NO: 347 - protein, 477 aa, unidentified
  source 1..477: note = Related to QHJY01000004.1; note = Caulobacter sp.
MYQQFDIAKSGKKVRSISAPDKRLKHLQRQIAPLLDSLYRVRHPVHGFVANKSVKTNAQAHLRKRFILNLDLKDFFPSITEGRIGGLLQSIGIDSRVADIIARLCTNDGRLPQGAPTSPVLSNMICFRQDKQLMSFAKENRCIYTRYADDITFSSDQPMAALFESAVPSPGRFPPDLLVTRLRAIFMANGFEINADKTHYADRHSRRMVTGLKVNELINVDRRYVRNIRAALYSVRTLGAEEAQKKFETKLGGKSNIGSHLEGKIAWLRFIRGQSDPVVRAMALRFNAAFPDRKIDVVPTRDEVRDRAVWVVDNDTDISQGSAFFLKGVGLVTAAHCAKGAKEVEVYHPSKRSNKFKATVVKRDEQFDLAILNHEIPTTEYYELERSLTAVAVGDDLTAIGYPDFGPGDGLNVRGGKVSSLPVKNGVSMIEVTQKLSQGMSGGPLLDDNDAVVGVTHKGGPDEGRDFVVRIEMIDKL

SEQ ID NO: 348 - protein, 545 aa, unidentified
  source 1..545: note = Related to SACP01000011.1; note = Methylobacterium oryzihabitans
MPSSSAFGFPIVSVAIPCELKSEEKLLEYLAISTKELKFVWWYRERMYRKFELGSKKGKVRAIAAPNNRLKYIQRRIAVLLNQIYRVRNPVHGFVKEKSVKTNALSHLKKKYIVNIDLKDFFPSITENRVIGVLNSLGIERSVSQIIAKFCCCNGHLPQGAPTSPVISNMICFKMDKSLMSMAKEMRLIYTRYADDITFSGYRPMTVLFEGAAPFPGRFDPNQLASELRQIISGNGFVLNANKAHYADPNMRRMVTGLKINEIINVDRRYIRNIRSALYSVQTIGETAAQDKYQIKYGGRSSLGAHLEGKITWLRYIRGQSDPVFRAIAVRYNLCFPNRRKIEVIPTPEEVRDRAVWVVEHSEGDMAQGSAFFLKGVGLVTAAHCVEEATGLQQISLYHPSKPNNLFAATVVGIDKHRDIAILEHSIPLTEFFELESSFRVVQVGDNMTAVGFPGFAKGDRLNVREGKISSLPAKSGVRLVEVTQKLTQGMSGGPLLDSDNKVVGIIHRGGPGEGRDFATHIGVLNDWLRERPEGVSKKIEEVRG

SEQ ID NO: 349 - protein, 455 aa, unidentified
  source 1..455: note = Related to SMAR01000071.1; note = Martelella mediterranea
MPNFFGDFHTPRVKLPEEFSSKEAFHQYLGLSTAELKKIWWYRERMYKQFPLAKKNGKNRLISAPDKRLKFLQGRLLLLLNQIYRARNPVHGFVFDRSVKTNAEAHLRKRYVLNIDLKDYFLSITEKRIVGLLESLGIDTEVACIAARLCCLNSRLPQGAPTSPILSNMICFRLDKRLQKFSKENRFIYTRYADDITLSSQQPMTSMFKSGTIVSGSISPDDLNATFVDIISGNGFQINPQKVHYADRNSRRIVTGIKINELLNLDRRYVRNIRAALYSVNTLGQIEAQRKFEDVHGGDCDLSRHLRGKITWLGYVRGRSDPVFRSIARRFNGCYPDMKIETVPTAKEVRNRAVWVIEHFEGDWAQGTAFFLKGVGLVTAAHCVKGAEKIKIYHPEKRSNEFDVHVVKINEDLDLAVLHHSIPTTEFYEFDQTTKDVAVGDELIALGYPGNPPEK

SEQ ID NO: 350 - protein, 479 aa, unidentified
  source 1..479: note = Related to NZ_VWNA01000001.1; note = Segnochrobactrum spirostomi
MYHNFNIGHHGRKLRVINAPNDRLKYIQRRLLKVISGIYSVRDPVHAYVEGRSIKTNAASHLKSKYIVNLDLSDFFPSITEDRIVGLMNSLCITPRVSAIIGRLCCMGGYLPQGAPTSPMLSNMICFRMDRDFLSIAKRYRYIYTRYADDITISSRSPLTNLFASGAPPVGHFDANILSKDVISIIYTNGFNINSQKCHYADRHSRRMVTGLKVNEFVNLDRKFIRNIRSTLYSIEKFGIAKATDEFISKHAGKGTLHAHLRGEIEWHGHIRGRSDPVFRKNADRFNLLFKPKILVEPTYEEIRKFAVWIVDNNTACDQGTCFFVHDIGLITAAHCVEGATDIDVYNPLNPTQKYKANVQKIDKHLDLAILSHSIPTSQYRNIKISKVRASVGQSIIAAGYPDYGPGDSLSIRTGTVCSLSMKSGVGRVEVTQKLSSGMSGGPLIDRDNCVFGVIHKGGSTEEKDIAVEISELTKLVHA

SEQ ID NO: 351 - protein, 563 aa, unidentified
  source 1..563: note = Related to CP031750.1; note = Cereibacter sphaeroides
MNGGEHLVPSGSYIFGSGKPRIGIPDELTTLSKMLDYLGISDKELLKIRLSRSFMYSEFTIPSPKKARLISAPDARLKFLQGRLKSSFEKFYRPRLSTHGFVSGRSIITNAAIHARKRHVLSLDLKAFFPSITENRVRGLFRNLGFATDVCDAITTICCHAGYLPQGAPTSPIISNLICFSLDRDLHSFAKKQNLVFTRYADDISISTNGTPAGLFSATVPSPGKLDISALSVDLIDVVVKNGFFLNEEKIRFSSGSHRKIVTGLIVNEFPNVPRTYISNIRAILFSIMKDGYAVAEAKFRQKRPSAKRSLEQYLRGKLNHLANVRGKGDPIYRSLADKFNKEFLPSLATEPTPRERQSSGIWIIEWQYNDRKIDKLYGEAEANGQGIMSVTEGAQGTAFFLDGVGLVSAEHCAPPEEIDLEFFRVFHPSAPNLKFEVKVAKRCKVRDICILKHDVPENKFEGLKPCRVPARGGDVVRAFGFTDYQVGDAVTTSRGEVSHVATRSGVKLLNLSFKIGQGMSGGPIMDRMERVVGVVHKGGPLELRDYAVTLNAVLSLHEEASL

SEQ ID NO: 352 - protein, 535 aa, unidentified
  source 1..535: note = Related to VSSR01000016.1; note = Bradyrhizobium cytisi
MLCIGREGGGAPFTMPTLPKALGSANDFYAYLGVGAGERKFLEKHAFHRYKRVIVPKRRGGTRVLMVPDRRLKFLQRKAHQLLNQLYRPRTPVHGFVKQKGAISNANEHQRRPYLFNIDLRNFFGVISRRRVLGMLISMGLPDDAAEAVCSVCLTANQLPQGAPTSPILSNLVAYRLDRDLMKFAKTYRLKYTRYADDISFSSYAPPLALFNAGLPIPGRVKSDQLSVELSTVLATNGFEIAPDKVWFAGPKSRKEVTGLVVNEFTNLKRSFVRNVRAALYKTEKLGLAAAQSAYQKKYTTNATLEQVLRGRLEWIAQVRGRSFDPYRTLAKRFNNLFPNSPLPILPTHEETAERAVWVVEFFADEDNCAQGTAFFLAGVGLVTAHHVLEKLPPGAHADLYRPSGGGNKFKATPSKRSCPIRDLMILEHDVPTTDYLSLPVVTSPEQRDDKIVALGFPDYGPGDQLSRRGGQIYGRATKHGVKLLEVSAILSDGISGGPVVNDQHQVIGIAKKGGIEERKQLAVEVSELLKLADE

SEQ ID NO: 353 - protein, 484 aa, unidentified
  source 1..484: note = Related to JADPJU010000115.1; note = Bradyrhizobium sp.
MLSDTAYFTYLGVGAKERQFLEKHAFYRYSEATIPKRRGGTRTLLVPERRLKFLQRRTHLLLTQLYSPRAPVHGFVAHRGAITNANAHQSRPYLLNIDLRNYFGTITRRRVLGMLQSMGLDEAVALAVCSICMTRNQLPQGAPTSPVLSNLIAYSLDRDLMKFAKDYRFRYTRYADDISLSSYAPPVALFEQGVPPPGKMTVEQLSASLRSVITSNGFEIAPEKIWFAGPKSRKEVTGLVVNEFTNLKRTFVRDLRAALHKVETMGGAAAEKDFQARYKTTASLEKILRGRLEWIAQVRGRSFSAYRTLAKRFNQQFPASAVTILPTYAEIAEHAVWVIDFFNGTVCEQGTAFFLEGVGLVTADHVLQNLPVGVSAEIYRPSGGGKKFKATPSSRRCPYRDLAIVDHDIPTGGYLSRPVTSSPERRDDDIIAMGFPNYGPGDQLSKRRGHIIGSATKHGVKFIEVSAMLPGGISGGPILMIAIR

SEQ ID NO: 354 - protein, 526 aa, unidentified
  source 1..526: note = Related to NZ_JYMS01000026.1; note = Bradyrhizobium sp.
MPTVPAELKTANALFAHLGVGSAERKFLEHHAFYRYTEVAIPKRRKGERKLLVPERRLKFLQREMLKLLSQLYVPRDPVHGFVVGRGALTNASAHEKRPYLLNIDLKNFFGVIARRRVRGMLLSFHLEEEIAEAICDICTTRNQLPQGAPTSPMLSNMIAYRLDRDLINFSKTHRLRYTRYADDISLFSYTPPMGLFNAGLPNSGRVAEEQLSTGLRSVFSTNGFETAPEKIWYSGPDFRKEVTGLIVNEFPNVKRTFVRNLRSSLYKAETMGISAAEKDYQKRYGTTASLQQVLRGRLEWIAQVRGRSFGAYRTLAKRFNAIFPASPIAVLPTYDEVAEQAIWVIDFCEDVAGKPEPTCAQGTAFFIANIGLVTAHHVLADLPPGYSAVLHRPSLPGKKFKATPTKRQCPYRDLMILEHNVPATDYLSLSAATSPERRNAPIVALGFPSFNAGDELGTRSGLVVGNATRHGVKMLEVSALLLSGISGGPIVNDRAQVVAVAHKGGYEENKQLGVIVSELIALANE

SEQ ID NO: 355 - protein, 518 aa, unidentified
  source 1..518: note = Related to nan
MAALPPQLTSVAALHAYLGVGAGEARFLSRYAHHRYRAVNIPKRRGGFRNLLVPEDRLKFLQRKMLELLEPRYKPRPAAHGFVVGRSAITNANSHQARPYLLNLDLENYFGNITRNRVHGMLQAIGFAPEVARAICHICIVNNQLPQGAPTSPLLANMVSFRLDKDLTQFSKANRIRYTRYADDITFSSYVRPVALFSEPLQEAGALSVEGLSKELRLIISSNNFTINPVKTRYADRKSRKEVTGLIVNEFTNVRRTFIRDLRASLYKIDKLGLSAAQTSYNEKYGSDALLKDVLRGRLEWLAQVRSRSFYTYRTLAQRYNKHFPDNPAPIDPTNEEVAKSAIFVIEHFDGDGAQGTAFLLDGVGLVTAFHTLDGMVSEWADLYRPHEPTKKFRAKVGGKFCKHRDIALLEHDIPAEDQASLRPATGAEHVKSSIIALGYPEFASGDGLSERTGKIVGRSTKSAVRYVEVDAILGDGLSGGPIVNDRYEVIALTHKGGLLESKQLGVDIVEITKVAEA

SEQ ID NO: 356 - protein, 517 aa, unidentified
  source 1..517: note = Related to SDYD01000559.1; note = Alcaligenaceae bacterium
MPTLPPELMTVPALYAKLGIGGAEAKFLAHYVRHRYRASQIPKRRGGYRTLLAPDNRLKFHQRELLDLLTPLYRPKPAVHGFVAERSPITNANAHQGRPYLLNLDISNYFGVITRNRVRGVLIAVGMPAAVADAVCNLTVVDNQLPQGAPTSPLLANMVTFRLDRDLTSFAKTHRLRYTRYADDLTFSSYVRPTALFAEAEPAPGLIDIAELAPVLSGLITGNNFNLNPVKARYCVSKTRKQVTGLVVNEFTNIRRDFLRNVRSSLYRMETLGVADAEAEYQSKYDPKAKLHSVVRGRLEWIAQVRGRSFEPYRILAGRFNALYPAATPLPINPTNDELLAKAVFVIDYGKGKNMAQGTAFFLEGAGLVTAHHVLAKMQSGSATLYRADEPTKKYKARFSARVCSHRDLAILDHDVPVSEQTFLKQAAGIDRIKSTVTVVGYPEFGPGDSLVQMEGRIVGRNTKSAVRYVQVDMQVGDGLSGAPIINDRYEVVAVGHKGGPSESKQLGIDVAEVHGL

SEQ ID NO: 357 - protein, 567 aa, unidentified
  source 1..567: note = Related to JADCGG010000223.1; note = Roseomonas sp.
MTRRVNATFDRMLPQDVAVAFGGLPAIRRRRRLSFMRHIPQQLASESELLVHLGVGAEELAFLRRWTGFKYRTVKISKRSGGERTLLIPDDRLKFLQKKILGILLNLYRPRAPVHGFTKDRSALTNAKAHEGRRFLLNLDLKDYFASVSRNRVVGLLEKLGIDAAVADVIAAFCIFRDQLPQGAPTSPILANMVTFRMDRELMEFGQKHHLKYTRYADDLTFSSYRPPTLLFKDGLPKEGKITEKALSDEIRLIINSNGFDLNSDKIWFSATRSRKEVTGIIVNQFPNVKRSFIRELRVLLHKAETLGLPQTEKDYQSFSGKNAPLEQVLRGRLEWISQIRGRDFPCYQILATRFNALYAKKPLRLPPSQEDVLQKSIWVIEYHPKESEKRECLIDIQGTCFFLKQVGLVTAHHVVSELPKGTRFSVFRPTHSWQKYEAWSSEITCQYRDLAILHHNIPPHAFLELEAANSQAVDQTRIKALGFPNFGPGDTLARIPGEVIRTLTKSAVKQIEVTAALPSGISGGPIIDAAQLRVLAVAVKGGATEDRQVAVAISELQTLFKEHPGS

SEQ ID NO: 358 - protein, 526 aa, unidentified
  source 1..526: note = Related to JAIVAG010000015.1; note = Yangia pacifica
MPYNPFVVHRKPKVPEGLRTLPVFLSDLGVSESELRLISAKKVEQYHLVSVRKRSGGMRTLSVPNERLKYIQKHTASLLAPLYQPRWCVQGFVKGRSALQNAQRHLGRKHLVKVDLKDYFNQVTVSRAKGVLRYFELDAGVIDAILTFCTLFGKLPQGAPSSPLLANMVTFSLDQELVRYARTNRLKYTRYADDIVLSSFSKPRLLRPSVTADYCKLTIEDVQEDFAKIFSNQGFELNEEKMRYCGQRASRTVTGYTINEFANVPREHIRRIRSILNDIEKRGYPLAQRRFSETTHSIKSLKASLKGRLNWVSSTKGVSDPVYRRLALRFNGLFPDDCLEIGPDYSKLAQLSTWVIEAERKTNGVPEAQGTAFFLKGVGLVSAAHCLPGGCNYSVFNIDNPSKTYPATIAKTHNHIDLAILDHSIPAESYLALELSDRQANLGEEVFSWGYPEHGPGKRITQKSGRVSSKPRVSGVDMYAVDMKLYQGTSGGPILNSSSAVIGVTHKGGHGEAHDLAILIKHLKDL

SEQ ID NO: 359 - protein, 311 aa, unidentified
  source 1..311: note = Related to NZ_PHJF01000002.1; note = Epibacterium ulvae
MPTAISVAFGKTPTPPVEFSSMAALKTHLKISDKELLVIRKHRSKMYSHFIIPKKSGGVRFIDAPKPRLLYLQRRLLEVLVKMHKPRNPVHGFVRKRSAITNAEEHLNRKHVMNIDLKDFFPTITQDRVSSLLRILGIPSDVRAAILSICCANGRLPQGAPTSPVFSNMICLRMDRQLMGFCKTRRIKYSRYADDLTFSLYTAPHQLFSESVPSPGKLASSQISRELKSIILDNGFVLNEDKLRYFGPSSRKEVTGLIVSDFVNVPRKFVRNIRATIFDIEKNGFPAAQIKFSTLYRKTNPLSEHLRGKIV

SEQ ID NO: 360 - protein, 549 aa, unidentified
  source 1..549: note = Related to NZ_CP025996.1; note = Stenotrophomonas sp.
MDIGSLRCAYDYDKLGTLFGVPGAALKKNLYSSRGYTDFTIPKKSGGVRLISAPGRLRKQLQRKLLPVLDDVYKMGPAVHGFAKGRSVRTNALPHESKGLVINFDLKDFFPSISFQRIRGVFLGHPFRLDWTVANILAQMCSLDGVMPAGAPTSPVLSNIICAKLDKRLSALAARLGGTYTRYADDLTFSFDRPLAKLSSIAMIDEEGKPAVGASVSEIVTSEGFAINVEKFRIAAKGSRKAVTGLVVNERVNVKRSWYLKLESAIYAVEKFGLNPVAAKMFPQEEVPGVAPARLLRQLHGKISYLRMIRGKGDWLAAEMAHRFNTLHGNVRLRVPSVEMISNPNRQVRGVHIVVAYAAAVPVFDPTEEQGTAFTTPSGLLVTAAHVLEHEDTKTLLPFVYVMNERKLSLVACDVLAVDWDRDIAILRVRDDKNRVSAERSRYGLGQDPHQGETLISIGYPDYARGQHGSAFETPVTKLFKIKVPGGQEILKARVGGPIQGGMSGGPAIDSNFDVRGVILKGVANPGGVPEIIAISEVRRVAQANGLNL

SEQ ID NO: 361 - protein, 550 aa, unidentified
  source 1..550: note = Related to NQYP01000025.1; note = Xanthomonas sp.
MDIESLRCVHSYDSLGALFGVPGSTLKNNLYKSRGYTDFTIPKKSGGVRLISAPGRLRKKLQHKLLPVLYSAYKMGPNVHGFAKGRNVRTNALPHATRKVVINFDLKDFFSSISFQRIRGVFLGTPLRLDWSVANILAQICSLDGVMPAGAPTSPVLSNIICAKLDKRLSALAARLGGSYTRYADDLTFSFDRPLTQLRSVAILDDEGKPLVGASISEIVTSEGFSINMEKLRIATKGSRKTVTGLVVNEKVNVKRPWYFALESTIYAMEKFGVDEVAAQKFPEEKTPGVAPARLLRQIHGKVSYLSMVRGKGDWLASDIAHRFNKLHETLQLRVPSVELISQLVRRARGVHIVNASTDPLFVFDLGQSQGTAFTTSSGIMVTAAHVVERDDTKTILPFVYVMNERRLALVICDVIAIDWNRDIALLRVRNDKHRLDLERSRYRLGRDPNQGDNLVTVGYPDYTRGEHATAVNSPVTRVFKNKATSGAHDIRKARVDGPIQSGMSGGPALDSKFEVRGVVHKGVLNPGGVAEIIAISEVLRVAQANGLSV

SEQ ID NO: 362 - protein, 518 aa, unidentified
  source 1..518: note = Related to NZ_MQXX01000031.1; note = Stenotrophomonas maltophilia
MGIRALRFPRNPGGVRAISAPGRLRKTLQRQLLPVLYDAYKMGPNVHGFARGRSVRTNAQPHAARNVVINFDLKDFFPSISFQRIRGVFLANPMRLDWSVANILAQMCSLDGVMPAGAPTSPVLSNIICAKLDKRLSALAARLGGSYTRYADDLTFSFDRPLAQLRSIAMLDEEGKAVVGASISEIVKSEGFSINMDKFRISVKGSRKTVTGLVVNEKVNVKRSWYLKLESTIYAMDKFGIPAVAAQVFPDEKIPAVASAKLLRQIHGKVSYLSMIRGKGDWLAADIAHRFNGLHGEAQLRVPSVELISQAGRRARGVHIVNASTEELLVFDLAASQGTAFTIPSGLMVTAAHVVEKDDTKTVLPHVYIMNERRKALAACDVLAVDWDRDIAILRVNDEKHRLDLERSRYKLGLDPAQGDHLVTVGYPDYTLGERATAVNSPVSRIFKSKAATHGAPDVNKARVDGPIQGGMSGGPALDSKFEVRGVIHKGVLNPGGVAEIIAVSEVRRVALTHGLKV

SEQ ID NO: 363 - protein, 540 aa, unidentified
  source 1..540: note = Related to LR828257.1; note = Xanthomonas hortorum
MLTIKNLQGVHSYGALAPLFSVTPAALKAQLYSAKGYSSFNIPKKSGGFRLIHAPTKIRKQLQRALLPVLNEAYKAPSFVHGFVDKRSVRSNAQPHVQARTVVNVDLADFFQSISFKRIRGVFLAPPFRFDWTISNILAQICCYGGALPAGGVTSPTLSNMICARMDKKLVRLSRRLGGEYSRYADDLTFSFRRPLAQLSSIVAVDASGNYLPGAALLEIFNAEGFSLNPVKFRVATGAARKLVTGVVVNHRTNVPRKWLRALESKIYAITRFGVGAIAAQEFPDVAPESARYRLLRQLHGRISYLRMIRGAGDWVASDLAYRFNKAHGENQLRVPCTELISNPQRVPRGVWVLGCSASTMHFFDPQNQGTAFVTSSGLLVTAAHVLLLDSGDVAGYIYIINERAKKLRRCELLAIDVEADVAILKASEHNLEVERSRFSLGNDPQSQDSVVAVGYSDYGSGDTATMLQASVQKVFKFNSIKKAQVGAFISGGMSGGPVVDSACRVRGLVHKGVSSAAGVSEIICVEAIIRVAVSNSLSL

SEQ ID NO: 364 - protein, 534 aa, unidentified
  source 1..534: note = Related to JAHFXB010000114.1; note = Proposed Aureobasidium melanogenum
SAHTHESLAAALGLAPAGMLKALYKRKGYTVWLIPKKNGQHRTIASPSRLRRHIQIQLKAVLEQVYKPDASVHGFLQGHSIVTNAKPHVRRRTIINLDIKDCFGSISFFRVRGLLLKAPFNLPWVTANILAQATTFENALPPGGITSPILANIVMAGLDKRLSRMMIRYGGRYTRYADDLTFSFPAPPGRLGEFVEKSAVGNYQIAPKLSAVLKEEGFESNQLKFRCLTGASSKRVTGLKVSDKVNLPRRWIRELDCKIYAMEKFGVNAVAAADHPDSPVEAAKARLLRHIHGKIAFASMVRGRADFITAAMANRLNQLHERSDLYLSDIEIISRGDRASRAVWVVTAAPEGEDHYFAPEGNGTAFCIRGGLLVTAAHVIEDHEGKTKAPYPVVCVRRADQPGTYLGCNVIAFDRDRDLAVLQLLVPRPDLTRFQFALGKVPVTDESMTSIGFPNYVVGNRSATEVHVVQDVRPRYGVLRIRATGNIMGGASGGPLLNKKFEVAGITHKGLLMKWEANEFISVGELRTVLNEIK

SEQ ID NO: 365 - protein, 542 aa, unidentified
  source 1..542: note = Related to JACVCG010000003.1; note = Brevundimonas sp.
MVDITLVPPRQSLRDITTTRELAALMGVSYSREFAYILYRFPPTGRYRSFNIAKKSGGDRQINAPIRLLKKLQRRLVPLLAEIYDAPPCVRGFQGGQSILTNASDHVGQRYVLNLDLNDFFPSIHFKRVSGILQTRRYSLSRDVAVAIAQIACHGGQLPIGAPTSGILANMVCGPLDSSLLRLAKAHKLRYTRYADDITFSTSNSRHLNEATGIHVGDRFVIRGTEELSDSFHALFTQNGFSLNPNKAVLMSRRVRQSVTGLTVNRKTNVSKEFYRNLKSSINAIENYGYEAAQSVYIDRFRKPNESLQLRENLLGRLAFLGHVLNYSERYNKLARRTARLFEERSIPRPRDDREKAIYVLTNEQDLMMGTAFHTGGGKFLTAAHIFADRPGVLRCELACPPHYPEQITAVVSHIDRERDIALVRATGTFDLSRHSIPTDGKSVRIGDDVFACGFPQYEDGNSISTISTRITAERYISGNQRLEVDRPLSHGSSGGPVFSRDGFLVGQINTGPRIGEDYSPMSYTITPFRPHADLVATWLAA

SEQ ID NO: 366 - protein, 527 aa, unidentified
  source 1..527: note = Related to NZ_LR732816.1; note = Brevundimonas sp.
MRQLALLLNVDYGKTLSFALYRANQTSAYRAFSIPKRDGSERIITAPKRARKSLQQSLLPLLEQLYDPAPCVHGAVKGRSVKTNAAPHVARRYILNVDIDDFFPTIHFKRVVGILSSSRYGVHPTVATAVAQICCHQGRLPTGAPTSPILANMVCGKLDSALLRLAKKNKLRYTRYYDDITLSSSTSGHLTAATGIDLSSDHIAHGADRLSDEFKDIFTNNGFSINSKKVWGTTRKVRQQVTGLVVNKKHNVPIAFVRSTRAMIHSIEKMGIKSAQEKFLRSRKDNDSLDLESHISGRLAYIGYITDYGLRYTTLAKRFMAVSQGTKLPLPLLERERSVYVAVSKPGNEQATAFHVGHGFFVTAAHLVDPNKKPIFILVHSPDYYESPIATKIVHINYATDVALLKNVGAVAVNDRPAIKLTSRQSSRGDQVEAYGFENYIPGNKLGVVKTEISSVRQLDGQTRHSVSAPWPHGMSGGPVFDTQGVFLGIVFSGPLYGEKISPYGTAFTPSNLFAAELEQWLIDQAS

SEQ ID NO: 367 - protein, 569 aa, unidentified
  source 1..569: note = Related to JAIQXU010000019.1; note = Deinococcus sp.
MQTKDDLANALGISKSKLTYFAYAVSDKRKYVSFYVKKRSGGKRVIHAPNRGLKAIQRSLAILLSEIYQPSNPHCNHGFGRNRDIITNAQSHIGRRYLFKCDLKDFYPSINGARIFGVLTAAPFNFSDEVAHLIAMLSTKDGALPQGAPTSPVLSNIIIRKLDRKMMNFAKSSGGLYTRYADDITISYRTISMTRSAIDSDGNISDRLRHIIEHEDFTLNESKTRLLTKRNRQIVTGVVINEKLNVKRGYIRDLRNLIYILVRYGESDAVNAYNKHHLFDKSAKDIKRVIEGRIKFLERVRGREDAVVLKLIGMYQQHDKGFRTDKAPPYDDNKIETFKVRLLAEGKTDYKHLQIAFEFFAESNLYPSLDLNLEPHPDIEGIKHLEAHVKVLEKVTLEHLHIAIYDSDDKTINERYANGPKQLGSDLYGFTLPRPGHLPADQPFCIEMLYTPKDLTTPDENGRRIFLIDEFDRNTNHHKQDKRITTNNKSWDKLIIDDKVFRLDENHNIESINLSKAAFASFIEKRKTAGDPPDLHAFKAIFDMIDKIARTYYGKNTSELGEKIDIIKT

SEQ ID NO: 368 - protein, 555 aa, unidentified
  source 1..555: note = Related to LIYN02000006.1; note = Deinococcus sp.
MKTTKELAQHLGIELKTLMFYAFALPDTKKYYHFEIKKRNGDSRRIDAPIITIKNIQSSLSLLLQNEYEKSAPKSVYGFRPGRGIIKNASAHLNKRVTIKVDLKDYFNSITGGMIVETLTSRPFGMDKQVARVIAGLCTIGGRLPQGAPTSPVLANIITRTLDIKLISFAHKTRGTYTRYADDLTFSYSHENTARQCAIYSEDGIVLNAEIIKHIESKGFTVNSNKLRYKKSTSRQMVTGIITNNKIPGLPREYIRETKLLIHILLKYGEKEAAEAYRRKYAQNRYGHRNNLDISAIVRGRLEYIKSVKGVKSSAYCKLALRYKAFNPQYKFEEEEQAVFNPEEIIILCEGKTDYKHLSAALAHFQRNGQFNSLKLDLTDKERGGYDGLQKQIDALLKVKLRQKHIAIFDADVPSISKKYYDPNDLYKVHENLFVIITPRPDHVESGENFCIEMLYKDKDLKRVSSEGRRIFLSNEFDAKTSKHKKEPYYVQDRIKDKLIVESPVYRFTDEGESLNYCRSKDDFAKEIEACHMTQPIDFSGFLPLFKKIYEVHSS

SEQ ID NO: 369 - protein, 409 aa, unidentified
  source 1..409: note = Related to VXRZ01000402.1; note = Rhodothermaceae bacterium
MVFSPSRPAEGSNSFMSPCITVYHDGIGSESPRRFGKFYPKVVEAVARTLHVMPKVAPCLRPQWADIPNQRFSQTIKSLSSVQDLARFWDLPVKQLNYHAYHATDASEYHNFSITRRNGRKRKISAPNRSLKYIQRIIHETLSKLYWPDTTVHGFVSQRSTITNAKTHLARKYVLNADLKDFFQTITRPRIIARLKVAPYELQPPVAVLIGFLATDGDGQLPQGSPCSPVIANIMAASMDTQLKELCKKLRCTYTRYADDLTISTDCEPFPPEIARYPSAAGTVQVVLGDSFLDIIENNGFQINHMKSRLQNHWTRQICTGLVVNREKLSLPRSYKRRLRALIHNWKSLGWEKAAKRMHEKEYRPLFHNRDRFVHHVYGRINYMRMIYGVDYIGAKKLLSALEEIPKDQ

SEQ ID NO: 370 - protein, 355 aa, unidentified
  source 1..355: note = Related to NZ_AUGK01000007.1; note = Adlercreutzia mucosicola
MTTGSSSIFTPNIFSVNSCAKLASLLNTTESRLESLVDQAGNYRSFRIPKKDGTTRLIQAPQNELKKIQSQLSEMLLCAWEPSPFSYGFLHSRSIVSNAREHLGKRWVLNVDLKDFFPSITSQQIKKALVSAPCDMKPEVADLIARIACNNNTLPQGSPSSPILSDIVASPLDDSLASLAQSRDCTYSRYADDITISTSQNLFPVEIARPIGRQIVLGAPIKDPIIRHGFKINMRKVSLNSNSHHQEVTGVVVNEKTNVRRQYISQLRSILYNCLESGVYPQALRYIKRNRHKTPAAVIERMDDIAYIEHWFSMVLKGKVEYIRMVKGNDSPTFFMMADRYNSVFGSTFNIPPKS

SEQ ID NO: 371 - protein, 366 aa, unidentified
  source 1..366: note = Related to DPRH01000152.1; note = Flavobacteriales bacterium
MEEHLSTHLRTGQDVQTLTRFLNAMLLRRAEKDGWTPWRWQERQIDAMLTDPSWFYRSFTIPKKSGGLRHIDAPKRTLKLVQWALVPLFSEMFTPSSQVYGFVKGRGIVDNASVHLGQSAVLNVDIQGFFPSVSRARIEAILKDGPVLRLSEYMARSIARLCTLHGGLPQGSPASAVLTNLVTVRLDARLAGLAEQFGCRYSRYVDDITLSASSRAALDRALPKLEMILLSEGFALNTNKTRIQTLSMRREVTGLVLSGERIGVPAVNVPRPYRRQVRAMLHHWRKHGISEAAARNGFDGDHGVRPDLAFVRQLQGRIAHLRHVNPTPEVERFYTDLSDLLVSEGFRTSPDTDLECCADLESAKAI

SEQ ID NO: 372 - protein, 321 aa, unidentified
  source 1..321: note = Related to DNBY01000055.1; note = Flavobacteriales bacterium
MTPFEEVTQFINDGLSVLKEAAPKKHREVFEVSLDQVFGVFKNLDTSYIAFEIPKKSGEMRQIEAPNRKLKWMQKGLKAQLETLFEAEPGAHGFVPERSIQSNAGVHVGQRYVLNLDIAGFFPSVKRGRVQTVLQLEPIGLSKPAARILAQFCTRNRALPQGAPTSPTLTNLVCMRLDRKLEKLARHYRCRYSRYADDITISGPSKDLMYHLLKRITLILKTEGFEVQESKTRILPTSQRQEVTGLSVHAFVNSPRTYRRHLRATLHTWQSRGMETAMEALQITDKAQFIAVIRGRLQHAQHTNNTAEVQRMRATFHQLIA

SEQ ID NO: 373 - protein, 554 aa, unidentified
  source 1..554: note = Related to PABJ01000186.1; note = Ectothiorhodospiraceae bacterium
MSLNKCNTLSDLALHLGISTSRLRWLLYHKQSDLYDSFQIPKHNGVSRTIDAPCMSLKDVQNRILNSLATYYKPPRCAHGFIDSKSIITNAKLHVRKKLILRIDLEDYFPSIHIGRIQGLLKKGLGCNPTISWAISRLCTLDSVLPQGAPTSPLIANMITKRLDHQLASFASSYSCRYTRYADDITISTTKKAFPRRILKRSELSRLDIEDLADEMIAIITENGFHINESKLRLYHCNQRQTVTGLTVNQKVNLPRKREKQVRAMIHDWETNGLSNAAKKYISRYDYKKRPDNTSSGLLFKKVVLGRLSYIRMIKGPDDWIVQKYAHRLSLLDSEFFEQYESKWKVIVRAFQAIECIRLIEVEYSKNGVEYYSQGTGVYIKNIGLLTCYHVLDPDFTGTTSSNIDVSLVQEKLISGKLIYSKKELGAGVLLKADKDCDLALLKVDNDRPNSITLSSNDPILGESIITLGYPNYTPGRSAHVQNTSIGSQKMYMGKTHFTISDDIFKGMSGGPVLNSNYQLVGLMIVGNEITCTKYKRSESSFIVLSHIVEFLRK

SEQ ID NO: 374 - protein, 546 aa, unidentified
  source 1..546: note = Related to SZVX01000028.1; note = Dickeya sp.
MGWVVSLHDKLLILGLTNTIKGVKDPIPDLPRMEPEPYKAGKKLKWDNKKLENHSQASKEEIIDICEKIINKDIVITSANDVANILEVPVGQLLYILYHKKGNYRQFDIEKKGGGSRTISAPQGGMAILQEKLKPIIEYFYRPKKSAHGFIIGKSIYTNAANHTKKRYVVNIDLEGYFDSVTFARVYGIFKSKPFNFSHPAASVLAQLCTRDGILPQGACTSPALANLASTSLDKQLTQLARRKNITYTRYADDITFSFNQEQIKDIITLGDEDEFELSETVISIIERCGFKVNLRKFRVQEKNVCQKVTGLVVNEKVNIDRKYLRVTRSMIHKWREDKLKASLIFFAAKGLETINNEHAISIFRNHIYGRLSFIKMIRGDDFPLYLKLMAQMSHNDPRKTKEGLRAMRVTENYDVFICHASEDKDTIAIPIYDALVALNISAFIDHVEIKWGDSLIEKINSALVKSKYVMAILSASSVNKDWPRKELNSVLAREISEGKVKLLTLVKKEDEEIVASVLPLLQDKLYMSYENNPQDVAENIKSLLE

SEQ ID NO: 375 - protein, 535 aa, unidentified
  source 1..535: note = Related to CP055010.1; note = Klebsiella quasipneumoniae
MLRLATANKQATDQVPDLPKMEPEPYKTGGRIKWNNKKLKNNSQTPNEDIIKICQKIENKSIIITSANDIANVLEVPVGQLLYILYDKKDNYRQFEIEKKNGKSRIINAPQGGLAILQEKLKPIIEHFYRPKKPAHGFIKGKSIYTNALNHTKKKYVVNIDLEDYFGSVTFARVYGIFKSKPFNFSHPAASIAAQICTKEGKLPQGACTSPVLANLASAALDKQLTQLARRKNITYTRYADDITFSFNQRQVKEIITLDEENNFELGETIISVIEKNGFKINTQKFRVQKRNESQKVTGLVVNDKVNVERKYLRVTRSMIHKWREDKLKASLLFASKKGIKTNSNEHAISVFRNHIYGRLSFIRMIRGGDFPLYLKLMAEMSHNDPVKTKEGLRTMKVTETYDVFICHASEDKATIAIPIYDELNKLNISAFIDHVEIKWGDSLIEKINSALVKSKYVIAILSANSVDKEWPKKELNAVLAREIAEGDVKLLTLVKEEDEKIVAESLPLLRDKLYMAYTDNASEVAARVHALLDR

SEQ ID NO: 376 - protein, 535 aa, Enterobacter sp.
  source 1..535: note = Related to CP012871.1
MLSLSSANKEENETIPELPKLEPQPYQAGKNLKWGNKELKNHPITSKIDINVICKKIENKSIVITSANDVANLLEVPVGQLLFILYNKKDNYRTFEIKKKNGKSRIINAPQGGLSILQEKLKPVIEYFYRPKKPAHGFIKNKSILTNAEKHTKKKYVVNVDLENYFGSVTFARVYGIFKSKPFNFSHPAASILAQLCTKDGKLPQGACTSPILANLASASLDKHLTQLARRKNITYTRYADDITFSFNQQQVREIITLDNENNFELGEAVISVIEKSGFSINTSKFRVQKRNERQKVTGLVVNEKANVERKYLRVTRSLVHKWREDKLTSALLFVTKKGFKATNNEHAISIFRNHIYGRLSFIKMIRGDDFPLYLKLMAEMSHHDPLKTKEGLRAMRETETYDVFICHASEDKISIAIPIYEELTELNISTFIDHVEINWGDSLIQKINSALVKSKYVIAILSANSVDKHWPKKELHSVLAREIAEGEVKLLTLVKEADEAIVAASLPLLSDKLYITYKDNPAEVADKVRALLNK

SEQ ID NO: 377 - protein, 535 aa, unidentified
  source 1..535: note = Related to PDDV01000006.1; note = Edwardsiella tarda
MLNLTTTNKEAKGLAPQLPNVEPNPNTIGKSVTWENKKLKNYPIASESDIRTICSKIENGSISITSTTDVANLLEVPIGQLLYILYQKKDNYKSFKITKKNGGVRIIDAPCGSLSILQEKLKPIIEYFYRPKKSAHGFIKNKSILTNAEKHIKKKYVINIDLEDYFGSVTFARVYGIFKSKPFNFSHSAASILAQLCTKDGKLPQGACTSPVLANLASASLDKHLTQLAQKKQITYTRYADDITFSFKQKQVRDIIIKNKENDFELSKTIVDIVERNGFKINFNKFRVQKKSERQKVTGLVVNKKVNIERSYLRVTRSMIHKWRTNRSESASLFSIQKGYTSKNKDEEISIFRNHIYGRLSFIRMIRGNDFPAYLKLMAEMSHHDTVKTREGLRAMKETETYDVFICHASEDKESIATPIYNELVKLNIATFIDHIEIKWGDSLVDKINSSLVKSKYVIAILSTNSIRKHWPRKELHSVLSREINDNKVKLLPLIKKDDTGIVLSELPLLCDKLYVTYDNNPEEIANMIQSRLGK

SEQ ID NO: 378 - protein, 547 aa, Citrobacter sp.
  source 1..547: note = Related to LR134204.1; note = Citrobacter koseri
MSLHIKILLNNLTSTNHADLLPNLPQVEPQPNLSPSKTEWDNKKLSNRSLLTDDERNKILSGIENSKIIISSPTDVANLLEVPTGQLLYILYKRKNNYRSFIVKKKNGKNRIINSPYSGLAILQQRFKLILDYFYRPKKSAHGFIKDKSIISNAEKHIKKKYVVNLDLEDYFGTITFPRIYGIFKSRPFNFSHPAATVLAQLCTHEGKLPQGACTSPVLANLVSASLDKQLTQLAKRKNITYTRYADDITFSFKQNGINEVIKLSEDEKYEIGDQLISIIEKNGFKINQDKFRVQKRNNKQVVTGLTVNDKVNINKKYIRLTRSMIHKWSQDKTTAALMYTATHGIKTRDNDHAISIFRNHIYGRLSFIRMIRGKNFSTYLKLMSRMSHSDPKKTNEGRRAMSETETYDIFICHASEDKELIAIPLYKALCDKNIPTFIDHVEIAWGDSLIDKINNALAKAKYVVAILSENSVEKKWPKKELNSVLAREISNGKVKLLTLVKKEDEEAIADKIPLTHDKRYMVYDDNADFIADEVRKMLDNQASINQ

SEQ ID NO: 379 - protein, 534 aa, Escherichia coli
  source 1..534: note = Related to CP057087.1
MHNFALANKKSPDFISELPQIEPKPYSNGHKIKWINHTLTSTEVTPPDNLIKICILIESGEIAITSVSDIANLLGVPAGQLLYILYRKKDNYRTFEIEKKNGKKRVINAPCGGLSILQTRLKPVLEYFYRPKKSAHGFIKGKSIITNAGMHIKKKFVVNIDLENYFESISFARVYGIFKSKPFNFSHPAATVLAQLCTHNGKLPQGACTSPILANIASASLDKQLTQFAGRKKISYSRYADDITFSFNQRNIDIIKKNDDGSYSLSETIDNIISKNGFKINYDKFRVQTRNTRQSVTGLVVNDKVNINRRYIRITRSMIHRWTDDKLKYALLFATEKGYQAKDNNHAIQIFRNHIYGRLSFIKMVRGKDYPGYLKLMSYMSHNDPLKTQEGLRAMKETENFDVFICHASEDKKDIAIPIYDELTKLKISAFIDHVEIKWGDSLIEKINAALVKSKYVIAILSANSVNKEWPQKELRAVLASEISSGDVKLLTLLKKEDKEVVNLSLPLLSDKFYMVYDNNPEVVANNIKSLLQR

SEQ ID NO: 380 - protein, 543 aa, unidentified
  source 1..543: note = Related to NZ_CAKLOR010000001.1; note = Klebsiella variicola
MSLHDKLLMHNLALANKENADVISELPQVEPTPYKNGNKVKWRNKKLNNKAAIEPDSLMKICMLIESGKLLITSVSDVANLLEIPVGQLLYILYRKKDNYRTFEIEKKSGKKRIINAPVGGLSILQTKLKPVIEYFYRPKKSAHGFIKGKSIITNANMHIKKKYVVNVDLENYFESITFARVYGIFKSKPFNFGHPAATVLAQLCTHNGKLPQGACTSPILANLASTSLDKQLTQLAGRKKISYSRYADDITFSFNQEKVIDIIERSEDGSYIIGETIDNIISKNGFKINHEKFRVQTKNTRQSVTGLVVNEKVNIDRKFIRITRSMIHRWKEDKVKYALLFTTEKGYQTEDNNQAIEIFRNHIYGRLSFIKMVRGGDYPGYLKLMSYMSYNDPSKTKEGVRAMKETENFDVFICHASEDKEDIAMPIYEELSKMKISAFIDHVEIHWGDSLIEKINSALVKSKYVIAILSADSVNKEWPQKELRAVLASEISEGKTKLLTLVKKNDEEIVTKALPLLQDKLYMVYDNNPDMVAESIKKRLQS

SEQ ID NO: 381 - protein, 535 aa, Proteus sp.
  source 1..535: note = Related to CP063440.1; note = Proteus mirabilis
MYNLVSVNKKNQDIVPELPQVEPVPYKNGNKIKWRNKKLKNKTITNCENLIKICKLIESNEILITSSNDIANLLEIPIGQLLYILYHKKDNYRTFEIEKKSGKKRIINAPNGGVAILQGRLKPIIEYFYRPKKSAHGFIKGKSIITNASMHTKKKFVVNIDLENYFESITFARVYGIFKKKPFNFAHPAATILAQLCTHNGKLPQGACTSPILANLASTSLDKQLTQLASRKNISYSRYADDITFSFNQSNVFNIIVKNNKGNYEVSENIDSIISKNGFKINHEKFRIQTKNTRQSVTGLVVNEKVNIDRKYIRITRSMIHRWKVDKVKYALLFTIEKEYQTKDNNQAIEIFRNHIYGRLSFIKMVRGENYPGYLKLMSYMSHNDPLKTKEGLRAMKETENFDVFICHASEDKNDIAIPVFNQLDRINISAFIDHVQIKWGDSLVEKINSALVKSKYVIAILSANSVNKEWPQKELRAVLASEISDGNIKLLTLIKKDDEEIVKTALPLLRDKYYMVYNENPEVIADKIRELLHR

SEQ ID NO: 382 - protein, 535 aa, unidentified
  source 1..535: note = Related to CP082141.1; note = Erwinia persicina
MHSLTFANKENPDSIPEIPQVEPEPYKDGKNVKWRNKKLKNKSTIDHESLINLCKLIESGSIVITSASDIANLLEIPVGQLLYILYHKKDNYRTFEIEKKNGKKRIINAPNGGVSILQEKVKPIIEYFYRPKKSAHGFIKERSIITNAFMHTKKKFVVNIDIENYFDSITFARVYGIFKSKPFNFAHPAATVLAQLCTHNGKLPQGACTSPILANLASTSLDKQLTQLAGRKSISYSRYADDITFSFNQKKVPDIIEQNDDGSYEISEALEGIILRNGFRVNSDKFRVQTKNTRQSVTGLVVNDKVNVDRKYIRITRSMIHRWKYDKVKYSLLFTTEKGYKTKDNKQAMDIFRNHIYGRLSFIKMVRGKDYPGYLKLMSYMSHNDPLKTKEGLRAMKETENFDVFICHASEDKEDIATPVYDELTKINISAFIDHVEIKWGDSLIEKINSALVKSKYVIAILSASSVNKEWPQKELRAVLASEISDGDVKLLTLVKKDDEEIVKTALPLLRDKLYMVYEENPEVVADRVRTLLHR

SEQ ID NO: 383 - protein, 550 aa, unidentified
  source 1..550: note = Related to CP065673.1; note = Serratia plymuthica
MQLRKQIIAFNEKCRAEGLDEDRLIPLLKDTEPSSVKVGNTVIWNNSFKGNVFSLTEQEVSKVCAAISRGDVNIESVQDVANLLEVPVGNLIHLLYRSSSIKYKSFTIPKKNGGERIILSPQGGIKILQERARKYLDAFYRPKISAHGFILNKGIFTNAEKHVKKKYVLNIDLKDFFESITFPRIYGVLKKHPFNMGRPAAAVLAQLCVHNGKMPQGAPTSPVLSNIIASALDKTLVRLAGKYRMRYTRYADDITFSFNQSPPLDIAKKIEDTGGYELGDSLRHAIENNGFKINEEKFRLQLKTERQVVTGLTVNEKVNLDRKYIRLTRAMIDGWGKDKVQAANKYHKIRYGKCDKNDEFAVESFRNHIYGRLSFIRMIRGAEWPLYLKLSAWMSSNDDNPTIEGRRAMKAMEMFDVFLCHASEDKESIVMPIYDELCKLHIHAFVDTKYIEWGDSLTEKINGALARSKFVVAVLSSNSVEKRWPLKELHSVLAREIAEGDKKLLTLVKDGDEELIKAKLPLLADKLYAVYKGDPIEIAHGLSSLLTGKK

SEQ ID NO: 384 - protein, 543 aa, unidentified
  source 1..543: note = Related to CP065717.1; note = Serratia rubidaea
MAFNSKCKKEGLDEEQFLPLLNDNEPSSVKVGNSFLWDNRANRNAFSLTERDISKLCVAISKGDINITEVQDVANLLEVPVGNLIYLLYRTSSVKYKEFTIPKKNGDERKILSPQGGVKILQERAKKYFDAFYRPKISAHGFILNKGILTNAEKHVKKKYVLNVDLKDFFESITFPRIYGVLKKHPFNMGHPAATVLAQLCVHNGKMPQGAPTSPVLSNIIASALDKTLVRLAGKYRMRYTRYADDITFSFNQSPPSEIAKKIENTDGYELGDSLRHAIENNGFKINEDKFRLQSKTERQVVTGLTVNEKVNLERKYIRLTRAMIHGWGKDKVTAAKKYHKTRYGNFDKDDNYLVANFRDHIYGRLSFIRMIRGAEWPLYLKLSAWMASNDDNPTTEGRRAMRAMEMFDVFLCHASEDKNDIVIPIYDELCKLDVHAFVDNKYIRWGDSLTEKINSALARSKFVVAVLSRNSVEKEWPLKELNSVLAREIADGDKKLLTLLKEGDEELIQAKLPLLADKLYAVYTGDPIKVAQDLKALLSDGE

SEQ ID NO: 385 - protein, 550 aa, unidentified
  source 1..550: note = Related to HG427573.1; note = Xenorhabdus bovienii
MGLREKIASFNNELNYGVDYKDSLIPLLKNNEPLAIHMGNKVLWNNFFKKNEFSLTDIDVYKITTAISKKNIYIISPQDVAALLEVPVGNLLYLLYKSNSNKYREFTIPKKNGDKRTILSPQGGVKILQERAKKYLDAFYRPKASAHGFILNKSIFTNAEKHVKKKYVLNVDIKDFFESITFPRIYGVLKKHPFNMGNSAAAVFAQLCVHEGRLPQGAPTSPVVSNIIASSLDKTLVRLARKYKMSYTRYADDITFSFNQYPPVGIARKIDGTNDFELGDSLRNAIESNGFKINNSKFRLQSRAEKQVVTGLTVNEKVNINRDYIRTTRAMIDGWGKDRFQAAKKYHKIRYGKCDKSNQSAIISLRNHIYGRLSFIRMIRGAEWPLYLKLISRMANNDDSPTVEGKRAMKIMEMFDVFLCHASEDKDDIVEPLYEELVNLRVNAFLDTKYIKWGDSLIEKINGALAKSKFVIAVLSRNSVEKKWPLKELNSVLAREITGEDKKLLILVKDGDEELIKDKFPLLVDKLYLVYKNNPEIIAGELLSLLAGKQ

SEQ ID NO: 386 - protein, 546 aa, unidentified
  source 1..546: note = Related to QRAU01000016.1; note = Serratia fonticola
MLLKQQIIAANFIRGESGKAFLPTLLYVEPKSIKTGSKYKWMNPRSIRAYSLSENDIHSLLSAVLTGEIEIKTANHVAEILEIPVGQLIYILYKKTTENYVEFEVKKKMGGVRKIYSPQGSVKIIQNRVKKILDFFYRPKAAAHGFIKEKSIKTNAKKHIGKKYVLNIDLSNFFESITFARIYGVFKARPFNFGHDAASILAHACTYNGVLPQGAPTSPTLSNIVAASLDKKLVTLARRFKIQYTRYADDITFSFNQKPPEDLVKVLDGEGLCEVGDLLNEVIESCGFKVNSKKTRLQSKTQRQEVTGLVVNNKVNVNRDYIRITRSMIHGWCKDRAFSARKHFNITDECSVEKEKNIIESFRNHIYGRLSFIRMIRGVDFPCYLKLMAYMSHNDPKQTKEGKRAMKETETYDIFICHASEDKDEIAVPVYDELNNLSIVTFIDHLSIKWGDSLVDKINNALAKSKYVIAILSKNSVEKNWPIRELNSVLAREIKGGKVKLLTLIKASDEEYVQDKLPLLADKLYMVYNGNPAEVASRVRDLLGHP

SEQ ID NO: 387 - protein, 544 aa, unidentified
  source 1..544: note = Related to NZ_CABHYS010000030.1; note = Yersinia mollaretii
MLLKQQIITENFIRDENGKSLLPAPSYVEPKSIKSGNKYRWINPKSIRKYSLSESEIHSLLSAILTGELKINTVNHVAEILEIPVGHLIYILYKKISSNYVEFEIPKKMGGVRKIKAPHGSIKIIQGRVKTILDFFYRPKTAAHGFIKGKSIKSNAKKHIGKKYVLNIDLSNFFETITFARVYGVFKSRPFNFGHDAASVLAQACTYNGVLPQGAPTSPALSNIIAASLDKKLVTLARKFKIQYTRYADDITFSFNQKPPEDLVKVIDGGALCEIGDLLNEIIESCGFKVNLKKLRLQSRTQRQEVTGLIVNNKVNVSRDYIRITRAMIHGWCRDSTLAARKHFNITDGQGEDKSLVNSFRNHIYGRLSFIKMIRGAEFPCYLKLMAYMSHNDPKQTKEGKRAMQETETYDVFICHASEDKTEIAIPVYEELSKLGIVTFIDHLSIKWGDSLVEKINNALVKSKFVIAILSENSVEKKWPIKELNSVLSREVKGGKVKLLTLIRDSDEEYVQEKLPLLSDKLYMVYKGNPVDIASKVEDLLRNS

SEQ ID NO: 388 - protein, 528 aa, unidentified
  source 1..528: note = Related to LKDX01000002.1; note = Pseudoalteromonas sp.
MLTFNKLQFRLQATEPTRLYNNYWVKWLNPSLSPTLSRNIETSRELILGLQSSNDVANLLEIPVGQLLYILYTLEPKYKSFTVTKKSGKKRLIDSPNESIKILQDKVRPLIEAHYRVKKPVHGFVGGGKGIVTNAMQHKKKNYVLNIDLSDFFHSVNFGRVQGIFRNAPFNMGSAAATVLAQLCTHNKCLPQGASTSPVLSNLAASTLDRKLVQLAKKFHLTYTRYADDITFSSNKPFSGKIVENRKEESGLETHRVGKLLEQIITDSGFQVNHTKTRLQYKSQRQEVTGLVVNEGVNVNRKFIRKTRAMIHEWSNDLISAEARFIMQRYNVSDSEVGNDRDGSIFKRAVYGNLSFIKMVKGEEHSPYLNLCRKVLELDNEPPSFISKLKDVLDMYDVFICHARENKNEVAIPLYEALKSKGINTFIDSSAINWGDSLVSKINTALQKAKYVIAIISDDSLNKSWPMHELRSVLSTEIRSGEIKLLPLMVGDADALISQIPLLADKRFIHFEDNIDDVVEEIQKLLKD

SEQ ID NO: 389 - protein, 330 aa, unidentified
  source 1..330: note = Related to NZ_BLPI01000001.1; note = Agarivorans litoreus
MSNLAATSLDKKLVQIAKKFHLTYTRYADDLTFSSNKPFPSILVERKTQDNGQDKHRVGKLLEQVIKDAGFEISHDKTRLQHKSQRQEVTGLVVNEGVNVNRKFVRKTRAMINEWGKDLRAAEIRFIKHRYHVTDSEINMENLDGSIYKRAIYGNLSFIKMVKGEEHSPYLNLCKKVLELESNPPEFIKKLKGVFDMYDIFICHASENKSDVALPLHAALAERGINAFVDCFEIKWGDSLVAKINTALQKSKYVIAVISEESVKKSWPMKELNAVLSSEIGSEQTKLLPLMVGDDESLLKQLPLLGDKLFVNFDDNIEEIAGKVDSLLRG

SEQ ID NO: 390 - protein, 531 aa, Vibrio sp.
  source 1..531: note = Related to CP009984.1; note = Vibrio vulnificus
MSTPLGSLLFNLESFEPEKIPNKKTYSWKNPKLSPTLTRDLEVAKTHFVGLQTDNDVANILEIPVGQLLHILYYQKQNYNSFTIKKKSGKTRLIDSPKASIKILQDKVKPLIEAHYRVKKPVHGFVGDGKGIITNAFQHRKKNYVLNIDLQDFFHSVNFGRVQGIFRNTPFNMGIPAATVLAQLCTHNGRLPQGASTSPVISNLASTSLDKKLVQIAKKFHLTYTRYADDLTFSSNKPFPTILVEREIDENGKEIHKVGRLLEQAIKDSGFEVSHHKTRLQHKSQRQEVTGLVVNEGVNVNRKFIRKTRAMINDWSKGLAQAEIRFLKQRYHLTDSEIKTDGLDGSIFKRAVYGHLSFIRMVKGEEHSPYLKLCEQVLALDSKPPEFIRKLKGVFDMYDVFICHASEDKAEVALPLYDALAKREIKAFIDCFAIDWGDSLVSKINTALKKSKYVIAVVSDESVKKSWPMKELNTVLAAEISSEETKLLPLMVGDGEELLKEIPLLGDKLFVNFNDNIDEIADKVEKLLQRS

SEQ ID NO: 391 - protein, 436 aa, Aeromonas salmonicida
  source 1..436: note = Related to NZ_CP051883.1
MQEKIKPLIEAHYRVKKPVHGFVGGGKGIVSNAEQHKKKDYVLNIDLQDFFHSINFGRVQGIFKNTPFNMATPAASVLAQLCTHNGRLPQGACTSPVISNLAATSLDKKLVQIAKKFHLTYTRYADDLTFSSNKPLPSILVEKIAEDNGQYKYKVGRIIEQAIIDSGFNINHNKTRLQHKSQRQEVTGLVVNEGVNIDRRFIRKTRAMINEWRKNLLEAEIRFIKKRYNLSDSEIKNRKLNGSIYKRAIYGNLSFIKMIKGEEHSPYLTLCKQVLELDNNPPYFVRKLKGIFDMYDIFICHASEDKDKVAIPLYDELIKRDINTFIDCFAIKWGDSLVSKINTALKKSKFVIAVISDSSVKKSWPMKELHAVLSSEIGSEETKLLPLMVGDGEALLKELPLLADKLFVAFDNNIEEIADKVETLLKKYNLYDISQR

SEQ ID NO: 392 - protein, 531 aa, unidentified
  source 1..531: note = Related to NZ_CP033065.1; note = Pseudoalteromonas agarivorans
MTKLMDFLSFHSNAFEPTKSSKNAGYTWINPSLTPHLTRELDFVQRQFLGLQSDNDVANILEIPVGQLLYILYSQKDTYVNFTVKKKSGENRNIESPCSSIKILQDKVRPLIEAHYRVKKPVHGFVGNGKGIISNAEQHKKKTYVLNIDLKDFFHSVNFGRVQGIFKNIPFNMGTPAATVLAQLCTHKRRLPQGASTSPVLSNLASTTLDKKLTKIAKKFYLTYTRYADDITFSSNEPFSQALLEKDKLDDGQYIYRVGNVLEAAVISSGFSINHKKTRLQHKSQRQEVTGLVVNKGVNINRKFIRKTRAMINEWDKNLIEAEKRFIKVRYHAQETEIDMSKLDGSIYKRAVYGNLSFIRMVRGEDHSPYLTLCKKVLELDHNPPAFINKLKGIFEMYDVFICHASEDKESVALPLYESLEKRNINAFIDCFAINWGDSLVAKINTALQKSKYVIAIISEDSVKKSWPMKELNAVLSAEIAADKTRLLPLMVGDGEALVRQLPLLADKLFVGYKDNIEEITDMIESLLTEK

SEQ ID NO: 393 - protein, 529 aa, Vibrio sp.
  source 1..529: note = Related to VFNK01000001.1; note = Vibrio crassostreae
MATTFSSLSFYLVSFEPKKVPYKKSIVWKNPNLSSTLTRDANVAKEKFIGLKTDNDVANILEVPVGQLLHILYSQKQNYDSFVIKKKSGKSRIIESPKTSVRILQNKVRPLIEAHYRVKKPVHGFVGGGKSIVSNAEQHKKKNYVLNIDLVDFFHSVNFGRVQGIFRNTPFNMGIPAATVLAQLCTHNGRLPQGASTSPVLSNLASTTLDKKLVQIAKKFHLKYTRYADDLTFSSNKPFSSILVDKEIQEDGQYKYKAGRVIEQAIKESGFSINHNKTRLQHKSQRQEVTGLVVNDGVNINRKFIRKTRAMINGWRQDLLEAERRFIKIRYHAAESDIDASKLDGSIFKRAVYGNLSFIKMVKGEEHSPYLTLCKQVLALDNNPPEFVKKLKGVFDMYDIFICHASEDKAEVAIPLYNSLKERDINTFIDCYGLMWGDSLVAKINTALQKSKYVIAIISEDSVKKTWPMKELNAVLSAEIGSEETKLLPLMVGDGEALLEQLPLLRDKLFVSYDDNIEEIVGKVEALLI

SEQ ID NO: 394 - protein, 527 aa, unidentified
  source 1..527: note = Related to NZ_PNCO02000001.1; note = Pseudoalteromonas galatheae
MNQANFVFRDFEPKKFSYSGNQYWVNPSLSHELAGDIDNAIQQFIGLKTSADLASILEVPVGQLLHILYAQNNQYTSFEVKKKSGKSRLIESPRNSIRILQNKVRPLIEAHYRVKKPVHGFVGGGKGIVSNAEQHKKKNYLLNIDLQDFFHSVNFGRVQGIFRNTPFNMGKSAATVLAQLCTYNQRLPQGASTSPVLSNLAAASLDKKLVKIAKRHHLTYTRYADDITFSSNKPFSTMLVDREILEDGTYKYRAGKLIDQAVEDSGFKINHSKTRVQHKSQRQEVTGLVVNDGVNVNRKFIRKTRAMINEWRKDILAAEIRFIKERYHADEAEIDVSKLDGSILKRAVYGHLSFIRMVKGEEHSPYLTLCKQVLELDGNPPDFVKKLKGIFNMYDVFICHASEDKEAVATPLYESLTKLGINTFIDSEAIKWGDSLVSKINTALKKSKYVVAVISEESINKSWPMKEINAVLSLEIGEENTKLLPLMVGDGDALLKQLPLLGDKLFESFNNNAEEIARKLAERLQKS

SEQ ID NO: 395 - protein, 490 aa, unidentified
  source 1..490: note = Related to NZ_JXXX01000040.1; note = Pseudoalteromonas piscicida
MTQTNFFFGDFEPKKYSYRGNQYWVNPSLSHELTGDLDNAIQQFIGLKTSADLASVLEIPVGQLLHILYAQNNQYTSFEVKKKSGKCRLIESPRNSIRILQNKVRPLIEAHYRVKKPVHGFVGGGKGIVSNAEQHKKKNYLLNIDLQDFFHSVNFGRVQGIFRNTPFNMGKSAATVLAQLCTYNQRLPQGASTSPVLSNLAAASLDKKLVKIAKRHHLTYTRYADDITFSSNKPFSTMLVDREILEDGTYKYRAGKLIDQAVEDSGFKINHSKTRVQHKSQRQEVTGLVVNDGVNVNRKFIRKTRAMINEWRKDILAAEIRFIKERYHVDEAEIDVLKLDGNPPDFIKKLKGIFNMYDVFICHASEDKEAVATPLYESLTKLGINTFIDSEAIKWGDSLVSKINTALKKSKYVVAVISEESINKSWPMKEINAVLSLEIGEENTKLLPLMVGDGDALLKQLPLLGDKLFESFNNNAEEIALKLAERLQKN

SEQ ID NO: 396 - protein, 492 aa, Aeromonas sp.
  source 1..492: note = Related to NZ_CP023141.1; note = Aeromonas dhakensis
MNTDTSSDISVTTSFEPKRIIAYNGHQWINPKLSPTILSDQLKAAEKIIGLKEASDVANILEIPVGQLLYILYQQNKKYTSFTIKKKSGKERLIEKPNNSLQILQSKIKPLIEAHYRVKKPVHGFVSGGKGIVSNAEQHKKKNFILNIDLLDFFHSVNFGRVQGIFRNIPFNMDVPAATILAQLCTYNGRLPQGASTSPIISNLAAATLDKKLVQIAKRFHLTYTRYADDITFSSNREFPAVIVQRDVNTQDKLKYIVGPLLERAITDSGFHVNHNKTRVQHKCQRQEVTGLVVNNGVNINRQLIRNTRAMINEWRKDLQSAEIRFIKHRYHVNENDIEINKLDGSIYKRAIYGKLSFIKMVRGEDHSPYLKLCKQVLELDSNPPPFIKKLKGVFDMYDVFICHACEDKNRVAIPLYHALEKKGIKTFIDCFAIGWGDSLVGKINTALQKSKFVISIISEASIDKSWPMKEIHTVLSMEIRNTKTKLLPLIV

SEQ ID NO: 397 - protein, 525 aa, Vibrio parahaemolyticus
  source 1..525: note = Related to CP040101.1
MQQPLEFSEFEPIKFGNGDETIWGNPTLSPRLTRDHKVAETLLLNLESDNDVANLLEIPTGQLLYILYEKPKRYTIFSIKKKSGKPRLIESPNSSIRILQNKLRPLLEAQYKIKKPVHGFVGNGKSIISNAEQHKKKNYLLNIDLLDFFHSVNFGRVQGIFRNTPFNMGYKAATVLAHLCTHNKRLPQGAPTSPVLSNLASTTLDKKLVQLAKRFQLTYTRYADDITFSSNRPFPPLLVETIHLEDGTSHHRVGKALKQAVEDSGFAVNPNKTRVQHRSQRQEVTGLIVNEGVNVNRKFIRNTRAMLHSWRKDLIEAELTYLKNRYHAVDVNKSNLTGDIFKRAIYGRLSFIKMVKGQEHGPYLNLCRQALELDNNPPKSIAKLKGVFEMFDVFICHASEDKEAIALPLYDELNTLGVKTFIDKVEIQWGDSIVGKINSALQKSKFVVAIISESSIGKAWPLKELHAVLGMEIGSGDTKLLPLIVGNEEELLMQLPLIKDKAYLPYTNNCSEIAKILKDKLDTSN

SEQ ID NO: 398 - protein, 523 aa, unidentified
  source 1..523: note = Related to JACXAF010000008.1; note = Neiella sp.
MQLTLEFLDISEFEPKRIEASWSNPRLSPTLKRERDAVAQRLIGIQTDNELANLLEIPVGQLLHILYEEKKRYHEFYIKKKSGQLRVIESPNKSLKILQHKVKPLIEYHYRVKKSCHGFVGNGKGIVSNAEKHKKKQYVLNIDLKDFFHSVHFGRVRGIFMNVPFNMGNSAASVLAQLCTNHSRLPQGAPTSPVLSNLAASSLDTALTKIAKRYHLTYTRYADDITFSSNRKFPLAIVDRFETDLGKVEWRVGSLLRQSIEESGFTVNDSKTRVQHRSQRQEVTGLVVNDGVNVSRKFIRNTRAMLNSWSKDLVEAERRFLMTRYHMSESEIDSKKLDGRYFKNAIYGRLSFIKMIRGEDNSSYLTLCKKILELEPSPPKSIAKLKERFEMYDVFVCHASEDKDDVAIPLHRALEDKGIKAFIDCFEIKWGDSLVAKINTALQKSKYVVAIISQHSVNKAWPMKELNAVLSSEIDSKQTKLLPLIVGDQNALIEELPLLADKLFKVFDDDIDQIASELEMRLK

SEQ ID NO: 399 - protein, 521 aa, Aeromonas sp.
  source 1..521: note = Related to NZ_LKJS01000005.1; note = Aeromonas veronii
MMTLFRDDFQPRKTRNQFGESSWLNPKLNPYLTAGQEEVNQKLKNLNDVSDVANLLELPTGQLTYILYNKKPAYKTFGIKKKSGKVRIIDSPNNSILILQNKIKPVIESYYRVKKPVHGFVSGRSIISNAEQHKKSKYILNLDLKDFFHAVNFGRVKGIFKSTPFNFGDKAATVLAQLCTYQGRLPQGAPTSPLLSNLAATSLDRELVHLAKRFHMTYTRYADDITFSSNKKFDEQIVTFLIEKECFEVGVLLRKKIEESGFEISESKTRVSHRSQRQEVTGLTVNDKVNVPRKYIRETRAMLHSWGLGLLEAERKYLSLKKGWTSEKLNSTKLDGSYFKRAIYGRLGFIKSIQGEDSSPYLSLCKKAITLDSNPPKFIQVAKEKLDMYDVFICHASEDKEAIVFPLEKALVAKGVKVFVDSSVIKWGDSLVDKINHGLRVSKFVIAVLSPASVNKAWPKKEINAIMSMEIKAEKKKLLPLLAGSDDLINEFPLMSDKLYKKFDNNVDEIVDGLCEMLQET

SEQ ID NO: 400 - protein, 468 aa, unidentified
  source 1..468: note = Related to NZ_PVBM01000010.1; note = Neorhizobium huautlense
MKDIDDLARVLEVPKGNLVYIAYTRGLSAQYKTFEIRKKSGGTRIIHMPKGGLRVLQQKLKKIFDFLDRKPKCSHAYHKGKSFLTNAVEHKKKRFVFNMDLEEFFPSIHFGRVQGVLRAAYKMPPSVATFIAHLCCYNGSIPQGAPTSPSISNLVSNNLDKKILALAIKHHVSYTRYADDITFSYRYRNFPPAIGHFAATGQLFGPAAVGATLEQLIKDQGFQVNHKKTRLQYNHYQQSVTGVIVNQFPNVRRRKVLEVRKLIYLWRTFGLEKAETFRFEKAEGGDYFRAVLFGNLAYLKGVRGENDKIVRSFCRDILRITTKVPNWVRVAAEEFQVKDVFLSHASEDKVAVAKPLFDACQAVGISVFYDAEDIKWGDSVIEKINHGLGEAKIIVPVISETFLEKKWPVRELNVALSRFMKDKARILPIIYNIDHLDDYPLLSDFHYKKWEDNPAELVALLKERLNSI

SEQ ID NO: 401 - protein, 502 aa, unidentified
  source 1..502: note = Related to NZ_VISO01000003.1; note = Rhizobium mongolense
MNVFISSLEDPIVSLRFAHSVQDVASVLGLDPARFFYVVQNADNGSYYKQFQIPKKKGGKRDISKPVRGLALAQDRLAAILAQKYSPKQYVKGYVKGESFLTNAQYHERQRWILNIDIKDFFPSINFARVRGLFMSSYFGFNDRVATILARITTFNDGLPQGATTSPIIANLIAHNLDKKLLSIAISERLRYSRYADDITFSSNQKTVPASVIRSWEPLHGERSVELGNAIREAFRSARFEVNEEKTRILFSSERQEVTGLIVNRKANVWRGDVALLRMKLHSARVHGAQNAAKLWLKTTDNPDHFWRHIEGWLAYISQVRGRDDPVTAKLCKMAVLSGLKGAEWIEKYADMVREFDVFLSHATEDKPTVVKLKRKLESLGIKVFFDVDSIQWGDSIVEKINHGLLKSSFFVPFLSDTFSAKGWTNKELNSAIAMNINRKGRILPICEANFSIADNYPLLNETLYQRWPEDPALEAAFVTSVADQILKIVQQEKSKPNDLSD

SEQ ID NO: 402 - protein, 510 aa, unidentified
  source 1..510: note = Related to NZ_JABFCN010000062.1; note = Rhizobium sophorae
MVKSEGQALETRETPINNALLQLRMAHSVTDVAFSLGLEPSKFFYVVQNADNGRYYKEFQIPKKKGGMRHIAKPVRGLALAQDRLAAILRDKYEPKPFVKGYVKGQSFLTNARYHERQKWVLNIDIKDFFPSIGFARVRGLFMSSYFGFNDRVATILARITTFKDGLPQGATTSPVIANIVAHNLDKKLLAIAVKERLRYSRYADDITFSSSQKAVPPSVVRGWEPMHGPRTVDLGGAVLEAFRSARFEINDEKTRILLASERQEVTGLIVNRGANVWRRDISLLRMKLHSARVHGPEKAAKLWLKTTESPVHFWQHIEGWLSYISQVRGGDDPVTAKLCKMAVLSGFKGTTWIEAYAEMVREFDVFLSHASEDKPKVRILKNKLEYYGIKVFFDADSIEWGDTIVEKINHGLLKSSYFVPFLSKTFSSKGWTNKELNSAIAMNVNRRGRILPICDGDFSIEENYPLLNETLYKTWPSDPTEEDQFVTSVADEILKRVQDKQSQQNDLSG

SEQ ID NO: 403 - protein, 501 aa, unidentified
  source 1..501: note = Related to JAAXST010000004.1; note = Rhizobium laguerreae
MTITLGLDDPLLLLRLAHSIQDVAFALGLEPAKFFYVVKNSDNGRYYKQFQIPKKKGGMRDIAKPVRGLALAQDKFAAILAQKYEPKQFVKGYVKGQSFLTNAQYHERQKWILNIDIKDFFPSISFARVRGLFMSSYFGFNDRVATILARITTFNDGLPQGASTSPIIANIIAHNLDKKLVEIAIRERLRYTRYADDITFSSSQKAVPSSVVKSWEPLNGARTIALGNDVIDAFRSARFEINDEKTRILFPSERQEVTGLIVNRKANVWRRDISLLRMKLHSARVHGPSKAAKLWLKTTENPVHFWQHVEGWLSYVGQIRGPNDAVVAKLCKMAVLSGLKGSEWVERYADMVREFDVFLSHASEDKPKIRKLKDKLESYGLKVFFDETSISWGDSIVEKINHGLLKSSFFVPFLSETFSTKGWTNKELNSAISLNINRKGRILPICDGNFSVENNYPLLNETLYKKWPTDAAQEEEFLVSVSDAILKKVQDAQATSNDLSG

SEQ ID NO: 404 - protein, 505 aa, unidentified
  source 1..505: note = Related to JAHBRY010000004.1; note = Chelatococcus asaccharovorans
MSDPQAKVDLIDLTADPMFRLLTAHSVVDVAHALHLDPARFFYVVQHAQDGTYYKSFSIAKKKGGVRHISAPKKGLRLAQARLAAVLLKAYKPKPFVHGYVKGQSFLTNAKLHQRQRWVLNLDIKDFYPSITFPRVRGLFMSSAFGFNDRVATILARITTTSNGLPQGARTSPVIANMIAYTLDRKLIELATRHRLTYTRYADDVTLSSSRKEVPADVVKSWSPPFGERQLDLGGVLSAAFQTAGFQINDAKTRLSFQYERQEVTGVVVNQKANVWRKDISRMRMILHSARKHGAAQAATVWVGKDANADRFWRFVAGWLSFFAQVRGRDDPVVAKLCKLAVFAGLKGIEWIEKGADMVREFDVFLSHASEDKERVRKLNDRLVDLGVTVFFDESSIGWGDSIVEKINHGLLKSSFFVPFLSDSFARKGWTNKELNSAIAMNINRKGRILPIKDIGFSLEDNYPLLNETLYRTWPAGGEDEAACSLADEILLKVQTAHEIRSDLG

SEQ ID NO: 405 - protein, 481 aa, unidentified
  source 1..481: note = Related to JAGRAU010000490.1; note = Bdellovibrionales bacterium
MQDVAFALNLDPAKFFYVVQHADDGSYYREFVIPKKRGGVRSISAPQKGLALAQTRFYELLLEKYKPKPFVKGYVKGESFLTNAKYHEKQKWILNIDIKDFYPSITFARVYGLFLSPYFGFNRRVSAILARITTYRNELPQGARTSPIIANIIASNLDKKLVSLAADLKLKYSRYADDITFSSSQRRIPAGLVKGWEPSFGDREIKLGAALLEAFNGAGFRVNDAKTRLLFSYERQEVTGLVVNQQANVWRKDISRLRMIIHSARKHGPREAASIWVGKNASEEEFWQFLCGWLAYVAQVRGQSDPVVAKLCKLAVIAGLKGPKWIDRSADMVREFDVFLSHASEDKPRVRLLYEKLVEVGVTVFFDEDSIAWGDSIPEKINHGLLKSNFFIPFLSKRFSEKGWTNKELNSAISMNISRKGRILPIIDGHFSVEENYPLLNETLYKKWPIEVELQAKFISTTADEILKKVVAEKLKKHDLG

SEQ ID NO: 406 - protein, 476 aa, unidentified
  source 1..476: note = Related to NZ_KB890024.1; note = Hoeflea sp.
MAFALGLDPEKFFYVVQHAADGTYYREFQVPKKRGGVRNISAPRKGLALAQNRLAEVIRSHYVPKKFVKGYVRGESFLSNARYHEKQKWILTVDIQDFYPSIGFARVRGLFLSRYFGFNERVATILARITTYRDGLPQGASTSPLIANIIAHNLDKKLVAIAVKGQLKYTRYADDITFSSSRRAVSSDVVQSWEPAFGRREVHLGQSITEAFKHSGFEINHTKSRILFPFERQEVTGLVVNRKANVWRRDIARLRMKLHSIKRFGATEAAKVWLGPGGDKQKMWSHVAGNLAFIRQVRGMTDPVLAKLCKDAVIAGMTGPSWVLQMAEMVREFDVFLSHASEDKEKIRRLKDKLEECGVKVFFDETSIKWGDSIVEKINNGLLKSSYFIPFLSKTFSEKGWTNKELNSAISMNVSRKGRILPIIDSNFSVEENYPLLGETLYKKWPADESSEDAFIGEVADAILHLIEKKVTSVAT

SEQ ID NO: 407 - protein, 510 aa, unidentified
  source 1..510: note = Related to NZ_MYFQ01000014.1; note = Shinella sp.
MKGKDRGSSILLPENPFSDPIFRLKIAHSVQDVASALGLDSAKLFYVIRHCDDGRYYKKFKIPKKSGGFRDISRPIRGLAMAQDRLATILTAHYKPKSFVKGYVKGESFLSNAQYHERQKWVMNIDIEDFFPSIGFARVRGLFLSSYFGFNSNVSTILARITTFNNQLPQGASTSPILANILANNLDKGILSTAIRGRLRYSRYADDITISSSQRHVPSLIVKNWEPDKGKREIRVGNDIVDAFKKAHFKINEKKTRIQFTYERQEVTGLVVNKKANVWRKDVSKIRMKLHSAKKYGAENAAKLWLGKDKSGKDFWIHIEGWLAYIRQVRGVDDPVLAKLCKQAILSGLKASKWIQRCSDMVREFDVFLSHASEDKEKVRILKNALEIRGIKVFFDEDSIEWGDSIVEKINHGLLKSSFFIPILSDKFSKKGWTNKELNSAIHININRKGRILPIAINGFSIAENYPLLNETLYKVWPNNEIEQNIFIEEVSDQLLLKIQKTHSESAGLG

SEQ ID NO: 408 - protein, 497 aa, unidentified
  source 1..497: note = Related to NZ_CAKKMZ010000001.1; note = Rhizobium sp.
MSVFDDPITKLRLAHSVQDVAFALNLDPAKFFYVIQNSENGSYYKKFEIPKKSGGVRQISRPLRGLALAQDRLSAVLTAHYKPKSFVKGYIKGESFFTNAKYHERQKWVLNLDIKDFFPSIHFGRVRGLFISQMFGFNEQVSTVLARIVTFENGLPQGASTSPIIANIIANNLDKQLIAIAAKERLRYTRYADDITFSSSQKTVPSALIKLWEPDKGNRQITLSSAVHDAFRQSNFAINEDKVRIQFPYERQEVTGLIVNKKANVWRRDVSKLRMKIHAARKHGAESAAKIFIGESADGEKFWQHITGWLAYVRQIRGNDDPVVAKLCKQAILAGLNGAEWIRRYADMVREFDIFLSHASEDKEKVRKLKDKLEGKDVRVFFDESSISWGDSIVEKINHGLLKSLYFVPVLSETFAKKGWTNKELNSAIQSNIGRKGRILPIVMPGFSVAENYPLLNETLYRSWPAQEQKEGEFLEEISDQILLKIQKSHHEKTDLG

SEQ ID NO: 409 - protein, 498 aa, unidentified
  source 1..498: note = Related to NZ_VCDK01000006.1; note = Shimia sp.
MALPENFDPEQAHLFLGFAYSIQDIASALHMRPDGIFHITKTSEDGGYYRSFRIPKKNGGERSIDQPLRGMAMAQERLAAILRATYVPKSHVHGYVCDRSFLTNAQYHVGQKWILNVDIEDFFGSITFPRVRGLFQTYFGYSDRVATTLARICTYQGKLPQGAKTSPVLANLIAHNLDKSLLAIATKHSLRFSRYADDITFSTSQRRFPPSLVTAWEPLYGDREIQLGGPLKDAFMKAGFRINQTKTRIQRYDERQVVTGLVVNKKANVWRSDIKRLRMKLHSAHKFSADEAAKIWIGPSATQEDFVAHVEGWLAFIRQVRGKNDAVLSKLCQQAVVAGVTQQAWVKELAKTVHEFDVFLSHASEDKPKVRLLRDALEHLGVNVFFDEDSITWGDSIVEKINEGLLRSSFFVPFLSETFAAKGWTNKELNSAITNNVQRKGRILPITDAGFEVEDNYPLLNDILYKSWPAEGPEQSAQIEELADQLLAVIEKNKLKAQ

SEQ ID NO: 410 - protein, 498 aa, unidentified
  source 1..498: note = Related to NZ_AQQR01000002.1; note = Marinibacterium profundimaris
MGLPNHFDPATAHLLIGVAHSVQDVAGALMMRPGGLLRILKNTETGEYYKTFEIPKKRGGTRTIDKPLRGLAMAQERFAAVLLEVYNPKPFVHGYVSGRSFLSNAQYHQRQRWILNIDIEDFFGSIGFARIRGIFMSKLFGYNDRVATILARICTYQDRLPQGAKTSPALANLIAHNLDKELIALAAKENLRFSRYADDITFSSSSKRIPRTLIKAWEPEYGDRVVELGERLEEAFRGSSFQINRDKTRVQLFGERQVVTGLIVNQCPNVWRKDVKRLRMKLYSAKKYGLEQAASLWIGLDAKPEAFWSHVEGWLGYIKQVRGEGDPVLSKLCKQAMEANPKSSDWIQEHAHMIHQFDLFLSHASEDKPRVKKLHDKLVVLGVKVFFDQSSISWGDSIVEQINIGLMKSNFFVPFLSNTFAEKGWTNRELNSAISININRKGRILPICDHDFHVGRNYPLLADILYESWPGPDADEEAKLNEIADKLLAAAEKAKHSQ

SEQ ID NO: 411 - protein, 486 aa, unidentified
  source 1..486: note = Related to CP010623.1; note = Phaeobacter inhibens
MLLGVAHSVQDVAHALSMPAGGLFYVLQNADNGKYYQSFEIPKKREGTRPIDKPVRGLALAQERLAAVLKQSYRPKSFIHGYVTERSFLTNARYHEKQKWVLNIDIEDFFGSIGFARIRGLFMSQFFGFNHRVATILARLTTYKDALPQGARTSPILSNIIAHNLDKHLVEIAVKERLKYSRYADDITFSSSRRKIPPSLVRTWEPEYGDREVILGEKITDAFKTAHFRINPDKTRIQLFRERQVVTGLIVNEGVNVFRKDISRLRMKLHSGKKFGLEQAAKVWIGPTATVKDYWAHIEGWLGHIKQVRGDDDPVLSKLCKQAADINPAAPEWIIRHAEMVREFDIFLSHASEDKPRVRKLKKKLEAVGIKVFFDEESITWGDSIVQRINHGLLKSTFFVPFLTNTFAAKGWTNRELNSAISANVNRQKRILPICDHDFHVGKNYPMLEDVLYKTWPKAGPKEDEWLNAITDELLALVEKVKLETS

SEQ ID NO: 412 - protein, 507 aa, unidentified
  source 1..507: note = Related to SMSI01000004.1; note = Pseudohoeflea suaedae
MANRGARIEVKNEEQALLLPSEEEKALFSLQYAHSIQDVAFALGLDPAKFFYVVKNCDSGEYYKSFTIPKKNGGERKISKPLRGLALAQVRLLIILKHVYKPKGYVKSYVEGESFLTNANYHSNQKWVLNFDIEDFFGTITFPRVRGLFMSKFFGFNPRVSTILARICTHEGSLPQGAPTSPILSNIIGNALDKNLVALAREYKLKYTRYADDITFSSSQKLPPGAVISLWEPKFGKREITLGKDIREAVKNAGFRINPEKTRIQFPYERQVVTGLVVNKKANIRRADIARLRMKIHSAQRFGAESAAKVWLGPNATASSLQSHIEGHLSYVRQVRGKDDVVLAKLCKSAIIAGLANATWMKAQADMVREFDVFLSHASEDKEKYGKLNKALKAVGVKTFFDVDVIQWGDSIPEKVNFGLLKSDYFIPFLSNNFTRKGWTNKELNSAISININRKGRILPIIDSDFSVDDNYPILAENLYKKWPEKESEEDDFIEEICAEITKRIVR

SEQ ID NO: 413 - protein, 506 aa, unidentified
  source 1..506: note = Related to JAGHRO010000004.1; note = Shimia sp.
MKSKERGSSQVKASIVFHTDFRLIQLRAAHSVRDVALALGLDPKKFFHVLKHTDDGRYYRDFEIPKKTGGYRQISKPVKGLALAQDRLSTILDHVYNPGSYVKAFVKKTSFVENARYHKAQRWILNIDLKDFFPSISFPRVRGLFLSTLFGFNERVATILARICTYKGSLPQGASTSPRLANIIAKSLDKKILEIAKSHQLKYTRYSDDISLSSSKKVIPTLVVKNFHDNPDGRDVILGDGLKNAVRSSGFFINASKTRLMMPNNRQEVTGLVVNKRVNVRRTDIAKLRMKIHSVKKVGFSEAAKVWVDGNEAQLKNHLVGWLAHIRQVRGPSDPVLAKLCLQAHEAGLTEIKWIEELADMSKEFDVFLSHASEDKERVRRLQAELEERKVSVFFDESTIKWGDSIVEKVNHGLLKSTFFIPFLTETFSKKGWTNRELNSAIQMNMTRKRRILPIKSPDFDVDSKYPLLNDTLYKTWPRDPADEAAFISEISDELVALIEMEKSSV

SEQ ID NO: 414 - protein, 493 aa, unidentified
  source 1..493: note = Related to NZ_JFZB01000068.1; note = Paenirhodobacter enshiensis
MNELDLCLFQLKIAHSVKDVSFALKLDPEKFFYVLQHTDDGRYYHTFEIPKKNGGKRAIAKPLRGLALAQDRLAPLLHHVYNPGPHVKAFVTGSSFVSNASYHKGQRWILNIDLSDFFPSITFPRIRGLFLSKLFGFNPNVSTILARICTFQGSLPQGASTSPVLANIIANSLDRKFLEIARSEKIKYSRYSDDITFSSSKKSIPKCLVKSFHDHEDGREIILGNDLQDAVRAAGFSLNDQKTRLMTPNNRQEVTGLTVNERVNVRRSDINRLRMVIHSAKKVGFEEASKVWLPDGKNNLREHILGWLAHIRQVRGASDPVLAKLCLQAHGAGLTKVGWIEELADMSKDFDVFLSHASEDKDRVRKLSDALTAGGVKVFFDESSIKWGDSIVEKVNHGLLKSRFFIPFLTTTFSKKGWTNKELNSSISMNISRKGRILPIKSEDFEIGDRYPILNETLYKTWPKSSVDETAFIQEVVDSIIKLIEEDKAAPSV

SEQ ID NO: 415 - protein, 505 aa, unidentified
  source 1..505: note = Related to FOXV01000005.1; note = Roseivivax halotolerans
MRVDKVKSEGRADTVKSEAEVLFSLQTAHSVKDVAYALGLDPEKFFYVVQRADDGHYYDTFKIPKKSGGERDIAKPKKGLALAQARLVPILSFVYSPGECVKGFVKGSSFLDNAHYHHAQRWVLNIDLLDFFPSVTFARVRGLFMSSLFSFNPRVATILARICTFQGGLPQGATTSPILANLIAKSLDKRLTGLARTHRLKYSRYSDDITLSCSKAYVPKSIVSEIIEIDSAWEVQLGSELKDIIRHSGFRVNDKKTRLMRRNNRQEVTGLVVNEKANIRRADIQRLRMKIYSTRKYGQAEASLLWLGDSSKSISMHLVGWLAYIRQVRGQSDPVLAKLCQQVVAAGISDIEWIVRLADMTKEFDVFLSHASDDKSKVRPLYESLNSAGVKVFFDESSIKWGDSIVERVNHGLLKSRFFVPVLSSTFSRKGWTNKESNSAIAMNISRKGRILPIKFSEFDLDGRYPTLNDTLYKTWPEDSGKEDDFIREVTDDLIALVEQDKQLG

SEQ ID NO: 416 - protein, 492 aa, unidentified
  source 1..492: note = Related to JAINWD010000002.1; note = Halomonas sp.
MKLLNPSSRSIAKLNSLDELCNLLGINKGHLLFICYKRPDELKYKSFEMRKKRGGFRKIDSPQKGLRVIQGKLAELLEENVEFKTCVQGFVKERGVLENATLHKKSNWVLNVDIKNFFGSINFGRVRAVFVAKPFEIHPDVATVIAQICCFKNYLPQGAATSPIVSNIVASTLDNQIIRRIRNHRLLYSRYADDITISAKRVFPRELAYISEGRTIVGEDLVNIFSRASFEINQKKSRLQSKYSRQEVTGLIVNRKVNVPAEYKNKLRAAIHHWVDDPREAERKYYVDILGLTPEEAELTDDGSKLRRNIYGRLSFLNMVKGGDDPTYIKLILKMAEHDPLPPKFVKNIKAEYKMYDVFLCHASEDKADIVEPLYQELSKIGVHAFYDKKEIGWGDSLVGTINKALLKSKYVIAVMTDNSVGKSWPQQEINSVLNGDISGGTKRLLPLIFGDKEKILNNNFLMNDKLYVEWKDNPTEIAQKVQELLAQKSNE

SEQ ID NO: 417 - protein, 491 aa, Pseudomonas sp.
  source 1..491: note = Related to NZ_QBEO01000006.1; note = Pseudomonas aeruginosa
MKLLSPLNRSIAKLSSLDELCGLLGVQKGHLLYICYKRSDNAKYKSFEMRKKRGGFRKIDSPQKGLRVIQNQLAGLLQENIEFKSCVKGFIKERGILDNAALHKKSDWVLNVDIKDFFGSINFGRVRAVFIAKPFEIHPDVATVIAQICCFNNYLPQGAATSPIVANIVASTLDNRIIKHIRNHRLLYSRYADDITISAKRIFPRQIAYINDGQTIVGEDLASIFARSGFEINEKKSRLQAKFSRQEVTGLIVNKKLNVPAEYKNKLRTAIHHWVDNPVEAERKYYIDILGLSPEEAELTEDGSKLKRNIYGRLSFLALVKGADDPTYVKLILKMAEHDSTPPKFIKSIKAEYKMYDVFLCHASEDKEEIVKPLYDELEKLGVHAFYDAKEISWGDSLVGTINKALLKSKFVIAVMTDNSVGKAWPQQEINSVLNGDISGGTKRLLPLIYGDKDSILNNNFLMSDKLYVEWKGNPEEIAQKVKDLLTQKAQ

SEQ ID NO: 418 - protein, 495 aa, Pseudomonas sp.
  source 1..495: note = Related to NZ_NEIO01000001.1
MKLLNPPSRSILKLNSIDELCSILGVQKGHLLYICYKRSDDLKYQSFEMRKKRGGFRKIDSPQKGLRVIQKKLAEIFEENIEFKSCVQGFIKSRGILENAALHKKSNWILNVDIKDFFGSINFGRVRAAFIAKPFEFHPNVATVVAQICCFKNYLPQGAATSPIVANIVASTLDNRILKYIRSQRLIYSRYADDITISAKRVFPNEVAHINDGKTIIGEDLANIFSRASFEINEKKSRLQSKYSRQEVTGLIVNKKVNVPAEYKNKLRTAIHHWIDDPVDAERKYYIDVLGLSPEDAELTKDGSKLKQNIYGRLSFLSMVKGKDDPTYIKLVLKMAEHDPSPPKFIKSIKAEYKMYDVFLCHASEDKEKIVEPLYQELSKIGIHAFYDTKEIGWGDSLVGVINKALLKSKYVIAVMTDSSVGKAWPQQEINSVLNGDISGGTKRLLPLIYGNKDNILGNNFLMNDKLYVEWKNNPDEIAKKVQELLTHNESLNSR

SEQ ID NO: 419 - protein, 491 aa, Pseudomonas sp.
  source 1..491: note = Related to NZ_CP009747.1; note = Pseudomonas parafulva
MKLLNPPSRSILKLSSLDSLCELLEVQKGHLLYICYKRADDLKYQSFEMPKKRGGFRKIDVPQKGLRVIQQSLAKLLEENVEFKPCVQGFIKKRGILENANLHRKSNWVLNVDIKDFFGSINFGRVRAVFIAKPFEMHPDVATVIAQICCFNNYLPQGAATSPIISNIVASTLDNRIIKHIRSHRLIYSRYADDISISAKRVFPREIAHISEGKTIIGEDLSNIFSRARFEINEKKSRLQSKYSRQEVTGLITNKKVNVPAEYKHKLRTAIHHWIDNPVEAERKYYIDILGLKVEDAGLTGDGSKLKRNIYGRLSFLAMVKGSDDPTYVKLILKMAKHDPSPPKFIKPLKEQYQMYDVFLCHASEDKAEIVEPLYNELNKLNIHAFYDAKEIGWGDSLIGTINKALLKSRYVIAVMTDKSVGKAWPQQEINSVLNGDISGGTKRLLPLIHGDKETILGNNFLMNDKLYVEWNNNPAEIAQKVQALLAQKAE

SEQ ID NO: 420 - protein, 488 aa, Pseudomonas sp.
  source 1..488: note = Related to NZ_CP075180.1; note = Pseudomonas lundensis
MKLLNPPSRSIHKLDSLDLLCNLLGVKKGHLLFICYKRADEKKYKSFEIPKKRGGLRKIDSPQKGLRVIQQKLAELLTENLEFKPCVQGFIKGRGILQNAILHKKSNWVLNVDIKDFFGSINFGRVRAVFIAKPFEIHPDVATVIAQICCFNNYLPQGAATSPVVSNIVASILDNRIIKHVRSHRLIYSRYADDITLSAKRNFPREIAHVSDGRTIIGEDLANIFSRASFEINEKKSRLQSKYDRQEVTGLITNKKVNIPAEYKNKVRAAIYHWIQDPKEAERKYFIDILKLNPDEVELTEDGRKLKHNIYGRLSFIAMVKGKDDPTYVKLILKMAEHDKTPPKFLKSIKEEYKMYDVFLCHASEDKAAIVEPLYEALTKIGVHAFYDSKEIAWGDSLIETINKALIKSQYVIAVMTDNSVVKAWPQKEINAVLNGDISGGTKRLLPLIHGDKEKILNNNFLMSDKLYVVWQENPDEIAQKIKALLAS

SEQ ID NO: 421 - protein, 488 aa, Pseudomonas sp.
  source 1..488: note = Related to NZ_JYKS01000054.1
MKLLTPPNRSIYKLASLDRLCELLGVKKGNLLFICYKRADALKYKSFEIPKKRGGLRKIDAPQKGLRVVQNKLAELLNENLEFKNCVQGFVKKRGILQNAMLHKKSSWVLNVDIKDFFGSINFGRVRAVFIAKPFEIHPDVATVIAQICCFNNYLPQGAATSPIVSNIVASTLDNRIIKHVRSHHLTYSRYADDVTISSRRAFPREIAHIIDGQTIVGEELSSIFARARFEINEKKSRLQSKYDRQEVTGLVTNKKVNVPAEYKNNVRAAIYQWVKDPKEAEKHYYIDVLGLKPEDISLTDDGSRLKHNLYGRLSFIAMVKGKDDPTYVKLILKMAEHDKSPPKFLNAIKEEYEMYDVFLCHASEDKETIVEPLYNELKKLGVHAFYDTKVIAWGDSLIETINKGLIKSKYVVAIMTENSVIKAWPQKEINAVLNGDISGGTKRLLPLIHGDKEKILSSNYLMSDKLYVEWKENPEEIAKKIKDLLAS

SEQ ID NO: 422 - protein, 496 aa, Pseudomonas sp.
  source 1..496: note = Related to RHQN01000003.1
MALKLLNPTANPLFRLNSLDALSGLLEVKKGHLLYICYKRADVHKYKSFEIPKKNGGIRKIDAPLKGLRLIQNRLAAILTENIEFKSCVKAFVKGEGIFNNAVLHKKSDWVLNVDVKDFFGSINFGRVRAVFIAKPFEMHPDVASVVAQICIFQNSLPQGAATSPVVANIVASMLDNKIIKHINGVKSGRLVYSRYADDITISAKRFFPSEIAHLSEGKTIVGESLVNLFSRSGFVINDSKSRLQPKINRQEVTGLVVNKKVNIPSEYKNKLRSAISQWILNPKEAERKYFVDILGLNESEFEASATGENLKRNIYGRLSFMSMVKGKDDPTYLKLILKMAEHDDSPPKFVRLIRAQHNMYDVFICHASEDKAEIAEPLYHALTALGLNVFYDAESIEWGDSLIETINKGLYKSKYVIAIMTDNSVVKKWPQKEINAVLNSDISGGQNRLLPLIHGDAENILSANFLMSDKLYEVWKGNAEEIAGKVKVKIEGRAR

SEQ ID NO: 423 - protein, 490 aa, Pseudomonas sp.
  source 1..490: note = Related to CP013124.1; note = Pseudomonas mendocina
MKLVEPDKNPLLKLATLDELCSLLNVKKGQLLHICYDRSGPAKYSSFDMKKKRGGVRKIEVPLKGLGLVQKRLSILLSDFIAFKPCVKGFVEGESICTNASLHKKSKWILNVDIQDFFGSINFGRVRATFLAKPFEMSNEVATVIAQICTFENHLPQGAPTSPVVANIIASMLDNKMLRLAQKYRLRYSRYADDITLSSPRGFPGEVATATEGRTILGEELKLIFDKARFTINPNKSRLQAKNSRQEVTGLIVNKKLNIPAEYKHKLRTAIKHWTSDPEEAERNFYLNIKGEDPATFAVSKGGERLKGNIYGRLSFISMVKGSDDPTYIKLVLKMAEHDTQPPKFIQKIKSEHNMYDVFLCHASEDKDAIVKPLYDELKELGLSVFLDGEEIGWGDSLIDIINKALHKSKYVIAVMTENSVDKKWPQKEINAVLSNEIKHDKNKLLPLIHGDAEEILGKNFLMSDKLYKKWEGDPKKIAQDVLALLQKNA

SEQ ID NO: 424 - protein, 489 aa, unidentified
  source 1..489: note = Related to JAAYGA010000118.1; note = Pseudomonadaceae bacterium
MKLVKSDKNPLLKLSTLDDLCSLLSVKKGQLLFICYKRSDKAKYSSFDMKKKSGGVRKIEVPIKGLGLIQKRLSVLLSELITFKPCVKGFVKGESICSNASLHKKSKLVLNIDVQDFFGSINFGRVRATFMAKPFEMSNEVATVVAQICTFENHLPQGAPTSPVVANIIASMLDNRVLRLAQKYRLKYSRYADDITLSSPRKFPPEVAATVEGRTVLGEELKTIFEKARFVINPNKTRLQAANSRQEVTGLIVNKKLNIPKEYKHKLRAAIKHWISDPVEAERKFYVDIKGELSEEFVSQGGERLKNNIYGRLSFMSMVKGIDDPTYIKLALKMAENDNQPPKFIKTIKSEHNMYDVFLCHAAEDKETIVRPLYDELKKLNLNVFLDSEEIHWGDSLIDIINRALHKSKYVIAVMSENSVEKKWPQKEINAVLSNEIKHDKSKLLPLIHGNAEEILGTNFLMSDKLYKEWENNPEEIAQAVLKLLQKAG

SEQ ID NO: 425 - protein, 490 aa, Pseudomonas sp.
  source 1..490: note = Related to NZ_SULN01000012.1; note = Pseudomonas rhizoryzae
MRLVESDKNPLVKLSSLDALCALLNVKKGQLLYICYQRSNKAKYDSFEVKKKRGGVRKIEVPQKGLAVVQKRLCKLLSEWIEFKPCVKGFVTGESICSNALVHKKSKWVLNVDIQDFFGSINFGRVRAAFLAKPFEMSSEVASVVAQICTFENHLPQGAPTSPVVANIIASMLDNKILRLAQKHRLRYSRYADDITLSSLRSFPGEVAKLLDGRTFVGEELRLVFERSRFSINPQKSRLQAKNSRQEITGIIVNKKLNVPIEYKQKLRAAIKQWALDPEAAERNFYIDIKGEDPETFKVIEGGRRLRDNIYGRLSFVSMVKGCDDPTYINLALKMARHDTHPPKFIKKIEGEHNMYDVFLCHASEDKDAIVKPLYDELKRLGLNVFLDDEEIGWGDSLVDIINKALHRSKYVIAVMTENSVDKKWPQKEINAVLSSEIKHDKSKLLPLIHGDAEIILGKNFLMSDKLYKKWEGNPEKIAQDVLALLRKKT

SEQ ID NO: 426 - protein, 488 aa, unidentified
  source 1..488: note = Related to NZ_PZJW01000002.1; note = Salinicola acroporae
MKLIEKEENPLRDIKSIDDLLSVLNIEKGKLFYVLYEVGVDKRYKKFSIPKKRGGERPISAPTKGLRLAQYRLFKLLTDNIEFKQCATGFVSKRGIIKNAKVHKGTKWILNVDIEDFFGTINFGRVRGVFMSSPFDMPKQVATLIAKICTFNNALPQGAPTSPVISNIIASSLDNKLLRLSKQYRLRYTRYADDITLSGFGQPPQDIAKIVEQKTVLSEKLVAAFTKSGFKVNESKTRLQKKVVRQEVTGLVINSKVNVPVEFKKSLRAAIHQWCDNPEEAERKFLASTGKIKEGEEVTQGGQILKRNIYGRLSYLAQAKGNEDPTYIKLAMKMGRADPEPPKFLRRIMEKYHEYQVFICHASEDKTKIASPLYEALEEREISTFIDNKVIEWGDSLVDTINHALYKAKLVVAVVSENSLGKSWPQKEINAVLASEIQGESKLLVLVDGDGQELLGRLFLLQDKLYRQWEDNPDELADEIARIAMKIQ

SEQ ID NO: 427 - protein, 564 aa, unidentified
  source 1..564: note = Related to AE008922.1; note = Xanthomonas campestris
MPPLPDYASTELLLGLKTRKDLASWLGVSDRALRYMLYRLGDGDKYSTFSIRKRNGGLREIHAPKKALKYLQNKVAHALAGVVPVRQIAKGYVPGRSIYDHAKMHRSKKWVVLVDLKSFFPSINFGRVLGLLRAPPFSLENEVAVAVAQLCTRAGELPQGAPSSPVISNLICRKLDRQLLELAKQAGCGVSRYADDICFSTNRKRVSVEICDFVNEHGWVPGAGLKQLICSNGFEINFSKFRVHEGRDRKLVTGLVVNKGVSTPSRWRDQLRSSLHVIDKYGEAAGVEIISGWTSGFFRKEPGDVLRTIRGKLGYLKWIDKVANHLATDALRRNFPSLASLMPISNDGVSFRIMAEGPTDLLHLEAALDYLRKSGGFLDVRPRFQNFLGDVGDSELWETLLRIAKADVNELTIGVFDCDSPAFMKKTSLVPGGNIQLGPRVYAFCLAPPGTSISNNFCIESLYSRSDATLVDGSGRRLFFGDEFDSASGFSHDGLYKCLHPKKKAIVVSDQVARVHDGASVLLSKAGFASQVKDKAPPFDVVSFDGFRPTWLGIRALAIAAVRK

SEQ ID NO: 428 - protein, 562 aa, unidentified
  source 1..562: note = Related to DOBS01000129.1; note = Stenotrophomonas sp.
MPPPSSTVEVFLSLKTRADLASWLGVSDRALRYILYRLEEAEKYKTFLVRKRDGGFREIDAPKPALKYLQEKIASALIEVMPVRQIAKGYVPGRSIYDHAKVHRTKRWVVLVDLKQFFPSINFGRVLGLLRSAPFNLEQEVAVAVAQLCTKAGALPQGAPSSPVISNLICRKLDRQLLELAKNAGCSVSRYADDICLSTNRRQVSKSICEILPEHGWVPGVGLKQVISSNGFEINISKFRVASGRERKLVTGLVVNRGVSVPRRWRDELRSSLHVVSKYGELRGAEIISQWNSGFFRGDGSNALRTIKGKLNYLDWIDRVARRSAIGALRRQFPSLGTLMPRPRGGIPFRVMAEGPTDLLHLKAAFDRFRDDGHLFDILPRFQNFSGDVGDSELWETLRRIAKADVHELTVGIFDCDSPAFLRKSSLAPGGHVQVGEKVYAFCLAAPNSSLSGEFCIESLYSREDATMLDGSGRRLFFGDEFDATNGLSHDGEFRRLHPQKKSIVVSDQVTRVSGGGSVLLSKANFASLISEKVPPFDRVSFEGFKETWRGIRELVIANSRK

SEQ ID NO: 429 - protein, 327 aa, unidentified
  source 1..327: note = Related to JAGOCJ010000020.1; note = Pseudoxanthomonas sp.
MSVKSRSDLAGWLGVSERALRYILYKLPDERKYSTFEIKKRNGNARVIDAPSPALKFLQSKLAETLSEIAPPRQLAKGYVRERSIFDHAKVHRSKRWLVLADIKDFFPSINFGRVGVFRAAPFSFGHEVAVCLAQLCTKGGQLPQGAPTSPVISNIVCRRLDRELLELSKRSRCSVSRYADDVCFSTNTRDISARVADFVGEAGWVPGLELKSVFQRNGFQINPNKFMVRCGRERKLVTGLSVNSGVSIPRSWRRQLRSALHVIRKYGEVPGDSIVLSWRPAFQRGSAVNIGQVIRGKVRYAHWIDRLAGRGSVEALHRNYRAGSMG

SEQ ID NO: 430 - protein, 564 aa, unidentified
  source 1..564: note = Related to NZ_LMHF01000016.1; note = Lysobacter sp.
MGPLSLSPEAIAFSGLKTRAELAGWLGLTDKKLCYLLYVLPATQKYITFQVAKRDGSSRTIDAPHPALKQIQRKLLSVFRELAPATGVAKGYVNGVGVIDHARLHRRQRHVVLVDLENFFPSITFPRVRGALLGKPFLFPPKVATCIAQLCCKDGVLPQGAPTSPVLSNLICRSLDHKLLALAKANRCRVSRYADDICFSTSLVEVPSIIATLYDGNYLVGPALIAAIHASGFTINQKKFKAKSQRTQQLVTGLVVNRGVSLPRRWRRQLRVLLHLADKKGAARATEIASAWTKPVAFRRGSGSIEQLVRGKTNYAQHVDLRCDKSFSESIYRNYGGVRKLMPRPLRGIAFRVMTEGKTDLLHLESALKWFQERAEFAEFKPRFLNFPGDIGDVELLKTLQRIAKSDVPELTVGVFDYDNIKDMNKIGLAPGAHLQLGSRVYAMCLGEPAGFTGTRFCIENLYQKNQLVAMTSEARRVFLPEDFDQDGISLDGLFKRAQPRATAAIVSDKVVRLSDGFSASLSKAEFAEMIFRSVHPFDQIDFSGFGPTFNALRRIVEEVSLAG

SEQ ID NO: 431 - protein, 563 aa, unidentified
  source 1..563: note = Related to NZ_JAHXYK010000004.1; note = Lysobacter sp.
MGPHSYSPGALAFLNLKTRADLAGWLGLTDRKLCYLLYALDASKKYTSFQIAKKKGGVRTIDAPHPALKYIQRKLMHVLVELAPPTGIAKGYVAGVSTIDHAWLHRRQRHIILADLDSFFPSITFQRVRGALLAKPLSLTAKVATCIAQLCCKDGALPQGAPTSPVFSNLICRSLDHKLLALAKAHRCKVSRYADDICFSTDLKVIPTTIASWVGDRYLAGPSLISAVSSSGFSLNPSKFKVRSKESQQLVTGLVVNDGVSLPRHWRRQLRVILHLSSKRGLVRAKEITDGWARPAASRCEADSLEHFIRGKTYFAQYVDFRCRRKFSESIYRNYSGMRKLMPRPLSGASFRVMAEGKTDLLHLEVALKWFQSNGEFTDFRPRFVNFHGETGDVELMKTLERIAKSDIPELTIGIFDCDNSKFMLKNGLSPATHQSLGGKVYAMCLGAPLALTKSTFCIELLYPRSQLLTMTSGGRRIFLPDEFDLNSGLTPDGLYKNKFPKATAPIVSDHVERVVDGFSALLSKADFADMVHQAVHPFDAMDFSGFRATFDAVRRVVDEVYS

SEQ ID NO: 432 - protein, 551 aa, unidentified
  source 1..551: note = Related to NZ_JAKPBV010000011.1; note = Lysobacter sp.
MALSSRQDLAKWLGLTDRELRYVLYALSSDKKYTTFTIKKRTGADRVIEAPHPALKNLQRKLLTAISEIAPASGLAKGYVLGRSTIDHAWLHRRKRFVILADLKEFFPTITFRRVRGALLAKPFQLPSAVATCVAQLCCKDGVLPQGAPTSPVLSNLICRSLDHKLLQLAKKHRLAVSRYVDDICFSTSRPTIPGNIAVPHGAEWEAGPELTEAIRVSGFELNHSKFKVRSRETTQLVTGLVVNHGVSLPRRWRRQLRVLLHLVKKHGEKKAGEIAASWVRPTASRRGFASIEQVIRGKSHFAQYVDRRCNRAYSDALFRSYPGQRRLLPRPLRGVQLRLMAEGKTDLLHLEAAHRAFNTAGEYAHIRPRFVNFPSDTGDVELLKTLNRIAKSDIPELTIGVFDCDNPKFMKDAGLQPAGYVQLGSNVFCMCLAPPPSLAGVPFCIELLYERDELCAMTTDARRVFLPDEFDQATGLSHDGLYRRTNPKKSALVVSDQVVRVSDGYSSLLGKADLATLVSQQVPPFEEMNFGGFQPTFDLIGSIIDMVHGR

SEQ ID NO: 433 - protein, 577 aa, unidentified
  source 1..577: note = Related to NZ_LXXZ01000065.1; note = Stenotrophomonas sp.
MSASPPPIKKTSLLSPNAIAFRSIKSRSELANWIGIKESTLIYILYRLPTSKKYTDFLIPKRNGGTRMISAPRKALKYAQKRISSVLYDISPPRNLSKGYIPGRGIFDHAYRHRRRSTVVTADIKGFFPSINFGRVRGMFAAAPFGLPLDVATMLAQLCCKDGELPQGSPSSPAISNIICRSLDLDLAGFSRKHRITVTRYADDVCFSTNMRKNLFPLVERNDLLGEVPGGEVSRIFEKNGFELNLKKFNLSKSNSRQMITGLIVNSHVNVPRQWKRQLRTLLHLRSRMEDAQATEIANTWARPQASRKGVTESIDHLIRGKASFAAYIDSRSGTRHIASLHRGYPKLRQMLPRMNPSFPVRIMAEGPTDLLHLEAALRHCSDRIDFSNVALRLHNYQGDVGDTDMIKTLHRINKVDVEELTIGIFDHDNPSFLKEISLNEGSHVRLGRMVFAACLSRPKFVTGNYCIESLYRRIDSSRVTSEGRRLYFSDEFDAEGLHSQGVLRRQYPKKTALVLSERVFDPKDPNVSLTLSKTDFAAMVNAGAAPFSDMDFSGFLPTLAHLRKMIDEAMYFSGNS

SEQ ID NO: 434 - protein, 578 aa, unidentified
  source 1..578: note = Related to CP076250.1; note = Xanthomonas translucens
MPSSPPVKKNSQQLSDRALEFKAMASRSDLAQWIGIKEKTLLYILYKLSDSEKYKDFTISKRDGGTRLISAPLKALKFSQKRISAILQEISPPRHLAKGYVPGKGIFDHAFLHKHRKTVVTADITNFFPSINFGRVRGMFLSPPFSLPTSLATMLAQLCCKDGQLPQGSPSSPAISNIICRSLDLELLEFSKRHRISVSRYADDICFSTNMRKPIFGLYEINSQFGNFPGTELSDIFTRNGFTLNIKKFKVSKSNSRQMVTGLIVNDRVNIPRAWRRQLRVLLHLRSRMEDAATTKVVNSWSSPLPSRKGETSSIDNLIQGKASFAAYIDRRSGTNHIGGLYRSYPKLRGMLPRVTQTFPVRIISEGPTDLLHLQAALEHYGSKLDLSNISIKFHNYQSDQGDADTLQTLRRIAKVDVEELTIGIFDYDNPKLLRDLSLDAGGYVRLGRMVFAACLARPAQTNGMYYCIESLYRRDQASRTTTEGRRLFFADEFKEDGSSQDGSLRREHPKKSALVLSERVFDPAKPEVSLTLSKTDFASMVFTKAAPFSDMDFSGFLPTLTLLRRMVDEAMRYQGIK

SEQ ID NO: 435 - protein, 574 aa, unidentified
  source 1..574: note = Related to JAJUAC010000002.1; note = Xanthomonas campestris
MPVKPPSLSNRSLQFLAIRTRADLANWIGLSEKALLYILYKLSPERKYTTFLIKKRNGQFRRISAPQKALKFSQHQISLAIQEITPPRHIAKGYVKGKSISDHARQHVRKKIVVISDLKNFFPSINFGRVRGLFLSPPYSFPTDIATILAQISCKDGELPQGSPSSPAISNAICRKLDRQILQLASRNRVSVSRYADDICFSSNKKISLSICDTSLITGDVAGQALRGIIQNNGFQVNDAKFHRIPYNQRQMVTGLVVNEGISIPRKWRRQLRAILHLRSKFDDPRSTEIVNSWSSPQASRSGKITSVDHLIKGKASFAKHIDRTSGRRVVESLHRGYPSLSELFPRVSPEFPVRIMTEGSTDLIHLDAALQRYEKQLELFNISIKLHNYIGDTGDVDVLSTLRRIAKVDVDELTIGLFDCDNPRLMKEISLEAGSYVRLGRMVFAAALAPPNSSTVPPFCIESLYPREQSTRRTKEGRRLFFGDEFDKSGKFIGEDINREFPQKTAVALSEKVYSSSDPSTSLTLSKVDFANMVSSGAHPFEDIDFSGFLPTLNLLRAMIDDATRHRYRGKER

SEQ ID NO: 436 - protein, 527 aa, unidentified
  source 1..527: note = Related to NZ_CP031059.1; note = Xanthomonas axonopodis
MSPEKKYKSFRISKRNGGEREISAPTSVLKKIQKRIAFGVDGVRKKSLISNGFEKGRSIFDHAQPHKRKSLVITADVKDFFPSINFGRVRGVFLSPPFGFNNKVATLLAQLCTDGASLPQGAPSSPSIANVVCVQFDRLLVTLAGKCRCSVTRYADDICFSTGMADVPKYIAVRKDGNYVPSQALIKTFKDGGFEINLDKFRVVDGKDALVTGLKYRGGIGLPRKWRRRLRTELNLLRKYGDGAEKIIASWGGVTEVAGLPESQGSPRILGKIGFLRWLDGKAGSSNALRMARSYPQLRKEFRAVIPYENIDLLVEGVTDKVLLLAALSALQAKGSFSDLKLNFPESAMKGGPDLEKTVRLVASTGARRNLTIALFDSDDSEVLARAGLAPQSGVYYRAIASGVYVMALKPPPWMLVESFCIENLLRNDTFSVEDSHGRRMFLANEFSENGLHQSKEFFRTRPNKKAIVVDSDVYSVKSGKSMALAKYAFSELVANGQAPEEDYYGFHGTFSLIQEVSYDFALDKVR

SEQ ID NO: 437 - protein, 527 aa, unidentified
  source 1..527: note = Related to JADUNR010000014.1; note = Stenotrophomonas maltophilia
MSAEKKYRSFQIRKKNGGQRAITAPTDVLKRIQKRIAFGVDGVRKRSLISHGFEKGRSIFDHARPHKSKSFVITADIKDFFPSINFGRVRGVFLSAPFGFNNKVATLLAQLCTEGNCLPQGAPSSPSIANVVCVQLDRLLVLLAGKCRCSVSRYADDVCFSTGSSTVPKYLSVRKDGKYVPSQALLKTFKDCGFEVNLEKFRVVDGKDALVTGLKYRGGIGLPRKWRRRLRTELNLLRKHGSGANKIISGWSGVQEIAGITEKSDCPGISGKIGFSHWLDVKAGSSRTLRMARSYPQLRKEFKAVIPHQKIDLLVEGVTDKVLLLAALAALQVRGGFSDLSFNFPDSAMKGGPDLEKTIRLIASTGARRNLTIALFDSDDSEVLAKVGLSPQTGIYYRAVAEGVYVMALKPPDWVISEIFCIENLLRKDTFAVQDANGRRIFLASEFSENGLHQSKNFYRIRPNKKAIVVDSDVYSVTTGESMALAKHAFSELVAAGEAAGEDYNGFRYTFSLIQEVSYEFALEKSR

SEQ ID NO: 438 - protein, 574 aa, unidentified
  source 1..574: note = Related to CP043540.1; note = Xanthomonas translucens
MASLSPNSFGLTDADLIRFLSMASRNELAAWLGVSERQLKYVVYAMPLHKKYKVFRIKKKNGGEREISSPTDILKRIQRRIASAVDSARTRSLISNGFEKGRSIFDHARPHKGRVFVITADIKDFFPSINFGRVRGVFLAPPFRFNNVVATLLAQLCTDGESLPQGAPSSPSIANIVCVQLDRLLMELAKKSKCSVTRYADDICFSTGIAQVPKYLAVKNGDDYIPSQALCKILNNNGFEINLEKFRVCRGKDALVTGLKYRGGIGLPRKWRRRLRSELQVSRKYGAAAANIIAAWDGSDEPKLTGENNELLCVSGKIGFSKWLDGKVGAQRTLALARSYPQLRGVFKAVIPHREIDLLVEGVTDRILLIAALLALQKRGLFLSLKFNFLSSAMKGGADLEKTVKLLAATGARRNLTIALFDSDDGEILAKVGLVPASGVYYRAIAEGVYAVALKPPSWLTAETFCIENLLHPDTFSIEDDLGRRIFLATEFSERNGFHQSGKFFRVKPNKKAIVVDSDVYSTTSGEPVALAKHAFSELVAQGAAPSEDFYGFHETFSLIQEIAYEFGLAAGRT

SEQ ID NO: 439 - protein, 565 aa, unidentified
  source 1..565: note = Related to JAGHWV010000014.1; note = Xanthomonas sp.
MAPPLSKKEIVNFLAISNRSELATWLSVSERQLKFVVYALPIDCRYRKFKIAKKNGGTREISAPVEVLATMQRKIGSAIDSIRKRSLISNGFERGRSIYDHAKAHKGKSKIITVDIEDYFNSINFGRVRGIFLSSPFLFSPTVATLLAQICTDGKSLPQGAPSSPSIANLACVRLDRMLVEIASKARCSVSRYADDICFSTGLSEVPKFLAYEDDGSYLPSNVLADIFKSNGFSINKDKFAVRSRNKAMVTGLKFHGGIGMPRKWRRRLRSELQVCRKYGDEAASIISSWTFGPNRVQLKSHGISSVAGKVGYLHWLDGKSGADKVRRLAESYGQLAGIFGPLMSFGEIDLLVEGMSDEILLNAALRNLQKKGMFEGLKFNFLELGKKGGPELEKSVRLLVTTGARRNLTIALFDCDDNDVLTKVGLEPANGINFRRLSDGIYVAALRPAGWTQSDQYCIESLLRRDTFELSDISGRKLFLSSEFSDNGLHHSMNFYRTTPKKKTLVVDSEVYCVRTGASMALSKIVFAQIVASGTGVAEDFYGFVETFKMLYEIHLNHRVVAVK

SEQ ID NO: 440 - protein, 561 aa, unidentified
  source 1..561: note = Related to NZ_CP049872.1; note = Thermomonas sp.
MPLEEREAEFLALRTREALACWLGITDKQLRFLLYKKLDQSYRTFVIPKARGGSREITAPSKFLARLQRKIALVVAAISPPRGLAKGFVKGLSVLDHAALHANKRWVVCLDLKNFFPSINYGRVLGVFRSRPFEFPDAVAIPLSQICCYLGLLPQGAPSSPAISNVVARQLDRRLAEFARKNKLSVSRYADDISFSTNARIVPVGLMLEDRSPGNEILELLVQSGFVINGEKFRVRHASERQQVTGLIVNDRPRMPRFWRRQTRVLMHLRRVHGDENALSIAKDFRSKRKLSDVKSIEALVRGRATFASHLDDRFQTDFVESLARAFPEQRSVLESRRKVAHIRVVAEGKTDKKYIAQAFSALSGHDSRYRRVKIEFSDLPDKSEGFGDVALRKHVQEISTVQLPVFTIALFDCDNSKLMADLNLTAASYVPLSPTLAIACLPQPAHVSDAAFCIEHFIPAHIRALRDSKGRRIFTVDEFDSTNGRHRTESLYRIHPKQATLIVDSDVFSMTSAESVALSKSQFCDLVCERAPPFEDFDWEVFRPVIDFLLSVYEGATSRR

SEQ ID NO: 441 - protein, 563 aa, unidentified
  source 1..563: note = Related to NZ_QREQ01000002.1; note = Xanthomonas arboricola
MAPPDLSLQAASLLAVSNRAELAEWLGTTDKRLRYMLYGRGNIGLYKVFEVAKRSGGTRKIAAPKPFLKALQRRLAAVFPLISAARGISMAYTAGRGIIENAKVHRRKRWVVATDLEEFFPSINLGRIRGLFLSEPFNFPKEVATVLAQVCCYQGALPQGAPTSPALSNIICRSLDRKLVEFARRSGIAVTRYADDIVFSFNFKECPDSLVNKVDGRWIVSDILSEIIESSGFKVNHKKTRVTPRSQRQLVTGLVVNQRPAMPREWRRRNRVILRLLQTYGKERASQIISEWKGLRRPGADAEAIIRGATAFASNLDKNFNGTYTSSLRRNYPLLSQVISYSPDLVPVEVLTEGKTDRLLLEFAYAQLRLLPEFQDLRLKFSRLSDTAGDGALAKRLDELAARGVRTLTIGLFDADNDQYLSKYRIAAGEFSAVSKTSDYVYSGIIPKPTDDAPSRFCIEHYFPRDFISRTDEFERRLYFLDEFDKRNGRHKSLPLYKISEKSTLIVDDKVFSIMTDDDRNYAMTKADFAEKVVSRTPPYEDADVNWFSPVFKMLKNFSLRYS

SEQ ID NO: 442 - protein, 541 aa, unidentified
  source 1..541: note = Related to JAFWYH010000002.1; note = Clostridia bacterium
MKDIKTYEDLCMVLEINQGYFYSVLNKIKNKKGYTKFSIPKKNGGAREILAPSPIIKSLQLKIKAYIEGKYFPHTCAKGFKKGCCNVDNAKMHVKRNWCLNLDLKDFFPSINFGRVYGLLMSEPFNANKKIAVALAHILCYDNELPQGAPSSPLISNLIAYSLDNKLLALAKEYHCNYSRYADDISFSSNSTHMPKQLVVFDDLIHEWIIGDDLQNTIESCGFSINHGKTRLLKKNQRQEVTGIIVNSKLNLNRKYYREIRSIFHKIKVNGIKEVAKQNHERYGKCKDNSEFGLISFINGKLAYYKSVVGEDNPCYNKLCKLYNNTIEYKYKNCKSSKQELIDNAMFIIETSEGQGTAFLLKDLGLVTCKHCLGFKHDDFCTEEELIIFNKQNEDIIYAYRVSNPENRFKLKLKKIFKESDLAILELLTDEILQYYFYPSKERLDIHSKNCTLLGFPNHSKGSSISEINNIQVSSKKAYFGRDYYCLDKPIITGNSGGPLLNEQNEVLGIACKGAGDITSASETDFNGVIPIELLYTEKDA

SEQ ID NO: 443 - protein, 690 aa, unidentified
  source 1..690: note = Related to CP074390.1; note = Cupriavidus necator
MTKLPSMDQIIEALVRSSPSFFSRRVLGMSYDHLKAIVYPRPSYQSFTIKKRDGTDRTIHEPRKPLKIIQVKVLAFLKERSSPLKPAVHGFVAKRSILTNALVHCSPKTKHVFNVDLEDFFPSITFYRVRGVLLHHPFNFSHQVATVIAHICTLDNVLPQGAPTSPFLSNLVCRTMDRDLTDLARRSMARYSRYADDITFSFRVSKTLKLPAAVCSVNGDGDLAIGTELHDIIVNKHHFKINSAKTRLSDRTRRMEVTGLTINRFPNVPRVFIDRIRGALNAWEKHGYDQADKAWQARITAAATGAYEKKPWKRQIRTGKAPALKNVLWGKLLYLRMVRGKDDLIYTRLAERYNAAAAATTAAGSFSAPTLPVEPVVRDKETALDACFVVDWYGDYKHPALGDEMPMAQGTAFVYRELGLIITCNHVFEWEGQVGKVDTVIDYESPYLTNKILQLIQPGTKKSWPAKVLFRDKPMDFAILAFAEEPPQHRYFSAMDTPIEPGAQGVLIGYPAWKQWTLPDFNDQKVLNRTSPHAGMNSFTITGAGSIRPGNSGGPFTDDRFRVAGMAQRGAYMGSGHDESLCFEIIDDLIAKYKASLVPPPAAISVPPAAPVIGSGAPPATPPASIPVLPAPPAPAPPNAGCTRTCRSADATGPTARVRRMNRTTAQADYAITRRRLSRSSDRLRSGTAV

SEQ ID NO: 444 - protein, 638 aa, unidentified
  source 1..638: note = Related to PDDY01000004.1; note = Burkholderia gladioli
MAILLGTDQITEALVRSNPSFFSRRVLGMPYDRLKAIVYPQPPYKSFILKKRDGTDRTIHEPRKALKIIQNKVLAFLEERSPALKPTVHGFVAKRSILTNAMVHCSHKTQHVFNIDLEDFFPSITFYRVRGVLLHHPFKLSHQLATVIAHICTLENVLPQGAPTSPFLSNLVCRSMDRDLADLARRSLARYSRYADDITFSFRVSKTLKLPAAVCSVDISGNLTIGTELHDIIVNKHHFKINSAKTRISDRARRMEVTGLTINRFPNVPRVFIDRIRGALNAWEKYGYDQANKTWQARVTEGATGTYEKKPWKRQTRGGQVPALKNVLWGKLLYLRMVRGKDDLIYTRLAERYNAMVATSTAAGQFSASTLPVEPVVRDKETALDACFVVEWYGDYKDPTLGEEMPIAQGTAFVYRELGLIVTCNHVFEWAGHVGTVETVIDYESPYLTNKVLRLIQPGTKASWPAKIVFRHKPMDFAILAFVGEPPQHRYFSAMDAPIEPSAQGVLIGYPAWKQWTPPDFNDLKVLNRTFPHAGMNSFTISGAGSIRPGNSGGPFTDDRLRVAGMAQRGAYMGTGHDESLCFQIIDELIATYKASLLPPLAASTLGAAAPPTTSPAPISHPPSHPAPPVQDAPASDT

SEQ ID NO: 445 - protein, 1224 aa, unidentified
  source 1..1224: note = Related to BKCJ010000001.1
MTTLSELNRCDVATFIDRLRGIYEHSPWIPERAATHRPFANETALKLALQAVVTHATEGEQLGLIREHPELAGKAAVAGELTMESTSEQAASGLHLCSADEYATLHQLNADYNAKFGFPFILAVKGPTGKGLTRRQVIAAFTRRLKNQRADEIAECLRQIKRIAEIRLNDLLGVSLEFGPAIMQWAETIAAWSDADNAADADFDLTCAYMTPAHRRTADQLRDWMTDAGMDAHIDAVGNVVGVYRSPVPGAKTLMTGSHYDTVRNGGKYDGRLGILLPIAIVRHLYLRGETLPFHLEVVGFAEEEGVRFKSTFLGSNAITGHFDLSLLDQVDADGVSMRDALTAAGHDVARIPALARQPEDILAFVEVHIEQGPVLLQRDLALGVVTAIAGSSRYLVQLTGLASHAGTTPMSMRKDAAAAAAEIVLLVEQRCAQGQSLVGTVGQLEVPGGSVNVIPGACKLSLDIRAADDAVRLAAVQDVLDGIASICAERQVAFALERIVDASAAPCAPHLMQQLGAAIERAGLPRFELLSGAGHDAMAMAAITDVAMLFTRCGNGGISHNPLETMTADDADIAARASHEVTPRATDRRLYNWAIIQVQEKDTGGRLLFSIRAYMAILPNMDQIIETLVRSSPSFFSQNILGINYNELRAIIYPRPSYQSFTIPKRNGTVRTIHEPSKTLKIIQLKVLNFLLERSSPLKPAVHGFVANRSILTNALVHCSSKTQHVFNIDLKDFFPSITFYRVRGVLTHHPYNFSHEVATVIAHTCTLNNSLPQGAPTSPYLSNLVCRTMDRDLTELARRSLARYSRYADDITFSFRVSKTSKLPAAVCSVDSDGDLVIGSELHDIIVNKHHFNINSAKTRLSNRTRRMEVTGLTINRFPNVPRVFIDRIRGALNAWEKYGYIDAEKKWQERVTSAATLAYEKKPWKRKTRAGRVPALKNILWGKLLYLRMVRGKDDLVYTRLAERYNAAVLTATSAGPFSAPKLPVEPVVRDKETALDACYVVEWYADFNDPTIGEEMPLGQGTAFVYRELGLIVTCNHVLEWNGEINNIGITIDYENKYLTNKVLKLIQPGTKKSWAAKVIFRNKQMDFAILAFADEPPPHRYFAAMDAPIEPEANGMLVGYPAWKQWALPDFNEQKVLNRTTPHAGMNSFTITGAGSIRPGNSGGPFTDDRFRIAGMAQRGAYMGEGHDENLCFQIMDDLISKYRATLRIHVAIPPASGA

SEQ ID NO: 446 - protein, 647 aa, unidentified
  source 1..647: note = Related to NZ_RSFB01000003.1; note = Burkholderia pseudomallei
MDQIIEALVRKHTSSFSQRVLGMPYDALKALIYPRPSYRSFTIKKRDGSDRTIHEPRKALKNVQLKVLAFLQERSSPFKPAVHGFVADHSIFTNALVHCSPKTQHVFNLDLEDFFPSITFYRVRGVLLNHPFKFSHQVATVIAHICTLDNMLPQGAPTSPFLSNLVCRTMDRDLTELARHGLARYTRYADDITFSFHVSKTSKLPASICSVDDDGALVVGSELRAIIVDKHHFKINAAKTRLSDRTRRMEVTGLTINRFPNVPRIFIDRVRGALRAWETYGYENAEKVWHARVAAAATGPYEKKPWKRQTRAGGPPALKNVLWGKLLYLRMVRGKDDLIYTRLAERYNAAVLNEQAAGAFVAATLPVEPVVRDKSNVLDACFVLEWYGDYSSPTLGEEMVGGQGTAFVYRELNLLVTCSHVFEWSGKIGKVDAEIDINDPCIATKTLQLVQPGTKKAWPAKILFRDKPMDFAIVAFEDPPPHRYFSAMDNPIEPSAQGFLIGYPDWKQWNLPDINGLTVLNRTMPHAGMNSFTITGAGSIRPGNSGGPFTDDRFRVAGMAQRGAYIGRGHDENLCFKIIDALIAKYKATLPSPPPLAPAVMAASAPASAAPIVVPTSTDALSATPSAAGATPIVPPSEGESPPPDAI

SEQ ID NO: 447 - protein, 639 aa, unidentified
  source 1..639: note = Related to CR555306.1; note = Aromatoleum aromaticum
MAILLSLDQIVEALVRSEPASFSRDVLGMPYDSLKAIIYPRPPYKSFTIKKRDGSDRTIFEPRKRLKVIQLKVLDFLQKRSTPLKPAVHGFVAKRSILTNAQVHCSPKNHHIFNIDLEDFFPSITFYRVRGVLLHHPFKFSHEVATVIAHICTLDKTLPQGAPTSPFLSNLVCRTLDRDLTELARRCLARYSRYADDITFSFRTRKTIKLPAAICSVDSDGDTVIGTELHDIIVNQHHFKINSAKTRLCDRNRRMEVTGLTINQFPNVPRVFIDRIRGALIAWESHGYAAANKVWNERVTAARSGAYEKKPWKRQTRRGQVPDLKNVLWGKLLYLRMVRGKDDLIYTRLAERYNSAVLITAATGTFTAPKLPVEPVVRDKETARDACFVVEWMGDYDEPGVGTEVPISQGTAFVYRELNLLVTCNHVLEWQNGEEGKFLAQIDYESPFLSDKALKLIQPGTKKSWDAKILYRNEQMDFALLAFEDPPQHRYFSAMDNPIEPGAKGFLIGYPAWKQWNLADVNSQTVLNRTSPHAGMNSFTITGAGSIRPGNSGGPFTDDRFRVAGMAQRGAYMGDGHDENLCIEIIDELIAAYKASLVAPAVLVPAASAAAPASPATAAPSAKPTAPPPAPTPPPPVMP

SEQ ID NO: 448 - protein, 664 aa, unidentified
  source 1..664: note = Related to NZ_QMFZ01000074.1; note = Burkholderia sp.
MAIVASIDEIIESLVRNNPAWFSRRILGIPYSTLKEIVYPRPPYKRFTIKKRDGTDRVIFEPRNRLKIIQQRTLKFLLDRSGPLKPAVHGFVSKRSILTNAQVHCSPKVHHVFNIDLEDFFPNISFYRVRGVLEKHPFNCSHQVATVIAHICTLDKVLPQGAPTSPLLSNLVCRSLDRDLTDLARRSFARYSRYADDITFSFPVRKTSRLPAAICHVDEDGDLLIGTELHGVITKHNFKINPAKTRLRDRSRRMEVTGLTINRFPNVPRRFIDRIRGALHAWEKYGYDAAEKAWSERVEKATTGPYEKKPWKRQMRRGRLPKLKNILWGKLLYLRMVRGKDDLIYTRLAERYNDAVLAAHAAGPFTAPRLPVQPLVRDKETARDACFVVEWLGDYQSAAGVTDDIPMGQGTAFVYRELNLLITCDHVFEGKANVGHFEVEMDYEDVELVNKTLNLVKPDTHQKWPAKILYRNAQMDLALLAFDHPPQHRYFSAMDNPIESGAQGILIGYPAWKQWNLPDFNDQKVLNRTTPHAGMNSFTISGAGSIRPGNSGGPFTDGRFRVAGMAQRGAYMGDGHDECLCFEIIDDLIDKYRASLVPPAPVPAPTPAVGAAAGLAAAMSAAPPAPIPIPAAVASYTEAPSVSASAIGSVATPVQPPPSDEPLM

SEQ ID NO: 449 - protein, 660 aa, unidentified
  source 1..660: note = Related to QXFE01000005.1; note = Burkholderia pseudomallei
MAILASLDQIIEGLVRNHTAWFSSRILGIPYSTLKGIIYPRPPYKRFTIKKRDGTDRVIFEPRNRLKIIQERTLKFLQERCGPFKPAVHGFVSKRSILTNAQVHCSQKIHHVFNIDLEDFFPSISFYRVRGVLEKHPFNCSHQVATVIAHICTLDKMLPQGAPTSPFLSNLVCRSMDRDLTDLARKSLARYSRYADDITFSFPVRKTSRLPASICHVDEDGELLIGTELHDIVTKHSFKINAAKTRLSDRTRRMEVTGLTINRFPNVPRVFIDRIRGALHAWEKYGYDAAEKAWSKRVVKAALMGAPYEKKPWKRQVRRGRMPKLKNVLWGKLLYLKMVRGKDDLIYTRLAERYNEAVLRAQAAGPFTAPRLPVQPVVRDKETALEACFVVEWLGDYQSTAGVTDDILMGQGTAFVYRELNLLVTCHHVLEGKANVGHFQVEMDYEDAELVNKTLNLVKPDTKQKWPAKILYRNAQMDLALLAFDYPPQHRYFSAMDNPIEPGAQGVLIGYPAWKQWNLPDFNDQKVLNRTTPNVGMDSFTISGAGSIRPGNSGGPYTDDRFRVAGMAQRGAYMGDGHDECLCFEIIDDLIAEYRASLAPAPVPAVSTAATSATVTAGTTPAAVSAPAAAAMSASAAIVPSSAMSSLGTLVQPPPRADDT

SEQ ID NO: 450 - protein, 643 aa, unidentified
  source 1..643: note = Related to QTPQ01000002.1; note = Burkholderia sp.
MRTHLSIEAILEELARQKVFWFSTHVLGIAYSELKAIIYPQPPYKHFTIKKRNGTDRVILEPRKRLKIIQEKVLAYLQNRAGSIKPAVHGFVRKRSILTNAQAHCSPKNHHVFNIDLEDFFPSITFYRVRGVLEKQPFNFSHEVATVIAHICTLDKKLPQGAPTSPFLSNMVCRTMDRDLADLARRNLARYTRYADDITFSFPVRKTSRLPAAICRVDDDGDVLIGTELHDLIANKHHFKVNSAKTRLSDRTRRMEVTGLTINRFPNVPRIFIDRVRGALHAWEKYDYAAASKVWSDRVVAASTGPYEKKPWKRQTRSGKVPELKNVLWGKLLYVRMVRGKDDLIYTRLAERYNAAVLKTRAAGPFVAPRLPVEPVVRDKTTAREACFVVEWWGDYQSAPGHTDDIPMGQGTAFVYRELNLLVTCNHVFEGVATVNKHSFNTDFDAPEMVNKTLTLVQPSTKQSWPAKILYRNPQMDFALLAFEDPPSHRYFSAMDCAIESGAQGILIGFPAYQQWNLPDFNEQKVLNRTLPNAGMISFTLSNSGSVRPGNSGGPFTDDRFRVAGMAQRGAYMGTGHDECLCMEVIDALISEYKATLASSAPVTPASALDAAPIVAPSGAVIAPRTAAPAPADPEGPRPPADA

SEQ ID NO: 451 - protein, 650 aa, unidentified
  source 1..650: note = Related to CAJQYY010000007.1; note = Paraburkholderia gardini
MASIPNFDAITESAVRSNIGFFSRRVLGISYDRLKAIIYPRAPYRSFIIKKRDGTARLIHEPRKRLKILQEKVLAFLDERSGPVKPSVHGFVRKRSILTNARVHCSPKTQHLLNIDLEDFFPSITFYRVRGVLRKHPFNFSHEVATVIAHLCTLDRTLPQGAPTSPFFSNLICRSMDRDLTELARHSLARYTRYADDITFSFHVRNAARLPAAICSVDAEGAVQIGQELHDVLVNKHHFNLNSSKTRLSDRSRRLEVTGLTINRFPNVPRIFIDRIRGALNAWEKHGYDAAEKTWQARVVAQSNGAYEKKPWKRQTRSGKVPELKNVLWGKLLYLRMVRGKDDLIYTKLAERYNAAVGAAQATGVFHAPKLPVQPVVRDKVTAQEACFVVEWYGDYNEPGIGAEMPYVQGTAFVYRELNVLITCNHALVWENEEGKFPAVIDYESAHLSGKVLSLVRPGTKEKWPAKVIYRNKPMDFALLAFDGAPPLHRYFSAMDNPIEPGAQGFLIGYPAWKRWNLPDINQQTVLNRTSPHIGMNSFTVTGAGSIRPGNSGGPFTDDRFRVAGMAQRGAHMGVGHDENLCIEIIDDLIAKYRASMVPPPPAAPAPADPAASVSAPVLGVPPPAPSAPAAPASSQNAAPVALPPPQTDT

SEQ ID NO: 452 - protein, 635 aa, unidentified
  source 1..635: note = Related to NZ_SSSP01000009.1; note = Rhodocyclus tenuis
MAIVKMNEMHEALSRNFVTWFSNNALGIPYSSLKGIIYPRPPYKQFVIKKRDGSARVIAEPRNRLKVIQQKVLTFLTERAGPFKPVVHGFVPKRSILTNAQIHCTPKNHHVLNIDLKDFFPSITFFRVRGVLRKHPFNFSHEVATVIAHICTLDGTLPQGAPTSPFLSNLVCRSMDRDLTDLARRNLARYSRYADDITFSFPVRKTSRLPAAVCIVDDDGHLQVGAELQDLITNKHHFTINPAKSRLRDRGRRMEVTGLTINQFPNVPRVFIDRIRGALHAWEKYGYEAADKQWNDLVKNAVTGAFEKKPWKRQTRRGKTPELKNVLWGKLLYLRMVRGKDDMIYTRLAERFNNAVLATHVAGPFSAPKLPVQPVVRDITTARDACFVVEWVGEFHSTPGTCDDVMCKQGTAFVYRELNLLVTCNHLFEHIATINKHEFPTDYEAPEIFNKTLNLVHPGTKQHWPAKILYRNAPMDLALLAFEGPVPPHRYFPAIDSPIEPGKQGILIGYPAWKQWNLPDFNDQRVLNRTSPHAGMNSFTITGAGSIRPGNSGGPFTDDHFRVAGMAQRGAYMGDGHDECLCIQIIDDLILKYKASLTLLTVPALAAVSPDEAAVAATSTPALTSPAPTTPAVTV

SEQ ID NO: 453 - protein, 594 aa, unidentified
  source 1..594: note = Related to NZ_VTUZ01000025.1; note = Paraburkholderia panacisoli
MLRNHVTWFSRNALGVDYEKLKRMIYPRPKYKHFTITKRNGSPRVISEPRKRLKIIQERVLAFLEPRSGPLKPAVHGFVPKRSILTNARVHCSPKNHHILNLDLQDFFPSITFYRVRGVLRKHPFNLSHHVATVIAHICTLDGTLPQGAPTSPFLSNLVCRSMDRDLTDLARRNLARYTRYADDLTFSFPLKKTSNLPAAVCVVDEDGGITLGAELHDLITNKHHFAINPAKTRLSDRGRRMEVTGLTINKFPNVPRIFIDRIRGALNAWERNGYDAAEKGWEERIGKAATGPYEKKPWKRQTRGGAAPKLKNVLWGKLLYLKMIRGNDDLIYTRLAERYNAAILKEMAAGPFSAPKLPVQPVVRDYKTAREAVFVVEWLADYHSSPGHHECPIEAQGTAFAYRELNLLVTCDHVLVGKAEFAGMEVPADFDAPEVVNKMLTVVRPETQESWAARVVYRNKQFDFAILQFEEQPPHHRFFSAMDTPIAPHADGVLIGFPAYQNWNLPDINPQKVLNRTLPNAGMVSFTIANTGSIRPGNSGGPFTDDRLRVAGMAQRGAYMGVGHDECLCFEVMDKFIGEWKAKSAAAAPPAVP

SEQ ID NO: 454 - protein, 636 aa, unidentified
  source 1..636: note = Related to JAEDZX010000001.1; note = Burkholderia plantarii
MVAIPSADALFESLARNNVNWFSHHILGISYAHLKRMIYPRPPYKHFSITKRNGSPRVISEPRRRLKVVQERVLAFLEARRGPLKPAVHGFVSKRSIVTNARAHCSPKNHHILNLDLQDFFPSITFYRVRGVLRKHPFNFSHHVATVIAHICTLDGTLPQGAPTSPLLSNLVCRSMDRDLTDLARRNLARYTRYADDITFSFPVKKTSRLPAAICVVDDDGGVTIGAELHDLIATKHHFTINAAKTRLSDRFRRMEVTGLTINKFPNVRRIFIDRIRGALNAWERNDYAAAEKGWQDRVQKASAGAYEKKPWKRQTRGSAVPKLKNVLWGKLLYLRMVRGKDDLIYTRLAERYNAAVDKEMAAGPFAAPKLPVEPVVRDHDTAEEAVFVLEWFGDYQSQPGHTDDMVMAQGTAFVYGELNLLVTCSHVFEAEAKVGKMMVPTDFQAVEMANKTLQLVRPGTQQAWPAHILYRNKQMDFALVAFDDPVPQHRYFSVMDNPIQARADGILIGFPAYQNWNLPDFNDQKVLNRTIPNAGMNSFTIANAGSIRPGNSGGPFTDDRFRVAGVAQRGAYMGTGHDECLCFEIADALIAAWKATLVPPAPPPAPAAVVPPPAPPPIAPAGHAPTAPPTPPTTP

SEQ ID NO: 455 - protein, 609 aa, unidentified
  source 1..609: note = Related to NZ_BMYS01000009.1; note = Advenella faeciporci
MVAITSAMALNESMLRTSVTWFSSHVLGVPYSQLMRMIYPRPPYKRFTITKRNGSPRAIAEPRQRLRIVQEQVLAFLKERSGTVRPAVHGFVVDRSIVTNAKVHCLPKTQHILNLDLQDFFPSITFYRVRGVLRKHPFNFSHHVATVVAHICTLDGKLPQGAPTSPFLSNLICRSMDRDLTELARRNRATYTRYADDITFSFNVRTASRLPVAICVVDDDGHVTLGTELHDLITAKHHFAINAAKTRLSDRHRRMEVTGLTINKFPNVRRIFIDRIRGALNAWERNGYEAAEQGWQDRVIIGGKVPYEKVLWKRQTRSRVVPKLKNVLWGKLLYLRMVRGKDDVLYTRLAGRFNALVDFEQSFGSFAAPKLPIEPVVRDHDTAQEGVFVVEWAGDYHSSPGRHEDTLQAQGTAFAYRELNLLVTCDHVFEVDATVGSLKAPTDYEAPEIVNKSLRLVRPGTKDSWPARIVYRNRQFDFAILQFEGPVPPHRYFSAMDTPIKPRADGLLIGFPAYQNWNLPDQNEQKVLNRTEPNRSMFSFTISGAGSIRPGNSGGPFTDDRFRVAGMAQRGAYMGDGHDECLCFEVMDTFVTAWRSSTKSTPTTSEIPA

SEQ ID NO: 456 - protein, 601 aa, unidentified
  source 1..601: note = Related to NZ_VIUO01000001.1; note = Herbaspirillum sp.
MPNPFLFPALTDSLIRNDVAQFSRRILGLPYSQLQKLIYPQPNYRVFTLTKRNGKLRSIAEPFANIKAFQLLILEYLTKKSSPFKPSVHGFVPHRSILTNANAHCSPRTQHVLNIDLQDFFPSISFYRIRGVLQKRPFNFSHAVASVVAHICTFDGSLSQGAPTSPFFSNLVCRSMDRDLQDLARRHKAAYTRYADDITFSFTTRNSLSLPKNICMEAPDGRVVIGAELNDLITVKHSFAINADKTRLSNRARRMEVTGLTINENPNVRRIFIDRIRGALRAWETHGYNAAQSVWQAKVAKSILAPHENKIWKRQTRTGSTPQLRNSIWGKLLYLKMVRGGTDPLYNHLAERYNAVVEIEKSLGTFVAPRLPVDPVVRDERGARKAVFVVEWFGDFELSATAADVVSGQGTAFAYRESNLLITCDHLFEATATIKDKSYPADINAPEIKNLALFAILPDIPKKTWPVRILYRNAYDDIAILCFEGEPPPHKYFNPMSAPITRNTNGILMGYPAYKQWNLPDFNRQSVLNRFLPAAGMSSFTITGAGSIRPGNSGGPFTDLEYRVAGMAQRGSYEGRGHDACLCFEIIDKHLQKWKASTTLN

SEQ ID NO: 457 - protein, 623 aa, unidentified
  source 1..623: note = Related to nan
MGLTIEQITKILIRSRVSDFCDEILGVPYSEIKKLLYPRAPYLFFELKKRSGGVRRIAKPTKRLKEIQLRVLEFLEKNRGPYKASVHGFISRRSIVTNARTHCSPKTHQILNLDLEDFFPSITFYRVRGALQSHPYHCSHAVATVIAQVCTVDGVLPQGAPTSPFLSNLICRSLDADLNNLARRNRAKYTRYADDITFSFATRSSTGLPAAICSVGADGRVTLGAELNDLITTKHNFKIKESKTRVSNRATRMEVTGITINKHPNVPRIFIDRVRGALNAWKKYGYAAAESAWQKRVRESGTVAYEKKPWKRQTRLGVPPLLKNVLWGKLLYLRMVRGSEDLLYTRLAERYNALVEFEQSIGPFSAPKLPVVPVVRDHKTAMDATFVVEWSADYRISKEDVDSIIGQGTAFSYRQQNFLVTCSHVFEGKATVGSMEVPVDIDTAELENLSIHVVHPHLKERWPAKVLYRNRQFDFAIMCFDGEIPPHRFYPALESPIEVRDEGMLIGFPAYKNWNLPDMNELAVLNRSEPHRGMRSFTITGAGTIRPGNSGGPFTDMRFRVAGMAQRGAYLGNGHDECLCFEVMDDLIAKWREKIAAECANATTKAAMAENKVDASGSLEQLP

SEQ ID NO: 458 - protein, 673 aa, unidentified
  source 1..673: note = Related to NZ_CADFFK010000002.1; note = Burkholderia vietnamiensis
MAAAVMEKDGRGRHPDLSEARIQSLEEVAERITRTDVPIFCRSVLGIEYRQLAPIIYPTPPYKHFAITKRDGSPRYIAEPRKRLKILQYKLLEFLTERMTPLKPAVHGFVPNKSIVTNALAHAHRRNHFILNLDLDDFFPTISFKRVRGVMMNRPFNFSFEVATVIAQMCCLNLKLPQGAPTSPFLSNLVCRTMDRDLTDLARRNRATYTRYADDITFSFIVRSRKSLPAAICTADDEGHLALGAELQELITTKHHFTINEAKTRLSDRNRRMEVTGLTINKFPNVRRKFIDRIRGALNAWERNDYAKVQKGWEDRIAAAEKLHVDLKPWKRQYRSGRLAQLKNVLWGQLLYVRMVRGKDDLLYTRLAERYNAVVAKERAAGPFAAKVLPVEPVVRDKTTLRDACFVVEWTGDYDEPGGGSEIPYSQGTAFVYRELNLLVTCNHVLEWENEDASKFPAMIDYESPYLTGKSLNLVQPGTRLSWPAKILYRNKPMDFAILAFEDPPPHRYFSAMDNPIQPGAHGYLVGYPAWKRWNLPDVNAQTVLNRTSPHHGMDSFTITGAGSIRPGNSGGPFTDDRLRVAGMAQRGAHMGSNHDESLCLEIINTLIDTYKATLAPPAPVGAADVVALPPAPAPIAVPSAQVAPVPTAPAEGTAAPIAPPTGAGAPDGLQPT

SEQ ID NO: 459 - protein, 612 aa, unidentified
  source 1..612: note = Related to NZ_AMPR02000466.1; note = Cupriavidus sp.
MEVNIFDLEEIGERLTRTDVPMFSRSVLGIEYSKLASIIYPTPPYKHFTIKKRDGSSRHLAEPRRRLKDLQYKVLGFLTERMTALKPAVHGFVPNRSIVSNANAHAHRKNHFILNLDLEDFFPSITFYRVRGVLTSRPFNFSHQVATVIAHMCTLHGTLPQGAPTSPFLSNLVCRTMDRDLTELARRNRATYTRYADDITFSFIVRARRGLPSAICTADDEGHLALGAELQELITNTHHFSINEAKTRLSDRHRRMEVTGLTINKFPNVRRKFIDRIRGALNAWERNGYAAAQKGWQDRIAASASHAYEERPWKRQYRSGGTAELKNVLWGKLLYLRMVRGKDDLIYTRLAERYNAQVQKEQEAKPFTASLLPVEPVVRDHATALEACFVVEWFGEYCSRAGVVDDIPMGQGTAFVYRELNLLVTCDHVFEAFANVNGHSFKTDYEAQEVINKTLNLIRPDTQQRWPAKILYRNAQLDFALLAFEDPVPPHRYFSPMDNPIERRSDGVLIGFPDWKQWNLPDFNDQKVLNRTEPNKGMISFTITGAGSIRPGNSGGPFTDNRLRVAGMAQRGAHMGSGHDECLCLDIINNLIAKYKAALTTVASTPTTYAVD

SEQ ID NO: 460 - protein, 661 aa, unidentified
  source 1..661: note = Related to NZ_CABPSF010000003.1; note = Pandoraea iniqua
MDIHSLDDLGELLTRTDVAVFSRSVLGIEYSKLASIIYPTPPYKHFIIKKRDGSPRYIAEPRKRLKVLQYKVLSFLTERMTPLKPAVHGFVPHRSIVSNAKAHTSRKNHFVLNLDIEDFFPSITFFRVRGVLTSRPFNFSHQVATVIAHMCTLGGKLPQGAPTSPLLSNLVCRTMDRDMTDLARRNRATYTRYADDITFSFSVRARRSLPQAICAADDEGHVALGAELQDLITTKHHFSINTAKTRLSDRHRRMEVTGLTINQFPNVRRKYIDRIRGALNAWERNDYAAAQKGWEARIAASTTLLYEQKPWKRQYRSGGIAELKNVLWGKLLYLRMVRGKYDSIYTRLAERYNALVQKEQAAGPFAAPILPVAPVVRDHPTALEACFVVEWLGEYHSTPGVSDDIPMGQGTAFVHRELNLLVTCNHVFEAVAHVNGHPFETDYEAVEVVNKTLNLIRPDTQQKWPAKILYRNAQMDFAILAFEDPVPPHRYFSPMDKPIERRADGTLIGFPDWKTWNLPDFNDQRVLNRTEPNKGMFSFTITGAGSIRPGNSGGPFTDDRLRVAGMAQRGAHMGSGHDECLCLDIINDLISKYKATLAPPAAHANAPAVSATMPAPVASPPIRLLAPLPLSDPAPEAPAQAASPPTAPPLAANSEPPLGDV

SEQ ID NO: 461 - protein, 658 aa, unidentified
  source 1..658: note = Related to NBTY01000203.1; note = Caballeronia sordidicola
MVIPSLNVIFEQLTRTFVPSFSQAALGIPYAQLKDIIYPSPPYKHFQIKKRNGSPRFIAEPRQRLKVMQEKVLTFLEERMSPLKPAVHGFVPKRSIVTNARAHCSRKTQFVLNLDLQDFFPTITFFRVRGVLRNRPFNFSHEVATVIAHMCTLNGSLPQGAPTSPFLSNLVCRTMDRDLTDLARRNRATYTRYADDITFSFAVRTASRLPAAICVVDEDGHLTLGAELQDLITGKHHFTINPPKTRLSDRARRMEVTGLTINKFPNVRRKFIDRIRGALNAWERNGYAKAESGWQARVANAESGPYEKKPWKRQTRTGAPPKLQNVLWGKLLYLRMVRGKDDLIYTRLAERYNKAVLKEQAAGPFKAPKLPVEPVVRDKVTAQDACFVVDWYGDYKDPTLGEEMPMAQGTAFVYRELGLLVTCNHVFEWEGKVGKADTVIDYESPYLTSKILQLIQPGTKKSWPAKILYRDKQMDFALLAFEGDPPQHRYFSAMDNPIESGAQGVLIGYPAWKQWTWPDFNDQKVLNRTFPHVGMNSFTISGAGSIRPGNSGGPFTDDRFRVAGMAQRGAYMGTGHDECLCLEILDGLIAKYKATLVPPVPPAPATVLGAPPTPAAGSAALPLPVPAAPAATVNGAAAPAARAPAHPVPAAPIPPTLP

SEQ ID NO: 462 - protein, 624 aa, unidentified
  source 1..624: note = Related to WBTZ01000029.1; note = Zoogloea sp.
MNLDAFDEMQKRTSVSWFSHIVLGTPYSQLKTVVYPKPHYKSFVIKKQNGGPRVIHEPRKELKLIQKKILAFLSERAGPIKPAVHGFVHKRSILTNALKHCSPTTHHILNLDLKDFFPSITFRRVRGALRKHPFDCSHEVATLIAHICTFNGTLPQGAPTSPFLSNMLCRRMDRDLTDLARRYRATYTRYADDLTFSFNVRSAERLPSAICMVEDGNVAPGTELTELITTKHGFAINPTKTRLNDRFGRMEVTGLTVNNFPNVRRNFIDRIRGALNAWETYGYAAAQLEWEKRNATYIAAPYITKLWRRQTRANFVPKLKNVLWGKLLFVRMVRGKEDALYTRLAERYNKACAAEQGTVPFVYEKLPIEPVVRDYGSAEDAVFVLEWMGDYHSSPGVFEDMVCSQGTAFAYRELNLFVTCDHLLSGAKAKVGTFEVEADYDAKEMVNKTLQLVHPFTKQSWPAKVLYRNAQLDIALIAFDMPQPPPHRYFAAMENSIRVRTSGILIGFPAYKNWNRPDFLEEKVLNRTEPNKGMASFTITGAGSIRPGNSGGPFVDDRFRVAGVAQRGAYMGDGHDECLCFEVLNQLIDKWKAPQAKSVLPENKIAATIVATSPGAVSTAAPQT

SEQ ID NO: 463 - protein, 601 aa, Thiobacillus sp.
  source 1..601: note = Related to JAJPEP010000007.1
MTTTLSTISLNDILLRHDVHHMSSKILGVPYSTLKALIYPLPPYKSFVITKRNGSPRLIQEPRRALKELQYKALDYFYEQCGLPKPCVHGFTKDRSIVSNAKSHCSDQTQHLLNLDLEDFFPSITFYRVRGVLQKKPFELSHQVATVLAHLCTFKGVLPQGAPTSPLLSNLICRSMDRDLMSLAKRHRATYTRYADDLTFSFSVRRSESLPSNICSFDGGNLTLGNELQAIIAAHSFRINAEKTRLSTRLHRLEVTGITINEFPNVRRVFIDQIRGALNAWEKYGYNLAQKDWERRITDGVASAYEKRPWKRQIRANSPPDLKNVLWGKLLYVRMVRGKDDVIYTRLAERYNAICETEDAKGPFAFSRLPVELIVRNAQDAERAVFVVEWSGDYQPEGNTAPLDVVLSQGTAFAYKDVGLVTCDHVLSYSGKIGGVTYTTDVQSSDVINKTLTVRNPVTGASWRVKVVHRDATRDLAILVFDEAPPAHRHFSSMVAPMNQGMRGILMGFPNWSPGRRVNQTKADVLSCYARSALKRFEISTNIRQGNSGGPFVDESYRVAGVAQQGARQDAGNDECLCVTDLDAWIAQWKASAMGTMAASS

SEQ ID NO: 464 - protein, 602 aa, unidentified
  source 1..602: note = Related to JACXUH010000009.1; note = Betaproteobacteria bacterium
MNDILLRNDVHYMSSKVLGVPYSTLQALIYPRPPYKSFTINKRNGSPRLIQEPRRALKALQYKVLDYLYEHSGLPKPCVHGFTKNRSIVSNAKAHCNRQTQHLLNIDLEDFFPTISFYRVRGVLQKKPFEFSHQVATVLAHLCTFNGILPQGAPTSPLLSNLVCRSMDRDLMALAKRHRATYTRYADDITFSFSVRRSESLPANICSFDSGILTLGHELQATIATHNFRVNAAKSRLSTRLHRLEVTGITINEFPNVKREFIDRIRGALHAWEKHGYDLAQRAWEKLVSDGAIGTYTRRPWKRQTRIGKLPPLKNILWGKLLHVRMVRGKDDVIYTRLAERYNAVCEAENVKGPFAYSRLPVGLIVRNAQDAERAVFVVEWDGDYQPIGSAAPLDMVSSQGTAFAYKDVGLITCDHVLSYSGMIDGKSFTTDVQSGDVINKTFTVRHPATGESWKVKVVHRDAARDLAILEFDDEIPSYRYFSCMAAPTNQNMRGLLIGFPNWSPGRPANQSKADVLSYYPRSGLKRFEISTNIRQGNSGGPFVDEFFRVAGIAQQGARQDGGNDECLCVTELDAWVAQWKAATTASISAPTLVEPVAKSFP

SEQ ID NO: 465 - protein, 595 aa, unidentified
  source 1..595: note = Related to JAHIHT010000028.1; note = Gammaproteobacteria bacterium
MAVHVPLTPSALHTLLIRNNLPYMSRHVLGVSYDTLQAMIYPLPPYKTFALMKRNGTPRVIHEPRQRLKVLQERVLAFLYEHAAPAKPCVHGFTPKRSIVTNAQMHCSQKTQHLLNIDIEDFFPSITFYRVRGVFQKKPFEFSFPVATVLAHLCTFSGVLPQGAPTSPLLSNLVCRSLDRDLMTLAKRHRATYTRYADDLTLSFSVRRAESLPSNICSFDSGILTLGHELQALIEHHSFRINPNKSRLSTRLHRLEVTGITINEFPNIKRKFTDRIRGALHAWDKYGYDHAQLEWERRVNKAAEEAYAKRPWKRQTRTRTVPALKNVLWGKLLYVRMVRGATNTLYLRLAERYNALCARERLKSEFVCSSVPIDSIVRNSNQAKKAVFVVEWYGELDGKDVGGLGTAFKYEDVGLITCEHVIKHQDHGPYADDIPRSEIFVRDAETDETWPVRIVHRDKDHDLAILQFDTANPPVSRHFIRGEKPITVNESGVLIGFPNPTRGRQANQVNAQVVNVFPRAGLPRFEIKERIRQGNSGGPFVDENYRVVGIAQQGAEQGKGNDECLCITEVNRWLDAWKTSLVVAVAVASAPDPIP

SEQ ID NO: 466 - protein, 565 aa, unidentified
  source 1..565: note = Related to DPRS01000035.1; note = Oxalobacteraceae bacterium
MSDQLFGITYSELQALLYPRQPYKTFIIAKRNGSPRVIHEPRIALKVVQEKLLHFLYENAGMAKPCVQGFTPGRSIVTNAQKHCSPRTLHLLNIDIENFFPSITFYRVRGLFLKKPFEFSHQVATVLAQICTYQGILPQGAPTSPMVANLICRSLDKDLTLLAKRHRAIYTRYCDDITFSLSVRDIAKLPVNICSFDSGVLTLGDELQSIFVKNSFRINPLKSRLGNRRHRLEVTGITINKSPNVKRSFIDSIRGALHAWDKYGYEAATAEWEKRPYKRQRRIGGIPSLKNVLWGKLLYVRMVRGGDDVLYTRLAERYNMLCEKEQAARKSFTYSSLPIEAVVRNAADAENAVFVLEWLGDYKGEPVGGQGTAFAYKDVGLLTCEHVFHTVTENGEPVSFDEVKGATLTLQNPSTGKFWPAKLIHKDPYRDLAVVHFDTRIPPAHRHFSALEAQINRNSKGILIGFPNWSPGKRANQLYVTVLNRFPITGLQRIEINGSVRKGNSGGPFVDELFRVAGVAQQGATQANGNDQCLCVTELDKWLVEIKGLAHGLSLDALPDTPVAD

SEQ ID NO: 467 - protein, 581 aa, unidentified
  source 1..581: note = Related to JACVPM010000001.1; note = Polynucleobacter sp.
MTVNFHEILIRCDVDYMSKHIFSTSYADLAKLIYPSPRYKAFVISKRDGTPRVIEEPFRKLKRLQYKLLDYLSRNSSTPKVCVHGFIKERSILSNARVHCSSKTSYLLNVDIENFFHSITFYRIRGVFQGEPYNFSYEISTVLAQLSTFNGRLPQGAPTSPFLSNLICRSLDGELMRLAKSHRGMYTRYADDLTFSFSARTPLGLPKNICEFDGGNLHIGNELLSIIEKNSFKLNEKKSRISSRKHRLEVTGLTINEFPNVRRNYVDQIRGAIHAWDVHGYEAAQKRWIEKNNVAVKVRQTRNLYAPQLKNYLWGKLLHLKMIRSRGDPIYTRLAEKYNTLCAKESGKGFIFAPKLPIEPIVRNANDIESAVFVLEWSGDYILNEASPEHTEVVGAQGTAFIYKDFGLITCDHVLSSMLRIGGVDVSVDIDSDRILNKKLYVCNPLLAKSLPVRVIHRDRHLDLAVLEFVDGVVGNRYFSSAERPILRNEQCTLVGFPNWTVGRGVNLLPVSVVIRFFRSLFNRIEISGAIRKGYSGGPLIDSSFRVIGIAQEGATQADGNDECLCITEVDKWLSGLTVRP

SEQ ID NO: 468 - protein, 621 aa, unidentified
  source 1..621: note = Related to NZ_AP018441.1; note = Undibacterium sp.
MKDVEVATAWAHMTDSDIHFDVLNLPFREALIRTNVEFMSRYLLGIPYSEVKKIIYPTPSYKIFLITKRNGKARIIQEPRKALKELQLKVLSFLETRGGNPKACVHGFTKRRSILTNALRHCSTQTHHLLNIDLQDFFPSINFFRVRGVFQSKPFECSYSVATVLAHLCTHRNELPQGAPTSPILANLVCRKMDSELMALARRHRATYTRYADDISFSFSIRDAVRLPENICRFESGTLTLGQELQSIILENSFNINSTKNRLSNRLNRLEVTGITINEFPNVKRNFIDRIRGALHAWEVFGYIKARDQWDALISEGLRLTREKRIWLRQRRTRAVPELANVLWGKLLYLRMVRGADDAIYTRLAERYNVLCAKEVEEGRNFFFSKLPVEPIVRNSHDVDHAVFVVEWGGLYPVEGAKAPEFVCGQGTAFLYQSNNCLVTCEHVFRYKESVKITKYGEEVEEILDTGYMSPDVYEKNITIHSPVRGQTWDAKLVHYDSDRDLAILEFVSPPENVRHFTSLDAPIKKNEPGYLIGFPNWNPGRFSNQTNASVLNRFPRKGLQRIEVSTNVRKGNSGGPYVDELFRVAGIAQEGATQSGGNDECLCVSELNTWLKNSTNKKET

SEQ ID NO: 469 - protein, 573 aa, unidentified
  source 1..573: note = Related to JACHCH010000008.1; note = Janthinobacterium sp.
MSKNLLGMPYSEIQKIIYPTPPYKVFVITKRSGGPRLIQEPRRKLKELQLKVLAFLEEHGGKPKPCVHGFTKNRSIVTNARKHCSRQTQHLLNIDLKDFFPSIGFFRVRGVLQKRPFACSHSVATVLAHLCTHRNELPQGAPTSPMLANLVCRRLDSDLMDLARRHRSTYTRYADDLTFSFSVRDTSRLPENICAFESGGLTIGHELLSIIDKHNFDINPTKSRLSTRLHRLEVTGITINEFPNVKRIFIDRIRGALHAWEKHGFDAASAEWERRITKGKTCIYEKRPWKRQTRTRKIPELINVLWGKLLYVRMIRGADDVIYTRLAERYNVLCEHEQGLSADFSFSRLPIESIVRNANDAERAVLVVSWLGDYQPVGVAESEAVGGQGTAFPYQSNNCLVTCDHVLRWEGVVNENNVSTDCTSVDVHGANLKVISPALGLEWPVRVVHRDVDRDLAILEFIGPPPNIRHFAGLDAPIKRNETGYLIGYPNWNAGRVANQVNVVVTNRFARRTFQRLEISTTIRQGNSGGPFVDDLFRVAGVAQEGATQVSGNDECLTVDELDTWIATWKTRN

SEQ ID NO: 470 - protein, 579 aa, unidentified
  source 1..579: note = Related to JACOGB010000003.1; note = Undibacterium sp.
MSTFPLGILTRNFVESLSANLFGMPYSDLQKIIYPSPRYKSFIINKRNGSPRVIHEPRAKLKALQDKVLLFLEENAAPVKPCVHGFIIGRSIVTNAKKHCSPQTKFLLNVDLKNYFPSINFYRVRGIFMKKPFSCSHAVATVLAQICTHNNELPQGAPTSPFLANLASRRLDTELMDLAKRHRASYTRYADDLTFSFSVRKASSLPENICSYDSGVLTLGKELISTIEHNSFNINPVKSRISTPLHRMEVTGLTINEFPNVKRNFVDWVRGTLHAWDKYGLAATQVEWERKMEAAKTSPYEKKPWRRQRRCKGFPSFYKILWGKLLYLRMVRGPNDALYTRFAERFNGLYQRDMGGAALLLPIENIVRNAADVERAVFVVSWMGDYQLEGGASEFCASQGTAFAYMSANKLITCEHVLRCELEVNGQVLMVDFQDAQMRNGEMTAHSPTLGFSVPVRVVHRDQDRDLAVLEFVNPPPANIRHFVGRDSLIKRNEHGILVGYPNWNPGRIANQAAANVLNRFPRRGLQRIEISTNIRRGNSGGPYVDELFRVAGVAQEGATQADGNDECLCVEELDKWLD

SEQ ID NO: 471 - protein, 597 aa, unidentified
  source 1..597: note = Related to JACPOI010000015.1; note = Burkholderiales bacterium
MKDVEVTPPMPVVSSPIDLHGVFLKVDADYFSRHVFGVPYSSLKAVLYPTPRYRAFIIAKRNGSPRIIHEPKRQLKEFQLKLLSFMESQVTQIKPCVHGFVKGRSIVSNAERHLETQPHHLLNLDLEDFFPSISFYRVRGVFKKAPFGLSHEVATVLAQLCTYSNSLPQGAPTSPMLSNLVCRSLDRDLTALARRHRATYTRYADDLTFSFTVRDPNRLPSNICSFDSGIVNLGHELQALIQEQHHFRINPKKTRMSTRFHRMEVTGLTINEFANVKREFIDRIRGALSAWKKYGYGKSQASWQDRVIDGQTKPYEQRLWRRQVRGGGVPELKNVLWGKLLYVRMVRGRDDSIYTRLADLYNELCKQEKKVDKDFLFSSLPVEKIVRNAVDAERAVFVIEWSGDYCPPGASASEMVGGQGTAFAYKKADQLITCDHVFNWEGQYAGASVSVNCQSSDVHGLTLRAVNPATGLSWPVTIVRRDAPRDLAVLQIAGGSLAHRHFVAIEAPLKRNTRGFLIGYPNWSPGRVANQVTANVQSLYNRSALARFEISTLIRQGNSGGPFVDAQFRLVGVAQQGATQQSGNDECLSVLELEKWL

SEQ ID NO: 472 - protein, 587 aa, unidentified
  source 1..587: note = Related to JACIBG010000006.1; note = Variovorax sp.
MAFLGVKEFHDYMLRSDVPYFSRHIFRAEYSSVEGYLYPHPRYTSFVLAKANGKNRFIAEPSKKIKELQYRALRYLEKTVPQPKACVHGFVEGRSILTNARKHLERRPYHILNLDLTDFFPSITFFRVRGALMAPPMKFSFGVATMLAHLCTHEGTLPQGAPTSPFLANLICRSLDSQLTLLSKRHRATYTRYADDLTFSFSHRHANRLPANIVNFDGGTVSIGSELRSIIESNSFGINNDKTRVSTRMRRMEITGVVVNEDPNVTRKFIDKIRGALHAWDRYGYVAALANWNARVAETLKEPRAGKQWARQTRTGNIPSLQNVLWGRLLFVRMIRGDDDLLYTRLAEKYNHLCRTHKAIDPEFRAASLPIALQVKNSLDADFATFVFEWSADYAASDAHESEPLVSQGSAFAYGDGRRFITCDHVLKGQSADGEVDVANPRVRNLTMNLRNPVTRIDFQARVLHRDAHLDLAVLELVDPAARAKRYFDGRTEPLERDARARLIGFPNWTQGRTANNSVVSVQQRFPRAGLQRIEIGGSMIRQGNSGGPLVDASYKLAGVAQQGASQSSGNDECLCIMELDRWLASL

SEQ ID NO: 473 - protein, 586 aa, unidentified
  source 1..586: note = Related to NC_022247.1; note = Variovorax paradoxus
MAILGKNEFHDFLLRADVPYFSRHIFGAEYWKIEGLLYPTPRYTNFVIAKANGKNRHIAEPSKKIKALQYRALAYLKGTVPPAKPCVHGFVEGRSILTNAEKHLERRPYHILNLDLSDFFPTITFFRVRGALMAPPMKFSFEMATMLAHLCTHEGSLPQGAPTSPFLANLICRTLDSQLTLLSKRHRATYTRYADDLTFSFSHRSAERLPANVVAFDGGTVSIGSELRSIIESNSFHINEGKTRISTRLRRMEITGVVVNEFPNVTRKFIDKIRGALHAWEAHGYVAAQATWTARITEKLKNPPRERPWARQTRTGNIPSLQNVLWGRLLFVRMIRGNDDLLYTRLAEKYNHLCRLHQTIDPGFRGASLPIDLQVRNTLDVDFATFVLEWSGDYTAPGTDESEPLVSQGTAFAYGTGRRFITCNHVLTGQSKDEEIDISNPFVQNVSIVLRNPLTGTVSPARVLNRDSARDLALLEFVDSETRAQRYFDGRPEPLERSAQARLIGFPNWTPGRTANNTEVSVQHRFARAGLQRLEIGQTIRQGNSGGPLVDSSYKLAGVAQQGASQSSGNDECLCVMELDRWLTAL

SEQ ID NO: 474 - protein, 642 aa, unidentified
  source 1..642: note = Related to NZ_CP017754.1; note = Cupriavidus sp.
MNTPNTILIQALVENQDLMDAWERMDVHVFSTGVLGVPYEQVQKILYPHPPYRAFLMAKRSGGFRLIREPRRRLKVLQEKVLAHLYERAGTPKPCAHAFIKDRSIVTNARRHLERRPTFVLNLDLEAFFPSISFYRVRGVLKKPPFNYSHEVATVLAQMCVVGNELPQGAPTSPFLSNQVCRSMDRDLMALAKRHRATYTRYADDITFSFSAPTRAALPSNICTFDSGVVTLGQELVGIINQHNFQINPSKTRMSTRRRRMEVTGIVINEFANVKRIFIDKIRGALHAWDRYGYAAAQAAWEQRVTNGTTLAYEKRPWKRQTRTGQTPALKNVLWGKLLYVRMVRGDSDAIYTRLAEKYNRLVARERDGNADFAASTLPVEAIVRNVEDAERAVFVVEWAADYQPPVPGQPTMVGGQGTAFAYKQRNRLITCDHVFRAEGEYQLGDGPNAQEIPFTTDINEAAVQGLNVTAIDPVSGQRWPLRVVHRHAHRDLALLEFEGAPPDHRHFSGMEAPINRHAPTHLIGFPNWNNGRRANIEPAIVTARFPRTGLQRFEINQLIRKGNSGGPVVDELFRVAGVAQQGAQQDAGNNECLCVLELDAWLAEYDADVAAPADVPAAEPAAPAAAAEAPAAPVAPAEPAA

SEQ ID NO: 475 - protein, 628 aa, unidentified
  source 1..628: note = Related to NZ_CABPRY010000003.1; note = Pandoraea cepalis
MTTPLLTAKDAAEAAKWAEIWARTDVHLFAADVFDLAYEEIQNIIYPTPPYKAYLLAKRSGGQRVIREPRRRLKDLQVKLLKYLIERAGTPKPCAHAFTEGRSIVTNARKHLERRPHFVLNLDLEGFFPSISFYRIRGVLRKAPFNLAHPVATMLAHMCTVNNELPQGAPTSPFFSNQVCRSLDRDLMALAKRHQATYTRYVDDITFSFSTPNQIALPANICTFDSGVVTLGQELVGIIGQHNFRINPAKTRMSTRRRRMEVTGIVINQFPNVKRAFIDKIRGALHAWDRHGYKAAEENWQARVSNGARLAYEKRPWKRQARLGQPPELKTVLWGKLLFLRMVRGADDTIYTRLAEKYNRLVERERAGDAPFVSATLPVEAIVRNAEDAERAVFVVQWLADYHPPNAGTQEAVGGQGTAFAYKRHNRLITCDHLFRADGEYRRGEDPQAPRVPFTTDLTSPQVRGAMVSVTDPVTGQEWAVRVVHRDAHRDLAILEFDEEPPAHRHFSGMDAPITRHAPGHLVGFPNWNNGRRANIEHAIVSARFPRTGLQRFEINQLIRKGNSGGPFVDELFRVAGVAQQGAQQDAGNNECLCVAELDAWIEAYEATRVRPPPAPPAPAAVERGPAA

SEQ ID NO: 476 - protein, 606 aa, unidentified
  source 1..606: note = Related to NZ_CDQJ01000001.1; note = Ralstonia solanacearum
MLQKTQVNSFSSAILGAPYATVQGILYPRPPYRSFELAKRSGGIRVIREPRKRLKLLQLKALEDLEQRAGRPKPCAHGFVKDRSIVTNARKHLERKPHFLLNLDLEKFFPSINFFRVRGVLKKPPFGFSHEVATVLAQMCVLDNELPQGAPTSPFLSNEICRGLDRDLMALARRHRATYTRYADDITFSFSTPNATSLPANICTFDGGLVTLGQELISIITSHSFQIHPTKTRMSTRRRRMEVTGVVINEFPNVKRVFIDRIRGALHAWDRYGYDLAQKAWANRVQAGASTAYEKRPWKRQTRSGNPPELKNVLWGKLLFVRMVRGADDAIYTRLAEKYNHLIQRERGTKPDFAASSLPVEAIVRNAEDAERAVFVVEWSGDYLPTGTTEATMAYGQGTAFAYKKKDRLITCDHVFTARCEIAGASVDVDIQSKDLREVSLEAHDPATGNRWPLRIVHRDAPRDLAILQFEGEPAAQRFFSGMDAPINRHAPGHLIGFPNWSPGRRANVEPAIVTNRFRRSALQRVEINQLIRKGNSGGPYVDELFRVAGVAQKGATQDDGNNECLCVAELDAWINASGEAPPPAASTASAGGGRAGEPLRRRPTR

SEQ ID NO: 477 - protein, 557 aa, unidentified
  source 1..557: note = Related to NZ_CP090000.1; note = Xanthomonas translucens
MHVFGVQYSELEKLLYPRPSYRAFLIPKKDGGLRAIHSPRLHLKIIQKKLLEYLERVGNPPKASAHGFCKDRSIVTNAAKHSLARTRFILNIDLENFFPSINFFRVRGLLLAPPFGLSYPVASLVAHICTYQNELPQGAPTSPYISNQIARSLDRDLMNLAMRHRATYTRYVDDITFSFSVRSEAALPANICSFDSGILSLGAELQALIAKNGFKLNEKKSRISSSRRRMEVTGLKINRFPNVRRNFIDEIRGALKACETHGYLNADAHWKRSFRSDFGVKRANTYRALRDDKYQPELKDFLRGKILFVKMVRGEDDLIYNRLAERFNAVMPSTTVRPLKVYPVVKTEDDLRRACFVIYWQAAIMDTASGERKMLSGQGTGFLYGDGNLITCDHIFYDTTALEGVQKDVHITDRELEDIKCVAIDHQHMEHDLTLMRWDVPRDLALLHFDRNAPHNKHLTPALSSAKRHDRGWLAGYPDWTSGRPANVVEAQVDNSYVRSGLARLELNQTIRSGYSGGPYVDKSYRLIGIAHRGATQSSGTNECLASHELDKWIASP

SEQ ID NO: 478 - protein, 568 aa, unidentified
  source 1..568: note = Related to RBIT01000001.1; note = Acidovorax sp.
MADAFDEMVLAIDVRYFASTVLLEDYKKIAALIYPKPRYREFNIPKKSGGKRAIAAPRKKLKILQQRLLSYLVAKIDPPKACVHGFVPGRNVVTNASKHSERNPRFILNVDLENFFPTITFYRVRGVFLKRPFNLSYSVASMLAHLCCHNGVLAQGSPTSPILSNLVCRKLDNDLSALARKYRAVYTRYCDDITMSFVAKMADNLPANICSFNGEAVNIGDELKAVIAANGFALNDEKSRLSSSSHRQEITGLTVNDFPNVRRQYIDSIRGALHSWEVHGYKLAEARWQETPYKRIRVSNTVPKLCFNLKGRLLYLKMVRGGDDEIYGRLASKFNKLVAIGVVGEVPPCKPLPIDYSVTTANGARHAVFVLQAQWFEKNELIFERQGTAFFVGQGYLLTCEHVVSNELSSDEKDDAMGELEQARHTVLIPGGKEYPVELVAVHEHYDVALLKFSGDGPEYIRRFKLSQASATVGQKSCLLGFPNWSNGRPVTVVNGEVTSVYSRSATQKLETSQQIRKGNSGGPLLNAELEVVGMATDGATYEKGNNECLTSGQIRQWLIDIKAEVQL

SEQ ID NO: 479 - protein, 553 aa, unidentified
  source 1..553: note = Related to NZ_FMZC01000029.1; note = Acidovorax valerianellae
MEYEKVGSVIYPSPLYTQFTLPKKSGGVRIIDAPFQELKELQHKLLVFLKTLVDPPKSCVHGFVSGRSIVTNALAHSERSPKFVLNIDLKNFFPTISFYRVRGIFLKRPFSFSHQIASLIAHMCCKDGFLVQGASTSPLISNLICRNLDNQLRGLSLRHNSVYTRYCDDLTFSFPRERAESLPGSICSFAGEIVTLGAMSLEIIASNGFEINSDKTRISSSKRRLEVTGLVINKFPNVSRDYVDRLRGALHAWDVHGYPRALRSWKNKIPYERAGRRPRPPLAGIVRGRLLFLKMVRGADDDLYVRLATKFNILRQRDSIYRKIRALKSLSVDSVAKTATAARKAVYVIEVVWTDAADDMPLVDRRGTVFVTEYDLLISCHHVIDPDFSDDERKEISGKILNRSVKLIVPETNDTYSIDVIKFDSHLDIALLKFSEAKPAGLRKLLFSERSPVQSSGTTLLGFPNWKQGRPLTSASGEITSIYPRSNTNRLEASQAIRQGNSGGPLVDPDFRVIGMAIEGATYDRGNNECLAANEIINWIQPEVDKLKSQLKF

SEQ ID NO: 480 - protein, 575 aa, unidentified
  source 1..575: note = Related to NZ_AP025556.1; note = Delftia lacustris
MASLEFDIRKIDVELMAQDIFGRPYAEISKIVYPRPKYKYFVLPKKSGEYRSIVAPSLKLKNIQESLLDFLQREFPLAKSCVHGFHRGRSVVTNAQAHCNRDTSFVLNIDLEDFFPSISYYRVRGVFENSPFGYARNTASALAHICCNNGILAQGAPTSPIISNLICRGLDKDLSALARKHRAIYTRYCDDITFSFKSGRVDRLPASICKFDGDVLGIGDELTEIISSHGFRIKHTKNRISSRQRRMEVTGIVINKFPNVRRLYVDKIRGALHAWETYGYEMASKIWEEKKYSRSLRTGAIPRLYKNLYGKLLYLKMVKGDSDDVYRLLAMKYNRVFLKSQSLGELGDGKLLSLGSRVVNASHVKSAVFVIHARWGLDELGLPEEEVQGTIFCLVGKILITCSHVIEKPEHIKTDTVEYYLVEPTSGKEHRLNLICNDSHKDIAVLRFVEQGVPDARELVLSEQPISQNADVMLYGFPNWTRGRALNSLPGTVTSTFIRSNIDCLEVDCSIRQGNSGGPLLNVGMRLVGMATQGADVKSGNNECVTVSEIRDFILRCSTSHPLHFDKSFNISNLF

SEQ ID NO: 481 - protein, 566 aa, Nitrosomonas sp.
  source 1..566: note = Related to NZ_FOUB01000063.1
MAIHKNIFSKISTLDELAYKLAGIPYNLLAKLIYPTPRYKCFDLIKKSGGVRTINAPRRKIKKIQRETLELIKEYYQSVKSPVHSFVKDKSIVTNAQQHIGKSFIFNIDLENFFTSIHFGRIRGIFLKKPFEFSYDISTVLAHICSKDGILPQGAPTSPIISNLICRSLDSDLQKLARKYRATYTRYCDDITFSFTVRRISDLPKQIVDLSVAPANIGTELLAIIDKHELKVNSRKVRLEGRSNRMQVTGLTVNEQPNVPRTFVHEIRGMLHAWERYGLKKAQDQLKTKYSRQLRTTEIPPFYNVLRGKLLFLKMVIGETSLVYARLAMRYNKLIDRDNLKQNSKLPLSREIANDIDAKRAVLAIECCEDIPRLKESPLVSMGTAFIYRKKYIITCWHVISQKVESLGEDITFHETSIELYDYKKKKLEVTILAGCPRRDVAILAPKFDITVYPYFSPATTPPLSGDSLQMLGFPNYQVNKKISYTKTKLLTEEYTKSCVQYIEIRDTIRKGNSGGPVFNSNWEIVGIAVEGATQADGDNGVVVTSEIDRVIDSSEFKYQQKDKNH

SEQ ID NO: 482 - protein, 559 aa, unidentified
  source 1..559: note = Related to JAJFTF010000030.1; note = Betaproteobacteria bacterium
MAIHTPLSTIPDLEKLADRLVGNSYSVLADLIYPKPRYKTFSIAKKSGGIRTIDAPKKKIKAIQWKTLALIKEYYQCVKTPVHGFAKGKSIVTNAQQHLEKTFVFNVDLEDFFPSIHFGRVRGIFLKKPFEFSYDIASVLAHICCKDGKLPQGAPTSPVISNLACRRLDSDLQELARKYRATYTRYCDDITFSFSVKRITDLPKQIVDQRAFPVNPGTELLAIIEKHSFRVNSGKVRLEGRSKRMQVTGLTVNEQPNVPRIFVHEIRGMIHAWERYGRNGAETYLASKYSRQLRNPVSPPFHNVLRGKLLFLKMVRGASSPVYARLAARYNSLIDHDKLQPNSKLPISRTVANDIDAVRATFAIECVQDFPELAGLELSPLVSSGTAFIYREKYIVTCWHVISPRIEKLGKSFTFDEASIEIYDYKKKKLQVTVLAKCKDRDVVILAPKFDVTEYPYFSPAQLSPSSGDILQILGFPNYQMSKKVSRTKTELITEQYAKHGVQYIEVKDTIRKGNSGGPVLDSNRGVVGLAVEGATQAEGDNGVAVTLEIDHVIDSIVV

SEQ ID NO: 483 - protein, 561 aa, unidentified
  source 1..561: note = Related to MWTD01000011.1; note = Planctomycetes bacterium UTPLA1
MPAPLSKEATQLLTLKTHEDVARFFGYPNYVSLQSLIYPRPLYTSFVIPKRTGSIRIISAPRRRIKDVQRLLSTALLDLYGHGRKPVHSFMKGRSVVTNARQHAQSRFVLRVDLRDFFGSIHFGRVRGVLLNRPFALPEPVATVLAHICCLDGKLPQGAPTSPIISNLVCRGLDTALMKLAGECRATYTRYCDDLVFSFSIRQAGKLSARIVASEGGVVGVGHELETAIKREGFEINVAKTRLYHYGARQTVTGLVVNEFPNVSKKYYRSLRTALYAWEKHGYESASLNVPGTIQHRRYRSGKPRCLHRLLWGKLQYMRMVKGERDASLISLVHRFNRLLARDAAVVEKPVPPAIHVKPTVARAKDARAGTWMLEAITHRDTPDELLNEGTAFYVRGVGFITCAHCLLNTYVSPPTAHNEFFLHSHDRRYKYQVTPHQFDYGLDLAVLAPDSSFVENEHLAFEIDPALPAVGTAVVLCGYPGNSPSRPPVIYQSDVSRTVTVSGVSRIEIDKPVHPGSSGGPLLSALTGKVLGVVATFKKGDAGADAAIAIAEISRLGAPK

SEQ ID NO: 484 - protein, 547 aa, unidentified
  source 1..547: note = Related to NZ_CP038033.1; note = Nitrosococcus sp.
MNKEDFLKITTHNELASMFGMSYAKLTKIIYKTDGVYKYHQFQIPKKNGGHREIASPSKKLKKIQSELKELFYEIYPSKPSAHGFAKNKSIVTNAERHLDKRFIFNIDLSNFFGSIHFGRIRNLFKSSPFNFNNSIATILAQICCFDNSLPQGAPTSPILSNMIAWKLDTQLQSLAKMTNGTYTRYADDISFSFTTTKGRLPEEIVILRGGEAAPGHALTHIIEENGFFINYDKVRLCSRLSRMEVTGLTVNELTNVRRKYVRQLSSMLHAWRKHGYELAEKDFNEKYDTRYRASGKPKSFLHVVKGKLAFLRSVKTERDPIYIKLATQFNDLVTDEHKFKIKVPSDPEKNAINALWVIEACYDNEEGEAMVPQGSGFQLEDIGIVTCAHVVSEKGKIFEDLEAFKHDDSTVKYKLRVERICSHRDIAICSLLVEEGKEPPKHSVSRSANNVEMGQDVKLLGFPAYAPGHSYFMVDTKVAKIYTQSLVRKFEINALIREGNSGGPIIDSKSSVVGIALEGARKEAGNNGCLTIPELEDVLSDDKYKI

SEQ ID NO: 485 - protein, 547 aa, unidentified
  source 1..547: note = Related to QNFF01000108.1; note = Gammaproteobacteria bacterium
MNKDDFLKITRHNELASYFGITYPVLTKIIYKTDDAYKYHQFQIPKKNGGYRKIASPSKKLKLIQEQLKDVFYEIYPTKPSAHGFAKDKSIVTNAERHLDKRFIFNIDLSDFFGSIHFGRVRNLFKSSPFYFNNTVSTILAQICCFNNSLPQGAPTSPILSNMIAWKLDSQLQHLAKLTNSTYTRYADDISFSFTSKKRRLPEEIIILRDDEGSPGHALTHIIEENGFNINYEKVRLCSAFSRMEVTGLTVNEFLNVRRQYVRQISSMLYAWRKHGYVLAANEFNEKYDKRYRASKKPKSFLYVVKGKLAFLRSVRTGRDAIFNKLAKQFNDLVEDEYKFKIIEVTDPEINAISALWIIEACYDDEKGEAVITQGSAFQLKGIGIVTCAHVVSEKGKVFGSLEAFKHSDPTVRYELKVERICAHRDVAICSILVKEGIEPPEYGIEKSLNPIEMQQSVKLLGFPAYAPGQSHYIVDSKVAKVYKQSAVNKFEIDSLIREGNSGGPIIDAESNAVGIALEGARKESGNNGCLVISEIDDVIGTDEYKI

SEQ ID NO: 486 - protein, 547 aa, unidentified
  source 1..547: note = Related to NZ_SOQX01000007.1; note = Thiohalophilus thiocyanatoxydans
MKDAFLNIKTHQELAKYFGLSYADLSKIIYKTDFEYKYHHFVIPKKSGGERHINAPSKKLKLIQITLKDVLYDIYPTKPAAHGFVKNKSIVTNAEKHLDKRYIFNIDIENFFGEIHFGRVRNLFKSSPFNFNNTVATILAQICCFENALPQGAPTSPIISNMIAWKLDSQLQQLAKITNCTYTRYADDISFSFTCNKNRLPEEIVSVSEGDARPGRTLTGIIEDNGFRINYSKVRLRGKYSRMEVTGLTVNEFINVKRKFIRQLSSMLHAWRKFGYDKAEEEYNNKYNRKHRASGKETSYLHVVKGKLAFLNNIRSKRDPVYIKYAKQFNELVGNEHKFIIVEITEPEQNAINSIWVVEACYDYNDEVRVSQGTGFHLSDVGIITCAHVVSNDDGEIYEEIEVFKYSETTKRYTIKVDRICRHRDIAICSLVVDEDENPPNNELQKSQSIPYIQQQVKLLGFPGYAPGHSYSIVDANITMTFVESGVNKVEINQLIRSGDSGGPIVDADSNVIGMAQKGVDEKYKRNSCVVLQEIEAVYNSDGYKTE

SEQ ID NO: 487 - protein, 543 aa, unidentified
  source 1..543: note = Related to JAHBUO010000087.1; note = Ignavibacteriaceae bacterium
MKLKEFQKIETSEDLAKIFGMSYKELSKIIYKLPFEYRYTYFEISKKNGTKRLISKPNKKLKQIQNKLSETLYSIYKPRPSVHGFVKQRSVISGAEKHLNKQSILNIDLENFFDSIHYGRIKYLFMAHPFNCNETIATILAHIFCHENKLPQGASSSPILTNMICYKLDKELQNLAKHCNATYTRYADDITFSFTTNKKKISKQIVEDTEVLTISPVLQQIIENNGFKINYNKVHLYKKNQRMLVTGIKVNEFTNVQRKYISKIRSMLYSWEEHGYINAKKEFESKYLTERHRVFSSLPEYRNVIRGKLNYLKMVRSKRDVLYIKYAKWFNKLVDEFSEPHLEYLEITPEEKLLMQSVLVIEILYDNSEGECVCNQGTGFYLKDVGIVTCAHVVTDDKNNPLDNIDVFRYDKITEKFRCTIQKIDSILDLAILQPVDPESLKDIQPLEQSSETIDSLHTVKMIGYPAYKIGQTPYIVDAKIASIYCQSTINKFEIDSLIREGNSGGPILNSNNKVVGIAAEGAEKSGGNNAVLRIDMLERIKS

SEQ ID NO: 488 - protein, 545 aa, unidentified
  source 1..545: note = Related to JABHWU010000021.1; note = Deltaproteobacteria bacterium
MPEKSFLSVKSPKELSLYFNLEYAAFSKIFYKTASDYKYKKFYLSKKTGGKRIISSPNRKIKEIQRCLAYTLKNIYQVRPSVHGFVEKHSIVTNAMPHLDKKFVLNLDIKNFFDSIHFGRVKHLFMSQPFNFVHSVATVLAQICCFENKLPQGAPTSPILTNMICWKMDAQLQHLAKINHCTYTRYVDDITFSFTCNKKQIPKSILIQPESELVVGQDLKIIIEKNGFEINLAKLRLYGRNQRMEVTGLTTNEFPNVRRKYIKQIQSMLHAWRKYGYGLAEKDFKEKYYKKHRASQKIPSFENVIIGKLAFLKSVRGLRSQVFIKLAKQFNDLTESGKMKFNYIEKTKDETDISNSLWVIEVLYNDKNGILKAGQGTGFYFENKGLITCAHVVSENDENFEKINAFQFDKPSKKYLLKIKKIDNHRDIALCEFSDCTMNDIQINKLDSITVSNDQISQFLEVKLFGFPAYKIGQTPYIADAKIATIYTQSAVSKFEIDHQIREGNSGGPILNKDNKLIGVALEGAEKGSGSNGCLQLDEIVKFIN

SEQ ID NO: 489 - protein, 560 aa, unidentified
  source 1..560: note = Related to JAGROM010000229.1; note = Simkania sp.
MTSLETLQALTTSQDVATLFGKSYTELSKIIYRTPEKYRYRVFTIPKKTGGLRTIASPRRKILEIQRRISILLQDTYQPPPSSHGFVRTKSIVSNAERHLNKRFIFNVDLEGFFDSLTFGRVKRFFMAQPFNIPNEPATVLAHICCFQKRLPQGAPTSPIITNLICRKMDRQLQALANQNHATYTRYADDLTFSFTRGMSKLPSAIVSHKDGLPGSGLMEIIKENGFKINPQKTRLNSKHQRLEVTGLIVNKFINVHRKFIRRTTSMLYAWEKFGLEMAEKEYLSVYSNLIRPYASGHHPKFHEVVKGRLAFLHMVRGKRDPLYIKLAKRFNAVLDDKTSSLPYIETSSYELSLSEAIYVIEILYDKKVKKGKNVSEEAVVMQGTGFFLKDIGFVTAAHVLLDNKGVEHPEIEVFSPKNSGVRYKLSIQTLDIHRDLAVGILFGPDKKKHTSSNQLTAQKSLPVQRDAITLVGFPGHKVGHTKPYIDDGKIGNVYTHQGVQVYDITTQIREGNSGGPVLLGSTYEVIGVASRGAEGKTGSNTVIAVSELFNLLSKSNSKK

SEQ ID NO: 490 - protein, 595 aa, unidentified
  source 1..595: note = Related to NESO01000004.1; note = Limnohabitans sp.
MHLNPLSKALSSVSYSDLTASFLQVKTPEDLALWFGFSKYAALGFLIFPRPKYTAFLIKKKNGSERLIQVPNKKLKEIQKRLLHVLNELDNSRPSAHGFRKKLSVVSNAEQHSGHKKHYVFNLDLKDFFPSITFPRVRGVFLSEPFKFPANVATVLARICTCNGALPQGAPTSPPLSNYICRGLDGSLQQIAKASYSTYTRYADDLTFSFTNKKRHRLSPNLINTAVENATVSLKLKEIIEDHGFKINFEKVRLRSRHARMEVTGLTVNEFPNVKRKFVDEIRGMLHAWETYGLEKAQEGFLSRLYKRQLRSGGVPAFENVLRGKLLYLRQVKGADDKVYNTLARRFNACSNLIGKNFQMAVPMIDVALSEQDLEKAIYVISCVHEEYDFEIKGTCFFLKGVGVVTCEHVMRYPLNVDEKGNKIHNFPRELTESYFGLSHGRIFIQDTIENPLCELEIVWLDRNADVVVLRPKDEIKIEHLTLIGATAETKTKEVRLVGFPFHTPGKSLSVAEGKIRSRYRHFGYENYDITSLIRQGNSGGPVLNSDFHVVGVAKEGERQDGGNNGVLMLAELIKLHAHYKNVQGPLPKNKVWSS

SEQ ID NO: 491 - protein, 550 aa, Chromobacterium sp.
  source 1..550: note = Related to NZ_JAJNRU010000001.1; note = Chromobacterium piscinae
MPLVDNIHQILIKSDVQPFSRYYFDLSYEELSKIIYPTPKYQTFHIKKKNGTDRVIHSPSYKVKQLQYIVIEKILKETIVPRPSVHGFVKDRSIVSNAKLHVGKRHVFNVDLKDFFPSINFHRVKGLFRGKPFNFANNIAVCLAQICCYKTKLPQGAPTSPILSNIICRGLDGELQVLAKNSHATYTRYCDDITFSFTKPNPSKIPRHIVQVDSNVASAGEKLNDIVVAHGFEINCEKTRMYDWKRRMEVTGLTVNKFPNVKRKNIDRIRMILHCWEKFGYKKAQENYIEFTKIEKSDFRGKCFLSYTRGYLNFIKSVKGMDDPVYRKLAKKFNTLIDFEFDGKRKDLPVGSVVKIREELDKAIFLIQCENAAGQCQQGTAFFLKDVGFVTCDHVRWLNEENIPTDEYIGYFFEREIKILNSEEQEVCKVRIKKYDARKDFLILEPTEQVIVNMALLPQVNIPQQGDPLILCGYPSPFIHRQTLTIINTTLITNYNTFGADHIEISTQIRKGNSGGPVLNSSFEVVGIAKTGSEQHGGKDSVLCIREIFN

SEQ ID NO: 492 - protein, 523 aa, unidentified
  source 1..523: note = Related to PHET01000006.1; note = Actinobacteria bacterium HGW-Actinobacteria-7
MTQRFIEIQSTDELAAFFGLDYKRLAAALYRTDASHRYHEFRIPKRSGGARTIHAPNRRIKALQRRLAGELDALYVPPPCVYGFVNGRGIRKNADVHAGRTFVFNVDLKEFFPSIHFGRVRGVFEKAPFHFTREVATVLAQLCCHQNGLPQGAPTSPVISNWICRGMDRELMALAKSSLATYTRYADDLTFSFTCSYRRLPGALVDVRGRKAETGDALQKIIENHRFKVNTDKVRLAGKSTRMEVTGLTVNEFPNVQRKYVRQVRSMLYAWREHGLPDAEREFNEKYDRGHRPSGRPKSFTAVVAGKLAYLLDVRGAENPTYNRLAAEYNRLVGEQGDHLPLAPPGPLERDLMGLQAMRKGKAHAKQYENIVESLLTQLLSPSLENPQNQVRINGGRKIVDITLDNHATSGFFHYIALNYNAPHIIVECKNYSGDPANPELDQLVGRFAQNRGRVGILVCRSFGSAAKKKRFLERCRDTANAGNGFVIALDDTDMALLVEERLRYGEKQSYRLLMERFKALVM

SEQ ID NO: 493 - protein, 541 aa, unidentified
  source 1..541: note = Related to JAIEMN010000007.1; note = Gemmatimonadaceae bacterium
MATLTTRRSIAELIEMSPTLLDGLANSLNRRAYHRFHVPKKSGGSRVITAPTARLKEVQRRLYRVLSALTVPPTCAFGFIERRSTVHNAQSHTRSRWVLNIDLEEFFPSIHFGRVHGMLMAPPYHIPELGAQRIAALCCHESVLPQGAPTSPILANMIARGLDFALRDFANQNRCHYTRYADDLTFSQFRKRFPSALVTRGVDNVTRVSDELRQIVESHGFRLNAKKTRLAHYSERQEVTGLIVNSKRPNVPREFIRNLRAMLHAWERYGEEAAEATYRRTFAPRDASDHVGLFRETLLGRLSYLAMVKGRSDPVYVELIRRARERVDRKHGTNYFDTMPIPEDGVAVLMTTEGRDRAGEQGTGFVLRNIGVVTCYHVVRRAVTVEAFPWHAPLRATNLFMDRFNVDWDLAILRGNYGAKYQFEAGDDAQLRIGMPVRIVGFPNWAPDRPMSITETVIQGMNSDYFGARRFTVRDAIFGGNSGGPVLNGAGKVIGVAMTGMFQTGGGTENMITPISYVRRLAEQPAYDPFSNVASKTREHS

SEQ ID NO: 494 - protein, 570 aa, unidentified
  source 1..570: note = Related to JAIOJS010000294.1; note = Thermoanaerobaculia bacterium
MNLDTAQRLLECETRADLAEWLGEDPRRLAFYAYVLPEHRRYSHFTIEKRAGGSRHIHAPIAPIKEHLRLISAALSHFYNPRNVVMGFVKERNIVDNANKHSRQEWILRVDLKDFFPTIHFGRVVGVLQAAPFQLRSEVAQTIAQLACHQGVLAQGAPTSPIFSNLVCRGLDHELLNLARRGRCRFTRYADDLNFSTSRKRFPDLLAARQLGSEGHTCEVSAALLQVISKHGFTLNDSKTRLVHRSQRQTVTGLVCNETATVSRRYYRGLRAVLHVWRKYGEDSAAEWFLANHYKRNKPSGSDFSFKKVVIGRVQFIGYVCGWSAPKYQKLANLLSQLDPTFRKKTAKTPPPEKPSGLVIWGEGETDYLHFFMAWNSLHQDYPNLTIEFPHPAKRTKGAPMLEKMLAVLEKTPPLEATVCVFDTDEPKITSRFEPVEGSAYLKLGTNLFVVLLPTPSFRSGRDPLCVELLYEDPASLRDERGRRLYLKDEFQAEEPYHKKEPGVMRLKPRSNSLVVEDVHNGTTQQNVALSKMGFANLVQSKSTSFEGFRALFDVLNGIVETELTLSNGS

SEQ ID NO: 495 - protein, 569 aa, Pseudomonas sp.
  source 1..569: note = Related to CP074412.1; note = Pseudomonas viridiflava
MDASLFPFPIAPKCKVANNKELAALLGITTAKLTYYAYHLADDEKYKEFTIKKRNGGDRLIEAPIKGLKDIQESIADILEENYKPRACVFAYVKDRGIVEHAATHIGQRWLLRLDLKDFFHTISFIRIAGILRRSPYNFAETPAKTSALLCTKGQRLPQGSPASPVISNILCKGLDYKLKELAALNKCYYTRYADDIFISNNGSKFPPSIAIRDEDGSAELSDTLKKIIIDAGFEVNLDKTILRKRSERQLVTGVVVNRKSNVPKELIKSIRAALYAWEQHGLEAAEDYWKRKIDKSNRFDGESPQMKLVLRGKITHVGHVKGYSDGTFLTLVKRLQALDSDYHIDEQKISRTITGEIHIYTEGVTDTKHFQAALRAFQRSGEFAGLNLIFRNSKKTGSSGLKALCENLCETLQRHLTICIFDRDERPIINEMSGSPGNYRDHTNNVFSLIIPTPEFRDPSDLICIEHLYQDAQIYTPDSQGRRLYSKDEFDSLGCHKDNPQLFCRVSKQSLIYDDQVINLQEKKNIALPKNKFADYIFNGAPPFSNVDFSGFRGTFTQIVAIAASYSR

SEQ ID NO: 496 - protein, 568 aa, Pseudomonas sp.
  source 1..568: note = Related to NZ_CP083988.1; note = Pseudomonas putida
MDAFFPFDPSPKYKISNNKELAALLGISTAKLTYYAYYLADDDKYKSFKIKKRAGGERLIEAPNKGLKEIQKNISVFLAQSYKPRACVFAYIQDRGIVEHAATHIGQRWLLRLDLKDFFHSISLARVSGVLRRAPYNFAESPANTTARLCTLGRRLPQGSPASPIISNILCRGLDYKLKELAASNKCYYTRYADDIFISNNGSAFPASIAIRSEDGSAELSDTIKKIITDAGFNINFEKTILRKRSERQLVTGVVVNRISNVPKDFIKSIRAALYAWEKHGLEAAEEYWKRSIAQTNRFDGESPQMKLVVRGKVTHVGHVKGYSDGTFLTLAKRLQALDSEYRIDEQKVLRNITGEIHIYTEGVTDTKHFQTALRALQRRGEFVGLNLSFRNSRKPGSSGLKLLCESLSETLQRHLTICIFDRDERQIINEMGGSPGNYRDHANNVFSLIIPTPEFRDSGDLICIEHLYRDAQIYLTDNQGRRLYSKEEFDSLGCHKSEPDLFCRTTKQSLIYDDQVINLQEKKNVALPKNKFADYIAAGAPPFSNIDFEGFRGTFTQIVEIASSYSR

SEQ ID NO: 497 - protein, 568 aa, unidentified
  source 1..568: note = Related to NZ_LR607350.1; note = Klebsiella oxytoca
MDTFFPFNTSPKYKIENNKELAELLGVTTAKLTYYAYYLRDDDKYHSFKIRKRINGERLIEAPNRGLKDIQKTISHFLERNYTPRSCVFAYVKERDIVEHASIHVGQRWLLRLDLKDFFHSISSARVSGVLRRAPFCFAKSPANTVARLCTKDGRLPQGSPASPVISNILCKGLDYKLKQLASSNKCYYTRYADDIFISNNGSVFPSAIAIRGDDGNVELSEEIKNIIINSGFEVNAGKTTLRKKSERQLVTGVVVNKKTNIPKEYIKSIRAGLYAWEKFGLVAAEEYWKKEIERSNKFDGQPPQMKLVIRGKIIHVGHVKGYTDATFLTLVKRLQALDSEFKIDEQKFRREITDEIHIYTEGVTDTKHFQAALNAFQKRDEFLDLKIIFKNSSKPGSASLKTLCENLRETSQKHLTLCIFDRDEKNIVNEMSGSPGNYRDHGNNVFSLIIPIPEFRKGNDSICIEHLYRDSLLFTYDSEGRRLYFKDEFDSLNCHKTDPNLFCRISKSSLVYDDNVINLSERKNVALPKNKFADYVCSGQPPFNKVDYGGFYEVFKQILEIASTYNK

SEQ ID NO: 498 - protein, 568 aa, unidentified
  source 1..568: note = Related to FUXY01000001.1; note = Pantoea ananatis
MKEPKFMQNLPSYKISNNKDLALLFGVPTATLTYYAYHLSDERKYKSFKIIKRSGGERLIEAPIKGLKDLQKTFSNFLSENFKPRACVYAYVKDRGIVEHAATHIGQRWVLRIDLKDFFHSITSTRITGLLRKSPYNFAKSPAETVARLCTIDGRMPQGSPVSPIFSNIICRGLDYKLKELSSLNKCYYTRYADDIFISNNGSLFPSAIASRNDDGSVQLSDAIKDIITKAGFVINIEKVILRKRSERQLVTGVVVNKKSNVPKVFVKSIRSSLYAWEKFGLPAAEDYWKREIYKNNTHNGEIPSFNLVIRGKVTHVGHVKGYADPTYLSLAKRLQALDSEFHIDEEKIFNTITSEIHIYTEGVTDTKHFQAALNFFKSKGDFQALNLVFKNPRKTGSANLKALCENLSETQQKHLSICIFDRDEPAIIKEMSGSPVNYRDHNNNVFSLIISVPDFRRDLDYICIEHLYKDSDLYIADLEGRRLYSKDEFDNLGCHKYLDNLFCRSSKSSLIYDNMVIDLPTKTNVALPKNKFAEYIINAKAPFNDIDFEGFRPTFNQIFEIASTYRK

SEQ ID NO: 499 - protein, 572 aa, unidentified
  source 1..572: note = Related to CP026511.1; note = Pseudomonadaceae bacterium SI-3
MDSFYPFIPNPPYKISNNTELANLLKIPVARLTYYAYYLPDEQKYTSFNIRKRNGNPRLIEAPIKGLKDIQRAISVYLYEQYKPRSCVFAYVQGKGIVEHASIHIGQRWLLRFDLKDFFHTIKTSRISGLLRRPPYSLAKGPAETIARICSKDGRLTQGSPSSPVISNLLCKGLDYKIKELAAKNKCYYSRYADDIFISNNGSVFPSAIAIRTLEGTAELSLALQEIVSASGFQINKSKTTLRMRSERQIVTGIIVNRKSNIPKEFLNSVRAALYAWERFGLEAAENYWRKNIDPKNGFNQEDKEGPRLRWVIRGKINHIAHVKGYSDSTFLSLARRLQSLDSSYKIDEQKILHALTDEIHIYTEGITDTKHIESALKNFKKNQEFSNLNLVLKTPRKPGSASLKSLCESLSVAPQKQLTICIFDRDEPNIIKEMGGSSSNYRDHTNNVFSMIIPTPDFRDANEPLCIEHLYKDEAIYIKDSHGRRLYSKHEFDSLGCHTLEPGLFCRISKNTLIYDDNVIELSKKANIALSKNKFADYISNGAPPFCNIDFSGFRNMFSQITQIAGLYKSN

SEQ ID NO: 500 - protein, 568 aa, Pseudomonas sp.
  source 1..568: note = Related to CP023969.1
MDASLPFGQFPKISISSNKELAVLLGISVNKLTYYAYYLDEESKYKTFNISKRNGGVRVIEAPVKGLKDIQKNIVTLIEPNYKARSCVFAYVKGRGIVEHAAVHTNQRWLLRFDLKDFFHTISAVRVAGLFRHPPFNFSKNVAETIARLCTKAGRLTQGAPTSPIISNILCRGLDYKLKELASQNKCYYTRYSDDVFISNNGSLFPSAIAERGSNGVVKLSDDVLEIIGGAGFQLNLSKTILRNRAERQLATGVIVNRKLNVPKEYIKSVRAALYAWDKYDLKQAEEYWREHIDDRNRWGDSLPRLSWVIRGKINHIGHVKGYNDPVFLTLAKKLQSLDPTYRLDERKILRSLTDEIHVYAEGITDCKHLETALKFFKARGEFTNLNLNFRNTRKPGSSVLKALCEHLSEAPQKHLTICVFDRDERPIISEMGGSPGNYRDHTNNVFSLIIPVPDFRDSDIICIEHLYNDSQLYIPDNQGRRLYSKEEFDSLGCFKGEAHLFCRMNKQSLIYDDNVIDMVERRNVALPKNKFADYIVSGAPPFSNIDFSGFRGVFSQIVEIAGFYGKR

SEQ ID NO: 501 - protein, 578 aa, Pseudomonas sp.
  source 1..578: note = Related to JAHARZ010000001.1; note = Pseudomonas syringae
MVLLNFPLKEQAPEYTISNNKQMAQVLGIKPSTLPYYAYYLPDNKKYTSFNISKRGGGLRLIEAPNKRLKDLQRAIAEYLGEHYKPRACVFAYVGKRGIVEHASVHVCQRWLLRLDLKDFFHSITAPRLAGLLSAPPFLLAPNLARTLSFICTKDGRLTQGAPVSPVVSNIICRGLDYSLKAYAAKNKCYYTRYADDIFFSNNGAIFPSSLARKDEAGTVILGDELQEIIKASGFIINESKTFLRSRAERQIVTGVVVNKKLNVPREYVRQIKAALHSWRKFGLEAAEKYWNEKIDKRNRWSGASTSFKLAVRGQINHVGHVKGYSDSVYLLLARKLSQLDNTFNFDESAIAESIAEEIHVFCEGESDILHLGHAFRCLKPRYPSLNLIFKLPGIGKGDGSSVLKSFCDTVRNHPQRHLTICLFDRDEPSIIREMAGSAVSYKDYGGNVFSLVMPPPSFRKNDNICIEFLYQDIDLLRRDTQGRRLYLGEEFDQNSCFKGEEMLFKKFPKNSLILDSDIIDARTGNNVALSKIKFAEYISSKVDPFSSVDVSGFAIIFDEIAAIRETYMRPFHDVDGD

SEQ ID NO: 502 - protein, 572 aa, Pseudomonas sp.
  source 1..572: note = Related to NZ_AZVL01000013.1
MVSLNFYLKEQAAEYKVLSNKHMAQILGVKTSVLAYYAYYLPDNKKYNSFNIAKRGGGFRLIEAPNKRLKDLQRIIAEYLGGYYKPRACVFAYVGKRGIVEHASVHVCQRWLLRLDLKDFFHSITAPRLAGLLSAPPFLLAPGVARTISFICTKDGRLTQGAPVSPVISNIICRGLDYSLKTYAAKNKCYYTRYADDIFFSNNGAVFPSSLARKDEAGTVILGDELKDIIKASGFLINDNKTFLRSRAERQIVTGVVVNKKSNVPREYIRQIKSALHSWKKFGLESAENYWSEKIDKRNRWNGASISFKLALRGQINHVGHVKGYSDSVYLMLARKLSQLDNTFNFDERSIAESIAEEVHVFCEGESDILHLRHAFQCLKSEYPSLNLIFKLPGIGKGDGSSVLKNFCDMVKNHTQRHLTICLFDRDEPNIIREMSGSAVPYKDYGGNVFSLVMPSPDFRNENICIEFLYKDVDLLRQDTQGRRLYLGEEFDQNSRFKGQGTIFKKIPKSSLILDSDIIDYQTGNNVALSKVKFAEYISNGVAPFDSVDVSAFSVIFNQIAAIRDSYMSLGV

SEQ ID NO: 503 - protein, 577 aa, Pseudomonas fluorescens
  source 1..577: note = Related to MSDE01000014.1
MSAQDAIDENLNIYSISTNRELAKILKTKTSTLSFYAHYLPDKKKYKTHTISKRGGGARIIDAPNKNLKTLQKSIASFLNEHYKARACVFAYVANRGIVEHGEVHVNQRWLLRLDIKDFFHSITTARLVGLLIAPPFCIAPNVARTISFICTKDGRLPQGSPASPVISNIICRGLDYKLKTIASKNKCYYTRYADDIFLSNNGAIFPPSLALKNDTGIVALGPEISEIITSSGFSINEEKTFLRSRGERQIVTGLVVNKKLNVPKEFVRNIKSALHSWRKFGFEAAQKYWRDKIDKRNRWLVEHADYKLSVRGQINHVGFVKGYSDPIYLSLARKLSELDSTFSFDEEALANSIAEEIHVFCEGDTDLLHLEHAFQKLKNEYPTLNLTFKLPNTGKGDGSSILKNFCNSVRTIPQKHLTICLFDRDEPTIIREMAGSALPYRDFGSNIFSLVIPQPDFRDHECICIEHLYKNDDLLKKDSHGRRLYLNEEFDSNSRHTGGELLFKKIPKATLILDADVIDFKTGENVALSKSKFANYIYNETPPFTSIDVSGFKVIFDQIATIREAYSNGMHGQKTI

SEQ ID NO: 504 - protein, 578 aa, Pseudomonas sp.
  source 1..578: note = Related to NZ_CP014135.1; note = Pseudomonas agarici
MSVPEVSPLPASFLDLLAPAVKIKNNKELAAELGISLGRLTYYAYFLPDHKKYKTFTISKRGGGERIIEAPVKGLKDLQKTILGKFEPYYKPRACVFAYVQDRGIVENADVHDFQRWVLRVDLKDFFHSITQRRVIGIFSSPPFSLSRDAARTLSFLCTKDGRLTQGAPTSPLISNLVCKGLDYTLKELAAKNKCYYTRYADDIFFSNSGAMFPRIIAEKMEDGSVKIGEELKNLIEGAGFAINEEKAFLRSRAERQIVTGLVVNKKVNVPREFTREVRAALYSWEKHGLESAENFWKEKVDKKSRHSESDSRFKWVVRGKINHIGHVKGYSDPVFLSLARRLKALDDTYKLDERKITVAIAQEIHIYTEGVTDNKHLKNAYEHFKRSNQFDDLNILFKETKKSGSPALKALCENLSEALQRHLTICIFDRDEKDIISNMGGSPGSYKDHGNNVFSLVIPVPDFRDTQFVCIEHLYKDEQLFQEDIEGRRLFSKDEFDSLSCFKGEKPLFCRLPNKQSLIYDSEIIDMSKKVNVALSKNKFADYILSRVAPFDKIDLSGFTGTFEQIREIARSYGNKR

SEQ ID NO: 505 - protein, 578 aa, Pseudomonas sp.
  source 1..578: note = Related to AP017302.1; note = Pseudomonas aeruginosa
MLNIAGKPLFVPFLDAPLPEVKIKNNKELAGFLGISLGRLTYYAYYLPENKKYASFKIKKRGGGERLIEAPVKGLKDIQREVVRKFEDDFKPRACVYSYVKGRGIVENADIHDLQRWILRIDLKDFFHSITQKRVAGIFSSPPFMLSPDAARTLSFICTKDGRLTQGAPSSPFLSNLVCRGLDYRLKELAAKNKCYYTRYADDIFFSNSGAIFPRSLAERLEDNSLKLGEELTNIIQGAGFSINENKAFLRSRAERQIVTGLVVNKKVNVPKEFIRSVRASLYSWEKFGLELAEKHWREKVDKRSRHERESPRFKWVVRGQINHIGHVKGYSDPVFLSLARRLQALDSQYKLDEIKIINSIAEEIHIYSEGITDIKHLKNAYIELQRSGEINDLNIVFKETKKSGSPALKALCENLSEALQRHLTICIFDRDERDIITSMGGSPGSYKDHGNNVFSLVIPVPEFRETEFVCIEHLYRDEHLFLEDQDGRRLFARDEFDSVSCFKKERPLFCRYPNKQSLIYDSDVIDLAERKNVALPKNKFAEYVTSKTPPFDNMDISGFRCVFEQIRDIAKSYRSKR

SEQ ID NO: 506 - protein, 581 aa, Pseudomonas sp.
  source 1..581: note = Related to NZ_CP025263.1
MAKLPRKFSFSSFLNSPAPEVKIKNNKELAEVLGISVGRLTYYAYYLSADEKYSSFNISKRGGGERLIEAPVKGLKDLQKKIVEYLTTFFKPRSCVFAYVEGRGIVENADVHDLQRWILRVDLTDFFHSITQKRLVGVFSSQPFSMSHDAARTLSFLCTMNGRLAQGAPTSPILSNIICRGLDYKLKELSAKNKCYYTRYADDIFISNSGASFPRTIAEKLEDGSVELSESFCEVVSNAGFKVNLKKVFLRSRAERQIVTGLVVNKKINVPREFVRSIRAALYSWESFGLEDAEKFWARNIDKKSRHERSSPRFRWVLRGQINHVGHVKGYSDSVYLGLARRLAALDDSFKLDERKIRKAIAEEIQIYTEGPTDIKHLSNAFEVYQSRGEFQDLKLIFNRTKKAGSSVLKVLCENLSEAQQRHLTICIFDRDEREYIKSMGGSPGSYKDHGNNVFSLVIPVPDFRDTDLVCIEHLYRDEDLYREDVEGRRLFSKEDFDAVSCFKGDRPLFCRIPNKNSLIYDSDIIDMVEKKNVALSKNAFADNIVTKTAPFNNVDLSGFTETFEQIRIIAGSYRNRGVGV

SEQ ID NO: 507 - protein, 578 aa, Pseudomonas sp.
  source 1..578: note = Related to QRDL01000002.1; note = Pseudomonas oleovorans
MAKPDEFLDLPLQPPIKIKNNKELADFLEIKVNKLTYYAYHLDDRKKYTTFEIKKRSGGLRKIDAPIKGLKDIHRQVLLKLDPYYKPRSCVFAYIKKRGIVENADLHKGQRWILRIDLVDFFNTITFERLKGLFASQPFSMSENASRTLSMICTKDGHLTQGSPASPLLSNIICRGLDYKLKEISAKNKCYYSRYADDIFISNNGAIFPNAIAEKKSDGSVELNPQILSTIYDAGFSPNKEKITLRSRAERQIVAGVIVNRKTNTPREYIKSIRATLYSWRKYGLESAEEYWLKHIFRQSPHGDNQPRMRWVLRGQINHVGHVKGYSDPVYIGLAKKLKSLDPTFKFNEQNAIDFVREEIHIYSEGITDRKHLENALLSLKSQGLFTELNLVFRETSTDSKKQGSAALRSLCETLCAATQKHLTICLFDRDEKEITESMGGSTRTYKDHGNNVWSLIIPAPEFRTLTSFCIEHLYRDEQLYQYDQEGRRLYSNSEFDDNQCHRDPDKLVFQKHPNKKALILDDAVIDITTKTNVALPKNKFADYISSKTAPFDDMDFSGFIPTFDQIIEIAARYTSNK

SEQ ID NO: 508 - protein, 558 aa, Pseudomonas sp.
  source 1..558: note = Related to NZ_CP067024.1; note = Pseudomonas syringae
MAIPQIKNNQDLADFIGVKKGVVAYYAYYLDSAKAYTSFTIKKRSGGDRTIDAPVRGLKQLQRTILNKLSPEAAFRHCVYGYVPGRDILQNSAIHVRQRWVLRVDIKNFFPSITTLRVSGMFRSPPFDMEPKAARALALICTKDGLLPQGSPLSPWITNVICKGLDYNLKRLASKHKCYYSRYADDLFFSTSNGLFPTALARKSDTESNVIIGEELKSEILSAGFLPNEEKTSLKPISQRQVVTGIVVNSRTNVPREYIRNLRAALYSWDKFGLEAAEEHWRNKVDLKNRVGEQPRFRWVVRGQINFVKHVKGEADPVYLSLAKKLKKLDEKFTFDPKVSALSVTEEVQIFVEGITDKKHIEKAFRNAQGQGLYLDLNLTFPNQREYGSSNLKSLCETLSANAQRCLTICIFDRDEQPYVKSMGGSSGDYMDHNNNVFSLIIPRPEFRVEPDICIEHLYKDSDLFKHDLAGRRLYSKSEFDKHSCHCEDPNIFIRTPPKSLICDSGVINISTKASVALSKFDFATNIYDGVPPFDSISFEGFLPLFTKIQQIKNLFRK

SEQ ID NO: 509 - protein, 558 aa, Pseudomonas sp.
  source 1..558: note = Related to MSXU01000002.1
MAIPPINNNQDLANYIGVKKGVIAYYAYYLVSSKAYTSFAIKKRSGGERTIDAPIRGLKELQRTILDKLSPETNFRHCVYGYIPGRGILQNSAIHVRQKWVLRVDIKDFFPSITTARISGMLKSPPFNMAPKAARALALISTKDGVLPQGSPLSPWITNVICKGLDYNLKRLASKHKCYYSRYADDLFFSTSNSFFPTALARRGDAEKNVIIGEDLELEILRAGFLPNEEKTSLTPISQRQVITGVIVNSRTNVPREFVKNVRAALYSWEKFGLKAAEEHWRSKVDSRNRAGDPPRFRWVLRGQINFIKHVKGEADPVYISLAKKLKKLDDNFTFDAKASALSVIEEVQIFVEGITDKKHIEKAFIDAQKQGLYSDLNLTFPNQREYGSSNLKSLCETLSANVQRCLTICIFDRDEPAYVKNMGGSSGDYMDHNNNVFSLIIPRPTFRSEGDICIEHLYKDADLFKYDTAGRRLYSKSEFDKHSCHIKDPLIFIRTPPKSLICDSGVINISTKASVALSKADFATNIYEEIPPFNKVSFEGFLPLFTKIQEIKHLFKK

SEQ ID NO: 510 - protein, 559 aa, Pseudomonas sp.
  source 1..559: note = Related to LJRY01000136.1
MAIPPIVTLQDLANYLSIKRGKLAYYAYYIKPADAYNTFAIKKRSGKDRSIDAPIKGLKDIQKLVYENFSGEIEFRKCAFGYIPGRGILQNSERHVRQRWVLRVDLKDFFPSVTAVRVAGMFSSQPFNLSYKTARALALIATKHGTLPQGSPLSPWITNVICRGLDYNLQKLASRYKCYYSRYADDLYFSTSNSLFPLALAHKSENDSNVIIGEELKAVILTAGFTPNEEKTSLRPTSQRQMVTGIVINSKPNVPKEFIKQIRAALYAWENHGLVAAEEHWAKKSDFRNRFEKAKPRFRWVLRGKINHLRHIKGESDPVFLKLATRLKKLDPTYSFDPKLSAQSITQEVCLFVEGITDRKHIETAFKDAQNRGLYGDLNLKFNEPKENGSSNLQKLCHNLSATPQRCLTICLFDRDEPSYIKSMGGSSSDYLDHNNNVYSLILPYPKFRAEPDICIEHLYEDKDLFMPDSKGRRLFSRDEFDKHSCHIKEPNVFIKLPAKSLIVDSNVIDISTKESIALSKNDFASQIYTATPPFDNVSFSGFIPLFDKIQEIKNLFIR

SEQ ID NO: 511 - protein, 558 aa, Pseudomonas sp.
  source 1..558: note = Related to JADTFG010000022.1; note = Pseudomonas aeruginosa
MALPAINSLQDLANFLSVKRGLLAYYAFYVSPGDAYSNFSIKKRSGSDRSIDAPVKGLRDIQTIIYKKFSGEIEFRKCAFGYIPGRGIFQNSERHIRQRWVLRIDLKDFFPSITAVRVAGIFSAQPFNISYKAARTLALIATKNGVLPQGSPLSPWISNVVCRGLDYTLQKLASRHKCYYTRYADDLYFSTSNSVFPSALAHRSEKESIIVIGDELKAAIIAAGFTPNEEKTSLRPASQRQIVTGVVVNSKPNVPKEFVKGIRAALYAWEKHGLLSAEENWQKNVDVRNRWDSANPRFRWVLRGKINHLRHIKGEADPVYIKLASRLKSLDNTYSFDPKLSALSITQEVSVFSEGITDKKHLEIAFKHAQSKGLYPDLNLKFYVPNEAGSSNLQKLCYGLSSTPQRCLTICLFDRDESQYIKSMGGSSSDYLDHNNNVYSLILPHPAFRTEPDICIEHLYEDKYLYMPDSKGRRFYSKNEFDKHNCYIKEQNIFIKATSKSLIIDSNVIDISKKTSIALAKNEFASLIYTSTPPFDKISFDGFLPLFDKIREIKNLFK

SEQ ID NO: 512 - protein, 564 aa, Vibrio sp.
  source 1..564: note = Related to MSCI01000001.1; note = Vibrio chagasii
MEISSVKNLDDLAKCLGQSKKTLAYLAYHAPVDKKYKTFSIRKRSGGNRTITAPCSKLKSIQYSIYNQLNSFYQPKKSVHGYVKDKSIVSNASIHVGQRWLGKVDVKSYFPSITTKRVVGLLRNEPFNLPNKIAATVGLLVTYNGYLPLGSPCSPIISNLITRRLDAKLSALSRGYKCYFTRYADDIFFSTNRKVFPRELIHHNEDGVSTIGHKLNEVFEEEGFTVNTDKVSLKDKSQRQVVTGIVVNERMNVPKEYIRELRAMLYSWEKHGLEAAEKDWLKKYVNLNRNGQDIPSQPRYRWMVRGKLNHIAAVRGSNDEVYLKYAKRLARIDNTFKIDPKAITASIASEIKVHIEGKTDAIHMRAAMHALHGAGKYTSLKLSFPNEDTAKGDGELIKACKVMSSSNQTHLTIFLFDSDVDKTTREMKGSTLAYKDHGNNVYSVVMPNPSFRNDEKICIEHLYTDEDIMKKTENGLRIFKSDEFNKKNGLHIEEKGIIRLYPNNSTLIVDSNVIDVESGENVALSKAKFAELIESKRAPFDSVSFDGFEPLLDIFEKLHTDYIK

SEQ ID NO: 513 - protein, 463 aa, unidentified
  source 1..463: note = Related to SOEC01000021.1; note = Halomonas xianhensis
DAAGGLRGRSQEISRWTRHTSIVLLLELETTELCEVLGIKTSYLNYLLYKLNEGERYESFEIKKRGGGARRIDAPIKPLKVIQRKLGDLLKEIYSPRIGVYGYVEGRGIKENAEVHLGCNEVCRIDVKDFFPSIHIGRVIGLFKSKPFLFPEPLSVLLAQICCKDGALPQGAPTSPVISNMICWLMDKELYRYARISGCRYTRYADDIFFSTVRKRLSRRICSVEHSEFDFSIALSPAVISIIEKHGFKINVHKTYMADKSQKQVLSGVIVNEKLNVDREFVLKLRAMLHCWEMEGLEKAEKKFHSKFARNYIVPPLFMQVVRSKVEYLGYIKGYDDPVYLKYADKLSRLHPHYTYNKRKVVAHGGNLIRVYTEGPTDKIHFNAALEWFRGRGEYASLGVVFEHLPEANGGDSLMKHAKTISTEARADRKVFYSIKMCQKLIRKLIRSQERITDFLLTTFGWP

SEQ ID NO: 514 - protein, 565 aa, unidentified
  source 1..565: note = Related to nan
MDVNIQKFLNIESKAQLSAFLGISTEKLNYLLFKLPHEEKYNSFEISKKTGGKRIIDAPIKPLKLLQRQIATILFEVYKPKTGVYGYVKNGGVKRNAEVHLRSKVLFRADIKNFFPSIHIGRVIGLFSSKPFSFPRNIAVLLAQICCKEDVLPQGSPASPIISNFICRGLDRDLLEYARSVRCKYSRYADDIFISTYKKFMPGSICKLEHDDGVGFCNINDGLEDIFETHGFSLNKNKLSVAYKHNRQIAAGIKINEKLNVDREYVLNLRAMLHSWRKDGYDVAAAKYNELKPNPSYARAFKNAVRSKLEYLGYVKGYGDPVYLKYAMWLSRLDDGYTFNKRSYEMENNKKLVVYTEGVTDQLHIQAAKNYFREKGEFMHLDFRFDDKSEVNGAPDLEKYLIQDRKEPNQEFKVYLFDDDLKKVTSKLDIAPGESSRWFGNKIWAALTPKPQHRKDDELFCIEMYYFDADLERKDSSNRRIYLNSEFDAKGFHNTESVVKTKPGSGLIVDNDAYSMVSKEKVSLSKIAFAENILYKKQGFEDVNFEGFRPLFELLQNIYNQAYLH

SEQ ID NO: 515 - protein, 614 aa, unidentified
  source 1..614: note = Related to JACCAU010000001.1; note = Paraburkholderia bryophila
MSGEADQRGMSPGMQAAIDRLNLMGTNTQEALFSGFAQLTSKAQLCQFLGIKTAKLNFLLYKLKPAHRYKTETIKKRNGDDRLLRVPVPLLKQIQRIIASELAKEYRPRQHVYGYVKGKNIAQKARIHVAQKWVARVDLKDFFPSVNFGRVLGIFRGHPFHFNDELATVLTQIVMDGNELPQGAPTSPIISNLICRSLDFELKRMAKEHRCFYTRYADDLVFSTSLKRLSPQICSPAAPDGVSIQANVGDGLRTLIARQGFTINDAKTRIFDRSSRQQVTGLTVNEKVNVSREYVRGLRAVLHAWFKFGEESAASWFFANHYKRNRPDWKSTPADFREVIRGRLAFIRFVKGADDTTYLALAKKLAKLDDGFQLGVEEQIQVNSPRLMLYTEGVTDTIHLRHALQRFKADGQYSDLNIDWADHSDRPRGEGKLWQNCLNDAKRDEFRHQTQVYVFDRDSDFAKKAEDKYGKLKHHGNNTYSLVLPIPEHRQGRAQICIEHLYVDDFLWQQDVQGRRLFAREEFEHDGNHVGNVEVMYRHPKATTLIVDTDVVGYGSLRSKPVVMSKKQFADAVELGVKPFDAPSLVGFQGVFDMLRDLTKNLTGEVKADASAFV

SEQ ID NO: 516 - protein, 592 aa, unidentified
  source 1..592: note = Related to NZ_JAGIXD010000027.1; note = Paraburkholderia tropica
MSNTTQAALFNAFPFLTSKEQLCQYFGVPPRKLNFLLYKLAPADRYKTVVIKKRSGADRQLRVPVPLLKQIQKIIAAELAKEYRPRQHVYGYVKGKNIAQKARIHVAQKWVARIDLKDFFPSINFGRVHGLFKSHPFQFNDEVATILTQLVMDGNELPQGAPTSPIISNFICRSLDTELKQMAKEHRCLYTRYADDLVFSTNLKRLSPQICSPAAPDGVSIQANVGEGLRAVIQRHGFTVNDVKTRIFDNSARQQVTGLTVNEKVNVSREYVRGLRMVLHVWQKIGEASASAWFFEKHYKRNRPGWKRAEPDFREIVRGRLTFVRFIKGANDTTYLTLAKKLSKLDDGFRLGLDEEIQLSSPRLMVYTEGVTDTIHLRHALQQFKARGVYNDLNIDWADHADRPRGEGKLWQNCLSDAKRDEFRHQNQIYVFDRDSDYAKKAEDSYGKVKHHGNNVYSLVLPIPEHRRGRKQICIEHLYEDAFLWQSDAQGRRLFPREDFDQEGHHTKGLEVIYRHPKSATLIVDADVLGYGPLKSKPVVMSKKQFADAIDQGVKPFDSPSLEGFEGVFNILRELTNSLAGEVRSDVIDLVS

SEQ ID NO: 517 - protein, 607 aa, unidentified
  source 1..607: note = Related to JAJUBH010000003.1; note = Caballeronia sp.
MSRETEQPDRRVAGLSATIGRLNRMGTTNQTTLFGSFLEVGSKQDLCAFLGLSESKLNFLLYKLTSAERYKTEVIKKRNGSPRTLRIPIAPLKKIQKVIAGELSNLYRPRQHVYGYVKGKSIIQNAQVHLAQRWVARIDLKDFFPSINFGRTHGVFKGHPFHFNDEVATLLAQIATDQNELPQGAPTSPIISNFICRSLDLELKQMAKEHRCFYTRYADDLIFSTNLKRLSPQICVPAAPEGVSVQAHVGDGLRAIIEKQGFSVNDIKTRIFDRSGRQQVTGITVNEKLNVSREYIRGLRSVLHVWSKHGEPHAAAWFFSNEYHRNRPGWRPDPPDFREVIRGKLGFVRSVKGAEDTTYLTLARKLSLLDDNFKLSQAEQQQAESPRLMVYTEGVTDAMHLRHALHQFKADGLFTDLNIDWADHTDRATGEGKLWQTCLSDAKREEFRHQTQIFLFDRDSDFAKKAESKPGKLKHHGNNVYSFCLPVPAHRVDRTQICIEHLYHDEFLFQKDTQGRRLFAREEFEQDGNHVRHEDVFCRYSKATLIVDSNVSGIGSLRGKPVVLSKKQFADYVEQAVAPFQSPSLDGFQGVFEVLQQFVHNQIQGDA

SEQ ID NO: 518 - protein, 591 aa, unidentified
  source 1..591: note = Related to NZ_CADFFT010000001.1; note = Caballeronia sp.
MGTDNQQSMFNSFTSLTSKVQLCQFLGITTTRLNFLLYGLPCERRYKTHAIKKRNGGERRIREPIPPLKKIQKIIAGELAKQYRPRQHVYGYTKNKNIVQKARVHVAQKWVARVDLKDFFPSVNFGRVKGLFRGHPFDFNHEIATLLAQLVMDGNELPQGAPTSPIISNFICRSLDYELKRMAKAHRCFYTRYADDLVFSTSQKRLSPQVCSPLAADGISVQAVVGDGLRAVVERQGFVVNDAKTRIFSKSSRQQVTGITVNEKVNVSREYIRGLRAVLHAWRKHGEEAAASWFFANHYKRNRPHWKSQPADFREVIRGRMTFVRFVKGGDDTTYLTLAKKLAQLDDGFQLDAAEQLQAMSPRLMVYTEGVTDTIHLRHALSRMKGDGRYVDLNVDWADHSDRPRGEGKLWQNCVNDSRREEFRHQIQVYLFDRDSDFAKKAEDKYGKLKHHGNNVYSLVLPIPEHRHGRQQVCIEHLYRDEFLWQKDAQGRRLFPREDFDLDGHHIGGLEVLYRHPKAGTLIVDSDVVGYGGLRGKPVVMSKKQFADAVDLRVEPFHAPSFAGFEAIFDTLSELSRSLGGGHRPEASDLL

SEQ ID NO: 519 - protein, 617 aa, unidentified
  source 1..617: note = Related to NZ_CP014579.1; note = Paraburkholderia phytofirmans
MGTLNITSLLDESVQPPLISPFLLLRSVEDLCSFLDISHRRLNFLLYVLTPGDRYRSYELKKKKSSGTRTIKSPIKPLKEIQRRLANELSAVYKTPLNVYGYVKHRDVVDKAKQHVGQRWVARIDLENFFGTFNFGRVRGMFRAKPFNFPDSLATVLAQICVDTNELPQGAPTSPIISNILFWRLDARLRRLAREHRCVYTRYADDLVFSTNKRHMSSGICTVLDELSETPTIRVGETLRKEIEGEGFKVSDSKTRLFGRTARQQVTGLTVNEKVNLGREYVKELRAILYACRKFGVEAAKERFMASHYGKNVPPGKAAPAFAEIIRGRVMYVGRIKGYSSRAFLALARGMPILDPNFRVPEEHAAPRAYLFTEGVTDYLHLDAALKRFRKAGEFADVTVEWDDHTKREQMGDKRLLQICDDIAKGPKQDRLCIFVFDRDVPDTITKAEAPDGSPKLRGNGVVSMCLPVPKHRDQSSPMCIEHLYSDEFLYQYDADGRRLFARDEFLPSGFHKSEDFLSRQPKTSLIVDSDVVLSAGERRGTSVALSKRQFAMFVNLQTAPFSEPDLSGFRPFFEALRQLMEAHEAIQAMPVTPPANDRGQRVPPPGTGAGATQIEA

SEQ ID NO: 520 - protein, 607 aa, unidentified
  source 1..607: note = Related to FUZX01000002.1; note = Paraburkholderia hospita
MGTPNLKSLNFEPEQAALIHPFLLLRSVDALCQHLGVSKRRLSFLLYVLPAAQRYRSFELKKRKSKATRTIKNPVKPLKEIQQHLAKDLLDIYRAPLNVYGYVKDRDIVDKAERHVGQRWVARIDLENFFGSFNFGRVRGMFRAKPFYFPDALATVLAQLCVDSNELPQGAPTSPVISNILMWRLDARLRRMAREHRCVYTRYADDLVFSTNTRRMSSGICNVLNADSDAPIVRPGDALLKEIRDEGLAVNDSKTRLYGRTERQQVTGLTVNEKVNLDRDYVKQLRAVLYACSKVGVEAAAERFFASHYPKNVPPGKRVPQFADVIMGRVMYVGRIKGYSSGAFLALASRLKILVPDFRVPEMPVTPRVYIHTEGATDYLHLHAALKKLQSGGEFTDLSVGWDDHSKREQLGDKRLLQLCEDTANGPRQDRLNVFVFDRDIADTVTKAEREGEPRVRGNGVVSLCLPVPAHRPASSLMCIEHLYTDEFLYQQDTAGRRLFSREEFRPDGFHNTEDYLYRQPKTTLIVDSDVLVTSGENRGKSIALSKKQFARYVSEQVEPFAAPDLSGFRPFFERLRHIIEAHEFLHDVPKRGGEGSDISRVAVDTP

SEQ ID NO: 521 - protein, 542 aa, unidentified
  source 1..542: note = Related to JAFDWE010000089.1; note = Actinomycetia bacterium
MAKVELRILTWLAWGLNEQRKYTTFSIARRNGSVRQISAPIKPLKEFQQALAESLLEGYRAPAHVHGFTTGRGPRTNAEVHVDKFHVFRADLADFFPSITYRRVRGLFRRWPFEHPDDLAKVLARLCCHQDALPQGAPTSPIISNFICRRMDRELAQLAAAERCHFSRYADDLVFSTNQHLFPPAIGLVEEGTAVAGDRLKGIVTTNGFSINADKTTLTRETQRQRVTGIVVNEKINPPREYVRSLRSLLYIWKTYGQPAAEAALAKHDPPSGNRPPGKSLPRFEQVVRGRVQYVGSLKEFRNPTYYRLAKQLSEVDEGFSPPPMPIIEANLYTEGPSDWRHVLAAQRHFNELGEFTDFHLVKGKEASREGESQLRKFAERLGEREQSEFSVCLFDSDVKPALEAVGPDGWRRYGPRVVAVGLAVPAAMDRREPLFIEKLYSEEVLKTKLANGRRVYLGTEFNPKSGHHLEEDCSIVGEGKEFIQQSVHAFDTHSVISLTKVDFSKAVYDDPEHFGTEIFEGFRPTFERIDEALRDSWEVLQ

SEQ ID NO: 522 - protein, 552 aa, unidentified
  source 1..552: note = Related to JAHBZD010000017.1; note = Xanthobacteraceae bacterium
MLTHQLRARRRETMRCPAQYQERQKRHDRADYYFMTLNSAYSFSSLAAVLGITPKQLGYYLHKRPLASQYKQFKIPKKSGDYRVISAPATNLKLIQKSIAKQLNEIRLFKPCVNGFVPKRNIRRNASMHVGRRFILNIDLEDFFGSITFARVYGMLQKEPYFLAQPVAAAIAKACTLDGVLPQGAPSSPVITNLICAKMDAELTRFAESNRCKYSRYADDITFSTTRPTMPFASALKDAEGTTVYELNPTLRDIIETNGFKINEKKVRLRDATARQEVTGLIVNKRVNVKRRAVREIRAMLHAWRTFGLPAAATMGKDKYGLKGNFEAVLRGKIEFVGHIRGRPDPLFRKLADQFNSLPVAGRIRTVLTPEEIARNATWIIESDGDVQGTAFFVDGVGLVSCSHCVGPNAYILHPTDPTKKHRVKIIKEDSHRDIAILECPNGFSVPGFQLHAASIVKDGTEIVLLGYPNHRAGSTIRVEAGKLLRRIVSSAVEHYEITPKIIGGNSGGPIVNSDYEVVGIAVRGLSGKAKFSDVEFIGINSSELKLVLSGK

SEQ ID NO: 523 - protein, 517 aa, unidentified
  source 1..517: note = Related to NZ_CP007440.1; note = Rhodoplanes sp.
MPLNKIHNLTGLAYLLGCRAQQLGYYIYKRPLITQYRTFEIPKRRGGTRTIAAPSTNLKIIQRNLAKELDALFTFKSCVNGFVTDRDIKRNATTHVGERFVLNIDLENFFGSINYGRVFGLLSKPPHSLNRTVAAAIAKACTLNDALPQGAPTSPVISNLICAKMDSELLRFAAANRCKYTRYADDLTFSTNRTSMPFATASKAADGKTYCEINASLRTIIESNGFQINTNKLRLRDNTARQEVTGLIVNERVNVKRRFIRETRAMLHAWRKFGLLAAAAEHKNKFGGGTAFESIVRGKIEFIGQIRGRPDLVFRRLAVQFNALTTSGKIRTALSPEEIVKQATWVIEHSGDGQGTAFFIEKYGLITCAHCLGSNPYIYHPENPAKKIAVTVLSQDNHRDLAALEIPAELKTISPIPLYKGPPLKDGASITLCGYPNHFLAKPIRIEQGKLIRTFPKSAVSYLEVTPKIIGGNSGGPLVTEDFSVAGVAVLGLSGSVTLSQAEFFAVNIAELVAWLK

SEQ ID NO: 524 - protein, 519 aa, unidentified
  source 1..519: note = Related to CP069300.1; note = Bradyrhizobium sp.
MDLSKAYDLTSLAILLDCSAKQLGYYVYKRDLATQYKQFQIKKRSGGARIIKAPATNLKIIQRSIVRELERLVRFKPCVTGFVKGRDIKRNAVLHVGQRHVLNVDLQDFFNTINYGRVYGLLTKKPYGIAPKVAAAIAKACTLDNALPQGAPTSPILSNLICAKMDAELSRYALANKCIYTRYADDLTFSTNRQFMPMAALNLNSDGTPITELARPLREIIEANGFVINERKVRLSTRGRRQVVTGLVVNERVNVRRSAIREARALLHAWRKFGLVKASSVFNEKFGGAGRDFEAVVRGKIGFIGQIRGRPDESFKKLALEFNKLTANGKIRTALSRSEIAAQAIWVIEHDGDSQGTAFFLDGVGIVTCAHCLGENPFIYHPSDHTKRFKLKVRAEDKHRDLAILYVPVELENVVPLSAYKGVALANGADVSLWGYPNHFAATPIRMERGKLIRSFVKSAVSYLEISPKIIGGNSGGPVLNDGYQVIGIAAVGFGGSTKFTGVEFMAVNGIELSALLSK

SEQ ID NO: 525 - protein, 534 aa, unidentified
  source 1..534: note = Related to NZ_QTTB01000004.1; note = Tsuneonella troitsensis
MRVNSKQDLACAIGIPLELLERRAFGIPQHILYSRHEYPKRDGSTRLIYSPHWPLRHIQSRLANLLDEIYEPSSRVSGFVKGRGIRYNASLHVGKRLLLNFDLSDFFPTIHFGRIRGRLRARPYQLNAVIATTIARLCTLDGNLPIGAPSSPVLANIICSHLDGLLTRLAREHGCFYSRYADDITFSTNRRSFPNSLATVDHENGLAAVGALISAAVTEAGFIVNPRKTRILDKSSRQEVSGVVINQFLNVPRSFMREIRGALNAWEKHGHIASEQYFKEKYNWRSSQSFENHLRGRIQHVIHIRGSDDLVVWRLVNRFNNLPDRAHSSISYDRPKDERDRLSLAVCRVESGNDELMEYNQGSGIKLPNGNVLTNFHNIEICGTVAPIIEIYLTDNAPVPVPMRVLKHDFAKDVAILEPIDPEWKMPIAAASAELSFSECKVGDDVKVGGFPSYQLGDSCQIATGEVRAFSKIEGITYFRVSVPIVKGNSGGPVFNIDGQVVGIASRGIDTHEITNAAFNGCLELFRFEKFLQS

SEQ ID NO: 526 - protein, 406 aa, Acinetobacter sp.
  source 1..406: note = Related to KB849143.1; note = Acinetobacter calcoaceticus
MKFPPTSPILSNLIVMKMDGQLSKLAKDNLCFYTRYCDDIYFSTNRKKFPQNIAFFDHSSDNRFCQIGGDLEKIIKSNDFIINEKKVYLSDKSNRQFVTGLVVNEKINVNRKFIKNIRPILKKLQKDENFKKEYFEKFNKNILSQLRGKIEFIGNIRGYDDPVYRKYALALSKLDPSYIFNKRNLSFGDGQLVEIYCEGITDYLFLKEYLRLFKNRGMFTDLEIRFREDSNFTGGDTQLLDAYKKIQQMNSSLNNHLTIFIFDKDNQNIIKYFENLENELDGLKHLFLPCPDGYSNSEYCIEHLFKFEDILKVIDNENRRIYLKSEFNSKGFHEEENLIYMRMNQKTLVADDEVLCLRTQKNVALSKANFADLATGKYLTLLDLSNFEKLFLEITYLKNEFYKSPQ

SEQ ID NO: 527 - protein, 511 aa, Acinetobacter sp.
  source 1..511: note = Related to NZ_KB849643.1; note = Acinetobacter soli
MPKKDGGIRQLYVPNQLIKKIQKQIFDDLQPIYSPRACAFAYVKGRNIKEHAKKHVNKRWILRVDLQDFFPNIHFGRVRGIFKLLGCNEEISTYLAQLCCYEGKLPQGTSTSPLISNILASKMDRQLSEMAKQNQCFYTRYCDDLYFSTNRKLFPQNLAFFDNSSGNRFCQLGEDLKNIIDSNDFIVNEKKVYLSDKSNRQFVTGLIVNEKLNINRKFVRSLRPDLKKLKDNPNYKNEYFEKYNKNLLAKIRGKIEFIGYIRGYEDTLYRKYALELSKLDSSYIFNKRNLSFGDGNLVEIYCEGVTDYLLLKEFLKFFKSNGMFTDLEIKFREDSNFTGGDSQLLDAYKKIQQMNSNLNSHLTIFIFDKDNQIIVKYFEALKNELKGLKYLFLPCPIGYEKKEYCIEHLFKFDDILKVVDEENRRIYLKDEFNAKGFHNNGECIYMRINQKTLIADDEVLSLSNQNNIALSKSKFAELATGKYLKELDLSNFEKLFIEITNLKNEFYTLSH

SEQ ID NO: 528 - protein, 529 aa, unidentified
  source 1..529: note = Related to JACCQO010000001.1; note = Desulfovibrionaceae bacterium
MKRIKNLTAFERQALTEKDICSYLGVYDSEVNKIIRLPTKYKYKVFTIPKKNGAQRTIQAPTYRLKEIQKRISILLCDLYPPKKSASAFIKKRGICYNANFHINNNLILNIDLENFFPSIHFGRIFGLLKSTPYNLSFIVSKIIANLCCVDGRLPQGAPSSPVIANMICGKLDAQLYKIARENQCLYTRYCDDITFSTKQNSFRGIATIHDDEFALVQLSDKLEDIIEDNGFYVNKDKVHFASKKSRQSITGIVVNEKMNVRRTYVRNLRSAIYKMEKDIDAAESEYIAKYKKSMNYASSSSIFDHISGKLSYLKMIKGDKDKTYKLLKHRFDLLLGKQSFFFSTQREQLTAAIWAIEDKNTIETGTGFMLKGVGIITCAHVIRDNPCAILDTRPGAPLRKIDMEIIKRDEALDIAILRPLGVDIRKYYALEKSDAEFHNTPEQLILAGYPGYRLGHTLSIKETYCISHRVEHAIQLIELSDQIHKGNSGGPVLDSELKVVGIAAKGGEPGQQDLAIHIGMLSSLVIRG

SEQ ID NO: 529 - protein, 557 aa, unidentified
  source 1..557: note = Related to NZ_JAEHFP010000009.1; note = Paracoccus sp.
MSLKPFANLRQIAFALRRNYRKRFVYIAYGLAPGARYKEFTIPKKSGGTRRICAPRIALLGLQRDILRLLESDYRPRAHVHGFVGGHQRSIVSNARQHVGKRWVLNIDLEDYFETIHFGRIRGRLMAPPYDYPEEIAQFIAHIACFQTEKEVEGSLRTTHVLMPGAALSPILANIVSDKLDAELARFCRQLGCTYTRYADDITISSNRRTFPAPIGRFANPDSHDDFILSDTFQQMIEDNGFRINHAKTRLLGAAFQQEVTGLVVNEKVNVKRKFVRDVRAMLHDWEFNGYAAASARHFNDKRPDRGRLPEQEATNFEWVLRGKIEFIRQVKGSTDQVFRGLAARFNALSSGGQFSIPLVEDSEVLNAAVWYLENDTDGGSVGTCFAVAENLFATCAHCLGPNLRIFPRQSPAFAMEADEVARDEHNDLALIRLRTPMPAFNPAATLQMASTAEAGALGIRSAVQAAGYPSNLDSTSLTIRDTEVTGFSRQTFDGTPATSDNVIALLSGTYEGMSGGPVLFSGKVVGVIVRGPNDDDRTIPFLAVRSEFVDALLATL

SEQ ID NO: 530 - protein, 534 aa, unidentified
  source 1..534: note = Related to JADOUJ010000023.1; note = Labrenzia sp.
MTYIAYGLAVGARYKEFNIPKKNGGTRRICAPRIALLELQRDILRLLEGDYKPRAPVHGFVGGHKRSIVSNAQQHVGKRWVLNIDLEDYFESIHFGRVRGRLMAPPYDYSEEIAQFVAHIGCFQTEKEVDGNVRTTHVLMPGGALSPLLANIVSDKLDAELSRFCRQLGCTYTRYADDISISSNRRTFPASIGRFANPDSQKEFVLSDTFQQMIEDNGFRINHSKTRLLGHAFQQEVTGLVVNESVNVKRKFVRDVRAMLHDWKLNGCEVASARHFNKKRPDRGRLPEQEATNFEWVVRGKIEFIRQVKGSTDQVFRGLAARFNELCLGRRFSIPLVEDTEVLDATVWYLENDTDAGSVGTCFAISENLFVTCAHCLGPNLRVFPRKNPEFQMEAEEVARDDHHDLALIRIREPLPAYNPATVLRIASTADASELGIRSAVQIAGYPSNLDNNSLTIRATEVTGFSRQTFDSTPTMSDNVVELLSGTFEGMSGGPVLFSGKVVGVIVRGPNKHDRTEPCLAVRSEFVDALLATL

SEQ ID NO: 531 - protein, 561 aa, unidentified
  source 1..561: note = Related to QOCE01000017.1; note = Phaeobacter gallaeciensis
MSLRRFANLRQVAFHLHRDYRRRMFHIAYGLPAGARYREFTIPKRSGGTRRICAPRKALLNLQRDMLRLIEPDYQPRAHVHGFVSGRQRSIVSNARQHVGKRWVLNIDLEDFFETIHFGRVRGRLVAPPYNYPEEIAQFVAHIACFETEKEVNGTRRTTSVLMPGGALSPLLANVVTDKLDAELARFCRQLGCTYTRYADDVTISSNRRTFPAPIGRFADPESFLEFTLSDSFQQIVEDNGFRINHDKTRLLGQAFQQDVTGLVVNEKVNVKRKFVREVRAMLHDWEFNGLAQASARHFDEKRPNRGRLPEQEASNFEWVVRGKIEFIRQVKGSTDQVFRALAARYNDQCSGQEFHIPLVEDQDVLNAAVCYLENDADGGAVGTCFAIEDDLYVTCAHCLGPNLRVYPRQNPAFPLEADVVAQDDHNDLALIRIRTPLPAFRPAAFLQLAEATEAASVDIRSAVQTAGYPSNLHSASLTMNSTEVTGFSRQSFDGTPPTSDNVISLLSGTFEGMSGGPVLHEGKVVGVIVRGPNEDDRTIPFLATRVSFLETLRAGVSSAS

SEQ ID NO: 532 - protein, 557 aa, unidentified
  source 1..557: note = Related to REBV01000319.1; note = Puniceicoccaceae bacterium
MSLKKFKNLRQVANALGRDYRKQVLNIAYGLPPKERHTEFAIPKKGGGTRRICAPRAALLGLQHDCLDLLQMDYRPKAQVHGFVSGRGRSIVSNARQHVGKRWVLNIDLEDYFESIHFGRVRGRLLASPYNYSSEIAQFVAHIACFQTTKEFDGVHRFNSVLMPGGALSPLLANIVSDRLDAEIGRLCRRLGCTYTRYADDISISTDRRTFPAPIGRCSDPERLRDFTLSDGFQEIIENNGFRVNNSKTRMLGREFRQEVTGLVVNDKVNVKRTFVREVRAMLHDWEFNGYDVAADRHFNEKRPDRGRLPAYEATNFEWVVRGKIEFIRQVKGAADQVFRALAARFNQLTSGQAFVIPLVEDREVLDAAVWYLENDVDAGSVGTCFAVGENLFVTCAHCLGPGLRVFSRRSPNFSLNAIEIARDEKNDLALIRVESLPSGLKPEAILRLATLAECGNVPTGAAVQAAGYPCNLHPDSLTVTPAQVAGFSRQTFDGSQHTEDNCIGLLSGTYAGMSGGPILHEGKVVGVIVRGPNDSDRTLQCLAVRSMYLERLLQGL

SEQ ID NO: 533 - protein, 554 aa, unidentified
  source 1..554: note = Related to JACJHV010000001.1; note = Rhizobium leguminosarum
MTLKSVPDLRFLAAALGRNLKRRLTYIAYKLPSSSKFREFTIPKRSGGTRNIQAPKVALLNLQKSIKPLIEKDYRPRVNVHGFVAGQGRSIVSNAEKHVLKKWVLNIDLENYFGSIHFGRIAGRLQSKPYNYAPEIARFVAHIACYPTQTVIAGQIQDSSVLMTGGAISPLLANIVTDKLDSEIARFCSQLGCTYTRYADDITISSNRNKFPGKIARFEDPDDQKSVVLSEEFLDLIEGNGFAVNHAKTRLLSRIFSQEVTGLIVNKKVNVPRTFIRQVRSMLHDWEANGYAAAQENHFTKYRPNRGRLPAYEAKDFQWVVRGKIEFIKQVKGATDQVFQTLARKYNSLTSGKKIAIPIVETNRIIEEAVWYLHTEKDIISTGTCFAVEGGAFITCAHCIGPNMTVFPKAAPKFPVATAALNVDGVNDLALLDLTALLPAHAPKGLLKLANVAEVSALQVGDKVQIAGFPGNLNPDAVTIAEATITRFSKTTLDGSIPASNNVMVLDGGTFSGMSGGPVLFKGKVVGVVVRGPNDNDPNEKCEAVFSTLVLPMF

SEQ ID NO: 534 - protein, 554 aa, unidentified
  source 1..554: note = Related to VITA01000024.1; note = Sinorhizobium medicae
MTLKSIPDLRFLAAALGRNLKRRVTYIAYKLPPSSKFRVFTIPKRSGGTRTIQAPRIALLSLQRSVRLLLERDYSPRVNVHGFVPGHGRSIVSNAEKHVLKKWVLNIDLENYFGSIHFGRIAGRLQSKPYGYTPEIAKFVAHIACYPTQALIDGKIQDSSVLMTGGALSPLLANIVSDKLDSEIARFCSQLGCTYTRYADDITISSNRNKFPGKIARLEDPEDHRSVVLSEAFLDLIEGNGFAVNHAKTRLLPRSFGQEVTGLVVNKKVNVPRSFIRQIRAMLHDWETNGYAAAQIRHFSKFRPNRGRLDAHEAKHFQWVVRGKIEFVRNVKGSTDQTFQTLARKYNSLTSGGKITIPIVETNRIIEEAVWYLVNENKVVTTGTCFAIEGSKYITCAHCIGPNMTVTPKSAPKFPVSVKALKQDRVNDLATLDLSALLPAHTPKGMLKLASIAEVGALKVGDKVQIAGFPGNLNEEAVTISEATITRFSKTTLDGSIPASNNVMVLDGGTFSGMSGGPVLFKGKVVGVVVRGPNDDDPNEKCEAVFSTLILPLI

SEQ ID NO: 535 - protein, 558 aa, unidentified
  source 1..558: note = Related to NZ_LFJD01000004.1; note = Bradyrhizobium sp.
MPAPTPLLNSIFLPRQLASVIGVGFRRFAYIVYVIQGSLKYRNFKLPKRRGGERLIEAPRWPLLRIQKELRPLVDELYRPRGVVHGFLKDRSVLTNARVHLKARWVLSLDLQDFFHAVTFGRIKGRLEANPFNLTPPIAHAIANAACVSGRLPQGGALSPVLSNMVADRLDGELSRLCRKFRCRYTRYADDITISTGAARFPHALAHLDDGEKRTLIIGEALRALIESNDFKLNESKSRLSGRGDRQEVTGLIVNEKLNVPRTFVRQIRAMMHAWEKFGRVAAEAEHLTKWRKSDGRLRKHDRDNFEHILRGKLEFLKCVQGENEPVCRKLLLRFNALPDRSTTSFRLLPASAIELLRESTYCLDITKYVGPSSEGSAHVREYFTGTAFFLKGVGLVTCEHCTGDEMQIYHPDRKHLKYRVHPLKVDALADVAILEVLDTMLPSPRVELEAAVSAVAIGDEVRVAGFPAKFPEGSISIARTEVIATYDRSRHPVIWKGDATVRYLIEKGVPDGVSGGPVLDARGMVIGLGVKGPSEDDPLVPCEVVPISAVQRLLRTS

SEQ ID NO: 536 - protein, 579 aa, unidentified
  source 1..579: note = Related to NZ_JXMS01000023.1; note = Halodesulfovibrio spirochaetisodalis
MKNKTTLPTPTKELLQASSNKDLARLLGFRTSSLCYILYKLPSRPYKKFGIPKKSKGVRIICAPRKPITTLQEKVYHLLLPLYRPKKSASAFIKNRSIVFGADKHSRKRHLVTFDLKDFFDSIHFGRVQGLLMATPFNIHPDVAQSLANIICYEDKLPQGGITSPLISNMICWKLDTQLTELAVNTGCTYTRYADDISISTWKKELPPEIGTLSKYDITLSEEVQKIVNDNGFEVNPSKTRYTHPSTRMEVTGLTVNRRPNIQRKKIRNLRALLHDWDINGYVEAEQRYRDKSSNPPREEATLEEIVCGKLAFLKMVRGENDPVYRKLKRKHLILSTGSIPTGLLDAVPTLNADSNYLFGEGQTDWKHLYAAFRYFRNQGLYNGLNLVISPPPAVWEGGFSNLKMMVERYKLLHNTNSKLFFLFDTDEQQAVKYARGRKDNSNLYHHQGSNVYTLLLSHTPNLCIEHLYPEEELKRANSAGRRLYLSNEFTEQGVLKDNSSITYCSEKKPFDKRWVHKKHILDADVIKTINGKKKNIACSKKDFSSQVLARPDTELVFTFDEFKPIFDAIEKALAAYKA

SEQ ID NO: 537 - protein, 537 aa, unidentified
  source 1..537: note = Related to NZ_CP009962.1; note = Collimonas arenae
MLITLSALTPPNFLDLKSFSDLALFFGIPSNKLGYLLYALQDSDKYKSFNVPKKTGGTRQISEPHPLLKKIQRKLADSLLELYKPKQSVHGYLKDKSIVSNAKMHLRKRYLLNFDLADFFTSINFGRVRGLFLNHPFNFPQEVATALARISTKENSLPQGAPSSPVISNFMCWGLDNYLRKFCYQLGCTYTRYADDISISTNRENFPTEIANVKHDPYSAVISEILTTKIEQNGFTINNAKTRFSTPRQSQVVTGLKVNEFANVSRKYVRNLRAMLHAWEKFGLDKAESEFREKYVSKHRAPFLPPVSFKQVLHGKLTFLRSVRGPNDDIYQKLLGRYSLVADLRRLTKFGFPKQINRALWILESDLFEDDYYQGTGFCLDGIGIVTCAHVLKPGTKARRIYNHLESLNIEIVERNDALDYAIIKVIGGVEEVSLIADLDFNHQLGGQVRTIGFPAHDGTASVAYEDGVIVQSRYNAAGQKWFRVNTNIVAGSSGGPVLNSEMKVIGIVAYGATNLSGGGDPINSGYIPIQCLNGPA

SEQ ID NO: 538 - protein, 504 aa, unidentified
  source 1..504: note = Related to JAHBTD010000003.1; note = Fimbriimonadaceae bacterium
MRIITSLWQLEEEWGYEAGTLAFVAYRTNIDSRYTTYNIRKRTQGYRQIDEPDELLKGVQRKIKEFLEDKYVPTTSAYAYVSNRSPVKNAALHTRKKWIVNIDIKDFFPSIHFGRICGVLQSKPFHLEASTAKVLATICTRNHALPQGAPSSPILSNIISYSLDIALIQFARSHGFYYTRYADDITFSTWQSKFPNQLLTVDHEGTRVADSLEQIISGNGFTVNGLKTRCLERRQRQSVTGLTVNKFVNVRRKYIRQVRGMIHAWQKYGEESAQKTFEEKHLNKHYVPSGRIPKFRWVLLGRLQYIGHVRGWQDPVYRKYFRQLSELWPDLSKRMRDRFDILAQNFLELSNMTDHRAKGYALEKFIYELCDDGTVGVSGQFRRQNNIEQIDGAISFNSNAVLIECKFYSERIGALLIDPFSMKLARSGAGTQGLLISMSGYTSEALETIKLNPGQNLMLLTDADLQVWLDRRLTTYEVIAAKLKALQVLREPALSLAESVEIEE

SEQ ID NO: 539 - protein, 546 aa, unidentified
  source 1..546: note = Related to JADMJM010000027.1; note = Hyphomonadaceae bacterium
MPSDTSTPTQRKAREPGPPAITINGRALQTPFDVAQYFKVAHSHMMWVLFKAPAASRYRTFEIPKRTGGMRLISAPNGLVRDLQTKLAPALAAAYEAHPSAHGFLKAKSVVTNAHEHIGQRLVVNIDLEDFFPTINFGRIRGLFMSRPFYMGAGAASVMAQIVTHRNGLPQGAPTSPALSNFIAATLDRRLTRLAKENRLRYTRYADDITFSTNQPTFPPSIVMTDVATGRVVPAETLERAIAAAGFAINRKKVRLQTRHQRQTVTGLVVNSSTNVHRARIRKIRAMIHAWEKFGLDAAASEHFAVHRGSSGKMPDHPAAAFRNIVYGQLSFVKMVRGKADPVFLKLCAKLIDLDPNPSKFIRQMVFGADDYDVFISHASEDKETIARPIFEACARRGVKAFLDEAHIGWGEDFTKKINTALGSARTVLCVISQVSVTKEWPLAEVNTALSMDVIGQKRVVPLIVGSPDLSKLPLIRGRDQLVWRGDAEIVAAELVKVVRPPKPEVTKGGAAVPVIAPNSPAEAKRAAQAKGAKKGGGFFGLFQKK

SEQ ID NO: 540 - protein, 545 aa, unidentified
  source 1..545: note = Related to JAEUMP010000020.1; note = Hyphomonadaceae bacterium
MPSEPGSEKPVRDPGPPAILWRGKPLETPFDVAGYFGVAHNHLMWALYKAPPQTRYRTFEIPKRTGGMRLISAPNGLVRDLQTKLAPVLAAAYDAHPAAHGFLSGKSVVSNAREHADQRLVLNIDLEDFFPTINFGRVRGLFMARPFFMGAGAAAVMAQIVTHRNGLPQGAPTSPVLSNFIAATLDRRLTRLAKENRLRYTRYADDITFSTNQPTFPPSIVITDQASGKIVPAETLERAIAAAGFAINRKKVRLQTRHQRQSVTGLVVNTAPNVHRARVRKVRAMIHAWEKFGLQSAAYEHFRKYRGASGAMPDDPSTAFRNIVYGQLSFVKMVRGRDDKVFLKLCAKLIDLDPNPSKFIKQMVFGADDFDVFISHASEDKETIARPIYEACARLGVKAFLDEAHIGWGEDFTKKINTALGAARTVLCVISQTAVTKEWPLAEINTALSMDVIGQKKVVPLIVGQPDLSKLPLLKARDQMVWRGDAEMVAREVAKIAKPPKPDVVKGGASLPVIAPNSTIEAKRAAQEAGGKKKGGGLFGWFGKK

SEQ ID NO: 541 - protein, 571 aa, unidentified
  source 1..571: note = Related to WGOB01000084.1; note = Alphaproteobacteria bacterium
MPPSTSDAPPEPPQAGAPVPPPPLGALAIDGAPLRNAYDVARYFGVAHGTMVWVLYTAPENQRYRTFEIPKRSGGMRRIDAPTGLVRQMQKKLAPILAGAYEAHPSAHGFIKERGVLSNAKGHAGQRLVLNIDLEDFFPSINFGRIRGLFMAAPFLCGPGAATVLAQICTLRNGLPQGAPTSPALSNFIAASLDRRLTRLAKDHNLRYSRYADDITFSTNQGVFPPAVAMKVQTEGASLGVRPGEALDRAIAAAGFAINLRKVRLQSRSVRQNVTGLTVNVAANVERSRIRKVRAMLHAWEKFGLDAAGSEHFLKHRGAKPKKGRGPVTPGAAFRNVVYGQLAYIKMVRGPADPVFLKLCGRVLDLDPNPSKFIKQMVFGAENFEVFISHASEDKELIARPIYEACERLGLKTFLDEPHIGWGENFTKKINTALGSARTVLAIVSSNSVAKDWPVLEINTALAMEVNGQKRVVPLIVGKPDLAKFPLLKGKNHVVWASDPDKVALRLLDAARPPPKPRAARPASRTAVPATGAYQPVPAGPNALPPLFAPYPPRAPKPKRSFLEWIFGRRG

SEQ ID NO: 542 - protein, 560 aa, unidentified
  source 1..560: note = Related to JAEUMQ010000020.1; note = Hyphomonadaceae bacterium
MQPPPTDGEASKPAAPAPSPLSIDGVPLRSAEEVARFLSVPYGRMIYTLYKSPDKARYRGFEIPKRSGGMRLIQSPNGLLREMQEKLGPVLQAAYEAHPAAHGFIKTRSVVSNARLHVAQRLVLNIDLEDFFPNVNFGRVRGIFMAPPFSCAPAAASVLAQICTHRNGLPQGAPTSPALSNLASATLDRRLTRLAKENGLRYSRYADDITFSSNHSQFPPAVAIFTEDGKKGLAVRPGEALERAIAAAGFSINLRKVRLQPRHVRQAVTGLTVNAAPNVERKRIRRVRAMLHAWAKFGAEAAGAEHLLKYRGAHSPGEQSARAFRNALYGELAYIKMVRGQEDRIFLNLCAKVLELDPNPSRFIRQMVFGADDYDVFISHASEDKDEIARPIFEACGRAGLKAFLDEAHIGWGQSFTQKINSALGAARTVLVIVSSTSVSKDWPVLEVNTALQFEAAGQKKVVPVIVGKPDLSRLPLLSGKDGMVWSGDADAVATRLQAAVKGDAPRRPERGAAKPPARAAPPQPPPRAAGRPGRTAVPVTAPRGPRRGFWSWLFGARPR

SEQ ID NO: 543 - protein, 563 aa, unidentified
  source 1..563: note = Related to WGNI01000003.1; note = Alphaproteobacteria bacterium
MPDPSTPSDRTRAPAFGELRLETVSDIARLLRTHPGQLSWTLYKAPETARYRAFEIPKRSGGMRQIHAPIAHVRDWQTRLAPILQAAYEAHPSAHGFLRERGIMTNARTHVGQRLVLNIDLEDFFPSVNFGRVRGLFMRSPFNCGPAAATVLAQICTHRNGLPQGAPTSPALSNFAAAALDRRLTRLARDNNLRYSRYADDITFSTNQPQFPPAVAEMRAGEGDALKVRAGEALERAVAAAGFSINHKKVRLQRRSQRQSVTGVVVNARTNLTRQCVRRVRAMLHAWKKYGLEAAGAEHFDRWRGAQANKRATTVGRAFRHIVYGELSFLKMVRGADDPVFLKLCAQLIELDPNPSKFVRQMAFGADDYDVFISHASEDKDAVARPIFEACSRLGVKAFLDEAHIGWGQSFTTKINTALGASRTVLAIVSSHSVTKDWPVLEVNTALALEANGFKKVVPLFVGAPDLSKLPLLQAKDAMVWKGDPDMVAKRVQAALKGEAPRRPAEVAPRPRWMGGRSATALPIVGVAPRGVAVRVDPPPILPPPRRTLWEWIFGRRGPPSSR

SEQ ID NO: 544 - protein, 556 aa, unidentified
  source 1..556: note = Related to JAEUMS010000023.1; note = Hyphomonadaceae bacterium
MPSSSQAETAETALLHNGRPILTAYDAAKFFGAPLGKLAGVLYRAPEEERYKSFEIPKRTGGMRPILAPIGLTRELQEKLAPVLLERYSAHPAAQGFLKERSILTNARVHAGQRLVLNIDLEDFFPSINFGRVRGLFMAEPFKLGPAAAALFAQLCTYRNGLPQGAPTSPALSNFIAADLDRRLARLARESNVRYTRYADDITFSSNQPTLPQTLIVTVAGEGRASVQVAEPLERAITASGFAINHKKVRLQTRHQRQSVTGLHVNAKPNVSRARIRRMRAMLHAWERFGLDAAAYEHFLKHRGMLKPPRDPSRAYRNVVYGQLSFIKMVRGGDDPVFLGLAAKLIKLDPNPSRFIRQMAFGGDDFDVFISHASEDKDEVARPIFEACARLGVKAFLDEAHIGWGQSFTQKINTALGSARTVLAIVSQTSVTKEWPVIEVNTALSLEASGQKKVVPLIVGKPDMSRLPLIHGKDAMAWNGDAANVARRLKAAVDGAAPRRPAAQPATTAVPVTTDKPLALRARSQAPLAIQERGPWRPPPKPKRGLFDWLGGRKRP

SEQ ID NO: 545 - protein, 487 aa, unidentified
  source 1..487: note = Related to DPWD01000203.1; note = Hyphomonadaceae bacterium
MLLHEGKPILTAYDAAKYFGVSVGKLARALYRSADEERYVRFEIAKRSGGMRPISAPVGLTRELQTRLAPVMQARYSAHPAAQGFIKERSILTNARVHVGQRLVLNVDLEDFFPSVNFGRVRGLFMAEPFKLGPAAASVFAQLCTYKNGLPQGAPTSPALSNFIAADLDRRLARLARESNVRYTRYADDITFSSNQQSLPQTLIVHAQGGDGHGVAVAETLERAITASGFNINHKKVRLQTRHQRQSVTGLQVNSRANVSRERIRRVRGMLHAWEKFGLPAAARDHFLKHRGMLRPPKDPPRAFRNVVYGQLAFIKMVRGADDPVFLNLAAKLIKIDPNPSRFVRQMAFGGDDFDIFISHASEDKDAIARPIFEACAKLGMKAFLDEAHIGWGQSFTQKINTALGSARTVLAIVSQVSVTKEWPVTEVNTALSLEVSGQKKVVPLLVGRPDLSRLPLVQGKDCMAWNGDAAAVARRLKAAVEGAAPR

SEQ ID NO: 546 - protein, 556 aa, unidentified
  source 1..556: note = Related to NZ_SBJL01000001.1; note = Vitreimonas flagellata
MPLTSIEDAEGLRLPDGRLVLSARDAAIYFGVSFGKLTHALYRADDEQRYRAFEIPKRTGGMRQIYAPHGIIRECQEKLAPVLQEFYAAHPAAHGFIKERSILSNAKLHTGQRYVLNVDLEDFFPSINFGRVRGLFMAAPFKLGPAAASVFAQLCTHRNGLPQGAPTSPPLSNFISAQLDRALSRLARENGVRYSRYADDITFSTNQGAFPPAIAVTSRGEDGGEGVRTGEALERAVIASGFAINHRKVRLQKRDQRQSVTGLNVNEKANVARKRIRRIRAMLHAWQKHGLEAAAAEHYLRHRGMLQLPQNFDRAYRNVVYGQLAFVKMVRGADDPVFLNLCAKVLEIDPNPSRFIRQMVFGADDYDVFISHASEDKHEIARPIFEACAKLGLKAFLDEAHIGWGQSFTQKINTALGSARTVLAVVSSTSVSKEWPIVEVNTALALEVSGQKKVVPLIVGKPDLSKLPLIRGKDAMVWNGDSAAVAKRLKAAVSGDAPRRPVITPSRTALPPVSAAPASATAPLRQAPVGTGPWAPPPPRKRKLSFFELLFGRRKR

SEQ ID NO: 547 - protein, 589 aa, unidentified
  source 1..589: note = Related to JAGWZE010000002.1; note = Alphaproteobacteria bacterium
MHADRRPDDAPPQAPAILVSGRAPQSASDVAALFDVSASWLTYVLYRADESQRYRAFEIPKRSGGVREINAPIGVVRDCQEKLAPLLLAAYRAHPGAHGFIPERSILTNAKAHAGQRLVFNVDLKDFFPTVNFGRVRGLFMASPFFMGPAAATIMAQVCTHKNGLPQGAPTSPVLSNFVATALDRRLTRLARENGVRYSRYADDITFSTNQTGFPAAIVAFEQDGEKRRAVVGDALAKAIADSGFAVNFGKVRLQTRHERQSVTGLVVNAMPNIERARVRRIRAMLHAWSKFGLEAAGEEHFRRWRRAKPKVKDGTAGTAFRNVVYGELAFVKMIRGREDPVFLKLCAQVLALDPNPSKFVREMAFGAADYDVFISHASEDKDTIARPIFEACEKLGLKAFLDEAHIAWGASFTEKINVALGSARTVLTIVSPASVAKDWPVLEVNTALALEVSGEKTVVPLIVGKPDLSKLPLIKTKDQLVWTGDAMFVAKNLKAAVEGRVGVKQRRTPDGGLAPAPAATGAPGPAVAARAESSRGAAQGWTPGWQSTAPKPFEIRRKSKSGGRWFVTALWAALAAALAAAAFLFGFG

SEQ ID NO: 548 - protein, 511 aa, unidentified
  source 1..511: note = Related to JAHQVS010000037.1; note = Rhodobacteraceae bacterium
MSEKFSAQELDQLLNLKLETANDVSKFLKISKPQLLFALYRASDEQKYDSWEIPKRSGGMRRIDSPRRVIRDGQKALLPYLEARQNAHPASHGFLSDRGIVTNADAHKGQRIVLNIDLANFFPSVNFGRVRGLLMKPPFEMGEAAATICAQLCTFRNGLPQGACTSPILSNFIATSLDRRLLRLARATRMRYSRYADDITFSTNAEAFPEQIVKVFSAAPLTDEALEAAMEGPASKAPKPAAPAPKIGPALERALTQCGFKVNPAKVRVQRRDERQTVTGLTVNQFPNVERRRIRRIRAMIHAWEKFGLQKAGHEHFHRYAPRQTSPGFDVARAFRNAVYGQLAFVKMVRGAEDPVFLKLCSKLTTLDPNPSKFIRRMVFGADDYDVFISHAAEDKDAVARPVFEACERMGLKAFLDEAHIGWGENYTTKINAAMGSARCVLLIISSHSASKPWPLAEINTALSLEVIGEKMAAPLVVGKPDLSKIPLIKGKDYIEWSDNPDLVARRLKDL

SEQ ID NO: 549 - protein, 558 aa, unidentified
  source 1..558: note = Related to JAHJSN010000196.1; note = Alphaproteobacteria bacterium
MPENPASTAGPPTPPTPPALPQHLRLRGRPLQTSQDVADYLGIRHRLMIDTLYNQPPNARYRHFEIPKRTGGMRPIHAPVGHTRAMQDRLLTDFKALYRPHPNAHGFIEKRSVTSNATCHTGQRWVLNIDLEGFFPSINFGRVRGLFMRPPFEMGQAAATVCAQIVTFRNGLPQGAPTSPVLSNFIAAQLDRTLSRLARQNRLVYSRYADDITFSTNLTQFPASVVVREMVVGGGYKVRAGDALELAIQKSGFEINEKKVRLQAHYFHQDVTGLCVNERVNVARERVRKLRAMLHAWRKFGLERAGQEHFAKHRGSRRLKPPSQPGAAFRNVVYGNLSFVKMVRGADDPVFLKLCAQVLALDPNPSKFLRQMVYGADDYDVFISHASEDKEAIARPLFEACNRLGLKAFLDEAHIGFGQSFAAKINTALGASRTILAVVTPHSTTKDWPLQEINTALALEISGEKKVVPVMVGSPDLTHLPLLRTKRWISWEGNADSVIRQMKQQVGPLREAKKAGSVPGIAGKKAARPVPQAKPMSGAQSQTTPRSDGWISRLFGKK

SEQ ID NO: 550 - protein, 561 aa, unidentified
  source 1..561: note = Related to JAGWZH010000139.1; note = Alphaproteobacteria bacterium
MLSSDTSNPAPETPKETLQEPPLEPHPFAWGALQTVADVAEFLGARRSDLAYWLYTASPDKRYTEFEIPKRTGGMRLISAPTDQIKTWQNRVAEKLAQSYRPHPSAHGFLEKRSVLTNARDHTGVRFVLNVDLKDFFPSINFGRVRGLFIKPPFAMAPPAATVLAQLCTFRNGLPQGAPTSPILSNFVASELDRRLTRLAKSNGVAYSRYADDISFSCNRAEFPPDLAHYEVDAGGLKTLRLGAALAKEISAAGFAPNLGKLRLQTRAMRQAVTGLTVNAKANVQRRRIRRVRAMLHAWEKFGLQAAGQEHFSRYRPSAAALRDPGPRFRHGVYGQLSFIKMVRGVDDPLFLRLCARVLDLDPNPSRFLKKMVFGDELYDVFISHASEDKDAIARPIAQALARQGLKAFLDEAHIGWGENFTKKINTALGASRYVLAIVSSHSVTKDWPILELNAALAMEANGLKTVIPVVVGKPDLGKLPLLQAKDWYVWKDDVEALALRVRQVVKGELRGAARRQAVEARGSSASAVPTEVAQEGTGPPVASSDINKKPGFFARLFRKQ

SEQ ID NO: 551 - protein, 502 aa, unidentified
  source 1..502: note = Related to JACQOS010000129.1; note = Chloroflexi bacterium
MFRAIVSVRDVADLLELDWSQLYYITSRAADRYSYRTFAIPKKGGGERVIQTPHPTVRILQHKLLEVLSLVYQPHPAAHGFVHERSIKTNATPHVNRRWVLNYDLQDFFPSITFPRVRGIFIKRFRLPPGPATVLARLCCNTGDTPDHLPQGAPTSPIISNMICHSLDHQFVQLAKRNGVFYTRYADDLTFSTNRTAFPLGIAETSGAQLIGVGNDVKEIIKHNHFDLNHRKARISGRASRQDVTGLTVNKRINVRRRLPREIRSMLHKWKAHGYEAAEVEFHTKFDVYGRGANYRNVVSGKLAFLRNVRGIDDRVFRRLYGWAKELDNDSFSELPPLATNAPSLAEAVRDFPTITASDNKQTRRGYLKRMFASARGTLWVVDPNLKADLLTDLVASIEPGRVSDIRLLSRDERLSSRQKVKYTTSRQSLLAKGVNLEWRVLPPPQRYFHDRWLADDSDCVSIGGPFSSIYDPRPPLGQNLLARRPEQFDTWWNRATPLTTG

SEQ ID NO: 552 - protein, 593 aa, unidentified
  source 1..593: note = Related to NZ_RAWI01000336.1; note = Corallococcus praedator
MASNHPEVPSDPRQLRASFVALKTPQEVAKLIGISYGQLCSIIYAKPGKFPYETFFIPKKNGTLRTISKPHPAVRSLQNKLLPFLTSAYRPKPSAHGFVVQRSIVSNARPHVGKRFILNIDLEDFFPSIHFGRVRGMLMAVPYQLPSSVASVLARICSNEGVLPQGAPTSPIISNMICARMDADLQRLAGKHRCTYSRYADDLTFSTTSRRFPEQLAVPRHGLVGENLQIGEPLIATITANGFRINTAKQRLQPRHHHQEVTGITVNRFLNPRKKLVRQARAMIFAWKKFGLQAAAAEFREKYDPKPRRASKPQPSFIRVVLGKVEHIRNVGGEGHPGYRKLLAALHQADPHHFEKPAEARTWNPRPADTSSWGYLAKRFRNSVFHLEVTNKEGDLQNGTSFLWDAGYLATAHHNLIGPVSVMINGISSPVGAGDQLHHPKANEGVDAALLKVAHTATAGKLAFKTRESAIEIGESVAALGFPTVPMYDSALIVRTGIVEGTAPQYSNQIDGIQVSIKLTGGFSGGPVIDSSGRLVGVVMEATFEKTAAGVPGGEFQHILPARYLTEISKDSAETSPQLPLQLKVVDSKQDTD

SEQ ID NO: 553 - protein, 472 aa, unidentified
  source 1..472: note = Related to VBNI01000253.1; note = Gammaproteobacteria bacterium
MLTEMYVPKAAAHGFVLTRSIASNARRHVRRELLLNVDVENFFGSIHFGRVRGMFGKPPFSFPGVVAATLAQLCTDTGTLPQGAPTSPMISNFICRRFDNDLLRLAGKHRCVYTRFADDISVSTQELAFHESIVKSFDSYGADVTLGAELVALFGKHKFTVNAKKTRVQSRHRRQEVTGLIVNRRLNVPRIYTRRLRSIIHSWRKFGKTGAETVFKTLDAGRKTRSGASPDIRSHLRGKIEFLRMVRGGGDLIYTKYALAASKLVGYDRPGRIEGAAAAIFEFYREALWVVVGRDALGSLISQGTAFFLDGVGFVSALHVLYPADSSITKWTLIRGCAPYDEFAVVGCTRHPALDLTILQTDARTHALLRGDEGQTLPGQAVVVLGFPNWHTSADKPLRADALIVQQKTISGCKLASVNYPLLSGASGGPVLNAEGWVVGVTVHNATSPVLPNSFLAIEHFASIVGSPFHAL

SEQ ID NO: 554 - protein, 557 aa, unidentified
  source 1..557: note = Related to MEDJ01000019.1; note = Acidobacteria bacterium SCN 69-37
MAKRDQVNDVEPLGTDAHLREAFPRLMTRWDVARLLRVDSKDLHYWCYRNGARYREFQLPKKSGGYRTISAPEGGIRLVQRKLCQILNAIYVPRHSVHGFVPIKGRGILTNAEPHVKQRWVLNVDLSDFFDSIHFGRVRGVFERFGAGPDAADLMARICCFRGRLPQGVPTSPVVTNLVCRSLDRALQAFAKTHRCAVTRYADDITLSTGRAGFDDAVVSVKHDEGRRVAEIGHGLRFLIESHNFSVNESKVRLSGTLDRQEVTGLIVNRKKNVPREYVRNVRAMIHAVERYGVGEAERVFHDRFSRSRRPDLPAADFLRALRGRLEFIRMVKGDHDATFVSLWNRAARFHQWLTPRIVDLSHVEQALWIVESEVATQGVSIRRHGTAFVLKDVGLVTAGHCVGERMRIWHPTRPAERFPARIRALCTASDLCVLEPPPRDRLPALDRGDAGTVAEGVEIGTAGFPDEPVKVAQLEGRVSMIRLRFGHRNLFPSFETRKGMSGAPLLDARLRVVGVVLYGPDRSPSGEEDRVPSSAVAIDLIDELPKFTGSSPALLT

SEQ ID NO: 555 - protein, 488 aa, unidentified
  source 1..488: note = Related to JAGQQN010000044.1; note = Planctomycetaceae bacterium
MVDRPVKSLLSVRTITNLADLLDVTPNQLKYLMRGLRSEERYLRFHIPKRNGGLRVIYSPRRELKAIQERFSRLLVGIYNPPGPAHGFTAARSILTNAIPHVRCRCVLNVDLEDFFPSINFGRIRGLFKSLGVPESGATVMAQLCCHDGILPQGAPTSPVLSNMVCLSLDRKLVKLAAVHRCRYTRYADDITFSHKHQILPSELAYVDDKGEPVVGHELYRAIKESGFEVNVKKVRLFDNRHRQEVTGLTVNEKPNVPRRLIRQIRAMIHAWRKHGEAAAEEEHFQCYYRRVGRRSPTNSFRDVLVGKMHFVRMIKGADDRTYRNLQRQLAHVYPEYLAVMQKENLTLKKRHLFICHASEDKESFVRPLVDQLLLRGVSVWYDEYELTVGDNLREKIDEGLKSSLYAAAVLSTSFFGDKKTWTTREIGGVTALEDADLRPRMLPIWYNLRQSEVANYAPTLAGIVALSSPRQTIEEIADELAKKVLKK

SEQ ID NO: 556 - protein, 472 aa, unidentified
  source 1..472: note = Related to JACCRE010000240.1; note = Planctomycetaceae bacterium
MASLLDVSSRQLNYLLYVRGESERYIAFSIPKRRGGIRQILAPHDDLRHVQHRLAEVLNSLYAPPDVAHGFVAGRSILSNADAHVRRRHVLNVDLEGFFPSINFGRVRGMLLSPPYSLTAQAATVFAQICCHNNELPQGAPTSPVVSNMICRRLDRQLSRLAGNHGCGYTRYVDDLTFSRRTGAFPPQLARWGESRRCIVSDELRCMIEENGFSINPRKTWLFSRCHRQEVTGLTVNTKRNVPRKYVRQIRAMIHAWSRYGIERAGQVHAAEFYRRQGRQGDVPPFALIVRGKLEFLRSVKGTTDPVYKNLQSQLVRLDPAYLQVMLRENAMLNRRDVFISHASEDKDVIARPLAEELIRLGLTVWFDEYEISIGDSLRQKIDDGLSQSAFGVVVLSHSFFAKRWTRRELDGLTAQEDATNRNRILPVWHEITHAEVSKHSPTLAGVRAARTSDQTVQQIAHEIAEVIRNAS

SEQ ID NO: 557 - protein, 571 aa, unidentified
  source 1..571: note = Related to JACQVF010000034.1; note = Gemmatimonadetes bacterium
MADLRLTSPPYVLVAAFRSLTSVGDLATLLQVRPDQLRHYTYGRGYRYRAFTIKKRRGGVRTLKEPHSGLKIVQQKLAQVLTTLYEAPDCVHGFVAGRSIATNAHLHIGSEWVFNVDLKDFFPSINFGRVRGLFIKRYGLPANVATVIARICTHKNELPQGAPSSPIVSNMVAERLDRDLQRLARRYRSAYTRYADDLTFSRNDRFPDAIGYWDPIALPVRQSRVGHLLEAAVMKNGFEINPAKVHLRLKDERQVVTGLVVNRKVNVRKLFVRRIRAMLHAWETHGEKEAEQEYFNRYDTKDRAPHAIFSFRRVVKGHIDFLGMIRGTDHSWYRRFVMQYAHLVPGYVARPEHCRRPNHLRTWKDAIWVLETEESQGTAFELTGYGLVTAAHVVRDTTLPGHPPYSNPHVFSPRNEALKHPVRIAAYDADLDLAILEFDAPTRCALRTRMAPAAVAGDPIRAAGFPSYAPGSQLWEESGWINHVRRHITAPRYVVTTPIIAGASGSPVMDLEGRVIGVATTGVLSFSAAAARSTGAAGLPDYGVVPIALLARVSVAATPASFSAPDAHGSP

SEQ ID NO: 558 - protein, 497 aa, unidentified
  source 1..497: note = Related to JAJFUI010000046.1; note = Planctomycetaceae bacterium
MAATEVVSALGGVRTRSDVANLLATSDAQLRYLLYGRHEDSRYCTFRVPKRKRGFRTIEAPREDLKLLQRRLVVILSAIYQPRAGVHGFTVGRSIVTNARQHCGRRYVLNVDLKDFFTSINFGRVFGLFRAPPISASYETATVLAQLCCHRNVLPQGAPTSPIVSNMICARLDRQLSKLAQRNWCRFTRYADDITFSKQRGEFPEEIGYLDREDVAQPGSELRRIIEANGFAINPSKVSLRTKKRSQSVTGLTVNEKCNVHRNFVRQVRAMIHSWQKFGFDAAHNEHTSRYYRRLGKLGNPPRLDQIIRGKLAFVRMVRGGLDPVYKNLQLQLCRVDPSYLDVMRKENDRMKRRDVFLSHASEDKETLVRPLADSLIAAGISVWYDEYEIQLGDSLREKIDEGLAKSRFGVVVLSRHFFSKRWPRRELDGLTAREDASHGNMILPVWHGLSKADVAGYSPTLAGLKALLTDGKPLAEVAVELVAQLRGRLKKTGGWS

SEQ ID NO: 559 - protein, 492 aa, unidentified
  source 1..492: note = Related to nan
MRIWTVSFEPTVFQEVTSIVDVANLLGTSVKQLIYLLYVRWETERYTSFAIAKRTGGTRTISAPKPELKRIQRRLADFLQDNLTPKTCAHGFARGRNIASNAEEHVHHRIVLNIDLSDFFPTINFGRVRGVFMAQPFGASPKVATLLAQICCHEGSLPQGAPTSPVVSNMICFRMDAQLMRLAKEHGCFYTRYADDISFSKRKGEFPAELATVGDNGKAVVGKSLRDIIEHNGFRVHPLKVHLHHNTTRQMVTGLTVNNRVNVPRAFIRNIRAMIHDWRVNGYEAAETRHHANYYSHPHRSVKPPLRKIIEGKLSFLKMISGVDDPVRQNLQRQFVNVCEEYKAVMEDEGIMHDFFICHASEDKDDLVRPLAEALRSWGVSVWYDEYMLTIGDDLREMIDAGLANSRYGIVVLSPRFFGVKKTWPKREVGALFAMEDADGKSRVLPIWHEVTQPDVAKRSPTLARILAWHSADFSPEELAAKFRDFIVTRRR

SEQ ID NO: 560 - protein, 558 aa, Vibrio sp.
  source 1..558: note = Related to NZ_ACFQ01000009.1; note = Vibrio cholerae
MFGIPAGLHECFTVSDLYQFLGVDPETTGGFLYGDATKYRVFSVPKKSGGEREIVAPTKRLKYLQNKVKAELESYYSPRKCVHGFVSGRSVISNAQSHVRKEYVLNIDLEDFFGSINFGRVSKLFQRPPLNLPHGVASVLAHICCHRGVLPQGAPTSPIISNMIAFKLDRQLRELAYKCSCTYTRYADDISFSFTNRKKSLPKAIAFFDSNDELVLGKELKDIIEDNWFKINDKKTRIQHRTQRQSVTNITVNEKVNVNRKFIRQTSSMLNALFKYGAVEAEREYFEKYHKGYIANRQRAKMSEQPGKLFTQKIRGRLNFIRSVRGSSCNVWRSLMYRYTVAIGNPNEIYNRSWWEIAAESTYILYDLSAEGNGQGSGFLLDGIGLVTNEHVIAGVEQNNIVDTLSIEWLPNTKKEFIGLNVAWKNAEKDLAVITSDFVFNDTVPLTLERNPNYSVGTEIFAIGYPAYETRGANKATILQAKITGEVVREGQDRVVIDQPIIHGHSGGVVLNTDGRVIGVVANGNAEGEVRTTPSAFIPISVLLEEHDRQTKASSVEA

SEQ ID NO: 561 - protein, 558 aa, unidentified
  source 1..558: note = Related to nan
MFGTPNGLHECMTVSDLYRFLGYDEKNTGGFLYGSAIKYRAFSVAKKGGGERKIYSPIKKLKNLQHIVKSELESYYVPRQCVHGFVSGKNIISNAQPHVRKEYVLNIDLEDFFGSINFGRVRKLFQSSPLSLPPSVASVLAHICCYRGALPQGAPTSPIVSNMIAFRLDRQLRELAYKNSCSYTRYADDISFSFTNRKKSLPKAIAFFNGEDELVLGKDLKDIIENNWFKVNDKKTRIQHRTQRQSVTNITVNEKVNVNRKFIRQTSSMLHAIIKYGAVKAEQEYFEKYHKGYIANKHQAKMREEPGKLFVQKVRGRLNYIGSVRGNSCDVWRKLMYKYTLAIGSPNEAYNRSWWEIAEESTYILYDLSEVGKGQGSGFLLEGIGLITNEHVVTGVEQSNIVDSLVIEWLPNQSKQFIDLNVAWKDVDKDLAVITSDSIFNDTEPLKVEPNPNYSRGTEVYAIGYPAYESRGDKSATTLKAKITGATKREGQDRIVIDKPIIHGHSGGAVFNLDGRVIGIVANGNAEGAIKATPSAFIPISTLLDEHDIRMKAQSTQT

SEQ ID NO: 562 - protein, 563 aa, Vibrio sp.
  source 1..563: note = Related to NZ_PDMZ01000012.1; note = Vibrio splendidus
MFGVPTKLHECLTVTDLYQFLGVDEDKTVGLLYGDNIRYRSFQIPKKGGGERTIFAPVKSLKNIQKKVQAELETYYKPRKSVHGFVAGRSVLTNAKPHVRKEFVLNIDLNDFFGSINFGRVSRLFQSPPLSLNQNVASVLAQICCYEGVLPQGAPTSPVISNMISFRLDRQLRNLAHRHSCTYTRYADDISFSFTNKKRSLPKEIAFFDSNDELALGHGLTSIIESNWFEINDKKTRIQHRTQRQSVTNVTVNEKVNVNRKFIRQTSSMLNALLKFGAIEAEREYFEKYHRGYIANRQHIKIAKSPGKIFLQKVRGRLNYIRSVRGKTCSVWRKLMFDYTVAIGKPDETYKKCFWEIAAESTYIVYDITAEGDGQGSGFLLEGVGLVTNEHVIEGVTNENIVDALVLRWLPNESKEFIGLELAWKNKAKDLAVITSDFIFKDNNPLEIEPEPDYSEGATVFAIGYPSFESEHGNRATILKAKIKRQMTRESQPRILIDEPIIHGHSGGVVLNEHGRVVGVVANGNAKGALRLAPDAFIPIQVLIEEHANRQSAKKAAVLQAVN

SEQ ID NO: 563 - protein, 557 aa, Vibrio parahaemolyticus
  source 1..557: note = Related to ABFKIQ010000002.1
MFVTPTGLHECKTVSDLYRFLGCDPATFGNYIYGNGIKYKEFTIPKKNGDSRTILAPVKKLKFLQQKIKAELESYYTPRQCTHGFIPKRSIISNAKSHVRKEFVLNIDLEGFFSSINFGRVSKLFQSPPMNLPPNVASVLAHICCYKGCLPQGAPTSPVISNMIAYRLDRQLRELAYKNSCSYSRYADDITFSFTNKKKSLPKSIVFFNGEDELTLGNDLTTVIEGNWFKVNEQKTRIQHRTQRQSVTSITVNEKVNVNRKYIRQTSAMLNALLKYGAEEAEREHFEKYHKGYIANRQYSKITERPGLLFTQKVRGRLNFILSVRGQSCETWRKLMYKYTLAIGEPKEQYNKSWWEIAAESTYVLYDISQDGDGQGSGFLLEGIGLITNEHVIEGVEQQNIIDTLNIEWLSNPSKTFLALELAWKDKQKDLAVITSSLAFNDVEPLKVEPNPDFSVGTEIVAIGYPAYEARGLNEATILKAKITGTQKRENQPRIVIDKPIVHGHSGGVVLNKDGRVIGVVANGNAEGSVRATPSAFIPITVLIDEHEHQKIKKTEP

SEQ ID NO: 564 - protein, 565 aa, Proteus sp.
  source 1..565: note = Related to NZ_CP041391.1; note = Proteus mirabilis
MIKPPPIFFSWDILNMFCSVTKLHECKNVEQLYYFLGCEAAEISKFLYSGVIKYRSFSILKKNGNLRNIRAPVKYLKEIQYKIKDELEKYYTPKSCAHGFITGRNIITNARPHVRKEFILNVDLKNFFDSINFGRVSRLFQSQPLNLPENVAHVLAHICCYNKALPQGAPTSPIISNMISYRLDRQLKELARNNACTYTRYADDITFSFTKTKKYLPKSIVSLSKDNNIILGHEFKKVIEDNWFEINEEKIRLQHKTQRQSVTNITVNTKINISRKFKKQTSAMVNALFKYGAAEAEREYFSKYHKGYIAERQYNKIKEKPGLLFTQKVRGRLNYIRLVCGKNNESWRKLMYKYTLAIGQPNEEYNRTLWDIAGDSTFILWANSSQGSGFFLENIGLVTNEHVIKGIEDSNINNDLIILWLPNERKEYIELHLAWKDDNTDLAVITSNISFLDIKPLQVEPVPIYDIGTEVYAVGYPNYDARGSIGKPTIITAKITSIITRERQKRIVIDQPIVHGHSGGVVLNADGRVIGIVANGNAEGELRVVPNAFIPIETLLNEHKSRTKL

SEQ ID NO: 565 - protein, 535 aa, unidentified
  source 1..535: note = Related to NZ_RKKD01000014.1; note = Shewanella vesiculosa
MLSYLYSKDIKYRNFEIDKKNGKKRKIVAPVKKLKFLQYKVKAALEPYYKPKKCNHGFVKDRDIVTNAQAHLRKEFVLNIDLVDYFGNITFGRVKRLFESNPLNLSHSVATVLAQICCHNGCLPQGAPSSPIVSNMVTFKLDNQLRALAIKSSCSYSRYADDITFSFTNRERSLPKMIAFYKNEKLQLGSSLEKVIEENGFSINDDKTRMQHRTQRQSVTNITVNEKINVNRRFIRSTSAMINALIKYGPAAAEKEHFEKYLKGYIPARHHMKMAKYPGKMFIQKVRGRLNFIRMVRGNTCDVWRKMMYLYTVAIGAPNEDYNMSWLELAAESTLVIHTYTDSNMAQGSGFIVEDIGIITNEHVVRGITSKNIKDGLEMHRWNNETAKFSFVELIGMDEDIDLAIFEPSIHLATFTPLKIENNPDYSNGTIVHTIGYPNYQSGEEPTYITAKIIGKTKRMLQPRIKIDENIRHGNSGGVVMNTDGKVIGVVSNGNAIGATSQNDSSFIPIQTLLEYHEKLRNLVARPFLDEVDSL

SEQ ID NO: 566 - protein, 565 aa, unidentified
  source 1..565: note = Related to PIQA01000014.1; note = Idiomarina piscisalsi
MRQNPPAFLRELRYLMDSQTVLPPRAKLANCSTLDQLASLLNTEVDKLLKLIYPHNRQYISFSIPKKDGSRRLISTPKPTLKNYQMIIASELHHHYIPRASAHAFIEQKSVLTNASPHVNKRYVLNLDLEDFFGTITFGRVKRLLQSPPLSLTHNVATVVAHICCYKGRLPQGAPSSPIISNMIAFKLDNQLLKLAKQYRFTYTRYADDITLSFNQKRKTSLPTDIVKFDEDSLALGRLLLRTIESNGFSVNDDKTRLATKNDRQAVTNLTVNQFVNVNRLFLRQTSAMINALNVYGAQDAEIEYLKKYHKGYLSPRKQLKHKNEPGKFFKQMVRGRLNFIRMVKGKDSLVWRKLMYRYTVAIGEPNARYALSPAELAKRSLFVIHNLTDDSEGVGTGFKLNTFGMVTNQHVIAYLDNSNLADFCVIEWIEKMDQQFPSVQLILSDEKSDIAIVEGASMNIVPALDASTSPDYTPGTTCTLLGFPNYKTEDSPTVIECRIVREIEVDNEPRIVVDEKVTHGMSGGPVIDSDGLVIGIISNGSKYNSTDDRVNAFIPIKTLLLTKN

SEQ ID NO: 567 - protein, 573 aa, unidentified
  source 1..573: note = Related to JAFIFP010000014.1; note = Idiomarina sp.
MFTLEDHINPTRLEHCSDLHILSRLLGVRRDYLLKLLYSENRLYYHFDISKKNGDKRTIHAPIEPLKNLQRKIKVELEKYYIPRGSTHGFVKKRNIITNATPHLRKRHVFNIDLADFFGTITFGRVQRVLQSSPFNMPYNVATVVAQICCHEGALPQGAPTSPIVSNIIAFKLDNQLLKLAQKYRCTYTRYADDISFSFRQQRNKLPEAIVSFNGDKVIPGAKLTDVISKNGFKINSSKTRLQSKQNRQAVTNITVNEKLNVNRRFLRRTSSMLNAALRYGFPKAESVHFEHFHSDYIPPRHSKKMHEEPGLLFRQKLRGRLNFIREVRGKSCPVWRKLMYMYTVATEEPNEDYNLSIDAITARSTVVIWDLSNSCGETFSGSGFMLKGAGLVTNQHVVKGIISGREATELQIDWLEKKCLNFLDARIVIADGCADVALITSSIADRHMEPLDIEPYPDYSVGRAVKLIGYPDYREGDTFSVTDTVIVREYGQADSRRIEVREQIFHGMSGGVVLNEDGRVIGIVSNGIKYGTTSQLPSSFIPISTLTAKVTNFRKVKIEQLLSIFASSINST

SEQ ID NO: 568 - protein, 553 aa, unidentified
  source 1..553: note = Related to NZ_JAKGAS010000007.1; note = Paraglaciecola aquimarina
MFDIIDPKTLNECFTVELLAKFLNTDYPNLSKLIYGKKSPYRTFYIPKKSGGTREIKAPIKTLKLIQQKLKVEFEDYSSPRVASHGFVKGRSILTNAKLHINRNYVLNVDLESFFNSINFGRIKKLFESTPFKFTSPVATVLAQICCHENSLPQGAPTSPILSNMIAFKLDGELMRLAKKINFRYTRYVDDLTISCQSLAQLEKHKIIYRSKEAKYEAGFTLSRLIEKNGFKINNEKTRLQQRTEHQGVTGLTVNVKLNVSRTFIRQTSSMINALIIHGAEKSEHEHFTKYFDGYVPNRQQQRISKKPGDLFIKKVKGRVNYIKMIRGAACPVYRKLAYQLTCGLGCPNEDYNKDWLDWISDSVLVLDNNLDILQGTAFYADGLGIVTNQHNLESITEDNIAGNITLVEPLNYSKKYQLLGLNKTSEKYDIALIDFGVHAKSKRALEIADSPLYKTGTTVYAIGYPNHSEGTKPTILECKIVNKTKWQGECRYKIDQNIHHGFSGGPVIDTDGKVIGIVSNGNAVGASKSTEDMFIPVETVMKFANDAKPEDC

SEQ ID NO: 569 - protein, 548 aa, unidentified
  source 1..548: note = Related to NZ_JAESDJ010000002.1; note = Alteromonas lipotrueae
MFGITEPKTLNECFTVESLAKFLGTDYSSLAKLLYSKRSNYRTFYIPKKTGGTREIKAPTKRLRFIQQKLKVIFEEYSSPRAASHGFVKKRSIVTNAQHHVGRAFVLNVDLEDFFGSINFGRIKRLFESQPFNLAHPIATVLAQICCHEGCLPQGAPTSPLLSNMIAFKLDGALMKMAKGVNFRYTRYVDDLTISCQSLTQLIKHKIVQCDKDGKYSVGFILNQLIEQNGFKTKSDKTRLQKRGEHQGVTGLTVNEKINVSRTFIRQTSSMIHALIKFGAEKAEKEHFTKYFDGYIPIRQQQRLSKFPGDLFIKKLKGRVNYIKMIRGSACPVYRKLAYQLTIGLGCPNEDYNKDWLNWISESVLVLDNNLDSLQGTAFFAKDIGFVTNQHNLKSITKDNFSGKIKLTEPLNYSKSYPLISFLKSSEELDIALIDFNIHEKSKRPLEIAESFVCRAGQTVYAIGYPNHAEGSPPTILECKIIDRAKWDNQLRIKIDQNIHHGFSGGAVIDTDGKLVGIVSNGNAVGAPHSTDNMFIPIETLLTFASED

SEQ ID NO: 570 - protein, 545 aa, unidentified
  source 1..545: note = Related to MDHN01000015.1; note = Alteromonas confluentis
MLFGTTPKDLKSCNTVEGLAHLLGTDYNSLGKLLYGKKTLYRAFDIVKKSGGVREITTPIPSLKVLQRKLKDLIEPFTSHREAAHGFIRKRGVLTNATRHVGKKHVLNTDLEDFFGTINFGRVKRLFESSPFELSSQVATVLAQIVCYKNRLPQGAPTSPIISNMIAFKLDGNLTSLARKAKSTYTRYADDLTFSCHSSMLLEKNGIIKFDKDNKAIAGKELVAIIKSNGFEINHQKTRLQSRGSHQGVTGITVNEKPNVSRTFIRKTSSILYAINRWGAEQAEEEHFAKYRRGYSPPRAQLRRKKKPGDLILKMVKGQVNYNRMIRGESCPVYRKLAYQLTIALGCPNEDLNKDWRSWIAESTFIVDNVEDICQGSCVLIKDIGFVSNQHVLNSITKSNFTANVTICDPYDYSRKYPLISLLKMSIEKDIALIDAGVHALSLRGLEVAESPNYKIGTKVIAIGFPNHTEGTPPTILDCKIIGRTKWHHEPRIKVDSNIHHGFSGGAVVDLDGKVIGIVANGTAVGAPKAADNLFIPIETVAQYA

SEQ ID NO: 571 - protein, 549 aa, unidentified
  source 1..549: note = Related to QJST01000027.1; note = Idiomarina fontislapidosi
MIDFFPKKLSDCANVEMLAYLLDTNYEALGSFLYSKRKLYRSFEIPKKSGGMREITTPIKPLKEIQRKLKPLIEPYTSHREAAHGFIEGKSIVSNASRHVRKNFVFNLDLLDFFGSINFGRVKRLFESAPFNLPAKVATVVAQIVCFDNQLPQGAPTSPLISNLIAFKLDGNLTALARRAGVNYSRYADDLTFSSNSLNLLKNHGILTIDESAQVKVGKDLKNIIKANGFDINVNKTRLQGRGQHQGVTGITVNRKVNVTRSFVRKTASILYSICKWGSANAEREHLKKYRTKSLSPRARQRTFLNEGDLILKIVKGRVNYIRMVKGEASPVYRRLAYRLTVALGCPNEDYNKDWETLLAESVYVLHNYYDSTQGSCVLIENLGFVTNKHVLKCVTTSNFEGHVVITGPFDYAKDLPLISFLGASDTNDVALICPSVHQHSQPSLKIASSPDYRKGTKVVAIGFPNHTEGTPPEILYCTIQGKTKFQKNDRYLLSCNIHHGFSGGAVLNLDGDVIGIVSNGNEVGARKSVGNMFIPIQDVAEALSHISK

SEQ ID NO: 572 - protein, 601 aa, unidentified
  source 1..601: note = Related to NZ_CGBL01000001.1; note = Yersinia aleksiciae
MAAFEFNFPTTICVGHFSTAVLHSKFADKFVAQLAIEKTWPPLFHIRIFMPSFSLKECNDVWKLCDLLGVNFENLSKKVYPSNNRLYRCFFIPKKSGGLREIYCPIKSLKNLQKKIKIELEKEIKYRSPAHGFIKGKSIITNAEQHIGKTIVLNLDLEDFFKNIHFGRIKKLFESSPLNLKHSVSTFLAHICCRGGVLIAGSPTSPIISNMICYKLDGQLQRLAKKNHCTYTRYADDITFSFTCSERKLPRGIVHIDESSLLGFKLGDELSEIISSNNFTLNESKIRLSRKSQRQEVTGLIVNSKVNVKRDFIRRTSSMIHALKIHGAEDAEKEHYLKYKKTYIPERQNKRQKDKPGDLYTKVIKGRLNYLRMVRGEDCNLWRKLMYDFTVAMKNPDESYKRTWLDDAAESTVIFNTYDGCGSGFLINHDIKKYPNGLIITNYHVIPEINSDNISNIEVHTWMNPSKGFLLLKFVASSKDLDIAILTADIPFPVSKFLVVNSCPNYRPGIKIHTIGYPDYSSGEDPTFISTKIKGKTTYHGQLRYQIIDEIKHGNSGGPVFDSDRKVIGIVSNGNEKGAPKNNKSSFIPIETLLDFINCQK

SEQ ID NO: 573 - protein, 548 aa, Vibrio sp.
  source 1..548: note = Related to JTKH01000003.1; note = Vibrio renipiscarius
MQVPLPNNLKDCSCVEGLAQYLGFTNYDDLKTLIYPSVDHLYKGFSIPKKNGEFRLIDAPKKELKKIQRFLANELAQVYTPRNATHGFVKERSIVTNASKHVDKKYVLNLDLEDFFGSIHFGRVRNLFQSHPLNLHHSVATVLSHLCCHNGKLPQGAPTSPIISNMIAYRLDKQLQTLASKNRCTYTRYADDITFSFTQTRGRLPKPIAVLTRDLQLSLGNELKELITENGFVINSDKTRIAARSNRQEVTGVIVNERMNVSRKYIKQTRSMLYAWKKFGLEDTEETYLRQFHGKTVFEKHQRRIDEKKGQFFKKIVKGRINFIKMVRGADDLIYRKVAYEFSVLIGKPKPELVQTPLDKACDSIFVVENLLDDSQGTAFLLKGIGIVTNEHVVRGIDEDLSELLELFRHHEQETKRPVKFQKSCRSRDLAILKPTTSFNGIKRLQVGDDSQIGIGSVVTVLGFPQYSPGETPYINTGKIIQSKVLFGERVWLLDIPVIHGNSGGPVLNDRQEVIGVAAIGSPTHDLSTKLHGFIPISTLLAYVEECN

SEQ ID NO: 574 - protein, 571 aa, unidentified
  source 1..571: note = Related to NZ_CP045857.1; note = Shewanella chilikensis
MVDIAKIAAIAASSSFTSVPVPVQLKDCTCVEGLAKYLGFKDYDELKGIVYPSTSHHYKSFRIPKKNGDFRTIEAPRKQLKKLLKRISTSLEEVYSPRNATHGFVKGRSIVTNASKHADKKYVLNLDLNDFFGTIHFGRLRNLFQSHPLNLSHSVATVLSHICCHNGKLPQGSPASPIISNMIAYRLDKQLQTLASKNRSTFTRYADDLTFSFTQTRGRLPKQIVSLSRDLQLKLGHELTDIVNENGFSINSSKTRISARSHRQDVTGIIVNERMNVTRKYIKQTKSMIYAWKKFGIENAEDEYLKNYHGKKIFEKHQRRINEKKGQFFRKIVKGRVNFIKMVRGSDDLIYRKLAYDFSALIGKPKPDLIRTPLDKACDSIFIIENMLDQSQGTGFLLKGIGIVTNEHVVSDIDEDLSDLLELFRHHEQDIKRPVKFQKSCKSRDLAILKPTTSYNGIKRLPVGDDSQLGVGSKVTVLGFPQYSPGETPYINTGKIIQSKLLYNEKIWLLDIPVIHGNSGGPVLNERQEVVGVAAIGSPKHDNSTKLHGFIPISTLINYAQENNKSNNNNN

SEQ ID NO: 575 - protein, 559 aa, unidentified
  source 1..559: note = Related to NZ_LSNH01000001.1; note = Photobacterium sp.
MTSAISIFSLISPITTPTTLNQCVCVERLARFLGFASYSELQNLFYPSTSIHYRGFHIPKKNGEYRLIEAPKKKLKEIQKLISKELSALYSPRKSTHGFVPERSIVSNASCHVDKKYVLNLDLLDFFGSIHFGRVRNLFQSHPVNLPLPVATVLAHLCCHNGKLPQGAPTSPIISNMIAYRLDKQLQTLAANNRCSYTRYADDITFSFTQTRGRLPNQIVTVTRELQLYLGTELKNVISENGFTINSQKTRIASRSQKQAVTGIIVNERMNVSRKFIRQTRSMLYAWKRFGLEQAESEYLQSYHGKTVFEKHQRRINEKAGQFFRKIVKGRINFIKMVRGADDLIYRKIAYDYSVRIGKPKHDLIKTPLDKACESIFIIESELDYAQGTAFLLKDIGLITNEHVVDGIDEELSELLNVYRYFEQDKKRLVNFEKSCKSRDLAILKPTTDFNGIKRLKVGDDSMLNIGSKVTVLGFPQYSPGETPYINTGKIIQSKMLYGEKLWLLDIPVIHGNSGGPVLNDKYEVIGIAAIGSPKHDNSTKLHGFIPISTLLAYAKEKS

SEQ ID NO: 576 - protein, 555 aa, unidentified
  source 1..555: note = Related to NZ_CP013139.1; note = Pseudoalteromonas sp.
MLNFSTSLIIKTPTCLKECKCVEGLARFLGFTSYSQLDELVYPSINHLYYSFKIPKKNGHKRIIKAPRKSLKSIQELINIELGNYFSPRNSTHGFIKNRSIVSNAAKHVDKKYVLNLDLENFFDSIHFGRVRNLFCSYPLVLSKPVATVLSHLCCYQGKLPQGAPTSPIISNMIAYRLDKEIQYLASNNRCTYTRYADDLTFSFTQKRRKLPRSIVKVSSDLDITIGHDLKEIISKNGFTINDSKTRISSKCQRQEVTGITVNERMNVPRSFIKQTRSMLYAWKTFGLENAEFHYLDKYHKKTLFEKHKRKIDKKEGVFFQKIVKGRINFIKMVRGSEDIIYRKIAYDYSVLTGKPNSDLIKTPLDKVCDSIFIIENMLDTAQGTAFLLKDIGMITNEHVVDGIDEDNPELLEFFRHFEQTNKKNVTFKKSCKSRDLAILKPTKDFNGIKRLDVGDDSSLDIGSEVTVLGFPQYSPDETPYINTGKIIQSKILYDQKIWLLDIPIIHGNSGGPVLDKDQKVIGIASRGSAKHDQSTKLHGFIPISTLLKYFKEKY

SEQ ID NO: 577 - protein, 565 aa, Aeromonas sp.
  source 1..565: note = Related to NZ_CP077209.1
MTLPNTILLSLKTAKLQLNPTKPTCITGCHSTDSLALFLGFQNYNELQKLIYPSVKNLYRAFYIDKKNGDKRLISAPKKKLKSIQRIISQSLSNVYSPRKSAHGFIQGKSILTNASMHVDKKFVLNIDLLGFFDCLHFGRVRNLFQSYPLNLTPSVATVLAHICCLNGKLPQGAPTSPIISNMIAYKLDKDLHQLALANRSTYTRYVDDITFSFTQSRRRLPRDIVTVLKGNNLKLGEKITSIIEKNGFKINTDKTRCFSQNFRQVVTGLVVNERANVSRNFIRQTRSMIYAWKKFGLVNAALEYLSKYHDKSILEKHEFFIKKNKDKGVFFSKIVLGRIYFIGMVRGKSDRLFREILYSYTECIGKPNRALINTPLDKIGESIFIIDNLLDDSQGTGFLLDGVGLITNQHVVDGIEKENSELLEIYRYYEQDKKRKSNFEKACRARDLAILKPTTEFNGIKRLKVGDDSILKIGSKVTVMGFPQYSPGETPYINSGKIVQSKKLFENNVWLVDIPVIHGNSGGPVLNDKLEVIGIASIGSARHDQSTKLHGFIPISTLINYVNE

SEQ ID NO: 578 - protein, 566 aa, Vibrio parahaemolyticus
  source 1..566: note = Related to ABBBER010000002.1
MIYINYFVSQLSTQLPKITLRPWVRSLKHCTSVDDLAHFLGFNSYGELNSLVYPHTKNLYKSFSISKKSGGERNIKAPKSKLKSIQRWIGQDLENYYRPRSASHGFINGKSIITNAKGHVDKRFVLNIDLEDFFTTIHFGRVKSLFQAHPLNLSHSVATVLAHICCNEGVLPQGAPTSPIISNMIAYKLDKELTNLAIKNRCTYTRYVDDITFSFTQKLGRLPRSIIKVTKQNKQILGNDLLGVISTNGFRINSKKTRLLSRDQRQEVTGLTVNDKLNIPRTFIRETRSMLYAWKKHGLIEAEEEYIKKYHKKTLTYNQQRMLKHNKGNFFRKIVHGKVNYIKMVRGEDDPIYRKIAYQYLSRIGKPDKDLLKTPHDLIADSTFIIECYLDQGQGTGFLLENIGLVTNEHVIEGIDASDADLLEIYRYYEMDNKRKVSFGKSDKSLDLGILKPTTDFNGIKRLKIGDDSTLSVGQKVTVIGFPQYSPNDTPYINTGKIIQSKVLFGQQIWLLDIPVIHGNSGGPVVNENNEVIGVATRGAEKHDQSTKFHGFIPISRLVEYHTTDT

SEQ ID NO: 579 - protein, 551 aa, unidentified
  source 1..551: note = Related to CHYZ01000002.1; note = Yersinia bercovieri
MFDPFKVAPPKLKLHQCVDVHELSAILGTNYNQLSKLIYPTTQNSYYCFSIDKMNGNKRVINAPKNKLKSIQRRLAYLLNEYYPVRDVAHGFIKNKSIVSNAEQHVLKNCVFNIDLENFFGQIHFGRIRNLLFSPPFNFSTSVSTVISHICCSDGFLPQGAPTSPIISNLICYKLDNELRRLAVYHKCTYTRYVDDITFSFTCKANRIPSQIVVSSGNTVTPGNEINAIITRNGFSINDKKTRLQQKNERQIVTGIVVNKRTNVQRSFVRKTNSMLYAWEKFGAILAEKDYFDKYNSKIKTIKLKDFIDNPGELFKSIVKGRINYIKMVRGKDDVIYRKFAHRISCLFGKFDNRYLKTPYDFAIESTFVLENRCDDSQGTAFLLERIGLVTNHHVVEDICDITDEFIDLFLWNEIGNIRKTKFIMSNKLFDIAVFERTSDFDNITPLKIGDDSGIKNGTVITVIGFPQYSPGESAYVNTGKVIQSKTMYGNKFWLIDIPVIHGNSGGPVLNDKFEVIGIASIGTAKNDSSSKLHGFIPISTLLRYTGEDKP

SEQ ID NO: 580 - protein, 549 aa, unidentified
  source 1..549: note = Related to NZ_CABHZI010000111.1; note = Yersinia proxima
MFNPSNILPPKIKLNKCGDVHILAALFNLTYEELSKLIYPTPNRSYYQFAIDKKNGSKRVISAPKKKLKIVQKKIADELLTLYPIRDVSHGFIKGKSIVSNAEKHVLKSCVLNIDLEDFFGSIHFGRVRNLLTSPSFNIPLPVATVISNICCYNGSIPQGAPTSPIISNLICYKLDNELRQLAGKYNCTYTRYVDDITFSFTYKAKRIPHQLVTSDANIINIGVELEEIITRNGFSINKNKTRLQSKNERQTVTGIVVNKKTNLQRKFIRQTSSMLYAWEKHGVVAAENEHFVKYNEKKKLIKLRDFVDKPGELFKRIVKGRINYIKMVRGEDDIIYRKFAHRISCLFGNVNNRYLKTPSDFAIDSIFILENEVDISQGTAFLLEDVGIVTNYHVVPSIDEYNDIDLSLFRYNELDNKRKVKFIMSNKLYDLAIFDTNGNFDDIKKFSIGDDSNLKVGSEISVIGFPQYTTGEYPYINTGKIVQSKALFNNKIWLVDIPIIHGNSGGPVFNEKFEIIGVASNGTERNDQSSKLHGFIPISTLIKFISSK

SEQ ID NO: 581 - protein, 598 aa, Pseudomonas sp.
  source 1..598: note = Related to NZ_AWSQ01000001.1; note = Pseudomonas taeanensis
MDIDEIFKDLFGPGFKSLDGFCQLLKVDQDKLLNFLYKRKGSHYVSFSILKKNKTHRTIKAPKRVMKKIQHALLPHLEKYYSPKPSSHGFVKGRNVKTNAQIHSRKRYVFNIDLKDFFESIHFGRVRNLFMAHPFSAPHNVATVMAQICCSDGKLAQGAPTSPLISNMICRKLDSQLQALAKSGKCHFTRYADDITFSFTSTAKYLPKDIVEVSEDGRAIPGRELEEIIKSNGFIINSEKTRLQHRTQRQMVTGLVVNEMPNVTREFIRLTSSMINALKRYGPELAEAKYLEILKGENQRLQPRQILRTKDSAGDFFIKVVKGRLNYIQMVRGRGDNIYRRLAYEFTVAIGKENPEFKKSPEEILGNSIFVVNNIIEECQGTAFLLEGVGIVTNEHVVTGVSKTIARHSISFSRAGDTREYSAELILSDKKADLAIFHPNEEFRNIPALRKSDKTIVRPTDPVLSIGFPKHRDGTTHYIAKGHTTQRRRQVDLDLWLVDFTLMEGNSGGPIFNDSMEVIGVTARGAKNNIDAALYGFIPLDSLNSFTSRADFLLLKRLYDYLGNGSLSLLPGILGKGIFSSAYQTKLHKERLQKAKAA

SEQ ID NO: 582 - protein, 598 aa, Pseudomonas sp.
  source 1..598: note = Related to CP026558.1; note = Pseudomonas amygdali
MDIDSIFKDLFGPGFQSLDGFCRLLEVDQNKLLNFLYNRKGSHYVSFSILKKNKTHRSIKAPKRVMKKIQHALLPHLEKFYSPKSSSHGFVKGRNVKTNAQIHSRKRYVFNIDLKDFFESIHFGRVRNLFMAHPFNAPHNVATVIAQICCSYGKLAQGAPTSPLISNMICRKLDSQLQALAKTSKCHFTRYADDITFSFTSTEKHLPKDIVEVSEDGRAIPGRELEEIIRAAGFAINSEKTRLQHRTQRQMVTGLVVNEMPNVTREFIRLTSSMINALKSYGPELAEAKYLEILKAKNHTLQPRQLLRTNDGNGDFFIKVVKGRLNYIQMIRGRGDKIYRRLAYEFTVALGKENPEFKKSPEEILGNSIFVVNNIISESQGAAFLLEGVGIVTNEHVVSGVSKTIARHSISFHRAGDTKEYSAELILSDKKADLAVFRPNEEFRNIPVLKKSDKTIVRAMDAVLSIGFPKYRDGTAHYIARGHTTQRRRQVDLDLWLVDFMLLEGNSGGPMFNDSMEVIGVTARGAKNNIDAALYGFIPLESLNSFTSRSDFILLNRLHDYIGNGSLSLLPQTLGKGVLSITYQAMLRKQHLLPLTEN

SEQ ID NO: 583 - protein, 598 aa, Pseudomonas fluorescens
  source 1..598: note = Related to CABVIC010000001.1
MNIEEIFKNLFIPGFSSLDNLCRLLKVEQDKLLAFLYKKKSSHYVSFFIPKKNGTRRTIKAPKRVMKRLQRELLVHLEKFYSPKSSSHGFVKGRSIKTNAQVHAGKRYVFNIDLKDFFENVHFGRVRNLFMAEPFKAPHNVATVMAQICCSEGRLAQGAPTSPLISNMICRKLDAQLQALAKSGKCHFTRYADDISFSFTSTLRHLPKDIVEISEDRRAIPGRMLEEIIKANGFTINSEKTRLQHRSQRQMVTGLVVNEVPNVTRDFVRLTSSMINALKRYGAELAEAKYLEILKGDSQPLQVRQNVRVRENAGDFFIKVVKGRLNYIQMVRGRSDRVYRRLAYDFTVAIGRENPEFKKSPEEILGNSIFVVKNITDDSQGTAFLLDGVGIVTNEHVVSGVSKTMAPHMISFQRVGENKEYAAELILSDKKADLAIFQPNGEFRNIPPLRKANRTTIRPMESVLSIGFPKYRDGSAHYIARGHTTQRRRQVDLDLWLVDFTLIEGNSGGPFFNDSMEVIGVAARGASNNIESALYGFIPLESLNRFIARKDFVFLKKIHELSGSKLLGPLTMRSGNGVFSEVYLAGKYGGCRLKPAKI

SEQ ID NO: 584 - protein, 596 aa, Pseudomonas sp.
  source 1..596: note = Related to NZ_CP054866.1; note = Pseudomonas chlororaphis
MNIEEIFKNLFRPGFSDLDNLCRLLKVDQKKLLSFLYKKNSSHYVSFSIPKRNGTPRAIVAPKRVLKRLQRELLEHLEKFYTPKSSTHGFVEGRSIKTNAQIHSGKKYVFNIDLKDFFGSIHFGRVRNLFMAQPFNAPRNVATVIAHICCSDGRLAQGSPTSPLISNMICRKLDAQLQALAKTGKCHFTRYADDITFSFTTPLKYLPKDIIEVSEDRRAIPGRELEEIIKANGFMINPEKTRLQHRSQRQMVTGLIVNERPNVTREFVRLTSSMINALKRHGCELAEAKYLELLKGESHPLQPRQIIRTKDNAGDFFIKVVKGRLNYIQMIRGRGDKVYRRLAYDFTVAIGKANPEFKKTPEEILGNSIFVVNNMTDDSQGTAFLLDGVGIVTNEHVVRGVSKSMAPHMISFQRANEEKEYTAELILSDKKADLAIFHPSAEFRSIPSLRKAERSIIRPMESVLSIGFPRHRDGAAHYIARGHTTQRRRQVDLDLWLVDFTLFEGNSGGPFFNDSMEVIGVAARGAKNNIESALFGFIPLESLNTFIARKDFVFYKKLHDLLGGCLLKALPKRSGDGVFTEIHHQRTERVTARLQE

SEQ ID NO: 585 - protein, 594 aa, Pseudomonas sp.
  source 1..594: note = Related to MOAT01000002.1; note = Pseudomonas protegens
MNIDKILQDLFMPGFGSLEGFCQLLEVDQKKLLNFLYKRRTNHYVSFSISKKNGTHRSIKAPKRTLKFLQRKLLAHIEKFYSPKPSSHGFVPGRSIKTNAQTHSGKRYVFNIDLKEFFDSIHFGRVRNLFMAQPFNAPHNVATVMAHICCSDGRLAQGAPTSPLISNMICRKLDTQLQTLAKSGKCHITRYADDITFSFTSTLRHLPKNIVEVSEDGRPIPGRELENIIEANGFVINSEKTRLQHCSQRQMVTGLVVNETPNVPRDFVRLTSSMINAMRRYGPQLAEARYLEILKSESQVIPTRQTNRARDNAGDFFIKVVKGRLNYIQMIRGRSDNVYRKLAYAFTVALGKENLEFKKSPEEILGNSIFVVNNILDDSQGTAFLLDGVGIVTNEHVVSGITKTTAPHVISFKRADDPKEYTAELILSDKIADLAVFYPNAEFKNIPGLRKADKETIRAMDPILSIGFPKHREGAAHYITRGNTTQLRYQVDLPLWLVDVPLIEGNSGGPIFNDSMEVIGVASRGSSNNIQAALYGFIPLECLNRFAKRKDFAFYRKLHEILAGGKLVRAASVRGGGVLSTRLQILLISHLNSP

SEQ ID NO: 586 - protein, 584 aa, Pseudomonas sp.
  source 1..584: note = Related to NZ_FNBM01000007.1; note = Pseudomonas seleniipraecipitans
MTLDFLSKDLAFSKFQSLSSFCKLLQVDQDKLLKFLYKKSSSHYVSFTISKKDGSLRSIKAPKKVTKMLQHRLLSHLEEFYTPKSSSHGFIKGRSIKTNGQMHVGKNYVFNIDLKNFFESIHFGRVRNLFMAAPFNAAYNVATVMAQICCCENKLAQGAPTSPLISNMICRRLDAQLQTLAKAQKCHMTRYADDISFSFTSRLRHLPKEIVEISEDGRVIPGQALETLIKTNGFAINSDKTRLQHRSQRQMVTGLVVNKLPNVPREFVRLTSSMINAMKRYGPAQAEARYLEILAQTKQIVPERQLARVKSNAGDFFIKVVKGRLNYIQMIRGRSDNVYRKLAYDFTVALGKENIEFKKTPEEILGNSIFVVTNILDDSQGTAFLLEGVGLVTNQHVVSGATHALASHVISFKRAGDERSYTAELIFSDLKSDLAVFYPGPEFKNIPHLQKADKHIIRAMDPVLSIGFPKYRDGSAHYITKGSTTQLRRQVDIDLWLVDMPLIEGNSGGPIFNDSMEVIGIASRGSVNNLQAALYGFIPIDSLTRFISRPAFGLARRVHDLLAGDKFKPLSKTGHTRLLLKCAP

SEQ ID NO: 587 - protein, 588 aa, Pseudomonas sp.
  source 1..588: note = Related to AJXE01000010.1; note = Pseudomonas stutzeri
MNLDDLLKAMFAPSLGSLPSFCNLLGVEQDKLLSFLYKRTSSHYISFHIPKKNGATRVIKAPKKALKELQKRLASHLDKFHSPKPSSHGFIKGRSIKSNALPHINKTFVFNVDLKDFFETIHFGRVKNLFMSEPFSAPHNVATVMAHICCHDGKLVQGAPTSPLISNMICRKLDSQLQSLAKAQKCHVTRYADDITFSFTSSIKHLPTDIVEVTQDGMAIPGRELEQIVRVNGFTINAEKTRLQHRSQRQMVTGLVVNKFPNVPRAFIRKTSSMINALRRYGPVLAEEKYLQILKGDKQALPARQHRRIKDNAGDFFIKVIKGRLNYIQMVRGRSDSTYRRLAYDFTVAIGKENPEFRKSPEEILGNSIFIVSNLTDDSQGTAFLLGGVGLVTNQHVISGVSKTMAPHMISFTRVGDDTEFSADLIISDAKEDLAVFYPNEQFDRIPMLKKASKESIRPMEPILSIGFPRHRDGAAHYITKGTTTQLRRQVDLDLWLVDVPLIEGNSGGPIFNDSMEVIGVAARGATQNNINAALYGFIPIASLNRFVAKPEFKLANSLHMSLRGKPCRPLCEATGKYIRKMTICSFG

SEQ ID NO: 588 - protein, 587 aa, Pseudomonas sp.
  source 1..587: note = Related to NZ_QJUN01000007.1; note = Pseudomonas dryadis
MIIDDILKALFTPGLGNLSGFCDLLGVEQEKLLDFLYKRKSSHYAAFHIPKKNGATRVVKAPKKAMKELQKSLALHLNKFYYPKPSSHGFVKGRSIKSNALPHVNKNLVFNIDLKDFFETIHFGRVKNLFMSAPFNAPHNVATVIAHICCHDGKLVQGAPTSPLISNMICWKLDSQLQALAKSKKCHVTRFVDDITFSFTSSLKHLPAGVVEVTQDGMAIPGRELEQIVKANGFLINAEKTRLQHRSQRQMVTGLVVNKFPNVPREFIRKTSSMINALRRYGPELAEEKYLQILAGNKQVVPARQHRRIKDNAGDFFIKVLKGRLNYIQMIRGRSDNMYRRLAYDFTVAIGKENLEFRKSPEEILGNSIFVVKNLTDDSQGTAFLLDGVGLITNQHVISGVSKTLAPHMISFLRAGDEAEFSAELILSDVKEDLAIFYPGEKFDQIPRLRKANKEAIRPMEPILSIGFPKHRDGAAHYITKGNTTQLRRQVDLDLWLVDVPLIEGNSGGPIFNDSMEVIGVAARGAAQSNINTALYGFIPIASLNRFVARSEFKFTSSLYAVLDGKAFRPLCEVAGKYARRGCFFIF

SEQ ID NO: 589 - protein, 588 aa, Pseudomonas fluorescens
  source 1..588: note = Related to NZ_CP075566.1
MILYNFLAAIYAPGLSSLPAFCKLLGVDQNKLLHFLYKRKQSNYVSFHIPKKSGATRVINAPKKTLKVLQRSLAEHLEKFYYPKSSSHGFVRARSIKTNAQPHVDKNYVFNIDLKDFFDTIHFGRVRNLFMSEPFNAPHNVATVMAHICCHDGRLAQGAPTSPLISNMICRKLDSQLQALAKSKKCHVTRYADDITFSFTSSLRHLPPDVVEVTGDGVVIPGRELEHIIKANGFLINSEKTRLQHRSQRQMVTGLVVNEFPNLPRAFLRKTSSMINALRRYGPVLAESKYLEILNGDKQSIPARQHIRVKDNAGDFFIKVVKGRLNYIQMIRGRGDNVYRKLAYDFTVAIGKENREFRKSPEEILGNSIFVVKNISDDSQGTAFLLDGVGLVTNQHVVSGISRLTAPHMISFIRAGLDEAEISAELILSDEKADLAIFYPGPEFDKVPRLKKSKKELIRPMDPVLSIGFPKYRDGAAHYITRGNTTQLRRQVDLDLWLIDVPLIEGNSGGPVFNDSLEVIGVAARGAAQNNIQAAMYGFIPISSLNKFVQQSEFKVTRSILDILGGKLFQPLANAKGKFVRRKILIPF

SEQ ID NO: 590 - protein, 605 aa, Pseudomonas sp.
  source 1..605: note = Related to NZ_KE695189.1; note = Pseudomonas syringae
MSSVPFSFADIFKPGLSGLPNLARLLGTNQNALLELLYPNNVRNYKNFQIKKKNGNSRSIHAPKKVLKALQRNMADYLTTLHTPKPSSHGFLIERSIKSNSIPHAGKEYVFNIDLEDFFESIHFGRVKNLFMSRPFNAPHNVAVVLAQLCCYDGKLAMGAPTSPIISNMICRKLDSQLQLLAAGKNCYYTRYADDITFSFTSSKKLLPSDIVQITEGGVGVPGGALLSIIERNGFRVNPTKTRLRHRSQRQIVTGLTVNKFPNVSRSFIRRTASMIHALKKFGAVDAEQRYLEILSRQEIDLAPRQAKRTTDSKGDFFPKVINGRLNFIQMVRGKNDSIYRKLAYAFSVAVNEEDKDLLKSAQEILGESVFSVLNLADANSEGSAFLLSGVGIVTNQHVIDGIDFDSPLELLEFSTTENPSRKLNPQLIYKSKVPDIAIFYPGEEFDRIRPLVISKQKHIRPLDPILAVGFPGGFDSCPSPYINGGKVVQGRHIYEQQHWLVDIPLLQGNSGGPIFDTSMEVIGVASRGSKKNNLESILHAFIPIDTVVKAIRKPEFLYRQRYIELRLNRKTGKVVYTRCVFAEDCIFKSAIELYWPLSKSFSYS

SEQ ID NO: 591 - protein, 617 aa, Pseudomonas sp.
  source 1..617: note = Related to NZ_UUIZ01000014.1; note = Pseudomonas viridiflava
MDNRNILEKTFEGLFSTAPFTPGFHNLDGLALLLDTDLTRLLYILYKSDSPKYNHFKIQKRNGNSRSIHAPIPEIKKLQKKLATLLQALHVPKLSSHGFLADRSVKTNALPHTKKKFVFNIDLKDFFETVHFGRVKNLFMSRAVGAPHNVATVMAHLCCFNGRLAQGAPTSPIISNMICLKLDAQLQALAHKEKCHYTRYADDITFSFTCSKNKLPKDILVYSELDAISAGKGLEIIIEANGFKINPDKTRVRHKSQRQLVTGLTVNDFPNVSREYIRRTSAMINALRKYGEVLAERKYVEINKINAVPLAARQLKRLERKEGDFFIKVVKGRLNYIQMIRGRGDPIYRKLAYYFSVAVKKENKEFLKTAEELLGEALFIVKNSLDEDSQGTAFLLDGVGIVTNHHVIDGVDLITAPHCIEFITTEKIPRVLSAELIFTSKSMDLAVFHPSSDFETLRPLQMSRRKRLKALDPILAMGFPSHIRGATPYINTGKIVQSREAYRSTFWLVDIPLLRGNSGGPVFNSSMEVIGVATMGSKNHDRTTIMHGFLPNDGISTILKNPDFLYRREILKTKKTGIRSISTRLKGVQTLAFYEHKHVGPYPLIHASWPFLSGAGG

SEQ ID NO: 592 - protein, 585 aa, Pseudomonas sp.
  source 1..585: note = Related to JAEIKZ010000029.1; note = Pseudomonas corrugata
MTTIPNFAFSLIKVKPGFGSIESLALLLGTTQDALLGLLYPQTKINYVTFTIPKKNGDIRTIHAPKNHLKHFQRLLAKYLLTTHNAKSCTHGFVENKSIKTNAQPHIGKEYVFNIDLKDFFQTIHYGRVKRLFMAYPFNAPENVATVIAQLCCFNGHLAQGAPTSPIISNMIALKLDGQILSVASKNQCHYTRYVDDLTFSFTCKKHRLPKDIVKISNEDEATPGDTLTNIILKNGFTVNPEKTRLKHRSQRQVAAGVTVNEFTNLPRSYIRLTGSLIYALEKFGPINAEIKYVEGLNEIHQLTPYQLDKIKRSNGEFFKTVVKGRLDFLKMIRGKSDSIYRKLAYRFSKAIGKEDKNLMKSAQDILGESVFVVEEMMSESQGTAFLLDGVGVVTNFHVVGGITQELAPDCVSFITNEATSRTLSAQLIFSCKERDLAVFYPDHSFDTIRPLKTRKKNGLTRVLDPILSMGYPNHSAGTPPYFNTGKIVQQRNVLGRNYWLVDIPLLKGNSGGPIFNSSMEVIGIATIGTTRNDLASILHGFLPVEKLKEIIKLPEFIYRKRYLALKNNQPNLSCLLPKSRPYYY

SEQ ID NO: 593 - protein, 610 aa, unidentified
  source 1..610: note = Related to SMFU01000008.1; note = Marinobacterium mangrovicola
MTLPLGENFFSTAQTIANELGMSYKQLSSFIYPTTNKSYRTFTIKKKGGGERTISVPKKNLKKIQRMIVDKIMKYYNPKLSCHGFTESRSIVTNAYRHVGKQFVFNVDLKDFFGTIHFGRVRNLFISKPFLYSHSAATVLAQICCKDGVLPQGAPTSPIISNLICWKLDAQLQTLAAKNNCHYTRYADDITFSFSCNKKYIPKSILDFDNDGVVVVGSSLERIIKENGFNINYEKVRLKGRSQRQEVTGITVNEFTNVERKFIRKTRSMIHAWRKFGSIKAQEHYISNYLEKDILPRQAKSIAKNDGEFFIDVVKGRVNYIQMVRGRADPIYRKLAYQMTLAMGKPNHLFLRKAEEVISDSVFIVENNLLCEQGSAFLLDDIGIVTNQHVVEGIDHENHELVDFYREDDVKNKMNSSFVYSSASKDIAIFLATANFNNIPPLPIGNDKNLRVGDSIIVVGYPDYSEGETAYINRGKIVQSILRFGKRFWLIDIPVIHGNSGGPVLNEKLEVVGIATLGSAINDGKNKFNGFVPISTLTGILNTPQYNKIYRYSLLHSKKPKVEIEKDLFYVDGLTYCKKCFLDKKQAITVYKTKSNVFFNCKICGKTYRK

SEQ ID NO: 594 - protein, 557 aa, unidentified
  source 1..557: note = Related to DUBU01000004.1; note = Micavibrio sp.
MIDFSDTILPSQEAIAKKFGYTYDQLSSLIYPKVNKSYHSFTISKKNGELREINAPKILLLKVQQTLAEELSSCYTPKNATHGFIKERSIVTNAKKHIGKRNVFNIDLKDFYGSIHFGRVRNLLMSKPFMYSQSEATILAQICCYNGALPQGAPTSPIISNLICWKMDALLQNLASENRCTYTRYADDITFSFNVKKSKLPSSIVRFDLKKDRAIVGYELSKIIEESGFVINEEKVRLAGKNQRQEVTGITVNKKPNVSRKFIRQTASMLYAWKKFGAEQAEHDYLDKYRVKKLTNWQSEKFKGAKGEFFIKVVKGRVNYIQMVRGRDDKIYRKLAFKLTDALGKPNIHFTKSREELATYVIEWMEAQGTGFLLDGVGIVTNEHVISGITSDNYAMCNVYRCYEEDKKQKCPLIFADKAIDLAVLDPTSYLSDVKPYKIGEDKYLEIGDTVKVIGFPKFGPGSTPNISEGIITSKKKIHGIDAFIVNTPITDGASGGPVLDNNNEVIGVAFWGPEHNDGSNPINGFIPISTLKNALEQHSLTNSFGAKKPVKQQKEK

SEQ ID NO: 595 - protein, 543 aa, unidentified
  source 1..543: note = Related to NZ_LN614827.1; note = Legionella fallonii
MDNIDFKDCRTVKDLSHFLGMNYKKLSSLIYPNTNRLYVTFIIPKKSGEDRTIDAPKPILKAIQRKLSIEFNKIYNPRKNTHGFICGKSIVTNANQHINKRYIFNIDFKDFFHSIHFGRIRNLFMSDLFAFTYEVATVLAHICCHNNRLPQGAPTSPVLTNIISFKLDNDLFKLSFDNKCSVTRYADDVSFSFSCNKRNFPKDILYFNKAKEIVPGIKLREVIEKNGFEINNNKVRLQNKTQRQQVTGITVNQKLNIHRSYIIKTRSMLHAWDKYGLEQAAKEYLSKYIEKDYSNNDKNRINSNESLFFKQVISGRINYIGMVRGINDEIYRKIRYKYSCLIGVPDENLKKSLDDILSESVFILENNIGIAQGTAFLVEQLGLVTAYHVIEDINEENSCLIDFFRCNEVDKKRKATLFKTSQKNDIAIFTLNNNFQDITPLKLGDASKLKRGVEIKLFGFPGYNTGDECHCDNGKITQKKKLYGFDVWLVDIPITHGISGGPVLNANNEVIGIAIVGSEKNDKSTISQGFIPITKALAMLQDQ

SEQ ID NO: 596 - protein, 541 aa, unidentified
  source 1..541: note = Related to CP016868.1; note = Legionella pneumophila
MEQTINKNFNSLDTLVSLFGINYSNLAKLIYPTTNNLYHSFSIPKKSGELREINAPNRILKEIQYKLLNELQSYYSKRNCTHGFINERNVVTNARPHVKKNIILNLDLKEFFQSIHFGRVRNLFMSNPFNFNKNVATVLAQICCHKGHLPQGAPTSPLITNLICYKLDKELSKLAFNNNCTVTRYVDDITFSFNCSHDKIPRDILDGISGESISISKKLVNIINKNGFEINYKKVRLSSSNQRQQVTGIVTNVKVNLPRKYIKKTQSMLYAWKNFSLPNAEQAHINNYLEKPYKYQRFIRYNKDKSYFNLMIKGRINYIGMVRGQSDCIYRKLLYQYTELIGNPNKELLKSVDDCLADSVFITEYPIESKQGTAFFLKDIGLVTAAHVVEGIHETNSCFLDFFRHYEVKIKRKATLFKKSEEKDIAIFYVGDDFKNLPSLKVGDDSKLAIGDQIKLIGFPDYNYHDSYLSNLGKIIQKKTMYNLDVWIVDLPINFGVSGGPVFNNKNEVIGVALQGSKKHDQSTYSHYFVPISKVIEMAQN

SEQ ID NO: 597 - protein, 538 aa, Acinetobacter sp.
  source 1..538: note = Related to NZ_NHRP01000030.1
MNFLQLQTTQDLANFFEIDLKHLMYLVHVMPGHIKYKSFKIITKKKERLISSPFFRLKKIQYRLKEEFEKIYKPRKSVYGFIKDKSIKENAINHLNKRYIFNIDLQDFFGSITAIRIKYLLQSYPFNFPSIVAEIISKLICYQGVLPQGSPCSPIISNMIAHRMDGELSFLAKKNNATYTRYVDDITFSFTKRFKALPKDILTFENGDLNVGAKLDQIINSNGFIVNQKKVRLGKRSTRMEVTGITVNEKLNVPRKYIRKIRTLLHLVEKYGEQEADRIFSTYKRTRVSKYPPRIEKAIFGMLTYLAQIVGYNNMVYYNLAKKYNSLEFKSKLLIIKPVDLQIIDALWVILLPTCEEGTAFSISNNLVVTAAHVVINEDTNQPFEEIQIYKSFAQDQIYHLEVLKYNIDADVAICKIMENYKDDSFFELGGNIENKLKLLGFPQFQPNQHKPHSADCDLMFKTTIKEYKYFSINTPIIGGNSGGPVIDSCKRVVGVASKGYFGQGIIDQGSLVNKSIHVTIMGHNLCSDIQNVKDLID

SEQ ID NO: 598 - protein, 564 aa, Pseudomonas sp.
  source 1..564: note = Related to NZ_MOBC01000433.1; note = Pseudomonas brassicacearum
MNGGFFLKFSPTLSPSTTPIELAELLGTDYAKIKRLYYHGDMQRHYLAFDIPKKSGGKRRILAPSDKLKTLQGRLASLLKKIYKPRDPVMAFRDGSSIVTNAHAHCRKKYVFNIDLENFFGTITFARVRGMLISKPYSLTAETATVIAHLATINGALPQGAPSSPILSNMICASLDRDLYSLAKSYRAVYTRYADDITLSFYCLAEFLPTEIVEYSLSNGKPNHYFSKVGNELGSLVRRHGFIINEQKVRLQGPGERRTVTGLVTNQKPNVPRPYIRKTAALIHSFEKLGEQAANILYKQKNPNSSGILESHLQGRLLFIKQVAGLESVVYRRLAQRYNMLPLKSKVPNTPIATTEDSDNFKVGEFIKNKCWVTEISENVEDELVHIQGTAFMIQGSLLVTCEHNLSYQTKQKRHEYGECLVYRVGEGQAVYEAKVIIRDKDLDIAVLRISDAPAGLEHFTLEETREPNIGDRVAILGFPNHKTGPYVGILKCRVTNKYPLHNVQHSEVDKTLYAGNSGGPVINSSYHVVGIAAKGAEGNPNGKNSFIRVTELVKYLEKSGFEM

SEQ ID NO: 599 - protein, 563 aa, Pseudomonas sp.
  source 1..563: note = Related to NZ_LJRZ01000537.1
MNGGFFLNFLSLSPSTSPAELAQLLGTDYGKIKRLYYRGDRQRHYLAFDIPKKNGGKRRILAPSDKLKTLQSRLASLLKKIYKPREPVKAFLDGGSIVSNAYPHCRKPYVFNIDLENFFGTITFARIRGMLISKPYSLTPETATVIAHLATINGILPQGAPSSPILSNMLCASLDRDLYSLAKRNRAVYTRYADDITLSFYCPAEFLPPGVVEYSISNGKPNHYYSRTGQELQSLVRQHGFTINFDKVRLQGPGERRTVTGLVTNQKPNVPRPYIRKTAALIHSLEKNGVEAANAIYKQKNPNSSGVLESHLQGRLLFIKQVVGESSVVYRRLAQRYNMLPIRSKVPNAPIATTEDSDNFKVGEFIKTKCWVTEISERIEDNLVQIQGTAFMIQGGLIVTCEHNLSYQTKERRHEYDECLVYRVGEDEGVYEAQVIIRNKYLDLAVLKIKNAPDDLEHFTLEVTKEPNIGDRVAVLGFPNHKTGFHVGILKCRITNKYPLHDVQHSEVDKTLYAGNSGGAVINSSYHVVGVAAKGAEGNPNGKNTFIRVSELIGYLQKSGFDM

SEQ ID NO: 600 - protein, 564 aa, Pseudomonas sp.
  source 1..564: note = Related to NZ_BCBD01000043.1
MNGGFFLSLFQLSSSTTPGELAQLLGTDYGKIKRLYYTGDMHRHYLAFDIPKKSGGKRRILAPSEKLKTLQARLATLLNKIYTPREPVKAFREGSSIVANAYPHCRKKYVFNIDLENFFGTITFRRIRGMLISEPYSLSAETASVIAHLATVNGILPQGAPSSPILSNMLCASLDRDLYSLAKRNRAVYTRYADDITFSFYSPAEFLPQNVVEYSLSNGKPNHYYSKVGQELETIVRQHGFTINLTKVRLQGPSERRIVTGLVTNQKPNVPRTYVRKTAALIHSIEKNGEEAANAIYKKKNPNSSGILESHLQGRLLYIKQVVGEDSEVYRRLAQRYNMLPIKSKVPNTPITTTEDSDNFKVGEFIKSKCWVTEVSENINGKLEQIQGTAFMIQGGLLVTCEHNLTYRDKDNKRHEFNQCCVYRVGEGEGLYEANVIIRCEKLDLAVLSIKEAPTGLEHFTLEVTREPNIGERVAVLGFPNHKTGSHVGILKCRVTNKYPLYEIQHSEVDKTLYAGNSGGPVINSSYHVVGVAAKGAEGNPNGKNTFIRISELIKYLQKKGFEM

SEQ ID NO: 601 - protein, 564 aa, Pseudomonas sp.
  source 1..564: note = Related to PVUL01000002.1; note = Pseudomonas simiae
MNGGFFLNFVALNPSTTPIELAEHLGTDYGKIKHLYYRGGMLRHYLEFEIPKKNGEKRKILAPSDKLKTLQSRLAGLLKKIYNPREPVKAFREGSSIVANAWPHCRKKFVFNIDLENFFGTITFSRIRGMLIAKPYSLTPETATVIAHLTTVNGILPQGAPSSPILSNMLCASMDRVLYSLAKHNRAVYTRYADDITFSFYCPIEFIPSSMVESSVSNDRPNHYYSKVGYELQSVIDQHGFTINTRKVRLQGPGERRTVTGLVTNQKPNVPRPYIRKTAALIHSIEKHGEQAANAIYKEKNPNTSGVLESHLQGRLLFIKQVVGESSVVYRRLAQRYNMLPTKSKVPNTPQATDEDSDNFKVGEFIKDKCWITEVEQKLDNDLVQIQGSAFMIQGGLLITCEHNLSHKIGDKWFEFNECLVYRVGEGESMYEAKVIIRDKKLDLAVLKIQEPPLGLKHFTLEVSKEPNIGERVAVLGFPNHKSGSHHVGILKCRLTNKYPLHDVQHSEVDKNLYSGNSGGPVINSSYHVVGVAAKGAEGNPHGKNTFIRVSELIKYLEKSGVIL

SEQ ID NO: 602 - protein, 563 aa, Pseudomonas sp.
  source 1..563: note = Related to NZ_LMGK01000001.1
MNGGFFLNFVALNPNTSPDELAALLGTDYGKIKHFYYRGEMQRHYLAFDIPKKNGAKRRILAPTDKLKTIQARIANLLSKLYTPREPVKAFLEGTSIVANARPHCRKKYVFNVDLENFFGTITFARVRGMLIAKPYSLSPETATVIAHLTTVNSILPQGAPSSPILSNMLCASLDRDLYSLAKRHRSVYTRYADDITFSFYCPIDFVPAELVDWSESNGRANHYFSQVGYELGSAIERHGFKVNQSKVRLQGPHERRIVTGLVTNQKPNVPRTYIRKTAALIHSIEKYGVEAANIVFREKNPNSTATVESHLQGRLLYIKQVVSEDSEVYRRLAQRYNMLPIKSKVPNAPQATREDSDNFRVGKFVRDKCWITNIEEYRNGKLVMIQGSAFLMKGGLLVTCEHVLSAIVDDSREEFNECLVSRIGDDESIYEAKVIIRNKELDIAVLKIKDAPADLETFTLEEVKEPNIGDRVAVLGFPNFKEGSKDVGILKCRITNKYPLFGVSHSEVDKTLYSGNSGGPVINSSYHVVGIAAKGAAGNPQGKNSFIRVSELRKYLEKSGAI

SEQ ID NO: 603 - protein, 563 aa, Pseudomonas fluorescens
  source 1..563: note = Related to SMCJ01000008.1
MNGGFFLNFTTLNPYTAPEDLATLLGTDYGKIKHFYYRGEMKRHYLAFEISKKSGGKRKILAPTDKLKTIQGRIAGLLSKLYKPRAPVKAFLVGQSIVANARPHCRKKYVFNIDLENFFGTITFRRVRGMLMAKPYSLSPETASVIAHLTTVDGLLPQGAPSSPVISNMICASLDRELYSLAKRHRAVYTRYADDMTFSFYTPIQYVPRELVEWCELDGRPNHYSSKVGHELAAVIATQGFKINEDKVRLQGGRERQLVTGLVTNQKPNVPRPYIRKTAALVHSVEKFGLEVSTSIFKEKNPNSTANIETHLQGRLLYIKQVVGEESKVYRRLAQRYNMLPIKSKVPNTPIATPEDSDNFKIGKFIKDKCWVIEINEEINGKLVSSQGSAFLIGGRLLVTCEHVLAENFIDGERIEVNECLIRRMGDENIYEAKVIIRSKDLDIAVLKIVDPPAGLEVFSLEDIKEPNIGDRVAVLGFPNFKEGSNDVGVLKCRLTNKYPLSGVMHSEVDKTLYSGNSGGPVINTSYHVVGIAAQGAAGNPEGKNSFIRVSELKRYLDKSGAI

SEQ ID NO: 604 - protein, 559 aa, Pseudomonas sp.
  source 1..559: note = Related to NZ_BQIA01000029.1; note = Pseudomonas otitidis
MEAFLNLIGLTPHTTPQELAQLLGTDYSKIKRLYYRSPITRHYHEFNIPKKNGDKRKILAPSEKLKTLQLRISALLNKLYDPRAPAKAFIQGRSIVDNAAPHCRKSFVFNIDLNNFFPSITFGRVRGLLMAKPYSLSSETATVIAHLSTVNGSLPQGSPCSPVISNMICAGLDRELYSLAREHRAFYTRYADDITFSFYCPLGFISRKIVIPSLSNQHTNHYDSKVGELLNEIIISHGFTINQGKVRLQGSNERQVVTGLTTNQKPNVPRTFIRKTAALIHSIEKTGLEQANLIFREKNPNSKGTLDSHIRGRLLYIKQVVSEESVVYRRLAHRYNMLPISAKVPNPAISAIENNENFKIGEFIKNKCWIVNLCEDIDGDVVVLQGTAFTIKNRLLVTCAHVLQYSGKDFDDCEIFRVHEAQKTLKAKVIIRDNQSDIAILKILEPPSNLEPFTLEEEKEPNIGERVAILGFPNFKEGATSVGILRSRITNKYPLFAPPVMHSEVDKTLYAGNSGGPVINSSYHVVGIASKGAAGSPTGQNSFIRISELIKILERYETN

SEQ ID NO: 605 - protein, 559 aa, Pseudomonas sp.
  source 1..559: note = Related to NZ_NEIR01000012.1
MDGGTFLLGTLGPTTTPDELARMLGTSYSKIKHFYYSRDMGSNYRQFTIPKKNGEKRVILAPENWLKTLQLRLAKRLQLLYKPRKGVTGFVKNSGIADNANLHKRSRYLFNIDLKDFFPSIKFHRIRGLLIAKPYSLMPETASVIAHLCTFRGSLPQGAPTSPILSNMFCASLDRELYTLAVRHNATYSRYADDISFSFYCPLRSLPPEIVVTSERQGELNHYKATIGDKLREAILRFGFEENERKVRLLSRTEKQLVTGLVSNCKANIDRRYVRSTAAMIHSLEKDGETVANERRKAKHPDSTTPVAAHVQGRLLFMHQILGKNSPVYARLANRFNVLPLKFKVPPPSLSTSEREASIAVNRFVRAKCWVVEVAIDVPGDCIISQGSGFMIEGGLLVTCAHVLEEKGVLVDECEIYHVDDDAQRYNATVLHRDRNADIALLKIEDCSENEYFHLESDEEPNIGDRVVILGFPNVKNGAKVGVLQAQVSNKYPLYDPEIMHSEVDKLLYPGNSGGPVINARQRVVGIAAKGAAGSAEGQNSFIRVSELFKVLKAADGLN

SEQ ID NO: 606 - protein, 559 aa, Pseudomonas sp.
  source 1..559: note = Related to NZ_JABWRZ020000002.1; note = Pseudomonas oryzicola
MDGGILINDCLNPSTTPEDLAFMLGTSYNKIKRFYYDRDMSANYRHFTIPKKNGEPRHILAPENWLKTLQIRLARRLTLLYTPRKGVTGFIKESGIVVNADKHKRSSYVFNVDLQDFFPSINFHRLRGMLIAKPYSLLPQTASVIAHLCTYRGSLPQGAPTSPVLSNMFCASMDRKLYELAIRHKATYSRYADDITFSFYCPLRYVSSAIVKASGRQGELSHYKATLGDELKSIINNFGFVENERKVRLLSRTEQQLVTGLLANAKANIDRRYIRKTAAMIHSLERDGETVANERRKEQNADSSTPLAAHVQGRLLFLHQVLGKTSPVYARLANRFNVLPLKFKVPPPQLTTSEREAIIAVSKFVRAKCWVVQVAIDVNDDCIIAQGSGFMIESGILVTCAHVLEEKGVTVDECEIYQVDDDGQKLTAEVIYRNRAIDIAILKVHDCGTQEFFHLETDEEPNIGDQVVILGFPNVKDGARVGVIQARISNKYPLYKPEVMHSEVDKMLYPGNSGGPVINSRQRVVGIAAKGAAGSSEGQNSFIRVSELIKILPALKERL

SEQ ID NO: 607 - protein, 558 aa, Pseudomonas sp.
  source 1..558: note = Related to JAAFOZ010000019.1; note = Pseudomonas savastanoi
MGGVFLLSDRLGPTTTANELAVMLGTSYAKIKYFYYSRPIGDCYKQFSIPKKSGGKRLILAPDDKLKTLQTRLAIRLAEIYTPRKGVTGFIPGSNITKNAKLHSRSKYVFNIDLENFFPSIKFYRIRGLLTAQPYSLMPETATVIAHLCTLNGALPQGAPTSPILSNMFCASMDRMLYSLAVKFKATYSRYADDISFSFKCPLRFIPEDIVKVFSRQGELSNYKAELGSVLSVIIADFGFSENKKKTRLLSRSEKQIVTGLVVNTKANVDRRYVRKTAAMIHSLEQVGEEVSNERRAEKTPGSTTPLAAHVQGRLLFIHQVLGKTSPVYARLSNRFNVLPLKYKVPSSMVLTSEREASIAVNKFVRSKCWVVEVAIDIPGDCIISQGSGFMISKNMLVTCAHVLEEKGVRVNECEIYQVDNDAVRHQAEVLFQDFNTDIAVLKLLDFQVDEFFHLEEGEEPSIGDPVVVLGFPNVKNGAKVGVMRAQVTNKYPLSKPPVMHSEVDKMLYPGNSGGPVINARQHVVGIAAKGAAGSAEGQNSFIRVSELSKLLAANKPA

SEQ ID NO: 608 - protein, 561 aa, Pseudomonas sp.
  source 1..561: note = Related to NZ_CP081943.1
MNGGFFLSSDHLGPTTTPDQLATMLGTDYAKLKYFYYRSGMQQHYREFKIPKKSGGVRTILAPGDKLKTLQLRLAKRLTRMYRPRKSVKAFVEGTSITHNAAAHCGKKFVFNIDLKDFFTSITFARVRGLLIAKPYSLMPETATVIAHLTTVGGVLPQGAPSSPVLSNMLCASLDRDLYSLAVKNHAAYTRYADDISFSFYCQISYLPSELVVTTGSSDNSNHYNSLAGEELSRLISRHGFRVNEKKVRLQAYTERQVVTGLIVNRKPNVDRRYIRKTSALIHALEKLGAEEANAVRKVKQPDSTTPLEAHIQGRLLFIKQVVGLESEVYKRLADRFNMLPIQYKVPKPVSEKLEKDLNFRIGKYVLDRCWVVDVCIDVPGGCVVSQGSAFMMKGQLLITCAHVLAEKKITVNECEVFRVDSPDERYEAKVIYRNDHVDIAILKIQDGLENYESFNLEEAEEPNIGDRVVVLGFPNFKEGSTSVGVIRTKISNKYPLDKPGVMHSEVDKLLYPGNSGGPVLDSANHVVGIAARGAAGNAEGQNSFIRVSELLKILKARQVV

SEQ ID NO: 609 - protein, 565 aa, Pseudomonas sp.
  source 1..565: note = Related to NZ_QYYB01000004.1
MDGDISSPKPTLDSSTTPELLATILGTSYGKIKYFYYGRSGSRTASFYTRFEINKKNGGVREIYAPNKQLKVLQGRIASLLSNLYKPKKYVTAFVKGTSLYDNAINHTRKSFVFNIDLKDFFPTITFARVRGLLISKPYSLDPSTASVIAHLTTVNGHLPQGAPSSPVISNMICASLDRQLNSLAKQHRAQYTRYADDITFSFYCPLKYLPLEIVNTQANPEKINHYNARTGSKLREIISTNGFIVNPGKVRLQFKHERQVVTGLTVNKKVNVDRRYIRKTSAMIHSIESLGIEGAKFLNIALNPSKENPDEAAFELEPHIQGRLLFIKQIKGESCPVYRNMAIKFNSLSEEYKVPLSSHESKDNISINANVVDKCWILEIEETISQGSGFIVEGGLLVTCAHVVASKDDADKPVESCTVFRVSNKSDQYKAIVVHYDKHRDIALLKIDHDTHKFPFFRIEEKIPVKQNDKVSVYGFPDYKPASTYVGCVWARVVNGFIASAVTYYEVDKVLYSGNSGGPVLNSNLHIVGIAAKGAVDGHELNAFLCKSELEKVITTYSALHNDA

SEQ ID NO: 610 - protein, 580 aa, Pseudomonas sp.
  source 1..580: note = Related to NZ_LGLH01000057.1; note = Pseudomonas syringae
MDEGSLPEESLKLTSESSVDDLAAILGTTYPKIKYFYYSSSVAGHYSKFSIAKKGGGKREILAPDNHLKVLQKRLAHQLSFLYKPNPRATAFLSNSSIVRNASFHTRKRFVFNIDLKDFFPSITFARVRAMLMSKPYSLTPQTATVIAHLATVKGKLPQGSPCSPVISNMICSSLDMQLRTLAKRHKASYTRYADDITFSFYVPMQYLPEDIVVLGGDDGEKTHHAVSVGTALSEIITKKGFVIHPGKVRLQRRDEKQVVTGLVVNQMANVDRRYIRKTSAMIHSLSTLGLETANLIHKSKSPDLTSKLSAHVFGRLLFIHQVKGVDSPVYRRLGMRFNQLESQYKVPLAKLLESYSDAGMKHNQLNIRRCWVLENEKWGTQATGFMLENNLMITCAHAFNYVLNPEIDSDVECCIEHDCKEVWFDDCTAYRVNDRSIKYTVKVLFLDKHRDLAVVSFSETNEKFEYFRLEYDLQAEIGDKVSILGFPNFKVGSTDVFRFWAAVSGRYVRSTIECGSIDKVVYSGNSGGPLINSNQHVVGVIRRGAAGDPEGTNEFVCASEVANVLTQYLSTLVVAPERV

SEQ ID NO: 611 - protein, 576 aa, Pseudomonas sp.
  source 1..576: note = Related to NZ_UWFG01000172.1; note = Pseudomonas viridiflava
MDEGSSVDESLRLTSESDVDDLANILGTTYPKIKYFYYSRRVASHYSTFSIPKKSGGKRQILAPDNHLKVLQKRLARQLSFLYKPNPRATAFLSNSSIVRNASFHTRKKFVFNIDLKDFFPSITFARVRAMLISKPYSLTPETATVIAHLATVDGKLPQGSPCSPVISNMICASLDTQLRTLAKKHKASYTRYADDITFSFYVPMLYLPEDIVVLDDNEGGKTHHVVSVGPVLSEIISKKGFKINSKKVRLQRRDEKQVVTGLVVNQKVNVDRRYIRKTSAMIHSLFTIGVDKANIIHKAKSPESSSELSAHVFGRLLFIHQVKGVDSPVYRRLAMRFNQLETPYKAPLAKFVEVHEDAGMKHNQLNIRRCWVIENEQWGTQATGFMLENNLMITCAHAFNYKLSDKIDSDIEYAIENNCDEVLFKDCVVYRVNERAKKYSAKAIFLDKHRDLAIVSIDQTDERFEFFRLEENLEVEIGDKVSVLGFPNFKIGSTDVCRFWAAVSGKYIRSTIECGSIDKVVYSGNSGGPLINSNQHVVGVIRRGAAGDPEGTNEFVCTSEVFKVLKEYQSTLVVG

SEQ ID NO: 612 - protein, 576 aa, Pseudomonas sp.
  source 1..576: note = Related to NZ_CM001514.1; note = Pseudomonas synxantha
MDEGSSVDESLRLTSESDVDDLANILGTTYPKIKYFYYSRRVASHYSTFSIPKKNGGKRQISAPDNHLKVLQKRLARQLSFLYKPNPRATAFLSNSSIVRNATFHTRKKFVFNIDLKDFFPSITFARVRAMLISKPYSLTPETATVIAHLATVDGKLPQGSPCSPVISNMICASLDTQLRTLAKKHKASYTRYADDITFSFYVPMLYLPEDIVVLDDKEGGKTHHVVSVGTVLSEIISKKGFKINSKKVRLQRRDEKQVVTGLVVNQKVNVDRRYIRKTSAMIHSLFIIGVDKANIIHKAKSPESSSELSAHVFGRLLFIHQVKGVDSPVYRRLAMRFNQLETPYKAPLAKFVEVHEDAGMKHNQLNIRRCWVIENEQWGTQATGFMLENNLMITCAHAFNYKLSEKIDSDIEYAIENNCDEVLFKDCVVHRVNERAKKYSAKAIFLDKHRDLAIVSIDQTDERFEFFRLEENLEVEIGDKVSVLGFPNFKIGSTDVCRFWAAVSGKYIRSTIECGSIDKVVYSGNSGGPLVNSNQHVVGVIRRGAAGDPEGTNEFVCTSEVFKVLKEYQSTLVVG

SEQ ID NO: 613 - protein, 531 aa, Pseudomonas sp.
  source 1..531: note = Related to NZ_RWIM01000011.1
MSAYYRSFSIPKKSGGVRTIFAPSNRLKVLQARLKVQLSNLYLPSPCAKAFLKDTSIVSNANAHIRKKFVFNLDLKDFFPTISFARVRGLLISKPYCLKPETASVIAHLATINGNLPQGAPCSPVISNMMCSSLDRELRALAIKHRANYTRYADDITFSFYTPMEYLPADIVIVNAGTLTSHHLATVGPELLKIISGKGFQVNFSKVRLQRQDEKQVVTGLLVNKKVNVERRYIRKVAAQIHSMMCIGLDAANAIHKANDPDANTTLEGHVFGKLLFIKQVKGVDSSVYRRLAMKFNQLDAPYKVPLAKLEEFSGDAGLKHNQLNIRKCWVLENEDWGTQATGFMLENNIMVTCAHAFNYKLNEDNDSDADYMFEHNVTEVWFEECVAYRANERSKKYAAKVLYMDRHRDVAIISIVDADRRFEFFRLEENIQVEVGDRVSVFGFPNQKPGSTDVCRFWADVNDRYVRSMIQCASIDKVMYAGNSGGPVLNLNQHVVGIVRRGAAGDPLGTNEFVCSSEIFKVLEDMNKVV

SEQ ID NO: 614 - protein, 555 aa, Pseudomonas sp.
  source 1..555: note = Related to RBNR01000201.1; note = Pseudomonas syringae
MSKLDSAIDVDGLASLLGTSYTKLRHFYYKPDTSAYYSTFEIDKKSGGKRTIMSPEKRLKTLQSRLKVLLEGIYVAKKQVNAFVKDRSIVTNARAHTRKKFVFNIDLENFFPSITFARIRGMLMAKPYSLQSGVATVIAHLATVRGFLPQGSPCSPILSNMICSSLDRQLLTLAKKHRGEYSRYADDMTFSFYDDLQFVSEEIVRCLKGDGLSNHYHCRVGFYLESVILKSGFKINESKVRLQGRYERQIVTGLVVNKKVNIERQYIRKTSAMIHSMSSDGLDFAREKFKSKAKESSVMLDAHLQGRLLFIKQVVSVDSPVYKRLAKKFNLLGLKYKVPLGKSKNIRGAESRRYSKWYDDRCWVIESELTTADVYDCAQGTGFVIKDGYVITCAHVVKFNGVIANEIQLFRVSSRGDVCKASVVMCDEDRDLAILRILDPALQDLPYFDLSDTSADIGDGVDVLGFPNDKLGATHVGRQKVSVRNKFSISAVTFCQIDKELYAGNSGGPALNEDGDLVGVVTAGNDGDGYNDHSRFVCISELKKVLHLLIGVKDA

SEQ ID NO: 615 - protein, 558 aa, Pseudomonas sp.
  source 1..558: note = Related to NZ_WLYI01000015.1; note = Pseudomonas karstica
MKLDSTLSVDGLASLLGTSYIKIKHFYYKPNTSAYYSTFEIDKKSGGKRKIMSPEERLKTLQRRLKLLLEGVYVSKKQVNAFVKDRSIVTNAKSHTRKKFVLNIDLEDFFTTITFARVRGLLIAKPYALQPSVATVIAHLATVHGFLPQGSPCSPILSNMVCSSMDRQLLSLAKAHRAEYSRYADDISFSFYDNLQFISEDIVETVKSDGLHNHYQCQTGQALESIILRSGFKINESKVRLQGRYERQVVTGLVVNKKVNVDRQYIRKTSAMIHSISTDGLALAREKFKSKVKDSSVMLDAHLQGRLLFIKQVVTVDSVVYKRLAKKFNLLEIDYKVPLGKSKSVRGLESRRYSKWYDERCWVIESELSTAEEFDCSQGTGFAIKGGYIITCAHVVKLKGGIANDISLCRVSKRGEVYKASVIVCDDNRDLAVLKIVEPALAILPYFDMSETIADIGDGVDILGFPNDKLGATHVGRQKVSVRNKFAISAVTFCQIDKELYSGNSGGPALNDDGDLIGVVTSGNDGGGFNDHSRFVCISELKKVLQDLVVAANEQALA

SEQ ID NO: 616 - protein, 574 aa, Pseudomonas sp.
  source 1..574: note = Related to NZ_FNCT01000024.1; note = Pseudomonas benzenivorans
MSKLKLCKSVDELAALLGTTYGKIRYFYYLHPTSESYSTFEIKKKSGGVREISAPSDKLKTLQGRLKVFLSEIYEPKKYVTGFVNGKSIVANAKPHTRKKFVFNLDLQNFFPSITFARVRGLLISKPYSLNSSVATVIAHLVTVNGKLPQGGPCSPVISNMICSSLDRKLKTLAVKNRAEYTRYADDITFSFYDDLEYVASDIVQILKGDELPNHYFARCGRSLERLIIDAGFKVNYLKVRLQGRYERQVVTGLVVNKKPNVNRQYVRKTGAMIHSIETKGLEEARRIHSEKIIKQEKKSGSGKEEEIKVPPVEAHIQGRLLFLKQVVGLESQVYRRLALRFNLLRLKYRVPLGVSKNKFSEDFRKFTKWYDSKCWVVEVEGEIRGEFECGQGSGFMISDQVLVTCSHVLDLKGVKLDEATVYQASSRSRSYKANLLYRDDHRDIALLKISVDKSEFDYFDLETSVLADVGDEVSILGFPQDKLGAQSAGNQTAFVRNKFPISGVGFVEVDKELYAGNSGGPVLNQDSRVVGIVGVGNDGEYCDHSRFICVSELLKVLERFKAASVDKSKLEPA

SEQ ID NO: 617 - protein, 566 aa, Pseudomonas fluorescens
  source 1..566: note = Related to NZ_CABVIZ010000005.1
MTKLNSTTDVDGFAALLGTSYQNIRYYYYSKPMSLYYNSFEIPKKNGGVRVIMAPSEQLKTLQDRLKVLLDELYTPKSSATAFIKGRSIVDNAKQHTRKKYVFNIDLSDFFTSITFPRVRGLLMAKPYSLQSGVATVVAHLCTVSGVLPQGSPCSPVISNMICSTMDRQLKGLAIRNRARYSRYADDITFSFYDDIKYISGELVACLKGDDLPNHYFSRCGKVLNSIIESCGFKVNSSKVRLQSRYERQVVTGLVVNKKANVERAYIRQTSAMIHSIEKNGLAFARQRFSEKNPPDPKSGTKLVLDAHLHGRLLFIKQVVSIESEVYRRLAMRFNFLDLNYKLPLGVSKNHRGIEFRKSTPWYDKRCWIVDTEFDLVFGQGSAFFVNDEFLITCSHVSEFDGCFVDVAEVYRAGSRGDKYSAKVVYRDVARDIAILIIDTDRPLAFETFDVATKMADVGDVLSVVGFPKDKLGAQHAGRQSVEVRNKFASSGVKYFEVDKELYAGNSGGPVLDADNNVVGIVAKGNDGDYCDHSRFICISELASVLQGYEKQKHVAPVVELELEKA

SEQ ID NO: 618 - protein, 558 aa, Pseudomonas sp.
  source 1..558: note = Related to NZ_CP061723.1; note = Pseudomonas putida
MSKLNSSIDVDELAGLLGTSYGKIRYYYYSKPIPDYYKTFEISKKSGGVRVISAPHDQLKVLQERLKILLDELYTPKSSAMAFIKGRSIVENAKQHTRKKFVFNLDLSDFFSSITFPRVRGLLMAKPYSLQSGVATVIAHLCTLNGILPQGSPCSPVLSNMICSGLDRQLKSFAIKHRARYSRYADDITFSFYDDLNYISPDMVSVLMGDGVSNHYYVKCGRPLVTIIESCGFGINLSKVRLQGRYERQIVTGLVVNKKVNVERSYIRKTSAMIHAIETKGLGFARERFAASNPPVDPDTGVQVVLDAHLHGRLLFIKQVVGVESEVYRRLAMRFNFLDLNFKLPLGVSKNRRGVEFRRSTPWYDKRCWIVETELDLEFGQGSAFFVADNVLVTCSHVSEFTGRFTSESEVYRANARGKKYNAGVVYRDKARDISILKLNDESLVFEKFEISTRLADVGDVLSVLGFPNDKLGAQHAGRQTVVVRNKFSMSGVQYFEVDKELYAGNSGGPVLDEDNNLVGVVAKGNDGHYCDHSRFICVSELLVVLEDYKKAILQVSV

SEQ ID NO: 619 - protein, 554 aa, Pseudomonas sp.
  source 1..554: note = Related to LKBT01000034.1
MTIPRLKACTNVDDLASILNTSYKKIAYFYYEVDYSKKRYYENFEIPKKNGNKRTISAPLAQLKNLQKKIAVLLGELYIPNPNAHGFIAEKSIITNAKIHTRKKYVFNVDLNDFFNTITFPRVFGLLTSQPYLINEKVASVIAHLCTLDGCLPQGAPTSPVISNMICQKLDRQLSRLAFTHRAVYSRYADDLSFSFYAPELHVSGEIVVFEQGAGNYYAKAGEQLNRIVNINRFSINPGKTRLQDRFERQTVTGLVVNKKINVPRQFVRKTCAMIHSIESFGLKTAQERFLIENPNSKSSIDNVIFGRILYMKSVVGYSSVVYKRVALRFNQLDLERKVPLSSSKDGKFSAKYLNWVNRRCWVIDNHETIEQGSGFMMAGNLLITCAHVVGNAKEIEVYRTCDTEKYKATVCYVSPDKAVDVAIALIQNPPTRFEEFHHKEETPNIEVGDLLTVLGFPKYKDDAKNVWINKASIVNQIKSSSSLIGYLDKELYGGNSGGPVLNEDGSLVGIVIKGNKDAEGIDDIYVDHSAFLHLSYVLACVKSLKEKYAADDI

SEQ ID NO: 620 - protein, 549 aa, Pseudomonas sp.
  source 1..549: note = Related to NZ_AZQQ01000096.1; note = Pseudomonas mandelii
MSKLQECLNTQDLADALGTNYKKIAYFYYDVDYSKKSYYENFEIPKKNGGSRVIKAPVARLKNLQKKLSFLLDEMFVPHSCAHGFVKEKSIVTNAKNHSRKKYVFNIDLNNFFTTITFPRLYGLLISKPYSLNNDVASVIAHLCTVDGCLPQGAPTSPILSNMICRSLDRQLRRLARLHRADYSRYADDITFSFYAPESFVNESIVVFKDGSGNYFSSAGNTLKKIIDKNKFSINESKTRLQDRFERQLVTGLVVNKKLNVPRAFIRKTCAIIHSIENFGIASAQARYIKENPCSMARVENVIFGRILHIKNVVGFDSVVYKRIALRFNQLNINRKAPLSNGKNGVVSAKFCNWANRRCWVIENNDEISQGSGFMISENLLITCAHVIGSAKVVEVFRAGENIKYEAVVCYTSSDPHIDVAILKIKDAPAPFEEFHYKDEAEALNSGETLTILGFPKYKHDAKNVWINKALLINQVKTASSSYGYIDKELYAGNSGGPVLSENGALVGLVIKGNNDAAEVDDIYVDHSAFLSFSDVLTCVKALKAKYTM

SEQ ID NO: 621 - protein, 550 aa, Pseudomonas sp.
  source 1..550: note = Related to NZ_CP034337.1; note = Pseudomonas entomophila
MNTPILQQCRSVDHLSAALGTNYKKISYFYYDLDSTKISYYEPFLIPKKSGGTRQILAPKPQLKNLQKKLQDLLEDLFKPHACAHGFISERSICTNATPHTRKKYVFNIDLQDFFSSITFARIFGLLISKPYSIEKSVASVVAHLCTVNGHLPQGAPTSPIISNMICRTLDRQLTLLAVANRAAYSRYADDITFSFYSPQEHTSSELVKFEKNSGNYFALPGEILSQIISRNKFKINPKKTRLQDRFERQIVTGLVVNKKINVRREFVRTTCAMMHSIESFGLASSQARYEIENPGSQSKVENVILGKILHIKNVASFASPVYKRLARRFNRLELSLKAPLSSTNEDNFDAKYCNWVNRRCWVIDNNDTISQGTGFMIQENFLITCAHVADGAKELEVYRACDETKYTAWVLGTYPQVDVAILKIQNSPGIFEEFHSRETPRKLNIGDNLHVLGFPKFKSNTKTVWINKAKLIGHTIVHNSNVNYIDKELYGGNSGGPVLDEDGALIGIVIKGNNDTDKVSDIYVDHSAFLDFQHVLDCLKLLKEKYSTT

SEQ ID NO: 622 - protein, 587 aa, unidentified
  source 1..587: note = Related to RZHD01000010.1; note = Halomonas populi
MPITSAQIAASGTPLRLKCKLVMRKVKPKRRPMLDTKTTPHELAVLLGTTYSKLCYTLYKKHTDNLYKDFTIPKKNGGVRKISSPKPILKNLQSKLKLLLDDIYRPHPSASAFIANRGLIYNTTPHIKKALIFNIDLKSFYGSIHFGRVKGMLISKPYCLREDTAQLIAHICCYYKTIPQGAPTSTTISNMICRRLDRELSFLAKKNHAYYTRYADDLTFSFHKIKPNEICAFEDNIWKPSDRLINVISNNTFKINNTKTRGETSRCRQVVTGLKVNTKVNVDRRYIRTTKAMIHSLSLDIESANEYFSSIRKGENEATLETVVAGRINFIGMVKGTECSIYQTLAHKFNNLNIDLKVPTRSNIDTTSQNDNQLKTLEYRKQEKLKKCIWVVSFDGIEGIELDEQLTQGTAFMIKGQKLLTCNHTFEKAGNPSYCLIHRIDDSSIKYYARLVKVDKHRDVALLEIDSKDKVFFDHLEIYFNDDMHSGYKVNLAGFPEYRSGHRDVTVLPSTIIRHEVVSLVKHYSVNSELLGGFSGGPVLNLYNQVVGMVTKGRYISHDKDAGQSTLEGSNSFISAVEFEKFLGSSN

SEQ ID NO: 623 - protein, 546 aa, unidentified
  source 1..546: note = Related to NZ_JABUZC010000043.1; note = Halomonas sp.
MLDSNTTPRRLAALLGTTYPNLCLTVYKVRPNNLYTTFKIAKKSGGVRTIAAPDKRLIYLQDKLKSLLEELYSPHPAATAFIKDRGIIYNASPHVGKALVFNIDLADFYGHINFGRVRGLLSAPPYNLRPDTSQLIATICCLNGSIPQGAPTSPVLSNMISRQLDRRLSLLAKKNHAFYTRYADDITFSFRNNNFEGVCFSVNGVFQPSSELIKLVEKSGFYLNKQKTRGEVSRSRQVVTGLKVNKKINVDRRYVRTTKAMIHALSGDIDTANVVFWQKFPEKEPKRLENVVAGRINFIGMIKGVNSRVYQMLAKKFNRLPLKQKLSTRTSKLVDTDQKYRDMAKQRELQKCVWILDFEGAPNVTDEAEFIQGTAFMVKGQQVLTCSHTFNKADDAEYCYISRIHERGVKYLMKVAKRCKHRDIAELEFVNEPNEIFQSLDIYHKEEMFPGYQVSLVGFPDYMSGHTTVSVINTSITSHVNISTVDNYEVDAEIGAGYSGGPVINDFHQVIGMIVSGRTTSVDFETQESALTGRNAFISAHHFLQF

SEQ ID NO: 624 - protein, 544 aa, unidentified
  source 1..544: note = Related to NYSM01000021.1; note = Alcanivorax sp.
MISSKTTPRALAHSLGTTLPKLNYTVYKLGVSRFYNEFEIEKSDGGKRTINAPEGRLKIIQDRLKVLLDELYSPHPSASAYIKERGIVYNAKKHVKRKVVANIDLKNFFGTIHFGRVRGVLIAKPYCLRADTATLIAHICCLDGVLPQGSPASPVISNMISRRMDRELSLMAKKNRAHYSRYADDITFSFKSKKDTELFDFKNRSVGSKIVRCIEENGFSLNERKTRIQFSSERQTVTGLKVNKKINIDRRYIRETKAMVHSLSFGSLEANKKFIDKYGRDDAQLEDVVFGRVAYIGMIKGRDSSVYQGLARKFNNLDWDRKLSINPGKILKDLEWSGFAFKAEGYRARFEQCVWVVSFDGVKGLGLDEMLVSGSAFSLKGGRVLTAFHVFVKAGMPDYCYLYRINKPGKKYKAKIKSVYEDRDVLELKFDEEVENIRYLDVAPNKFPGTGYELAVLGFPQLHPGHQSLTILPCKVVNTYIGSTFRYCEVDAQISGGNSGGPVVNAYMQVVGMALRGVDVASHEDRVELEGSNAFISAEHFPSP

SEQ ID NO: 625 - protein, 544 aa, unidentified
  source 1..544: note = Related to NZ_VCGW01000002.1; note = Marinobacter maritimus
MIQPTTSPSDLASLLGTTHSKLNYTLYSFPLEYSYTKFTIEKKNGSSRQIRAPNPKLKIIQKRLKNHLEKLYRPHSAATAFVAGRGIVDNAKRHIKRECVFNLDLDSFFDYIHFGRVKGLLVAPPYNLRDDTAKLIAHICCLNGRLPQGAPTSPLISNMVARSLDHKLSRLAKKYKARYSRYADDITFSFQKKTDGIIFHVDEGVVKPSVELVDIIENAGFLINIRKTRVQYYDQRQVVTGLKVNSVVNVDRRYIRTTRAMLFSLSQGVESANMKFFEKVGGDPERRLENVVHGRIAFIGMVKGRGGSVYQTLSQKFNDLGLDIQSPIGPAEIKDELEQKLHFYSYKNRARLQRCVWVVDFGGVPGLDMDQELVQGTAFMIGGQRILTSAHTFAKAGNPVQCKLYLVNEPGKKYSAEVVNINNNSDIAELKLINVDGSFPVLKVAPNLKTNTGYKVSIAGFPQLQPGHQSVAITPCTVINTLNISSHRYIEVDTPIQGGSSGSPVLNVYMQVVGMAAMGVSVTKDGEDVQLEGTNAFVSAVHFP

SEQ ID NO: 626 - protein, 585 aa, unidentified
  source 1..585: note = Related to nan
MNNKPSLSLFDDPQVASFLAANTKMELAAAINEPYRRFTYLLFAIDPDRQYKSFDIAKGNGKSRIIDAPVTALKNIQKKICAILSKIYVPPYPANAFIFGRSIVTNAIPHVKAKSVLKLDLQDYFPSIHFGRVRGLFMAPPFSFNQDVATTLARACCKGGCLPQGAPTSPILSNMISLKMDAQLNRIAKSNRCNYSRYADDITFSSTKDIFPLVVTNAKGLYEPAQEITDCILRNGFAVNTYKTKFMVGRDSKFVAGIKVNSKINTSRKHVRAVRAMLHALEKFGPEASVAEHLRRWRRRHTISSPTNFLQILKGKISFIRMVKGGGDLSVVRLENRLDEWMSLYSGAQVDVRRVETLIAQDDTYHAVVYTEGKTDALHLRYALKRLQKLSLYNNMKLIFYDFPPDTTSGETELKKILGTAKVANNTGKLKIVIFDRDVTGDVGDSRRPKYWGSNVWSFKLPCPGPRTLYENVISIEHYYPDKILFKQDNEGRRLFFVDEFDANTLAHKSIAGVICRKDVIGKKRPGVVICEGVRDQQGKSLTLSKSDFSKNIARGQFFVSDTEMLEFKPVFSAIERLIKKNHYC

SEQ ID NO: 627 - protein, 353 aa, Nostoc parmelioides
  source 1..353: note = Related to JACJQL010000002.1
MKDSSKLVLTDTPESLREKFYSLKQASDIADLLGVSYPRLVYHIYVVDPNQRYTTFEIAKKSGGVRQISTPITALKIIQRKLNQVLQAVYEIKPSVHGFVMGKNIVTNAQAHAKKRYVFNIDLKDFFPSINFGRVRGMFMATPYGLHPEVATVLAQICCHNNQLPQGAPTSPIITNMICAKMDSQLQRLAKECKATYTRYADDITFSTTLPKFPRDLAYIVNDENEEKLNVGDTLIQIISENGFEVNESKVRLQIKGNHQEVTGLTTNIFPNIDRNYIRQVRAMLHAWAKFGLEDAEKEYQRKHEFRSRFNQKEQHSFKQIILGKIEFIGMVKGKNDTIYKKYMQQYKILASL

SEQ ID NO: 628 - protein, 338 aa, Nostoc parmelioides
  source 1..338: note = Related to NZ_JACJQL010000002.1
MREKFYSLKQASDIADLLGVSYPRLVYHIYVVDPNQRYTTFEIAKKSGGVRQISTPITALKIIQRKLNQVLQAVYEIKPSVHGFVMGKNIVTNAQAHAKKRYVFNIDLKDFFPSINFGRVRGMFMATPYGLHPEVATVLAQICCHNNQLPQGAPTSPIITNMICAKMDSQLQRLAKECKATYTRYADDITFSTTLPKFPRDLAYIVNDENEEKLNVGDTLIQIISENGFEVNESKVRLQIKGNHQEVTGLTTNIFPNIDRNYIRQVRAMLHAWAKFGLEDAEKEYQRKHEFRSRFNQKEQHSFKQIILGKIEFIGMVKGKNDTIYKKYMQQYKILASL

SEQ ID NO: 629 - protein, 401 aa, Anabaenopsis sp.
  source 1..401: note = Related to NZ_CP063311.1; note = Anabaenopsis elenkinii
MISVVDPATVYFTVSFNPDVHPDNCFILSRISENIPASDIFLLSTTDKVPKKSHLFLQRSPELLREKFYSLKQPVEIADLLEISYSRLIYHIYLVTPEERYKSFGIPKKSGGIRQITTPITALKIIQSKLNQVLQAVYDIKPSVHGFVMGKNIVTNAQAHVKKRYVLNIDLKDFFPSINFGRVRGMFMATPYGLHPEVATVLAQICCHNNHLPQGAPTSPIISNMICGKMDSQLQRLAKDCKATYTRYADDITFSTTLSQFPRDLAYITNDEDGEKLVIGNSLLNIINTNGFEINQSKVRLQTRGNHQEVTGLTTNVFPNVDRTYVRQVRAMLHAWAKFGLEAAEKEYLSKYEFKNRLPQKAKPTFKQVLRGKIEFIGVVKGKDDTIYNKFITQYNILKKW

SEQ ID NO: 630 - protein, 377 aa, unidentified
  source 1..377: note = Related to NZ_LZQD01000011.1; note = Trichormus sp.
MQKNSKLFLTETPEALKEKFYSLKKPTDIADLLEVCYSNLIYHIYVVKPEKRYKIFDIPKKSGGIRQISTPITALKIIQRKLNQVLQAVYETKPSVHGFVSSRNVVTNAQNHVKKRYVLNIDLKDFFPSVNFGRVRGMFMATPYGLHPDVATVLAQICCYNHELPQGAPTSPIITNMICAKMDGQLQRLAKECKATYTRYADDITFSTSLSKLSKDLAYIVNEEDQEKLIIGDTLFKIIKQNGFELNDNKVRLQTRGNHQEVTGLTTNVFPNVDRNYVRQIRAMLHAWSKFGLEAAAKEYSIKYESKSRLINNEKLEFKPVIREKIEFLGIVEGKKDQLKFKKVIRGKIEFLGMVKGKNDPVYQKYFNIYQQLIKSV

SEQ ID NO: 631 - protein, 330 aa, Nostoc calcicola
  source 1..330: note = Related to JACJRQ010000001.1
MDIADLLEVSYSRLVYHIYLVEPDKRYKTFEISKKSGGIRQISTPITALKIIQKKLNQVLQTVYEIKPSVHGFVTGKNIVTNAQAHTKKRYVLNLDLTDFFPSINFGRVRGMFMATPYGLHPDVATVLAQICCHNNQLPQGAPTSPIVTNMICAKMDSQLQRLAKEYKATYTRYADDITFSTTLPKFPEELAYIVAEEDVDTVFIGNRLLSIINDNGFEVNNHKNRLQVKGNHQEVTGLTTNLFPNVDRKYVRQVRAMLHAWAKFGLEAVEKDYQDKYESKSRLSTKGEPNFRQVLRGKIEFIGMVKGIDDSIYQKYLKQYQLLSTLVIS

SEQ ID NO: 632 - protein, 330 aa, Nostoc sp.
  source 1..330: note = Related to JACJSJ010000006.1
MDIADLLEVSYPRLVYHIYLVEPDKRYKTFEIPKKSGGIRQISTPITALKIIQKKLNQVLQTVYEIKPSVHGFVMGKNIVTNAQAHTKKRYVLNLDLTDFFPSINFGRVRGMFMATPYGLHPDVATVLAQICCHNNQLPQGAPTSPIVTNMICAKMDSQLQRLAKEYKATYTRYADDITFSTTLPKFPEELAYIIAEEDVEKIFIGNRLLSIINENGFEVNQEKVRLQSRDDHQAVTGLTTNQFPNIDRKYVRHIRAMLHAWSKFGLEAAEEQYLTKYENKSKLPIKDNPTFHQVLRGKIEFISMVKGKDDPIYRKYIKQYKNLVSFSRI

SEQ ID NO: 633 - protein, 362 aa, Cylindrospermum stagnale
  source 1..362: note = Related to NC_019757.1
MQKDSHLILTDSPETLRERFYSLTKPIDIAHLLGISYRRLVYHIYLVEPEKRYKTFDIPKKSGGIRQISTPITALKLIQRKLNQVLQAVYQTKPSVHGFVSGKNIVSNAQAHAKKRYVLNLDIKDFFPSVNFGRVRGMFMAKPYNLHPDVATVLAQICCHNNQLPQGAPTSPIITNMICAKMDSQLQRLAKDCKATYTRYADDMTFSTTLPKFPEELAYIVAEEECKKIVIGNRLTAVINENGFEVNQQKNRLQVKGNHQEVTGLTTNLFPNVDRKYVRQVRAMLYAWAKFGLEAAENEYFEKYLFKSRLPIKKDLKFQQILRGKIEFIGIVKGKNDFIYQKYSNQYKILTKLSISNKIRED

SEQ ID NO: 634 - protein, 362 aa, Richelia sp.
  source 1..362: note = Related to CP021056.1
MQKGSNFILKYKPEFLAEKFYALKNPMDIADLLGISYGRLVYHIYVIESENRYKIFDIPKKSGGIRQISTPITALKIIQQKLNQVLKTVYKPKASVHGFVSDKNIVTNAQAHTKKRYVLNIDLKDFFPSMNFGRVRGMFMATPYNLPPDVATVLAQICCHNNQLPQGAPTSPIITNMICAKMDSRLQRLAKDCKATYTRYADDITFSTTLPQFPNDLAYTGTEEDTEKILIGNRLLAIIHENGFEVNEQKIRLQVKGNHQEVTGLTTNIFPNVDRKYVRQIRAMLYAWAKFGLEAAENEYFEKYVSKSRLSIKPKLEFQQVLRGKIEFIGMVKGKEDSIYQKYMNQYKILARLSIVNKNSED

SEQ ID NO: 635 - protein, 330 aa, Anabaena sp.
  source 1..330: note = Related to JADEWB010000105.1
MDIADLLEISYSRLIYHTYIVYPERRYKTFEIPKKSGGIRQISTPITALKILQRKLNQVLKAVYEPKASVHGFVTGKNIVTNAQAHVKKRYVLNIDLKDFFHSINFGRVRGMFMATPYGLHPNVATVLAQICCYKNQLPQGAPTSPIITNMICAKMDGQLQRLAKTYKLTYTRYADDITFSTTLPHFPRELAYILTEEDNEKIVIGDNLLRIIHENGFEVNEQKIRLQVKGNHQEVTGLTTNVFPNVDRKFVRQVRAMLYAWAKFGIESAESEYLTKNRYESIFPGKEKPTFQQALRGKIEFIATVKGKNDPIYRKYLSIYKQLIKPESV

SEQ ID NO: 636 - protein, 359 aa, unidentified
  source 1..359: note = Related to JACGCP010000001.1; note = Dolichospermum sp.
MQQDSQLLLKLTSETLREKFYDLRRVLDIAELLEVSYDHLVHHIYLIESEHRYTTFEIPKKSGGIRQISTPITAIKIIQKKLNQVLQAVYQTKPSVHGFVNGKNIVTNAQSHCKKCYVFNIDLKDFFPSINFGRVRGMLMATPYNLPPDVATVLAQICCYNNQLPQGAPTSPIITNMICAKMDSQLQRLAKDCKATYTRYADDITFSTTLPKFPNKLAYVLTGEDTEKVFIGNRLLAIIHENGFEVNEQKIRLQVKGNHQEVTGLTTNLFPNVDRKYVRQVRAMLYAWAKFGLEAAENEYFDKYVSNSRLPIKQKLKFKQVLRGKIEFIGMVKGKEDSIYQKYINQYKILRNKKSTNSY

SEQ ID NO: 637 - protein, 373 aa, unidentified
  source 1..373: note = Related to LWHC01000033.1; note = Cyanobacterium sp. IPPAS B-1200
MTINFPQGQLISPPWDKKSLLLLNRSPEELKNDFYQLKTPLDVAKLLNIPHKRLVYHLYLVDSQRRYKTFTIPKKSGGQRQISTPITALKIIQQKLNQVLQAVYQVKPSVHGFVQDKNIVTNAKAHAKKRYVLNLDLENFFPSVNFGRVRGMFMAIPYHLPPDVATILAQICCQNNELPQGAPTSPIVTNMICGKMDSQLQRLAKDCKATYTRYADDITFSTTLKNFSTDLAYVVNEGEAEKVVLGDLLSGIIRENGFNVNEKKTRLQTKGNHQEVTGLTTNQFPNVDRRYVRQVRAMLHAWAKFGLEAAQKEFEEKYNHKARFSGKQIPHFQDVLKGKVEFIGMVKGKDDLIYQKYINEYKQLLNLNFPKNI

SEQ ID NO: 638 - protein, 369 aa, unidentified
  source 1..369: note = Related to NZ_CM001775.1; note = Geminocystis herdmanii
MTINLPQWQLIFPHLHNQNPLLLQDSPEELSKKFYELKTPLDVAKLLNIPHKRLVYHLYLVDSQKRYKTFTIPKKSGGERQISTPITALKIIQQKLNQVLQAVYQVKPSVHGFVQDKNIVTNAKAHVKKRYVLNLDLENFFPSVNFGRVRGMFMAIPYHLPPDVATVLAQICCHNNQLPQGAPTSPMVTNMICAKMDSQLQRLAKDCKATYTRYADDITFSTTLKDFPPHLAYIVDYGNNEKVMLGESLLNIIRENGFSVNEKKTRLQTKGNHQEVTGLTTNQFPNVDRRYVRQIRAMLHAWAKFGLESAQKEFEEKYHHSARFSGKEIPRFQDVLKGKIEFIGMVKGKDDSIYQKYISQYYQLLKIYF

SEQ ID NO: 639 - protein, 374 aa, unidentified
  source 1..374: note = Related to NC_019779.1; note = Halothece sp.
MVINLPQGQLIEKKRSKREQKSSLLLLKKSPEELRTKFFELNSPRDVAKLLGISYGRLVYHIYIVSEANRYKTFEIPKRSGGVRQISTPRTALKIIQWKLNQVLQAVYKPKPSAHGFVPNKNIVTNAQAHSKKRYVLNLDLKDFFPSVNFGRVRGMFMGTPYSLNANVATVLAQICCHNNQLPQGAPTSPIITNMICAKMDSQLQHLAKSCKATYTRYADDITFSTTLKQFPESLARVITEEGEERVILGEPLLGIIAENGFEVNEQKIRLQTKGNHQEVTGLTTNQFPNVDRRFVRQIRAMLHAWQKFGLEAAEAEHRERYRNKANFPGKSESNFKEVLRGKIEFIGMVKGRNNEIYQKYLQWYVKLLKFGSN

SEQ ID NO: 640 - protein, 367 aa, unidentified
  source 1..367: note = Related to PXPI01000109.1; note = Cyanobacteria bacterium SW_9_44_58
MVINFPKGQLIPENSNIKSKSYAHLLLKDNPETLREKFFSLSTARDLAKLLNVEYRRLVYHIYIVPPSKRYKTFELPKNSGGTRQISTPQTALKIIQWKLNQVLQTIYEPKPSVHGFVSGKSIVTNAQAHAKKRYILNLDLKDFFPSINFGRVRGMFIAAPYGLTPEVATVLAQICCHNNQLPQGAPTSPIITNMICAKMDSQLQQLAKACKATYTRYGDDITFSTTLKEFPESLAKVVTEEGKEKVALGEPLLGIIAENGFQVNENKIHLQAKGNHQEVTGLTANKFPNVNRKFVRQVRAMLHAWAKFGLEAAEKEFQEKYASKSRLPSKSTASFKEVLRGKIEFIGMVKGKEDKIYSKFIDKFNI

SEQ ID NO: 641 - protein, 376 aa, Synechocystis sp.
  source 1..376: note = Related to NZ_CP063659.1
MLNSAVQEKINIHPLDHQAQIKERFTLPGSPEELRQKFLALQTPDDLASLLNLTYPRLAHHIYRVPSDKKYKTFTLPKKMGGERTISTPISALKIIQWKLNQILTAVYEVKPSAHGFVPGKNIVTNAKAHAGKRFVLNLDLADFFGSVNFGRVRGLFMATPYNLPAKVATVLAQICCHEDKLPQGAPTSPIITNMLCAKMDSQLQRLAKECRATYTRYADDITFSTTLKEFPEALAYAIETEDGDKLLLGDRLLGIITENGFKINEKKVRLQVRGNHQEVTGLTTNEFPNVKRTYVRQIRAMLHAWAKFGLEAAEKEYYQKYEEKVKFSLKKKASFSQVVKGKIEFLGMIKGKDDDLYQKMLKSYLKLKKSAPVTN

SEQ ID NO: 642 - protein, 374 aa, Synechocystis sp.
  source 1..374: note = Related to NZ_CP054306.1
MLSSVIENKVIVHPLDRQAQAKERFVLPGSQTELRQKFLKLQTPDDVARLLNLDYRRLAHHIYHVPTEQKYKTFTLPKKTGGERTISTPVSALKIIQWKLNQLLTAVYEVKPSAHGFVQGKNIVTNAKVHAGKRFVLNLDLADFFGSVNFGRVRGLFMATPYNLPAKVATVLAQICCHEDKLPQGAPTSPIITNMLCAKMDSQLQRLAKECRATYTRYADDITFSTTLKEFPEALAYAVETEDGDKLLLGDRLLNIIADNGFNINEKKVRLQVRGNHQEVTGLTTNEFPNVKRTYVRQIRAMLHAWAKFGLEAAEKEYHERYNFKARFALKEEASFKQVLKGKIEFLGMVKGKKNLAYNKFLKSYYNLTNFGKK

SEQ ID NO: 643 - protein, 339 aa, Synechococcus sp.
  source 1..339: note = Related to CP000955.1
MQTPQNVAVLLDVEYDKLIYHIYSSNVDERYKKFEVYKKSGGIRTITTPVTSLKFIQWKLNQVLNAVYQPKPAVHGFTLNKNILTNAQAHVGKRFVLNLDLEDFFPSINFGRVRGLFMAPPYQLPAGVATVLAQICCYDNQLPQGAPTSPIVSNMICAKMDTQLQRLAKECRATYTRYADDITFSTTLREFPEDLAYPVKTEEGTQFVLGDHLLQIIAENGFKINNQKTRLQTKGSHQEVTGLTVNQFPNVKRTYVRQIRAMLYAWEKFGLQQASQEYYFFYKDYNRLPLKFNNKSSEDDFVQVIKGKIEYLGMIRGKQDSIYRKYISKFNYLKNYNGR

SEQ ID NO: 644 - protein, 371 aa, Synechococcus sp.
  source 1..371: note = Related to NZ_JALAAD010000001.1
MESNLPEHQAVNPESSKRSFQRKKGCLNLTQTPEELRAAFLALKTPRDIARLLNVRYDRLVYHIYKVPLENRYTTFEIPKKSGGTRTISAPVTALKLIQRKLNQVLQAVYEPKPSVHGFTPGRNIVSNAKPHVKRRYVLNLDLKDFFPSINFGRVRGMFMGIPYHLPEPVATVLAQICCHNNQLPQGAPTSPVITNMLCAQMDSRLQRLAQKLKCTYTRYADDITFSTNMPEFPADLAIEVTTDEGTRIKIGEPLRQIIESSGFLINDKKVRLQKRGHHQEVTGLTTNEFPNVDRRYVRQIRAMLHAWRKYGNQNILSVTSKSNHPISYESFDNFKQVLRGRIEYVGLVRGKEDPIYIKFLNQLKMFEEVF

SEQ ID NO: 645 - protein, 371 aa, unidentified
  source 1..371: note = Related to RFIJ01001009.1; note = Bacteroidetes bacterium
MRDRLKGTPDQLREAFLKLRSPRDVAELLDVRYDRLVYHIYVVPEAKRYTVFHIPKKSGGQREILAPATPLKLIQKKLNQVLQAVYQPKPSAHGFLPARNIRTNAEPHAGKRYVLNIDLKDFFPSINFGRVRGLFLSKPYNLPDEVATVLAQIACYTHPEDTWQHNGKVVRRSYLPQGAPTSPIITNMICAGMDAELQRLAKRCRATYTRYADDLTFSTTLRTFPEDLAQVVDDTEGRKRVFLSETLRSIIEKHGFEVNDKKVRLQDRRFRQEVTGLTVNEFPNVRRSFVRQVRAMLHAWDKYGLEQAEREYRVKYESKHRGPYHAAPSFAHIVRGKLEFIGMVKGKGDPVYLKYLGHYYSLIERDKLASK

SEQ ID NO: 646 - protein, 753 aa, Nostoc sp.
  source 1..753: note = Related to AP018322.1
MSLYDFSPELVAKTIGVDYHSLIELLEQVDEIYRDFKIPKKSGGVRTIRTPRSTEYEDGDITLLDIQKKISKEILQPVYQPKPCVHGFTAKKSIVTNAKAHTKKKYVLNLDIQDFFTSIKFERVRKMFMAQPYNANDEVANLLAQICCYEDQLPQGAPTSPIVSNMVCAKMDGQLLDIARQYKATYTRYADDITFSTNLEEFPEALGYVVNEGSIRRFFVGHELQEIFNSNNFEVNERKVRLQTQNCRQEVTGLTVNHFPNVNRQFVRQIRAMLYAWQKFGINNAASEYISKYGRYGEFYKIILNYKSGVEAKRFHHVLRGKIEFLGLVRGKNDPIYKKYLAQYKRLLYEEIAQEPRLPSVLKTKGWQEGRLSLNNHDWNANIRKRGLLLPNYIKTSYLLSVLTSLYTGQIVLLNGSVGIGKTSLVEKSAKIFNGNSKIIPVRPAWTDSTDLLGFYNPVNDSFHPSIFLTALQQASENFEQIFLVCLDELNLAKIENYAADLLSCLEYSKTGQGAQKLILYSPSIEVQIRQEIKLLQSQKSKTFEQSNRLAKLQNLLNTYPAEFLLPKNLVLIGTLNSDETTYDISPKVIDRSFVITYPLPDFAEDTKATPSSNPITGTYIPSLFQELDNKILQAHSSSDEFNDSWYTLLNWNSRYLSQCGIPLGYRVKRDYKVFYAASQIIGLTVEECLGYFLFTKLMPRLSFFKDESRENICLEWLEEIENNYSQFGTPDVIENLRNQIQDIRRRNVRYWG

SEQ ID NO: 647 - protein, 753 aa, Merismopedia glauca
  source 1..753: note = Related to NZ_PVWJ01000139.1
MSLYNLSPELVAEQLGVNYHSLIELLQQLDEIYRDFVIPKKSGGVRTIKTPMSIREIIRGYEDGYFPLLDIQKKLSKEILQPVYQPKPCVHGFTAKKSIVTNAKAHTKKKYVLNLDIQDFFSSINFERVRKMFMAQPYNANDEVANLLAQICCYEDLLPQGAPTSPIVSNMVCAKMDSQLLTLAKKYKATYTRYADDITFSTNLDEFPEALGSVADEGGIRRFVVGEELREILNSNNFEVNERKVRLQTQNSRQEVTGLTVNRFPNVDRKFVRQIRSMLYAWQRFGIEQAAGEYSSRYDKKYKYLINRSGEEAKRFHHVLRGKIEFLGMVRGKNDPIYKKHLAQYKRLLYEELAQKPRLSSSLKTKGWQDRVSLNNQDWNTHIRVAGLLLPDYIKTSYLLAILTSLYTGQIILLNGSVGIGKTSLVEKSAEILNGNSKIIPVRPAWTDSTDLLGFYNPVNDSFIPSSFLTALQKASENFEQFFLVCLDELNLARIENYAADLLSCLEYSKSGQQAQKLILYSPSIEVQIRQEISLLQSQKTKTSEQSNRLAKLQNLLSTYPAEFSIPKNLVLMGTLNSDETTYDISPKVIDRSFIITYPFPDLAGDTNATPSNNPITGTYIPSLFKELDNKILQERSTNDEFNESWYIISNWNSRYLSQCGIPLGYRVKRDYKVFYAASQIVGLTVEECIGYFLFTKLIPRISFFKDDSRENICLEWLEEIENNYSHFVTPDVMGNLRNQIQDIRRRNVRYWG

SEQ ID NO: 648 - protein, 757 aa, unidentified
  source 1..757: note = Related to NZ_CP051206.1; note = Dolichospermum flosaquae
MNLKDLYCLSPELVAEKLGVNYHSLIELLEQVDEIYREFKIPKKSGDVRTIRTPISSSERYKIYEGEGYFPLLDIQKKLSKEILQPVYQPKPCVHGFTAKKSIVTNAKAHTKKKYVLNLDIQDFFASINFERVRAMFMAQPYNANDKVANLLAKICCYKDQLPQGAPTSPIVSNMVCAKMDRQLLELAKKHKATYTRYADDVTFSTNLEEFPEALGYVINDGSVRKFVVGEELREIINSNNFEVNERKVRLQTQNYRQEVTGLTVNHRPNVNRKFVRQIRALLHAWQKFGIEKAADEYSSRYDKKYKYLKIRSSENTKRFHHVVRGKIEFLGMVRGKNDPIYKKYLSQYKRLIYEELAQEPKLSFVLKTKGGKERVSLNYQDWNANIRARGLLLPNYIKTSYLLSVLTSLYAGQIILLNGSVGVGKTSLVEKSATILNGNSKIIPVRPAWIDSSDLLGFYNPVNDSFNPSSFLTALQQAQEKFEQFFLVCLDELNLARIENYAADLLSSLEYSKSGQGAQKLILYSPSIEVQIRQEIKLLQSQKSKTSEQSNRLAKLQNFLNTYPAEFSIPKNLILVGTLNSDETTYNISPKVIDRSFVITYPLPDFAEDTNATPSSNPIAKTYIPSLFKELDNKILQADNSNDEFNDSWYTISNWNSLYLSQCGIPLGYRVKRDYKVFYAASRIIELTAQECIGYFLFTKLLPRISFFKDEERENICLEWLEEIENNYSHFGTPDVIENLRNQIHDTRRRNVSYWG

SEQ ID NO: 649 - protein, 581 aa, unidentified
  source 1..581: note = Related to JACRMK010000078.1; note = Chloroflexi bacterium
MSILLESADTTLRERFHNLRDFADLADLLEIKKSLLYYYAFKARGVDHYKVFQVPKKSGGTRQICSPSSPLKLIQRKLNQIFQSVYVPKASVHGFVKDRSIVTNARRHIDGTPRKRYVLNIDIADFFPSITEGRIKGLLMATPYNLPRDLAHVIAGLVCLDGRLPQGAPTSPVLSNMICARMDTQLRRLAQKYRCVYTRYADDITFSTSLPRFPAGLATGNDTNRQIVVGDELASVISGNGFAVNQKKVRLRSKDNRQEVTGLTINRFPNVTRSYVRQIRAMLHSWERYGYENANHEYAQKYFAGDEDKAPSLRQVLYGKMEFLRMVRGSDNSIFLSFREKLRRIDPEYKPLELTPINASIPIYVVTEGKTDWKHLKAALHRLKEQGLFIGLEIEFWEYEDDVSMNDAELLKRCKYKDDIDLPKLYIYVFDRDKPDIVRQVTGTDGDFKQWRRRLYSMAIPVPAHRVGNPDLCIELLYDDDSVKQKDSHGRRLFLSSEFDKHSCRHLTEDLNCTDNNKVKQPLAIIDNAVFDSNRKNVALSKSEYATNVLTKVPGFTTFDVAAFKLVFETLERIIKYDNQH

SEQ ID NO: 650 - protein, 382 aa, unidentified
  source 1..382: note = Related to NZ_NKFP01000006.1; note = Leptolyngbya sp.
MFRSRIKRSSTLLLCKNCDELKQEFLSLKTAKDIATLLEVPYYQLAYHLYKVAENEKYREFSIPKKSGDSRTITAPAKALKILQRKLSQVLYSVYEPKKPVHGFVPARSILTNAKQHSHKRFVLNIDLKDFFDSIHFGRVKGIFIKPPCNLPEEVATILARICCHSGKLPQGAPTSPVVSNMVCARLDRQLRLLAEEFRCTYTRYADDITFSTTMSDFPKEIAFANPEGDNLESLLGERLILTIWDNDFEINENKIRLQHKGQHQSVTGLTVNQFPNVKRAYVRKISSMLHAWDKFGLASVQQRYVEKHYKESGKFNKEIPSFQEVLRGKINFLGMIRGKDDEIYRKYLTWYRNLSVREIPIDLSQLDSKTQPSQSHPTDRG

SEQ ID NO: 651 - protein, 337 aa, unidentified
  source 1..337: note = Related to JAHHHP010000108.1; note = Myxacorys chilensis
MKTPKDVARLLEVTYDRLVYHLYISSENTKYIEFSIPKKSGDSRTITAPSTALKILQRKLSQVLYSVYKPSDSVHGFVAGRSILTNAKQHLRKRFVLNIDLKAFFDSIHFGRVRGIFIAPPYNLPKEVATVLAQICCHSNKLPQGAPTSPIVSNMICVRLDRQLRLLAKKYKCTYTRYADDITFSTTLPNFPKEIAFESPGGDDLESLLGEELILTVWDNGFEINENKIRLQHKNNHQGVTGLTVNRFPNVNRDYVRKINSMLYIWQEFGLASAQKGYIEKYNEKSGKFNEEIPLFQEVLRGKINFLGMVRGKDNEIYLKYLDWYCSLSNQEEISKE

SEQ ID NO: 652 - protein, 361 aa, unidentified
  source 1..361: note = Related to JAAURG010000500.1; note = Leptolyngbyaceae cyanobacterium RM2_2_4
MLKENSTLILYKNCNELRQEFLALKSPRDIAELLEVKYEQLVYHLYKAPGSSKYKEFSISKKSGHSRTISAPSSALKILQRKLSQVLYSVYDPKYPVHGFLPEHSIVTNAKQHLRKKFVLNIDLKNFFDAIHFGRVRGIFLAPPYKLPEEVATVLAQICCHSNKLPQGAPTSPVVSNIVCTRIDSQLRLLAKELRCNYTRYADDITLSTTRPNFPIEIAYESSEDNKVKIVLGERLISIVQNNGFEINDRKIRLQHRSQHQEVTGLTVNQFPNVKRDYVREISSMLHVWDKFGLASASQRYAEKRSRELEISQEEVPSFQEVLRGKINFLGMVRGKENEIYRKYLNWYYILSNRSETPSGG

SEQ ID NO: 653 - protein, 363 aa, unidentified
  source 1..363: note = Related to NZ_JH976537.1; note = Nodosilinea nodulosa
MLTETEINSSLILLEDCEKLKKKFLSLKDPRDVAALLDVTYDRLIYHIYRVPDSEKYLEFKVPKKSGQMRKISAPSTALKIIQRKLSQVLYSVYDPKAPVHGFVPSRSILTNARPHLRKRFVLNIDLKDFFDSIHFGRVRGIFMAPPYNLPADVSRVLAQICCFSRKLPQGAPTSPVVSNMICARLDSQLRLLAKENHCTFTRYADDITFSTTLPVFPKRLAYIDSDVKEDEEKTVLGSSLVSIVRENGFEINWKKVRLQHKSHHQEVTGITVNQFPNVKRDFVRKISMMLHIWDKYGLDSARKRHAELLSKSLEIPEEEVTDFREMLRGKINFLGMVRGKNDSIYVKYLNWYCNLSARERRM

SEQ ID NO: 654 - protein, 359 aa, unidentified
  source 1..359: note = Related to JAIUYC010000141.1; note = Coleofasciculus sp.
MSDSKFKENSTLLLYKNCDELKEEFLSLQTPRDVARLLEVSYDRLVYHLYIVPENRKYAEFSVPKKSGDTRIISAPATALKILQRKLSQVLYSVYEPKAAVHGFVPSRSILTNAKQHLHKRFILNIDLKDFFNSIHFGRVRGIFMAPPYKLPEEVATVLAKICCYSGKLPQGAPTSPIVSNMVCPRMDSQLRLLAKEFKCTYTRYADDITFSTTLPNFPKEIAYINIEEDKPKILVGERLISVIQDNGFEINENKVRLQYKTKHQEVTGLTVNQFPNVKRDYVRKISSMLHAWDKFGLDSVQKRYIEKCSKELGIPAEEVPPFQEVLRGKINFLGMVRGKDNEIYRKYLNWYRRLSNRE

SEQ ID NO: 655 - protein, 378 aa, unidentified
  source 1..378: note = Related to JACMPV010000402.1; note = Alkalinema sp.
MSSSSFTDLNSQHNKGSSLFLYQNCDELRESFKSLKTPRDIARLLDVSYNKLTYHISILPENERYRDFLIPKKSGQSRTISAPCTPLKILQRKLSQVLYSVYEPKSSVHGFVPNRSILTNAKRHVHKRYVLNIDLKDFFHSIHFGRVQGIFMKPPYNLPKEVAVVLAKICCYSGRLPQGAPTSPIVSNMICARMDSELRKLTVEFKCTSYTRYADDITFSTTLSKFPVEIAYQEKSGDDNSQKLILGERLSSIIQSNGFAINESKIRLQHKSQHQEVTGITVNQFPNVKRSFVREISSMLHIWDRFGLKSAEQRFRDKAAEDLKTSAYTLPSFQEIPSFKEVLRGKINFLRMVRGKDNATYLTYSKWFYELSRKEAIK

SEQ ID NO: 656 - protein, 376 aa, unidentified
  source 1..376: note = Related to JACQYI010000059.1; note = Oscillatoriophycideae cyanobacterium NC_groundwater_1537_Pr4_S-0.65um_50_18
MENLSLLLERSCEDLCEDFHSLKTPRDVAALLDVPYKRFVYHLYKEENRYTSFEIPKKSGDRRTISAPVIGLKIIQRKLSQVLYCVYNPKPSVHGFVPAKSILTNALPHVKKRYVLNADLKDFFPSINFGRVRGLFMAAPYGLSPEVATVLAQICCYEGKLPQGAPTSPVVSNMICARMDRQLQHLAKEYRSTYTRYADDITFSTTVPKFPKALAYVPEEGDEKKLILGEKLAEIIISNDFRVNEQKVRLQDKRSHQEVTGLTVNEFPNVDRRYVRSIRAILHAWDKFGLQKAQEVYLEKYAPTPRYPQQEKSSLKQVLHGKIEFLAMVRGKEDQIYQKHIKKYFELSQRDSIPHKAILVRQEAVHEQTGTSNDEV

SEQ ID NO: 657 - protein, 333 aa, Microcoleus sp.
  source 1..333: note = Related to JACJPD010000044.1
MKTPRDVAQLLEIPYQRLVYHLYQVPLEERYLTFELKKKSGGVRIVSAPASALKLIQKKLNQVLQCAYQPKPSVHGFTFSKNITTNAKAHTGKRYVLNIDLKDFFPSINFGRVRGMFIAMPYSFSPDIATILAQICCYNNQLPQGAPSSPIVSNMVCAKLDSQLQQLARKLRCTYTRYADDITFSTTVPKFPKELAYLIDINEQQKLVLGDGLLSIIKDNGFQINEKKIRLQSKDEHQEVTGLTVNQFTNVNRNYIRQIRAMLHAWEKFGLELAEREHRIKYYFKQKSPYKNIPSFKQVLRGKIEFVGMVRGKEDQIYQKYLNHYLRLNNPVI

SEQ ID NO: 658 - protein, 364 aa, unidentified
  source 1..364: note = Related to JAKGPC010000001.1; note = Planktothrix agardhii
MAKTRNSKSSIQPTLRKEGDELRKEFFLMKIPRDVAQLLEIPYQRLVYHIYIVPLEDRYLTFDIKKKSGGNRNICAPATALKIIQKKLNQVLQFVYKPKPSVHGFVLNKNIATNAKPHAKKRYVLNVDLKDFFPSINFGRVRGLFMALPYGLSSEVATVLAQICCYNNQLPQGAPTSPIVSNMICAKMDSQLQQLAKKLRCTYTRYADDITFSTTLPKFPKELAYFIEIENQQKLILGDDLLSIIKENNFEVNERKIRLQSKDSHQEVTGLTVNQFVNIDRNYIRQVRAMLHAWEKFGLEDAEREHQEKYYSKYKSPYKVIPNFKHILRGKIEYIGMIKGKDDRIYKKYLNHYIKLHKNSQNKK

SEQ ID NO: 659 - protein, 382 aa, Nodularia sp.
  source 1..382: note = Related to NZ_BDUB01000001.1
MSENYEKKSQVIKALKPCLDKNCDELIKKFYSLKSGRDVARLLEVPYGDLVYYLYVIPYEQRYTTFQIPKKLGGYRIISTPATSLKLIQKKLNQVLQCVYQVKPSVHGFVKDKNIVTNAKAHIGKRYVLNFDLKDFFVSINFGRVRGMFMALPYALNPEVATVIAQICCHDNQLPQGAPTSPIVSNMLCAKLDSQFQKLAKKYRFTYTRYADDITFSTTRPNLPEEIAYIIITEEPEKLEKVVLGKDIYSIVKENSFEVNQLKVRIQNDKQHQEVTSITVNTFPNVDRNYIRQIRAMIHAWEKFGLESSELEYINKYEFKARLFSGDTPKFKQVLRGKIEFLGMVKGKNDTIYKKYLTQYLELNKRDKNFFYRLFSWREGNL

SEQ ID NO: 660 - protein, 592 aa, Plectonema radiosum
  source 1..592: note = Related to NZ_JADEWL010000096.1
MGTTALSRTEEELKEDFYKLKTRQDIAQLLEISDYQLRYHLYIYPRDKAYTKFQIPKKTGDYRIISAPITSLKIIQRKVNQILKCIYKSKPSTYGFVTGKSIVTNAKQHLRQRHVLNLDIKDFFPSINFGRVRGLLMAVPYSCTEEVATILAQICCHENQLPQGAPTSPIISNMICAKLDSQLQRLAKKYQCIYTRYADDITFSTSRTKFPGHLAWFSQEADVLILGNDLKNIIENNGFIVNDSKLRLYNRYKHQEVTGITVNQKLNVKRSYIRQIRAMLHAWEKYGIVNAEVEFWNKFDRKSSFKKDRKSFKSIVKSKIEFIGAVKGKDDTIYLNFLRWLKRLAPELVSDKKLNQYSDKLLENNFRLKATIWTEGKTDIKHLKSALKWLKYQGKEFNVELEFKEDLDDQKQGDGELLNVCQQFCKEKKIIPIIAVFDRDVPNIIPRVHDDTMGFKVWGNGVYSFALPIPLHRKENKDICIEFYYTDEEIQKLDEDGRRIYLSSEFNSKSGRHITFDVNTTDKNKLKPNQLKIIDNDVFDKNNKNIALSKNNFADYIFEQKSGFNDFNFRAFEEVFIIIEKIIKYHAEIIKE

SEQ ID NO: 661 - protein, 591 aa, Nostoc sp.
  source 1..591: note = Related to CP046703.1
MGTINLSLTEEELKERFSQLKTRKDIASLLEISDYQLRYHLYIYPRDKAYTTFQIPKKTGEYRTISVPHTSLKIIQRKLNQVFKCVYQPKPSTQGFVTGKSIVTNAKQHLRQRYVLNIDIKDFFSSINFGRVRGLLMASPYNCTEEIATVLAQICCHENKLPQGAPTSPIVSNMISARLDSQLQRLAKKYHCIYTRYADDITFSTSRPKFPGHLAWFSEEAEKLIISDDLKKTIEDNGFIVNESKSRLYSKHRHQEVTGITVNKKLNVKRKYIRQIRAMLHAWEKYGLDNAQAEFYNQFDNKSSYLKKQKSFQYIIKSKIEFVGTVRGKDDQIYLNFLRWLKRLAPELVSNEKLNVYNLLENQNKSSIKASIWTEGKTDIKHLNSALKWLEDQGRKFDFEINFKDDLDPQKQGSSQLLEMCKQLCKTKHQQPMIAIFDRDEPNITKQVNDDSLGFKNWKNGMFSFALPIPQHRHGQNDICIEHYYKDNEIQRQDVNGRRLFLSNEFHDETGRHFKDDLNCTDRNKYKYDGKIIDQDVFNRNNEKVTLSKNDFADNIFNKKEKFDDFQFEAFEEVFLIIEKIVKSYAEELQE

SEQ ID NO: 662 - protein, 489 aa, unidentified
  source 1..489: note = Related to QBMH01000079.1; note = Leptolyngbya sp.
MGTTLLSLSKDELKDLFYKLKTREDIAALLQISDYQLRYHLYIYPRKYPLKKAYTAFKISKKSGGSRSILAPNTSLKIIQQKLNQVLKSIYQPKPSTHGFVVEKSIVTNAKQHLRQRYVLNLDLKDFFPTINFGRVRGLLISPPYGCTDEVATVLAQICCYENQLPQGAPTSPIISNMICAKLDSQLQRLSRRYQCIYTRYADDITFSTSRSRFPPHLTWFSREAEKAILGDELKAIIEENGFLVNESKVRLQSRYKRQEVTGITVNEKLNINRKYIRQIRAVLHAWEKYGLENTEAEFWRKDKKHRFQANSDSFRKIIRGRIDFIGTVRGKDDQIYLNFLGWLKKLAPDLVSDSKLSLASPKILLENQKKNRQEAVLWTEGKTDIKHLKSALRWLENRKISYEFKLNFKDDLDEQKQGDDQLLKMCEQFCKEARSKPIIAIFDRDKPDYVRKAHDETQGFKIWGSGVYSFAIPIPCHRQDVRDICIEL

SEQ ID NO: 663 - protein, 601 aa, Pseudanabaena sp.
  source 1..601: note = Related to NZ_JAAVJL010000001.1; note = Pseudanabaena yagii
MNTTFLNLSEEELREEFCRLRTREDIAKLFQISDYQLRYHLYVNPSQKAYVIFEIKKKSGGIRSISAPKTALKIIQHKSNQLFQSVYKPKPSTHGFTSNKSIVTNAKQHLRQRYVLNLDLKDFFPSINFGRVRGLLMANPYNCTEEVATVFAQICCHNQQLPQGAPSSPTISNMICAKLDTQLQRLAKKYQCIYSRYADDITFSTSRSRFPSHLAWFSRDSEKLNIGSELKDIIEGNGFQINESKVRLQNRYNHQEVTGITVNEKLNIKRKYIRQIRAVLHAWEKYGLENAEMIFWQKYEKHRHTEFNPDSFRQVIRGRIEYVGSVRGKDDHLYLKLLRWLSKLAPDLVNKTKFDIANINESSEEQKDLPQVIIWTEGKTDIKHLRSAHRWLQNNKTTRYKIEIKFKDDLDDQKQGSPELLKMCEQFCKEKRNNPIIAIFDRDEPDLIRKVHNETTGFKSWNNGVYSFAIPIPQHRKDNHSICIEFYYKDEEIKRHDNDGRRLFLSNEFNPISGRHIIDRDLVTQETKKIKKNEIKIIDSNVFDSNDTNVALSKDNFANYILQESANFNDFDFNPFLEIFEVINRISKHHEENIKSEHITH

SEQ ID NO: 664 - protein, 585 aa, unidentified
  source 1..585: note = Related to NZ_LXYR01000030.1; note = Phormidesmis priestleyi
MESNDGIKQLLGGLESRQDVATLLDVTDRQLRYLLYSPRYKKYEKFEIKKKMGGVRLIYSPSHALKNLQRRLNAILQQVYQPKPSTYGFVKGKGIVKNAEQHLRQKCVLNLDLKDFFSSINFGRVQGLLKAAPYNLLHEVATVLAQICCHEFEVDGQLNRRLPQGAPTSPVISNMIYAPLDSQLQRLAKRHKCIYTRYADDITFSTSKSKFPSSLAFYSVGDEKWLLGKELLEVVEGNGFSVNEKKTRLATKYQHQEVTGITVNQDLNVKRDYVREIRSMLYVWRTHGLEKAEATFLEKFDKKHRLNSITPSFRSVVKGKIEFLGSVKGKSDPIYLKFTDELRVLAPELVSIDKLLNSPIVRAQIMTEGKTDIYHLRAAFSNLQKKGLFLSLAIDFVDLPPEKQGDSNLEKHCESLCIVTPQFPVIAIFDRDNSAILKKVHDDSKGFKSWGNGVYSFALPVPSHRHEDPEVCIELYYSNEEVTRLNLQDRRLFLNSEFSKKSYRHSENKILSTTKFNEVKNNSLKIIDSEVHDDADNNVALSKNDFAKCILNSNPGFDNFDFSEFSAIFEVIEKILQRHNLDSAV

SEQ ID NO: 665 - protein, 612 aa, unidentified
  source 1..612: note = Related to CP000806.1; note = Crocosphaera subtropica
MGNKLEYNAKYLAFLFLLTDMGTTSLDLPQEELKKHFEQLKTRQDVARLLQVSDYQLRYHLYIHPRDKAYTTFKIPKKSGGHRLITTPQTSLKIIQHKLNQVLSSVYQVKPSVHGFAIQKSIVTNAKIHLKQRYILNLEDQDFFPSINFGRVRGLFIAKPYNCTQEVATILAQICCYNNQLPQGAPTSPIISNMICARLDSQLQKLAKKYRCIYTRYADDITFSTSRFKFPHRLAYFSQDSETFVLADELITVIKDNGFSVNLSKLRLQNRYQRQEVTGIIVNEKLNVKRKYIRQVRAILHAWKKYGLENAEAEFYKGFNENNNNMKSRDCFRKMVQGKINFIGLVRGDTDHIYLKFLKQLKVLVPDLADDSKINFITSKLSEIKSSNNLHKAIIWTEGKTDIKHLKVAWKWLINKKIVDYFDLDYKDDLEPDKQGSSQLFDVCKQFCKEKRNIPLIAIFDRDEPNIIKKIHDDSQGFKDWDNGVYSFALPIPKHRQDVKEICIEHYYQDSEIKRTDKKNKRLFLSNEFHRESGRHLSKPQLTTTDNKFKSNQLKIIDGKVFDSDNNNVALPKDDFATYIYDKEEGFNDFDFTAFKEVFEIIEKILNRHYSQ

SEQ ID NO: 666 - protein, 581 aa, unidentified
  source 1..581: note = Related to SLTK01000007.1; note = Chloroflexi bacterium
MSTELFASNEVLIAAFFQLKTRHDIAKLLEVTELQLNYYLYIVPRDKRYKRFEIPKKHGGSREIYAPATALKIIQQKLNQVLQSVYKVKPSAHGFVQKKSILSNAIPHVSKRYVLNLDLKDFFPSINFGRVRGLFMAPPYLRNNEVATTLAQICCFNGYLPQGAPTSPIVSNMICSKLDSQLQKLAKKHRSTYTRYADDITFSTSRPKFPSGLAYFLEETGKLEIGDELKALILENGFEINERKNRLQPYSKRQEVTGLTVNVFPNVRRDYVREIRGMLHAWQRYGYDAAEMTYREKYAGKHPESKREQISFKRVVQGKLNFLKMVKGENNRVYVNLAKWFWQLAPEFAQSEVLTPLHLPKPIIFTEGKTDWKHLKVAFTSLKKMGMFTELDVQFHEFGDDVQMGHGELLKMCKAYCKRENRQPNIFIFDRDVPAVVNEVMEKDKDYKNWDNNVFSLAVPIPAHRTNTTDVCIELYYQDKDIKRKDGDGRRLYLSDEFDSNNNSHKQQNDVYTLSNKTRRLVGVTIVDSQVFNFITKESVALSKDSFAELIANDDPNFHNVDFSEFGKIFDVIVTILREHQ

SEQ ID NO: 667 - protein, 576 aa, unidentified
  source 1..576: note = Related to JACPVE010000065.1; note = Chloroflexi bacterium
MSTELSASKDELRATFFQLQTRQEIAEMLDIPEKQLNYYLYILPEHRRYKRFEISKKRGGNREIFAPATALKVIQQKLNQVLQSVYEVKPSAHGFVPEKSIVSNAQPHARKRYVLNLDLKDFFPSINFGRVRGLFMGYPYHRNHEVATTLAQICCFKSYLPQGAPTSPIVSNMLCAKLDAQLQRLAKKYRSTYTRYADDITFSTSRPNFPSALAYFSDDTGKIEIGDELKSIIQENGFKIHERKSRLQPNSRRQEVTGLTVNVFPNVKRDFVREIRGMLNAWGKYGYEAAEQIYRQKYAGKHPENEREHLSFKRVVQGKLNFLKMVKGENNRVYLNLIKWFWKLAPELAKPEVIAPLPLVKPMVYTEGKTDWKHLKTAFYALKKMGLFEQLDIQFLEYGDETPMGDSELLKTCQGGSKMLHETPQIFIFDRDKPDVVKHVTDTDKPYKVWGNNVFSLAIPIPAHRVDINDVCIEFYYQDKDIRRSDENGRRLYLSDEFDSKNGKHNSLNVYTRSEKIRKITIIDSQVFDFAGASVALSKDMFAELIANGNPQFQNVDFSEFGKIFDVIVAILRENS

SEQ ID NO: 668 - protein, 582 aa, unidentified
  source 1..582: note = Related to JACNJY010000485.1; note = Chloroflexi bacterium
MTLVLSAKPENLRKGFLSLQSAKDIAGLLEIDLQLLYYHLYIRPESSRYTSFEIPKRSGGSRSILAPISALKIIQRKLNQVLLSVYSVKPPVHSFVLGKSIVTNASVHVKRNYVLNVDLLDFFPSINFGRVRGLFMGKPYCLNPKVATILAQICCFKGNLPQGAPTSPIVSNMICARMDSHLTQLAKKNRSDYTRYADDITFSTNKGVFPSDFAVINELEQLELGKELVRIISDNGFQINHTKTRLRSRKQRQEVTGVTVNKFTNVRRSYLRSIRAMLHAWEKYDLEKAQEKFWHDYDKGKYRSPYKSKPSFKRVVRGKIEYLGMIRGKDDPLYQRLLGQLRVLAPELAKKAKKIQPVYLQGSQAIVYTEGKTDILILETAWKKLYPDKLIPFILKPCDFNPADKAHGTGGASFLSNFIKYVSPDSPNVIIGIFDRDHDGIRAYEGIGESFPEKKGLGSKLAKHGKAGAILLPIPKGKEKYAKYKNLCIEFYFSEKTLNRKNEGGKGLDFQFGTEAIHVAGKPASGSKPSAIRETRTIIRGKDVFSNDIVPQLPTSAFRNFKLLFDVIIATLEKCKTKVASH

SEQ ID NO: 669 - protein, 522 aa, unidentified
  source 1..522: note = Related to QMXJ01000455.1; note = Candidatus Bathyarchaeota archaeon
MYKIELSANPEKLKARFLALKKPEDIAELLEVSYKDFVYWIYRTPEKYRYVSFTIPKKHGTPRYIDAPNNNIKILQQKLNYILQIVFSPKYCVHGFTNGRSVVTNARKHVGRRYVLNIDLKDFFPSIHFGRVRGMFMGKPYNLPSKVATFLAHLCCYKKVLPQGAPTSPVISNMICAKMDSELQRLAASNRCSYTRYADDISFSTSKHSFPSALATINDLGQVEVGKELVRIITENGFQIHPEKIWLRRKDRRQEVTGIIVNERTNLPRKFTNNIRAMLHAWEKYGLESAQKHFEEKFDKKHRAPWKKKPRFQDVLKGKIEYLGMVKGKESSTYLRFLDQLGRLAPKLTGGRGTPQDLLFRRYQALLKSDDPQGRGYLLQSLLHDVFTFLNVTIEKSFTRNRNGEQIDGAFIFEGWHYIVECRWREKVSDIRQVDGLLGQVLRSGKQTMGVFFSINGWSQNVPTLLKQNPSKSIILMHGDDFHALLSQKISLDKLLKGKISELNLKSEPFISAEEIIKKDDT

SEQ ID NO: 670 - protein, 483 aa, unidentified
  source 1..483: note = Related to JACPTZ010000059.1; note = Planctomycetes bacterium
MSLWLADPPHVLKARFHALLRPFDIAALLDVPFGDFFYWTYRVPPSRRYTTFYIEKHSGAPRRIDAPELNIKILQQKLNQVLRAVYVPKRCVHGFVPGRSVLTNAQAHAGRRHVFNIDLRDFFPSINFGRVRGMFMGKPYRLPPKVATVLANLCCFDRRLPQGAPTSPVVSNMICARMDSQILGLAYRHRCTYTRYADDMTFSTSRRPFPAEMATLNDLGQVAVGAELRGIIEGNGFRVHPEKIWLRGRDRRQEVTGLTVNVEPNVRRRYVNQIRAMLHAAGKYGLPSAQSEREQRYDHKHRAPWNDPPSFERALQGKIEYLGMVRGHACPKYLKMLDDLGRLAPHLFIIRGTPRERLLRRYRALLTSPNHQARGYQLQALFEEGARPGRAGRGGISATPDRGGICPGTPSLRGRTLAPRFPASHPTTARGSEGHVQAPYESHPRPRIQPRHGPVDEQVERHEKRAVHRHPARDEIVVPVHHS

SEQ ID NO: 671 - protein, 511 aa, unidentified
  source 1..511: note = Related to JAEUJA010000134.1; note = Phycisphaerae bacterium
MSDGPPSKPLPLPLSPTLAKSDADIKAAFRVLQSVTDVADLLEVRETQLTYAIWRTPEEKRYSTWSIRKRSGGTRTIDAPRKTHKILQRKLAYVLSLVAQRRSVAHGFSPGKSIVTNAAAHARCRWVFNADLKEFFPTINFGRVRGMLMGKPYRVGERAATAIAQLCCHKRLLPQGAPTSPVISNMVCARLDGELRRLAEHYGCNYTRYADDITFSTNKKTFPEELATLIGEGTKAAVGSALSRVIESNGFQVNPDKVRLQGKRTRQEVTGLVVNRRPNVRRAFVRQIRAMLHAWERYGYDAAQKEFLDKYDSKHRPDGASGRTYERVIRGKLAFLKQVRGKDDNRYLAMRRRLRRLLGEVDAGVGRGVEMEYDVFICHASEEKTTVVVPLAKALNDAGIRVWLDEEKIGWGDSVTKEINDGLAKSKFVVVVLSAAFMKKKWPAKEMNAVLNKEIASDITCALPLIVGDSSDKKIILETYPLLADKHYKEWSPSDIGTIVGALKAMLSRYA

SEQ ID NO: 672 - protein, 544 aa, unidentified
  source 1..544: note = Related to NZ_JALCZB010000001.1; note = Anaeromyxobacter sp.
MQVRLSQSSADELRRRFFACRTARDVARLLEVPYSVLHYHACKSPVSIRYETFTVPKSTGGSRQILAPATALKLLQRKLNVVLQAVYRPRPSAHGFLPARSILTNARCHSGRSYVLNVDLEDFFGSINFGRVRGMFMARPYNLGEGAATVIAQLCCHLNRLPQGAPTSPIVANMICARLDGELQRLAIRHRCTYTRYADDLSFSCHSHTFPEALATYSPGTGTSARVGPELSRVVHQNGFRPNPSKVRLQRPSERQEVTGLIVNRDPNVHRTFVRQVRAMLHAWRKFGLEAAEAEFIAKYGWRHRAPERATPRFRRVVKGKLDFLRMIRGRYDPLYRKLLREYCTLSDEHFEEAPTAPTVEALIARAVWVLECDICLRQGTAFYLRGNGLVSCDHVVCDHIRAFRPDAPGTKFNIDIVGRHSVVDLAVLRLRDADFSDDGLRAGTASALQTGDELTVWGFPNFRLGDTVQVHPGRVAGFRQVSGIRRILVSAPIVRGASGGPVLNRRNEVIGVAVTGAETMETAHETEDHGVLPINALEHVPLR

SEQ ID NO: 673 - protein, 537 aa, unidentified
  source 1..537: note = Related to JAIPEW010000016.1; note = Clostridiales bacterium
MEIKLRADDSTLIEKFIALQSRKEVADLLEIDVKTLIYFLYRRKDKDNYKIFYLRKRSGKERTICAPINSLKIIQRKLNYILSLIYKPKPSAHGFIVERSILTNAQAHLKNNNMLNVDILDFFPNINFGRVRGMFMANPYNIPPEPATVLAQICSCNNQLPQGAPTSPIISNMICAQLDSQLQKLAKKHSCTYTRYGDDLSFSTWQYKFPKELGYKTKTGEVIVGISLEKIIRQNGFKHNKDKVTLKSRKSRLSVTGLIVNEIPNVPRKFVRQIRAMLHSWEKDGLIKAEQIHLNKYRYKQKNPKAFQPKFSNIVRGKINYIRMIKGEENPVYQKLASKFNDLNGGGFPKYYHNLREELEAAVWIIEGEGGTNQGTGFMLEGFGMITCAHVLTKSMEAFRCNDYGNKFPVEIISYDNENDVAVLKIKGNENYHYLRVGDSDEIDVGSEIKLSGFPNYNIGDSIYIDDGKVTLCRKSLGRTRYLISARIVKGNSGGPVLNKNNEVIGIAAKGAPCFEDKNMDEKFEVIPITIINPEPL

SEQ ID NO: 674 - protein, 551 aa, unidentified
  source 1..551: note = Related to JADHXR010000104.1; note = Phycisphaerae bacterium
MRNRLDIQLRKNIDEAVGEFQSLSSPHDVAALLEIPYKVLNFHLYVAHPTRRYKTFTVHKKSGGVREICAPVTAIKIIQQKLNYILQNLYKTIYKKKFSVHGFIYGKSVRTNAQSHTRKDYVFNIDLLDFFPSINFGRVRGMFMANPYRLPPKVATVLAQICCFNNQLPQGAPTSPIISNMICARMDDELYRLAKRFDCKYTRYVDDMTFSTNRPNFPAELANVTRLESGWRLKADVGKELNKIIEENKFSVNTSKVWIQHRNCRQKVTGLIVNEFPNVSRKYTNQIRAMLHDWDKHGLIAAENRFVNDYDKKKRWPYEPGILFKNVVKGKINFLKMVRGDRNPTYQKFSEKLASLDPDFSFIRIVREADSDNLQQAVFVLESPRGQGTAFMLRGIGLVTSAHNLKNDKLDTYLYKTDEPADKQRLKVKHINTNLDFAIIEVAQGWAKASLVRGDSTILKTRDTVKVIGFPNYAKGKSIHIHDGKITGRGRWFKVKTLNVSARIIYGNSGGPVLNDKNEVVGIAFYGAPDPEKADRIESGVIPIEILDKLM

SEQ ID NO: 675 - protein, 580 aa, unidentified
  source 1..580: note = Related to NZ_NCQY01000020.1; note = Salinibacter altiplanensis
MSISLDASEEELQNDFHNLEDLEDVADLLDVESSNLIYHIRESPEEGRYKTFTLDKSGGGEREISAPVSALKIIQQKLNQILQAVYTPKAAVHSFLPDRNIRTNAEQHVKQRFVFCVDLKDFFHEINYGRVWGLLQAVPYELPEDVATVLAQICCHNNRLPQGAPTSPIVSNMLCAQLDSELLRLAESNKCIYTRYADDLTFSTSMRQFPDELATGGEDGNVKVGKELREVVDKNGFELNEDKTRLQHEDYRQMVTGLIVNEKVNVPREFVREIRAMLHAWKAHGYEAAEEEFLREYDTKNRKSEKEEPVFSRVIRGKLEFLSMVRGKDDKIYKKYLTEYSRLSNTPINIDNQEEPENDTSKLIVYTEGKTDWKHLKRAIRELAVNQSSELPDLEFNETESDRGDDELLEKCRHTSESEGQHQHAHVFLFDRDQPNQVQEVTEDDQSFRSWGNNVFSAAIPPPPHREDVNISIELYYEDDDLLKRDGNSRRIFLGQEFHKTSGKHKEEAKINCSLLNKTGDENRIIDDRVFNEENENISLSKNDFAEYILNEEPPFDDINFKPFARIFDLLSEIEERVDS

SEQ ID NO: 676 - protein, 529 aa, unidentified
  source 1..529: note = Related to JAGQYO010000133.1; note = Flavobacteriales bacterium
MITELTAPDIVLTDKFFALASPEDVADLLELKSYAFLQHLIFILPSSKRYKEFVIPKRRGGKRYLLEPSPNLKIVQKKLSYVLQLVYKPKRSVHGYVNGRSIVTNAIQHVGRRYLLNIDLEDFFPSIHFGRVRGMFMSYPYNFNGRVATTLAQICSLRNCLPQGAPTSPIISNMVCAKLDSELQKLAKQHRCYYTRYADDLTFSTSIKQFPTALAVSIVEGKRLRVEAGNELSEVINRNGFTINVKKIRLQKHSQRQEVTNLTTNEFVNVNRKFIRQIRAMLHAWRKFGYVAAEIEFRNEYNKKPPNKPYKKQPSFKNVIKGKIEFVQMVRGKNDRIFIMLNNQAAQLERIQNIEPYQFQILEDEDHEIVSLIASGETEWVEFKEGACLDPHTGENNKKNMSHKILRAVASLINSKVEGRVLIGIKDNGAITGVEREYALADPSKVNWDGYELYLTNFLNDSLSIENAHNFFKISRHAINDKIVCCISTRMADKPVLVHEKLYIRSGNQSKEIKGTEKVDFILKWATSS

SEQ ID NO: 677 - protein, 481 aa, unidentified
  source 1..481: note = Related to JADJXK010000002.1; note = Anaerolineaceae bacterium
MTIKLTSTDTVLTDKFFALTSPEDVADLLELKSYSFLEYLIFILPSSKRYREFIIPKRRGGKRYLLEPIPNLKIVQKKLSYVLQLIYKPKHAVHGYVNGKSIVTNATQHIGRRYLLNIDLEDFFPSIHFGRVRGMFMSYPYNFNGRVATTLAQICSLRNCLPQGAPTSPIISNMICAKMDSELQKLAKQHRCYYTRYADDLTFSTSIKQFPPAMVVTLVESKRLRVEVGIELSEIINRNGFNVNMSKIRLQKDSQRQEVTNLTTNEFVNVNRKYIRQIRAMLHAWRKFGYVAAENEYRNVYNKKPPDKPYKNAPSLKRVIKGKIDFVKMVRGQEDKLFIKLNNQAAQLERAERIEPYFFDILQEPDHELMTVIANGETDLVEFKEGACVNPHTGKDDKRNMSSKILRAVASLMNSKSNGVVLIGVADNGAISGVEREYSVANPAKANWDGYELYLNNLLNDSLSVENAYKYFNISSLTMLN

SEQ ID NO: 678 - protein, 525 aa, unidentified
  source 1..525: note = Related to JAGRDB010001140.1; note = Anaerolineales bacterium
MAIYLESTPEIIEGRFRDLATPEGIAELLELSSLAFLKYCLYTLPQARRYRTFTIPKRSGGERIILEPEPNLKIIQQKLLQVLTLVYQPKRAVHGFVDERSIVTNASPHINRRAILNVDLLDFFPSIHFGRVRGMFMAFPFHFNDKVATILAQICSLPHCLPQGAPTSPIIANLICAKMDSQLTQLARTHHCYYTRYADDLTFSTSLAHFPKSLATIISEEGERTVEIREELARIIHKNGFRINPKKVRLQTRDHQMEVTGLVVNRKVNVKRSYIRHVRAILHAWQQYGYQAAADEYFAKYFGKAPDKPYKTLPGIRQVIKGKLSFIAMVRGQEDHLYIRYNNQAAQLERRDLPEPHIFRILAEPDNAIVRLVAEGESVCIEFKVGACLNPHTNKQDKKMKDKIVRAVASMINSLPVGHLLIGVKDNGEIIGVEREFPVADSSKQNRDGYELYLANILNDSLQVNNAQQLFTITFHNVGSHTVCQVQTTKSMQPVLVNNQLFIRSQAQTRELSGQEMVEYIQQYS

SEQ ID NO: 679 - protein, 584 aa, unidentified
  source 1..584: note = Related to CP000876.1; note = Herpetosiphon aurantiacus
MSLHLSSDPDTLRQQFFQLKSRDDLLNLLDISQQQLLYYLYICPENKRYRHLRLRKKRGGYRTIYAPATHLKIVQQKLSSILQLIYEQKPAVHGFVPHKSIVSNAAMHLNKTYVLNLDLQDFFPSINFGRVRGLFMNQPYYLNEEVATILAQICCHRNTLPQGAPTSPVISNMICAKLDRELLRFAQANRCVYTRYADDLTFSTNTRQPPSKLVRRTEATASIELGRDLVSIITANGFQVHPEKSRLQVKGRRQEVTGLTVNHFPNVPRRLIRQIRAMLHAWRKFGLDAAQQHYYAHYCHRQYPVFKPRPPFRQVLIGKIAFVGMVRGKHDQLYLRLRDQLLNLDPTYRAAVEKKAEETFILSTPLIKTEGKTDWKHIKHALRVLQAQGLYAGLSLDFDESLTEGGSSELKKTCYYLSRVKQAQIIIALFDRDEPNIIREVADGDRFKAWGNQVFSFVLPIPDHRTHTPDICIEFLYPDNNLLLVDEHGRRLYLSSEFHETSGRHKENPAISCLLSSKFKKDAKLSIIDASVFDANHRSIALAKDAFADYILHDQVPFNRMNLDGFKPIFDMIIAILRAETNKT

SEQ ID NO: 680 - protein, 562 aa, unidentified
  source 1..562: note = Related to JACPQA010000272.1; note = Chloroflexi bacterium
MLSAALAISRIGGQVSLRIHPVPTSTQTRHLTASDDDFRQSFASLIDRDDVVRLLEVTDSTLIYLLYRPRPRYTTFTVPKRGGGIRKIMAPVGSLKIVQQKLNQVLNAVYRVRPSVHGFAIDRNVKTNALPHVGKRWVLNIDLLDFFPSITFPRVRGMFMGRPYAIPERAATVLAQICCKDSLPQGAPTSPVVSNMICGKMDSELRRLATHYRCVYTRYADDMTFSCNSKEFPADLATTYLDGEMRPIVTVGDVLVKAIQANHFSINNSKSTLRGHGTRLAVTNVTVNEFPNVPRTYIRQARSMLHAWRKYGVESADDSYRASRGLRPADDRSRGQVFRRVVLGKLEYVRMMKGDTDPVYINLKNRLADADPRYPRVPTIVTEQQLGAALWVVVSQRGEEIRQGTAFMLQGFGLVTCDHVILDRTEVYQISDPTNAFDATPVKRNGHIDLAILSIDQKPEAQFTGAGRAAILGEDVTLIGFPNLGPGDTERTERGHVTGLRTRFGVKHILISPTIYSGHSGSPVLDAELRVIGIAQRGIDYRNDDPDAIEPSAIAIDEVNKL

SEQ ID NO: 681 - protein, 564 aa, unidentified
  source 1..564: note = Related to JAHBWB010000001.1; note = Labilithrix sp.
MAKAYSRELKDPPSVLASRFASLRDYRDVAALLEVDAPTLGFLLYRSPPSVRYHTYDVPKRRGGSRTISAPMASLKFVQRKLNQVLQAVYSVKPSVHGFVDEKSIISNADCHDRRRFVLNVDLENFFGVINFGRVRGMFMGKPYRLPERAATVLAQICCFNNQLPQGAPTSPVVSNMICGQLDAQLQRLARDHKLTYSRYADDLTFSGTNHVPSELGADRRAPKTFDVGPRLTAVISANGFAINRKKVRLATAAERQEVTGLVVNRKVNVPRKYIRQVRAMLHAWRKFGLAAAEAEFFARYDKKHRPVSKRPTFRRVVRGRLEFIGMVRGKDDPLFQNLLAQYDACVAPSGRSTPRAPNDVIRGALWVVEEDHSEMYQGTAFAVSADSLPEHLRVAVRAAGVEWTLITCDHCLLSGMKAYHPANSGAFFPVEVVARDNTLDLAVLAVRTASLGTLPLDLSATMTDGMSLRVAGFPNYGPGMTAPIYSGTVVGTRAWHGRQLPILDATIVAGMSGGPALNNSGAVIGVAVTGAIDHASAKATEKHGAVPIAALSELQALPKPEPL

SEQ ID NO: 682 - protein, 506 aa, unidentified
  source 1..506: note = Related to JAIOHN010000449.1; note = Anaerolineae bacterium
MSTELHSNPEVLREQFYGLEHPKDIAKMLEISYLTLNYYLYRLPENKHYTIIEIPKRSGGKRSLRVPISPLKILQSKLYEVLLCIYQPRASVHGFARGQSILTNAEAHLQRKNRTFILNIDIEDFFPSINFGRVRGMFMARPYNRSEKVATVLAQICCVDNQLPQGSPTSPIIANMICAKLDSQLQRLAKEHRCFYTRYADDITFSTSLSSFPRALAKVEHNTSGNPLIPGSKLNEIVEKNGFTINPDKVRLQSSDRRQEITGLTVNKLPNVPRKFLNQVRAMLHDWEKNGYGRAQENHFQNWRKGYSSPYSSPTSFAAIVRGKIEYIGMIRGTQNRTYRKLLKKLSELDPTFKKSGLVDMREQIFISYSHKDKKWLEELKRHLTVLEHNHKLVVWDDTKIEAGSKWRQEIEKALNSAKAAILLVSDNFLVSDFIREHELPPLLQAAEKEGLKILWIPVTSTMYEYTEIVEYQCLTEPSRPLNSLKKSERNRELVEICRKIAELAS

SEQ ID NO: 683 - protein, 513 aa, unidentified
  source 1..513: note = Related to JAFGJA010000607.1; note = Anaerolineae bacterium
MDIELSASPEDLQKRFFALQTSEDIAELLEIPYDYLIYYLYRVPFEHQYTTFFIPKKSGGTRKITAPISPLKIIQRKLNQVLQAVYIPKPSVHGFVPGRSIVTNAEAHMYKRIQKKKSQKVEKPRNYILNIDLEDFFPSINFGRVRGMFMAVPYKCPERVATVLAQICCAYNELPQGAPTSPIVSNMLCSKLDSQLQRLAQKYRCHYTRYADDITFSTSLLSFPRALATTEYSSQSGYQVVVGPELNVIVEENGFRINRQKVRLQTPDRRQEITGLTVNEFPNVRRQYINQIRAMLYAWKKFGHDNAEERYRELHDNQEYQCPDKLLPSFRSIVRGKIEFLGMVRGKQDRTYLRFLEKLAEVDPEFRANWEMNKIKKGGTNKQVFISYSRKDEDFARKLVNALSNRNIGAWLDVNEISPGENWVNVIQNGLVVCELMLVIISPDSMSSSQVAEEWQYFLSQSKPVIPLLYKNTNTIPYKLDTKQRIDFQEHYEFDSAMDILLRALNRENIASN

SEQ ID NO: 684 - protein, 554 aa, unidentified
  source 1..554: note = Related to JACDEG010000211.1; note = Pyrinomonadaceae bacterium
MTDVEHREDTGARFSALKDARDVASLLDVSYEYLRHHLYRAPAGERYTLFTIRKKSGGVREIMAPRRPLKLLQHRLAKVLECVYEPKSSTHGFTRKRNVLTNAHIHARRKHVLNIDLLDFFPSINFGRVRGMFMANPYRCPPEVATVLAQICSHNNQLPQGAPTSPVISNMLCARMDRHLQEVAKQYRCAYTRYADDLTFSTYLDEFPPELASMQTEHGVDRCVPGRTLVNIVTKRNGFRINESKVRLQNNKQRQEVTGLTTNKFPNVQRAYVRVVRAMLHNWKKHGLEAAQRQYLSKYNKQHRPPESVQPLFRYMVKGKIEYLGMVRGKDDAIYQRFLKRLRELAPDLVKASSVDDPYAKILDRLWVLETEEIGKCSQGTAFYIQDYGFVTCAHVLGESELAIITAHTRHDASQKYRVKVTAKDDQIDLARLEVIGVTPQVGLKVGASESLQIGDAIKLAGFPNHHIDDTGIVASGTVIGRRNAPVTREPRILISANIIAGNSGGPVLDSNNRVIGVAVRGGANEEESRNTEFHGVVPIEALGRLVVAGVGGN

SEQ ID NO: 685 - protein, 553 aa, unidentified
  source 1..553: note = Related to JACMJZ010000029.1; note = Pyrinomonadaceae bacterium
MTASPQREEIRTQFTSLRSRSDVASLLGVTDRALRYRLYGLPIPSQYVVFEIRKKSGGLRSIAAPIPPLKILQRRLRKILECVYEPKDVVHGFTVERSIKTNATRHEKSKHVLNVDISEFFLSINLGRVRGMFMAAPYKCEKEVATVLAQIACLEGKLPQGAPTSPIISNMLCARLDAHMNRLAGSFKCTYSRYADDLTLSTLQTKFPREVAELRIVDGQPKCFAGPKLIRVLTRRNGFKINLSKIRLANRSQRQEVTGLVVNEKVNVPRLFVREIRAMLHNLHKKGVEKCQQDYETNYARHRRPSSPVPPFLWVLRGKVSYVGMIRGENDELYRKLLKRLDELAPGLVKVPVIKDELDSIFEHLWAIQVETEAGDGGQGTAFMLRGVGLVTASHVLGTKKILGIKMQSSDGRVEREATVFRRDGLLDLAILESPDLDPSRGLEASTLKSTRKMAVTLLGFPNHNTGDPGHFDQGIVTSMRRSPLSEDQMFLISCPIIHGHSGGPILDSSSKVLGVAVRGAISRKEAALTEFHAGMPIAAIEKLTNEMAEPEK

SEQ ID NO: 686 - protein, 544 aa, unidentified
  source 1..544: note = Related to MSXN01000018.1; note = Nitrospira sp.
MPYHLTKSLDLLREEFKKLNSPQAVAALLEVDYKRLIYHLHKVPPSKRYTVFTIPKKSGAARQITAPISPLKILQKKLSFILSSVVDSKHSVHGFVRGRSIRTNSRVHAGKKYVFTIDLENFFPSINFGRVRGLFMAPPFKFNAETATILAQICTFENSLPQGAPTSPVVSNILCRKMDQQLSRLARNYKCDYTRYADDITFSTAKETFPKSIAFTLPDSKEPHCGDELSRIISDSGFTINAKKVRLIERCRQQKVTGLVSNEFPNVDRRFIRQIRAMLHAAQKFGFTAAEKDFHARYYNKLLKPGGKKPSFKKVLKGKIDFVGMVRGKLDRLYLKLIRKLQLLDETLVRAVPSEAWINEIKAALFVIDVHKPAEKPGVPTIEQGTGFLLKGIGLVTCAHVINERIGKLEVYQGADPSKLYDVDVSIEDLDADIAVLTIHGFTGPQLLQGDDGIVREDTEVILAGYPGYARGHSGTIGRGRVVGTNLHFDKKRMLIDAVIFPGNSGGPVLNNERRVIGIAAKGDGGQNSIVPISAIKEAMIRSR

SEQ ID NO: 687 - protein, 585 aa, unidentified
  source 1..585: note = Related to WYDU01000005.1; note = Chloroflexi bacterium AL-N5
MSISLSLLNEELKERLFNLQSRKDLADLLEIDEKQLIYHLYIIPPDQKYKKFIISKGHGSVRRIDAPISALKIIQRKLLKVLTCVYRVKKPVHGFVYGRSILSNAKTHRRRRYVLNLDLQDFFPSINFGRVRGMFMARPYHLNSAVATVLAQICCFNNQLPQGAPTSPIVSNMVCAKLDDELQRLSGKYRCMYTRYADDITISTNLPAFPSNIATLSDKTGQPELGVELQRIIDENGFVVHKDKTRLQIKSQRQQVTGLTVNRKVNVRRSFINQVRAMLHAWDKYGLEAAQEEFINKYDMRSRSPYKNKNGVSFARVVKGKIDYLGMIRGQDDTIYLKYYAQYCRLAGIPNRRALTYPVDETLLPLIVTEGKTDWKHLKIALSKLQSEGIFQNLNISFHEYEDNMEAGDNRIIQMCRDRALLPNNVITIFIFDRDNKEVIKKVTENGQEYKTWNNNVFSFAIPVPNHRTETPDVCIELYYRNEEITREDGNKRRLYLSREFNPESARNHDGSLNCTDMNKIRDQRKVNVIDSNIYNSSKENVALPKSDFADYILHQEENFNDFDYTEFKAIFEIIQRIIQENPIT

SEQ ID NO: 688 - protein, 477 aa, unidentified
  source 1..477: note = Related to JAFGRA010000087.1; note = Anaerolineales bacterium
MGKLLSRSNSQIIERFDALETPKDIADLLEVDYQHFDSILFKTARATLYRECLIPKKNGEFRQINVPAVQLKNIQRRLHEALQVIHKSKLPSHGFERERSIVTNAEAHVKQKFVLNLDLKDFFPSINAGRVWGMFQTVPFNCNEKVASILANICTFKNELPQGAPTSPIVSNMLCRKLDSELQKLAKKYNATYTRYADDITISFSYGEIPKNIATTNELGQLELGNEIKNVIKNNGFRINYDKFRLQSKNMRQEVTGLTVNEFVNVNRKYVRQIRAMLHAWDKYGYEKAEEEFRREYDNKYRPHWKSNPSFKKVVKGKIDFLGMVRGKDDKVYIKYREKLRELAPDIISEPPPPPESESPQSMVPIIRTEGKTDWKHLKAALRWLIDRGEISDLQIEFDEFEETLGEPLLLQDCEALCRHKQPRPIIAIFDRDTKNVNKFHNEKKGYKDWGNNVFSFAIPVPAHRKNTPKVCIELYY

SEQ ID NO: 689 - protein, 580 aa, unidentified
  source 1..580: note = Related to JACSRT010000201.1; note = Ignavibacteria bacterium
MKNLLQYSPEILKNKFHSLTTHFDLCDLLEIKYKDLIYYLYRIDPDVQYKTFYIPKKNGSFREINSPISTIKIIQKKLAQILNAVYLPKEPAHGFIIEKSILSNARLHVRRKYVLNLDLENFFPTINFGRIRGMFLKKPYNFDPKTATIIAQICCYKGFLPQGAPTSPILSNMICSKLDSNLSFLASKNKCIYTRYADDLSFSTSLTNFPKAIAKPNPTGLVELGEELKKIIRDNGFEVNSDKIRLQYKQQRQEVTGLVVNEFPNVKRKFVRQIRAMLHAWEKFGYDSANYEYSTVYNNKTRFASSSVDFAKVVAGKIEFLGFIKGKDNQIYQSFLNKLIALDPEKFKYLEKFVISSTNYVNPLVFTEGKTDLKHLRAALNHFQKNGEFTEIKLEFDEEEKEMGDEELLKLCKNYVKMTGNAKPIIFIFDRDNEKIISQVDNKGSYKIWGNNVYSFSIPIPDHRTDLTYSPIEFYYKNEDLKICDVKSRRLFLSDEFDKNSGRHLFEKELSCNNLKKIKDSKLNIIDNSVFNSESVNVSLSKNDFAENILLGIGKFADVDFASFKKIFDLILQIIKIQDN

SEQ ID NO: 690 - protein, 488 aa, unidentified
  source 1..488: note = Related to CP058566.2; note = Dehalogenimonas sp.
MSHKLNSPPQDLAKSFSALKDGRDVAKLLEVEYAHLVYHLYKIPQEARYSQFKVKKRGTNEFRTISIPNGSLKIIQTKLVQVLEAVYFPRIAVHGFIKGKSILSNARIHANQKWVFNADLEGFFPSINFGRVRGLFIAKPYVLPDNVATVLAQICCYNNELPQGAPTSPILSNMVCAKLDSELRILAQHSRCNYTRYADDLTFSTSSPKFPPQIASIDGDSQNTIIELGEQLRTIIGNNGFCVNAQKTRLQTKTHRQEVTGLVTNQFPNVSRQFIRQVRAMLHAWEKFGLEKAQTEYLMLYRDQQRNPLKNDPKYRNVSLKDVILGKIGFIGSIRGKTDFIYIKLLNKVISLSPELAKQKDKISALMSSGPAPLIRVTTEGPTDWMHIETAFNNLQSKGLFAGLAFDLVRYEHDMGHSRLLSICEAYATLPIPGGLSHVFIFDRDEPQIVNKVNEHGDVRKWPNNVYSFSIPIPTHRTKTPEICIELN

SEQ ID NO: 691 - protein, 544 aa, unidentified
  source 1..544: note = Related to JAGQGA010000179.1; note = Anaerolineales bacterium
MPEAQRYTTFKLAKASGGFRIISVPNHSLKILQQKLNHILQMVYQPKASVHGFLQGKSILTNAERHVKRKYVLNLDIEAFFPSINFGRVRGMFIAAPYNLPENVATVLAQICCYQNQLPQGAPTSPIISNMICSRMDVALKRLAQTYKCTYTRYADDITFSTSKPQFPPQIASIFNKQETSVIVLGTELNHVIESNGFEVNSSKVRLQTKNHRQEVTGVTVNRFPNVKRAYIREIRAMLHSWRENGFTEAEQIFREKYDSKQENRNPNLPIPSFAKVLRGKIEFLGAVRGKNDHIYLRYLNELSSLAPPGTIKLPKSVGKSNIIKLKPTVYVEGKTDKKILSIAWAKLFESRPIPFNIEDSNLSQTDQGGGLGGAEILKQFISVVREDHLHLAIAMFDHDQEGIKCYNSLPKYFDQVSELEAKISRHGKAAAFLLPASDQKSEYIKYENFVIEYLFSDAALAKTTEDAQGLIFQQASIEQRIVGSGKSFRLSSTPSSIPETRTIKEGKVVFAERIVPHLDKSEFTEFRFVFAKIQQIITYMASL

SEQ ID NO: 692 - protein, 564 aa, unidentified
  source 1..564: note = Related to JAGOBP010000036.1; note = Thermoflexales bacterium
MNNLSPVLSASAEELRKKFQELQTREDVANLLEIDESRLNYYLYIIPEPHRYTTFQIPKKSGKFRTISVPATALKILQRKLNQVLLAVYQPKAAVHGFVLGKSIVTNAQMHLRQKFVLNIDLKDFFPSINFGRVRGMFVAPPYKLPPMVATILAQICCWNNQLPQGAPTSPIVSNLICAKMDSQLLRLAEKHRCVYTRYADDITFSTSTSQFPIAIARKSEVTNQVEVGGDLGRVINENGFEINSDKIRLQTRQQRQEVTGLIANGKTPNKTPNVQRRYLKQIRAMLHAWEKFGLDNAEKDFLEKHDGHYRHPNLNEPSFKKVVCGKIEFLGMVRGKDDVTYHRFRDKLWSLAPELARFDPEIESTNIPTSVLIITEGQTDWKHLKAALQQLKEAGDFSDLNIEFREYDDSIQMGDGELVKLCIQMAKIPQSKITICLFDSDAPSTLKPLALSDAMYKHMGGNVFAMVLPTPNHRQGLPGVCIEHYYQDSEITREDTHGRRLYLSNEFHEKSMLHRTKHGISTSDRRVHDLKKVVCQVLCKLGGAGQALVSTVMRRNFRLRITA

SEQ ID NO: 693 - protein, 652 aa, Chlorogloea sp.
  source 1..652: note = Related to JADQBB010000011.1; note = Chlorogloea purpurea
MVNVDEELIKNFQNLKSVKGLYLLLQKFHTGPASFPDYSTFRQILFNQWQDEPYESFKMAKKNGSHRTIEVPKPEIKLLQQSLNTILRGIYEPKASVHGFTIKKNIISNAQNHCGKKYVFNIDLADFFHSITQQRIRGVFMKPPYSLPSKVATAISHLCCYNDRLPQGAPTSPIISNIVCAKLDSGLRLLAKENNCFYTRYADDITFSTTRKNFPTDLGVIYGGGTQDIKIGDKLASILAENGFTVNAAKTRIQINTLRQEVTGLTVNTKVNVSRDYIRHVRAILHDWELNGYVKANSNHWSHCSKKHLRHGNIDDVLGGKLAFIGQVRGNEDLLYKKLLQKYAGLIVNEMARDLALKFDNKLYELWSGVIDQYLEQAVIDYVANENITNEDIKNGFEELKKLKPINGRDYKQRQDPDYNQVGVPVAYTFLYLPRKIMAATAILTHYFGQKNSRIPYNILDIGSGTNAVSIAIGLFLFTDKININLTALEPSHYMRHFCSYQPNFSHLNISYREGMVGEWQDVLHSNYYELIFMSSVLQNSFNDQQDTWWEDRCRELYNCCKNNGTFIIVEPNAKMDLLNSLVNAMQKIGWSFKERLFLSNLLPKVSKNDELIKMQKLTDLKKEYKCDYHNYSVCNWNPNPKYNEIIYIFEK

SEQ ID NO: 694 - protein, 643 aa, unidentified
  source 1..643: note = Related to BJCE01000167.1; note = Sphaerospermopsis reniformis
MRYLLREASEIVESFRKINSFQDFADLLEVDYFWFKQELFAVPLEEKYTSFTIPKRNGESREIYSPVSGIREIQARLNEVLRLVYEPERKQSVHGFTTSRNIVTNAKNHCNKKFVLNLDIKDFFPTITQQRIRGVMMSPPYNLPSQIATTISHICCYEGKLPQGAPTSPIISNIVCAKLDSELRLLAKQNKCFYTRYADDITFSTIVKNFPLSIAKITGLKITDVSLSDNLISIFKSNGFQINFNKVRIQGDNQRQEVTGLTVNNKPNVSRKYIRQVRAMLHDWHKNGYVQAYINDSAIRYQKNKNRVNFSSALRGKIEFIGQVRQKDDFIYQKLLTFYEKLIEREIIRQRSLKFDDKDYNNWCDSVDEYALHIINNYIDAISVDIDNMKECIQQGFDELDKLRKKQDPDYDLPGVPIAYAFKYLPRKIIAMTAVLSHYFREENVPIPEKILDVGSGTDAVGIALGLFRQKMSFQITAIEPCSYMRQFAMFRPSLPNLEVLNVNGRLGDWFNYLNNNYFNLIFMSSILQNSFENLGNSWWLEWANELYQASTNNARLILIEPSVKVKLVNKMKWAMESSGWILREQLLLSDLFPNVFNKGCQLKKLTSLKQELIGNYCPWPVSGWNTYYKYNEVIHIYSKNNQ

SEQ ID NO: 695 - protein, 574 aa, unidentified
  source 1..574: note = Related to JACZJC010000064.1; note = Anaerolineales bacterium
MTKTLLSITPIEQREAFFALKTRRDIAVLLGYRYDGLVYQIYKIPAEKKYETFFVPKKSGELRTIHAPSPKIKRIQRLLNEVLQNVYKPKPVVFGFTSGKNIVDNASKHKKKNWVLNVDLENFFPSINFGRVRGMFMHKPYNLPDEVATTLAKICCFENSIPQGAPTSPVISNMICAQMDSQLQDLAWKHRCFYTRYADDITFSTTLHEFPLEIAKVNSVLSIDLGQELINIIQQNGFEINHGKVRAFAYFQRQEVTGLTVNKFPNVRRKFVMQIRSMLHAWDKKGLQTAEAEHYELYNKRHHNQNSKLPAYKKVVKGKIDFFGMVKGLNNSRYMEFKREYLRLSRRDKNVPFKNISAKTESKIIIYTEGPTDPPILKTAWQKLYQDEILFIITPVEIKPGIATGATALAAELNTHRKQHGIVIGIFDRDAEGIKAYKSLHSGEFEEKDGFKISIDRNAAAIILPIPTGKEKLAELDKLWIENYFSETALNTKTTDGKGLAFEYKPVVVTKKIGDKIIEETKTDERSLETAVIKDGGKRIFAEKIVPTLPVDEFKGFELVFEKINEIAELLQEL

SEQ ID NO: 696 - protein, 553 aa, unidentified
  source 1..553: note = Related to JAHRVL010000217.1; note = Kordiimonadaceae bacterium
MSPHLPHFVARIVLLKNLLDVNTSRELATFLKINYENQLIFHAYRVPSHEKYLTFEIPKKSGGTRRILAPATALKLIQRSLAEKLLEIYKPRASTYGFCLGRGVVDNAKQHLGKRVILNVDFENFFPSINFGRVRGLLMAKPYSMPKEVATIVAQICCHDNQLPQGAPTSPVVSNMICRSLDRQLQIMARKHNCWYTRYVDDITISTNRRRFPPQIAQRTDDLSATEAQLGEEFKGIVENAGFNFNPSKTRILTNMERKEVTGVTINEFPNVPRSYVRQIRAMLHAWEHYGFAAAQEEYIKKYQPACRNDKKGAVNFEWVVRGKLEYLRQVRGTQDPIFIKQASRFNLLASSSIKLPLAAETTDVTTSTWIVQSTSADGKTLQEGTAFFLEGVGLVTCEHCIIGPTIIFSASSPTIEFPVVASKKNAYTDVAILNFTDDLQPTKTQDLRRNKGLGDNLPPPLTDIRLIGYPNWALGAGMSIRLGRVTSINHDEPRYFQIDASIISGNSGGPVLDAEGFVLGMASRGAPNQEDAQKTNDHRVVPIQAIFDLCNQ

SEQ ID NO: 697 - protein, 590 aa, unidentified
  source 1..590: note = Related to JAAXWZ010000064.1; note = Chlorobiales bacterium
MSLSNPLPPRNAASLTELSILQTKREVASLLGIKYKYLIYYIHKYPHDKRYTSFQIPKKSGGVREILSPIGPLKFIQRRLSEVLLKDYKVKPSVYGFVKEKSILKNAQRHVGKRYVFNADLKDFFPSINSGRVRGMFMSPPYSLNKEVATFLTQICCHNNALPAGAPTSPIISNIICRSLDNQLQELAKENRCTYTRYVDDITFSTTLRSFPQSIAHINEAGQIEAGSRLNQIVSANGFQFNSKKVRLQAKNKRQEVTGLTVNEKPNITRKFSNQIRAIIHAIEKYGLEAAEKEFLAKHQKKHRNPKLPTASLLRVLKGKIDFLGMVRGKCDPLYLKFLRQLKAIAPQMVKDLPEPRKECTKVEVWTEGKTDWKHLKAAFTNLKGQGYYINLEIDFKEFEDSMGEGELFKHCPIWSKTTHQSPLICIFDRDIPTRTKEVMNNGRFKDWTNNVFSFTIPVPEHRQSTQEVCIELYYKDSELKREDSNARRLFLSNEFDAKTTIHKEIPGLICPDKKAKDAKKLTVIDNNVYHSLNHKRENIALPKDDFASKVLAGEKNFDDFDFSQFKKIFDVIVEIADFSRRNYPSNLSP

SEQ ID NO: 698 - protein, 546 aa, unidentified
  source 1..546: note = Related to JAHJHP010000073.1; note = Candidatus Omnitrophica bacterium
MEKMQLKLTASDDEQITKFKTLKNYYDIANLLEVESRYLKYLLYHPKKTHYKIFFIKKKSGNLRKICAPISSLKIIQQKLAHVLYLIYAAKPSTHGFCPNKSIVTNAQLHIKKKYVFNIDIKDFFPSINFGRVYGMFNGWPYGLPSRVSAVLSKICCNDNELPQGAPTSPIISNMICAKLDSKLQELAKRCNITYSRYADDITFSSTSRLPKEIVEFEILDSSVAITTGERLRGVLNNNGFEINNEKVRLKYKTNRQEVTGLTVNEITNTKRRYVKQVRAMLNAWEKYGLKKADEEHFNKFNIKQRNPEFKKASFMQIVEGKISFIKMVKGEKSPVYRKLANRFINLSGKKKLKYFIDPNDEIKAALWVLEDDITGYQGSAFMLSGVGLVTCQHVLSKNIQAFKCEDPSKKYRVSSVLQDKDCDLAILKIDTEDSHYLKAGRSEVIRHGELITIAGFPQYRLGGSLIIIESKVAGFYPRFNFKRILIDKQIVGGNSGGPALNRDNEVIGIVATGAENFETTTKTIEYGIIPIELIFEMLKKSEICI

SEQ ID NO: 699 - protein, 536 aa, unidentified
  source 1..536: note = Related to JAHJDL010000235.1; note = Candidatus Thermoplasmatota archaeon
MNNYIEVDKNVLREFKNLKNERDVANLLQIPYNVLHYYIVINRNNNYKKFIIKKKNGEIRTIYAPISSLKILQRKLHKILSEFYKVYYRPSVYGFRDNLSIVDNARKHQDKKNIFHIDIKDFFPSISYKRVIGLLSSGIFNFPYSVSIILTKICCYQGMLPQGAPTSPILSNIICSKLDYELQLISKDNYCTYTRYSDDIVFSNTANTFPKDIATDGKCSDKLVSILLRNGFKINDSKVYLQRNIQRQVVTGLTVNQFPNVKRIYVKKIRAILHSWEKYGLKNTESIYCKKREVEKENRKEFMCSLVKVIEGKIAFLKMVKGKDNYTYLKIYKRFCDLIGREFPYHDLLNALKVEKRVMLNKYAKSIRKCIYRCNQSYAYDIFKPTNDLINSLDNLGIDARDYHRFGDRIDDLYMIFYEGTGYIERLKEHSLDRTIITEINILRTYYRHDIDHGKTNEIRRKRIKTMKVIQKYINKNSIINASELDLYIFQKKLYDNVMIFLEELEESINKNTYNNDTTGNIRRLIKEIISSLKRL

SEQ ID NO: 700 - protein, 509 aa, unidentified
  source 1..509: note = Related to LCSE01000017.1; note = Parcubacteria group bacterium GW2011_GWA1_59_11
MQAFFKASNLELINRFHKVDGLIDLANLLEVDSSELLLLFYGLRRGGGYYKEFSIPKKTGGERKILAPDSRLKFVQRKLAYVLSLVYFGRPSVHGFRLGRSIITNAECHARKKCLLNIDLKDFFPTIHFGRVRGLLQAKPYGLSKTGATAVAGICCFWGKLPQGAPTSPVISNMVCAKLDYELQALARGEGATYSRYADDITFSTQRRNLSENIVKFENSSFIAGPKLVEIIRKNGFEINKDKIRMRFLTERQEATGLVVNKFPNVKRSFIREIRIMLHMWRKFNLETASLFYGMKFPGREIYFPEIVRGKINFVKLVKTERDPTYLGLAEKFNDLVGKPVFKIVPIKDWPDEEYIPAGHRYRAIETLETIFANADKEILISDNFLRKDIVGLLEKQVGRSPRLKIRLLFSRGRYKSEERKYAECIEAIKKMVSLHKDLSIDCREVLPGGPHGRNIIIDREEVYHSGHSLDQLGSRADSIIRMRIQSAKRDALQDIETWFANSAEIPLI

SEQ ID NO: 701 - protein, 322 aa, unidentified
  source 1..322: note = Related to JACPLU010000002.1; note = Parcubacteria group bacterium
MRPDLLNSPEVLKEKFRNLKTLIDVADILEIDCKTLIYLVYRKNKPTNYKEFVIKKKSGGERRILAPTSTLKILQRKLNYILSICYEPRPSVQGFVNNRNIVSNASAHSGKKIVFNLDLKDFFPSINFGRVRGLFLKPPFSLPAPVATALANLCCHNNQLPQGAPTSPIISNLICSRMDGAFQALVKKYNAVYTRYADDITISTRQAFFHKEIVESGSAPLCGKGILSIIASNGFIINDAKTRILRTGRRQEVTGLVTNRTPNIKREYIREIRVLLDKWRKYDLRVAEEAYFKNRLKERAPHIKSVEFSKIIEGKINFVKDG

SEQ ID NO: 702 - protein, 551 aa, unidentified
  source 1..551: note = Related to NZ_LT828648.1; note = Nitrospira sp.
MDTQLKASQDTIISLFAALRTPRDVAKLLEVPYGLLIYHLHKTPPSTRYISFAIRKRAGGERIISAPGTALKILQIKLNYVLKTVYRPNSCIYGFIVNGGIVKNASVHANRRLVFNLDLKDFFPSIHFGRVKGMFSSPPYNCPSEVSTVLAQICCLPKTYPSLAPYAQLPQGAPTSPIVSNMVCSSLDSQLLRLAKKYKCSYSRYADDITFSTNLPRFHEAILVESQAEEGRISVTAGSELKAIISSNTFRINENKVRLQRAMQRQSVTGLTTNKFPNPPRRLIRQIRAILHAWTKYGYENAQNEFRSRYFNRTRNPNKMAPELKHVLHGKINYVGMVRGQTDPLYLSYLKQLKALAPELIIRQVIDVMDALWVLESDGAYAQGTGFSLKGYGIVTCYHVLRARTKLFKANTPAKKYNIEVIIQDQELDIAVLATDGPQGPELLLEEGERPRQDDWILLTGYPSYSAHATGVVRRGRVTGYYQFFGTERMLIDTPIVYGNSGGPVLNQSNKVVGIAAKGPVSLNDAQKTEKFEVIPISILRRLAPPAPTAQ

SEQ ID NO: 703 - protein, 528 aa, unidentified
  source 1..528: note = Related to DOHN01000106.1; note = Ruminiclostridium sp.
MNTELKSSDEELKKKFFALKNKHDICALLEIDIKTLIYILYRKMPSTNYSTFTIQKRSGGLRVINAPSTSLRILQQKLNYIFQLIGMIAPCAHGYINGKSIVSNAKPHAKKRYVFNLDIEDFFPSINFGRVRGLFMSYPYYLPKEAATILAQICTYENELPQGAPTSPIISNMICVKMDKQLMKLAYDTKSYYTRYADDMTFSTTLRMFPSELAYNKASGEIVASSSLTKVIIDNGFKINNSKIRLQKSTQSQQVTGLTINQMPNVKRTYIRNIRAMLHSWEKYGLDKAEEEYLSKYNYRNKDYIKPCFQDIVKGKINFVKMVKSEDSKVFRNLAIKYNQLAGSGFSDYTINQPSEEILLQIYTEGKNTEHIEKAIHILDKDLSALIYNGKIKIVNGVEHRSGDQQLKTTYEIMSKSKNSNKFLFVWDCDSKNKINSLVEENNFFKFVFASNTDNTKVEKGIENLYPESLFTQDLYSLEETKNDYGGKKSEEKFDKSKFLNKIKEETDPYVFENFKPLFREIRNILDM

SEQ ID NO: 704 - protein, 527 aa, unidentified
  source 1..527: note = Related to NSKE01000007.1; note = Aliifodinibius sp.
MDVELNYSNRELKQKFANLKSLREVSDLLEISSDKLKYYLYILDDEKKYNEFKIPKRSGGTRSISAPNDSLKILQQKLNHILRLFYNPRVCVYGFVNDRDIVEGASKHTDKKYVLNVDIKDFFPSINFGRVWGLFQAKPFNLPEEAATVLAQICIFKNSLPQGAPTSPVISNFICAKLDSELTRLAKKHKVTYTRYADDLTFSTTIPVFPKSLAKINDAGQTIVGSELEEIINDNGFEVNHDKVKLMNSSQRQEVTGITVNEFTNVNRSYVRKIRAMLHAWEKFGYENAEDTFHREYCNPGINPERSKPPLDKVIKGKLEHLGKVKGKHDPVFLKYYHKLVKLDDKYEREHYNKKYQLLDHNEYPFILDRLNDRFQDIKKLKPHPRGYAFEDFLNELFKTYSLEPRKPFKNVGEQIDGSLNFEGNAYLIEAKWQDKNIEAKHLNNFQVKVDSKASWARGIFISISPFTDGCLKNFREGKSTKLLGILGDEIESMLKHKIDLREVLKYKARKSVETGDFFTRIENELK

SEQ ID NO: 705 - protein, 364 aa, Nostoc sp.
  source 1..364: note = Related to CP046703.1
MSKDTSHSLLLYDSCKELSEKFKKLESPQDVAQLLEVPYKNLIYYIYRKSEDSRYNTFIVPKKSGGSRTIHSPNKSLAIIQRKLSQVLYTIYRPRASVHGFAAKRSIVTNAKAHIKKKFILNLDLKDFFDSINFGRVRGVFIAKPYEVNEKVATILAQICCFNNKLPQGAPSSPIISNLICAKMDSELQRFAEEYGLFYTRYADDITFSINRDELPSALVDSYKKGLPHVVLGKELKSIIEKNGFQINDAKVRLAYKTQRQAVTGLIVNKSVNVNRKYIRNLYGALHAWEKYGLEQAVETYISKYAKKPILPEKDIPAFLDSLRGKIEFIGSVRGKDDDLYQKLLNIFNGLRRKEADKESIAVE

SEQ ID NO: 706 - protein, 364 aa, Anabaena sp.
  source 1..364: note = Related to JAAVWA010000002.1
MSKNLSHSILLYDSCEELSKKFKELKSPRDVARLLEVPFGDLNYYLYRKSEDSRYKTFIVPKKSGGSRTIYSPHKSLSIIQRKLSQVLYAVYRPRASVHGFAVQRSIISNAKAHTKKKFILNLDIKDFFDSINFGRVRGVFIGKPYELNDQVATILAQICCFDNKLPQGARTSPIISNLICAKMDSELQRFAEKYGFFYTRYADDITFSITREELPTELVACYKKGLPKVVLGTELRSIIETNGFEINEAKVRLAYKTQKQEVTGLIVNNKSVNVNRKYIRNIYGTFHAWEKYGLEKALEIYKSKYAKKSILPEKDIPHFLDSLRGKIEFIGSVRGKDDNLYQKLLTIFNDLKSKETNAENIEK

SEQ ID NO: 707 - protein, 377 aa, unidentified
  source 1..377: note = Related to NZ_LXYR01000055.1; note = Phormidesmis priestleyi
MKKKAYLSLFLYESCEELSKKFQELQSPHDIAQLLQVPYEYLTYYLYRIPHGSRYTEFRVLKKSGGYRTIHSPKGSLGIVQRKLSQVLYAVYRPRPSVHGFAASRSIVTNAKAHVNKKFVLNVDIKDFFGSINFGRVRGMFIANPYKLDEKVATVLAQICCFDNKLPQGAPTSPVVSNLICAKMDSELQRFSKQHGLLYTRYADDITLSSNRNELPTSLVSHYEKGLPNVMLGDELRSVIERNGFQINEAKVRLAYKTQRQEVTGLIVNQTVNVSRKYVRNIDGALHAWERYRLEAATETYRAKYAKKTTFPEKESALFLDSLRGKIEFVGSARGKDDHLYQKLLKKFNDLRTREAIDQKTTETEPLQTTLELPFND

SEQ ID NO: 708 - protein, 358 aa, Nodularia sp.
  source 1..358: note = Related to REBL01000169.1
MNKNSSLSILLYDSCEELSKKFKQLQSPQDVARLLQIPYDYLIYYLYRRPDDLRYTTFSIPKKSGSHRTIHSPHKSLAIVQRKLSQVLYAVYSPRPSVHGFAASRSIVTNAKAHTKKKFVLNIDIKDFFDSINFGRVRGLFIAKPYELNEKVATILAQICCFNNKLPQGAPSSPIISNLICAKMDSELQRFSKENGLFYTRYADDITFSLTRNELPPGLVSSYQKGFSQVVLGNKLRSIIENNGFQINNSKVRLAYRNQRQEVTGLIVNQGVNVNRKYIRNVYGALHAWEKYGLEEAVKVYISEYAKKSVSPKQKYIQDYPDYLTSLRGKIEFIGSVRGKDDGLYQKLLNIFNELINK

SEQ ID NO: 709 - protein, 366 aa, Anabaena sp.
  source 1..366: note = Related to JACJRF010000019.1; note = Anabaena subtropica
MKKNISLSPLLYDSCEDLSSKFLQLKSPRDVARLLQIPYNYLIYAIYRKDESLRYRTFNIPKKSGDYRVISSPHKSLAIIQRKLSQILYAVYKPRPSIHGFAAKRSIITNAQAHTKKKFILNIDIKDFFDSINFGRVRGLFMAKPYELNEKVATILAQICCFNNKLPQGAPSSPIISNLICSKMDSELQRFAKEYSLFYTRYADDLTLSLTRDELPSELVASYKKGFSQVVIGNEVRSIIEQNGFQINNSKVRLAHRTQRQEVTGLIVNKNVNVNRKYIRNIFGTLHAWEKYGLEESVKTYISKYAKQPILSQKDVPTFLDSLRGKIEFVGSVRGKEDPIYQKLLSIFHGLKNKEIDNAIVVDSEN

SEQ ID NO: 710 - protein, 354 aa, unidentified
  source 1..354: note = Related to NZ_JAECZC010000098.1; note = Amazonocrinis nigriterrae
MYESCEDLGKKFKELKSARDVAQILKVPYNYLIYYIYRTSENSKYQTFNLEKKSGGYRTIHCPNNSLEILQRKLSQVLYSVYNPKPCVHGFAANRSIVTNAKVHTRKKFVLNIDIKDFFDAINFGRVRSLFIAKPYQLNKEVATILAQICCFKNKLPQGAPTSPIVSNLICAKMDKELQNFAKENGIFYTRYADDITFSINRENLPSGLVSSYSKGFSKVILGDELRSIIENNGFQINESKVRLAYINQRQEATGLVVNKGVNINRKCIRNLYGTLHAWEKFGLEQAQKTYIFEYAIKPVSPNNKVPPFLDSLRGKIEFIGSVRGKDDPLYRKLLNIFHELKEKESDKNNIIVP

SEQ ID NO: 711 - protein, 364 aa, unidentified
  source 1..364: note = Related to JAAHFU020000005.1; note = Leptolyngbya sp.
MESRSDFLQPLLYESCEELAKSFKSLKSPRGLASLLKIPYEYLVYYVYRFPQDRKYRAFKILKSSGGHRAILVPNKSLKIVQRKLSQVLYSIYNPRPCVHGYVPGKSIITNAKSHTRRKFILNIDIKSFFKSINYGRVRGLFIAKPYCLNPPVATFIAQICCHENHLPIGAPTSPVVSNLICSKMDSELQRFAKEHGCFYTRYVDDMTFSINKKNLPSALIANHGPGFSEVVLGNQLREIIEEDNGFQINSSKIRLRHYTQKQEVTGLTVNKFVNVDRKYIRNLLATIHAWEKHGFQNTIDMYMKKYAKESVLPGKETPNFLSYLRGKIEFVGSVRGKNDLTYKKLLNKFFELKTRDSKMIRGI

SEQ ID NO: 712 - protein, 372 aa, Synechococcus sp.
  source 1..372: note = Related to NZ_PCGE01000062.1
MRNQKTISLEGRTDDLQQDFLKVLNNRDLAKLLEISYPQLIYHSLKTINSVTRYQTFQVQKKSKGTRKICVPNKSLKIIQTKISQILYSIYEPKSCVHGYVVEKSIITNAKSHRRKEFILNLDIRDFFGSINLGRVRGLFIAKPFSLPKEVATTIANLCCHENKLPQGAPSSPILSNLICQQLDRELQYFAQKNRLYYTRYADDITFSSEYLESLKSLIKNLELVTENYPILLNNELEYIFTKNGFTINQKKVRLLYPHQKQQVTGLIVNEKLNVDRKYIRNLRAALYAWEKFGLEEASQVYLEKYAKTPTLRRKKKSSFIEAIRGKIEFLKNVRGESDPITRKFLDKYSELYEEYKKNVIQAKEEPDSQST

SEQ ID NO: 713 - protein, 369 aa, Synechococcus sp.
  source 1..369: note = Related to NZ_CP016483.1
MRNQKTIFLEGKTDDLQQDFLKVLNNRDLAKLLEISYPQLIYYSLKTINSDTRYRTFQIQKKTKGTRTICVPNKSLKILQTKISQILYSIYTPKSCVHGYVFGKNMITNAAAHRRKAFVLNLDIQDFFGSINLGRVRGLLMAEPFSLSNTVATTISNLCCYQNKLPQGSPSSPILSNLICQKLDRELSHFAKKHRFYYTRYADDITFSSKSLDALPFLIKNLDLVKEKYPILLSDELEYIFTSNGFTLNQNKIRILYPHQKQQVTGLVVNKKLNVNRKYIRNLRAALYAWEEFGLEKTSQVYLEKYAKTPTLKQKKKSPFVEAIRGKIEFLKNVRGKSDPITQKFLDKYSELYSRDVTQAKDDQDSQST

SEQ ID NO: 714 - protein, 351 aa, Synechococcus sp.
  source 1..351: note = Related to NZ_CP016477.1
MYLESSCERLKHDFLKLENNRELAELLNISFSRITYYVVRIPDSARYRSFQIKKRSGGFRKIDTPIKSLKIIQQKLSQVLYSVYQEKSCVHGFVVNKDIISNARAHTKKDFVLNIDLENFFGTINFGRVRGLFIGEPYNLPQDVATMIANICCYNNQLPQGAPTSPIISNMICERLDRKLQQFARKYKLFYTRYADDITLSATRKEIPSSLATVSPENRNKIELGDELQKIIYENGFSINHKKTRIAYSDQSQKVTGLIVNKTVNVPRKYIRDVRAALHDWDKNGYSKAQEKYHLKYAKQPSLQSKDSPSLHDSLRGSIEFIGHVRGRKDKVFCRLIAKLTVLKYRDLSKS

SEQ ID NO: 715 - protein, 715 aa, unidentified
  source 1..715: note = Related to JADZAP010000042.1; note = Ignavibacteria bacterium
MIEYDNKYNQYLHKFTKIKTSLSEDKFRLVEINLKTILSTKTFNGLLFTNECLNYFINKDKNKFPDWFINNIESEIKRRDELLTLKNNFFKIKHEHELAGILGLDYGTLVYHIFKVPDNRKYKIFKIPKKTGGYRTLCSPISNIKLIQKKLSEILYEIYIPRINAHGFIPGRGIVTNARIHVKQNAILNIDIKDFFPTINFGRVRGLFLNKPFYFPKWIATLIAQICTYQNQLPQGSPVSPIISNMICSKLDNKLSAISKKYFCYFSRYADDITFSTKKYDFPEELIRKIRIIIEEEGFIVNNNKFRIQKKNQRKEVTGITVNEKLNVKRKYIRKIRAMLSSWEKLGYENANNTFNKKIKPTYPHINFLPRLDNSLHGMIEYVGQVRGKEDNIYLKFLEKYNALNKTPHSERAINNNETDSKVEKREEHNQNPQHVPIKVCELLNSFKKEGSYLKKLVHNDEDKPDLPKILDGAKNEINTKKSILPYELYSNIWVNLIRLYEKEGMGVWNRNDKKHPISITKFNDKIIQFKKDIRFGASSDQTSMFTTIQSIIKELPNKQLENKIKVNPNLDKLDIYTDVQHIRNGLKIIIEHVIKYIDKGNGIRINLSELKWVNEKLYKYEISICNLNSSSYINKQVLIKRFNDLEHDLPKLKDKHSSKGHLFNRCDWYIEAIFDGQISKINVLSKDNPDGSTFEDANPKSNDGFTHILVFYGM

SEQ ID NO: 716 - protein, 549 aa, unidentified
  source 1..549: note = Related to JACKBS010000010.1; note = Ardenticatenaceae bacterium
MVYIYKIEPNRRYTIFSIPKHSKGERKISVPFKSLKFIQKKLSNILQTVYEPSIQTHGFIQERSILTNAKLHSRKKYVLNLDLKDFFPSINFGRVRGLFIHHYNFSPAIATVLAQICCFDNQLPQGSPTSPIISNMICSRMDNELAKLAKRYNCIYSRYADDLTFSTSEYYFPHELARTKIVNNFTITRLGEELRDTIEDNGFRINNEKVRLQKTNERQIVTGLVVNKFPNTTRKYVRQIRAMLYAWGKFGLQPAEEEYFKKYDKKYRAPYKIKPSYKNIVRGKIAFLGMVKGKEDKVFIRYWNQLVALAPEFGKPIVPSTISAFIPPIIYTEGKTDPKHMEAALQHLKKRGTFHDLIIKFHQEEGDSGLGHDNLLKMCQNFSKTPNSEARIFLFDRDVPGNVKSRVTGKGEFKSWGNNVFSFLLPIPTHRENNADSVCIELYFEDKDLMLKDEFGRRIFLNREFSNLSGRHKSLDLICSDRNKIKSSLLEIIDSSVYDSNDQNVALSKNDFSNLILERKHPFDQVDFSAFLKIFKVIGDIISKVNANA

SEQ ID NO: 717 - protein, 564 aa, unidentified
  source 1..564: note = Related to JAFQYI010000015.1; note = unidentified bacterium
MKKYTVKLNENEIKRRIADFCDDSKGEKTIEDFLDTSLKGLKIKLYKNYNELYKEKMILKRNGEQRILRVPNNYLKKIQRNLNYIIQTIYKGKFTSHAFEKASEGKSKNIITNAKIHTNKKFILKIDLKDFFPSISFPRIYGVFQKPPFNFDNKTARLLAHICIFQKSLSKDDVGELPQGAPTSPILSNLVCRNLDNQLFKLCSKNKCQYSRYADDITISTNLSIMPNEIYSNNDISTQIKEIIKQNGFIINQEKTKLLTQKRRQMVTGLVVNKKVNLKRNYIKNIRAMLFQWQQKRIKYMRILKNKKNIFTIIKLIKKSNFKNINSKNKNERKKIIKDLLSNDKYNNTIYFIAMKSALLDVEKEMHDKYYQNKFDKPKFKRVLSGRIGFVRKVRGDEDDIYRKLWNQYCYLNNKKKKIKPLIIKNVSDDPIWNIINKGESMELELKQEYSEQHLLETINAFLNSKFNGTLIFGVEDLTHIIYGIDKELKTKSKDAFRNEIIHKIFDTFNPQKQLPVMCKFYERYKKTICIIEVQPYGERIYLDAKNKIYFERMDGYSQKRQDP

SEQ ID NO: 718 - protein, 576 aa, unidentified
  source 1..576: note = Related to DVOD01000049.1; note = Candidatus Limenecus avicola
MKKKFQHDLKASKQQILEKLDKISNNPLATKKDVADLLERNLQALCIKLYVNTDDLYEISKIQKKNGKERIIFKPNPYLKQVQRNLLYILNLKYESKFCSHGFEKDKSIKTNAATHVSKKYILKCDIENFFPTINFKRVYGVFKSPPYNFNPEIAAFLAHICIYQVSTTDKHDLGILPQGAPTSPLIANLVCRTLDNQLFKLAKNNKCYYTRYADDMYFSTYLTNFPEKLYTNGKLSNEIEEIIYNNDFRINYDKTKLMYNNQRQAVTGIITNKKLNVKRSYIKNTRTMLYLWEKFKNKYTLQLFNATSEKDTVLHLLSLCKSLIFFPSKSEFKKYHTLNVTEQEDLVQKYLNDDNKRKNMYYAIATELSLYEAEQLMHEKLYKNKVKKPFFKNVLRGKIGYIKLIRGEDDNLYRKLWNRYCKIINSNQFKPLIYPNTPDNRIYNMLHSVKEGLDVEFKEYYDKKKLLETVNSFLNSDKGGQLIFGINDITMEITGIDKEINKQQKGEDGLRTMITNIICSKFHPTSQLNITCKFHKIYNKTICRIEVQPYHNKPIYYEPGKYYIRQDGRKQLVQT

SEQ ID NO: 719 - protein, 578 aa, unidentified
  source 1..578: note = Related to LBOR01000005.1; note = Candidatus Peregrinibacteria bacterium GW2011_GWC2_33_13
MKKNEHKPKHNLFFSDEIILEKISSLQNNVFAEKKDMAALLKSNIIAIGIKLYKHNHLLYKSISITKRDGTTRTIREPNAYLKQLQRNLVHILNLIYKGKFCSHGFEKGKSIVTNAKFHTNKKYIFKIDLKDFFPSITFARVYGVFCSPPFNFNKDISILLAHLCIYQETLSSDSEGELPQGAPTSPIISNLICRSLDNDLFKLSKKYKCNYTRYADDITFSTNLSVFPKELYDNSQIGTELNKIIIKHQFQINESKVRLVSNKRRQIVTGIVVNKKTNTKQSYIKNIRTMLHNWEKAKYKYVHILLDSKVTLEKKIQLVKLSKIPIIKPCSEEVQVENFKKFFDEENKKNNIHNIIKLAIELGLQEAEAEMYEKLYKDIEKKPSFQRVLLGKMGHLKNVRGEDDNVYIKLWNRYCRIVNMNKYKQYSVKDIKEDGLWFLLYSQEENLNIEFKENYQKDTVLKVINSYLNSETGGVLILGVSDYPREIVGIDHEIKKHQKGEDGFKLSMQNAIIDKFKPNKSLNINYKFHKFCNKTICVIDIKHEKEPIYFSPEEKEFYVRQNGNTSKLNHSNPSETI

SEQ ID NO: 720 - protein, 533 aa, unidentified
  source 1..533: note = Related to SUTT01000012.1; note = Cyanobacteria bacterium SIG27
MKHNLKRKPKDIIEKFKALSSREDVADLLEISDKQLRYYLYSLSDTEKYTKFNIPKKNGGSRDITAPIKNFKLIQKNLAHILYLIHNPRICSYGFEKNYKNKEQETVYKGICPNAKLHINKNNVLNVDLKDFFTSINFGRVRGMFMALPHNFSSDVATVIAQICCTNNALPQGAPTSPIISNMILKSFDSKMLKLVKPLKCTYSRYADDITISTNLKTLPKEIYDYTQNSISTDLNSIIEDNGFEVNKQKIRLQTKIQRQSVTGLIVNKKTNVPRDYIKNIRALLFRWEKDGEENADKYFQEHFKKCKLRRVLLGRISHIGNVRGVEDPIFIKLWNKYHILIGQSDKIKALISEDKEILTLISKGENSELEFKQAYEYSQDEKRCNNKLYYRPQGKKEDIPTMKHKVLKTVCAFLNSNSGGTLLLGVEDNSTIRGLKEDIKNNKNNLDSLALSIDHAIKDNITPSPIGNIKTKFYKIHNKYICKIDIEPYYDPVYLKTHGGIFYVRHDVESVEIKEKDKIDQWIRAHNKLQRN

SEQ ID NO: 721 - protein, 570 aa, unidentified
  source 1..570: note = Related to NZ_QBTW01000011.1; note = Muricauda sp.
MKKNFTDLKTKNDLAEFLDITIKQLDYNAYNEDKKYNKFHVPKKNGSKREIYAPIPSLKTIQKKLSKELTKLYLPKKHVHSYTSKKGIRTNAKIHVNQRFVFNIDLENFFPSINFGRVSGVFKAPPFNFNNEVAYILAQLCCHQNSLPQGSPCSPVISNLICRSLDNDLKRLAKNNKCFYSRYADDITFSTSLRRFPDSLCKIVKHEIQIGEKLNEIICKNRFSINPNKSSLKRPYEHQYVTGLTVNQKVNVKRKFLKQVRAMLHAWETFGLSNAAQEHFNKYSVRHKSKKDDSLFIRIIEGKLLFVADIRGKNDPIFKKLLAKFKVLAPKDTLKNYLSYQGDKILVYTEGNTDWMHLKHALESFNVINNYLQVNSAIKIYEYDETLTIGDKKLMEILRGHLLSDNTRPIIGVFDSDNPQTLGEFNPTRNRKYLNFDNRVFTFYLPQPFHRKTDKNCIEHYYKNHDLCIKDEYGRRIFLSNEFNDQSGEHIEMENVRCDFGQKKLRMTDGIIDSKVYDLEERSLALSKKDFARNILSKHDNFKKVNIDSFRLIFDRIQEIIKDIESIKNE

SEQ ID NO: 722 - protein, 598 aa, unidentified
  source 1..598: note = Related to JABFSO010000101.1; note = Cyclobacteriaceae bacterium
MESNKLSPEELAKKNEELRNSFLATDSIKKLAVFFNLRHSVLTYRVYKVPEDEKYKEFKLKKKNGGIRIILSPNEKLKFLQRKISDVIYLIYRPLIYSHGFEKGKSVKTNAQIHAKQRFILNIDLKDFFSSINFGRVRGMFMSPPFAFSPEIATILAQICCYKNALPQGAPSSPVISNIICLKLDRQLSKFALENKCYYSRYADDITFSTSCKKFPKQISSIKTGKVKLNTKLESIISKNGFEINEEKISFRSEYQQQIVTGVVVNVSPNVKRKYVRQVRAMLNAWGKYGLEEAEREHFEKYSTKNRNILRQRPSLRDIISGKVHYIGYIRKKLTGSDKLYIKLKKDLEKLIKEEDSIPKYQDNGSQLPLIITEGHTDWKHLKNALSHFKGFKKDAIDVEFWEYEQNLKFGDSVLKKFCLKESHKPKSRKYICIFDRDSPEIIKSMNGDNNSSFKYWGNNVYSFCLPTPSNRENYSNISVEMYYTDSEVNTIDTDTGKSLFFTNQIKETIEVNLTNNTTTQKREILKTPLAINEFDKKIFDYKVDLIKNTTGVQVAHSKTVFASRVYNSHKDFSNFDLSEFEKVFTIISEIIKHNSSQ

SEQ ID NO: 723 - protein, 543 aa, unidentified
  source 1..543: note = Related to FR885511.1; note = Azospirillum sp.
MKFTELKANIQLAAKLNMDYSYFTYLIYKRTDDQNYIPYIIPKKSGGYRKIAAPCKTLKYIQRQIANFIYDEIQVKDCVHGFARGKDIKTNANYHLKRKHILNLDLKDFFDSITVNRVYGVFHGHPFNFPEKLSSCLAKIATYYGSLTQGSPLSPIISTLVCRRLDNDLKAFAVKYGLRYSRYADDITFSSIRTMKELFKENPVTNKIILCKELVDIITRNDFQINEDKVRYRNKTQRMEVTGLIINDKPNLVRNYRDQIRAMLHAWKKFGYENAEKEYLSKFSRGHKSFKQVIYGKLNFYKSVRGVTDHYYQQMAKLFNTLSPDMKLLLKPTPEEIIQKAVWVIDNTVNAEKNDSPIERMSQGTCFFLKNIGIVTAAHVLFPNKKNTTDEFDVDFNQSPMSNFYILNPTNPSHRVNVQLVNLDKNRDWAVLSLKNTNDLSINRDYFELESCCKIQTGTEIMLCGYPSFELGHQIRKETGQIVAKKTEHAVKKFEITADIRHGNSGGPILNNKMQVLGWADAADPSIVNEIGELLDNYKSTSV

SEQ ID NO: 724 - protein, 556 aa, unidentified
  source 1..556: note = Related to NZ_LMUJ01000063.1; note = Acidisphaera sp.
MNDPTEQAKLEQAFRGLKTRDGVAALLGVNRRSLAYQVFRHPKPYISFAIKKRSGGMRTISAPNPSLKKIQRSLSKYLCAVYRTRNPVHGFALERSIATNGNVHLDKRYILKIDLNEFFDSIHIGRVIGLFEKVFHFNKDVATLLAQICCRTGSLPQGAPTSPVLSNLICWNLDNELRRVAMTHRCSYTRYADDITFSTNQARFPKDLATIAEIDGVAAVTVGAAIIGVVTANGFTINQSKVRLLTKTQRQEVTGVVVNVKRNVDRRFIRNIRATLFKWEKLGTLHLQKQYEDVYRRSANPSRPPAAIEDVIRGRIEHIAYIRGQRDTLYAGLATRFNKLAEKWLIIPATAFEAFTARLRRAVWVIECDGDKLSPDSEPSDGALMQGTAFYLEGTGWVTCAHCVEWDGIDNSKVKYLFRPDNPSKRYSFKISRSQPTVDVAVISADIPASEYEPLQIAATAPSRNNLVQVVGWPEFRLGDEITVMDSRIISFTMVSGIRRMRVSAPIIGGNSGGPGLNADGQVIGVVVTGSHKGEQTINNALIPISALSYLEDTPD

SEQ ID NO: 725 - protein, 378 aa, unidentified
  source 1..378: note = Related to JACKWW010000005.1; note = Clostridium algidicarnis
MICSPLDTQLIRLAKKYGIVYTRYVDDITLSTFNDSFPEAIVKGEVSNLIIGSELENILKRNSFSVNLDKVFLNNNFTRQEVTGLIVNRFPNVKREYIKNLRAILHNCFKEGIYETALEYICKGYCKNKDIIKNSDNKECVNNWFKYVLKGKINFIREIKGANDYIFLKYAQQLNRLFNEELFNLDFLDEFIYNVVVLETMNPDNIVQGSGFFIKDRGLFTNYHVTENNEFYSVKTYKMENLGAVLKGMNEINSNIDIDYALYDLKSSKISGLELGESKNIKIGDKIVVIGYPEYCDNDSPNIQTCNIISRTNYLGECLYTISGRIVHGSSGGVVLNMNHKVIGIIKAGVVTLNESDTSSKQGFIPIHLALEHLNKGV

SEQ ID NO: 726 - protein, 554 aa, unidentified
  source 1..554: note = Related to JAAYMO010000138.1; note = Clostridiales bacterium
MLRDEFYRLSTREDVAKILEIEEKSLRYFLYAKKPDNMYTTFKIAKKSGGTREISAPAKELKAIQRKLAYILNLVYRVKPSVYGFFHERNIKDNASKHTRRKVILNIDLKDFFSQIHFGRVRGMLMNKPYGIGQEAATVIAQLACYKGILPQGAPSSPVLTNMICSPLDTQLTNLAKKHGLVYTRYADDITFSTFNPVFPKDIIERDLSSIIIGQELDAILKKNSFSVNPKKIFLNNNKVRQEVTGLVVNKFPNIKREYIKSIRAILHNCFKNGVYETAIDYVARGFCKNKDIEENIDNIEYRDIIILWFKSVLKGKINYIKEIRGSDDYTFLQYADQLNRLFGEEIFNVEKHNEFFNKIAYNVVILENRNKLVQGSGFFLKDVGLVTGYHVTEDRGFFMVTTYKGENIGIVSKEMNEIISDKNIDYAIYNLNNSSMEGLELGDSNEIEIGDKVTVVGYPDYIEGDTPYVHTCEVTSKTKYLGECLYTVSARIIHGASGGAVLNKDNKVIGIIKAGVVSYEEKEDVGKHGFVPIHIALKHWMSQQENQKINTEG

SEQ ID NO: 727 - protein, 554 aa, unidentified
  source 1..554: note = Related to NZ_PJSO01000011.1; note = Clostridium perfringens
MINIFSKNDDELKKAFYALKSRNDLANLLEIEEKTLRYFLYGKSDDDKYNTFEIPKKNGQFRKIAAPISPLKTIQRKLTYVLSLVYKVKPCAYGFLKDRNIKSNAKNHSKKKVLLNIDLKDFFSQVHFGRIRGMLISKPYDIGIEAATSIAQLTCYKGVLAQGAPSSPILTNMICSPMDTQLIKLAKKYKLQYTRYADDITFSNYNEQFPQGIIKGEINNLIIGDELNNILTKNGFEVNMNKVFLNDNFTRQEVTGLIVNKFPNVKREYVKSLRAILYNCSRDGVYNTAKEYISKGFCKNKNVLENQDNEELVINWFKMVLKGKIDFIKEIRGSNNNIFLKYAQILNKVFNEDIYDLNILNKLTNNVVILNYEDNKCMIQGSGFFVKDVGLFTSYHVTESGAFFSVKTQYLETIGSVANEFNEISKDKRIDYAIYDIKKSTIEGFEVGNSKDIKVGDKVIIIGYPEYQEKDTPTIQTCNITSMTTYLKAPLCIVSGRIIHGASGGVVLDMNHKAIGIIKAGAASTEKEYKGKQGFIPIHLALEHMKNNKKSISN

SEQ ID NO: 728 - protein, 421 aa, unidentified
  source 1..421: note = Related to DMUT01000367.1; note = Clostridium sp.
MVNIFKKSDEELKKEFYNMISRKDVAKLLDIEDKSLRYFLYSDKNKSMYTTFEIPKKKGNPRRINAPNEELKNIQRKLSYVLNLIYKVKPCAYGFINNKNIKDNAKNHVKKKMILNIDLKDFFTQIHFGRVRGMLMKPPYGIGVQAATVIAQIACYDGVLPQGAPSSPILTNMICSPLDTQLTNLAKKYTLKYTRYADDITFSTYESTLPKSILDYQVNSLTIGNELNHILNKNSFSVNPDKVHLNNNYTRQEVTGLVVNKFPNIKREYIKTLRAILNNCTKIGVYETALEYINKGYCKNKEIATSKEDKEKVCNWFKCVLKGKISYVSQIRGYKDYIFLKYAQKLNRIFNEEIFNLDYVDDFIYNVVVLETSNLDNVSQGSGFFIKDIGLFTNYHVTENGEFYNVKTYKMEILGVVSKEL

SEQ ID NO: 729 - protein, 552 aa, unidentified
  source 1..552: note = Related to JAHLDU010000027.1; note = Clostridium sp.
MFKKTDQQIKDCFYKLKNRSDVSDLLEIEDKSLRYFLYVKRPENLYVTFTVLKKNGNKRIINAPQAELKSIQRKLAYILNLVYKIKPSTHGFVIGKNIVTNANNHCKRKAILNIDLKDFFTQIHFGRVLGMLVKGPYDISKDAAIVISQIACCNAVLPQGAPSSPIITNMICSPLDTRLTRLAKKNNSKYTRYADDITFSTFDKQFSSNMINSDILNLKLGKDLNKAIKDNGFVVNEDKIFLNTKNTRQEVTGLVVNKFTNIKREYLKNIRAILHNCEKDNVYNTAKTYVKKGYCKNGQIKANIDDKNYETQVVLWFKAVIKGKINFIKDIRGKNDFIYLKCAEKANIIFKDQIFNISKLKDFKDKIISNVLVLKGDNNGVQGSGFLLKDFGLVTSFHVTQDNAFYKAYHYNEYEETSLCVISKEINEIKSDLNIDYAIYKFNKDNENFLEAGSSVEVGDKVKIIGYPNFMKGNSYNVQTCYITSRKYYMGAIFFTVGGTVFHGASGGVVLNDQNKVVGIIKGGVVSNTESETNENQGFVPLDIVLTHFHQQ

SEQ ID NO: 730 - protein, 572 aa, unidentified
  source 1..572: note = Related to FPBY01000132.1; note = Clostridium sp.
MFKASDDELIEKFNNLKNRADVAELLEVDEKSLRYILYVKRLENMYKKFNISKKKGGFRTINAPEGSLKTIQKKLSYIFSLIYNKKACAYGFIKGRDIRGNSKQHIKRNFILNIDLENFFDSINFDRVICMFQKPPYNVEKDAATVLSQLVCCDGILPQGAPSSPIITNMICRPLDTQLVRLAKKFSLNYTRYADDITFSCNKSTFPKEMAYYDMQEKLCIGKSLQEVISRNGFKINTNKVFLNYKDRGQEVTGLIVNRFPNLRREYLKEIRAILYNCRRYDIYSQAKKYIKESSYTNKNIMRISMLEDKKSKEIIYNWFKNVIIGKIRFIGNIRGKESPCYIKYALECNKLFDEEIFKIIKSKSQELIENTVFVVKIEKGSKYIQGSGFFIKDLGFVTSMHVTPDIDETYDVFTPKEDIPRKLCLFNNKANNQELDYSIYDLKNPTSNYLKLGDSSNLNIGDRITVCGYPMYDKGDSIYIQNGEITNLKKDYFGSRIYTVSQRLIHGISGGAVLNTNNEVIGIIKAGAENMDEEDESIQGFIPINDVIEDVKSQGIELRPKSILVKSNNYN

SEQ ID NO: 731 - protein, 554 aa, unidentified
  source 1..554: note = Related to JAKNTH010000001.1; note = Enterocloster sp.
MLEEPNMVREKFFNMKSREDVADILGIKEKSLRYFLYSIKPDNMYVEFSISKKNGGERVICAPNDKLKAIQRKLAVILNMVYKTKPAAHGFVLDKNVATNAKGHVKKKYVFNIDLENFFDQIHFGRVRGMLMKPPYNLGEEAALVISQIACYKGKLPQGAPTSPILTNMVCAPLDTQLTKLAKKYNLQYSRYADDITFSTYKADFPVEIAYVDFNGVHVGTVLEELIKKNNFLINYNKVRISDYRQRQIVTGLVVNQFVNLRRDYIKEIRALLYSCKVKGLLESAKLYVEKGKCKNPKIIEAVNSGKSEKEDEIINWFLQVLKGKIEYIKSIRGDNNPTYLKYASELNRVSGKIFFRVDEYLDFIKQIEKSVFIIEINALDDYIQGSGFLLDPDLLLTNHHVTKKEGFYKVTTFKEDQIGIISNDIKFLKRNENIDYACYNGFGREDLIPWELGDSDDIKIGSKIIMIGYPDYNLGNTPDVQTVYVTGERTFMGQKLITVSGRIVHGASGGVVLNEEHKVIGMIRCGVVSYCETDTTNNHGFIPINDIMKDIKS

SEQ ID NO: 732 - protein, 553 aa, unidentified
  source 1..553: note = Related to JAFQLB010000113.1; note = Lachnospiraceae bacterium
MRQDSEQIKEKFLTLETREDVAALLGIQDKSLRYFLYSIKPDNMYSEFIIKKKNGEDRHIYAPDRRLKNIQRKMAQILNCVYKIKPAAHGFVLDKNIVTNAENHIKRKYIFNIDLENFFEQIHFGRVRGMLMKPPYSIGSEAALVIAQIACYKGKLPQGAPTSPILTNMVCSPLDTQLTKLAKKYNLHYTRYADDISFSSYRDELPTGIVYEDLEGIHIGKELREILSQNSFAVNSKKTRVFDYRKRQEVTGLVVNEFVNIRRAYIKKIRAILYHCKQDGIYETAKEYVEKGNCKNSSIIEMIKNETEENKERVAEWFKEVLKGKIGYIKFVRGKNDYVFLKYAKEINELYGEEVFSIETELKLIDKIEKSVFVLEFESEDNYVQGSGFIVRDIGLLTNYHVTDNNEIYTVNTYKGEKKCCVSNEMNLIKNNESIDYACYLYGKTSEDALELGNSDELDIGSEVLVIGYPDYYTGNSPEIQHVNIISQRPFMGQKIFTISGRIVHGASGGVVLNMSYQVVGVIRCGSVTLKETESNSLQGFIPINEIVNDLMA

SEQ ID NO: 733 - protein, 564 aa, unidentified
  source 1..564: note = Related to NZ_JACEGA010000001.1; note = Variimorphobacter saccharofermentans
MINARTDIETEKLFYQMQSREDVADILQIEDKSLRYFLYAIKPDNMYTEFKIPKKNGEYRKISAPNKKLRSIQRKLADILNIAYKVKPASYGFVKNKSIYQNADNHCKRKNVLNIDLKDFFTQIHFGRVRGLFMKPPYNLGEEAAMVIAQIACYRGVLPQGAPTSPIITNMICSPLDTQLTHLAKKNQVVYTRYADDITFSCYKNSFPEALVYLDKGDIHIGKELEFILKKNNFVVNMNKVRLMDNRRRQEVTGLVVNKFTNLKREYIKEVRAILHCCKNKGIYDSAKIYVNKGKCNNHRIKAYIQNEDKVDRKEDVSNWFEQVLKGKIGYIKLIKGNDNPTFLKYAKQLNIISNKKIFNIDEYDKFHNMIDDNIFILQCTSKNVARQGSGFLLKTYGLMTSYHVIPDDNFYSVKKNTGKQVGVITKSSNLYKESYEIDYACYINICNNFDKSQNGFELGDSSNLKAGDKVIIIGYPNYMDGDTPYIHTCYITNKTSYFGQELYTISGRIAKGASGGVVLDLLHEVVGIIKGGVTSLEEDDESNDPEFKHGFIPIHDVIEHMRN

SEQ ID NO: 734 - protein, 326 aa, unidentified
  source 1..326: note = Related to JAAZLI010000107.1; note = Bacteroidales bacterium
MEISALKHVKDKFYTLETRQDVSELLGIEDRSLRYFLFKRRPENLYYKFRIPKGMDGFREINAPKDELKTIQRKLANILNEVYEAKICAYGFIPGKDIIQNARSHVGRNLVLNIDLKDFFIQIHFGRIRGMLMNPPYSLGREAATTIAQIACLNGTLPQGAPTSPVLSNMICAPLDNSLMKLAKKTKCTYTRYADDLTFSTHRKEMDKALVYFDNNNDVVLGAGILSLLRKHSFKVNPDKIAFRTRYDRQEVTGLTVNVFPNVRRSYIKRLRAILHKCKKDGVYGTAKEYAIKRQIKNRVWFVNHADSSQKKELINWFRQVLIGKI

SEQ ID NO: 735 - protein, 560 aa, unidentified
  source 1..560: note = Related to JAFVSK010000006.1; note = Clostridia bacterium
MNRDEVKKAFLELKTREDVAELLGIKERSLRYFLFKRRPERLYTTFTITKRNGKPREISVPCREWKEIQRKLADVLSCVYAPKICAYGFIPGKSIVDNARQHTKRHLVLNIDLKDFFTQIHFGRVRGLLTSPPYGIGEEAATTIAQIACVNGVLPQGAPCSPVLTNMICVPLDNSMMKFAKATDCVYTRYADDISLSTFKRSFDPEVVYLDGEKLCIGSKLQHIFDKHSFQINPEKVAVRRNTERQEVTGLTVNVFPNLRRSYIRNLRAILDHCQRDGVHQTAKTYIEKGFCKNPSILATYKCDEARGSVEDWFISVLKGKIEYIRNVKGAESLTYLSFAQKLNEIVGVEILDISLLNRLETIAEKNTFVLECNQGESFYQGSAFYVPNIGLITSYHVVESGEFFYGYTHMDYPSKPAMVIGLSLNRVADNREIDYAIFSPPLTDLGEYALKIGDSKKLRVGNNVTIIGYPNHQIGNTPFIQNCAITSEKTFMSAPFFTVSGSIVHGASGGLVLNTGFEVVGIIKGGIQSLDDDDVSGNQGFIPIHLVLEDMAEKRKDVK

SEQ ID NO: 736 - protein, 566 aa, unidentified
  source 1..566: note = Related to JAFUCD010000004.1; note = Oscillospiraceae bacterium
MESKEIKTKFFQLKTRTDVADILGIDERSLRFFLFKVRPENMYIRFQIAKRGGGFREICAPNRKLKSIQRKLADILEIVYREKACAYGFVRGKNIVQNARNHTKSELVLNIDLKDFFSQIHFGRVRGMLIKPPYGLGEEAATTIAQIACLDGKLPQGAPCSPVITNMICASLDNQLMRLAKKTGCIYTRYADDITFSTNKKQFDDEIIFLNGGSLELGKGLSNVLTKNSFIVNPDKITLRAKSSRQEVTGLVVNQFPNLRREYVKQLRAIIYNCSKNGVYHTAQQYIEKGFCNNTKIATVVHDPNHREEVENWFRQVIVGKINYIRQIKGAGHATYKSFALRYNRLVGEDFFEVPQDDLLAELMRSVYVLESEERQGSGFAVKGIGLFTSNHVTGDGAKYEVFLPDGQGDVEIKGIISNGDNLIDSDDTIDFALFDVPFANESNLEIGDSDEVKFGSDVIIASFPDYAKGNSVRIEHRTVAGEARLFGSKIIIIDGVIFHGASGGVVVNDKNKVIGIVKAGIQDAVSKDELLSNQRHGFVPINLVMQHIREHQRPASEENHQETMT

SEQ ID NO: 737 - protein, 555 aa, unidentified
  source 1..555: note = Related to FMHA01000009.1; note = Ruminococcus sp.
MFKRSDNEIKELFSIAKTRTDIADMLEIDEKSLRYFLFVLRPENMYRSFFISKKNGGTRQIFAPSKKLRNIQRKLAYILNLMYKPKICAYGFIKNKTILGNALQHTKKAEILNIDLKDFFSQFHFGRVVGLLCSKPYSIGKEAATTIAQIACLNGILPQGAPTSPVLTNMLCVPLDNQLMQYAKKYGLVYTRYADDITFSSYNRCISDNIISKVGDKILLDDSLKKVLDKNSLIVNDEKITFRTKNLRQEVTGVIVNKFPNVKREYYKNIRALLHNCIQNGIYIEALKYIDKGYCKNRNIISFRSDPKKQPLIEEWYKSVLIGKIHFIKQIKGEHSFTFYSLALEANKVFSKNIFDLTYFNQMNEIINKNVFVLQSTDEMKQGSGFYVPGYGLFTSYHVTEDKDFYYLWQNDVKAVISPISADINQVSADKIIDYALYNISIANVASLSMGNSSNLKIGDTVVIAGFPNYIKGDTITKEECKITGKTKLFGAPFYKVSGKIVHGASGGIVLNTNHQVVGIIKGGCSSEDEDNTSIKQGFVPIDLVISDLKAKSVL

SEQ ID NO: 738 - protein, 568 aa, unidentified
  source 1..568: note = Related to PGXO01000004.1; note = Synergistetes bacterium HGW-Synergistetes-1
MDGNLPEKKLFYELKTQKDVAALIGCKERSLRYFLYAGNCIVKYRTFTLKKTDGSQRIISAPIPPLKKIQRKLANILNVVYKPKACVYGFVPKKNFIENAKQHVGCKYILNIDLKNFFNQIHFGRVRGVLMAKPYQLSQEAAGAIAQLACFNGTLPQGAPSSPILTNMVFRSFDNELIKFAANNGIKYTRYADDMTFSSYRNKIPEELATVSGNNVRLGTFLEKLLEKNNFEINPNKIHLFLKNQHQEVTGLTVNAIVNINRRYLGLLRVILYNCDKKNIDNPIYESAKRYIKLGYCKNNNIIELAKNDKNKDKIEKWFKQVLIGKVRFIKQVKGADSFSYYYFATRYNKVFKDTVFDLSLFNYVNMRIQQNVFIVEAGTNQGSGFYLKGYGFITCYHVVEKNKEEKKENEKEIYDSVCIYRCVDRSKQPFKRLRKEEIILKDKFLDYALYRLDENEVESAYKIGNSEKVELGEQVTIIGFPNYLEQDTFSLIKTHITSKSNFMNAPAFLVDSKIFHGTSGGAVLNKDSEIIGLVVAGSQDTAYELKNAFVPIHEIMASLSSKNIHEL

SEQ ID NO: 739 - protein, 549 aa, unidentified
  source 1..549: note = Related to NC_021016.1; note = Anaerostipes hadrus
MEDNVKRKFKQLNSREDVANILEIEDKSLRYFLYCVKPDNMYKNFEINKRNGGTRIISAPNKKLKNIQRKLLQILENVYTPKICAYGFINGKSIYDNASIHLKRRQILNLDLKDYFLQINFGRVRGMLLKKPYELGEEAATVIAQIVCYKGKLPQGAPTSPIIANMICAPMDNHFMKLAKANNMKYTRYADDLTFSTRTEFPTSIVRIENDTVVVGKKILQILKKDGFLLNEEKIYLRSKDKRQEVTGLVVNKKVNVRRDYVRELRAILHNYKNMGAEDAIKLYVKKKKSTNISAVNIDTLSDKKRQETINQFNEILKGKINFIKDIRGEDDLIYIKYANELNRICNKEIFNLDKQKAFMEKLKNSIFILQSRYTCVQGTGFLLKGIGLITNYHVTEDDDFYDVCMCNKNKIAVISNKLNLIKRSKRIDYASYKILDAKEDQFLDCGDSSNLQIGSELKMISYPEYNDEDTPNIQTIEITGSREYMKNKIITISGRVIHGSSGGVILDQKHKVVGVVNCGPVSLEETDDTIIQGFIPINTILKDISMPT

SEQ ID NO: 740 - protein, 360 aa, unidentified
  source 1..360: note = Related to RBMT01000022.1; note = Planctomycetes bacterium
MLFLRQAEASPVIDFGCDPQPATCLFPTSACPVALRHAGCSGREAECRRTSALPLLHSQPQPFLRASDNELRTKFRALRALEDVADLLEIQPRSLRWYLYVDKVRCQYKERSLPKSHGGTRRICVPPIPLRILQDKLLRILTLIYAAKPCVTGFVLGRSVANNANPHVCKQHVLTIDLDNFFPSIHFGRVRGILQSPPYGVAPPAASVLAQLACHDDGHLPQGAPTSPIVANMVCGPLDSAMLQMASNNRLTYTRYADDITLSTNLRTFPSDIVRQDEHDTCEVGVVLRDLLAEHGFTIREGKTRLRSRLRRQTVTGLVVNEVVNVRRSYVRQLRALIHSCSTVGLLPSGYCQELCIECA

SEQ ID NO: 741 - protein, 454 aa, unidentified
  source 1..454: note = Related to JAFGTG010000124.1; note = Sedimentisphaerales bacterium
MEIVLRTNKEELKKKFGRLKSRADVADLLEVSDHFLCKILYGVKERRKYRIFEIQKKSSKTRQISAPPKNIAILQSKLNTILSLVYEPKPCVHGFAEGRNILSNAQHHTKRRHVVNIDLKDFFPSIYLGRVKGALMSKPFCVGRIAAEVISQICCRDDGILPQGGATSPIISNIICRSLDNDLMSFARKNRCKYTRYADDITLSTSSFRLPTAVGKVENGNLILSDTLVLIVEKHKFIINPKKVRYTPPFLRQDVTGLIVNEFPNVRRSYVREVLGALHAWEKHGYRAANKRYMSHFRLRGQAGLDLENVLRGKISFIRMILGDNSPIFRKLARKYNGLASNKIAIIQIEETDPYPLRGGNTRIQMWNRWFNRYKAAIFFIETTNSKGDKSAGTAFYIGNNLFATAGHNLEYGKPIFYFGDSPKAVDTFTEYNKKSTDIGLIRNMGEILGSELD

SEQ ID NO: 742 - protein, 558 aa, unidentified
  source 1..558: note = Related to SJPO01000018.1; note = Posidoniimonas polymericola
MNSRQDVATYLGISDARLCAILYGYCDRRRYTEFQIPKASGGHRKILAPPKRLKWLQSTLLRRLEGQYTPKVCVHGFVKNRSIVTNARVHCGRRLTASFDLEDFFPSIHIGRVKGIFKNPPFSFGEDASEVLAQICCCDDGKLPQGGVMSPYLSNLACRSLDNDLLRLSRQHRLRYSRYADDLTFSSNDRYFPHEVVELDVEQPQPGERLVELITSNDFRLNHSKMVFRTSTRRQEVTGLTVNAFPNVSRKFVRGIEAALSSWRRFGYDAAQAHFLEKYHEGGGSELSSVLRGRIAFLSMVRGKDDFIVRRLSREFNDLGQPSINVKPLTTARPSPRHNSRAEWQTWIRKYSEGVLHLLFTSPEGDPSCGTAFHIGKGTFATARHNVFTECGAVHDDLRLKHDGNEFVANVLAPLDADANTPDVALLSCNALSKLARIPTQVRLPELGEEIVAIGFPSIPQRNVTQVVHSGIVEALPVNYSDRLRFIQVSFQSGGGLSGGSLIDAGGNLLGVVVENVFMQAADAGGITAPSRPYGQAVPVEYLDDLLKSYDRQQRPIR

SEQ ID NO: 743 - protein, 515 aa, unidentified
  source 1..515: note = Related to CP038033.1; note = Nitrosococcus sp.
MRLRVHLAQGARGKAHLSKLQFHLNKPLEEAAAQIVGAQTADDIAEVLEVPKGQLLHILYSYPDEKKYISFDIKKKNGGYRNIKAAKGGLRVLQSKLAPLLASHYRLKNPVHGFVKERNIVSNATQHKRKRYVFNVDLSDFYGTINFGRVRGLFRAKPFEMGEKAASVVAQICIFKNSLPQGAATSPIISNFIASELDRKLSRLARRYKLTYTRYADDITFSSNNRNFPEGIAFYDGNNPITNDCFVGQVLEETVSGCGFSINHEKTRLQIRGVRQDVTGLTVNEFPNVRRSYIRNIRALLHAWRKFGPDGVEVIYRRKYAKNKSRLVDTERHYFKEALYGMLAFLRMVRGEDELYLKLCLQTAELDKAPPELIKRMKEQYKMYDVFISHASEDKIDIVRPIYDACKSLGISAFLDEEEIDWGDSLTEVLNHALGKSKLFLAVLSNNSVGKKWPRKEINAALARQMDGKQKFLPLVVGSPDMDIFGLTNDLLYVNWKNNPDEIAEKLKFILSKYA

SEQ ID NO: 744 - protein, 303 aa, unidentified
  source 1..303: note = Related to JAKITL010000008.1; note = Gammaproteobacteria bacterium
MSKLQYQLVKSLDIAVKQIVKLQTAEDIAQLLEVPKGQLLHILYSYPAEKKYILFDIAKKNGGFRNIKAPKGGLRILQQKLAPILYSHYKRRNQVHGFVKDKSILTNAKIHKRKRYVFNIDLHDFYGSINFGRIRGIFKAKPFQMGDKAATVLAQICTFENSLPQGASTSPILSNFIASSLDQKLSRISRRYKLTYTRYADDITFSSNARDFPEAIAFFDGGNPITGDCYAGRILEETIVSSGFAINHAKTRLQIKGVRQDVTGLTVNEFPNVRRSYIRNIRALIHAWNKYGDSGVEDVYRSQ

SEQ ID NO: 745 - protein, 509 aa, Nitrosomonas sp.
  source 1..509: note = Related to FOSP01000012.1
MPEKLKPELNKNLDESVRAISQLSSVSDVASYFEIPEGQLLYILYKLPDNKKYRFFEIKKRRGGHRLIKAPIGGTAILLKKLKPALHQLYKTKSCVHGFVNGKSIVSNAKQHKKKRYVLNVDLANFYDNINFGRIRGLFMSKPFNMAPNAATLMAQLCTHDNSLPQGSPVSPVLSNFIASNLDKRLTLLAKKYGLQYSRYADDITFSTSKKDFPKSFGYYEGNNPITGNMVIGKLLEDQILASGFVINYDKVRLQYHGVRQEVTGLTVNEFPNVERSFVRKIRAMIHAWKKFGLIEAEKTYISCYAKPTLDISSDNLNGAYYKSVVYGRLAFLKMVRDEEDEVYMKLCLKVAEIDSNAPRKILETKEMFNKFDIFISHASEDKDDVALPIYEACKKIGVNAFLDVKYIRWGDSLTEKINHALGQSKFVLAILSENSVGKTWPSKEINAALAREIEGKQKILPLIVGSPDLSSVSLLVDKLHFPWEKDASKVAHRIKELTYEKYQISNCK

SEQ ID NO: 746 - protein, 504 aa, unidentified
  source 1..504: note = Related to JABIUT010001148.1; note = Candidatus Scalindua sp.
MLNVKLKSTIGNTVKIFLSSQNTEDVANVLEIPTRQLLYLIYTLTDEERYSTFFLPKKRGGQREISAPRKGISILQKKLLTIIDSIWHPKPWVQGFTNSRSILTNARHHKKKSYVLNIDLKDFYGSINFGRVRGLFMSYPFKLGHKAATIIAQLVTFNNLLPQGASTSPIISNMIAFKLDNMLVKIARRYHLTYTRYADDITFSTTKSNFPKEIAEIEGTNPSTGNIKLGHILEKAIKESGFSVNYKKVRLQIPFVRQEVTGLTVNEFPNVERRFIRNVRAMVYAWRKHGLIEAEREYINKYASRKLEIPSGKLKGSYYKNVLYGKLAYIKMIRGEDDQIFIKYCLQLAELDSDPPKQIQKAKEMHEQYDVFLCHASEDKEDIAKPIFEDLSNAGIIVFLDDKYIKWGDSFVEKINHALGKAKYVIAILSSNSVTKAWPVKEINASIAREIVGKQKFLPLMVGDGKEIQSFQDEMPLISDKKYLIWKNDTSEIVDKIKSLMSSK

SEQ ID NO: 747 - protein, 528 aa, unidentified
  source 1..528: note = Related to CP066225.1; note = Planctomycetes bacterium
MRYPKIAKPTTELVRPTEDSVKLFKAAHTFGDVAELLEVHPGHLKRWLYKYPGHSGYKDFEIPKKNGKPRQISAPPKNISILQQKFKTILDAVYQPKDCVFGFVNKRSVVGGANIHKKQSRWVLNIDLEDFYTSIHFGRVRGLFMSFGAGENASTTLAHLVTKDGVLPQGACTSPVISNMIAFKLDRKLINIANKYNLKYSRYADDITFSYRYCTFPKHIAILDKYSGDDQEQHKEGQYKSGLEPENITLGPLLVHAITKSGFTINTNKNRLFSKRQRQEVTGLTVNEFTNVNRKFIRQIRAMIHAIRKFGPELAGIEYIEKYRAPYKNCEVNNHAEYFLNVLYGKLSFLRMVRGKTDVCYLDFCLSMSKIDPEPPTFIKEAVKMRQKFDLFIIHASEDKNEIATPLHEHLTKIGLNVFIDEKYIKIGDSFIEKINHALGQSKHIIAILSSHSVEKSWPKHELQAVLARHIASDGNGKIIPIMAGNKYEIQTILDKWPLLSDKRYHKWEGDPDAAAQEIADSIGTVIS

SEQ ID NO: 748 - protein, 533 aa, unidentified
  source 1..533: note = Related to JAFLKZ010000048.1; note = Campylobacteraceae bacterium
MKGQKINIKLKKPFKESMTLFENLQTQEDVANFFEVEHRYLMYLAYKDKRPHYKELVIPKKTGGTRKISKPVKSIDILQKKLLPFLQEKYKIKKPVHGFVKGKSILTNSQQHLKKKFILNIDLKDFYDSIHFGRIKGLFMSETFKMGENAATLVAHLCCNNTKIPQGACTSPILSNFIVSQLDKKLMEFAKTSHCTYTRYADDITLSSSKNISNTVIKDENSSFPINGFELSSELEKLIHFCNFTINYKKVRLESKYIRQEVTGITVNDFPNVKRTFIRQIRAMLHSWEKDGLDIASQKHLSFKKREYSISSPEKFFKNVIIGKLAYLKMIRGEEDIILRKLCLKFTALVSNDEVLPKFIRNIKMKYEEFQVFICHASEDKEKIARPLYDELVKLGIKSFLDEKYIEWGDSLTEKINHALGQSRYVIAILSDNSIEKKWPKKEINSTLSREISGDKVLLPILAGDERKIFKVFPLLHDKLYKLWNNDAKFMANEIKNLLSSTEDYEINHEVNTSESSILEKIKDFLTKIKILK

SEQ ID NO: 749 - protein, 503 aa, unidentified
  source 1..503: note = Related to MIBX01000109.1; note = Sulfurimonas sp.
MTKKLHIKLQKTFEESLELFNNLTTASDVASFLEIPLQTLIYILYKDTKLHYKEFKIKKKSGKDRIINKPIGSISILQKKLLPFLQFKYKIKKPVHGFVNKKSVLSNAEQHLKKKFILNIDLKDFFSSINFGRVRGLFISYPFNMGNDAATLIAQICCHKNGLPQGTCTSPILSNFIASRLDVELIKYANATHTTYTRYADDITFSSTKKLSSKMIIYDMDSNPVINGFILSDSLKELIKFMGFDINYDKVRLETKNIRQEVTGITVNDFPNVKRNFIKQIRAILHSWENLGLEEAEKKHLETKKLKMDISSIKNDGKYLKNVVIGKLAYLKMIRGENDIVFIKLALKLASLSSDNLPKFIKEIKLKSEEFDVFICHASEDKEKVARPLYRELTELGINAFLDEEYIEWGDSLTAKINHALGRSKYVIAILSNSSINKEWPLKEINSTLAREISGDKKLLSILVGDEQEIFKVLPLLADKLYKPWNNNAKTLAIEIKTMLIPK

SEQ ID NO: 750 - protein, 511 aa, unidentified
  source 1..511: note = Related to JAGBOM010000008.1; note = Opitutales bacterium
MLITHSKLLPKIKKDITEQESLFSKLQTTKDVADLLEVPYKQLLYILYKQDDSKKYETFSIPKKMGGMRIISKPKGSISILQSKLLPLITSKYTAKSCVHGFVKGKSILTNAGAHKITQHTKILNIDIKDFYDSINFGRVRGLMMSHPFNMGNKAATVVAQILCWKNKLPQGACTSPVISNMILHRLDSKLTKLCEDLKSVYYTRYADDITISSNCPVFPETIATWDPKTKEVRLNQDFENIFKSENFNINYSKVRLKSNKERQEITGLTVNEFPNVRRVFIRQIKAMIHAWNKFGLEAAAKEYIEKYDRKKFNAENSNVVDYFKNVVYGKLAYLYMVRGKEGADRICQRFAERILNIDDEVPNFIKNMKESKYDIFLSHASEDKCIAERIYKECTSNNINAFFDKECIKVGDSIPERINDALRTSKIFVIIASYMYSEKKWTCEELWSAVNKTIETGEIRIYPIVIGDINEFKRNYPLLGHRKAMRWENNESEIVKDLENFLRVQENEVK

SEQ ID NO: 751 - protein, 591 aa, unidentified
  source 1..591: note = Related to NZ_CP014504.1; note = Pedobacter cryoconitis
MKKKEELAPEYLERFLQLNSIKELSTFLNLRISALEYFLFYAPDEKKYRIFKIQKRNGNLRSISTPTERLKEIQQILQIIFQYLYAGKPSVHGFVQNKSIITNAKLHINKKILVNIDLSDFFSSISFGRIKGIFLNHPFNFNEEVSNALTRICCHDGSLPQGAPTSPILSNFVCRQLDNQFMKLSKTSKVLYSRYADDITISTNLKSLPQSIGIIETDKLELSNEIKKILHKNGFKINYNKVRFALKTNRQEVTGLIVNKFINIKRDYLRQVKSMLNAWEKYGLYLAAFEHFSKFNPKTYMPGDIELAYTKELAGKINYIGIVRGRDDGIYEKLYTRIKVLAPSVMLSIIRRQIQSSKDPILFTEGKSDIKHIEAAFSHFRSQGLYHNLSLHFHHYKEEDKMSNGELLKFCETFSKSHETGSIVICLFDRDDENFLANVASTKNTFKEWGNKVFSMVLPIPDHRKFTDICIEHFYTDKEITTKDKNGRRIYLSNEFNKETGQHAKEKLTIKHVNKLQARRVQIIDSGVINTENINFALSKNQFAENIFNKVDGFDSFNFEAFKLIFDNIQTVIDYANDEAKKSNKIEMSIL

SEQ ID NO: 752 - protein, 576 aa, unidentified
  source 1..576: note = Related to JABFRS010000002.1; note = Cyclobacteriaceae bacterium
MTPEEIKELTDRFLAIKTPRQLAKVLDVEFKILTYYLYKVPELKKYNEFDIRKRNGNARRIIAPIGGIKRIQRSLNFILQTLYPTKKAVHGFTLGKSIKTNALAHVKKNLIINIDIKDFFPSIHFGRVMGLMMARPFNFNEPLARVIAQICCHKASLPQGAPTSPIISNFICRKIDNAFLRLTSYNRCTYSRYADDITISTNQKKWPTEIARIENGKVLLSNIIQGIFHSNGFLINEDKTRHATRVNRQEVTGLVVNESININRKYYQHVRAMIHAVEKYGITLAANEHFLKYNIKSKEPDNIELSFQNELVGKLGFIGFIKGKENSTYKKLAARINTAEPGIRLKIVQNEIDEAANPIIFGEGKTDWRHLSKALTKLKKEGMFKSLFLRFNRYENLEINNEQLLDICKSLPKGEPSKKIVICLFDRDTKKINNAVVENGKDFKSWGNNVFSLLMPIPVHRKFDEICIEHYYLDTELKRTDHDGRRIFTSDEFDKVTGIHKQENLQYPYIGYLQPNFPRIIDSHVRNDIGQNVALSKNNFSNNILNDVPLFDDFTFSHFKIIFDRIEEIITSHPVG

SEQ ID NO: 753 - protein, 579 aa, unidentified
  source 1..579: note = Related to NZ_SAYM01000002.1; note = Apibacter sp.
MEEDFDKDILNSFLEVETDRQLASVLDIPYKNLIYNIYKLPDEKKYEIFEISKRNKSKRQICAPISGIKNIQKKLSIILNNLHSPKYCAHGYVKDKSIKTNAQIHVKKRILINIDLKDFFTSINFGRIRGLFKSYPFNFNDKVATILAQVCCYNGCLPQGAPSSPILSNYICRRLDNQILDLSQKCKVDYTRYADDLTFSTNLKELPKEIGVIRDNELFLSNELISIIESNGFVINRQKIRFALKNNRQEVTGLIVNNRININRKFVRHVRAMLHAWEKYGLENAAIEHFEKYNYKNKKVENYIFSFLKEISGKIGYIGYIKGKNNSVYRNLFRRIKELNPEIKLPVPKDIIESNTAIVFCEGKTDAIHIETALKYLKSKGDFIDLNIGFHPYEGKEISNSTLYDICKNWSITKKSDRVDIFLFDGDDRRYNRKNICQYPNFYKHWGDKVYSVMLPIPPHRDFEEICIEHYYTDDEIKTKGNKERRLYLSTEFDPNTCFHKEENVNFANRKTIRSSYPKIIDGNDRVLNEFGVNVALTKMAFAENIANKTGEFKKISLENFKVLFDVLLKILEDSKDEN

SEQ ID NO: 754 - protein, 570 aa, unidentified
  source 1..570: note = Related to NZ_BDCR01000003.1; note = Paludibacter jiangxiensis
MEELSKDNFLASTNKRELAASLGIKYSTLAYLLYHLTDERRYSEFEIKKKNGKSRMIAAPTVGIKHVQSNLAYILLDIYPSKKNVHAYLKKRNIKSNASHHLHKKLLINIDLKDFFPSINFGRVRGLFMSHPFKFNEEVATILAKICCYKNTLPQGAPTSPILSNFICRKLDNQLVDLAQKGRFSYTRYADDITFSTNLSPLSQVLGTISDNKIVLSEELTSIITSNGFTVNQDKTRYATNANHQEVTGLVVNEFPNVKRQYVRHIRAMLHAWEQYGLTLAAQEHFSKYNTKHKIISNPEISYKNEIAGKIGFVGSIKGKDDDIYRKMCIRLRELDPDIKLAVAFSNFHNENKPVIYGEGKTDWKHLKAALRYFQHKGEFLDLNIHITEYSEQVKINNAELLAMCKSKALDANKHKLIFLFDRDNHQINSEASLNESNYKYWGNNVYSVLLPKPDHRDFNEICIEFLYEDEIIQRKDNNGYRLFINNEFSKDTGRHLINEKLQLSNLGIIRCPYPRIIEHDVMDIETGKNKALPKNNFATYILEQQPPFDNVSFEHFRGIFELLTTIATE

SEQ ID NO: 755 - protein, 577 aa, unidentified
  source 1..577: note = Related to NFLR01000001.1; note = Alistipes sp.
MQTEMPDIQSTFQAVTTKRELAERLGSSLKMLAYYLYKLPPEQQYKKYDIPKRAGGTREIYAPISGIKQIQKRLSHILQNYQPAKFCVHGYVKERSIKTNAYIHRRKRIVINLDLKDFFPSINFGRVRGLFKSAPFGFNDEVATTLAQICCHDGKLPQGAPTSPVISNYICRRLDNELIAFARKHKINYSRYADDITFSTNLQFLPTAVGHIKEHKIVLSNTLQKIFQDNGFTINEEKTRYALRTNRQEVTGLIVNAGINVPRKYIMRIRAMLHAWEKYGLEAAAKEHFEKFNYKHKHPDYPEIAFKNELTGMLNYVGQMKGIGNRVYIALYYRIKRLDSNIKLSIPEYIPAPEGTTVVFCEGKTDPLHLETALSWFHQQGEFSDLDLHFFKWRSDLDINNDTLLQMCQTRPQAKRDNRIEIYLFDRDVPRYIQKAAEKDKSYKHWEANVYSALLPVPEHRDFNEICIEHFYPDEDLLKEDKDGRRLYTTREFDPESGCHLKLKEVYYAGTRAQLRCKYPKILDSNVRKTGSDENIALSKNNFAKNIFHKTGSFKEVSFSYFKVIFELFEEIMAQAK

SEQ ID NO: 756 - protein, 575 aa, unidentified
  source 1..575: note = Related to JAFXLG010000026.1; note = Alistipes sp.
MDGFDSNMIEFCEIDSRRDLAAYLGCQYKDLIYNLFVLPDDKRYKKIQIPKRNGDTRDILAPSSGIKRAQRMLATILSDLYKRKSCVHGYVKKHSILTNASVHKNKRIVINIDLKDFFPSINFGRVRGLFLNPPFSCCEEVATFMAQICCFDGVLPQGAPTSPIISNYICRSLDNELLKFARKYRLDYTRYADDITFSTNLREIPSRLGVIQENKLVLSEYFTSIIEENGFKINPSKVRYSYHTGHQEVTGLVVNKIVNVHRKYVKRIRAMIHAWEKYGLTATANEHFEKYNYKHRLPESPDYAFKLELQGMMGFLAAVKGKNNQVYARLYERLILLDKHTILQPPLRITAPRDSVVIYGEGKTDVVHLAAAYRHFQQQGEFLGLKLHFHRWGNHDVNNEFVYNMCRTRSESKENDNLEIYIFDRDVARYVKDTTENGKGFKRWSDRVYSAVLPIPPHRDFNDICIEHFYSDQDLARRDKSGRRIYTSFDFNPQSGNLKDSNDIYYPYRQELKRTYPKIIDDKVMRISSGENIALSKNNFALYISRGIGEFADVDFENFRPIFKLIEEIVHNSMR

SEQ ID NO: 757 - protein, 570 aa, unidentified
  source 1..570: note = Related to JAFXAT010000041.1; note = Bacteroidaceae bacterium
MKNKEYRDFLLLGTREDVAKFLGGSLKNLSFLLYILPKEKQYHDFSIPKKNGGKRQISSPISSIKRYQRELADILSEYYHVKSTVHGYVKGKNIKTNAIMHCNKKWIVNIDLKDFFSSIHFGRVLGVFKSKPFEFNDKVATLLAQICCFDGKLPQGAPTSPIISNYVCRNLDNNLINYAKKNKLTYSRYADDITFSTNMSSLPENLGKISEDHELRLSDELLGIITNNNFAVNSTKVHYANRNNRQEVTGLIVNKKVNIKRTYIRRIRAMLHAWQKFGLSNAAIEHFNKYSIKTQIPDFPDLAFKKRITGQIGFIGHIKGSNDNIYRNLYKRIKELDPMTKLTLPNIISSPESCNAIILCEGKTDSIHLETALKYFIERGEFVNLKIHFYKYPDEAKINNSYLYKLCEARDLILHDVRIVCLFDCDDAKYVKHCCEGKKLYKNWGNNLYSCLLPQPMHRDFKEICIEHFYTDDILLKTNNKGRRIYLSNEFVYETGFHKTENIQIRKRDDAKSPYPKIIDSGVFKSNGENIAMSKNDFANSIAAGEKPFDNISFETFRPIFDLISDIVNE

SEQ ID NO: 758 - protein, 574 aa, unidentified
  source 1..574: note = Related to JAFVOO010000133.1; note = Alistipes sp.
MEENKNYEDFLQVTTRSDVATYLGGSLKNLSYNFYVLPKEKQYTKFAIQKKGGGERHICAPASSIKLYQRRLATILSPYYSTKPTVHGYALNKSIKTNAKVHCRRRWIVNIDLKDFFQSMHFGRVRGVFLSNPFAFNDQVATTLTQICCFEGVLPQGAPTSPIISNFICRRLDNELLEFAKRHKLSYSRYADDITFSTNLAAIPAELGTIREDNILTLSKELRDIIENNQFIVNESKIRFAGRNNRQEVTGLIVNEKINVKRTYIRRIRSMLHAWEKFGIANAAKEYFEKYATNNKMPDYPDVVFKRILVGRIAFIKQIKGIDDKVYRNLFGKIKALDPTIRLTLPTLITSPDTCRAVVLCEGKTDGIHLHAALQYFIERGEFVDLNVYFYKYPTEADLSNSYLYKYCESSNLRQQKKRTICLFDCDDSRFVAKCQEEGKLYKYWGNNLYSCILPKPAHRGFDEICIEHFYTDEVLCRESNKHRRIYLSNEFDPITGKHRTEDLIMRKRTDAKSSYPKIIDSGVFKPNGENVALSKNDFANLIATRNAPFHDISFEEFRPIFELLSRIVNAASE

SEQ ID NO: 759 - protein, 586 aa, unidentified
  source 1..586: note = Related to JADILV010000021.1; note = Bacteroidetes bacterium
MDTGNGNILNGFTDLKSKAEVAEYLGGSLKNLSYVFYVLPKEKQYKTFSITKRNGKKRTINAPVSSIRLYQKRLAEILSGFYKRKPCVHGYAKGCSIKSNAKIHCRKKWVVNIDLKDFFPSIHFGRVRGMFLSQPFEFNGTVATTLAQICCFEGALPQGAATSPIISNFICRRLDNDLISFAKKHRLTYSRYADDITFSTNLPALPESVGTIASDGSLELSDDLRRLIEKNSFNINESKIRYSDRHNRQEVTGLTVNEKTNVRRTYVRRVRAMLHAWQQYGLKDAAREHFEKYSDKVMPEYPELTFSRIATGRIRFIRQIKGPDDHVYRNMFRQIKALDASIKLDLPAFFNTPDGCNAVVLCEGKTDGLHLQAALRYFIGKGEFTGLKIYFHRYPDKMDINNSILYKCCETSVTRQSNILRICLFDRDDRTFMKKCREGDSLYKDWGNRLYSCVLPQPEHRDFSEVCIEHFYSDEVLRTKSPKGRRIYLSNEFDPGTGKHLSEDLTCRKRTDASCCYPKIIDSGVFKPNGDNVALSKNDFANLIFNREGDFADISFEHFRPVFELLSEIIEKDGALKEKLRASSSA

SEQ ID NO: 760 - protein, 570 aa, unidentified
  source 1..570: note = Related to SUYX01000009.1; note = Bacteroidales bacterium
MTGGCFYMSIENRDILFYNAATKEMLAAALGTRLNRLVYYLYVVPDSERYTKKCILKKSGKVRNVAAPRSGLKFIQRNLASILNTSVPQKSCVHGFVPKKSIISNASVHLKRNFVINLDLKDFFPSINFGRVLGLFKSAPFNFNDEVAVTLAQICCFEGSLPQGAPSSPIISNLICRSLDNDLMRLAKSLKLSYSRYADDITFSTNLKELPKGLGEEVEGKFIPSEALVDIIGRNGFELNFNKLRCRRKCQRQEITGIVSNEKLNVPRNYVRRVRAMIHAWEVYGLEKAAYEHFGKYSRRRFLYPEASFRKRVAGMVGYIGMIKGVDSPVYLKLYEKLKSLDDSIKLKIPEYSGSADMVVYCEGPTDPMHLKAALYHFRSKGMFNSLKVDFHMYRDDMTVGHGELYNYMVRKHLMKKDNVIEVYLFDNDLKQYVQKLDGKPFITVGHPKIYMALLPKPEHRDFFEVCIEHFYKDEDLCRKDANGRRLYFAREFDKDTGAHVTEDVRSVKLHPLKQPGYTIIDNRILDKDDRSVALSKKDFALAIMHRKKSHSDVDFSAFKAIFEMLQMLV

SEQ ID NO: 761 - protein, 570 aa, unidentified
  source 1..570: note = Related to JAFTHV010000023.1; note = Bacteroidales bacterium
MGAFFMDYDERYMRFYEADTRELLAVALGTKPNRLSYYLYVLPESERYKKKSILKKSGKVRNVAAPTGGLKFIQRNLADILTGSLAQKSCVHGFAPDRSIVTNAKVHLRRNLVINLDLKDFFPSINFGRVYGLFKSHPFNFNELVAATLAQICCFEGSLPQGSPCSPVISNLICRSLDNQLMHLAKSLKMSYSRYADDITFSTNLKEIPEEIGSIVDGRFVPSEKLTGIIERNGFSLNVNKTRCRNRNQRQEVTGIVTNQIPNVPRNYVRRIRAMLHAWEAYGLQKAAEEHFSRYSRKHCVYPEASFKKRLAGMIGYVGMVKGRDSSVYISLFEKLKAIDETIRLRLPEYSGDAKMVVYCEGITDPMHLKAALRHFRSKGLFGGLKIDFHMYRDDVPVGHGELYKIMEGRHLVKKDDVIEVYLFDNDQKDYVTKLNGKAFMTYRHPKVFMALLPQPAHRDFYEVCIEHFYSDSDLMRKDAKGRRIYFVHEFDKSTGFHKTESVRCLKLSPLKQKEYTPIVDGILNEKDQSVALSKKDFALAVLNGKQSHADVDLDAFKSIFEMFENIYIS

SEQ ID NO: 762 - protein, 561 aa, unidentified
  source 1..561: note = Related to JAGAPQ010000482.1; note = Bacteroidales bacterium
MELSKAESREDVLLALCSSWKNLAYYIYRLGDRRYEKMEIVKKSGKLRNIASPVRGLKYIQRNLSAALSYGYRQKGCVHGFVPQRSILTNASVHVNRRYVINLDLKDFFPSIHFGRVVGMFVGPPFGFNHEVAVTLAQICCFERVLPQGAPSSPVISNIVCRKLDNELLGLAKECRLNYSRYADDITFSTNLCEIPERLGRVEGERFIISDGLRRIIADNGFELNDEKVRWSSEYYRQDVTGLVVNEKVNVPRTYIRRIRSMLHAWQKFGLQAAAKEHYSRFSFKKTNNCEESYRRRVTGMIGYVGMVKGRDSKVYLSLVSKLYDLDKGMSLAVPDLKDKTGMVVYCEGKTDPIHLKAALSAFRKRGLYHELDVCFHMYKPDKSISNSTLYEIYAKRDVVKEGNQIEVYLLDSDDKRYTDKVKADGKCYTKGGQNIYLAVLPKPEHRNFDTVCIEHFYTDDDLRRCDKNNRRIYLSGEFDKNTGLHLVESGLRTTKLSPLAKSDYAIISEGVLDCHDVNHALSKNEFARAVSCRAASHKDVEFSHFSVIFDMLMDIQKDAL

SEQ ID NO: 763 - protein, 566 aa, unidentified
  source 1..566: note = Related to NZ_SNWM01000001.1; note = Pedobacter duraquae
MNLLNIKSKEDLLDYIGIEEAQLNHLLYRLPNAYKYHTFEVKKKNGSSRIINSPNPELKVIQTKLKDDLVEFFGKKNCVHGFVKDKNILSNASSHLKKQILINIDLKDFFSTIHFGRVRGMFLSSPFSFPERIATLLAQICCFNGLLPQGAPTSPIISNFICRKLDNSFIQFSKKNSFFYTRYADDITFSSNIRSLSSELGIFNKDQFEISKSILNQIHNNGFTINESKVRMASRFNNQTVTGIKVNVKPNVSRFYIKQIRAILHACEKHGVEKTAIVHFQKNEIDLNRLKSPIDFFIKRLVGKISFIGFVRGKDDFLFKKLYDRVKVIVPNARLSIIYKKIDESKNTLILTEGKTDWKHIKAALIKLQAQGAYNNLNLTFADYLDEHKVSNSELFKICESIPKLGMQKNKTICIFDRDDKNFIPKVTSINDFYKDWTNNVYSMVLPVPKHRNFENICIEHYYTDDDLFTYDHNNRRIFVSSEFENNGNHKLEKYRYKGNLEKLKNRFPTIFDSQVVDSSGASIALSKNDFADYVYNNNPRYNSFDVEAFKEIFNHIYVIENTTPK

SEQ ID NO: 764 - protein, 539 aa, unidentified
  source 1..539: note = Related to FR898423.1; note = Acidiphilium sp.
MRSQEFLKIKTEADLANFLNISEGTLKYYSNPITPSKAYTTTILKKKNGEDRIVCAPVRILKYIQRQISDVLYELYKPSRCVTGYVRKKSICDNARPHTSKRMIICLDLKDFFTSIHFGRVRGMFLNQPFNFNTTISTVLANLTCRNGCLPQGAPSSPIISNYICRRFDGDFMKLCAKYKLVYTRYCDDITISTKAYSFPHSIIYFSTTWSLGDDIRELIQKHNFILNESKFRVVTNKTRQMVTGLVTNQKVNIPKNKYRKLRAELYYTLKNGLDEAAKHDGYIHNKIVDKNAFLNHLRGGVNFFKSVLAVDNPRYKWLANEFNKIVGENYFFVPSSWDELKNKAIFVLMNNKETSQGTAFYVTDIGLITCLHTVCAISGRPSKSDVETALNDYYAFLPNTEYNHIKLSYCWHSNDLDLLVLKFVDYTIRIGYEIEKNIVLSDGINHLKALGYPEYGLGCSCCFIQDMSITSNRVLCGLKLYVVDKTFYTGASGGPVFNSANKVVGYIDRGNEIGSDEERYNAFCSIAPLLDEFNKGTL

SEQ ID NO: 765 - protein, 554 aa, unidentified
  source 1..554: note = Related to JAFSEX010000061.1; note = Bacilli bacterium
MYNEFGRIQHFKNIETKDDLLYVLNISSRKYNYLVYQKKNLYTSFYINKKQGGFRKILSPCYDLKKIQKELNIIMSNNYEFNNETVHGFVKEHSIKTNATVHKDANYIVNIDLKNFFDNIHFGRVRGMFMKPPFNFSDYIATNLAKLTCYEKKLPQGAPTSPTISNIICYRMDRELSYLCNKYNCRYTRYADDITISTKMLYLPKEIAKFRDGQVILSSNITDTIKNEGFTINIDKLKISPNTDRQEVTGLIVNKKVNVQKVYIKKLRALLNNVSKYGFYLEGCKYFEKTLNDCSNKDYVEHRFINVLKGKIEFLKMIRGIDDYVYIKYASLFNELIGYEYFDTDYGLTMKEFIEKRVYPLISYDEMVQGTCFMADEIGMITSTHVLISPQSFITENKYKEIELKDKFNFCTVGSKPFYILDHYNRKYIINPEITREQINSDILFYKCIPSKKRFKINMTYEPKIGETVYLAGYGEFKDFKTSTINYIKSNVTGYTEFLGRKVACINSKIYHGMSGGPVLNSNREVIGIIYAGLNLEDDDNGVISKTNGFVLFQ

SEQ ID NO: 766 - protein, 516 aa, unidentified
  source 1..516: note = Related to JABFRH010000087.1; note = Proposed Sideroxydans sp.
MNFIDIKSTQDLADYFELDYNILARITYGPSRSNLYKVFEIPKKSGGSRIIHSPEKTLRVIQRKLADELKQHYRRHDAAFGFVDKYSITDNASKHINQDWILNLDLADFFPSIHFGRIRGLFQKTPFAFPDKVAQWIAQLATFNGTLPQGAPSSPILTNMICLRLDKDLKKLARRHDLSYTRYADDITLSSKKYFPKEIAKMEKSDNESLATLGADVVSIIEKNGFKVNPSKTRLVSKSGRQEVTGIVVNEKSNLPRHYINTIRGEIGQLRYLDGEAKDALQLRVLGRLGHLKKVVGEYDPRYIKLKAKLHGIKLSCSPNETMYRAVNWIVENDDGVYGTAFHVDHLGWITACHVITKPAAILNFKLFHPDDSQNKYAIQLKSNFFDADIDYVIFNAPIKPIISARIAPKQIENGEACVLSGYPNHNHKNNSVSIIEAKITSTQTIFKAPRFVIDANIFHGMSGGSVFNKENQLVGLVTHGNEDGGTTVLQSAFTSIHLVMNDITNKSPQRIIRTE

SEQ ID NO: 767 - protein, 577 aa, unidentified
  source 1..577: note = Related to NZ_BEWN01000005.1; note = Gluconobacter frateurii
MSHLAKLKSATSRKELALILGYKPKSMTAIVYKTPTADKYATFDIDKKSGGKRTIKAPAPKLKNLQSHLSHVLYQCLAEIDRARDAKPISFGFRQDRSITENASRHKRRRWVLNLDLEDFFPSFNFGRVRGFFLKDKAFDLHPEVATTIAQIACDGTALPQGSPCSPVISELIAQILDMRLVRLAKKHGVTYTRYADDITFSTSQKDFPAGLAQVDESDPSVWHLSDELTRKIVTSGFAINNAKTRMNFRGSRQIVTGLVVNEKVNIRSDYYRRARAMCDTLFQTGQYYKAVIKPDDADEEPKPEVTSNLNPLQGILGHIYAVTQSAERREVSEQRQNPRAIRKLFRRFLFYKYCIVLNEPLIVTEGKTDPVYLREAVKSRVKFQPMLGAHGKDGFKHAVRYFNYGGLAHEVMDLGGGTGDLKSIPLDYLRNLKPSKGTHKPFAYKPMKYPVIIVLDNDDGLAAVASTVKKNFGTEIDKKSTQDFYNVIDNLYIVKTPEDGSKNTCIEDMFPKEWREYKINGKKLNTASKIDPSKDLSKEAFAKSVVKANADKIDFSGFDPLLERICKAVQHYAAKS

SEQ ID NO: 768 - protein, 365 aa, unidentified
  source 1..365: note = Related to SAQI01000010.1; note = Mesorhizobium sp.
MTAIVYKTPLALKYTTFEIDKKSGGKRTIKAPAPKLKKLQAHLSHVLYQCLAEIERGSDAKPISFGFRRDRSISENALRHKRRRWVLNLDLEDFFPSFNFGRVRGFFLKDKAFGLHPEVATTIAQIACDGAALPQGSPCSPVISELIAQILDMRLVRLAKKYGVTYTRYADDITFSTSQKDFPTGLGSVDPNDPAVWHLSEELVGKIVTSGFAINDAKTRMHFRSSRQTVTGLVVNEKVNIRSDYYRRARAMCDTLFQTGQYYKVVIQPDEDEEPKPDVTSNLSPLQGPLIPFAQGHTISREETCGIVCCLLMLLKDVAVWCRTIATQKIRFGAVCRPIPRECNPRSTGKCDAFCTATNTGLVRS

SEQ ID NO: 769 - protein, 322 aa, unidentified
  source 1..322: note = Related to CP060244.1; note = Entomobacter blattae
MSYLHKLKSATSRKGLAEILGYRPKALTSIVYMTPLDQKYTIFEIDKNSGGKRTIKAPVPKLKKLQSHLSHVLNGCLAEIERERSAKPISFGFRKGRSIAENARRHKRKHWVLNLDLEDFFPSFNFGRVRGFFLKDKAFGLHPEVATTIAQIACDGAALPQGSPCSPVISELIAQILDMHLVRLAKKYSVTYTRYADDITFSTSQREFPTGLATVDTNDPPVWHLSDELVDKIVTSGFTVNAAKTRMHFQDSRQMVTGLVVNEKVNIRSDYYRRARAMCDVLFQTGQYYKVMTQPDDDNEGPKPDLTSNLNPLQASLAIFTQ

SEQ ID NO: 770 - protein, 579 aa, unidentified
  source 1..579: note = Related to JAGHQS010000002.1; note = Qipengyuania flava
MNVTHLKKLRAASSRKELAVILGYKPKTLTAIIYQTPPALKYTTFEIDKKSGGKRTIKAPEPRLKKLQTHLSHALYQCLAEIEKDRGAKPISFGFRKDRSIAENASRHKRRRWVLNIDLEDFFPSFNFGRVRGFFLKDKAFALNPEVATTIAQIACDGTALPQGSPSSPVISELIAQILDMRLVRFAKKYGVTYTRYADDITFSTSQKNFPNGLATVDPNDPTVWHLSEELVGKIVSSGFTINNAKTRMHFRGSRQMVTGLVVNEKVNIRSDYYRRARAMCDMLFQTGQYYKVVIQPDEEDEEPKPDLTSNLNPLQGILGHIYSVTQTEERREISEQRQKPRAIRKLFRRFLFYKYCMALKEPLIITEGKTDPVYLREAVKSRTKFHPALGAPGKDGFEHAVRYFNYGGLAHEVMDLGGGTGDLKSIPLDYLRNLKPSKGSHKPFAHKPMMHPVIIVLDNDEGLAAVGSTVKKNFGVAIDIKSTDDYYNVTENLYIVKTPENGTKNTCIEDMFPKKWRDHKIKGKKLNTASKIDPTKDLSKEAFAKSVVKANADKIDFSGFDPLLERIDKAIQHHAAKP

SEQ ID NO: 771 - protein, 577 aa, unidentified
  source 1..577: note = Related to JAINWB010000007.1; note = Thalassospira xiamenensis
MSHLKKLKAATSRKELAAVLGYAPASMTAIVYKMPKDRKYTTFEIDKKSGGKRTIKAPVAKLKKLQSHLSHVLYQCLSEIEKDRGAKPISFGFRRDRSIAENASRHKRRRWVLNLDLEDFFPSFNFGRVRGFFLKDKAFHLHPEVATTIAQIACDGTALPQGSPCSPVISELIAQILDMRLVRLAKKYSVTYTRYADDITFSTSQKEFPKGLAHVDANDPSIWHLSDELVGEITGSGFVINNTKIRMHFRGSRQMVTGLVVNEKVNIRSDYYRRARAMCDSLFQTGKYFTVTQPPAGEGEEPVPELIDSLSPLEGILGHIYTVTQSEERRSVQEQRQQPRAIRKLYRRFLFYKYFMALKAPLIVTEGKTDPIYLREAIQSRADSHPVLGVLGEDGFNHAVRYFNYEGLAHEIMDLGGGTGDLKSIPLDYLRNLRPSKEAHKPLLHKPMEHPVIIVLDNDEGLASVASTVKKNFGVSINLKSTSDFYNVTDNLYIVKTPENGSNGTCIEDLFPKEWRNYKVNGKKLNTASKIDPLKDLSKEAFAKSVVRPNADSIDFSKFDSLLGRISKAIEHYAAKP

SEQ ID NO: 772 - protein, 572 aa, unidentified
  source 1..572: note = Related to JADGDA010000026.1; note = Alphaproteobacteria bacterium
MSRKDLAGILGYNPSSLTAIIYKTPNASKYTTFEIDKKSGGKRTIKAPSPKLKKLQSHLSHVLYQCISEIEKNRECKLKPISFGFRKDRSIFENAARHKRRRWVLNIDPENFFPSFNFGRVRGFFLKDRAFALNPEVATTIAQIACDGAALPQGSPCSPVISELIAQILDMRLVRLAKKFGVTYTRYADDITFSTSQKEFPTGLARPDGTNPTIWHLSDDLVGKITNSGFTINSNKTRMHFRGSRQMVTGLVVNEKVNIRSDYYRRARAMCHHLFRNGQYFKSMLPQEKDGEEPKPELTGNLNPLEGILSYVYAVTQREERRNDQDQRQKPRAIRKLYRRFLFYKYFIALKAPLIVTEGKTDPIHLREAVKSRTKFHPALGKPGKDRFDHAVRYFNHGGLASEILDLAGGGTSNLRSIPIDYKRNLHANKKEQKAIARCPMRFPVILVLDNDDGLKTISSTIKEMFKVEFVVSSDADFYHVTDNLYVVKTPENGNKNTSIEDLFPDKWRNMELRGKKFSSANKIDSSKEYGKEVFAKSVVKPNACQIDFSAFDPLLERLCKVIEHHSGARAS

SEQ ID NO: 773 - protein, 568 aa, unidentified
  source 1..568: note = Related to NZ_QAYR01000012.1; note = Rhizobium pusense
MAEILGYPPSSLTAIIYKTPTASKYTTFTVDKKSGGQRIISAPIPKLKKLQSHLSHVLYECLDEIEKGRAASPISFGFRAGRSIAENAAKHKRRRWVLNIDLEDFFPSFNFGRVRGFFLKDQSFSLHPEVATTIAQIACDGVALPQGSPCSPIISELISQILDSRLLRLAKKYGVTYTRYADDITFSTSKKEFPAGLATQDATDPTLWNLSDELSGKITSSGFVVNNSKTRMQFRGSRQMVTGLVVNDKVNIRSDYYRRARAMCDSLFETGKYFSSMVPPAKVGDDAVPNRTDNLNPLEGILSHIYHITQAEERRDVQEQRQTPRAIRKLYRRFLFYKYFIALKEPLIVTEGKTDPVYLREAVRRLPQFHPALGTPGAKGFKHVPRYFGYGGLVSELLDLGGGGTSNLKSIPLDYRRNLNPTKKEPKAFGFRPMSFPVILVLDNDDGLSPIAGTIKKTFNIQISQSSTEDFYHIIGNFYVVKTPEILATGNPPQSTYIEQFFPQKWRDYPLNGKKFSTKNEIDINREYSKEVFAKSVIKPNAAAIDFSGFIPLLKRIEKVMKHHAAQT

SEQ ID NO: 774 - protein, 582 aa, unidentified
  source 1..582: note = Related to JADOUL010000002.1; note = Labrenzia sp.
MSHLKKLKAATSRKELAQFLGYKPSSLTAVVYKIANDDKYKIFEIDKKTGGKRIIKAPIPKLKKLQSHLSNMLYQCLEEIEKDRQLKPISFGFRKDRSIADNASKHKRRRWVLNLDLADFFPTFNFGRVRGFFLKDHAFELHPEVATTIAQIACDGTALPQGSPCSPVISELICQILDMRMLRLAKKYGVTYSRYADDITFSTNQKEFPTGLASQDTGDFTIWHLSEELVGKIENAGFTVNDEKTRMHFRGSRQTVTGLVVNEKVQVPSDYHRRARAMCHALFETGKYYRSEVESEDEDKEGELEPELIDNLNPLEGILSFIYSVAKHGDHRPIEEQRKHPTAIARLYRRFLFYKYFVAPKKPLILTEGKTDPVYLREAVKRRDSFHPGLGKPEKDGFKHAVRYFNYGGLAHDIMGLGGGGTSNLKSVPLDYARNLYPKRGKPRAIKHRPMKFPVVVVLDNDDGLGPLASTIKDTFGVRITQKSTDDFYHVTDNLYVVKTPEDADKKTFIEGLFPEKWLKKELNGKSFNAENKIDPDKEYSKEVFAKSVIKPNAKDIDFSGFDPLLERIQKAILDYQTKLGS

SEQ ID NO: 775 - protein, 571 aa, unidentified
  source 1..571: note = Related to NZ_JACICD010000010.1; note = Angulomicrobium tetraedrale
MSQLEKLKAAKDRKELATVLGYKPSALTAIIYHPPAKDRYTNFEIDKKSGGKRTIKAPDAKLKKLQSHLSHLLYACLDEIEKERDAKPLSFGFRRDRWIADNATRHKRRKWVLNLDLADYFPSFNFGRVRGFFLKDNSFALQPEVATTIAQIACDGTALPQGSPCSPIIAELIGQVLDMRLVRLAKKYGVTYSRYADDITFSTSQKDFPAGLASQDPTDATIWHLSDELLGKITASGFAVNPAKTRVQFRGSRQTVTGLVVNEKVNIPSEYYRNARAMCDALFSSGQYFTSMKASAPEPDLTSNLNPLEGVLGHIYAVTQTEDRRDVREQRIKPRAIRSLYRRFLFYKYFVALQAPLIVTEGKTDPVYLREAVKARTAFHPVLGAKTAGRFEHAVRYFNYGGLAHEILDLSGGGSGNLRSIPLDYRRNFQPSKNDPRAIAHTPLAHPVILVLDNDDGLASVASTIWDNFKVKIDVKTTAHFYHIIQNLYVVKTPEAGGKSAIESLFPDVWLNIELNGKKFNCSNTINPETEYSKEVFANSVVKPNAGNIDFSGFDLLLERIVAAIEHHRAK

SEQ ID NO: 776 - protein, 425 aa, unidentified
  source 1..425: note = Related to NCFD01000067.1; note = Acidocella sp.
MSQLEKLKATTYRKELAALLGFKPQALTSIVYKTPLSERYTTFEIDKKTGGKRTIKAPSPKLKKLQTHLSHLLYQCLDEIEKQRGEQPLAFGFRRKLWIADNAARHKGRRWVLNLDLKDFFPSFNFGRVRGFFLKDKSFELKPEVATTIAQIACDGVALPQGSPCSPVISEMITRILDMRMVGLAKKYKVTYSRYADDITFSTNHKNFPVGIAVPDGEDATNWNLSNELLGKITSCGFEVNSEKTRMQFDGSRQIVTGLIVNEKVNVASEYYRRARAMCDSLFSTGSYFRSMKEPKEDNDEPTPDLINGLNPLNGILGHIYAVTETEERRAISEQRIKPRAIRKLYRRFLFYKYFVALEVPLIVTEGKTDPVYLRSAVRRRPDFHPVLGKMKGDSFIHAVSYFNYGGLAHEVLDLGGGGVGNLKS

SEQ ID NO: 777 - protein, 573 aa, unidentified
  source 1..573: note = Related to JAFKKU010000016.1; note = Hyphomicrobiales bacterium
MSYLSKLKAAQSRKELAEILGYSAQSLTAIVYQTPDTSKYTTFEIPKRSGGTRTIKAPIPKLKKLQTHLSHALYQSLDEIENGREARPLSFGFRKGRSISENASCHKRRRWVLNLDLEDFFPSFNFGRVRGFFLKDSSFGLHPEVATTIAQIACDGVSLPQGSPCSPIISELIGHVLDMRLVRLAKKYKVTYSRYADDITFSTSQKDFPAGIALPDPANSANWMLSEELLSKISNSGFSVNQSKTRMHFRGSRQSVTGLVVNEKVNIRSEYYRNARSMCFSLFANGVYYKKNAATGEREPTDNPNPLEGMLSHIYYVTQSSEKREIQEQRINPRASRKLYRRFLFYKYFLRLDRPLIVTEGKTDPIYLKEAIERLDAFHPALGQKRNGQFHHTARYFNYKGTAHEILDLGGGGTANLKSIPIDYRRNLMPYKKEPRAISHRPMLHPVILLVDNDDGLGALASTVKEMFGTNISLKTTNSYYHIVENLFLVKTPENNEKKTCIEDMFPLSVLKRELNGKKFNPSNQIDITKEYSKDIFANHVVKAEADTIDFSGFTPLLDRIKKVIEDYKISHG

SEQ ID NO: 778 - protein, 577 aa, unidentified
  source 1..577: note = Related to JACKIO010000012.1; note = Rhodospirillales bacterium
MSYLEKLKNAKNRKDLARLLGFKPSALTAIIYMIPVEEKYTTFEIPKKSGGTRTIKAPAPKLKKLQTHLAHWLYECLAEIEEGRDSTPVAYGFRRKGTIAANAHNHKRRRYVLNLDLEDFFPSFNFGRVQGFFLKDKAFELNKEVATTIAQIACDGTALPQGSPCSPVISELIGQILDLRLLRFSKKHGVRYSRYADDITFSTNQKNFPVALAIQDSLDLSKWTLGEALINEIEQAGFKINANKTRMHCRGSRQMVTGLVVNEKVNIRSDYYRKARAMCDSLFQTGKYFKTLKVSDDPKEEPQPDFTSNLNPLEGILSHIYDITQKEDRRGVSEQRKEPRAIRALYRRFLFYKYCVAPKAPLIVTEGKTDPVYLREAIKYRDSFHPRLGKPGKNGFEFAVKFFNYGGQAHEVMDLGGGGSGNLKSIPLDYLRNLDATKKGRKAFKSKPMAYPVILVLDNDDGLRDIAGTLKTNFSISIKTNTSSDFYHITENLYLIKTPETSGQSCIEDMFPEKWKEKPLKGKKFNPNSKIDPQKEYGKEVFANSVVKPNANEIDFSGFDPLLSRIVSVLDDYKAAS

SEQ ID NO: 779 - protein, 575 aa, unidentified
  source 1..575: note = Related to JABGZD010000203.1; note = Proteobacteria bacterium
MSYLKKLKSAKNRKALASILGFTPSALTSIVYQTPLEKKYTTFKIPKKSGGDRIIKAPNPKLKKLQTHLAHCLYSCLSEIEEGRNATPVAYGFRKGGTIAANAKNHKRRRYVLNLDLEDFFPSFNFGRVRGFLLKDKAFKLEEEVATTIAQIACDGEALPQGSPCSPVISELIGQVLDLRLLRFAKKHGVRYSRYADDLTFSTNQKDFPPDFAQQDASDLSKWTLGNELVQKIEGAGFKINAGKTRMQCRGSRQMVTGLVVNEKANIKSEYYRNARAMCDSLFQTGQYFKTVISPDIPNDKPMPDLTDNINRLEGILSHIYDVTQSEERRPIADQRKEPRAIRLLYRRFMFYKYCVAPKVPLIITEGKTDPVYLREAIRHRNSYHPRLGNPGKDGFEFAVRFFNYVGQAHEIMDLGGGTGDLKSLPLDYLRNLDPNRKGRKPFKHKPMACPVILVLDNDDGLSGVAGTIKKNFDVTVSIKTTDDFYHITENLYLIKTPEAKKKSCIEDLFPQQLKGTLLNGKKFSAKAKIDPQTEYSKEIFANSVIKPNASKIDFSGFDPLLDRIVSVLDHYSPQ

SEQ ID NO: 780 - protein, 578 aa, unidentified
  source 1..578: note = Related to VYFW01000066.1; note = Gammaproteobacteria bacterium
MNYRDKLKAAKDRKDLARLLGYKPSALTSIIYVTPPERKYTTFEIAKKSGGIRTIKAPNPQLKKLQSHLAHYLYGCLAEIEEERQARPVSYGFRKTRTIASNAKNHKRRRYVLNIDIEDFFPSFNFGRVRGFFLKDKAFALKEQVATTIAQIACDGEALPQGSPCSPVISELIGQILDLRLLRIAKKHGVRYSRYADDITFSTSQRDFPEALAVQDSESLFGWAPGAELVHEIRRAGFKINPSKTRMHCRGSRQMVTGLVVNEKVNIRSEYYRKARAMCDSLFQSGTYFRSFTPPVSPGVDPQPDLTVNLNPLEGILSHIYAVTQSEDRRGIKDQRLKPRAIRTLYRRFLFYKYCIALDAPLIITEGKTDPIYLREAIRFREIFHPQLGEPGESGFKFAIRFFNYTGQAHEIIDLGGGTGDLKSIPLDYLRNFDARKRKPFQHVPMAYPVILVLDNDNGLESIGSTVRKNFGISITVDSTDDFYHITKNLYLIKTPETKEQSCIEDLFPAEWKNKRLNEKKFNPSGSIDTQTEYGKKMFAKYVVRPNSHKIDFSGFDPLLERIVAVLDHYSAEGKQSL

SEQ ID NO: 781 - protein, 580 aa, unidentified
  source 1..580: note = Related to NZ_QWGA01000003.1; note = Henriciella algicola
MSQLENLRSAKNRKELASLLGFQPSALTSIIYKTPLADRYSTFEIPKKSGGTRTIKAPNDKLKKLQRHLAHLLYNCLAEIEDELSIASVSYGFRQNGSIIANAKNHKRRRYVLNIDIENFFPSFHFGRVRGFFLKNKFFALEDEVATTIAQIACDGEALPQGSPCSPVISELIANILDLRLLRLAKEHGVRYSRYADDLTFSTNSKKFPDAIASEGALGNWTLGNELVEEIDDAWFTINHAKTRMHCRGNRQLVTGLVVNEKANIKSEYYRNARAMCDSLFTQGRYYKSKTSPEDADAVPQPIWTSNLNPLEGILSHIYDVTQSEERRPVPEQRNAPRAIRALYRRFLFYKKCVALTAPLIITEGKTDPIYLREAIRHRNVFQPVLGSMGDEAFEFAVNFFNYEGSSHELMDLGGGSGDLRSIPLDYRRNLAPAKEKKRKPMIHTPMSYPVILVLDNDDGLSAVTGTIKKNFGVQIDKTTTDDFYQVIQNLYVVKVPETTSDAQIESLFPDSVQSIKLNGKAFSTKDKIDPEKEYSKAIFAKSVVRPNADKIDFSGFDPLLHRIVAAIDHYDANGPKAFS

SEQ ID NO: 782 - protein, 572 aa, unidentified
  source 1..572: note = Related to NZ_BARJ01000009.1; note = Gluconobacter oxydans
MSYLKKLKAAKDRKELAKLLGYEPSSLTAIIYMTPLPAKYSTFDIPKKNGGVRTIKAPEPKLKKLQTHLAHLLQACLVEIEADKLSRPVSFGFRKKGRITDNAKVHKGRRYVLNIDLADFFPSFHFGRVRGFFLKDKNFELSDQVATTIAQIACDGAALPQGSPCSPVISELIGHVLDVRLLRLSKKHHVTYSRYADDITFSTNNKAFPTALASQDPADPAKWVLGDELINKVQNSGFQINPAKTRMSCRGSRQMVTGLVINSKVNIKSEYYRNARAMCDSLFQKGWYFRDSTPPVEDGDPPTPNYIISLSPLEGILSFAYNITQSEDRREIAEQRKKPRAIRELYRRFLFYKYCVAPSQPLLITEGKTDPIYLREAIIRRTAYHPTLGTFGPTGFKFAIRFFNYEGQVHEIMDLGGGTGDLKSVPMDYLRNFKPYRKRKPFKHKPMQHPVIIVLDNDKGLQGVASFLKENFDTIISLTTKNNFYHIIENLYVIKTPESSPMTCIESMFPKIWLKHSLNGKTFNPDKPDITKEFGKEIFAKSVVKPNAGSIDFSGFDPFLDRIIAVFNHFYG

SEQ ID NO: 783 - protein, 577 aa, unidentified
  source 1..577: note = Related to NWSX01000001.1; note = Rhizobium sp.
MSYLAKLKATKDRKDLARLLGFTPSAMTSIVYQTMPAAKYTEFEIPKKSGGKRVIKAPFPKLKKLQTHLAHVLYGCLAEIEQNFDAKSVSYGFRKGRGIEGNAKIHKRKRFVLNLDLADFFPTFNFGRVRGFFLKDTSFALTNEVATTIAQIACDGVALPQGSPCSPVISELICHILDVRLLRLARTYGLRYSRYADDITFSTNRREFPADIARVNQTDPSTWVIGKELASRIDDCGFAINFTKTRMHCRGSRQMVTGLIVNEKVNIRSEYYRNARAMCDSVFRQGAYFHSHQTPTVAGGTPIPEMTDNLAPLEGILNHIYSVTQTEERRSVQDQRSAPRAIRSLYRRFLFYKRFIALEAPLIVTEGKTDPVYLREAIRHLPSWQPRLGEPTVNGFKFSLSFFNYGGKSHEIMDLGGGTGDLKSIPLDYLRNLDSSKSDRKPMQHKPMKFPVIMVLDNDDGLGDVAGTIKKNFNVGMSVTSTQDFYHVCENLYVVKTPEAGGKSSMESMFPKSWTTIVLNGKKFNPSNKIDITKEYGKEVFATSVVKANAAKIDFSGFNPLLDRIVKVIDHYAPPAS

SEQ ID NO: 784 - protein, 674 aa, unidentified
  source 1..674: note = Related to NZ_LT670818.1; note = Bradyrhizobium erythrophlei
MSILHTLRTAKTRYDVAALLGYKPSALSYIVFQIPTAEKYKTFEIKKKGGGKRRIDAPIPMLKGLQRRLADVLYECLRELEEPEKRKNKLSHAFRKDYSIITNAKAHKSRRYVLNLDLQNFFPSLNFGRVRGFFLKNNQFKLAEPVATILAQIACNDGVLPQGSPCSPILSELLTHFLDIRLVKLAAKNQCSYTRYADDITFSTNQKEFPVALAVAVGEGWILGDEVKSRIEGAGFTINDTKTRMQVRGSRQTVTGLTVNEKVNVPQRYCKLARAMTHSFLATGAYKRDGVDDSSVPRLEGVLDHIYHIKERQIDIAIDAEKNKEKRHKLHADRTKHKNEYPSAIRLIYFQLVFFKHFIDPSKPLIICEGPTDSIYLKSAIRKLAALHPKLASTKDGKLSLDIHFFKYSKQSKDLLQLRGGSPDLKFFLEAWRDKLAKFKHRPMKHPVIVLIDNDDGATQIFKLAQSKKFGVTIGHATDLPFYHLGGHLYLVKTPIKGPDNKSCPEDFSTRPCWQPRSTARPLIPTRSTTRLASSERSSLQSVSCGRRRAASTSQALIPFSLALTPYSMITPNAGLRAQRPRHRRRSQRCRHRQRRSARRQPPPWPRPNVGCASQSIDLGRNRAGGGAAGRVNPVQDSSREASMLFPNLNTALMESKMKRASAFSKKTLSWARL

SEQ ID NO: 785 - protein, 607 aa, unidentified
  source 1..607: note = Related to JADPKY010000194.1; note = Bradyrhizobium sp.
MSILQSLRAAKTRYDLAALLGYSPSGLSFIVYQIPKAAKYTTFDVKKKDGGQRRIDAPIPMLKALQKRLAGILYECLRELEESDKRRNNLSHAFRKNRSIITNAMAHRSRRYVLNLDLQNFFPSLNFGRVRGFFLNNNQFKLAEPVATTLAQIACNDGVLPQGSPCSPILSELLTHFLDMRMVKLATKSRCSYTRYADDITFSTNLKAFPASLAVAVGSGWALGDELKSRIESAGFTINEAKTRMQVRGSRQTVTGLTVNEKVNIPQSYYKLARAMTNSLLTTGTYKRDGVNDSSVQRLEGVLNHIYHIKERQIDLAIDAEKNKEKRHALHAERTTQKNEYPSAIRLIYFQLVFFKHFIDLAKPLILCEGPTDSVYLKSAIRKQAALHPKLISTKDGKTSLNVHFFKYSKQSKDLLQLRGGSPDLKFFLEAWKETLVKFKHRPMKHPVIVLIDNDDGATQIFKLLQSKKFGVTIGLATDLPFYHLGENLYLVKTPIRGPDNKSCPEDFFDPAVLSTKIDGKTFNPNKEHDAPGEFGKVVFAERIVRPQAGTIDFSGFDPLLARIDAVLDDYAKRTAPGPAAAPSPPAAGAAPKMKKRPRAATAAAQP

SEQ ID NO: 786 - protein, 577 aa, unidentified
  source 1..577: note = Related to JACIHF010000027.1; note = Bradyrhizobium sp.
MSALQALRSARNRYDVAAILGYKPSALSYIVFQIPTANKYTVFEIDKKGGGQRRIDAPIEKLKGLQRRLADTLYECLRELESTDKVKNKLSHAFREDFSIITNAKAHRARRFVLNLDLSDFFPSLNFGRVRGFFMRNRSFRLAEPVATIIAQIACNNGVLPQGSPASPIISELMTHFLDIRLVRLAARNRCSYTRYADDITFSTNLEEFPAALATAEGQSWKLSDELRSRIRDAGFEINDAKTRMQVRGSRQTVTGLTVNEKVNVQQYYYKSARAMTHAFITTGKYIRNGDEETSVQRLEGILNHIYHIKERLIDIGIEAQENDEKRHKLHADRTKQKNEYPSAIRLLYYQLVFFKHFVDPSRPLIVCEGPTDPVYLKCALRSLATSHPKLATAVDGKISLAVNFFKYSDQSRDLLQLRGGAPDLKFFLQTWKDKLAKYKHRPMKHPVIILIDNDDGATEIFKLLQSRKKFGIDISHATDLPFYHLGNHLYLIKTPINGPNNKSCPEDFFETSVRETPIDGKRFNPDKEHEAPGEYGKVVFAERVVRPQAANIDFSRFDPILARIEAVIDDYAARKS

SEQ ID NO: 787 - protein, 601 aa, unidentified
  source 1..601: note = Related to FOUS01000020.1; note = Bradyrhizobium sp.
MSSLHALRAATTRNDLAVLLGYKPSALSFIVYLTPPTAKYTTFDIAKKGGGTRRIDAPTPRLKGLQKRLADLLYECLREIEESEPRKNKLSHAYRKQFSIITNAKSHKSRRYVLNLDLEGFFPSLNFGRVRGFFLTNNHFKLARPIATLIAQIACNNGTLPQGSPCSPIISELLTHFLDMRLVRLAGRNKCSYTRYADDITFSTNQKEFPEALAVAVAEGWSLGDELRSRIEDAGFSINESKTRMQVRGSCQTVTGLTVNEKVNVPQRYYKLARAMTHSLLSTGSYLRDGISETSVQRLEGILDYIYNIRERQIDIALSAEKDAAKRKKLLSDRVEHTNEYPSAIRKIYYRLVFFKHFVDPTKPLIICEGPTDPVYLKSAIRRLASAHPKLTSVRGSDILLNVAFFKYSKQSRDLLQMRGGSGDLKYFLEGWKEELARHKHRPMKHPIIVLIDNDDGAKSIFGILRGKFGQSIGLATDLPFYHLDGPLYLVKTPTRGADHKSCPEDFFESHVLATKVDGKIFNPDKEHDAPGEYGKVIFAEKVIRPLAGSIDFSGFEPLLARIEAVIEDYSKRTATRPPPPLAAVRPTASRAKRAVVAAKP

SEQ ID NO: 788 - protein, 576 aa, unidentified
  source 1..576: note = Related to NZ_FYEH01000004.1; note = Arboricoccus pini
MAALLSYSPSAVSYIIHITRPATRYMTFDIPKRSGGVRTIDAPNDRLKGLQRSLSKLLFKCLREIEAKDPRRNKLSHAFRPGASIISNAKTHHRRRYVLNLDLKDFFPAFNFGRVRGFFLKNEHFRLAEPVATLLAQIACKDGKLPQGSPCSPIITELMTHFLDIRLVKLAARHKCTYTRYADDITISTNQREFPSALAELDGTQWKLGEELVSRIHDAGFEVNDAKTRMQLRGSRQMVTGLTVNEKVNVAQAYYKRVRATAHRFLTTGAYELDGATCNSVPRLEGMINHIYHVRERQIDIAIANEGNKEKQHKLHAERTKTKNERPSAIRVVYYELIFFKNFINPPQPLIICEGPTDPVYLKSAIRRLAAAHPLLASVVGGKPELKVNFFKYSDQARDFLQLRGGSGDLLSFLISWKEAFNRYNFRPAEHPVIVLIDNDDGAGDIFNYLKNKKNYGLDIALEKHDPFFHLHGSLYLVKTPALGANHKSCPEDFFDPALLAEKLDGKSFNKENKINPATEYGKAVFATRVVRPKAGAINFAGFTPLLERIEAVIRDYAARKAAAAAPVPAAAAPTP

SEQ ID NO: 789 - protein, 568 aa, unidentified
  source 1..568: note = Related to NZ_AXAP01000106.1; note = Bradyrhizobium elkanii
MAHLLGYQPSGLSYLLYKLPVGAKYTTFTIPKKSGGVRQIDAPAPRIKRLQRELAKILYKCIAEIEAQPGRKNTLSHAFRYGHSILTNAKAHRKRRYVLNLDLQDFFPTLNFGRVRGYFLKNRDFLLSEKAGTLIAQIACHEQTLPQGSPCSPVISELLAHFLDIRLATLAKKHRCTYTRYADDLTFSTNQKDFPAALAVETEAGWILGDGIVQKIQSAHFTIHPSKTRMQLRARRQTVTGLVVNEKTNVRSDYYKTARAMVDSLFRTGTYVIDGAPETALAPIEGILNHIYHVRESVIDAAIEAELDPERKKKRKSERAKAKRETPSAIRVLYHRLLFYKHFIAPSQPVLLGEGPTDSIYIKTAIRRLPAYHAALTELKQGKQVQRLDFFRYSKQAKEILQLGGGTGDFKYLLTAYKKFAPQYKHAPMAHPVILLIDNDSGSNPVFSVMASLFHVTASIKTDLPFYKLASNLYVVKSPPVELDGSSYIEQFFDPALLTTTIDGKTFNPNKEHEAAGEYGKVWFAEKVIRPNEANIDFTNFGPILARIAAVLEDHAASKAAVLPQAAQ

SEQ ID NO: 790 - protein, 595 aa, unidentified
  source 1..595: note = Related to JAFCMB010000001.1; note = Bradyrhizobium sp.
MSKLSLLKSASSLSDVADLLGFSPSGLSFVLYKQSALAKYKKFEIHKKTGGTRDICAPIGAMKAIQRELATVLNACRAEILEATPRRPLSHGFRESLSIITNAQNHTARRHVLNVDLADFFPTFNFGRVRGFFLKDKDFFLNEKAATVLAQIACFENTLPQGSPCSPVIADMIAHVLDVRLVGLAKKNRVTYSRYADDLTFSTNQKDFPEDLAKPGAGPADPWIVGDELLKKIEGAAFKVNPTKTRMQFRGSRQVVTGLTVNTKVNISQRYWRSIRSMCHALFQKGEYHHPAPKAGTPPGSALVMINSLEPLAGMLSHAYHVKRKSLRFPDEKKEDVVFGQTDHRRFWFYKAFVAPTRPLIVCEGPTDNIYLRNAIRRLTAYHPKLGNMTPHGFKYGVALFSYTNQIHKILGISGGIGPLLTLVHGYKKQLKEYKFRPMAHPVIVLVDNDTALGQKVCNSLKKHFGVDVTHHSPSSFFHLTDNLYLVKTPLVGILAMTCIEDLFDAATKAMPLDGKTFHTEKAGFDPTKHIGKAPFATKVVSPNAAAISWNGFVPLLDRIVAVQNDYSAKLGTTPLAALPHTPTLAPLSPAAGHP

SEQ ID NO: 791 - protein, 554 aa, unidentified
  source 1..554: note = Related to MEEX01000061.1; note = Phenylobacterium sp.
MSFVLYKQHPALKYAKFEIPKKDGGTREICAPLGPLKAIQRELATLLNECRAEILEATKRAPLSHGFREDLSIVTNAHNHTARRYVLNVDLADFFPTFNFGRVRGFFLKDKDFELHEKVATVLAQIACFENSLPQGSPCSPVIADMIAHVLDARLVGLAKKAKVTYSRYADDLSFSTNQKSFPEGLAKPSAVGSGVWVAGDDLVKKIEASGFKLNPAKTRMQFRGSRQVVTGLTVNAKVNVSQKYWRGIRSMCRALYTTGAYHLPSPKAGAPAGDPPEKIASLRVLAGMLSHVYHVKRESGFAPDGEKEEIVFGHTDHERFWFFRSFVALDRPLILCEGVTDNVYLRNAMRQKAAAFPQLAAKTPEGYKFAVALFSYDNLIHKILGITGGIGPVLKLIHGYRRRLKAFKYRPFLHPVIVVVDNDTALNAKTCNALKKHFGVDITHGSADDFFYLTNNLYLVKTPLVGTKAMTCIEDLFDDATLKKDLDGKVFHTEKEGFDASKHIGKKLFATKVIAPEAATISWDGFEPLLARVAAVLNAYAAKVAADASSSTT

SEQ ID NO: 792 - protein, 549 aa, unidentified
  source 1..549: note = Related to NZ_JAENJN010000015.1; note = Brevundimonas diminuta
MAGLLDVEPRQLSFALYKLTPQQKYDTFEIPKKGGGVRTIHAPRGVLKDIQARLAALLYDCVDEIQVAKPRRPVSHGFRRSLSIITNAARHTNRRYVFNLDLEDFFPTFNFGRVRGFFLKDQDFLLSEKAATLIAQIACRDGALPQGSPCSPIIADLIAHILDVRLLSLAKTSKVTYSRYADDLTFSTNQKIFPPAIATGGAGPEDAWVIGSPLARVIERAGFSINTRKTRMQERASRQLVTGLTVNSKVNVTQSYWRSIRSMCHSLFQTGAYYRPIRTGEPPTLLMSLSPLAGMLSHVHHVKRESGVRPDRPGKDFQFGHKEQEDFWFYATFIALTQPLIVTEGKTDGVYLRNAIRNLPAFHPALGHITPEGFSFGVRIFNYENQTHQRLRITGGIGPLSTFMIHYGARLKRYGHRPLAAPVIVLIDNDTALTKELRAALDRNYGVKVDLLTPASFYHLTDNLYLVKTPELGASGVSCIEDFFDTATRKLPLDGKTFHADGKGFDPTRHIGKSPFAKKIVAPRAATIDWTGFAPLLSRIAAVVAHYKH

SEQ ID NO: 793 - protein, 572 aa, unidentified
  source 1..572: note = Related to NZ_CP054836.1; note = Oricola thermophila
MTILKKLQDAKDLEDLAKILGFSPKGISYIIYKLEENSKYKKFKIKKSHGGEREICAPIEPLKTLQRRLANVLYASVDSIEAEKGINSTSHGFRRGHSIISNARKHKRRRYVLNLDLKDFFPTFNFGRVRGFFISDNRFGFHENVATLISQIACHENSLPQGSPCSPIIADLIANILDARLVRLAKDHKVTYSRYADDITFSTSLKKFPAALAQPVAGEGPDWKLADPLTKAIEGAGFKINPDKTRMQFRDGRQLVTGLTVNDKVNIRPEYYRYARSMCHQAFKSGKYYRPSKVSVVGEKEPEMIESLNPLEGILSHIHHVKDTIDVRIEPEKRRHGTAARQLYRRFLIFKKFVCLDQPLVICEGKTDSIYLKCALRKLTPSFPELAKIKDEKFTSKISFFNYTGRVHSVLELGGGTEDLKFFFIKTRYHEIINRFGHKPLQHPVIVLIDNDDGAKGLFKTIKQNFGITIDLQSDDKFYHITDNLYLVKTIEKGESGKSCIEDCFEPSLLETKVKGKKFNSLKYGGASGGYGKFVFAEQVVRPNADKIDFNGFKPLLERITAAIVDYKSRVP

SEQ ID NO: 794 - protein, 563 aa, unidentified
  source 1..563: note = Related to PBKC01000100.1; note = Rhodospirillaceae bacterium
MAYILYKIPDSAKYQKFTIPKSGGGEREICAPVERLKTLQRHLANALYACRDEIDRESGLRPLSHAFRRTVIVTNDRRHKLSIITNARRHKRQRYVLNLDLQDFFPTFNFGRVRGFFIHNNDFKLNDKVATIIAQIACFENALPQGSPCSPIVADLIAHLLDVRLAQLAKKHQLTYSRYADDLTFSTSRRDFPPSIAAPVTPESPEWAPGRELAKVIDKSGFVINPTKTRMQFRMSRQLVTGLTVNAKVNIRPEYYRRARAMCHSLFETGQYYRPLSVPETEAEDGEDVKLEPVTSLNPLQGILSHIHHVKDAIDDRPEPEKRMDATAARKLYARFLKYRYFVRLDRPLIVCEGKTDNIYLKHAIRQLTDFHPKLGEWEDNSFKSAIRFFNYTGQAHKLLELGGGASDLKYFFIKNRYAEDVRGFKHRPLAHPVVILIDNDDGADGKKGLLSTIKTNFNINIDLKSNDSFFHITDNLYLVKTPGKGKKVKSCIEDFFDPKLLKTKLNGKKLNLKKDHGADGEYGKYLFAEKVVRPNADKIDFSDFKPLLERITAVIDHYKPPD

SEQ ID NO: 795 - protein, 572 aa, unidentified
  source 1..572: note = Related to NZ_JAGHQP010000025.1; note = Brevundimonas sp.
MAALLGYKPKSLAYILYKIPDGAKYTTFTIPKKTGGEREICAPIAQLKLLQRRLANILYACRDEIDKSSKLGSLSHGFRRGHSIVSNAKPHRRRRYVLNLDLKDFFPSFNFGRVRGFFIKSKAFELNEKVATLIAQIACHNNALPQGSPCSPVISDLLAHLLDARLAKMAKAQGVTYSRYADDLTFSTSKKEFPAALATSKEGETNVWELGEELVSRIVDAGFAINPDKTRMQCHASRQLVTSLTVNAKVNIRQEYYRRTRAMCDALFKTGQYADVPFNKSLARRQDSVTANEGGATGSGPWAPAKAGIKSLGPLGGRLAHIHYVKDTIDTREEIDKRKHMTAFRMLYYRFLFYKNFVALDKPLVLTEGKTDNVYLSLAVRHLPKFHPKLGQPSAKGFQSALRYFNHVNKTSKVMELDGGSGNFKFFVLRYADLIAKFGHKPQLHPVIMLLDNDDGAKDILAVIKKNYGIEIKPSSTNSFFHITDNLYVVTTPHVGKKVKTCIEDFFEPSLLKEELNGKTLNLGTPNPATEYGKHIFAEKVVRPNASTLKWDGFEPLLQRLSDVLDHYEPPT

SEQ ID NO: 796 - protein, 587 aa, unidentified
  source 1..587: note = Related to NZ_LT960614.1; note = Hartmannibacter diazotrophicus
MSILKSLKAAEDVDDLAVLLGYKPKSLTYILYKLPDAAKYTTFKIPKKTGGEREICAPTDQLRLLQRRLANILYTCRDEIDHESGKGSLSHGFRRGHSIVTNAKPHHRRRFVLNLDLKDFFPSFNFGRVRGFFIKSKAFELNEKVATLIAQIACHQNALPQGSPCSPIISDLLAHLLDTRLAKMAKKEGVTYSRYADDLTFSTNKRVFPTALAIQNGDNAKLWELGEELTSRIADTGFTINPDKTRMQCRMSRQLVTSLTVNAKVNVRMEYYKRTRAMCDTLFKTGLYSDIPFNKSLARRRDNALAVAGSEKDKDGVKAAKTSITSLGPLSGRLAHIHHVKDRIDTREEWEKRKHKTTFRMLYCRFLFYRNFAALDKPLILTEGKTDNVYLSLAVKNSPKFHPKLGQLTAKGFQSNLRYFNHLNETHKIMELDGGSGNFKFFIIRYKEIMDSFKHKPMLHPVVLVVDNDGGAKDIFATIKTNYGISINHDGKHGFYHVTHNLYLVKTPHVGKKQQTCIEDMFEPALLKEELGGKKLNLGKLDPAKEYGKHLFAEKVVRPKASTLKWDGFEPLLQRVVEVLDHYKPPT

SEQ ID NO: 797 - protein, 559 aa, unidentified
  source 1..559: note = Related to NZ_PSRS01000004.1; note = Bradyrhizobium sp.
MSVLGDLKAATSLSDLAKLIGYKPSALSFLIHHAPATSKYTSFSVPKKSGGVRLINAPSPKLKTLQQHLVTLLTKCRKEIDEASNLKPLSHGFRKGQSIITNANPHIRRRYVLNLDLEDFFPSINFGRVRGYFIKNNDFKLHKDVATVIAQIACHANSLPQGAPTSPIISDLVAHLLDVRLVRLAKKNNCTYTRYADDLTFSTNVKVFPTSLALQTSPSDWELGKPLSDVITDVGFKVNPLKTRMQLRGSRQTVTGLTVNQKVNIQAGYYRRVRSMCYELFKTGLYFQQGSAPVSALPVVEGQLNHCFRVKHEVAYSRKVDIQNDKRDRGVRKLYRRFLFYKHFVQLTKPLLICEGKTDVIYLKLALRSLAASFPSLVTTTAAGEVRNVGFFNHTDIADNLLKLGGGSGGMQLLIKDYASVLKYFRSKPLAHPVILVIDNDDGADDIFAAIYNVTKTKVSRTSTADFYHIVNNLFLVKTPESGIHGTSRIEDLFKPSVLKTVVDGKIFNPAKKIDPTKEYGKIVFAEKVVRPNANKIDFSAFNKFLGRIEAILKHYKPP

SEQ ID NO: 798 - protein, 593 aa, unidentified
  source 1..593: note = Related to NZ_CP085136.1; note = Lichenihabitans sp.
MLLELRQADTLERFAALLNYTPSGLSFILYKMDAASKYTTFEVTKASGGVRMIHAPHIKLKRLQKALANILLACNVEIETATPRRPLSHGFEKKRSIFTNAWEHKNRRYVLNLDIEDFFPTINFGRVRGFFIKSHDFTLPEKTATLIAQIACRDGKLPQGSPCSPIIANLVAHLLDVRLVGLAKRSNCSYTRYADDITFSTNQQEFPAELAAEDPPRSGTWVLSEALIAQITRTGFTVNNAKTRMQCRPSQQLVTGLTVNQKVNIRAAYYARARIMCSSLFNHGHYHVEMEPAPAPAPGGTPGKPKPKLLTKTATLEGILSHIYHIKHAQELKSNPETYKAKDPEAKKKTNQKREYPGYRKLYKKFLYFRHFVSPTAPLVMCEGKTDNIYLRSALKGLDPSYPRLAEVKDGKLFTKGRFLKHSRAEHDILELSGGSGNIANFIAHYRSAVFNYKHRPMKYPVIILLDNDSGGNAVFNQAKEMFKIRVGYDTTEAFYHLCHNLYLIKTPEMGRTGESCMEDLFDEKTRKELVDGKTFNPKADKDTATQYGKMVFADRVVRANYAMINFDKFKPLLERIVAVLDHFDANKPKAAT

SEQ ID NO: 799 - protein, 587 aa, unidentified
  source 1..587: note = Related to NZ_LABZ01000002.1; note = Methylobacterium tarhaniae
MLSQLKSASTIDRFAAALGYKPAALAFILFKMTDAEKYQTFTIAKASGGVRTIHAPTEKLKRLQKRLANVLADCRKEIHDKKPLSTLSHGFEPDRSIFTNAWAHKNRRYVLNLDLEDFFPTINFGRVRGYFINNRDFQLPIKAATLIAQIACFQGKLPQGSPSSPIISNLIAHLLDVRMARLAKSNTCTYSRYADDLTFSTNQKQFPPDIATQVPDEPGNWVLGNRLTGEIVRTGFTINHQKTRMQSRPSQQLVTGLTVNEKVNIRASYYRHARKMCSSFFNHGVYYNEMEFVFGVEGPRPKLIDTPSVLEGILSHIYHIKNLQLTRSTEPEELKQKSNKIKYPAYRHLYKKFLYFRHFINLDAPLIVCEGKTDNIYLRSALKALYPAFPVLADVKKGELRSKVKFLKHSRIEHNILELSGGSGNIANFIAHYRGAVYNYKYRSMKHPVIVLVDNDSGQKGSVFPQANKLNGKIDINYSSKEPFYHLCHNLYLIKTPEIGLTGESCMEDLFDAATLATKVDGKTFNRKDDKDTSTQYGKMVFADKVVRANYDKIDFSLFVPLLERITKVIAHYKSNPSASASSHVKS

SEQ ID NO: 800 - protein, 504 aa, unidentified
  source 1..504: note = Related to SDGU01000027.1; note = Chlorobaculum sp.
MSTLLRLRTAKNLKDLSVILGYEPKKLSYILYKIPEQEKYNSFEINKKDGGKRLIEAPIPQIKKLQKHLCNILTLCSVELAKDSPNNILSHGFKKGSSIQTNAQKHKNKRFVLNFDIKDFFWSINFGRVRGFFIKNKDFLLDDKVATIIAQIACYNGRLPQGSPTSPIISNLIAHLLDIRLVGVAKKYGCVYSRYADDITFSTNQKEFPLDLVRRSSENPELLLLGTPIEEEVKRSGFCVNPLKTRLKYRDTRQVVTGLVVNKKINVRSEYYRLARAMCHSYYKTGKYLIPSKISPIDIPSTLCDSDVKADLNRLGGILNYIFYTRNYSDQRCLRDKQDNKSGIWKMYRDFIYFKIFGALERPLILCEGPTDSIYLKAAIKSLHNEYPELIEKCSERFIYNISFLKYSKTIRELLHLTGGTGELANFVGYYASMAKQYVIWNPMHPVIIVTDNDGKRKNAATKVFAAVKQNSKNSHPTTEDDSDFFHINNNLYLVKMPHINNKK

SEQ ID NO: 801 - protein, 583 aa, unidentified
  source 1..583: note = Related to NZ_LNYU01000023.1; note = Legionella santicrucis
MAYLEKLKAASTIQDLAALLNLKASHLAYVLFVLPDETKYKQFEIPKKAGGERIINAPHERLKHIQRCLAHLLQYCVLEIEHSKPQPTPRVLSHGFRKKTEVNPNRKSDISIGIHTNAYSHQNKKYVLNFDLSGFFGSFNFGRVRGFFIKNNDFGLHPSVATLIAQIACFKNELPQGSPCSPIITNLIAHILDIRLVRWAKKNRCSYSRYVDDITLSTNQEIPQKLATQSEELMKWSLNKEIENIITHSGFQINPLKTRLQMHSSRQIVTGLVVNKKINVKKEYYRSTRAMCHALYCTGSFFLLGDKSKPGTLQQLNGILEYIYFIKQKNHCNKEPCYKTNVEQHNITNLYSQFLYFRYFIALEKPLIICEGKTDVAYLKIAIKQLKKQGKYLLPHQIDFFHFTERISEVMHINAGTSLLKKFIENYKKNIAFTKQIPRSPVIVLLDNDKAAGDVIQCLENKFKKTNVNYDRKKNFIYPVIENLYVVLLPIRNPPEDIIIENFFEKSVLETKLGEKIFSPENGNGFDSQRHYSKQVLVEKVIRPKQDTINFSGFTDILDNLVTAIEQYKPGPDKIQDQAVSII

SEQ ID NO: 802 - protein, 580 aa, unidentified
  source 1..580: note = Related to NZ_CP014691.1; note = Neoasaia chiangmaiensis
MSSLAKLQSAKSLDELAAILGYKPAALAYLLYHLPTARKYTTFTIPKRDGTPRDILAPTPKLKLLQRRLANVLYLALADIDKAGAPRRHLSHGFAKHLSIVTNANVHRRRRYVLNLDLKDFFPSINFGRVRGMFIKDKRFALDPKIATLIAQIACHNNVLPQGSPCSPVISNVIGHLLDIRLVRLAKAQKCTYSRYADDITFSTNAKLFPADMAALVAGTEHEWTLGAALIEEIDKAGFAINPVKTRMQYRGSRQVTTGLLVNEKPNILPEYYRPVRAMCWSLFNNGSYYRVVPATLAGGKPGDPDVQEPATSLAPLQGMLGHIYHVRDQIDQRSSAEKKKETTATATRKLYHRFLFYRNFIVAPKPLIIPEGKTDSIYLQAAIEKLIAYHPQLGRMDKGKFKSALKFMNFSSTVHAVLQLGSGSGDLFHFIRKYHELLKHYHHRPLPNPVIVLIDNDDGAKEIFGAAKGLGAIGISLTSTDAFYRLGPNLYLIKTPETGPKGKSCIEDLFDPTLLKAEIDGKKFDVNKKHGEPGKYGKQIFAEKVVRPKKDIIDFSKFSGLLDRIVSALDDYTASPPPP

SEQ ID NO: 803 - protein, 468 aa, unidentified
  source 1..468: note = Related to AP018498.1; note = Altererythrobacter sp.
MLNLDIKDFFPSINFGRVRGMFIKDKRFALDPKIATLIAQIACHDHVLPQGSPCSPVISNVVGHLLDIRLVRFAKAQKCTYSRYADDITFSTNAKAFPPDIAAPVAGSEHDWTLGAALLKEIEKAGFEVNPTKTRMQYRGSRQVATGLLVNEKPNVRPEYYRTVRAMCWSLFNSGTYYRMVPAALAGGKAGDPDVPEPATSLAPLQGMLGHVYHVRDQVDTRPSADKKKDATATATRKLYIRFLFYRNFVVAPKPLIIPEGKTDTVYLRAAMEKLTAYHPRLGAMDKGKFKPALKFMKFSSTIHDVLQLGNGAGDLFHFIRRYPDALKRYRHRPLPNPIIVLIDNDDGAKEIFGAAKGLGAAHIARTSTDPFYRLAPNLYLIKTPEIGAQGISCIEDLFDPALLKTVIDGKVFDPNKKHGEAGKYGKARFAEKVVQPQKDTIDFSKFAGLLDRIVAALDDYVANPPPP

SEQ ID NO: 804 - protein, 578 aa, unidentified
  source 1..578: note = Related to NZ_NISJ01000021.1; note = Sphingopyxis witflariensis
MSSLAKLQAAKSLDDLAAILGYKPAALAYLLYHLPDAQKYTAFTIPKRNGNPRPILAPTPKLKLLQRRLANVLYLALADIDKAGAPRRPLSHGFAKHLSIVTNAAVHRRQRYVLNLDLKDFFPSINFGRVRGMFIKDKRFGLDPKVATLIAQIACHDHVLPQGSPCSPVISNIVGHLLDIRLVRFAKAQKCTYSRYADDITFSTNAKALPAEVAVPIPGSEHDWTLGAALLKEIDKAGFEVNPAKTRMQYRGSRQVTTGLLVNEKPNIRPEYYRTVRAMCWSLFNSGTYYRMVPAALAGGKPGDPDVQEPATSLAPLQGTLGHVYHVRDQVDTRSSVDKKKEATATRKLYIRFLFYRHFVVAPKPLIIPEGKTDSVYLRAAMEKLAAYHPQLGAMDKGKFKPALKFMNFSSTVHDVLQIGNGAGDLLHFIRKYPDALKHYRHRPLPNPIIVLIDNDDGAKDIFSVAKNFGAPNISRTSTDPFHRLAANLYLIKTPEIGAKGTSCIEDSFDPALLKTVIDGKVFDPNKKHGEPGKYGKARFAEKVVQPQKDTIDFSKFTSLLDRIVAALDDYAANPPPP

SEQ ID NO: 805 - protein, 536 aa, unidentified
  source 1..536: note = Related to NZ_CP046252.1; note = Sphingobium sp.
MPKRDGTQRQILAPTPKLKLLQRRLANVLYLALADIDKAGTPRRQLSHGFAKHLSIVTNAAVHKRRRYVLNLDLKDFFPSINFGRVRGIFIKDKRFALDPKVATLIAQIACHDHVLPQGSPCSPVISNIVGHLLDIRLVRFAKAQKCTYSRYADDITFSTNAKAFPADVAAPVSGSEHDWALGAALLKELKKADFEVNPAKTRMQYRGSRQVATGLLVNEKPNVRPEYYRTVRAMCWSLFNSGTYYRMVPAALAGGKPGDPDVQEPASSLAPLQGMLGYIYHVRNQVDTRPAAEKKKEETSTATRKLYVRFLFYRNFVVAPKPLIIPEGKTDSIYLRAAIEKLTAYQPRLGEMDKGKFKPALKFMNFSAAIHDVLQIGNGAGDLKHFIRKYPDALKHYRHRPLPNPVIVLIDNDDGANDIFSVAKNLGAPHISRTSTDPFYRLAPNLYLIKTPEMGSKGTSCIEDLFEPALRKTVIDGKVFDPNKKHGEAGKYGKARFAEKVVQPQKDKIDFSKFADLLDRIVAVLDDYAANPPPP

SEQ ID NO: 806 - protein, 571 aa, unidentified
  source 1..571: note = Related to JAACTB010000013.1; note = Erythrobacter sp.
MKAATSLEDFATLLGYSPAGLSYILYRQPPALKYRSFTIPKRSGEERLIFAPKPKLKLLQRRLADLLYAVLADIDKAGNPRKPLSHGFAKNLSIVTNAKNHKRKRFVLNFDLKNFFPSINFGRVRGVFINDRRFQFDPTIATLIAQVACHENALPQGSPCSPVISNIIGNLLDIRLVRFARAHKCTYSRYADDITFSTNAKHFPPEVAEPLSFLGDEWVVGANLEAEVSKAGFQINPGKTRMQLRGSRQQTTGLVVNEKPNICSEYYRSVRAMCSSLFNTGSYYRMVPAALSGGEPGEPDVRDQTTKLAPLQGLLGHIYHVRNQIDRRTSSEKKQKPTATRSLYQRFLFYRNFVVAPQPLVVPEGKTDSIYLRAAIERLSEYHPRLGSFEDGKFKQSVKFLNFSPAIHDVLQLGGGYGDLQFFVRQYRISLKRFRHRPLPNPVIVLVDNDSGGKQVFNAAKGLGIDGISLKSSDPFYRLTENLYLVKTPELGNEGTSCIENFFKPELFKEKINGKEFDPAKKHGAPDKYSKQVFAEKIVRAKKAEIDFSDFAPLLGRIVAVLDDYAANPTN

SEQ ID NO: 807 - protein, 580 aa, unidentified
  source 1..580: note = Related to CP030050.1; note = Bradyrhizobium arachidis
MGGRVSLLLKLKTAKSLDDIASLLGYQPQGLAYILYKIPESVKYTTFTIAKRSGELREIKAPIPHLKILQRRLANLLNSCLGEIENAGERRRPISHGFVPSLSIITNASVHKRRRYVLNLDLEHFFPSINFGRVRGVLIRDRRFELDSKVATVVAQIACHENSLPQGSPCSPVLSNIVGHLLDIRLVRFARQHKCTYSRYVDDITFSTNRTAFPTELAAQQESGSWGLSQSLVSEIERAGFRVHARKTRMQVRGSRQLTTGLLVNEKVNVRPEYYRTTRSMCAALFNKGTYYEMKPATLAGGNVGDAAVKEVANSLDLLEGRLGYIYHIRNTVDRRESAEKKKNSTATRKLFHKFLFYKNFVALERPLIITEGKTDSIYLRCAIRSLSSFHGKLTIDRGSKPRLSVSFLNFTSTVHDVLQLGGGTGDFKFLMLRYKQLLDEFKHAPLIHPVILLIDNDDGAREIFGVAKQLGVADVSLVSRAAFYRICANLYLIKTPEGTSQNPKTCIEDLFDSSVRNTLLGGKSFDPDKKHNEEGKYGKAHFAERVIRPQSTDIDFSKFEMLLDRIVAVIEDYAPAKGI

SEQ ID NO: 808 - protein, 582 aa, unidentified
  source 1..582: note = Related to JAKSYA010000167.1; note = Methylobacterium sp.
MSVVKSLKEAKSLTDLAKILNYKPSGLSAILYHIPDANKYTEFSIPKQSGGLRTIKAPVDRLNLLQKRLSDLLYSYLDEIEPKKNGFKTVSHGFIKDRSIITNAQVHKRRRYVLNIDLNEFFSTINFGRVRGIFIKDKRFEFHQDVATIIAQIACHANSLPQGSPCSPIISNIVGRLLDVRLIRLARLYKCTYSRYADDITFSTNRAQFPSELAHPDPAGSPRWVLGFALTSEITNRGFQVNNNKTRMQFKASRQLVTGLIVNDKVNIKQEYYRNVRSMCSLLFKSGKYYRVTPAVFAGGSANDPPVKVEFDTLGSLGGMLSYVYHVKNTIDRRASVEKKKEATSAAIRKLYHLFLFYKNFVDLKSPLIVTEGKTDAIYLKSAVEMLSKFHPQLGSLNGGKFVHTVRYLKFTSTVRDVLQLGGGSSDIKFFIERYAKILRKFKHGSLSHPVIILIDNDEGAKDIFSVVRGNTPHKDISLDKTDKFYRIYSNLYLVKTPEVGKVKNMTCIESFFEDIVLKTVLETKTLDLNKKHLAPGKYGKQVFAEKVVRPNKKSINFSGFDPLLERIVAVIDDYKTNPSSI

SEQ ID NO: 809 - protein, 585 aa, unidentified
  source 1..585: note = Related to NZ_FOTK01000017.1; note = Methylobacterium pseudosasicola
MTVSIVKDLKAAKSLDDLALLLGFSASGLSYILYKSNSAARYTEFQIPKRKGGTRTIKAPEPKLKLLQTRLAEILYNYLDGIEEKKKPFKAVSHGFAEGKSIITNAAVHKRRRYVLNIDLEDFFPTINFGRVRGVFIKDRRFEFDPKIATIIAQIACHDHSLPQGSPCSPVISNIVGRLLDVRLVRLAKEHKCTYSRYADDLTFSTNQSTFPAALAAPDPAAAGKWIVGNALDAEIVGTGFKINHGKTRMQFRDSRQTVTGLLVNEKVNIVPEYYRAARSMCSAFFQTGKYYHRVPAALVGGKAEDPMEDIVYDTPPVLEGILSHIYLIKNTVDRRTSAEKKKEENVTAIRKLYHHFLFYKNFVISVRPLIVTEGKTDPIYLKAAIERLPKFHPKLGAFKGGKFQTTVRFLNFTSTVRDVLQLGGGSGDLMHFIEKYFKILSKFKHAPLAAPVIVLIDNDDGAGKIFGKIQGLTKCPPISTLTTEPFYYITANLYMIKTPEIGKDKGMTCIETFFEDTVLKTVLGGKTLSLNKKHLEPGKYGKAIFAEKVIRPNKATIKFDAFEPLLDRITAVLDHHAAKAPPAA

SEQ ID NO: 810 - protein, 580 aa, unidentified
  source 1..580: note = Related to NZ_VDDA01000005.1; note = Methylobacterium terricola
MSIVNKLKGAKTLDELADLLGFTPSGFSYILYRLPNAIKYKSFSIPKRGGGARTIEAPDDRLKLLQRRLANVLYLYLDEIEKSGKEHTPVAHGFARSLSIITNAACHKRRRYVLNLDLAEFFPAINFGRVRGVFLKDKRFEFAPKIATLIAQIACHNHALPQGSPCSPVISNIVARLLDVRLVRLAKQHKCTYSRYADDITFSTNQKEFPVDLALPDPSGKGPWVVGPALTAEITGTGFVINASKTRMQIRGSRQLATGLLVNEKVNVCPEYYRTVRSMCARLFSTGEYFAMVPAMMAGGKVGDPDVRTSFKTFPLIEGRLGFIYLVRDGLDRRDGVEKKKSPTATRVLYHHLLFYKHFVAGARPLVITEGKTDRVYLRAAIEKLTSFHPRLGKIESGAFSSSIRFMNFSRIVHDVLQLGGGTGDLKFFMLHYADTLRKFKHAPLKAPIIVLIDNDLGTKDIFGVMREKTVHKTISTQTTAPFYRVHANLYLVKTPETGKDKGMTCIEDLFEPCVLATKIDGLVFDPDKKHKEPGKYGKAVFAEKVVRPNKSAIVFDGFDPLLQRICDVIDDYATHPGHI

SEQ ID NO: 811 - protein, 586 aa, unidentified
  source 1..586: note = Related to JAGWBW010000022.1; note = Candidatus Latescibacteria bacterium
MTYLKKIREAQTLKDIAHILGVQPKTVSYLLYILPDAEKYRPFEIPKRNGGKRLINAPEPRLKMVQRRLANVLYECIAEAEKCAPPRRPLAHGFARPRVIGTDASKNKKRRYALGIFSNAAIHKNRRYVLNLDLEDFFPSLNFGRVRGFFIKDKRFELNEKVATVIAQIACHRNELPQGSPCSPIISNLLGHLLDVRLFRLARKYKCTYSRYADDITFSTNRKDFPAALAKPIPEKVSYWQLGSPLVKQIQRAGFKVNNDKTRMQWRGSRQMATGLIVNKKVNIRSEYYRTARAICNRLFSTGEYYISDPEKSLDGLNKIEGILSHIHYIKDRADLREKEEKKKDPLAIRKLYRRFLFYKHFVALEKPLIVTEGKTDPIYLRAAISKLPKYHPQLGEFVNGKFSSAIRFLKYSDTIDKILRLSGGTGNLKDFILKNYKKDINSFKFQPLAYPVIILIDNDQGARDIFNMVTKRFEIKISPETTQSFYHLHKNLYIVKTPENGKNSISCIEDLFDPELRETPIDGKTFDFSKKNKADDKHGKTVFATKVIRPQADQIDFSRFEKLLDRIIVVLDDYYVRQKSSSVDS

SEQ ID NO: 812 - protein, 569 aa, unidentified
  source 1..569: note = Related to VXMB01000009.1; note = Gemmatimonadetes bacterium
MENLERLREATSLKDIARIFGVQPKTISFLIYVLPAEHRYHTFEIPKQSGGMRTINAPEPRLKMIQRRLADCLYKCTGEIYGEPPKRLLSHGFLRSRSIFTNASIHNSRRYVLNLDLEDFFPSFNFGRVRGFFIKDSRFKLHQKVATIIAQIACHQNELPQGSPCSPIITNLIGHMLDVRLVKLARKYNCLYSRYADDITFSTNLTNFPVDLAKQSDGDLSKWQLGKKLTKEIEDSGFDINKSKTRMQWKCSRQTTTGLTVNKKVNIRSEYYRRARAICHQLFTSGSYYTFDVESQSENLNKIEGILSHIYHIKQQSAVAFERSTQRTWDAKTTGLYAIRKLYRSFLIYRYFNVSVKPAIVTEGVTDPIYLKLAIKKIKAYQPQLGEFTNGRFQYKMSFIKHSGNTGEVLQLDGGVSKLNSLIKNYRKDLDRFKYTLLTNPVVVLIDNDKGAKEVFNTVKNQYGLEISHKKEKPFYHLHANLYLVKTPLTNNRSESCIEDCFDQDTLDIELDGRKFDPAKKNGSEDTYGKTTFAREVIIPNADVVSFEGFDEVLSRISAVLDDYRVRRQ

SEQ ID NO: 813 - protein, 562 aa, unidentified
  source 1..562: note = Related to JAIPDZ010000080.1; note = Deltaproteobacteria bacterium
MSRLIKLREAKSLSDLAVLLGFKPKAVSYILYKIPENNKYIEFEISKKNGGKRLIKAPTEKLKKLQRRLADLLNECFNQISKESGKKSLAHGFIENHSIVSNAKNHKNKRYVFNVDIQDFFPSINFGRVRGFFIKNRHFSLDPNVATVIAQIACHNNELPQGSPCSPIISNLIGHLLDIRMANLSKRAKCTYSRYADDLTFSTNRKDFPESIAIMQDDNNWVAGSRLIKEIDKVGFSLNTKKTSMQFKTSRQMATGLIVNEKVNIKREYYKIARSMCHELFNTGEFYLNNKDDSSGETDNNEDKGTTISQLEGILNFIYQIKRPHDTAKLGDRRFHPNAITKLHRDFLFYKHFHSMQMPVIVCEGKTDIIYLKCALKQLAKTYNEFIELNDDGTEYKINFLNFSKKLRDVFAISTGTSGLKHLMEIFEKNMCTFNVGGKSFPVVVIIDNDDGAEDIKKKLKIKNSEEIKEFYHFVENLYVLIIPKDKGKAIEDLFEPEVLMKKVDGKVFNRQKELDAEKEYGKIVFAEKVVRENQQHINFDGFKEVFDKLKTVIDDYRTKNV

SEQ ID NO: 814 - protein, 561 aa, unidentified
  source 1..561: note = Related to JAGGXD010000009.1; note = Bacteroidales bacterium
MSRLEKLRKTKSLSDLAKLLGFQPRAVSYILYKIPEDRKYIEFEIPKKNGGKRIIKAPTEKLKQLQNRLADLLNECFDQISKESNNKSLSHGFRKKHSIVTNAKNHKNKRYVFNVDLQDFFPSINFGRVRGFFIKNHHFGLEPKVATVIAQIACHNNELPQGSPCSPIISNLIGHLLDVRMVNLAKKAKCTYSRYADDLTFSTNKKNFSPLITIKQDENNWMAGDRLVKEIKKVGFTLNTEKTSMQFKTARQMTTGLIVNEKINVRREYYKNARSMCYELFRTGEFYIDKKDIPLNNEEGHKEIGTINQLEGILSFIYQIKRPHDKAKLGNRRFHPTAITKLYRDFLFYKHFYFMEMPVILCEGKTDIIYLKCALRQLAKSYTEFVEMNDDGTSYKIKFLNSSRNFRDVFSISTGTSGLNHLMEIYEKNISKFKVKGKAYPVIIIIDNDDGSKEIKKRLNIKNDEKIKDFYHFVENLYVLIIPKDKDKAIEDLFDTGVRKTKIDGKVFNRGKKIDEKKEYGKIVFAEKVIKANQQKINFDRFKEVFDEVQKIIEDYKKRNV

SEQ ID NO: 815 - protein, 553 aa, unidentified
  source 1..553: note = Related to JAKISH010000034.1; note = Gammaproteobacteria bacterium
MSQLEKLRKSTCLSDLATILGYKPKSVSFIIYKIPEDKKYIEFEIPKKNGKTRKINAPVDQLKHLQRRLADLLNNCFNEISSEAQKKSLSHGFRKNNSIITNANNHKNKRYVFNVDLKDFFPSINFGRVRGFLIKNNDFSLNEKVATVIAQIACHNNELPQGSPCSPTISNLIAYLLDIRMVNLAKHSKCNYSRYADDLTFSTNRKDFPNLIAIKKDDKSWDASKKLIPEIEKVGFCINPDKTSMQFRTSRQVTTGLIVNEKVNIKSEYYKKARSMCHAVFNTGQFYIEGDDTEKENTIKQLEGILSFIYYAKRPHEPSKDGSRKYNPTAITTLYRKFLFYKHFYSLEKPLILCEGKTDIIYLKCALKQLSNTYSDFVDTSKDKITYKVSFLNFSKNLRDVFSISTGTSGLDFIIDNYKKLSPTFKAPRKPYPVVVIVDNDDGSKEIKKKLKINNGDAITDFYHFSDNLYILIAPKNKTGAIEDFFDDNILSTKIGGKSFNREKKIDPNSEYGKMVFAEKVVAANQKSISFDKFKEVFDGMRKIVRDCDDKIV

SEQ ID NO: 816 - protein, 564 aa, unidentified
  source 1..564: note = Related to JAFDMD010000032.1; note = Deltaproteobacteria bacterium
MTKLEKLQKTTSLSKFAKLLNYQPKTISYILYKIPEEDKYNQFEIFKKNGEKRKIQAPIKKLKLLQRRLANLLNECFDEICNKNKKTKSLSHGFRKKHSIITNAKKHKNRRYVFNVDLQNFFPSINFGRVIGFFIKNNHFSLKPEVATVIAQIACHDNALPQGSPCSPIISNLIGHLLDIRMVNLAKKTKCTYSRYADDLTFSTNKKEFPEKIAIKKNESDWVAGRALTKEIEKMGFSVNAKKTSMQYRTSRQMATGLIVNKKINVKKEYYKKARAMCHNLFKSDNFYIDKNSEKEGTLKQLEGIISFIYQVKSPHYIENKKPTAITALYRKFLFYKHFFSIDKPLIVCEGKTDIIYLKCALKQLENEYKELMGKSDKGINFKIKFLNISKNFKEVLNVAEGTTGLLSLINMYKDGFKHFKGKGKKYPVIIVLDNDKATGKIKSRIQEQLKLNNDKTADKKKQKQKLDTNKYYHFAHNLHIMFAIKEDGKEIEDLFDKEVLDTNVEGKKFSRKDKIDTKQEYSKTIFAEKVIKANQTKINFEGFKPVFNKVKNIIKEYSKKNSQ

SEQ ID NO: 817 - protein, 585 aa, unidentified
  source 1..585: note = Related to JAGQKD010000345.1; note = Nitrospira sp.
MSHLENLKKTTTLAELALLLGYKPKALSYILYKIPQINKYKDFTIPKKNGGERRIQAPVDKVKHLQKRLAVLLSQCFDEISKKANHKRSLSHGFRKDHSISTNANNHTNKRHVFNIDLMDFFPSINFGRVRGFFIKNSHFGLKPKIATIIAQIACHNNELPQGSPCSPIISNLIGHLLDIRMANFAKKTKCTYSRYADDLTFSTNRKEFPEKIASQNNGNEWATSRTLKKEIEKVGFKVNEKKTSLQYKTSRQIATGLVVNKKVNIKKEYYRQTRSMCHSLFQSNEFFLGNTYSAKPAISENAKINSTSPATNSKTPLPKNPQGKIKQLESILSYIYSVKRRHDRDNAGKRKNYPNAITKLYRKFLFYKHFFSLNCPLIICEGKTDIVYLKCALRQLANEYGEFIEKTGPSFILKIDFLNLTKNLKDVLAISEGTGGLGSLMGIYEIYMKPFKGEGKKHPVIILIDNDSGSKEIIEIMKRKKKWDPSKPFAFFTENLYVVHISSESGTSEMAIEDLFDDQTQNTTVDGKKFNRKPKIDSASEYGKIVFAEKVIRANENSINFDGFKKVLNSFKAATQDYNKRITV

SEQ ID NO: 818 - protein, 386 aa, unidentified
  source 1..386: note = Related to JAGNKF010000015.1; note = Syntrophaceae bacterium
MSKLERLREAKSLSDLANLLGYKPKAVSYILYKIPSEKKYSAFTIPKKTGGDRRIKAPIDPLKDLQGRLADLLNTCFDEICIKSKHKRSLSYGFRKGESIVTNAINHRNKRHVFNVDLQDFFPSINFGRVRGFFIKNKHFELDPDVATVIAQIASHENELPQGSPCSPVISNLIGHLLDIRMVNLAKKAKCTYSRYADDLTFSTNRNEFPEIIAMPEKSGSNIWLAGETLEKEIKKVGFTINKNKTTMQYKARRQMVTGLVVNKKINVKREYYKHARSMCYSLFQSDQYYIDKHLTIPSAGTTILDDGAADKKSEPTKEYEKIVGNMAQLEGILNFIYYVKDMHDKREKREKRKNRSAMVELYRKFLFYKYFFSVERPLIVCEGKN

SEQ ID NO: 819 - protein, 583 aa, unidentified
  source 1..583: note = Related to NZ_CP087999.1; note = Geomonas sp.
MSSLEKLKKAVTLSDLAVLLGYKPKAVSYILYKLSLEEKYTVFTIPKKGGGERTIKAPTEQLKRLQKRLADHLGKCYEEIYTKGPHKNPLCHAFRKKFSIVTNAENHVNRRHVFNADIKDFFPTIHFGRVRGFFIKNVHFTLEPKVATVIAQIACCGDELPQGSPCSPVISNLVAGHLDIRMATLAKKAKCTYSRYADDLTFSTNRKEFPDLIAVLKEGSDKEWTAGPGLLKELKRADFTINERKTSLQNSTGRQIATGLVVNDKVNVRREYYKQARSMCYSLFLNGDFYRGSHHVSTIEQPVASSDVQAEASAEKHAKSGTLNYLEGVLSYIYSVKASHDQRKTCAKRSYPSAVMKLYRQFLHYKHFFVLQKPLIICEGKTDVIYLKCALRQLGKSHPSLIKLNGKEFVYEVSFLNMSKNLKEVFAMSEGTPGLASIMENFHKNMAGFEGEGKKHPVILLVDNDSGAKEIKKKIDHKNPAKTFHRYADNLYVILIPNKPGQEETAIEHLFDAKTLSTTIDGKKFNSSAELNPKTEYGKIVFAEKVIKANQQNIDFSGFDSILQQFEAVIVDYNKQQTQSVTS

SEQ ID NO: 820 - protein, 569 aa, unidentified
  source 1..569: note = Related to NZ_FNJI01000013.1; note = Desulforhopalus singaporensis
MSNLERLQLATTLSDLADILGYKPSALSYIVYKIPSTSKYTTFDIPKKSGGTRLINAPDERLKRLQKSLAKLLMKCEIEINDKLNHKNNISHGFKKKFSIITNAIPHKSKRHVFNVDLKDFFPSINFGRVRGFFIKNKHFQLCDKIATIIAQIACHDNSLPQGSPCSPVISNLVGHLLDIRMVNLAKRAKVTYTRYADDLTFSTNKKEFPCLIAYKKSGSDSEWLPSKKLTKEIDKVGFTLNSDKISMQYKTSRQIATGLVVNKKVNVKREYYKKTRAMCHSLFRNDEYYFETLDPATKTIVKSPGNFKQLEGYLSFTYQVRSSNKLRKDKQNQKKNFIGNIKKFNGTSNTAKIYRDFLFYKHCFALEKPLIICEGKTDRIYLQCALKKLASAYPTLIDTTPAVSYLITFLNKTKNFLNVCNLADGTSGLEGIMDRYEKQMGYYHGTGQKHPVIILVDDDKGAKEIKKKIIKKNGKVEPYQKYTDNLYVVFIPRVSSKNTAIEDLFDPSVLATVIDGKTFNKENDIDRDKEYSKQVFAHKVVKANQDSINFDNFRGVFDLFLDVISDYA

SEQ ID NO: 821 - protein, 456 aa, unidentified
  source 1..456: note = Related to DNTK01000207.1; note = Bacteroidales bacterium
MTRLEALHNAKSIYDLSKLLGFKAKSISYFLYHSTEEKYYTFEIPKKNGEFRKIQAPTDKLKKLQSRLATLLSDCFEEIDRNQGYPNSLSHGFRRKHSIISNANLHKNKRYVFNIDLKDFFPTFNFGRVRGFFIKNKHFQLSPKIATIIAQIACFDNGLPQGSPCSPIITNLIAHLIDVRLVNLAKHAKCTYSRYADDITFSTNRKDFPKEIAYKTNANQWVVGNNLNAEITKLGFTINDKKTNMQYRMSRQVATGLIVNEKVNVKREYYKKARACCQLLFEIDDFYLSEGKSGSLNQLDGILNFIYQVKRPHDKENIGPRRFKPNAITKLYREFLSYRHFFSGDKPLIICEGKTDITYLKCALKRLHPDFNQLIEFKDGKTKHKVSFLRFSDRLKDVFAISEGTPGLTALMEMYADLLKRFKGVGLIHPVIIVLDTDSGNKEIRKKLEEKTYEFP

SEQ ID NO: 822 - protein, 594 aa, unidentified
  source 1..594: note = Related to BLXY01000001.1; note = Geomonas paludis
MSDLEKLKSCKSLNDLAVVLKYKPSALAYILYKLPDSQKYEEFTIPKKSGGSRKIRAPKERLMALQKRLSEVLNNCYSEVIKNYGNPLSHGFRKDCSIVTNALLHRNRRFVFNIDLKDFFPSINFGRVRGFFIYNKHFSLEPKVATVIAQIVCYDNELPQGSPCSPVVSNLVGHLLDIKLVQLAKLHKCSYSRYADDITFSTNKKDFPEEIAYIAAGGDWEPGPKLTATINKMGFAVNERKVSMQSKTRRQVVTGLVVNKKVNVKKEYYRIARAMCHSLFNNGSFYISTMGNDTTQSGTIDSNNNCTAKQLEGILSYIYMIKGVHDSRTNVEKRNKPASIMKAYRQFLFYKHFYQAEKPVLICEGKTDHIYIRCALKQLHQHYPALIEKTTEGWSWKITFLKMSENFREVLSIAEGTSGLAALMDMYKKNIGIFKDGTGKKHPVVMLIDNDKGAKEIKSKLKKTEDGKGYKPYFTENLYVMTLPQGANGEEIEIEDLFDKDLLETKVAGKSFNKKTKTDTKTEYSKIIFAEKVIKPKQHIINFSNFMPVLNHLNGIILSYQHLKGSAPTEKETEALNVLLPTQTPQPPIYVPGV

SEQ ID NO: 823 - protein, 559 aa, unidentified
  source 1..559: note = Related to NZ_LVJN01000020.1; note = Proposed Magnetofaba australis
MARLLGFRPKALSFLLYKLPDNSKYTTFKIPKKSGGEREINAPDPRLKGLQKRLANLLQNCFEEIYGRERYNHSLSHAFRKDHSIITNARAHKNKRYVFNIDLIDFFPSINFGRVRGYFIKNTDFGLHPNVATVIAQIVCYNNELPQGSPTSPVLSNLIGHILDVRLVILAKKTKCQYSRYADDITFSTREKQFPSTIATQDDAGCWHPSSKLLCIIRKSGFEVNHNKTTMQHHAYRQVTTGLVVNRKVNIKASYYRQARAMCSSLFKTGAFYIGTEVRKGRSASISGKDLGSINVLRGVLSHIYNVKRLNDKRDQKERWGKPTAIHKLYEKFVLFEKFHNLRKPLIFCEGKTDSVYLKCALYSLASEYPDLIQVSNGEVNYAIDFFKHSKSNQDLLQFSGGTGDSRYLIKDYNKKMKPFLCKGKRFPVIILVDSDQGSKKVFSAAKEVIGNNENVTGDEDFYYITQNLYLIALPKINNVSSVAIEDFFEKSVRETKIDGKSLAKSNESDNRKYYSKHIFAEKVIRPNKGKINFERFKGILDRILKVIQDYESRRETKS

SEQ ID NO: 824 - protein, 581 aa, unidentified
  source 1..581: note = Related to CP064988.1; note = Rhodospirillales bacterium
MSVLQKLKDAKSLKELAILLSFKPSRVSYLLYKLDAEKKYSKFQIPKKSGGIREIQAPEPRLKALQKSLADLLYECTLEIESNGKKRPSLSHGFRKHHSIVTNARGHNGRRYVLNVDLEGFFPSINFGRVRGFFIADKSFSLNEKVATVVAQIACFENKLPQGSPCSPVISNLIGHLLDVRLVRLAKAQKCSYSRYADDITFSTNQKNFPPAMAVQDEKNPEKWIAGTTLSKTIENAWFKVNHAKTRLQSRTKRQSVTGVVVNKHVNVEASYYKNVRAMCHSVFAKGEYHKPIVKSGDPSKGAEPSGPEMLKNIAPLEGMLAHIDYVKFGRDSPRSTVENASGKSRPPATRRLYEKFLFFKHFVYLDKPLVLCEGKTDNVYLHAAIRQLKAHHSTFIGGSDQKPEMKIRFFKYSRTSNGILGLNGGSGHLANLIAYYSKNLKDYNFAPLLQPVIVLIDNDDGAPPIFKTIKQNYKVTIDHSSADLFYRICHNLYLVKTPEKATTYKSYIEELFDDTVLQKKLNGKTFTTKKDYDKATQYGKEYFSKYIVRPNEASINFTKFSPLLDRIASAVSHYGAAADK

SEQ ID NO: 825 - protein, 589 aa, unidentified
  source 1..589: note = Related to JAKSYD010000289.1; note = Methylobacterium sp.
MFKLQALRDAKKLEDVARLVGFTPKGLSFVLYKLPDSKKYNSFEIAKRGGGKRQIKAPEPSLSLLQRRLATLLTECLEELKKAAPPRRSLAHGFEKGRSIITNAQLHKRRRYVFNVDLADFFPSINFGRVRGFFINDKNFSLQPPVATVLAQIACFENQLPQGSPCSPVISNLIGHVLDGRLARFAKTHKCTYSRYVDDITFSTSRKHFPPEIGTPIAGTAAWQASNELRSRIENAGFKINDKKTRMQYHASRQVATGLVVNEKVNVRQEYFRAARNMCDALFKTGSYFRMVPATLTGGAVGDPPVKNVITSHNQLGGMLAHIYQVKNSTDLRADDVKKAKPTATRSLYFRFLFYKNFVANKTPVIVPEGKTDTVYLRAAIRYSSAYHPRLGELKSGKLETKIRFMNFSKIVHDVMQLGHGTSEQKFLIADYERNLRGYRHAPLAHPVIVLFDNDDGAKSLFGYAKNKRHSKIGLDSTDPFYYLGYNLYLVKTPEFGGGKKSCIEDLFPSGLLKTIIDGKVFDPNKEHEEAGKYGKVVFAKQVVTPNASTIDFSGFAPLLDRIVAVLDHHATLKKAPPAPLAAALVATS

SEQ ID NO: 826 - protein, 524 aa, unidentified
  source 1..524: note = Related to NZ_AUCM01000028.1; note = Gemmobacter nectariphilus
MDADHPRSGVLIASRSTRKQENSRFWFASHGFHKGRTIISNAEVHRRRRFVFNLDLEDFFGTINFGRVRGFFIHDTMFSLEPKVATLIAQIACHENALPQGSPCSPVISNLIGNILDSRLLALARDAHCTYTRYADDLTFSTNETLFPTEIAVNVHGADWEVGVKLRKTIEGTGFFINLAKTRMSLRQSRQTVTGLVVNAKANINQDYYRAARAMCNSLFQTGYYFRPGDNPASATDKLGPLDGTLSHIHFVKARRDRHPKVNKLAKAAGEFHPPRAPEELYRKFLFYKYFAAPTAPLIVTEGVSDITYLQCAIRALVKKFPLLAEEVDGKAVRLVHFLKSSGTSRELLNLGHGAAGQGALISRYENMLEDFKHKPMAHPVIILCDNDDGLKSVIKNAKSKISKIVSTTTTDPFYHLGLNLYLVKVPEGAPPVDKDIESLFDPALLATLLDGKKFNPKKEHADHTEYGKVIFAEAVVRANAGTVDFSGFEGLLTRIEDVLRHYAALMTAAAIPAAAAPGAAAAP

SEQ ID NO: 827 - protein, 589 aa, unidentified
  source 1..589: note = Related to JAGQAF010000003.1; note = Ruegeria pomeroyi
MSSLEKLQKAKSLTDLAKLLGFTPKGVSYVLYKMDAAKKYRSFDIPKKSGGVRTIHAPEPQLALLQTRLAELLYACVHEKKKTDRRFWFASHGFHQGRTIVSNAEVHRRRRFVFNLDLENFFGTINFGRVRGFFIHDSMFSLEPKVATIIAQIACHDNALPQGSPCSPVISNLIGNILDSRLLALARDARCTYTRYADDLTFSTNEKLFPTEIAVNVHGADWEVGKKLRKEIEKSGFFINPAKTRMSLRRSRQTVTGLVVNEKANINQDYYRAARAMCNSLFQTGFYFKPGDDPADATDNLNPLEGTLSHIYFVKARRDRKPRVNKLARAAGEFNPPRAPEDLYRKFLFYKYFAAPKAPLIVTEGISDITYLQCAIRALVKKFPLLGKEEDGKVIRLVHFLKPTGTSRDILNLGHGAAGQASLISSYTNNLKNYAHKPMANPVIILCDNDDGPKTVFKNAEKKGGTKITTTTIDPFYYLGENLYLVKVPEGATPHPREIEELFQPALLATKLNGKSFDPKKDHGDDTHYGKVAFAESVVRANASTVDFSGFEKLLERIEAVLKHYAALLAAPAAPAAAPAAPAAGTATP

SEQ ID NO: 828 - protein, 585 aa, unidentified
  source 1..585: note = Related to JAGIOQ010000002.1; note = Rhizobium leguminosarum
MSQLERLKQAKNLTDLAKLLGFTPTGVSFILYKMDPAKKYRSFDIPKKSGGVRTIHAPEAQLALLQSRLADLLYACVRIRKKENARFWCASHGFHQGRTIVSNAEAHRRKRFVFNLDLMDFFGTINFGRVRGFFIHDSMFGLEPSIATLIAQIACHDNALPQGSPCSPVISNLIGNILDARLLALARDARCTYTRYADDLTFSTNEKLFPSEIAVNVHGAEWEVSAKLKKAIEKTGFFINPVKTRMSLRRSRQTVTGLVVNDKVNVSQDYYRAARAICNALFQTGKYHKPGDDLADASDNLNPVEGMLSHIYFVKARRDRLPKVNKLATVAGEFRSPRAPEELYRKFLFYKYFAAPKAPLIVTEGVSDITYLQCAIRALVQKFPLLAKEENGKVVRLVHFLKSSGTSRDILNLGHGAAGQGALISQYENALKKYPHKPMSNPVIILCDNDDGLKSVIKNAKSKIGKIVSTTTTDSFYHLGLNLYLVKVPEGVPPADKDIESLFDPALLTTLLDGKSFNPKKEHADHTEYGKVVFAEAVVRSNAGAVDFSGFEGLLTRVEDVLKHYAALSAATVAAPAAGAASAAN

SEQ ID NO: 829 - protein, 411 aa, unidentified
  source 1..411: note = Related to NZ_LZYE01000077.1; note = Acidithiobacillus caldus
MSSLTQLQRAKDLADLAKLLGFTPKGVSFVLYKMGETKKYRSFEIPKKSGGFRIIHAPEPQLALLQRRLAKFLYDCVQERKKKYPRFWFASHGFHQGRTIVSNAEVHKRRRFVFNIDLENFFGMINFGRVRGFFLHDSMFVLEPKIATIIAQIACHENVLPQGSPCSPVISNLIGNILDSRLLALARDARCTYTRYADDLTFSTNEKFFPTEIAVNVHGADWQVASKLKKTIEKTGFLINPAKTRMSLRRSRQTVTGLVVNDKVNINQDYYRTARAMCHNLFHTGLYFKPGHGPADATDNLNPLEGTLSHIYFIKKRRDRCQRVNKLAENAREFYPPKAPEALYRKFLFYKYFAAPAAPLLITEGVSDIIYLQCAIRALAQKFPLLGKEEAGKVKSLVRFLRPSSTSRDVL

SEQ ID NO: 830 - protein, 590 aa, unidentified
  source 1..590: note = Related to NZ_SDEA01000026.1; note = Paracoccus luteus
MSSLENLRKAKSLTDLAKLLGFTPKGVSYVLYKIDAAEKYRSFEIPKKSGGTRVIHAPEPQLALLQSRLAEMLYACVQERQKVNRRFWFASHGFHQGRTIISNAEVHKRRRFVFNLDLEDFFGTINFGRVRGFFINDQMFSLEPKVATIIAQIACHDNALPQGSPCSPVISNLIGNILDSRLLALARDAHCTYTRYADDLTFSTNEKLFPTEVAVNLHGAEWQVGVKLKKAIEKTGFSINPTKTRMSFRRSRQTVTGLVVNDKANINQDYYRAARAMCHSLFRTGCYFKPGDDAANPTDNLNPLEGALSHIYFVKSRRDRKPKVNKVAKAAGEFNPPRAPENLYRKFLFYKYFAAPTAPIIVTEGISDITYLQCAIRALGKKFPLLAKEQGGKITRQVHFLKPSGTSREILNLGHGAAGQASLVSSYTSNLKHYTHKPMANPVIILCDNDDGPKTVFKNAKTKAGVAISTTTADPFYYLGDNLYLVKVPEKLAAIPREIEDLFQPALLGTTLNGKTFDPKKDHGDAKHYGKVAFAESVVRPNAGTVDFSGFEDLLTRIEDVLKHYAGLSAASAMTTLNTSAVAAGTSAAP

SEQ ID NO: 831 - protein, 574 aa, unidentified
  source 1..574: note = Related to JAGHRJ010000002.1; note = Labrenzia sp.
MSRLQSLQQAENLDDLAKLLGFSPTGLSYVLYRIPEDKKYRVFDVPKKGGGVRIIKAPNDRLGLLQLRLAELLSDCGEEIRKKKQNHWHSSHGFRKGRNIISNADAHRRRRFVFNLDLEDFFGTINFGRVRGLFIADKAMALRPNIATLIAKIACHDNALPQGSPCSPVISNFVGNILDSRMLALARDGRCTYTRYADDLTFSTNEKIFPKEIAVNLFGADWGIGERLRKEVEGAGFQINHGKTRMFLRQSRQTVTGLVVNAKTNINQDYYRTVRAMCHSVFKSGTYHRETPAGAKTTTNLAPLEGMLSHIYFVKARRDRTYKNNSAARDAGEFRPPEAPVRLYDKFLFYRRFVALPAPLIVPEGKTDNVYVHSAIRNLVSSFPRLGTMSGTKFECLVDFLKPTPITKDVMNIGHGASGQNALISKYAKQVKRYPHKPLDHPVIILCDNDDGPRAVFSSAGRLAGKTITKQTTDPFYYLGDNLYLVKVPEGTPATDRDMEDLFDPVLLAQKVGGKPFDKKKEHGDGTAYGKEIFANQIVRPNWQTVNFENFRELLERIDQCITDYSSRKPAGSP

SEQ ID NO: 832 - protein, 577 aa, unidentified
  source 1..577: note = Related to NZ_JAAXDY010000025.1; note = Rhizobium leguminosarum
MKRLKAAKSLDDLALMLGFTPKGLAYILYVMADAAKYSTFEIPKKTGGSRTISAPIPHLKLLQGRLADLLTKCVTEISKEKKNYWRASHGFQPGKTVVSNAEVHKLRRFVFNLDLSDFFGTINFGRVRGFFIRDKTFELDPAVATVIAQIACHDNALPQGSPCSPVISNLIGNILDVRLLALARDCGCTYTRYADDMTFSTNEVLFPTEIAVNILGAEWTIGKRLDGEIKRAGFAVNPAKTRMSLRRSRQTVTGLVVNAKANINIDYYRTARSMCHSLFKTGQYFRRDGEQIESLGPLEGILSHIYFVKTRRDRGARINKLAKEANEFRPPEAAVALYRKFLAYKYFVNPAAPVIVTEGISDITYIKCAIRSLGKDFPLLEESKDGTSKRLVNFLRSTPTTRDVLNLGNGTAGQASLVSQYAKTVAAFPSRPMKHPVIILCDNDDGPKNVFKNAKTKAHVEISHTTTEQFYYLGENLYLVKVPEGVPPEMREIEKLFTAELLATQIDGKSFDMKKDHGNENAYGKVVFAEKIVRLQWKTTDFSGFAPLLSRLEACITHYQALTSAQVETEAVAATAA

SEQ ID NO: 833 - protein, 583 aa, unidentified
  source 1..583: note = Related to JAHJTN010000036.1; note = Bacteroidetes bacterium
MDTLERLQGAKNLTDFAKLLGFTPKGMSYVLYQLPNDTKYRTFEIPKKAGGTRTIRAPEHRLALLQTRLGEMLDECVGELKQRNRKFWRASHGFQKGRTIVSNAEVHRRRRFVFNVDLEDFFGTINFGRVRGFFINDKSFSLHPSIATLIAQIACHENVLPQGSPCSPVISNLIGNILDARLLALARDEHCTYTRYADDLTFSSNEGLFPTRIAVNVHGAEWKVGRKLRQEIEGAGFKLNETKTRMSLRCSRQTVTGLVVNAKPNIKQDYYRGVRSMCHSLFRNGEYHRRVAEREDTTNALTPLEGMLSHIYFVKARRDRAYKVNKLAIEAAEFRPPRAPVELYRKFLKYKHFVAPPAPLIVTEGISDITYLECAIRALAASFPVLAKNDGGKIVRLVNFLRPSGTARDILNLGHGASGQAALIGQYRNMLKEYRHMPMVHPVIVLCDNDDGPKEVFKSAAKRSGLTISTTTTRPFYHLGDNLYLVKVPEGALPQSKEIEELFQPALLATKVDNKPFDPKKDHGDEAAYGKVIFAEKVVRPHWASIDFSNFTELLSRIEQCLTHYAAVKSATTAAPAAAASSP

SEQ ID NO: 834 - protein, 590 aa, unidentified
  source 1..590: note = Related to JAGRRC010000006.1; note = Ciceribacter sp.
MTGIDLLKQAKSLTDIAKLVGFTPAGLSYILYRMPESAKYRAFEIPKRSGGTRTIKAPMRELALLQSRLNTFLGQCAEELARDNPRFWAAAHGFRKGRTIVTNANAHRSRRYVFNVDIANFFDSINFGRVRGVFIKDRAFNLEPTVATIIAQIACFENALPQGSPCSPIISNFVAGILDARLLRLAKHARCTYTRYADDLTFSTNERLFPTEIARELAGPDWCVGPRLSEVVEASGFQLNPGKTRMSLRRSRQTVTGLVVNEKPNIKQKYYRDTRSMCSSLFSSGKWHHGTGVDEQQTSNLRPLEGRLAHIYYVKARHDRSQKQNKHAEYVPPTAPVELYRKFLFYKHFVANDLPTVVTEGVSDITYLKCAIRSLSAKFPSLIGMSRGKLKVDLQFLNPTGTSRSVLNLGHGASGQASLIQQYSNRLKNYKNRPLAMPVIILCDNDDGPKEVFKNASGKTGKTISKSTTDPFYYLGDNLYLVKVPENGTQSRDMEDMFPASVLDELLENKPFNKKKEHGDGTAYGKVIFAEKVVRPKTGTSIFNDFEDLLTRIIACIAHYAAIRATKAAASSPAPALSVPTAAAVAAPTT

SEQ ID NO: 835 - protein, 589 aa, unidentified
  source 1..589: note = Related to JAIERP010000170.1; note = Mycobacteriaceae bacterium
MSKLERLKKTKNLSDLAKLLGFTPKGLSYVIYQIPDTKKYKVFDIPKKTGGIRTIKAPVDQLSLLQSRLAELLTECVEELIKDNPRYWTASHGFRKSRTIVSNADAHRKRRYVFNVDLADFFGTINFGRVRGYFIKDNSFGLDPAVATVIAQIACHENALPQGSSCSPVISNLVANILDARLLRLAKAAGCTFTRYADDLTFSTNKSIFPSEIAKELAGANWEVGKQLQDLIERSGYTLNIAKTRMSLRQSRQTVTGLVVNEKPNISKDYYRCVRAMCHSVFTTGSWYRPVQAAGAVPVPTASLRPVEGMLSHIYFVKARRDRSQRMNKDAGFITPKTSTRLYKEFLFYKHFVASPSPMIVTEGISDITYIKCAIRALAAKFPLLASVKGGNVTPEVAFLNPTGTSRSVLNLGHGASGQGNLVDQYASSLKCYRHLPLTSPVIILCDNDDGPKEVFSKAQKKSGVPISLTTTSSFYHLGQNLYLVKVPEGVPSAKRDIEDLFPAALLGQLVDGKPFDKKKAHGDHTAYGKVIFAEKVVRPNAAKIDFTAFEELLERIEGCIKHYAAIVAAKALAATASAPAAKTSATGP

SEQ ID NO: 836 - protein, 584 aa, unidentified
  source 1..584: note = Related to NZ_ML660062.1; note = Denitrobaculum tricleocarpae
MSELNKLKAAKNLSDVAQLLGFSPKGLAYVLYKQKPEQKYKHFEIPKKTGGTRSICAPTSQLALLQERLGEHLYQSVLELKKKEPYLWAASHGFHKGRTIVSNAQVHRRRRFVFNVDIEDFFGAINFGRVRGYFIKDRAFELDPKVATIIAQIACHENALPQGSPCSPIISNLIGNILDLRLIALAKNAKCTYTRYADDLTFSTNLKRFPSKIAISVEQGKWVAGDRLVTEIGRAGFNLNSVKTRMSHRQSRQTVTGLIVNKKVNIRQEYYRTVRVMCNSVFQTGVYYRPIKDEETEPIFLNNLNPLEGMLSHIYFVKARRDRQPGVNKLAKFANELVVPEAPTQLYRKFLCYKHFVALASPLIVTEGVSDITYLKCAIKSLSNQFPNLVENNNGMRQVAIKFLKPTGISRDILNLAHGATGQASLISNYANQLKKYTHKPIDHPVIILCDNDDGPKTVFKNARSKTGKDVSKTTIDSFYHLVENLYLVKVPEGDPPGIRELEDLFPNEWFDVKINGKPFNRKKDHGDTTAYGKVIFAESVVRPNTHKIDFAGFVPLLSRIEGCIAHYKSRKLAEMTTTAASGL

SEQ ID NO: 837 - protein, 580 aa, unidentified
  source 1..580: note = Related to JACKJA010000002.1; note = Rhodospirillales bacterium
MSTLERLKNAKDLSGLATILGFTPKGVSYVLYKLKPDEKYRTFKIPKKTGGERTIQAPEPRLALMQKRLAEHLYECVAEIQHEYPHYWRASHGFQKRKTIVGNAAVHTRRRYVFNVDIEDFFGSINFGRVRGFFISDKTFALEPAVATVIAQIACHENALPQGSPCSPIISNHIGNILDLRLLALARDAHCTYTRYADDLTFSTNLKEFPDEIAVDPGTGRWEEGHRLRKVIEDSGFRLNPIKTRMTLRQSRQSVTGLVVNAKPNIDQDYYRRVRAMCNSLFGTGQYHRVVGGKDEVTSNLNPLEGMLSYVYFVKARRDRSLRVNKRSKNEGEFNPPRAPIELYRKFLFYKHFVSPPLPLIVTEGVSDIVYIECAIRALAKSFPRLAKEEDGKIKRQVNFLRPSDTTRDVLTLGHGASGQANLIGQYTSSLKKYAHQPMAHPVIVLCDNDDGPKKVFKNAKDKCDMAISTSTIDPFYYLGDNLYLVKVPEGAAAHPREIEELFKPEILAYKIGGKPFDRKKEHGDETAYGKVKFAEEVVKPNASTIDFSDFSELLSRIDQCLAHYGTVVAASPVAAAAAS

SEQ ID NO: 838 - protein, 568 aa, unidentified
  source 1..568: note = Related to NC_013440.1; note = Haliangium ochraceum
MSYLDRLKSAKNLSDIARLLGFTPKGLSYVLYKTGDTSNYREFFIPKKTGGTRKILAPERRLALLQSRLGDLLYGCVEELKRKDPYFWHSSNGFQKGRSTISNAKAHSRRRYVFNVDLEDFFGTINFGRVRGFFIHDRNFRIEPPAATIIAQIACHKNSLPQGSPCSPVISNMIGNILDVRLLALARNTHCTYTRYADDLTFSTNERVFPNEIAVTLEGKGWELGNKLREEIERAGFRVNDKKTRMSLRDSRQTVTGLVVNAKPNINQDYYRSARAMCNALFQTGKYHGADKQETANLNSLEGMLSYIYHVKIRRDRTHRINKLARQANEFRAPSAPIELYRRFLFYKYFIASSLPTIVTEGVSDITYIRCAIQSLTPSFPLLAEKVDKKIRLSVRFLKPSGTTRDVLNLGHGTSGQVKLISEYKNNLNHYKHKPMAHPVIILCDNDKGASNIFKEAARKSGTAIHLESEENFYHISNNLYLIKVPEGEPPAERAIEDLFMPELLAQTLDGKPFDRKKEHGDKAAFGKVMFAEYVVRPNRTSINFSKFSQLLSRIEACIKHDSAQRTS

SEQ ID NO: 839 - protein, 544 aa, unidentified
  source 1..544: note = Related to NZ_MZXU01000017.1; note = Bosea sp.
MKTITRLKGADKLDELAKLLSFTPRGLSFVVYKIDTMNKYRVFEIAKKSGGTRTIHAPEKQLALLQTRLANLLYSCVAELQQEKPKLWHASHGFQKQKTTISNANPHRRRRFVFNLDLEDFFGSINFGRVRGFFINDKNFKLNPKIATIIAQIACHRNALPQGSPCSPVISNLIGNILDLRLIALARETKCTYTRYADDLTFSTNEMLFPTEIATNPQGSTWEVGIKLHKEIEQTGFKINPRKTRMSLRRSRQTVTGLVVNSKVNIKKDYYRSARAMCNAVFSTGEYHIIDKDKNISDLRSLEGILSHIFFVKARRDRAPKTNKMAIEANEFKLPSAPVELYRKFLFYRLFVAPKAPLVVTEGISDITYIQCAIRALAKSFPALALEKDGKHTRLLSFLNPSGTTRDVLNLGHGASGQASLIMQYFGNLKKYKHKPLDHPVIILCDNDDGPKTVFKNAKSKSGLTISTSTTDQFYHLGENLYIVKVPEGNPATIKEIENLFDSKLLTEKLDGKSFDPKKEHGDPTSYGKVVFAEKIVRPNAGEG

SEQ ID NO: 840 - protein, 562 aa, unidentified
  source 1..562: note = Related to PDSV01000021.1; note = Gammaproteobacteria bacterium
MSRFQLLKDATTINDIASLLNYKAKTLSYILYVLSKQDDYYTSFEVPKKNGGVRLIQAPNKKLKQVQTNLSGLLNECVNEIIEKEPKYFYASHGFLADKTIITNANKHKKKRYVFNVDIENFFGSINFGRVMGFFMNDRHFRLDKKVATIIAQIACHENALPQGSPCSPIISNLIGNIIDIRLITLAKKHKCTYTRYADDITFSTNVKQFPTSIAKKRDETWEVGTKLSREIQKLGFNINEKKTRMSFNNSQQMVTGIVVNKKINFSQAYYRELRSQCHNLFKNGSYHVNNEVCSNLNKLQGKLAYLYFIQNNKKNIKIDKNEEANFGSGLNKLYRKFLFYKYFVASEKPVIVTEGATDIGHLKLAIDALDEKDMNLKFFNPSKTGIKLLNLGEGTGGQNKLIFNYRSMMNKLGKNMPAPFSPVILLCDNDEGASDIFKTINNKKNKFSCEISLSTTDPFYKLCHNLYLIKVPESKGAETSIEDLYEETVLDTKLGEKTFNKTNKKLGDNEYGKQYFLDYVVRKNKNSIDFSGFTPLLDRIKLCISNWESQEKSSHNSTNSH

SEQ ID NO: 841 - protein, 570 aa, unidentified
  source 1..570: note = Related to JAFECG010000019.1; note = Proteobacteria bacterium
MSTLQKLKNARTRSDLAKILGVTPSGLTYALFVIPQEAKYHKFQIPKRSGGHREISAPNSHIKLVQRRLASKLYECTKEIENAQPNRKKVTHGFQPGRSIITNADRHKNRRYVFNVDVKDFFDSINFGRVRGFFNKDREFLLDKEICTAIAQIACWENSLPQGSPCSPVISNLIGHILDVKMLKLAKESKCRYTRYADDMTFSTNEREFPSSIAIRDAQDPGKWSVSTKLEGLIKQAGFEINPQKTRMQIVGSRQLATGLVVNKKVNIKEEYCRQTRAMCNHLFKKDAYFLQNTKEGEAPKLIKNLDILEGKLCHIHAVKTRVDLTDQQKKSRKFDPPPGTLRLYKKFLFYKNFFAQERPLIITEGASDIIYLRTAIRHSKKKFPLLFDKTLQIRFLKNSKTVKEVLGLGDGCGGIGKLVATYAKEISAFGRPSAFPIIILIDNDDGSKKSIFKVAKDAAKATLKKDIEISIESNDCWHHLGDNLYLVKVPHGGSKSPKSIEELFPEKWLKFSVDGKIFDPSKKHGDHTSLGKVAFAKKVVETHAGEIDFGGFDSLFSLIEGAIADYRKN

SEQ ID NO: 842 - protein, 523 aa, unidentified
  source 1..523: note = Related to LOEV01000045.1; note = Alphaproteobacteria bacterium BRH_c36
MGLVQRRLATRLYECVLEIEEKQPNRRRVTHGFQKGRSIITNADRHHSRRYVFNIDIQDFFQSINFGRVRGFFQKDSTFALNDEVATTIAQIACWQNGLPQGSPCSPVIANLVGHILDVKLLKLAKQARCRYTRYADDISFSTSERNFPSLIAARADGKPAVWEPSENLASAIRQAGFAINPAKTRMQIRGSRQMATGLMVNEKVNIRPEYYNETRAMCHRLFTTGRYEIPRWPDRQETDQLGALEGRLSHIFAVKARLDLSSKRRKERHVKVPSGTIELCRRFLFYKNFVVNPLPVIITEGPSDVIYLRAALRARGKEFPKLYDARQEQKFLVRFVNHSHFMRENLLGHGVGGLGTLISRYHATLQEYAQEGQTAPVVLLVDNDEESDKAFKAAKKAIKEDGNGAASISVESNDAWHHLIDNLYLVKIPHGGAEQKKRVIEQLLPEEWLKHEVDGKRFDPSKKHGDHSSLGKVFFAKKVVEANADKINFGAFDALFSLLDGALRDFEDKRKQEAGGKVMAAS

SEQ ID NO: 843 - protein, 584 aa, unidentified
  source 1..584: note = Related to PAIP01000075.1; note = Parvularcula sp.
MGRLDELKAAKTRSDLAKLLHFTPKGLAYVLYKTPAADKYSIFTIPKKGGGERRIEAPEPRLKLLQTQLAAVLYDCLEEIESETPNRRSISHGYHRGRSIVTNAVPHRRHRYVLNIDLSDFFGTINFGRVRGFFIKDSNFALTDEAATTIAQIACHEGRLPQGSPCSPVISNLIARILDVRLARLAKSTGCTYTRYVDDLTFSTAQRTFPPKLAKKIATSPHKWRLMRSLRDEIKNAGFKINTAKTRMQICGSRQEATGLVINEKINISQPAYRTIRSMTHTLFSTGKYFVPGGELDPSGAPKWISELAPLEGRLAHLYFVKARRDRSEQLNKRENFKTPRAVKELYRRFLFYKYCVAPEAPLIVTEGKTDVMYLKSALKARGALHPQLASEEKGKSKRQIRFLPASYMNNTVLELGSSASQLTKLIESYSNRLKLYRHRPLSAPVIVIADNDDGVDRILKAANKRSELEVKAGTPQCMFHIVDNLYLVKTPHVGEKAKTCIEDLFSDRLKSQKVKGKPFDIKKDHGDETSYGKSRFAEEVVAKLAQAPDFAGFEPLLNAIEGAISDYSSRMMNKERSAALIGT

SEQ ID NO: 844 - protein, 565 aa, unidentified
  source 1..565: note = Related to WVQY01000005.1; note = Ruegeria atlantica
MKHLQALRDAKNIQDLANILGYKAKGLSYVLYKYPEDKKYTRFTIPKRSGEPRVISAPCKPLKLLQRRLADYLYICEKEIEEAQPHRKRLSHGFHKGRSIISNADLHRNRRYVLNVDIEDFFGTINFGRVRGFFIKDKNFLLNDKVATILAQIACHANALPQGSPCSPVISNLVGRIMDVRLAQLAKSCYCTYSRYADDLTFSTNKSGFPEQLAIMKADSDGSWGVGKALQNEVERAGFKVNNSKTRLQFRSSRQSVTGLVTNKKVNVSKEFWRNARSMSFQLFSTGKYNCQHKQPNVPTTSLAPLTGVLAHIYQVKSRRDLDETQIEERSFSAPKGHETLYRKFLDFKYFVALDKPVLLTEGPTDIVYLREAIKSRAAKFPSLYSGGEHQLKFLRPTDTVKELLSVGTGFGDLLGLMSEYEERVAKFPYCPLSHPVIMLLDNDDATSALSKMKYLKRKKIVIKTSSTADYYHIAKNLYVVKTPEGSPTNETCIEDCFDAATRGVTIDGKPFDPNKKHGDHSSFGKQVFAERVVKPNSSTIDFTGFDPLLDRITKVVSGYVPPAP

SEQ ID NO: 845 - protein, 584 aa, unidentified
  source 1..584: note = Related to NZ_FOSL01000011.1; note = Mesorhizobium albiziae
MSELNNLKAAKTLPQFAHLLKLKSETVSYALYWYRRRSPYSHFTISKKNGGRRHIAAPNSRLKLVQSRLAELLGRIETEMEMKRTTKVRVLSHGFKKGFSIITNANQHRNKRWVFNVDIRDFFPSINFGRVYGFFVKDRNFQLDPKIATIIAQIACYQNRLPQGSPCSPVVSNLITHILDIKLNKLANDLHCTYTRYADDLTFSTNEKEFPEQIARLVRGNDDKWVAGDGLLYLVYRAGFQLNHEKTRMQRRDSRQDTTGLIVNQKLNVRHEYYKQVRAMCHHLFNHGFAFSDPGKVPVSNHTVEGMLSFIYQIRRIRSQNLVVEKEPERNSFFQTDQAGFTELYRRFLNYRSFYGMIKPTIICEGKTDNIYLLAAIRKLAPKFPKLIDPAQKLPLKVQFFNYSHRSALFQGLSGGGDEMYKLIKDFRERMKFFKHVPTQPVIMIIDNDAASTGIFTYVGTVHGTGPVSGLDPFYHVFENLYIVPVPTTAGVKAVIEDLFDPVVKKPISGRTFNSSNKSFDQTKFYGKNEFATKIVAPERATIDFTKFEPLLQAICDVMDHFAATLAAKSIVLPAPVVVAEAAP

SEQ ID NO: 846 - protein, 359 aa, unidentified
  source 1..359: note = Related to JAHRFK010000006.1; note = Hoeflea sp.
MSELSNLKATKTLPQFARILDLDGQTVSYALYWYKRRNPYEHFTIPKKNGGVRHIAAPNSRLKVVQSRLAELLGRIESEMELKRTTKARVLSHGFKKGFSIITNANQHRNKRWVFNVDIRDFFPSINFGRVYGFFLKDRNFQLDPKIATIIAQIACYQNELPQGSPCSPVISNLITHILDIKLNKLANELHCTYTRYADDLTFSTNEKEFPERIARLVRGSDDKWVAGDGLSYLIYRAGFQLNHEKTRMQRRDSRQDTTGLIVNQKLNVRHEYYKQVRAMCHHLFNHGFAYSGPSKVPVSNHTLEGMLSFIYQIRRIKKPELLFGACPVGRRFRPEHDRHKFSKCRRIFGSDEIKCQRT

SEQ ID NO: 847 - protein, 582 aa, unidentified
  source 1..582: note = Related to JAIUHW010000003.1; note = Mesorhizobium sp.
MSELSNLRDVTTLPQLARLLDFPAENLSFALYWHRRRRPYHHFTIAKKNGGRRVIAAPNGKLKFVQGRLADLLGRIESEMELKRTTRSRVLSHGFKKTFSIITNANQHRNRRWVFNADIKDFFPSINFGRVYGFFLKDNNFELHPKIATIIAQIACYQNQLPQGSPCSPVISNLITHILDIKLNRLANDLHCTYTRYADDITFSTNEKEFPERIARLVRGSDDKWVAGDGLLHLLYRAGFQINHDKTRMQRRDSRQDTTGLIVNQKLNVRHEYYKQVRAMCHHLFKEGFAYSEPSRIPVSNHTLEGMLSFIYQIRRLRSLSIVVEDEIERNTFFKRDQPGFTELYGRFLNYRSFYGMIKPTIICEGKTDNIYLLAAIKKLAPKFLKLIDPIQKVPMKVQFFNYSHQSALFQSLSGGGDEMYKLMKEFKERIEFFKHGLSHPVIMVIDNDKASKGIFSYIGTVHGTGPVSGLDPFYYVYENLYVVPVPTTADVTAIIEDLFDPSVKRPINGRTFSDSNKKFDLTKHYGKNEFATTIVAPERDTIDFTKFEPMLQAICDVMDHFAAILAAKPEAAVPPLAATGT

SEQ ID NO: 848 - protein, 579 aa, unidentified
  source 1..579: note = Related to NZ_JACIFL010000022.1; note = Rhizobium sp.
MSELSNLKAAKTLPQLARLLNLNGETLSYALYWYRRSAPYTYFTVAKKSGGRRAIAAPNSRLKLVQSRLGQLLARIETDMELKRTTKSRVLSHGFKAGFSIVTNAKHHRNKRWVFNVDLKEFFPSINFGRVYGFFLKDRNFELDPKIATIIAQIACHDNKLPQGSPCSPVISNLIAHILDIKLNKLANDLHCTYTRYADDLTFSTNEKHFPEAIARLVRGSDDKWVAGDGLLNLIYRAGFQLNHEKTRMQHRDSRQDATGLVVNQKVNVRHEYYKQARAMCHHLFTNGYAYSRTEFAPVSNDAVEGMMNFIYQIRAVRSPDFTATDPRGFFKSDQPGFSELYGRLLNYCSFYGMLRPTIICEGKTDNIYLLAAIKQLAAKFPQLIDPAQKVPMKVQFFNYSERTALFQGLSGGGDEMYKLMKEFRERMRFFKHGPSKPVIMVVDNDDASKGIFSYIGTVMGTGPVSGLDPFYYVFENLYVVPVPKVAGTSAIIEDLFDAAVKKPINGRIFNSSNKKFDLTKYYGKNELATKIVAPERSSIDFTKFEPMLQSFADIIMDYGARLAAKPAMVPVKNAVAGP

SEQ ID NO: 849 - protein, 571 aa, unidentified
  source 1..571: note = Related to NZ_WPHT01000004.1; note = Agrobacterium vitis
MSDLTALRNARNLPQLARLLKLKGEYVSHSLYWYQQQKPYSHFTIPKKGGGKRSIEAPNSRLKLLQRRLAELLMRIEAEMEGQRTTKARVLAHGFKPNFSIMTNAALHRNKRWVFNMDLKDFFHTINFGRVYGFLLKNRNFALAPKTAAVISQIACYRNHLPQGSPCSPVISNFIAHVLDIKLNKLANKLRCTYTRYADDITFSTNEKEFPEDIARLVRGSDDKWVVGDKVLREVYRAGFKINHDKTRMQRRDSRQDTTGLIVNQKLNVRHEYYKQARAMCHHLFVHGYAHSGTDRGSVPIKNEVVEGMLGFIHQIRSLKNAEFFKADQPGFSSLYGKFLDYQSFYGILRPRIIGEGKTDNIYIKSAIKSLAAKFPALVDATEPLTTAVDFFRYNKRSSIFQDLSGGTGEMNKLLASYRHRMASFKHIARHPVIMVVDNDSGSASLFNYVSKVLGTPIGGLDPYYHVFENLYLVPIPKTSGHVAIEDLFDAALLAETIDSRTFERRNNKFDSTKFYGKNEFATKIVAPKRATIDFSKFEPLLQAFVDIMADYEKRHAAAIVAARPPVVAAA

SEQ ID NO: 850 - protein, 571 aa, unidentified
  source 1..571: note = Related to JAAMEU010000005.1; note = Agrobacterium rhizogenes
MSDLSALRNATTLPRLARLLKLKGEYLSHSLYWYRQSNPYATFSILKKGGGRRLIEAPNSRLKLVQSRLADLLMRIEAEMENKRTTKARVLAHGFKPGYSIMTNAALHRNKRWVFNIDLKDFFHSINFGRVYGFLLKDRNFELAPKTAAVIAQIACHNNRLPQGSPCSPVISNLIAHVLDLKLNKLANAHRCTYTRYADDITFSTNEKEFPEAVARLIRGSEDKWVAGDKILREVYRAGFKINHDKSRMQRRDSRQDTTGLIVNQKLNVRHEYYKQVRAMCHHLFVHGYAHSGLGAGRDPVKNESVDGMLGFIHQVRSLKNAGFFKTDQPGFSSLYGKFLDYQAFYGILRPRIIGEGKTDNIYIRSAIKRLAGKFPSLIEPSSPLAEAVDFFHYNTRSALFQDLSGGTDEMHKLLSSYRARTSSFKHIARHPVIMVVDNDAASAKIFAHLSNILGTAVGGMDPFYHVYENLYLAPIPKTTGHVAVEDLFDATVLAQTINGRTFNPSNKKFDQSVYYGKNEFATKIVAPQRATIDFTKFEPLLAAFVDIMADYEKRYAGALAALKGGIAAAA

SEQ ID NO: 851 - protein, 571 aa, unidentified
  source 1..571: note = Related to NZ_ANNO01000019.1; note = Pseudochrobactrum sp.
MSDLSALRNTKNLPQLARLLKLKGEFVSHTLYWYRPNTPYSCFTIPKKNGGRRLIEAPNSRLKLLQSRLANLLMRIESEMEGKRTTKARVLAHGFKPGFSIITNAALHRNKRWVFNIDLKDFFHSINFGRVYGFLIKDRNFELAPKTAAIIAQIACHKNHLPQGSPCSPVISNLITHLLDIKLNKLANKLHCTYTRYADDITFSTNEKEFPAAIARLVRGSHDKWVAGDAVLREVYRAGFKVNHDKSRMQRRDSRQDTTGLIVNQKLNVRHEYYRQARAMCHHLFVHGYAYNGADTRNNPIKNETLDGMLGFIHQVRSLKNAEFFKEDQPGFSSLYGKFLDYQAFYGILRPRIIGEGKTDNIYIRSAIKSLAAKFPSLVNPSIPATAALDFFHYNTRSALFQGLSGGTDEMHKLLSSYRSRISSFKHIARHPVIMVVDNDAASTKIFAHLSNILGYPVNGMEPFYHVYENLYLAPVPKTTGHVAIEDLFDASVRAQQIDGRSFNPSNKKFDLSIYYGKNEFATKVVSPHRATIDFSQFEPLLTAFVEIIADYNKRYAAILGAAKGDVLSAA

SEQ ID NO: 852 - protein, 572 aa, unidentified
  source 1..572: note = Related to NZ_AP023262.1; note = Mesorhizobium sp.
MSELSELKSATTLPQLARLLKLKGETVSYALYWYRRANPYDYFEIPKKNGGRRLIAAPNSRLKLVQTRLAGLLGRIEAELEGKRATKARVVSHGFKTGFSIVTNAAHHRNRRWVFNADLQDFFPSINFGRVYGFFIKDRNFQLDPKIATIIAQIACHNNKLPQGSPCSPVISNLIAHILDIQLNKMASKHHCTYTRYADDLTFSTNEKEFPEAVARLVRGSRDKWTAGDGILRLVYRAGFKVNHEKSRMQKRDSRQDTTGLIVNQKLNVRHEYYKQSRAMCRHLFQHGWAHTGTKRGERPVSNDSLDGMLSFIYQIRRIKNDAFFTDDQPGFSKLFGYFLDYQSFYGIVRPRIICEGKTDNIYLRAAIKSLHLKFPRLVDATPKFSLLVDFFHYNSRTARFQDLSGGGDEMNKLLSSYRQRMKPFKHGASQPVIMVVDNDSGSTKIFNHLTNILGKPIDGSDPFYYVYENLYVVPIRKVAGASTAIEDLFDGSVLAEKIGVREFNRSNKKFDQTKFYGKNEFATEIIAPKRATIDFSRFEPLQKACCDVVDHYQVLSKAAPIPTPVQVAALP

SEQ ID NO: 853 - protein, 580 aa, unidentified
  source 1..580: note = Related to JAJGNB010000034.1; note = Aurantimonas coralicida
MANEYPQATSPISELAQLRSVNTLTHLAHLMGLEGWTLSHALYQQGQKRGYTYFSIPKKRGGFRQIAAPNSRLKMVQSKLAGLLSRIEAEMEGKRARQQCILSHGFKPGYSIITNAAQHRNKRYVFNADLKEFFPSINFGRVRGFFIHDKNFQLNHKIATIIAQIACHNNQLPQGSPCSPVISNLIAHMLDVKLNKVARRSRCTYTRYADDLTFSTNEKEFPTEIARLVRGAHDKWVPGNSVVRSVYKAGFTLNELKTRMQYRDSRQDATGLIVNEKLNVPHEYYKLARARCRHLFRNGYAYDQHSGTEISDEAVEGMMSYIYQIRRARTEDFWKEQSGFAKLYKQLLDHRSFWGITKPRIVCEGKTDNIYLRAALQSLAAKFPELYEAGAEPQDRLKVCFFNHTKRAEIFQIGSGGSELAKLVGAYKSRTKSFEAGMPPHPVIVVADNDSGSTGLFSAMSKILGTSVGGENLRYYLGDNLYVVPIPKKNGHTAIEDLFDNQVLDEKIDGRSFDRKGKQADKTKWYGKNEFATKIVHAKRHELDFAGFEAVLTAFSEVIVDYERKKKEIAGAKAALKVAA

SEQ ID NO: 854 - protein, 574 aa, unidentified
  source 1..574: note = Related to NZ_VFVY01000001.1; note = Mesorhizobium sp.
MSELEKLKSCSTLPQLAHLLGIKGETLSSVLYWLKPSQKYVHFTVPKKNGTRRLIAAPTDRLKYVQGQLAELLSKIEAELEGRRTTKYCVLSHGFKKGFSIVTNADVHRNRRHVFNADLRDFFPSINFGRVYGFFQKDRNFHLSPKIATIIAQIACHDNQLPQGSPCSPVISNLIAHVLDIKLNKIASAGRCSYTRYADDLTFSTNEREFPASIARLVRGSHDKWVAGDLLLERVYRSGFSLNEAKTRMQHRDSRQDATGLIVNQKLNVPNEYYKLARSMCHQLFTDGYCYVGPDRAYVPDAKLEGMLAFIYQIRKIKIENFKADQAGFSKLYGRFLDYRSFYGLAQPRIICEGKTDNVYIRSALKALAVKYPSLIDPGKKPPLKVDLFNYTKRAATFQDLSGGSDELKKLINNYATRTARFKHGAPHPVLVIVDNDAGSVGIFQMLTKLLGKPIGGLDPFYHVIENLYVVPIPKVATPVAIEDLFDPALLARKIDGKDFDRTGKEKDGSKWYGKNEFATKIVAPERGTIKFDGFEPLLNAVVDAIQHYEGVKAAAAAKAAALKAAKPAVVAIP

SEQ ID NO: 855 - protein, 567 aa, unidentified
  source 1..567: note = Related to NWTG01000019.1; note = Bradyrhizobium sp.
MTKLSQLRGAKTLPQLARVIGVQPHGLSYALYWLTEDQKYESFTIPKRGGGRRIITAPKNYLKVIQTKLAKLLLDIHIELEGSRSKSQCRLSHGFKRGYSIVTNAAAHRNKRYVFNADLKDFFPSINFGRVLGFLTRDRNFALEPKVATIIAQIACHNNQLPQGSPCSPVISNLIAHVLDIHLNRIARNANCTYTRYVDDLTFSTNEKEFPPSIARLVSGNTSAWVPGDSLIRYVYRSGFKLNHDKTRMQRRDSRQDATGLIVNKKVNVRNEYYKAARAKCHHLFQHGFCYSDHDKTALSDAALEGTMSFIYHIRRLKTVDWKLEQKSFYQLYRQFLDYRAFYGLTRPRIICEGKTDNIYLRCAIGALSAKFPQFIHPDPKAGLNIDFFYYTDTSATFQDLSGGTGELNKLLGSYRARASSFKHGPTQPVFMVVDNDSGSNGLFRHLAGILGKPVGGMDPFYHVFDNLYVVPIPKAGVAAAIEDLFEAVLLTRTINGRAFDRTGKQKDLSKWYSKFDFATQIVKPERAKINFAGFEPLLQAISDARKDFASRVSAGAAAAAVKAAAA

SEQ ID NO: 856 - protein, 564 aa, unidentified
  source 1..564: note = Related to JAGKJI010000032.1; note = Bradyrhizobium sp.
MTKLSQLRGARTLPQLARVLGVKPASLSFVLYWLADDQKYETFTIPKKGGGRRLITAPKPRLKMIQTKLADLLLDIHVELESARSRVQCQLAHGFKPDFSIVTNATAHRNKRYVFNADLKDFFPSINFGRVLGFFTKDHNFSLEPKVATVIAQIACHNNQLPQGSPCSPVISNLIAHVLDIHLSKVARAGRCTYTRYVDDLTFSTNEKEFPASVARLVSGRSDAWVPGDSLVKHVYRSGFKLNYDKTRMQRRGSRQDATGLIVNKKVNVRNEYYKIARAKCHHLFLNGFSYSDKDKKAISDNALEGTMSFIYHIRRLKTVDWQREQQSFYKLYRQFLDYRAFHGLLRPRIICEGKTDNIYIRSAIKALGAKFPEFIHSDPSKGLTVDFFNYTEAAVIFQDLSGGTGELKKLLTSYRPRLSSFKHAAPQPVIMIVDNDKGSTGLFHQLAHIIGKPVGGVDPFYHVLDNLYVVPVPKTGTEAAIEDLFDSALLKKTIKGRSFDRTGKAKDFTKWYSKVDFATQIVKPERSTIDFSGFEPLLKAILDVRKDFSLRPPVATAVARAAE

SEQ ID NO: 857 - protein, 572 aa, unidentified
  source 1..572: note = Related to NZ_CP086136.1; note = Bradyrhizobium sp.
MTQLARLRGVKTLPQLARVLGVQPASLSFVLYWLPDQQKYEQFTIPKKGGGWRLITAPKPRLKMIQTKLADLLLDIHVELEQSRSRSQCQLAHGFKRGLSIVTNATAHRNKRFVFNADLKDFFPSINFGRVRGFFQWDNNFSLDPKVATIIAQIACRDNQLPQGSPCSPVISNLIAHILDIHLNRLARAGRCTYTRYVDDITFSTNEKEFPSSIARLVRGSTDKWVPGDSLVKRVYSSGYSLNYDKTRMQRRDSRQDTTGLIVNKKVNVRNEYYKTARAKCDHLFKNGFCFSDKDRKPIFDDALDGTMGFIRQIRGLKTKDWQSEQNSFFKLYRQFLDYRAFHGITRPKIICEGKTDNIYLRCAFQRLRARFPAFIHPDPLVGLTVDLFNYTEAAATFQDLSGGTNDLSKLLSHYAARVSPFKLSPDQPVIMIVDNDKGSADLFRKLTKMLGRVVGGLDPFYYVCANLYVVPVPKGITTLEAAIEDLFEPALLARTIKGKNFDRTGKEKDRSKWYSKVEFATEVVKPERATINFSGFEPLLQAISDACKDFTGRRAAPSKPLPSASASAGSP

SEQ ID NO: 858 - protein, 491 aa, unidentified
  source 1..491: note = Related to RPJW01000006.1; note = Sinorhizobium medicae
MGRQWLKSYRYLTIANEYPRALPPIVTQSASRLSNVKSLDQLAAVLEEQTKVLSYWLYKAEPSKKYLEYSIPKKNGGWRHITAPKDGLKRIQGKLARLLAEIYNDIEQRRSNGSFDSSRASESVLAHGFKDKYSIITNARVHVGKRYVFNTDLEDFFPSITFGRVRAFFIADNNFRLSPPVATMIAQLACYRNQLPQGAPTSPIISNFIAHILDIKLNKMARAGNCSYTRYADDLTFSTNEARFPSAIARLVAGTTDRWVAGDGLLGRVYASGFRVNHDKSRMQLPKSRQEATGLTVNQNVNVASTYYKLARSMCDHLFTGGTCFETIDGKWVEFPAHKLQGRMDFIYSVRRSRIGISLDHVSKKQHPIAYREREAEFCKRQSSFTKLYRNLLNYQSFHGMEKPVIVGEGITDGLYIRAAIQSTGGLFPKLYDPTGDGEVLVSFYRHSDKKNLSNWGGRFATQAVHHRVYEVDGAVQNKAKAARNSYRRQR

SEQ ID NO: 859 - protein, 570 aa, unidentified
  source 1..570: note = Related to JAAMCX010000003.1; note = Agrobacterium rhizogenes
MLEEQTKVLSYWLYKAEPSKKYFEYSIPKRNGGWRQITAPKDGLKRIQGKLARLLAEIYNDLEQRRLNAEFDSSRVSDCVLSHGFKDKYSIITNARVHVGKRYVFNADLEDFFPSITFGRVRAFFIADNNFRLNPSVATMIAQLVCHRNQLPQGAPSSPIISNFIGHMLDIKLNKMAKVGNCSYTRYADDLTFSTNETRFPSAIARLVVGTADRWVAGDGLLARVYASGFRVNHDKTRMQLPKSRQEATGLTVNQNVNVASTYYKRARSMCDHLFTGGTCFEMIDGKWIEFPVSKLQGRMDFIYSVRRSRLRMSLDHVSKKQHAIAYRERETEFCKQQRSFTTLYRNLLNYQSFHGMEKPIIVGEGITDGLYIRAAIKTIGASFPKLYDATGDGGVLVSFYKHSDKRKFYQIGEGASQLKPFITEYTKLMDAFKTRPKQPVILIVDNDDEGQSVLNVAGNRWKKDVKTATPFYHLVSNLYIIPIPAKTGLISTAIEDLFDAAWLAAQDIGGRKFTKDNDFNSATHFGKAELLGQIVRPSRATINWTNFQTLLQGIQGAILDYEVKLAVSP

SEQ ID NO: 860 - protein, 627 aa, unidentified
  source 1..627: note = Related to NZ_VDMN01000001.1; note = Rhizobium smilacinae
MVDYAVTVNAEYSTDRYTVKSYRHLTVANEYPRALPPIVTQSVSRLRNVKSLDQLAAVLKEQTKVLSFWLYKAAPHQKYVDYQIPKKNGGWRHITAPKDGLKRIQGKLARLLSEIYNDLEQRRIDPAFDGSHPSSCVLAHGFKDKYSITTNATVHVKKRYVFNADLEDFFPSISFGRVRAFFVADQNFKLDPAIATMIAQLVCFRNQLPQGAPTSPVISNFIGHILDVQLNKLAANGNCSYTRYADDLTFSTNEKAFSPAIARLVSGTTDRWVAGDGLVGRVYASGFRINHDKSRMQLPKSRQDVTGLTVNQAVNVSATYYKLARSMCDHLFTGGTCHEKINGEWHRFPAYKLQGRMDFIYSIRRSRLKVSIDYLPKKQQPVAFREREAEFCKQQKSFTTLYRHLLNYRSFHGMEKPVIVGEGITDGLYISAAIKSLGALFPTLFDAGGDGEVKASFYKHTDKRKFYQIGEGASNLKPFITEYTKIMEPFKTIPRHPVIIVVDNDDEGRAVLSVAGNRWKKDLKTTAAFYHLVSNLYIIKIPFGSSASSSAIEDLFDSAWLSAQDIGGRKFSKDNDFDSATHFGKADLVGQIVRPKRTTIDWAGFVPLLAAIEGAIIDYDSKLNSVP

SEQ ID NO: 861 - protein, 592 aa, unidentified
  source 1..592: note = Related to JACVAS010000003.1; note = Ensifer sp.
MPPIVTQSSSRLSNVKSLDQLAAVLGEQTKVLSYWLYKAEPARKYEQYSIPKKSGGWRHISAPRDGLKRIQGKLSRLLAEIYNDREQRRVNGSFDGSRTSPYVLAHGFKDKYSIITNAQMHVGKRFVFNTDLEDFFPSISFGRVRSFFRLDTDFRLDPAVATMIAQLTCFRNQLPQGAPTSPIISNFIGHMLDIKLNKMARKGNCSYTRYADDLTFSTNEESFPPAIARLVAGTTDEWVAGDGLLARVYASGFRVNHDKSRMQVASSRQDATGLTVNRTVNVSATYYKLARAMCDHLFTGGTCHEMKGGKWTVLPPHRLQGRLDFIYSVRRSRLKIPLDHVAKKQFPIEYMKREALFCDQQKAFSTLYKNMMNYMTFHGIEKPMIVGEGITDGLYIRAAIKTVGPAYPKLYHPSGDGEVLVNFYKHTDKRKFYQIGEGAAPLRSFIAEYPKLMGRFKTKPKQPVILIVDNDKEGRDVLKAAGSRWQKDTSVPSPFYHLVSNLYIIPLPKPGATDVCIEDLFDQTWLAAQNIGARKFTKKNDFDSATYFGKADLVGQIVRPQRATIDWSGFVPLLEAVQGAISDYEVKLSLTP

SEQ ID NO: 862 - protein, 600 aa, unidentified
  source 1..600: note = Related to SADI02000019.1; note = Mesorhizobium sp.
MAYEYPRALPPITTQSVSRLRNAHSRAQLAAILGEQSKVLSYWLYKADLSTKYTQYSIPKKNGGWRYITAPQNGLKRIQTKLARLLADIYNDIEQRRLNESFDGVTVSECVLSHGFKDSYSIITNAKVHVGKNFVFNSDLENFFPSISFGRVRGFFINDRNFRLHEDVATAIAQIACYQNQLPQGAPCSPIISNFIAHMLDIKLNKMAKKGNCSYTRYADDLTFSTNEKHFPAEIARLVAGTTDRWVAGNGLISRVYASGFRINHDKSRMQLPMSRQETTGLTVNQKVNVPATYYKAARSMCDRLFKEGYCFEIVSGKWVEVPSVKLQGRMDFIHSVRMGRLGISLDHLPKKRFPTAYRDRENIFRGQQKAFSSIYEKLLNYRSFHEMVKPIIVGEGITDGLYINAAIRTIGGLYPRLFDPAGNGTLLVDFYKHSDKRKIYQIGEGAKPLGAFVKDYAKLMEPFKAKPSNPVIVVIDNDKEGREVLTAIGKRWGKTIDGKSSFYHLVSNLYVVPVPATGGVLTSIEDLFDSTWLAAQDISGRKFTKDNDFDSSTHFGKTQFAGQIVRPKRASIKWDGFKPLLQGIQDTILDFELQSSPGT

SEQ ID NO: 863 - protein, 566 aa, unidentified
  source 1..566: note = Related to VCHT01000005.1; note = Rhizobium sp.
MSKLDALKQAKSLSDLAYILGEQPKVLSYVLYMIPSTLKYTPFLIPKKSGGTRTIQAPIDRLKRIQRALADLLQDIQEEISTKRKVDKRHAVSHGFKRKLSIITNARNHRNKTYVFNSDLENFFPSINFGRVYGFFVHNETFSLDPKVATVIAQIACHDNSLPQGSPCSPIISDYIGHILDMRLSRLASRHRCTYTRYVDDLSFSTSQPNFPKEIAYQHEGDHKWLAGDALVKNVFKTGFKLNHAKTRVQYKLSRQEATGLIVNRKVGVPTEFYHLTRAMCHSLFNQGFAFVVKDGIAQPVSDAVVRGRLSYIHHVRSMQNTLEKGPSLQGTAPFRLYQRYLNFKSFYGISQPVIIGEGVTDTIYLKAALNQLAGKFPNLIDVGHGTKEHKLTFFKYGKSSRELMGLSGGTGELKNLLGDYRKRISGFKFGGANPVIILVDNDDGAEKFFKTLGSMTKTKVTGTDPFYYVYANLYAVPIPPTGGPVAAIEGLFDPSLLNIPHEGKKLDLTNKETDGTKFYSKHTFAKSVVRPNQDKIDFTGFEPLLLAIEQVIADFAGRLAAGTAP

SEQ ID NO: 864 - protein, 567 aa, unidentified
  source 1..567: note = Related to CP050308.1; note = Rhizobium lusitanum
MSKLEALKKAKSLSDLASILGEQPRVLSFILYKIPSNLKYKSFEITKKSGGKRTIHAPVARLKRIQRSLADLLQDIQDEIKIQRKVNDNCVVSHGFKRKLSIITNARNHRNKTYVFNSDLKDFFPSINFGRVYGFFVRNQEFALDPKVATVIAQIACQGNSLPQGSPCSPIISDFIGHILDMRLSRMAARHRCTYTRYVDDLSFSTNKRSFPKAIAYQNEDNSHEWLAGDALLKNVFKSGFKLNNAKTRVQYKSSRQEATGLIVNKKVAVPTEFYHTTRAMCHNLFKDGFAFIVKDGTPKPISDAVLRGRLSYIHHVRSTQNKLENGPPLKTTAPFKLYQQYLNYISFFGSSMPVIIGEGVTDTIYLKAALNQLAAKYPNLITVVDKKKEHKLQFFKYSNSSRELMGLSGGTGELKNLLGEYRKRISGFKFGGTQPVIILVDNDDGAKAFFSTLGSITKTKVSGTDPFYYVYANLYAVPIPPTGNPVTAIEGLFEPALLNTIYDGKKLDLTNKEPDGSKFYSKHTFAKNVVRPNQDKIDFKGFEPLLTAIDHVMADYAARLVAGTAP

SEQ ID NO: 865 - protein, 567 aa, unidentified
  source 1..567: note = Related to NZ_KZ857258.1; note = Rhizobium grahamii
MSKLEALKKAQSLSDLACILEEQPKVLSYVLYKIPTNSKYKAFQIPKKSGGTRTIQAPVDRLKRIQKSLASLLQDIHLEIQKKRGVKANCIVSHGFKPKLSIITNARNHRNKTYVFNSDLKDFFPSINFGRVYGFFVKNEDFALDPKVATVIAQLACHGNSLPQGSPCSPIISDLIGHILDMRLSKVATRYRCTYTRYVDDLTFSTNESTFPKAIAYEDKDNQHKWVAGDALLKSVFKSGFKLNDAKTRVQYQSSRQEATGLIVNRKVAVPTEYYHATRAMCHNLFKEGFAFTVKDGVAKPVSDAVLRGRLSYIHHVRSMQNKLENGPSLKLTAPFKLYQQYLNYVSFFGISKPVIIGEGITDTIYLKAALNQLAGKFPSLVEVAGGENVHKLGFFKYGNSSRELMGLSGGTGELKNLLGEYRKRISGFKFGGAHPVIILVDNDDGAKAFFSTLGTITKTKVSGTDAFYYVYANLYAVPIPPTGNSVAAIEGLFDPTLLKTIYDGRQLDLTNKEPDGSKFYSKHIFAKSVVRPNQDKIDFKGFEPLLTAIDQVITDYAARRAARSAP

SEQ ID NO: 866 - protein, 569 aa, unidentified
  source 1..569: note = Related to JACIGM010000003.1; note = Rhizobium mongolense
MSFELVALKNAVDLTDVAVLLGVKPKDLSYALYIQPSSAKYRAFEIPKKGGGFRLITAPEPRLRSIQRRLADLLLTIQQELEVQRTKSKGIVAAHGFKKSLSIITNARCHRGKSFVFNGDLKDFFPSMNFGRVYGFFLKNRDFELHPKVATVLAQIACFENRLPQGSPCSPVISNFIAGILDRHLSKLAAENRCTYTRYADDLTFSTNEAIFPEQVARLVRGANDKWVAGYELAGRVARSGFQINELKTRLQYRNSRQDVTGLVVNEKLNVPSEYYKLARAMCHHLFKDGTAFRTIDGIKIPVSDERVRGILSHIHHVRTSQGGPKHPPGDPKAPGHQKLYRRFLDYVSFFGHQQPTIICEGKTDNVYIKTAMQMLAPKFPDLVEVAGNKFDLKVKFFKYGRASAQIQNLGGGSGALKTLLMEYEKRLKGFAGTASQPVIMVLDVDKGTTQIWSEISKILGTAVAGHGPDPFYHVRNNLYVVPIPAKPGVETCIEDLFDAKTLAIPHDGKVFDKESDKDKPGTYSKNTFANQVVRENRHSIDFSGFEPLLEAINAAIKNYSTKVAAMTA

SEQ ID NO: 867 - protein, 560 aa, unidentified
  source 1..560: note = Related to SIOG01000001.1; note = Rhizobium leguminosarum
MSPELKLLKAANGLSDVASLLNVRPADLSYALYILPNEVKYRTFQIPKKGGGFRVIAAPESRLRYIQKQLADLLVAIELGLEAGRTQRKFIVSHGFKKKMSIVTNAKNHRNKEFVFNSDLKDFFPSINFGRVIGFFVKNRDFGLKPKVATVLAQIACFNNKLPQGSPCSPVISNLIAGILDRHLSKMAVQHRCTYTRYADDLTFSTNERVFPEAIARRVRGAEDKWVAGHELVGRVARSGFQVNELKTRLQYRSSRQDTTGLVVNEKLNVPAEYYKLTRAMCFHLFRDGTAFAVDDNARMPISDERLRGRLAHLYHIRGLENGHKKYPQKKGPAYVKLYGKFLDYIAFYGHQRPTIICEGKTDNIYIKTAIQMLAPKFPELVDVVGAEYKLKVKFFKYGKASSNLQDLSGGAGQLKTLIMDYGNRLSGFTSGAKNPVIMVLDVDKGTTQIWAELSKILGKSVAGHDPYYHVRDNLYVVPVPVSSGAEGDMEDLFDKKTLELEYDQKKFDKKSDKDMPGTYSKNTFANHVIRDNRATIDFSGFEPLLKSIRDVIADYAAKI

SEQ ID NO: 868 - protein, 575 aa, unidentified
  source 1..575: note = Related to NZ_JABEPP010000002.1; note = Enterovirga sp.
MSVESLLLLRLRACTDLSSVARVLGLTPAVLSFVLYKIPTQARYRTFSIAKRAGGSRAIMAPNERLKMVQRRLASVLLQIQTEQERSRTKKACILSHGFKRELSILTNARNHRNKRFVFNLDLEDFFPTFNFGRVRGFFMRDQNFQLHPAAATVLAQIACHNNHLPQGSPCSPVISNLLAHMLDLRLNKIARRHKCTYTRYADDLTFSTNKKDFPEVIGATSPGDPNKWSAGNDLLASVYLSGHKINHSKTRMQYRDSRQETTGLVVNRKINVSVDYYKLVRAMCDRLFASGIAFRQDKNKIEPVSRSHLQGKLAFIYHIRGQETSHRKLQKKDQPGYYRLYSQFLDYCNLYDVDRPTIICEGKTDNVYIRSAIEALSSKVPGLLDSEKKLTVRLFKYTKITSTIQDLAGGTDQLKKLVREYANRTQMFKTTPSHPLILVTDVDKGSTEFFKAVSAILGTTVAGADPFYHLIKNLYVVPVPKIKHPETAIEDLFDDTLLNEKVDGKSFDRTNKEKDGTKFYGKHVFATRVVWPNRSTINFARFEPLLRAFEDVKSHYKTLTSTSVKSPAPIAAAA

SEQ ID NO: 869 - protein, 573 aa, unidentified
  source 1..573: note = Related to NZ_LSKN01000098.1; note = Methylobacterium sp.
MPAASPELQRLKKATDLHGVAALLNVKPSRLSYALYYMPPATKYRSFTVPKKRGGTRTISAPHGGLKYIQKQLATLLLSIEKELEGDRRKNSILAHGFKKELSIITNAIRHRNKRWVFNIDLRDFFPSINFGRVRGFFIANNQFALTPKTSTILAQLACHDNVLPQGSPCSPPISNLIARSLDYRLNRLARECNCTYTRYADDITFSTNEPEFPERIAVLAGPHAWQPSEELASRIVSSGFEINPDKTRMQYRDSRQDTTGLIVNRHLNVPVEYWKQTRAMCHRLFVDGQAYRVFDGEKEPISLDSLRGRLNFIYYIRSLTLGKANLEKPKGIPGYRKIFARFLNYNAFWSIEKPVIVCEGKTDGIYLRSAIRSLHAKFPDFFETVDGKVKIRPTFFKYTTNTREVQDLSGGNGQLKNLVAQYAHRTKGFKGTPKAPVIIVTDCDKGAVHLFEEVSKILGRTVAGADPFYYLHTNLYVVPIPKLGLPETAIEDLFDKTLLDTKIDGKTFDKTNHEKDGAKFYSKFTFATKVIAASKVPVDYSGFEPLLQAMLDVEADFAARLATVPPTVLPAH

SEQ ID NO: 870 - protein, 582 aa, unidentified
  source 1..582: note = Related to JAAXSB010000004.1; note = Rhizobium laguerreae
MSVSSLDLGRLKRAATLTDLAAVLGVEASTLSFALYIMPVHERYHTFTVPKKRGGERIINAPNERLKFIQKKLADILLRIERDLEAPLREAANNGAKKLPILSHGFKKELSIVTNAHKHKNRRFVFNLDLADFFPSLNFGRVRGFFLHNNHFQLPEKVATLLAQIACFQNELPQGSPCSPPIANLIANILDVRLNALARSCQCSYTRYADDITFSTNNKEFPSHIAAQNSDGHWVPSDKLISRISASGFRINESKTRMQFRDSRQEATGLIVNRKLNVPVEYYKETRALCHYLFHGRVPVLKIEGGSIPVTTSSLRGRLNHIFHIRGIETGHKKPEKSKYPGYFKLYAQFLDYVSFWGIEQPTIICEGKTDNIYLKNAMRALKPTFPHFWKFVDGKEQQTINFFKYTKCSNIIQDLSGGNGQLKNLVHEFEKRTRKFRSLPKAPVIIITDVDKGATDLFKAMKKILGYTVDGDKSWYYLRDNLYIVPVPKGGRAEVAIEDLFDPALLEVELEGKKFDRTNHESDGEKVYSKFTFATKVVAARRDEIDFGRFQPLLQAILDVQADYAQKIAHAVPSPAQATAA

SEQ ID NO: 871 - protein, 577 aa, unidentified
  source 1..577: note = Related to NZ_CP015318.1; note = Mesorhizobium amorphae
MTVKSLTLERLKKSTDLTEVAILLGVKPSALSHALYITPTAKKYHTFSIPKKRGGERIITAPNERLKLIQARLAALLLQIEQDLEATQSKSCILAHGFKNELSIITNAAKHRNRRFVFNVDLKDFFPSINFGRVRGFFMANRDFQLSEKAATILAQIACHQNKLPQGSPCSPPISNLIGQILDVHLNKLAKECRCTYTRYADDITFSTNQKKFPEKIAVLQAGSEHTWVPSDELSFRIIRAGFELNKQKTNMQYRDSRQTTTGLIVNQKLNVPVEYYKTVRATCHKLFTTGTAFRKLGSKLIPTTPPKIRGQLSFLFHIKGLETGHRKLPKPEMPNFYKLYAQFLNFMSFWAISQPTLVCEGKTDNIYIRSAIRALSAKFPDLVEKKDGKERIKLTFFKYTGIAKTIQDLSGGNGQLKNLVREYPGRTEKFKVQPAHPVIVVTDVDKGAVDLFKAVSDEVGKTILGHEQPWYFLRDNLYVVPVPKGAGAETAIEDLFDSALLTTEIDGKKFDRTNHEKDGDKFYSKFTFATKVISASKTPIDYGGFEPLLQAILDVQADYAARIAAPPVGTAAAAAS

SEQ ID NO: 872 - protein, 590 aa, unidentified
  source 1..590: note = Related to VFVE01000003.1; note = Mesorhizobium sp.
MTVVSLRLELFKKAKDLTDVAKILDLMPAHISFALYKLDRPGFEPKYEEFTVPKKTGGIRTIKAPHRALKAVQKRLAKDLLEIEQALETTRVKKVDCILAHGFKKRLSIMTNGENHRKRRYVFNVDLKDFFPTLNFGRVRGFFMKHKDFQLNKDVATILAQIACHDNHLPQGSPSSPVISNLIAGVLDIRLNELAQQYNCTYTRYADDITFSTSEKLFPSAIGRPEPGSINLWEAGPKLLKAITRAGFELNPVKTRMLLDWSRQEVTGVVVNQKVNVPADYYALAAAMCHHLFMDGACFTTVGGVKKPYPLTKLRGRLAYIYQVRGRGPKPKPAVDDAEDKPKLGKPWASTNLFQKFLDYADLYGIEKPVLLCEGVTDNIYLKAAIQSLAPKYPTLTTAAGELKVKLFKYTRSSAALQQLSGGGGGLGVLAYAYPQRVRKFKSGGKHPLILIGDNDEGSEKLFGAIKAKTGKKVDGSEPWYYLGQNMYVVPIPKVGGIDTPIERLFEPSLLATQYEGKTFNKTNASKDPAKYYDKKVFATQVVAKDKANVNFDGFEPFLDAIVSVINHHKAKVGSIPVPAAAVTIATAAP

SEQ ID NO: 873 - protein, 589 aa, unidentified
  source 1..589: note = Related to CP015005.1; note = Aminobacter aminovorans
MTLPLKLSLYRKARDLTDVAKILDLKPAHLSYALYKLDKPGFPPKYKEFTVPKKAGGVRTIMAPHKVLKAVQKRLANDLLEIEQVLEKTRVKKADCILAHGFKKNLSIMTNGENHRKRRYVFNVDLKDFFPSLNFGRVRGFFMKHNDFELDTDVATILAQIACHENQLPQGSPCSPVVSNLIASVLDIRLNELARQHNCTYTRYADDITFSTNEKLFPTAIGRREHGSLNLWEAGSKLVKVIERAGFELNPAKTRMLLDWSRQEVTGVVVNQKVNIPADYYATAAAMCHHLFMDGACFTMVGGVKQPFSLTKLRGRLAYIYQVRGRGPKTKPAADGTEDKPKSGKLWASTDLFQKFVDYADLYGIERPVLLCEGVTDNIYLKAAIQALAPKYPALATAAGELNVKLFKYTKTSAALQHLGGGGGDLGKLANVYAQRTRKFKSGGKYPLILIGDNDEGSEKLFGAVKAKTGKKVDGSDPWYYLGQNMYVVPIPKVGGIDTPIERLFEPKLLATQYEGKTFNKTNASKDPTKFYDKKVFATKVVAKDKANVNFDGFEPLLNAIVSIINHHKAKIAPIPAPAPAVLVAAVGP

SEQ ID NO: 874 - protein, 588 aa, unidentified
  source 1..588: note = Related to JAIUGR010000007.1; note = Mesorhizobium sp.
MTVVSLKLELYRKAEDITDLAKILGLKPAHISYALYHLPLGDRYEEFTVPKKTGGVRTIKAPHRTLKAIQKRLAKDLLEIEQALEQSRVKKTNCILAHGFKKKLSIMTNGENHRKRRYVFNVDLKDFFPTINFGRVRGFFMKHNDFELKPAVATVLAQIACHDNELPQGSPCSPVISNLIASVMDIRLNELAHRHNCTYTRYADDITFSSSEKIFAPAIGRRNVSSINLWEAGISLSRVIKKAGFKVNAAKTRMQLDYSRQEVTGVVVNQKVNVPANYYAEAAAMCHHLFMDGECFVKIAGVKQPLPRRKLRGRLAYIYQVRGRGPLIKAAPEDQEERPKGGKLWASSKLFERFVDYVDLYGIERPVVLCEGVTDNIYIKSAIQALAPIYPTLTNPAGELKIKLFKYTKTSAALQQLSGGAGELGKLANTYPSRIRKFKSGGQHPLIIIGDSDDGSKKLFAAVESKTGKKVDGSQTWYHMGANLYVVPIPKIGNKDTDIERLFDVALLKTNYDGKTFDKTNAEKDGTKFYGKKVFATKVVAANKATVNFDGFKPLLATIAEVIDHHKTTVVSPTVAAVSSSAVAAGGP

SEQ ID NO: 875 - protein, 591 aa, unidentified
  source 1..591: note = Related to CAAF010000028.1; note = Mesorhizobium sp.
MTVVSLKLEQYRKAEDITDLAKIFDSKPAHISYALYKLDQAPAPSKYTEFTVPKKSGGVRTIKAPHPALKAIQKNLAKDLLEIEQVLEETRVKKPDCILAHGFKKKLSIMTNGENHRKRRYVFNVDLKDFFPTINFGRVRGFFMKHKDFELKPAVATVLAQIACHDNQLPQGSPCSPVISNLIASVLDIRLNELAHQYNCTYTRYADDITFSTSEKNFPTAIGRRYVGSINLWEAGPKLLKAISRAGFELNPAKTRMQLDYSRQEVTGVVVNQKVNIPADYCATVAAMCHHLFMDGECFIQVAGAKQPFPLKKLRGRLAYIYQVRGKGPKVRITPEDAEEKPKTPKPWASTKLFEKFADYADLYGIERPVLLCEGVTDNIYIKAAIQALALKFPSLTNAAGDLKIKLFKYTKTSAALQQLSGGAGELGKLAFTYASRIRKFKSGAKHPLILIGDSDSGSQKLFDAVEKKTGKKVDGSQAWYHLGSNLYVVPIPKVGNKDTPIERLFDQALLDTPYESKKFDKTNAEKDGNKFYGKKVFATKVVAANKGTVNFGGFEPLLTAIAEVIEFHKTKVAPPANSVQAIAPVAAAGP

SEQ ID NO: 876 - protein, 587 aa, unidentified
  source 1..587: note = Related to NZ_JHQU01000117.1; note = Mesorhizobium mediterraneum
MNIVSLKLEQYRKATSLIDISHVLALEPAHISFALYKLDKPGFAPKYTEFSVAKKAGGERTIKAPHKALKAVQKRLAQDLLMIEQQLEATRVKRSDCILAHGFKKKLSIMTNGENHRHRRYVFNIDLKDFFPTINFGRVRGFFMKHKSFELQESVATILAQIACHNNQLPQGSPCSPVISNLIASVLDIRLNELAHQYNCTYTRYADDITFSTSEQNFPTAIGRRDVGSVNLWEAGPKLLKTIQRAGFELNPTKTRMQHSYSRQEVTGVVVNQKVNIAADYYDEVAAMCHHLFMDGECFIKISGAKQPFPIKKLRGRLAYIYQVRGKGPKVIQKGEDGESKGTQKFWASFNLFERFLNYADLYAVDRPLVLCEGVTDNIYIKSAIQALAVAYPTLTSPSGELKVKLFKYTKTSTAVQQLGGGSGELLKLITKYHLRTNKFKAGGKHPLIVIVDLDEGSKTIFKEVEKKTGKKIGTQPWFHWDKNLYIVPIPKVGGADTPIERLFPQALLEATYDGKTFDLTNSEKDGSKFFGKKVFATKVVAADKGAINFGGFAPLLAAIVEVIEHHKTKMSLPLAAAAAPVAAAAP

SEQ ID NO: 877 - protein, 591 aa, unidentified
  source 1..591: note = Related to nan
MTTAAALKLDLYRKAEDIRDLAAILGLAPAHISYALFKMPDANKYKVFTVPKKTGGVRTIKAPHKTLKAIQKRLAQDLMGIEAHLEAVRVKKRDCILAHGFKKKLSIMTNGENHRHRRYVFNVDLKDFFPSINFGRVYGFFQKNQSFNLKPKVAAAIAQLACFENQLPQGSPCSPVISNLIAGILDVRLNELAQQYNCSYTRYADDITFSTSEQNFPSAIGQRHPGSINLWEAGPKLLKAIKRAGFELNATKTRMQLSYSRQDVTGIIVNQKVNIPVDYYETVAAMCHHLFMDGACFTKVGGVRHPFPLKRLRGRLAYIYQVRGKGPKPKTVDEAGEPKGGAKFWASTNLFERFLNYADLYGAERPVLLCEGVTDNIYIRSALHALAAKYPTMITPASELKVKLFKYTKTSAAIQQLGGGSGELVKLLREYRKRTAKFKSGAKHPLILIADSDEGSKELFKEVTKRTGHKVDGTHAWYRIMTNLYVVPIPKVGAADTPIERLFEQVVLDKTYDGKKFDMTNSETDGSKFYGKKVFATKVVAANRGAIKFDGFEPLLTAIAEVIEDYKTKVAPVLALIPAAAAPAPPAPVPA

SEQ ID NO: 878 - protein, 595 aa, unidentified
  source 1..595: note = Related to SAKE01000022.1; note = Mesorhizobium sp.
MTIVSLKLEQYKKADTLTDVARILDLKPAHISYALYKLSNTSKYDEFTVPKKSGGDRIIRAPHKTLKAVQKRLAKDLLLIEQELEASRVKKRNCILAHGFKKKLSIITNGENHRDQRYVFNVDLKDFFPAINFGRVFGFFTKHKDFAIKRKVAAVLTQIASFENQLPQGSPCSPVISNLIASVMDIRLNELARQNHCTYTRYADDITFSTSEQLFPSPIGRRVNGSINLWEAGPKLVKMIARAGFELNHAKTRMQYYYSRQDVTGVVVNQKVNIASDYYATVAAMCHHLFMDGSCHVKVNGTKQPFSLAKLRGRLAFIHQVRGRGPKLCQVPDEKDEQTKAPPQKVWASFKLFERFLNYADLYGADRPVVLCEGVTDNIYIKSALHNLAAKYPALTSPAGELKIKLFKYTRSSAAVQQLGGGCGDLTKLARMYSARIKGFKSGGKHPVIMVVDSDEGSKDLFKHVQHVTKKKVDGTDSWYFLESNLYVIPIPKIGGADTPIEKLFEQALLDKPYEGKKFDMKLKETDGATHISKKTFASKVVAVNKATINFGGFEPVLNAVVEVIEDYKKRVGSVIPSAPTAAVVALAIIAGGPQ

SEQ ID NO: 879 - protein, 585 aa, unidentified
  source 1..585: note = Related to RZTV01000003.1; note = Mesorhizobium sp.
MTVVSLKLEQYRDAEDLSDIAHILDLKPAHISYALYKLPTHQKYREFTVPKKSGGVRTIKAPHNTLKVIQKRLAQDLLLIEQQLEQARVKERDCILAHGFKKKLSIMTNGENHRGRRYVCNVDLQDFFPSINFGRVFGYFSKNNDFALKPKVATVLAQIACHENQLPQGSPCSPVISNLIGRILDIRLNELARRYHCRYTRYADDITFSTSEKHFPIAIGMRELGSINLWAAGPKLLDAIARTGFEINPKKTRMQYHYSRQEVTGVVVNQKVNISADYYATVSAMCDHLFKKGECHIDVGGTKQPFSIRKLRGRLAYIYQVRGKGPKHRQTADDKDDQVKGSQQRLWSSFKLFERFLNYADLYGVDRPVILCEGVTDNIYIKSAIQALAAKYPTLTNAVGDLKVKLFKYTKTSASVQQLGGGSGELLKLVNTYSSRTRKFKIAPKNPLILVADSDDGSKPLFKVIENRTGKKVDGSHAWYHLESNLYVVPIPKVGAADTPIEGLFEQILLDTTYEGKKFDRTNSEKDGTKFYGKKTFATKVVAANKGSINFGRFEPLLTAITEVIEDYKPKIAPSPVPALAPALV

SEQ ID NO: 880 - protein, 584 aa, unidentified
  source 1..584: note = Related to NZ_AJQB01000700.1; note = Bradyrhizobium japonicum
MAHLTKLRAASSLNDLAFLLGVKPSSLAYVLYKIPDEKKYTQFPISKKTGGERIISAPDPRLKMIQRRLAKLLAKCQIEVEEKLKVKPQCTLAHGFKSGFSIQTNAANHRGQRWVFNADLHDFFPSINFGRVNGFFVKNQYYSLNSKIALLIAQIACHEKTLPQGSPCSPIISNIIAHLLDIRLNELASANGCTYTRYADDLTFSTNEKTFPTSLAKRDPANLNKWTVGSGLAKRIAKAGFIINSKKTRMQYRDSRQEATGLVVNEKVNVKSDYYKLARSICWQLMKEGKAFTKVNGDSVPLKLKSVRGMIAFIYHVKRWDDERKQVPIDEIEKRAYFRLYAEFLNYMWFFGQSRPTIVCEGKTDNIYIKCAIRSLAQSYPSLVKSSGEKRGLLVQLFGFTKTADQVQKLSGGAPQLNILLRDYRKKTANCKGMPQQPTILVVDNDSGPQSLYSHLGNILKTKVDGSEPFYWAYGNLYVVPVPKIGGAPTAMEELFEQEVLATKLNGRTLDLSNKEADGTKFYSKNEFSIQVVQKKQKSIKFDGFKPLLDNLVAVQKDYASKVEAAKKLSAAKKVAAAPTAAMP

SEQ ID NO: 881 - protein, 583 aa, unidentified
  source 1..583: note = Related to JACIHC010000005.1; note = Bradyrhizobium sp.
MTHLAKLKAASSLNDLALLLGVKPSGLAYVLYKIPDENKYTRFTVPKKTGGERTISAPDPRLKMIQRRLAKLLAKCQVEVEEKLKVKPRCTLAHGFKSGFSIQTNAANHRGQRWVFNVDLHDFFPSINFGRVRGFFIKNKYYALNSRVALLIAQIACHEKKLPQGSPVSPIISNIIAHLLDIRLNELASANGCTYTRYADDLTFSTSEKSFPTSLAKRDPANLNKWTVGSGLAKRISKAGFAINSQKTRMQYRDSRQEATGLVINEKVNVRSDYYKLARSICWHLMKEGKAFKKIDGDSKPLSLKSVRGMMAFVYHVKRWDDERKQVSVAEIEKRAYFRLYADFLHYMWFFGQTRPTIVCEGKTDNVYIKCALRSLAQSYPTLVKTAGKKTSFLVQLFGFTKTATQVLKLSGGAPQLNNLLRDYRRNTANCKGMPQQPTMLIVDNDSGSQSLYSHLGRILKTDVDGSEPFYWVYGNLYVVPLPKIGSGPTAIEQLFEKEVLDTELEGRTLDLTNKETDGTKFYSKHEFSIHVVQKKQKSITFDGFRPLLDNMVAVQKDYASRVAAAAKPRTASKVLAAATASP

SEQ ID NO: 882 - protein, 582 aa, unidentified
  source 1..582: note = Related to NZ_AP022641.1; note = Bradyrhizobium diazoefficiens
MAHLTKLKSAATLNDVALLLGVQPASLAFILYKIPEHQKYTKFPVPKKSGGERIISAPDPRLKMVQKRLAKLLKNCQLEVEAILKVKSQCVLAHGFKPGLSIQTNAANHRGQRWVLNADLQDFFPSINFGRVYGFFIKNQHYMLNKKVATIISQIACHENTLPQGSPCSPVLSNMIAHMLDIRLNELASSNRCTYTRYADDLTFSTSERVFPSRIAKRDPSSLHKWVAGAGLSKRVEKAGFAINGKKTRLQYRDSRQDATGLVVNEKVNVKSEYYKLARAMCWHLMTKGSAHLKVGSIPVPVDAKKVRGMLAFIYHVKRWDDDRTKVPKEEIEKRAYYRVYADFLNYISFFGQPHMTIVCEGKTDNVYLRCAVRSLAALYPSLIQVKGKKRNFLLQLFKFTKTADAVQHLSGGASQLSNLLSEYRKRIKNCKGTPQHPTVLVVDNDSGPEKLFKHLSSLLKKDVDGSDPFYFVYENLYVVPVPKIGGAFTAMEQLFESHVLKEKLNGRILDLTNKEPDGTKFYSKNEFSVEIIQKKQASIKFDGFKPLLNALVAVQNDYAGKIAAKKAAIPAPAPVPALAAP

SEQ ID NO: 883 - protein, 611 aa, unidentified
  source 1..611: note = Related to NZ_JHQS01000008.1; note = Mesorhizobium amorphae
MLGWIAHLRFLQFIDVSSCLGVSASRLPSGVSVTGSTLKTLQAIQNLHGFAAFLGVTPKALGHAIHGIPEVSKYTKFEIAKKSGGKREICAPVPHLKRIQRRLANKLKEIEMSLEGELTTNEHVLSHGFKPNLSIATNARAHRGRRWVFNIDLADFFPSINFGRVYGFFLKNSRYGVSKTVATLIAQIACYENQLPQGSPSSPVISNIVAHILDIRLHELAASLNCTYTRYADDLTFSTNEKGFPGAIAKRSQDEDDVWKIGKKVKSIIKQSGFEINPKKTRMQYRISRQDVTGLVVNEKVNVRAEYSRTARAMCHQLWTKGAAFQKDGKLKLAKTPEQVRGIMNFVYHIKECEEVRQSDGAEFDPSAPLPGYARIYAKLLDYLSFWGTDKPVLLCEGKTDNIYIKCAIENLAASFPTLIESSGGVIEPAVRFFNRSDVKDTKDSLTWKLQKLAGGVTELTSFLGEYRERIKDFKHGGKYPLVIVVDNDQESKGMFSHIKNIIKSAAPVDGSAPFYYIYANLYVVAIPKIGSKDTYIERLFSDKVLKKTLDGKTFDVTGKKNNKTHYFKSDFAKKVIKKNKANIDFKRFKPLLERIAAVKADYATRIKTTP

SEQ ID NO: 884 - protein, 570 aa, unidentified
  source 1..570: note = Related to NZ_KB913026.1; note = Mesorhizobium loti
MLLGMKPAALAYILYKLPAGAKYKSFEIEKKSGGVRKIMAPEPRLKMLQRRLADLLLACQSEIEASMKIKDDCALAHGFKPRLSIFTNAEKHRNRRWVFNADIEDFFPTINFGRVYGFFQKNHHFALPKPVATIIAQIACHENQLPQGSPCSPVISNIIAHILDIHLNDLAYRHNCTYTRYADDLTFSTNEKQFPRAIAKRQVGDIHEWIPGSGLKKALKSNGFKLNGSKTRMQYCDSRQEVTGLVTNEKVNVKQQYYKQARAMTRELVTGKKPFVTVAGKKVEVARDHLRGMLNFIYFIKSKENKRIGFTFDKENDKLPTFHAIYKQFLDYIWFYGIDEPTIICEGKTDNIYLKAAIKARAAHFPELVKTVEGVTKIRPRFFKYSDTAAELQDLSGGTGELNNLLAHYRNRITTFRGGANQPVIIIVDNDSGATAIFSHIYNILNPKIKSTGGKKGGATPAAPVDGSEQFYYLYENLYIVPVPKVAGAETPIERLFDPKLLKTVWNGKQLDLTGDKDPAKYYFKNDFAVHVVKEGGAGVKFDDFDPLLSAIVAVKADYAKRVALLAAVA

SEQ ID NO: 885 - protein, 312 aa, unidentified
  source 1..312: note = Related to JACIZA010000145.1; note = Phenylobacterium sp.
MNTPLSKIKSCTNRSDLALLLGVKPAALSYILYKIPDENKYYSFSIPKRNGDQRQISAPIPALKMLQRRLSEHLYECLNEIEYLEAVDPQCVVAHGFKKHLSIATNGSHHRSKRWVFNCDIEEFFSSINFGRVKGYFERNRHFQLQPEVALVVAQICCHEGVLPQGAPTSPIISNLIGSILDDRISRLANELRCTYTRYADDLTFSTNMAHFPRQIAVADEKSPSRWRIGDKLLSRVAQAGFRINHEKSRMAMPNSRQTVTGLTVNKTVNVATTYYKMTRAMCHHLFTTGSYSSGGLNDAPKGRELAALEGR

SEQ ID NO: 886 - protein, 579 aa, unidentified
  source 1..579: note = Related to JACJIU010000009.1; note = Rhizobium leguminosarum
MKVEIYKFGLKELKACVDLSDVAFLLDVEPKFLSKQIYKTDAAVKYHSFTLPKKDGSSRLINAPNKNLKFIQSRLSRLLYQCYFDIHGKPEFPGRVISHGFQKQRDLSIYTNAIRHIGKRHVFNVDLEDFFPSFNFGRVRGYFIKNERFALNPTVATVLAQTACHDNVLPQGAPTSPIISELISQVLDYRLQAVASKYRCTYSRYADDITFSTNLPEFPHQIGSQDAGVWTAGLSIEKAVSSCGLKLNADKTRMQLGQQRQATTGLTVNRKVNVGRHYYKGVRFCAHAMMTTGKADAPSYLKIPEKQLNSHQIWGMLCHIDDIKGRENNHAPIRHFSSSHPAPHYLRLMRDFFHFHRIHTNPKPVIICEGKTDYIYLKEAIRWNVGDPMVATLLDVVPHTKKSKGDHWNVDFVRHSDTAGDLLELAGGGGDLPKFAEYHLGRVDKLYNGEAAKPVIIIVDNDGGSDGMWTWIKRVTESATKIDGSKPYYHIGKNLYVVPIPSGGQADFYIEKLFPQPWLNAKLGTKTLKLIQKKGDKLSPNEYGKGEFATKVIRANRGKVDCSSFLPLLHTLFEIIHLK

SEQ ID NO: 887 - protein, 518 aa, unidentified
  source 1..518: note = Related to CP090117.1; note = Rhizobium leguminosarum
MKEKIYKFGLKELKSCIDLSDVAVLLDVEPKFLSKQIYKTDAAVKYHSFALPKKDGSSRLINAPNKNLKFIQSRLSRLLYQCYFDIHGKPEFPGRVISHGFQKQRDLSIYTNAIRHTGKRHVFNLDLEDFFPSFNFGRVRGYFIKNERFALNPTVATVLAQTACHDNVLPQGAPTSPVVSELISQVLDYRLQAVASKYRCTYSRYADDITFSTNLPEFPSQIGSQDAGVWTAGPSIEKAISSCGLKLNAAKTRMQLGQQRQATTGLTVNRKVNVGRHYYKGVRFCAHAMMTTGKAEAPKYLKIPEKQLNSHQIWGMLCHIHDIKGRENNHAPIRHFNNGHSAPHYLKLMRDFFHFHRIHTNPKPVIICEGKTDYIYLKEAIRWNIGDPMAAPLLDVVPHTKKSKGDHWNVDFVRHTDTAGDLLELAGGGGICRSLRNTIWADLKSSTMAMQQSQSSLSSITIVGVKACGVGSRSSRNPRRRSMDRSRTTTLAKTSTLFPSRVRGKATFTSRSSFPHNG

SEQ ID NO: 888 - protein, 579 aa, unidentified
  source 1..579: note = Related to NZ_CP054023.1; note = Rhizobium sp.
MTKKIYRYGLKELKSCIDLSGVAFLLDVEPKFLSKQIYKTDPGVKYHIFQVPKKDGSSRLINAPNKNLKFIQSRLSRLLYQCYFDIHGKPEFPARAISHGFQKKRDLSIYTNAFRHTGKRHVFNADLEDFFPSFNFGRVRGYFVKNKHFALNDTVATVLAQTACFDNALPQGAPSSPIISELISQALDYRLQAIARKHRCTYSRYADDITFSTNLPEFPEQIGLADAGGWIAGSSLEKAVTSSGFKLNAKKVRMQFGDQRQSTTGLTVNRKVNVGRHYYKGVRFCAHAMMTAGKAEAPAILKLPEKELSSHQIWGMLCHVHDIKGRQSDHAAIRSFTKSHPAPHYLRLMRDFFHYHRIHTNPKPLVICEGKTDYIYLKEAIRWNITDPKVAKLLNVSPLTKTSKGDHWHVDFLRHTDMAGDLLDLAGGGGDLPKFAAYHLDRFEKLHKAEATKPVIIIVDNDNQSAGMWSYIKEAIGSKGVIDGSQPYYHVGKNLYVVPIPSAGKKDFYIEKLFPPKWMKEKLGTKSFKIMQKKGEKLGPDEYGKGEFATKVIRANRGKVDCSNFLPLLQTLSDITDIE

SEQ ID NO: 889 - protein, 584 aa, unidentified
  source 1..584: note = Related to JAHIXO010000053.1; note = Alphaproteobacteria bacterium
MTKQIYEYGLADLKLCNDLGDLARLLHVRPKFLSKQIYHTPDSVKYSEFELPKKDGSKRSISAPNKNLKFIQSRLSRLLYQCYFDIHGVPENTGRVLSHGFQKGRDLSIYTNAKKHINRRYVFNTDIENFFPSFNFGRVRGYFIKNQHFDLKPTVATVIAQTACFQNALPQGAPSSPVITELITQTLDYRLQALARKYRCTYSRYADDITFSTNLKEFPAAIAFRPEGENTWREGPSLIKAVESSDLKIKVTKSRMQQSYQRQATTGLTVNDKVNIAVYYYKGVRFCAYAMMTKGKAVATNKLLVSKNGDLSKQQIWGMMCHVNDIKRRELPYEALRAFKPAPIPSYLKLMKDFYHFYRIHTAEKPLIICEGKTDYIYLKEAIRWNVSDTRVAKTLLNGPPLQNVTSDKGDHWAVDFVNHSEMAGNLLDLAGGGGDLPKFATYHLERVQKLFSEKPPVPVIIIVDNDSQSAGMWTTIKKLTEASKPIDGSAPYYHVGKNLYVVPIPSNGAKDFYIEKLIPKNWLDQKLDGKTLKLNQQKDEKLKPSEYGKMDFATKVIRANRGKVDLSSFLPLLHNICDIIDSA

SEQ ID NO: 890 - protein, 584 aa, unidentified
  source 1..584: note = Related to JAALYX010000005.1; note = Agrobacterium tumefaciens
MTKKIYHFGLAELTSCVDLGDLARLLEIQPKFLSKQIYHTPYGQKYTHFPMPKKDGSTRNISAPNKNLKFIQSRLSRLLYQCYFDIHGAPEFPGRALSHGFQKGRDLSIFTNAKRHTNRRFVFNTDIENFFPSFNFGRVRGYFIKNQHFQLKPTVATVIAQTACFMNILPQGAPSSPIISELISQTLDYRLQALARKYRCSYSRYADDITFSTNLKEFPSAIAFCPPGEVNWREGPSLEKAVLSSNLKLNSKKARMQQSYQRQATTGLTVNDKVNISTYYYKGVRFCAHAMMTKGKAVANNKLSVAPNGKLSKYQLWGMLCHINDIKGRELPHKALRAFKSSPVPSYLKLMKDFYHYYRIHTAEKPLIICEGKTDYIYLKEAIRWNVSDARVVKNLISGPALINFTSDKGDHWGVDFVNHSNMAGNLLDLAGGGGDLPKFATYHVERVKKLFAEKPPMPVIIVVDNDKQSEGMWTTIKSLTGSPTPIDGSAPYYHVGENLYVVPIPSAGKKDFYIEKLIPSKWLKKTLNGKTLKLNQKKDEKLKPTEYGKMDFANKVIRANRGNVDLTSFLPLLHTICDIIELP

SEQ ID NO: 891 - protein, 586 aa, unidentified
  source 1..586: note = Related to NZ_RPKX01000022.1; note = Sinorhizobium meliloti
MTNAIYKYGIKELKTCVDLSDIAFLLEVEPKFLSKQIYKTSDEIKYYSFEIPKKDGSKRAIYAPNKNLKFIQSRLSRLLYQCYFDLHGEPKFPARSISHGFQKGRGLSIYTNAIRHTGRKYVFNADIEDFFPTFNFGRVRGYFIKNKHFELNETAATVIAQIGCFQNMLPQGAPSSPIISEFITQHLDYRLQALAKKHRCTYSRYADDITFSTNLTEFPAQIGVLSTDQEAWTAGAGFEKAISSCGFKLNVKKIRMQQGYQRQATTNLTVNRKVNIGSHYYKGVRLCAHAMMTKGKATAPGKVSTPPGDELNSHRIWGMLCHIHDIKGRGLPHRALRNYSPTHPAPHYLRLMRDFFHYHRIHTSPKPLVICEGKTDYIYLKEAIRWNMADERVGKLLVKADQLPHLKKSSKGDHWLVDFVNHSDMAGDLLGLAGGGGDLPKFADYHLDRIGKLHADAPPGPVIIIVDNDSQSEGMWTFIKKATGSTTKVDGSKPYYHVGKNLYVVPIPSGGAKDFYIEKLFPDNWLKEKLAGKSFKIIQKKGEKLGPNDYGKGDFATKIIKANRGKVDCSNFLPLLHTLCDVIQGK

SEQ ID NO: 892 - protein, 584 aa, unidentified
  source 1..584: note = Related to WISN01000076.1; note = Sinorhizobium meliloti
MTKRIYDYGLEELKACGNLSHLAFLLGVEPKFLSRQIYKTDDQLKYHSFEIAKKNGTKRTINAPNKNLKFIQSRLSRLLYQCYFDIHGKPDFPARATSHGFQKNRDLSIYTNAVRHIGRKYVLNADIENFFPTFNFGRVRCYFIKNKHFTLSETVATVIAQTACFQNALPQGAPSSPIISEFITQALDYKLQSLAKKYRCTYSRYADDITFSTNLSEFPSHIGFLSPDTENWSVGKSFEKSVLSSGFKLNATKIRMQQQNQRQATTNLTVNRKVNIGSYYYKGVRFAAYSMMKNGKAIATGKLSLTAKELNSHQIWGMLCHVHDIKGRGLHHTALRNYTNAHPAPHYLRLIKDFFHYHRIHTSAKPIVICEGKTDYIYLKEAIRWNVANQRIGKLLVKSGKLSDLKNTKGDHWLVDFVNHSDMAGDLLDLAGGGGDLPKFMTYHLDRFDKLHSDAPPKPVIIIVDNDSQSDGMWSTIKRITGSKAAVDGTKPYYHVGKNLYVVPIPAGGAKDFYIEKLFPDHWLKEKLGGKSLKIIQKKGEKLTADHYGKTDFANKVIKANRGKVDCSAFLPLLLTLCDIIESK

SEQ ID NO: 893 - protein, 580 aa, unidentified
  source 1..580: note = Related to NZ_FOPG01000001.1; note = Sulfitobacter dubius
MSIYRYGIKDLKGCADLGDLARLLEVQPKFLSKQIYHVDDADKYHVFPIPKKNGSLRQIHAPNSNLKFIQSRLSRLLYQCYFDLHGKPKNLSKVLSHGFQRDRDLSIFTNANRHTNKRYVFNADIDNFFPSFNFGRVRGYFIKNEHFKLTETVATVIAQTACFQNSLPQGAPSSPIITEFITQVLDYRLQSIAKRNRCTYSRYADDLTFSTNLGEFPSKIGYPFPLPEVWVAGPGLERAIAKSGFKLNEKKIRMQHAQQRQATTNLTVNQKVNVGSYYYKGVRLCANAMMRHGAAVRPKKAIEPGTPLTANQILGMLAHVHDIKGRELEHKALRKYGKFQPAPHYLRLMGDFYHYKRIHINPRPIVICEGKTDYIYLKEAIRWNVADPRVSSRLVDPVRLLAPTGKGDQWLIDFLKHTKTADNFLGLAGGGGDLKNFVNIHLGRIKIFHDNPLLQPVIIVVDNDSQSTEMWSTIKKASGSTNKIDGSEPFYHVAKNLYVVPIPSGGKSNFYIEKLFDDSWLKEDLNGRTFKVLQRKDEKLKDTEYGKGEFADKVIRANRGKVDCSSFLPLLHTICDIIDK

SEQ ID NO: 894 - protein, 588 aa, unidentified
  source 1..588: note = Related to NZ_SAUW01000046.1; note = Sinirhodobacter populi
MTKIYNYGLAELQQCSDLSDIAHLLGVKPKFLSKSIYKTPGENKYQAFKIKKKNGTDREILAPNPDLKFIQSRLSRLLYQCYFDIYGAPKNPMRVLSHGFQKKRDLSIYTNACRHTSRRFVFNTDLEDFFPSFNFGRVRGFFLKHNKFKLGEKAATTISQLACFENSLPQGAPSSPIISEFLAQPLDVALQKLAKDHRCTYSRYVDDISFSTNLREFPSKIAFPFPIPEKWIVGPKLEHEINRCGFKINTSKTRMQARTHWQSVTNLTVNQGVNIKKHYYKGARFCAHAMMTNGKAYAGNKLNIAYNELSSDQIWGKLRHICDVKDRSGAVQPLRNYNGSNPAPHYLRLSGDYFHYHRIHISPKPLVICEGKTDYTYLKEAILWHKGDARVAANLVDISRFPTKWKKTKGDHWGVDFVKHSKSADRFLDISGGGGNLVKFCKLHIERTKKFHSVTGQNPVIVIVDNDNQSEGMWSFIKDETNSSTKVDGSKPYYKVSNNLYVVPIPKPKGFAGDVYIEMLFPDPWLKYEIDGRKLKIKQKKGEKLKPSEYGKGEFADKVIRANRGSVDCSAFAPLLGTLCDIVDGTAT

SEQ ID NO: 895 - protein, 627 aa, unidentified
  source 1..627: note = Related to NZ_QNQP01000022.1; note = Pelagivirga dicentrarchi
MFIVMVGRNAGQICSSSSFAVLRIVEILACVRVPEGYFLEVELVNKLVQLQATKSRSDLARLIGVKPKHLSFTLYKIPENSRYTQFTIPKASGGTRDIHAPNSHLKAIQSRTSGLLYECYHIIYPKNDIANLELSHAFQKNRGLSIASNGSKHRNKRFVFNMDLKDFFGSFNFGRVRGFLLSNNQFGLNAEVATTVAQICCHENKLPQGAPTSPIVTEFITRILDIRLSKIAKRNGCTYSRYADDLTFSTNKREFPVEVAFLGLDGQWTAGSAIANKIHTSGFEINPNKYRMQFADSRQETTGLVVNKKVNVSKNYTKQVRYMAHSLFQKGECFIQEPQTKLPIMVSNHVLGGKLAHQFHIKSQEYLDSKGKAFPVARFEKEGKKAPAYYRKYADFIYFQNFFHSSKPTILCEGVTDNIYIKCAIKSLYSKVPSLGYASKAASKIQLLCGFYNYSPTAQAVTKLTGGANPLKTFIETYGITFARFKAASIEVPVIVVVDNDAANNGLWKMLQEKFGIAGADGSHDFYHVTKNLYVVPIPKIGGADTFIEHLFDAKTLASQLKGKSFDFGQKGKKIAPNKYGKMAFAKDVVRKKRASIDFSGFLPVLVNVEKALSEHKKMLSTQKATS

SEQ ID NO: 896 - protein, 575 aa, unidentified
  source 1..575: note = Related to NZ_MNBL01000032.1; note = Nioella sediminis
MSKLASLKSVRTRGELADLLNYSRSALAYAVYKVPEEQRYKEFKVAKRSGGERIIHAPCPELKGLQKRLSNYLYDCHREIWPPLEFPRHSYSHGFQKNRGLSIFSNAWKHRNKRFVFNVDLKDYFPSFNFGRVRGYFQKNRSFELHQDIATLIAQIVCYDNSLPQGAPTSPIVSELITSILDQRLGRLSKKHHCTYSRYADDITFSTNQAGFPEPIADFSPQADGAWKAGSELVGLVERSGFEINPNKTRMQLATSRQSATGLVVNRKVNIPKQYYDDVRAMSNSLFKTGVCHHPDTKEAASLAVLKGKLEFVLAAKTYPKGLVSFSDLELASKAPGGTPVPSHYKLYRRFLAYEKFHANARPLVICEGKTDNTYIRCAIASLNSKFPLLQPTTDAEGSVRQALSFFKHSDKHAKLLSISGGAGELHKFVGKYGSLLKDFHSGGEQQPVIVIVDNDNAAKPMWSVIKEKMGSEDKVDGSANFYHVKRNLFVVPIPIKSGKFASIEDLFDKKTLATVNKGKKFNPHLKSHQTTNQYGKEIFAKWVIEANAENIDFSGFEPLLGRLEEVLKVELQGS

SEQ ID NO: 897 - protein, 574 aa, unidentified
  source 1..574: note = Related to LMGC01000024.1; note = Ensifer sp.
MTLSSFRACKDLADLAHLLRVSPKGLSYILYKIPSHLKYTHFEIPKKSGGVRTISSPDRRLKFVQSRLAELLYTCQREILPVEKNIKKVLSHGFQKNRDLSIHTNAYKHTNRRFVLNLDLEDFFPSLNFGRVRGFFLKNRDFQLKEALATVVAQIVCHGNELPQGAPTSPIISDLMARVMDVHLSKMAASYGCTYSRYVDDLTFSTNLAEFPPALATEDPATGAWSAGAELRSRIWRQGFALNNKKTRMQARTSRQEVTGLVVNKFVNVRTEVEASNRILVHTLVKKGNCFQKDPVSGTTKALSLEQIGGRLSYQFQTKAARHSFRSAREFEKAGEPIPRFYRDYASYINYCSFHANDLPTIVCEGKTDVIYLKTAIRVLYAKFPKLAGISAGEYASDVRFFGHSRHHTAATKLSGGAGDIQQFVREYSKIVHPFHPGGQLRPVIVFVDNDKATNGIWSFIKERTGSKTLIDGSAPFYHIERNLYVVAVPGKVGTTERIVEDLFDAKTKSMTWNGKTVDLKQKRGHPPGKGKMSKERFATKVIRDQRDNIDFSGFEPVLQAFSDIIDIKLPAST

SEQ ID NO: 898 - protein, 574 aa, unidentified
  source 1..574: note = Related to AGVV01000148.1; note = Sinorhizobium meliloti
MTLKTFRACKNLSDLAHLLRVSPKGLSYILYKIPSHLKYTKFDVPKKSGGTRTISSPDRRLKFVQTRLAKLLYACQREIVPVENNTKKVLSHGFQKKRGLSIHTNANKHTSRRFVLNVDLEGFFPSVNFGRVRGFFMKNRDFQLSEACATVVAQIVCHDNELPQGAPTSPIVSDLMARVMDVHLSKMAASYGCKYSRYVDDLTFSTNLAEFPTALAVEEPRTGTWSAGSELRGRIWRQGFALNDQKTRMRRRTSRQEVTGLVVNKFVNVRAEVEASNRVLVHTQVKKGSCFLKDPKSGATTPLSLEQLGGRLSHQFETKAARHNFMSAREFEKAREAIPKFYRDYSAYIYYRNFHVNDLPTIVCEGITDAIYLKTAIRVLHAKFPNLAGTSAGKYVSDVRFFGYSRHHTAATKLSGGAGDVQHFVKEYGKIVHPFHAGGQLKPVIVFVDNDKATNGIWSYIKEKTGSKTPIDGSDPFYHIERNLYVVAVPGKVGGAERVVEDLFDAATKSMAWEGKTVDLKQKRGHPPAKGKMSKERFATKVIRDQRDKIDFSGFEPVLEAFSEIIDIKLAGSK

SEQ ID NO: 899 - protein, 574 aa, unidentified
  source 1..574: note = Related to NZ_SIQZ01000001.1; note = Rhizobium leguminosarum
MTLKNLRACKDLSDLAHLLSASPKGLSYILYKIPPHLKYTRFEVPKKSGGTRTISSPERRLKFVQSRLTELLYACQREIVPVEENIKKVLSHGFQKKRGLSIQTNAGKHTNRRFVLNVDLEDFFPSLNFGRVRGSFLKNRDFQLPEPVATVIAQIVCHDNELPQGAPTSPIVSDLMARVMDVHLSKMAAAHGCTYSRYVDDLTFSTNLAEFPPALALENPLTGKWDAGHELRGRIWRQGFTINDQKTRMQTRASRQEVTGLIVNEFVNVRTEIEARNRVLVHALMKKGTCFQKDPKSGAATPMSLEEVGGRLSHQFQIKAARHGFKSAREFEKAGDDIPKFYRDYAHYINYCSFHVNPVPTIVCEGKTDVIYLKTAIQVLHAKFPKLGGLSGGKYASDVRFFGQSRHHTAATRLSGGAGDVQHFVRDYNKIVLPFHAGGQLSPVIVFVDNDKATNGIWSFIKERTGSATPIDGSDPFYHIERNLFVVAVPGKVGNTERIVEDLFDAATKAMTWDGKTVDLKQKRGQPPAKGKMSKERFATKIVRDQRSKIDFSGFEPVLKAFSDIIDTKLTPSK

SEQ ID NO: 900 - protein, 571 aa, unidentified
  source 1..571: note = Related to NZ_CP053347.1; note = Sphingomonas sp.
MLDDLKSCTSRSGLAVLLGVKPSELSYTLYKIPDAAKYTSFCISKKSGGTRQIQAPCPPLKWLQGRLLDLLYQCEDDISAASGLKRNLHSGFRRGVNIYENANAHRGKRFVFNIDIESFFDQYNFGRVRAFFINDRDFALQPAVATTIAQIVCFNNVLPQGSPTSPHIANLLTQFFDNRMARFLRPRRCGYTRYADDITISTNVREFPADVAIMTPADPQGWSIAPELAAIFGRANLPPNPSKTRMSAYSSRQTVTGLVVNQRPNVTREYYLHTRAMCDRLFKTGTIQIPDITSSYGKNCPVSDDAEPEADVDPLKVLEGRLSHIHHIREKSDLRNIQEKQDNPTQFWNMLQDFFLFKYFVANSKPLILTEGPSDIFYLRSAIINNTTLLVPELKKVVSGKPEILPTFFRFNTVAAKVIGLTGGAGNIKRFLYLYHKQEKRFNRSLRHKPVIIIIDNDSGGADVINMVNGIYKTNISLSDPIMAHKITDGLILVKTPHVGSKTHTAIEDLLPASVKAVKLNGKSFSAAKKFDATKHFGKIALGSYVQANASSISFQGFDDFIVAINGAITM

SEQ ID NO: 901 - protein, 569 aa, unidentified
  source 1..569: note = Related to NZ_BJVS01000002.1; note = Asaia bogorensis
MLDDLKACRNRSDLAHLLGVKPSSLAYTLFKIPDVSKYSKFCISKKRGGTRQIMAPCVRLKNLQTRLLAILYQCEDDIEKASGIHRSLHLGFRREVNIYDNARLHRKRRYVFNIDIEKFFDNYNFGRVRSFFIKDHDFSLHPDVATTIAQIACFNNVLPQGSPTSPHIANLLSQFFDNRMSRFLGHRRCAYSRYADDITISTNLKEFPSDIASVTTTVPQGWVIAPELLSILTRSGLPPNLAKTRMSLRSSRQMVTGLVVNKHPSVPREYYLQTRAMCDYLFKGKIPHIPDITSDYGENCPSSLGHKKKKPDYMRVIEGRLSYISYIRKRSAKFSTEYKNDKNSQFNNLFIDFLIFKNFYMNEKPIILTEGPSDILYIKSAIRSSTLSLPHLKRINSGKLEIIPRFFRFHSASSKTLGLTGGTGNLKNFLNLYKKRSSKFRVSPNENKIIIVVDNDSGGKDTICAINSLYKKNIQISDPTIIHKITEKLTLVKTPHVGIKKETTIEDLLPDDVKSVTINGKTFSAEKILDETKNFGKIKLASYVHDNASVIDFTAFNDFLSELDSGFTT

SEQ ID NO: 902 - protein, 569 aa, unidentified
  source 1..569: note = Related to NZ_CP019511.1; note = Sphingomonas sp.
MLSDLKACQDRKGLAILLGVSPKEFAYTLFHIPGDQKYESFCVSKKNGGTRNILAPVPRLKWLQRRLLEILYQCAEDISVSAGESPNLHFGFRPQFNIYENAFVHRRRRFVLNLDIVDYFDQFNFGRVQGFFLKDKNFELVPAVATAIAQIACFDNKLPQGSPCSPHIANLVSQFFDNRMARFLRSRRCSYSRYADDITISTNLRVFPSDVAEASDSPQGWQISPILTDIFQRSGFAINDTKVRMGVFHSRQTVTGLTVNKHPNISRDFYLNSRAMCNSLIKSGSFIVQDISGSFGNSCNPDLPPPIKSPLMVLEGRLSHIHNIKEKNDGRDLKYKQASPTQFWKLLRKFYQYKYFVINDYPLIITEGPSDIFYLKSAIRNTKLLVPNLYADEKGGRRILPQFFNLSNLPSKVLALNGGAGNIKKFIHQYSIEMRNFFTLNRTNPVVMVVDNDSGGEDVFGQIKKSFGLSVKTSDKDCMVKVSDYLYLIKTPHIGPQDKTSVEDMLPSAVRGVALNGKTFSTASKFDTSKHFGKVALASYVHANSGSVDFSGFDPLLLALDRAIADSKS

SEQ ID NO: 903 - protein, 569 aa, unidentified
  source 1..569: note = Related to NZ_CP032570.1; note = Tsuneonella amylolytica
MLTDLKDCTTRAALASILGVEAKELAYVLYKIDQGSKYTSFCISKKNGGTRQIQAPIPKLRFIQSRLQQISMACCDDIADLGIYKGKLSFAFQKDRNIFENARPHVGKRFILNLDIRDFFHQCNFGRVRGYFIHSKEWKLDPAVATVIAQIACVDEGLPQGSPSSPIIANLLGQILDVRLTRFLHPRRCTYTRYCDDITISTDMRVFPRDVAVQDDSWPSGWALAAPLEDIFVRADFPINYNKLRMSFDCSKKVVTGLTVNRFPNIDRKFYRDTRLLLDRYAQTSSCKYIEFTGNFGNNCDNTETKNKNPILRLGGRLAFIHHIKSRTSLIGYPGIVHPQNPQFYGMVQTYAFAKDFVFNSIPTVVTEGPSDIIHLKAAIRANPAWAPHIFDSKENRFLVKFARHDGLFATVLGMSGGTGNIGRFLDLYYSRFKRINYKIRTQPSVIVVDNDKGSHGILKRLSNIHKMKLSTGDGLVVKKLQPFFYICKTPQLAGKAETAIEDLLPSAITGMVVGGKTFEPDTKKFESSKNFGKIFLAKMVATQHSATAYANFQQFITGLDDAVAGVAK

SEQ ID NO: 904 - protein, 444 aa, unidentified
  source 1..444: note = Related to JADBDT010000001.1; note = Sphingopyxis sp.
MLIDLKACKDKRDLAHLLGFQLKTITYQINIAPDAEKYKKICISKKNGNSRTVFSPNPILKSIQNSLLEIITSCYDQIHGGMNYPVSFGFIPNLNIYDNAKRHIGKRWVFNVDIKDYFDSINYGRVWRYLQKNKNFLLNAEIATMISQIVCFDGRLPQGAPTSPMMANLVSGSLDYRLRSLASEHKCTYSRYADDITFSTNLRDFPEEVARYDEPSGSWLPGKGLLSCVSRAWFSLNDGKTRMSYRRSKQVVTGLIVNKKVNVDREYFKLVRANIHHLLTGRPVILQEFCDPYGENCDGKEVKNKNGMSLIEGRINFCFEINDQGDERTDNAKFFKPSSVRKTYRDFLIYKYFIHGDRPILITEGESDIVYMAAYLKARSLPLANLVDVSPPDNRKILIDFYQFPKRPSKIIGMTGGTSGVAFALKWVGEILPRLGKNVSRRKF

SEQ ID NO: 905 - protein, 613 aa, unidentified
  source 1..613: note = Related to LXYU01000002.1; note = Bartonella apis
MTEPKNLEKLKSITKREELADLLGLSRRRLFCTLYMEPMSSKYNTFSIPKKSGSDLRIIKAPNSHLKFIQWRLAKYLSECLEEIKKKEKFPHLSFAFQKKLSIKDNALKHINKRWVLNLDISDFFSSISFNRVNRFFLKNKFFQLNDEIATTIAQIACDEQALPQGSPCSPIISEFITQSLDVRLLKLAKQYHLTYSRYADDITLSTNQKVFPREVAYPDSSAENGWQVSETLRSIIQRSGFKINEEKTRMQKNCVRQVATGLVINKKPNVADNYYRTVRSMCHHVFEKGAYYRSPEDKDNPTCDLNPLAGKLNFIHDIKKNSDETNSSSLRGGNNLTLSGFDGLYKKFLFYRLFLCLNKPMIVTEGKTDPIYLRCAIKHGNKIKNAYGKTVGRYITQSILFFSRERSYAEAFNFKEGGSNNLLDIIKLYKEYLHSSKKRQIQSRPCAFPVILLFDNDDGIKTTSSYVKKNFDIILTTETTDDFYYLFDNLYIVKTVEKKYNTEYEKNDDKNHQYDNIKNKVKNKKNLIKNSESCIEDCFFKKTLEKTLHGKKFTKNNNGHSNTEYSKDKFATEIVSAEPWSIDFSGFDGLLDRIRKVIEDYKKLHNHPTINR

SEQ ID NO: 906 - protein, 568 aa, unidentified
  source 1..568: note = Related to NZ_JABVZR010000003.1; note = Novosphingobium sp.
MALKAATNRHDLAALLRFQTKMMTSIVYATHESLKYKTFKVPKKSGGDRTIAAPIPQLKLLQRRLADLLMDCHAAIMDTHPHRKGLQFGYLPELSVVDNAYRHRRRRMVLNVDLADFFSSINFGRVRGFFLSDAAFQLHPVVATTIAQIACWNNELPQGSPCSPIISGLIGGILDRRLGALAREHGCTYSRYVDDLTFSTNADTFPNELAALDPATGRWAVGGKLSHAVGKAGFLVNPDKTRLFGMTGRQTVTGLVVNDKVNINRDYEMRTRAAVHHFIRKGVYTVPASLESVAAGKPPEKETSPHRLEGMLQWIYSVRDFSDDRKDGSKRHHPTSFSKVYREFLFAKHFLFMDKPLILCEGKTDNVYLNSALKRLAASYPSLGSWVGADFKSNLRLFRYTSKSLQILHLGGGCGDIVQLVRDYRRLWTRLVHRQIAQPVVLVVDNDEGGASVFKAIKEVGGPDIKIAEPKILFHVFHNLYIIKTPCGSGTPKSCVEDLFDAATLGQTLGGKTFNPACDEETAKHYGKKIFAEGVIRPNWKTIDFAGFHSILASLEDAIKGYYGMLVP

SEQ ID NO: 907 - protein, 646 aa, Vibrio parahaemolyticus
  source 1..646: note = Related to NZ_CP013248.1
MSQLQQLKNCKSLSDFALLLGYNAKGLSYILYKIDDSAKYTSFQIDKKSGGKRTISKPCLKLKMLQRKLANLLYDCIEEKKPNGERLTDFKGSDKTLPKRKRAAKSISHGYEKGLSIATNAEMHIKKRYVYNIDLESFFPSFNFGRVRGFFIKNKQFKLHPKVATIIAQIACHQNQLPQGSPCSPVISNMICKNLDYYLLGIAKENGCVYTRYVDDLTFSTNKKKFPVAIAENRLKFFGKQSWSLGKEVEEAILKAGFKVNRKKCRMQTSYSRQEVTGLTVNRKVNTSSAYYRNVRAMCHSVFKHGYYTLPQQKEPPKKQGWLSKLTSIFGLKIGVNEPNIAQLEKQTSLESLQGKLAHIYNIKSYRNKFSRRGYRPTKHDGIRTNNSKNPFPPLDRSETYTDDNHIVALDGIKNLYGKFLFFKHFYANKKPTIICEGKTDNIYLKCALESLVAKYPRLSKDKNGNFQVHFFNRTETSSEMLKLVEGSPGLVYLVEIYKRFTKLFNSNGQEYPVIIVVDNDDAGRGVIKKADKIRQENRNAKSIKKVRRSDYFFENLYIVKVPSTAGEKDKEIEDLFDPILLQTKLNGKTFHRNNTGLDPNKHFGKAHFSEYVVTPNKGSIDFRGFEPLLDIINDIVNNFNPNDLD

SEQ ID NO: 908 - protein, 653 aa, unidentified
  source 1..653: note = Related to NZ_CP058972.1; note = Pseudoalteromonas sp.
MSQLEALRKSKSINDLAPILGYKPKSLAFILFKIPDQDKYTCFNVAKKSGGKRTISKPCDKLKALQRKLADLLYSCSDELKPINQSIKSFKGGNKQIPLSERAKKSISHGYEKGLSIASNASMHTNKRYVYNIDIKSFFPSFNFGRVRGFFIKNKNFRLHPKVATLIAQIACFENELPQGSPASPVISNLICKSLDIELLSIAKRYSCIYTRYVDDLTFSTNQKLFPKEIAIKPRFGFGRENWRLGKEVEATIIKSGFQINTKKCRMQYKTSSQEVTGLTVNKKVNVRNLYYRNVRAMANSLFKYGFYYRPAPSTSKIRDESKKSLYQRIYSIFFRRVVRAAPTKKKVKQIESADPLIGMLAYIFNIKSYRNKFVRRGFRPDIHNGIRTKSNGSITFPTVDRSESYEDDNHVIALDGIKNLYGKVLFYKYFYALEKPLIIGEGKTDNIYLKCAIEGLANTFPQLAKNSSGSQQVSFFNRTPTNTDMLRLAEGTPGLEYLISIYKRFMSFYKCEGKQHPVIFIVDNDDAGRGFINKASKIRDQIRSAKKVKTQRHKYYYFENVYIVPIPKQKFNGNKVKDIEDLFDDSVLAEKLEGKSFYNNNKGLDTSKHYGKAYLSEYVIKPNKNKINFNEFQPILADIADIIKSYDNNNLD

SEQ ID NO: 909 - protein, 651 aa, unidentified
  source 1..651: note = Related to NZ_VJWL01000003.1; note = Aliidiomarina halalkaliphila
MSKLTQLKQSSSLSDVASLLGYKPSALAFILYRMDDVDKYFTFDVPKKSGGHRVICAPCDKLKKLQRKLADLLYDCIEEDKPSEETLGEFRGENSDLPLRKRARKSMSHGYEKGLSIATNAEMHVGKRFVYNIDLTSFFDCFNFGRVRGYFLKNSRFRLNSKVATILAQIACFQNKLPQGSPCSPVISNLISKHLDYHLLSIAKNHSCTYTRYVDDLTFSTNQKAFPKAIAKRRFLTLEKGSWRLGSAVKGAIENAGFSVNENKSRMQYRDSRQEVTGLTVNKRVNVSSSSYRQIRSMCHSMFKFGYYFKSSARTVSKPKTNSILTRLYNKFALKYFRVHTQDDELGDTQGQECTSLASLDGMLAHIYHIKSYQNRFSRKGHRPSSHDGIRTKFNESSSYPPIVRGDTYASDNHRVALDGIKNLYRKFMFFRYFYYNEKPLIICEGKTDNIYLKAAISRLGNAYPELYDATTKRCRISFFSKSDRNLEILKMAEGTSGLSYLIKSYKRLCSKYKIKGGSHPVIVIVDNDDAGRGVIKKAEKIKNDTIKSKGIAANYRLDYFFENLYILAVPSGAGDADIEDLFDSSVLNRELSGKKFSRKNKKSDGSTYGKAWFAERVIKAEREKINFAKFAPLLDQVRDIIKAHDSRNLI

SEQ ID NO: 910 - protein, 647 aa, unidentified
  source 1..647: note = Related to JABWTP010000017.1; note = Photobacterium damselae
MTTSLNSLKKCSSLNDFALLLGYQPKSLAYVLYKIEDKKKYTSFEIPKKSGGVRVIQKPNVKLKLLQKKLAVLLYECIEELKPEGEKLVDFNGGKNKLPIRKRAKKALSHGYEKGLSISTNAEQHINKKYVYNIDIESFFPSFNFGRVRGFFLKNKNFRLNPKVATVIAQIACFENCLPQGSPCSPVISNLIAKNLDYMLLSIARRNSCTYSRYVDDLTFSTNMREFPKSIAYQRILTLRKNPWILGHEVENAIKDAGFKINPKKSRMQMNHSRQEVTGLTVNKKVNISSGYYKMVRAMCHQFFMEGYFYKPQKEKKNISKSYFNKLIDIFKKERFEVINDESIERVKLDSPDILQGMLAHIYNVKSYRNRFARRGYRPTRHDGIFTKHKNPSPFPPLDRCDSYTDINHIVALDGIRNLYGRFLFFKYFYLLKKPLILCEGKTDITYLRCAIDQLATSYPYLRNDKGNNQVSFFNKTKINVEMLKLAEGTSGLTYLIDIYKRFSSQYKCEGQLHPVILLVDCDAAGNGVLNKAAAIRDSNRKAKKIEKQRHADYYFENLYIVKIPAKNKGKTDIENLFPDEVLNMELNKKKFNPKNKGADSDTEYGKAYFAEYVVRANKNKIDFSGFKPLLDNIQDIITTYDHNELD

SEQ ID NO: 911 - protein, 647 aa, Vibrio sp.
  source 1..647: note = Related to PIEV01000027.1; note = Vibrio splendidus
MTTSLHSLKKCSSFNDFAILLGYQPSSLAYVLYKIQEKDKYTTFEIPKKSGGVRTIQKPNPKLKLLQKKLANLLYGCIEELKPQGEKLEEFKGSFKSPPLRKRAKNALSHGYEKGLSISTNAERHVNKRYVYNIDIESFFPSFNFGRVRGFFLKNKNFRIHPKVATVIAQIACHDNQLPQGSPCSPVISNLIAKNLDYMLLSIAKNNSCTYSRYVDDLTFSTNLNEFPKAIASKSVLTLRQNPWLLGKEVEKAISDAGFKINPKKSRMQLNNSRQEVTGLVVNRKVNVSSGYYKMVRAMCHQLFTEGYFYKPKEEVKLTKKTLFSRLIRILKTSTAEKVKEEIETVKLDSPDMLQGMLAHIYNVRSYRNRFARKGYRPTQHDGINTKHNNNNKFPPLDRCDSYTDVNHVLALDGIRNLYGRFLFFKYFYFLKKPLIVCEGKTDNIYLKCAIDSLAKDYPILCKSKENDNQVSFFNKTKTNSEMLKLAEGTPGLTYLIEIYKRFSSQYKCEGQHFPVIILVDCDKAGLGVLRKAASIRDNNRKAKNITQARHKDYYFENLYIVKVPSEDEKKVDIEYLFPDEVLKKELNGKKFNPNNTGGDNEHEYGKAYFAEYIVKANKKDIDFSGFKPLLDNIQDIITSYDPTKLD

SEQ ID NO: 912 - protein, 587 aa, unidentified
  source 1..587: note = Related to NZ_CP025583.1; note = Paracoccus sp.
MSSLSRLKSCKSLSNLAHLVGYEPKKLSYILYKIPDEAKYTEFEIPKATKGVRKISAPIPELKLAQSRLAKVLQNCLTEIEKEQANGENCILSHGFKPHLSISTNGAQHVDRKWVLNFDLKDFFPSINFGRVRGFFMKNKHFMLEEKVATIIAQLACHNGSLPQGAPTSPVISNLVANHLDIRLSRISGKNRCTYTRYADDITFSTNKSEFPEGIAANRDDENSAGDWKLSKRIRTEVKRSGFEINPDKTRMQYRRSRQDVTGLVVNKKVNVKRELYKQVRAQVQNFIKNDTCSKKVKIGGVESEVEVTEAALQGFLSHIFWVKGAEFEYKRLNKATGPAEPGFYKEYRRFLDYKTFVASQQPVVLCEGVTDNIYLQCAIKRSKTARPKLQDSGSSNGLAVKLFQYPKIGSKLRVPSSVQHLNGGTGDLKELIHKYKVRTADLGKRGFISPVILLVDNDQGSRDGLWGAIKTTSGSKKNVDGKKKFYHVTKNLYVIPTPKLAGGKDSMIEDFLPPAVVSQVLGGKTFNPDEKTFDKKKHYGKRILAEKVSKDQATINFDAFSPILDIMEEILDHFSALPKKQGRVVF

SEQ ID NO: 913 - protein, 587 aa, unidentified
  source 1..587: note = Related to NZ_KE557310.1; note = Litoreibacter arenae
MSSLSRFRSCKNVSDLAYLVGYQPKKLSYILYKIPDESKYMEFEIPKATKGVRKISAPIPELKLAQSRLAHVLQDCLAEIEKGQASGENCIISHGFKRHLSISTNGARHVNRKWVLNFDLKDFFPSINFGRVRGFFMKNKHFLLDEKVATIVAQLACHKGALPQGAPTSPVISNLIANHLDIRLSRVATKNRCTYTRYADDITFSTNKKDFPKGIAANRDDGSPSGDWELSKRIRSEVRRSGFEINAKKTRMLFRRSRQDVTGLVVNTKVNVKRELYKQVRAQVHSFIKDDVCFKKVKIGGVKREVKVSEAALEGMLSHIFWVKGAEFNYKRLNRPTGPNEPGFYREYRRFLDYKTFVASPQPVVICEGITDSIYIKCAIKRSKAARPKLQDAKSLSGLAIKLFQYPKIGSKLRVPSSVQHLNGGTGDLKELIHKYKVRTNSLANRGFVSPVILLVDNDQGSREGLWGAVKTASGATKKVDGTKGYYHVTKNLYVVPTPKLTGGKDSMIEDFLPSSVVTQKLGGKFFNPDEKTFDRKKHYGKRILAEKVSRDHASIDFASFSPVLDRIEEVLDHFSAFPMVQGRVKF

SEQ ID NO: 914 - protein, 568 aa, unidentified
  source 1..568: note = Related to NZ_JABVAX010000004.1; note = Jannaschia marina
MKSIEQLKAAAGLSDIAHIIGFKPKSLAYVLYVLPPASRYAQFSIPKSSGGTRDILAPVPQLKLAQRRLCEHLQNCLHDIEAQLTVKSDCILAHGFKRDLSIVTNASIHVGRRWVLNLDLKDFFPSINFGRVRGFFIKNKHFCLQPDAATVLAQIICHDNQLPQGAPTSPVVSNLIAGLLDIRLNKMATQNRCSYTRYADDITFSTNTRDFPQSLAKIDQDGVWTLGNRLHKRIKQSGYAINSKKTRMQFRRSRQEVTGLTVNTEVGIKRERLKNTRAQVDNLVRNGVCHARGNPMQPVGSVSLQGHLAHIAWVKGRYVDHSRSDGHWKREPAYVQTYRKFLDHQTFVASPQPVIICEGKTDNTYFRCSINRIAGAPANLTDKANPTGLAVRLFQFTRTTSWVQRLNGGTGDIKNFIEWYAERMRVLSATKFISPVVLVVDNDSGVKKGGLNSLVKSKTKSAVAIDGSSDFYHVGQNLYLVHTPKSATGGDTMIEDFLPAAVKGQTLGGKTLELDESKFDPKKNYGKVPLAETIVKRQQDKINFDAFLPLLMRVSKALDHFDKSAFKA

SEQ ID NO: 915 - protein, 563 aa, Vibrio parahaemolyticus
  source 1..563: note = Related to AAXMXP010000003.1
MSSLAKLKSCSSRSDLAKLLEIELKHFTYLLYGLSDSEKYFEFSIPKKTGGLREIVAPIDELKDLQKKLSNILQECLSEIEAKSSRKSPSHGFKKERSIITNAKSHTRKRYVINIDLENFFHTFNFGRVRGFFLTNKHFELNEEVSTSIAQIACYKRHLPQGAPSSPVITNLICNILDVRLSNLAKKNKCKYSRYADDITFSSRSKVISKELVRQENHKWSVSGKLKKEIKRADFIVNDKKTRVQYKNSKQDVTGLVVNEKISIPSKYWRTVRAMVDNLLYCGHFTITKRVLEEEELKEVKIEGKIEQLNGMLSYIDSVDLHNAKKGSVQVDLNQRERTYRDFLYFNKFYANNKPTIICEGKTDHVYLRCALKKQYQDHNILIEKSGDDLVSKVSFYKYTELETRLLGVTGGSSLLKAFIANYPKVIRKFSVPASNNPVIILIDNDKGAKEIFSQIKSITDSRSTIDGSELFYKLYDNFYVIATPAEKGKMSMIENFFPKSLLKTELGGKTLELDEKKFDKSKHYGKAYFADRVIAPNYKKIDCSEFSKIFYRIEAAIRDSRR

SEQ ID NO: 916 - protein, 562 aa, Vibrio sp.
  source 1..562: note = Related to NZ_JAHAMV010000022.1; note = Vibrio metschnikovii
MSDLATLKECQTKFDLAKLLQIEPQNLTYLIYGLSDEEKYNEFTIPKKTGGVRRIHAPIKELKDLQRRLSNILQSCLIEIESESKRSPPSHAYKKECSIITNAKSHTRMKWVLNLDLEDFFPSLHFGRVRGYFITNKHFELTEEVSTIIAQIACYDKKLPQGAPCSPVITNLICNILDVRLSKLARENKCKYSRYADDITFSSRSGDISKNIVKNNDHLWEISGKLKKEIVRAGFSINKKKTRVQYKNSRQDVTGLVVNEKVSIPSKYWRTVRAMVDNLLYCGFFTINKIVEEEGERKEVKIMGKLSQLEGMLSHIESIDSYNKKINPTKTLNQREKTYRDFLYYKKFYANDKPVIICEGKTDHVYLRCALKNLSLDFPKLIEKVDGKLRSNLSFYKYSDLEMKLLGITGGSDLLRAFISNYPKVIKKFSAKASSNPVIIVIDNDKGAKEIFSQIKSITRSASPIDGSSNFYQLYDRFYVIATPAAKKSMSMIEDFFPKALLRTKLNGKTFEPDEKKFNKDIHYSKAYFADHVVARTYKTIDCSGFKAIFNRIEAAIEHSKT

SEQ ID NO: 917 - protein, 602 aa, unidentified
  source 1..602: note = Related to NC_016026.1; note = Micavibrio sp.
MSKLAALKSANSVSDLARLLKSKPDTFAYFLYKVPEKNKYTSFSIPKKTGGERKIDAPSDQLSYIQKQLAKYLQDCIEEIGELEKQKLGKKKFSSAAHGFTKDRSIITNARPHRRKRWVLNLDLKDFFPSINFGRIRGFFIKNKNFNLDPDVASAIAHICCYEGKLPQGSPCSPIISNLIGHLLDVRLIKIAKKYSCTYTRYADDITFSSDLRKFPKEIAHKKLFSKKSWELSNSIKQEIEKSGFFVNEKKTRMQYQESRQDVTSLVVNKKVNVKRELYKTLRAQCHTLFRTGGCYEIAYQRPENEKISYLQRILDKIFYRPKKIKEKKEDRKYKTLDQIQGMLNFVYQVRHDRDKKLGIAERKEIESSIKSLYRKFLFFINFYYIDRPLIICEGKTDPIYLKCALKSLHLKYPGLIEKTSEGFDFRIKFFTYSDTTLDILNLGGGCGDLAKLIREYNESCTPYKCSGLLHPVIIIVDNDNEPTEKLFPAIKGITHSKTPILGDKPFYTVTRNLYVIPIPQKNGKSTCIEHYFEESVFDKDINGRKFHPDKGPADGFSCSKNDFAEKIICKQQGSINFSMFSDIFDKIVDVTIHYRTRRSSP

SEQ ID NO: 918 - protein, 570 aa, unidentified
  source 1..570: note = Related to NZ_WTYR01000001.1; note = Alteriqipengyuania halimionae
MNEKKIEQLKACVDRKDLARLLGFKPKALSYILYQRTPCQNYRTFKIPKRKGGERVIDAPNPELLFLQKRASNLLQDCLDEIVQDEGHKRTIHHGFQRKKSIITNARVHRARKFVFNVDLTDFFPSVNFGRILGFFQKNRHFTLEREVAVTLAQICCYDGQLPQGAPTSPVVSNLICQPLDIRLSRLAEKFGCSYSRYADDITFSTSTRKFPRAISRKSLISSKWYSGRILKKEIKSAGFAINPKKTRMQYAQSRQTVTGLIVNDKINVPADYTRLCRAMVDAYVKSGTYFIRKEKLSKSGKVKVTKEPGTDLQLIGRYSFIHNVKSSNFSKENPRPKDLFSYEKDYRRLLLFSKFHFSKIPLILTEGKTDTIYIKAALRRLHKSYPTLITKKGRSFEYNFDFFKFSPTNRRILGIDGGTSHLAGFLSTYRKEAKSFCPILNQKPVICIIDNDNGAKKFFKWTDSSGNKINRDGEVYHLFENVYLLLTPLKNGTEDSKIEDFFTKHTLNEKIGGKSFNPENVGVTEAEYGKAWFASKVVWPKKSTINFNNFKPLLDLIENTAMKVHNPKK

SEQ ID NO: 919 - protein, 556 aa, unidentified
  source 1..556: note = Related to NZ_AUBC01000017.1; note = Salinarimonas rosea
MTSKLTSLRSAKTVYDLASLLGFSPSSITFILYNLPPATKYKTFSIAKRSGGTRLISAPEPRLKSLQRRLADLLQECRDEINALPENKKSRSHGFERQRSILTNANIHKRKRYVFNIDLENFFPSFNFGRVRGFFIKNKKFQLEPKIATLIAQIAIHNNELPQGSPCSPVISNLVADALDRRLDRLARQNRCRYSRYADDITFSARVRDFPADIAVPTGANFDPSAVLQSIIASSGFAINPNKTRMQYSMSRQIVTGLVVNEKPNIRKEYRRTLRAQVDSYAKTGSFTYVDSSGTPIPGRARQLEGKISHACAVKMHNAGPLNDSMRVGEIFKIARKFWLSHLFARRLKPVILCEGKTDNAYLRAALKSLALQYPSMVDSSARNATFKVEFVNLNSLAAEVIGLGGTANLCKLIHNYDKEVLKFSRSRPLHPLIIVVDNDSGAKGVFGKIKEATGKTVDINTKEHFYRIKDNMYVVKVPEGRLNEERAIEHLFDPPVLNTPLHGKIFHPGDKNFDPTKHYGKEAFAQNVVRPQANTLNFRGFVPLLDRIEEVLKDY

SEQ ID NO: 920 - protein, 507 aa, unidentified
  source 1..507: note = Related to JAAUTN010000370.1; note = Leptolyngbyaceae cyanobacterium SM1_4_3
MLGRNNGDSASDNQAKTFSQVSHGFKRKLSIRTNARKHRNRRYVFNIDLTDFFGSINFGRVRGFFIKDKRFRLNSKVATIFAQIACFKKSLPQGSPCSPVISNLIGNILDTHLVRLAARTGCTYTRYADDLTFSTNKRCFPRSIAIQSDDDNHVWIPGPELLRLVNQSGFEINPKKTRMQYHSSRQEVTGLVVNKKVNIRREYRHNVRAMAHRLFTKGSFLLPIYEKDENGDYLLEMKPGSLNQLHGRLGFIDGIDRYNIEILSASKESQIKSKETIYRRFLFYKEFYAASKPVLICEGWTDYVYIENALLKLAPNYPSLVSLDDNGKGSFLIKRFKYSRSHTTKILGIKGGVGDFINFINSYKREFERFSVPGMREPVILLIDNDDGGKKVFNCIRSILGTDLEEMRKAPYIHVHRNLYLISTPLQGNQQKSQIEDLFDFSTLEVKIDGKSFDRSDEKVTETTYSKAVFAQKVVKEMASSINFQGFMPLLDRIAKVIESHYAQRKE

SEQ ID NO: 921 - protein, 304 aa, unidentified
  source 1..304: note = Related to JAAUQZ010000187.1; note = Leptolyngbyaceae cyanobacterium RM1_406_9
MSALKKLRDAESIADVASILGFRTKALSYILYVQPDSLKYKEFDIPKKSGGVRRIAAPQSRLKLLQKRLADLLQDCLDEINGDSASDNQAKTFSQVSHGFKRKLSIRTNARKHRNRRYVFNIDLTDFFGSINFGRVRGFFIKDKRFRLNSKVATIFAQIACFKKSLPQGSPCSPVISNLIGNILDTHLVRLAARTGCTYTRYADDLTFSTNKRCFPRSIAIQSDDDNHVWIPGPELLRLVNQSGFEINPKKTRMQYHSSRQEVTGLVVNKKVNIRREYRHNVRAMAHRLFTKGSFLLPIYEKMK

SEQ ID NO: 922 - protein, 585 aa, unidentified
  source 1..585: note = Related to JAAUUH010000063.1; note = Oscillatoriales cyanobacterium SM2_2_1
MSALKKLKDATTIAEIADILGFKTKALAYILYRQPDSLKYKEFDIPKKSGGVRHIAAPQGGLKLLQRQLADVLQECLDEINNATVGDQARPFVDISHGFKRKLSIRTNAKKHRNRRYVFNVDLIDFFGSINFGRVRGFFMKDARFCLSPKIATILAQIACFKQSHPQGSPCSPVISNLIGNVLDMHLVKLAARRGCIYTRYADDLTFSTNKRCFPKSIAVQSDDDNHVWIPGSELFRLVKHSGFEINPKKTRMQYHCSRQEVTGLVVNKKVNIRREYRHNVRAMAYRLFTKGSFLLPVYEKNANGDYSLEMKPGNLNQLHGRLGFIDGIDRYNIERVSTAKESQIKSKETIYRRFLFYKEFYAASKPVLICEGWTDYVYIENALRSLASNYPSLISLNDNEKVNFLIKCFKYSKSHTTEILGMNGGVGDLKRFIPLYKSEFERFSAPGMEQPIILLVDNDRAGNEVLGVVNNMVKGNKRTKTKVDNNEPYVHIHHNLYLILTPLQPGQSESQIEDLFDASTLAIKIDGKSFNRSDESVTETTYSKAVFARKVVEERASSINFEGFAPLLDRIAQVIESHYAKGKK

SEQ ID NO: 923 - protein, 579 aa, unidentified
  source 1..579: note = Related to PHCH01000051.1; note = Betaproteobacteria bacterium HGW-Betaproteobacteria-4
MFFLHSLKSATSLKDVADLLGFKASALAYILYKKDGASKYKSFEIPKKHGGIRKILAPSDELKLMQRRLSDLLLDYNSEIKAHDGLKNQISHGFEPDKSIVTNAECHRNRRYVFNADIKDFFGTINFGRVRGFFLKDKNFELHETVATILAQIVCHDNSLPQGSPCSPVISNLIGHVLDVHFVKLAARSGCYYTRYADDLTFSTNLKTFPKAIATNVDGENHSWIPGKELARLIKHCGFELNPQKTRMQYRDSRQEVTGLVVNRKVNIRNEYRHHVRAMVHRLFSTGNFDFEQTVVDEKGNSTKTKTPGTLSQLHGMLGFIHGIDVYNKDRLHTPHYDHQHSKLPRSKETIYRRFLLFKEFYAASAPVIICEGKTDNVYLVHAIRRLASDFPKLAAIEKDGAIKLMTRIFRYSDTSTGKILGITGGGPCLKNFINLYRAEIKQFTAPGRFHPVILLVDNDSGANEIYSTLKQIVKPPPSRNDPFVHVFGNLYVVPTPLLPGGGQSMIEDFFDSGIKSSVVSGKTFHPDSDADTETHYGKVIFAHKVIRTNADTIDFSGFKEILANLTAVIDEHAKRFPS

SEQ ID NO: 924 - protein, 586 aa, unidentified
  source 1..586: note = Related to NCKJ01000107.1; note = Halothiobacillus sp.
MTHLDGLRSAKSFHDIASLLGFKPRALAYIIYKIPVDQRYESFDIPKKRGGYRKISAPNSKLKLVQQRLANILQNCVEELNKSKRINDHISHGLKRKRSILTNAKKHRNRRYVFNIDLNDFFGSINFGRVRGFFIKDTNFKLEPNIATILAQICCHDHSLPQGAPTSPVISNLIGHILDIHLVKLASTNGCSYTRYADDITFSTNKRNFPENIAKQENINIHDWAPGHDLDQLIKISGFTVNPTKTRMQYCDSRQEVTGLIVNKKINVRSDYRHTVRAMVHHLFTHGFYYLPQNKPPKETEISEENKGTMDQLHGMLGFIDSVDLYNKKNASSAVVPRTEKQKLTSKESIYRRFLLFKLFYKAKAPVIICEGKTDNIYITHAIRSLAKNHPNLASINNDGSIQLKVRLFKYSETSTGRILGINGGTGELTKFIPLYHNETKKFKALGCDQPIIIIVDNDSGSNGNGRTFNAVRAIKKDADPKHAPFTHITQNLYLIATPLSLDGSDSMIEDFFTPETLSIEVGGKTFNRGNGINLNKEYGKNIFAQHVVKTMADSIDFRGFNPILSTIETVITTHAKTITSESEET

SEQ ID NO: 925 - protein, 572 aa, unidentified
  source 1..572: note = Related to JYOD01000041.1; note = Burkholderiaceae bacterium 16
MSLLAELKEATTIHDIASLLGFKTAALSYILYVKSDASKYKTFDIPKRSGGVRQISAPYSDLKLLQRRLADLLQNCADEITKNQGRGDEGKNPDRISHGFRRRRSIITNAKQHCKRRHVFNIDIENFFGSINFGRVRGFFIKDNNFDLNPKIATILAQIACTNGSIPQGSPCSPVISNLIGHILDTHLVRLAKRAGCTYSRYADDLTFSTSLRDFPDTIATRCPVNEHDWQPSHELERIITQCGFSLNNSKTRMQYQEARQEVTGLVVNKKVNVRSAYRRTVRAMVHQLFTTGKFHIPGTPETQGSLNQLHGMLGFVDGIDLYNRSLRAKNSGSLGDKEKMYRQFLLFKEFYSADVPVLLCEGKTDNVYITHAIRSLADKYPKLATKKTDGSVTIDFRRFRFTGTSTGRILRLQGGTPDLKAFAELYREESVRFKAPGMKHPVILLIDNDDGARRIYGFIQGITGKRPDGSESFVHVFKNFYVCATPLLAGAKESKIEDFFDPKTLDTKIGAKTFNSKNEIDTAMHYGKAVFAYKVVEAHADKIDFSAFAAIFDNLVKILDYHAAKFVTETA

SEQ ID NO: 926 - protein, 605 aa, unidentified
  source 1..605: note = Related to NKIH01000004.1; note = Burkholderiales bacterium PBB6
MSQLTALKSASTLHDVAAILGFKPSALSYLLYVCSEATKYRTFDIPKRSGGTRQIAAPVGPLKLLQRRLADVLQNCVDEINRTNKRSDDDKQPDCIAHGFKRKRSIITNARQHRNKRFVFNLDLEDFFGTINFGRVRGFFLKDKNFALQPKVATILAQIACYQRALPQGSPCSPVISNLIGHVLDIHLVRLATLTGCTYTRYADDLTFSTNKQAFPSMVARSAVGNEHVWEPGKELGRLVTKSGFAINTNKTRMQYRDSRQEVTGLVVNSKVNVRQEYRHTVRAMVHRLLSTGSFDFEYTTTDSAGVKSTIKTLGRLTQLHGMLAFIDGVDLSNKSVLPKASGISLTSKELMYRRFLLYKDFYAATTPIVMCEGKTDNVYIAHAIRSLATLYPKLATVGSSGKITLTIRRFKYPGKKTRKHQSRNAGNSTGRILGVNGGSNDVGNFMRTYAAEIGRFRAPGKLHPIIVLIDNDSGAAPVYNTIQRLTGTKPTGTEPFIHIIGNLYVVPTPLLTTKASMIEDFFDSATRAIQYKGKPFDPSNKFDSKTHYGKADFAYKVVQPNADKIDFNGFKAILDRFSDVIDQHAKTHNAVPLSIPAVAAAAAP

SEQ ID NO: 927 - protein, 602 aa, unidentified
  source 1..602: note = Related to JACZJU010000112.1; note = Burkholderiales bacterium
MSQLNALKTATTLADIAKLLNSEASGLAYVLYKVPEALKYKEFDVPKRYGGTRKISAPSDALRLLQQRLSNLLQNCLKEIEESGGRRHDVSHGFKRGRSIMSNGESHRRKRYVFNVDLKDFFPSINFGRVRGFFIKDKNFLLSPKAATFLAQIACYKNALPQGSPCSPVISNLVSHVLDTHLVRLAAKEGCRYTRYADDLTFSTNKTEFPKSIAKRTDGAPHDWIPGAALVKLVEKSGFAINPSKTRMQYHDSRQEVTGLVVNRKVNVRSDYRRTVRQMTHRLMTKGNFESVHKMVNSDGTKSVTKIPGTVPGLHGMLAFIDQIDLYNLKQVEKGLADSDKVKERIKLATKESVYRRFLLFSQFYAAPKPIVLCEGSTDNVYLVHAIRSLVADLPTLATKLPSGEIEINVRFYRYFKRRKKKLANEHSKAISSTGRILDLKGGSGELLKFAKVYKTHLAKITAPGAYQPVILLIDNDKGANDMFGYIKGVTQIKEPKNEPFVHLLRNLYVVPTPLTPDKPNATMIEDFFSDDWKKTLVEGKPFNPEKDHEDHTCYGKVIFAHRVVRPNAEKIDFSQFKQLLLNISSVIESHRKTHPPPGKAS

SEQ ID NO: 928 - protein, 344 aa, unidentified
  source 1..344: note = Related to SHXF01000114.1; note = Betaproteobacteria bacterium
MSQLKAIKTATSLAEIAKLLEFETSSLAFILYKLPDALKYKEFDVPKRYGGTRTISAPVDRLRLVQQRLSNLLQNCLSEIENNGGRKHDVSHGFKRWRSIMSNGENHRKQRYVFNVDLQDFFHSINFGRVRGFFIKDKNFLLNVKVATFLAQIACYKNVLPQGSPCSPVISNLVSHILDTHVVRLASKEGCRYTRYADDLTFSTNKTKFPASIAIRAGSAPHNWIPGTTLVKLVEKSGFAINQSKTRMQYCDSRQEVTGLVVNRKVNVRNDYRRTVRAMTHRLMTKGDFEFVHKTVSGDGTESVSKIPGAATRLHGMLAFIDQLDLYNMNQVKKGLIDTDKVTE

SEQ ID NO: 929 - protein, 589 aa, unidentified
  source 1..589: note = Related to JADJFI010000002.1; note = Sulfuritalea sp.
MPRLAILKGAANLSDVAHLLGFKPSSLSYLLYKLPAPLKYTEFDIPKRHGGLRKISAPIDSLKNLQQHLSQLLQDCLDELEEAGLRKNNSAHGFTRHRTIMTNAMEHRNRRFVFNADIKDFFPSINFGRVRGFLIKDKHFALNPAVATVIAQIACHNNALPQGSPSSPVISNLIAYVLDTHLVSLAQHTGCHYTRYADDLTFSTNMPNFPNAIAVCVGGNAHNWAAGQSLTAIVSKSGFSLNSAKTRMQYRDSRQEVTGLVVNEKINVRSEYRHKLRALTFRLINKGEFSIIHKSVDILGNITTNVIPATPAQLKGMLAFVDAVDIAQRDDAIRQFHDKHQDGQIKYERYKLVRKENTYRRFLMFNEFFATPKPVVLCEGPTDRVYLRCAVKRLAADFPTLATINAAGEVSLNFRRYKYADSNTNRILKIHGGASQLMGFISEYRSAAEKFLAPGPFEPVIVLVDNDDGPEELFKYLAKVNKVKAPRTEPFVHVCANIYVVPTPLGPNGEPTCIEDFFPSHLFKEEVAGKTFNPKKKHGDNEKFYSKEIFAEKVIAKKAGTIDFDAFKPLLSNIERAINTHRKNHPKPK

SEQ ID NO: 930 - protein, 590 aa, unidentified
  source 1..590: note = Related to FAOS01000003.1; note = Janthinobacterium sp.
MILLAKLRSAKTIHHLAAILGFKASALAYILYGKGGASNYKKFDIPKRYGGARHISAPMPELKLLQSRLSDVLQNCLAEINEAAGRSDKIFDRVNSRADRISHGFRRHRSIITNAREHRNRKFVLNVDLKDFFGSINFGRVRGYFIKDKKFLLSPEIATMIAQIACYENTLPQGSPCSPILSNLIGHVLDVHLVGLAAKKGCVYSRYADDLTFSTSKPVFPSSIASSDPTNEHLWLPGKELVRLVEKSGFEINPSKTRMQYRNSRQEVTGLIVNKKVNVRSEYRNTVRAMVHHLFTTGTFEILQRVSDGKGGVTISQVPGKVNQLHGMLGFIDGVDLYNKKLIGVAKGASNLPSKETMYRRFLLYKEFYATTSPVIVCEGKTDNIYILHAIRSLAATYPKLATTNADGTIKLNVRIFKYSGTSTGRILKMHGGTGDLGNFMLDYRTECARFKAPGQQSPVIFLVDNDSGASSIYNIVKQITKKKVTGTEPFVHVTGNLYLCATPLIAGATESMIEDFFDSATKAITIGGKTFDPDLDDETAKHYGKVVFAHKVIRANANKIDFKEFNPILSNIVAAIDAHSEKVVSAGVP

SEQ ID NO: 931 - protein, 576 aa, unidentified
  source 1..576: note = Related to NZ_CP036357.1; note = Bordetella trematum
MWATHPPPFMTQLKKLKAAKDIYDISTLLNYKAGKLSYILYVIDESDKYSSFEIPKKGGGTRTIKSPIPKLKRLQKNLSNLLQNCLDELRSENSYVDPMSHGFEKKRNIITNAEVHRAKRYIFNIDIKDFFGSINFGRVRGFFIKDNRFELDPKIATIIAQICCHENSLPQGSPCSPVISNIIGHILDVRLLSLAIKNGCSYTRYADDITFSTNKKKFPSSIAAKDDDGHGWSVGKELSDILKTNKFSENKNKTRMQYKTSRQSVTGLVVNKKINVRSEYRKQVRAMVHSLFSKGTFFIPKAGVAPMDEFPEGTLNQLHGMLGFIDSIDQNNVLRQGLEAASITQKEKTYRKFLLYKDFYLSTRPIILCEGKTDNIYLKCAIKSLAGQHQLLGERVGVDSFKMKVRFYKYAETSTGRILGLSGGTGDFPKFINSYLSGISKFTALELNHPVIMIIDNDSGAKGIYSKLREILNRQISPAEEYIYAGENLYIVPTPIAKHGQHSMIEDCFDKDTKKILVDGKKFNPDDKASIDMFYGKSVFATQVIERFSEKINFNGFSVFLSRIESAINHFHNMKG

SEQ ID NO: 932 - protein, 558 aa, unidentified
  source 1..558: note = Related to NZ_NEVN01000010.1; note = Bordetella sp.
MATILSFQPKTLSYLLYVASDTQKYRSFELPKKTGGTRTISAPTDKLKRLQSNLADLLQRCLDDLKISAEYSDSASHGFQRGKSIISNAAQHRAKRYVFNIDIANFFGAINFGRIRGFLIKDTRFALHPTIATIIAQIACRENSLPQGSPCSPIIANLVGNILDRRLIALAAKYGCTYTRYADDLTFSTNKKVFPPRIASRTTDHTWAAGEELLAVLQASRFSPNPQKTRMQYKTSRQEVTGLIANKKVNVRSDYRKRVRAMVHRLFSTGSFNLPENPTPGAGRTRDAEPGTLNQLHGMLSFIDSVDQYNIQRSKLKLDQLSQKEKTYRKFLLYKDFYLAEQAIILCEGKTDNIYLRNAIKGLPNDFPLLGSNDSPDQFKINVRFYRYAESSTGRILGLSGGTGDFPNFINAYLTALAQFPALKIRHPVIILIDNDSGARPLYSSLAQRLHRKIDPRESFIHVESNLYVVATPIIEPASESMIEDFFDETTKKLVVKNRHFDPRDDADQRYFYGKNTFATEVVERFSDSIDFSGFSELLCRIEMAIRHFHSAHSPANS

SEQ ID NO: 933 - protein, 577 aa, unidentified
  source 1..577: note = Related to NEVU01000001.1; note = Bordetella sp.
MTQLQKLKEAKNLHDVATLLNFKPNKLSYLLYIAEDEEKYKTFEIAKRSGGTRSIAAPDPRLKQLQRNLSVLLLNCLDELREKKLYKDDMAHGFLRKKGIVTNAVTHRAKRFVFNIDISDFFGSINFGRLRGFLIKDDRFELNPNVATILAQIACRNHTLPQGSPCSPVISNLIGHILDVRLAGLAAKNGCRYSRYADDITFSTNKKEFPQAIAMREPDSHAWVVGAELEVVLSANNYSLNTKKTRMQYCDSRQTVTGLVVNRKVNVRSEYRRRVRAMVHRLFTTGQFAVPSTKVAATAAGAVSSEEPGSLPQLHGMLGFIDGVDQYNIRKHGLRLEELSEKEKTYRKFLLYKDFFLAERPVVLCEGKTDIIYLKNAVRQLAAKYPKLGEQTGENKFQHNVRFYKFADSSTGRILGLSGGGGDFQKFAHAYLSEVGQFPTHPIAGLKHPVIIMMDNDSGANAVCSYALKRTKISVDRGGDFFRLGENLYLVLTPFLHGEKPSTIEDFFDDAVKLRTVEGKAFDPGDEHDTGTHYGKAIFAKEVVEKYADEIDFNAFRGILSRIEGVMSDYYASRLAL

SEQ ID NO: 934 - protein, 572 aa, unidentified
  source 1..572: note = Related to NZ_JACHGB010000002.1; note = Quisquiliibacterium transsilvanicum
MSKLESLRKASTLHDLARLLGFKAKALAYVLYVIPEAKKYTEYKIPKRSGGARTIQAPVAELKLLQRRTSNLLQDCIGELADKGQRSDPFVHGFRRHRSIITNASRHRNRRLVVNLDISDFFGSINFGRVRGLLIKDDAFSLNPSVATVIAQIACHENALPQGSPCSPVLANLVARPLDLRLLAHAKRRGFVYTRYADDITFSTRLKNPPAAIVQHKPGTGLHAWEAAPTLVRAIEKSGFSVNASKTRAQYRDSRQDVTGLVVNRRVNVPREYRRQVRAMVHRLTTTGAFEIRKNVLAAGSTTLRAIPGNFEELQGMLGYIASIDAAAEHNRKDNAIAARSQRETYRRFLFYREFFCVDRPVIVCEGKTDNVYLRSALRKLAPLFPSLASVTASGELRMNVRLYKADGKKTSSLMGLTGGAAPLLAFLREYRKASETFVSKGNRFPLIVVVDNDGASKDIFSFIKKITGSHKMIDGSEPYYRLMPMVFVVPIPKPPSSTTAAIESLFDSSLLSTIHKGKIFHGSDKGFDEDKHYTKSVFAKEVVEPHFDKINFDGFKPLLDAISEVVGLSSP

SEQ ID NO: 935 - protein, 579 aa, unidentified
  source 1..579: note = Related to JAAZTX010000005.1; note = Acidithiobacillus ferriphilus
MSRLAELKASTTLSDVAHLLGYKPKAVSYILYMLPTDQKYTTFEISKRNGGQRTINAPVEKLKVLQRRLADLLQDCLDEINNAKGLKDRAAHGFKRKLSIITNARQHRHRRWVFNVDLENFFPSINFGRIRGFFIKNRDFQLHEKVATVLAQIACHDHSLPQGSPCSPVISNLVAHLLDMRLVKLAQIAGCTYSRYADDLTFSTNKKQFPLEIGWPATDQGPDSHIWLPGDALRKTINRAGFTINPNKTHLMYRTSRQRVTGLVVNKKINIRWEYRHNVRAMVNKLVNTGEFELNGIVHKDGNVSIEKRPGRLNELHGMLGFVNDIDVYNSRQTNDKPPGFSSTERVYREFLIYSIFYAAQMPVILCEGDTDNVYITHAIRSLAREFPDLAEVRADDKIVLKVRLYKYPKSSTSHLLGLGDGGSSVLSKFISEYKKEISRFKAPGLAHPVIIVYDNDDGARSIRNTIKQITKSTPKVTNPFDHVTKNMYAVPTPIPEGEAASKIEDFFGEMIKSTVVNGKIFNDGNNIDATQHYGKRVFAHKVVRPKAQMIDFTGFRQLLSNIVEVIKYHKAAVVMPPP

SEQ ID NO: 936 - protein, 582 aa, unidentified
  source 1..582: note = Related to QHVH01000010.1; note = Blastocatellia bacterium AA13
MSRLASLKAATSLSDVAKLLAFKPKAVSYILYKQPAATKYRTFQIPKRNGGERTIKAPDEALKLLQRRLSELLQDCVDEINTVKQRKDRTAHGFKRKRSIITNARQHRHRRWVFNVDLEDFFPSINFGRVRGFFLKNRDFELHEDVATVIAQIACHENALPQGSPCSPVISNLVAHLLDMRLVRLASDAGCTYSRYADDLTFSTNKREFPANIAVSSGNEGDASHLWLPGEALRKVIKRTGFRINAKKTHQMYRASRQNVTGLVVNKKINVRWEYRHNVRAMVHSLVRTGAFQILGVTSKDGHAVLEKRPGDLNELHGMLGFIYSIDVYNKTHPSDAFAEGMSASEKVYREFLIYSTFYAAEAPIVICEGETDNVYLTHAIRSLAAEFPSLAEVRSDGKIHLRVRLYKYPHSSTARLLGLNDGGSGVLSKFIAAYKKETKHFTAPGLTDAVVILYDNDAGAKGIRQAIKNVSGVKATGDEPFVHVIKNLYAVSTPVEAPATQSKIEDFFDATIKATVIDGKMFNEGDGFNADQHYGKKVFAQQVVRSKADIIDFTGFRALLTNLTEAINSHKASVVPQPPEP

SEQ ID NO: 937 - protein, 576 aa, unidentified
  source 1..576: note = Related to JADBLS010000169.1; note = Chloroflexi bacterium
MSRLAALKASTSLSDLARLLDFKPQALAYILYKQPEAKKYTTFQIPKRNGGQRTIKAPVDALKLAQRRLSHLLQDCLEEINTNQNRKDRTAHGFKRKRSIITNARQHRHRRYVFNLDLEDFFPSINFGRVRGFLIKNRDFALHEHVATVIAQIACHENSLPQGSPCSPVISNLVAHLLDMRLVSLASAAGCTYSRYADDLTFSTNKKEFPTEIAVPLGTEGGESHLWGPGDELQKVIERMGFRISAAKTHLMYRTSRQDVTGLVVNEKINVRWEYRHNVRAMVHRLITTGAFEIYGVTQRDGKAALEKRQGPLNELHGMLGFIDSIENYNKKNTHDSPSDRPSSMELVYRQFLIYRNFYAAESPVVICEGDTDNIYLTHAIRNLAAEFLDLAEVKEGKIRLKVRLFKYPHSSTARILDLGDGGSGVLSDFIGTYKREIGHFTAPSSQSPVVIIYDNDSGARGIRSAIRSVSKVQPTGTEPYVHVVKNLYALATPLVGTTTESKIEDFFDDAIKATVIDGKTFNDKNKIDAAKHYSKTVFAHRVVRPNADTINFSGFRPLLTNLVAVINAHKASIAV

SEQ ID NO: 938 - protein, 590 aa, unidentified
  source 1..590: note = Related to CP047423.1; note = Candidatus Nitrospira kreftii
MSRLAGLKAATSISDLATLLGFKPKAISYLLYKQPSEYKYTTFQIPKRSGGQRTIQAPVERLKLLQRRLSDLLQDCHDEINASAKRKDQIAHGFKRDRSIITNAKHHRNRRWVFNIDLEDFFPSINFGRVRGYFLRNRDFMLQERVATVIAQISCHENSLPQGSPCSPIISNLVTHVLDMRLVKLASECGCTYSRYADDLTFSTNKKDFPFQIAGPSAISADRAHLWLPGEPLKQVIERTGFRVNSKKTRMMYRDSRQNVTGLVVNKKINVAREYRHNIRAMVHRLVTTGQFEILGPVTRDKKVVLEKRPGTLNELHGMLGFVDSVECFNHSRTDEYSASLKATYRRFLFYSTFYAASAPVLICEGETDNVYLTHAIVSLASEFPELAELAGAGKTRLKIRIYKYPRTSTARILGLKDGGSAVLCNFIKDYPKEVARFSGPGLAQPVIVIYDNDEGCKGIRSVIANISKVKPTGTEPFTYVYKNLYAVPTPLQEGVTSSKIEDLFEARIKETIIEGKTFNEGNSLDPHKHYGKKVFAHKVIRPNADKVDFTGFRSLLTFPRFHRHLYKEEFDEIGGQHEHQDQTAVYGRV

SEQ ID NO: 939 - protein, 579 aa, unidentified
  source 1..579: note = Related to JACQSX010000029.1; note = Acidobacteria bacterium
MSRLNNLKSTATLSDLARLLQFKPSGLSYILFKQPAATKYKTFEILKRKGGTRTIKAPSNPLKLVQQRLSILLQDCVDEINKAKNRKDRIAHGFKRKRSIITNARQHRNRRYVFNIDLEDFFPSINFGRVRGYFIRDRSFALNEDVATVIAQIACHENALPQGSPCSPVISNLIAHVLDMHLVRLASKVGCTYSRYADDLTFSTNKKDFPADIAKPSETEPHLWLPGAELQRLIAHAGFRINTAKTHMKYRTSRQEVTGLVVNQKINVRREYSHNVRAMVHSLLKEGSFELYAATEKAGAVTIEKRRGTVNELHGMLGFIDSIDLYNKKNAPESKDSGRLSSKELMYRQFLIYKDFYIAEAPVIICEGKTDNVYLTHAIRRLVAEFPDLAEITTQSKIRLKVRLYKYQRSSTARILGLRDGGSSCLTKFIETYKKETDKFTAPGQKNPVIILYDNDSGASNIRSLLKQTFKLTVGTEQFVRVVRNMYVVPTPLLNGANESKIEDCFDAATKATVIGGKTFNDKNGLDTAKHYGKKIFADQVVRDREDSINFEGFRQLLTNLVAVIQSHTTAVSGASAPQ

SEQ ID NO: 940 - protein, 578 aa, unidentified
  source 1..578: note = Related to JADZCM010000017.1; note = Bryobacterales bacterium
MPRLASLQSAATLSDLARLLRFEPSGLSYILYRKPAAKKYSTFEIPKRHGGTRTITAPDDDLKLVQQRLSDLLQDCVDEINTAKNRKDKLAHGFKRKRSIITNARQHRKRRWVFNLDLEDFFPCINFGRVRGFFLRDHNFQLQKHVATTIAQIACHANGLPQGSPCSPVISNLIAHVMDMHLVRLSSKVGCTYSRYADDLTFSTNKKEFPPEIAKPSATDPHLWLPGPDVQALVNHAGFRINNSKTRMNYRTSRQDVTGLVVNEKINVRHDYRHNVRAMVHRLFSTGEFELWGIIDKGGTKTLEKRPGSLDELHGRLGFIDSIDQFNKKIASDVNYTRYPAGRESMYRQFLIYRDFYAASKPVILCEGETDNVYLTHAIRSLAASFPELAEIDSNGKRHLKVRIYKYARSSTARILGLKDGGTGHLKHFIGTYSRETDRFKAPGLKQPVIVLYDNDNGANPIRSAIREVSKKAVKATDAYTHVVRNLYAVPTPLLNNAKESKIEDFFDAAIKATVIGGKTFVAANDYDSTKHYGKKIFAHQVVRPKADTINFKGFGPLLTNIARIVKDHAAVVGATAP

SEQ ID NO: 941 - protein, 633 aa, Achromobacter sp.
  source 1..633: note = Related to JABBJN010000001.1
MTKLEQLRRATTLRDLAELLGVTAPGLAYILYHKPRDQLYRAFEIPKRKGGTRSISAPADELKTIQKKLSSLLQECWAEIGDGKNSGRHPGRKGRVAHGFLPGRSISTNARQHRRKRFVFNVDLEDFFGSINFGRVFGLLRQDNNFKLQPRVAAVIATIACFENKLPQGSPCSPIISNLVARILDARIAGLAAKVGVNYSRYADDLSFSCNGRIFPPEIAKKIEGDDHSWVVGKALNSVIEKTGYRVNLSKTRMQYEDSRQEVTGLVVNRRVNVRSEYRRAVRAMGHRLFSTGAFDVPKVALTKGNDFPMQSVQGTIPQLHGMMSFVASIDRLHREAALSRGDAIEETSAEKLYRNFLYYRFFYKNDAPIILCEGITDNIYLRCAIRALRESYPLLVKPKAEPGDLLIKFYKYRGAAVDTVLKLKDGGAGNLQNFMVAYKKACQLFLGAGKENPVILIVDNDEGGRKVMGAAKELSGKAYDGSQAYLHVFGNLYLIATHPTAVVDGGQKKMAQKGARPSDSCIEEYFSSEVRSTKLNGKTLTLKNDSSGVAHYGKMDFAKHIVENLRGADSFSGFARLLDRINLVVTAHASSSTEAAVSGAAASQLSNGGLGAAIPPTGETIAGFTEIAEAAD

SEQ ID NO: 942 - protein, 593 aa, unidentified
  source 1..593: note = Related to NZ_CP088952.1; note = Massilia sp.
MTQLAALKKASSLNDVADLLGYKPAALAYILYQISDENKYTSFSIPKRSGGVREIKAPIDKVKALQKKLANVLDHCLDELNAVHQYRYQSSHAFRKNKSIFTNASNHRAKRWVFNIDLENFFTAINFGRVRGYFIRDRQFELAPSIATILAQIACSGNSLPQGSPCSPVISNLIGHILDVHLAKLAARVGCRYTRYADDITFSTNDPQFPSAIAICDVEDSRVWHIGNELQCLIESSGFAVNIKKTRMQFKDSRQDVTGLIVNRKINVKKEYRRTVRAMVNRLLTVGHFERKRRVKNNAGEWVLADVAGTAEELHGMLGFIESVDKYNSSLPLKKGGKRKEGEKTGVDEKRLTASTGKDNLYRRFLLYKEFFAAPCPVILCEGETDNVYLIHAIRSRAADFPMLAKVSETNEITITPRLYKYVKTNSGRMLGLGSGGTGDLGKLIKNYLSELHRFVRPKQQHPFIILIDNDAGAIGGGRPLEVLRKKGVDIDRTAPYIFVMGNLYLVPTPLLGKEESMIEDLFGQNVLDESLDGKTFCRKNKADNGRHFGKTVFAHKIVRPNADHIDFSGFDPLLINITAVIEDFYKKHPRVA

SEQ ID NO: 943 - protein, 606 aa, unidentified
  source 1..606: note = Related to NZ_CP080379.1; note = Massilia sp.
MTQLAALKASTSLIDIAHLLGYKPSALAYILYKIDDEVKYANFEIPKRSGGKRLVSAPIPELKALQRKLAELLENCSIELTEAGKHDDKSSHGFKKGKSIFSNAKGHRNKRWVFNIDLENFFGTINFGRVRGYFIKDRNFQLSPTVATIIAQIACHKNCLPQGAPSSPAISNLIGHILDIHLSKLAAKFGCHYSRYADDLTFSTNKPSFPHQIASPDSIDPQAWTPGSELSRLIDNSRFSINSLKTRMQYRDSRQDVTGLVVNKKLNVKAEYRRLVRAMVNRLLTLGHFEREKRLSDEKGNLVLTKVPGKTDELHGMLGFIDSVDRYNLNLSIPAGGKVHDEKKKAAADEKNTRPGLTGKDHLYRRFLIYKEFFAPSRPVILCEGDTDNIYLIHAIRSLSAKYPLLAKLQNEKLEILPRIYKYVDTSTGRILGLNSGGTGDLGKLIRSYLAEINRFIRPANQHPFILLVDNDKGAIGGGRPPDVVKKVVGKEMDRSAPFLYVAGNLYLVPTPLLDGKLESMIEDFFDDKTRSRDIDGKVFNPANKADNSKYFGKKVFAHKVIRPNAEDIDFSRFSSLLDNITLALEDFYKKHPHSATVDKPAKKAA

SEQ ID NO: 944 - protein, 605 aa, unidentified
  source 1..605: note = Related to NZ_RXLQ01000009.1; note = Massilia atriviolacea
MTQLAALKAASSLHGIAHLLGFKPAALAYILYKLNDSQRYKQFEIPKRSGGKRTIKAPTAELKLLQRKMASLLENCISEINVANKRADLFAHGFKKGRSIFSNARPHRNRQWVFNIDLENFFGSINFGRVRGFFLKDRDFALHQGAATIIAQVACVDNALPQGSPCSPIISNLIGHLLDVHLAKLAASCGCHYSRYADDLTFSTNAPQFPSRIATRTRGAAGDEWMPGAELHRIIQHARFAINPQKTRMQFKDSRQDVTGLVVNKKLNVKTEYRRSVRAMVHRLLTHGHFERTKRVDDGAGNHVLDAVKGTTAELHGMLGFIDSVEHYNRNLVLPKGGKPKVEKKKKGTEPNKPRVALTGKEVLYRRFLLYKEFFATSNPVLICEGETDNIYLVHAIRSLATHFPLLATVVKPGEIKIIPRIFKYVETSTGRILGLGSGGTGDLGNLIRQYDKEIKRFVRPATQHPFILVVDNDAGAVGAGRPLQASKQVTGLDVNRHAPFTNVCGNLYLVPTPFLAGAAQSMIEDFFTKETLDETIDGKSFCASNKQDSAKQYGKKVFAHKVVKVKADTIDFKGFFKLLENITLAIEDFYKKHPSAPITSAQAI

SEQ ID NO: 945 - protein, 570 aa, unidentified
  source 1..570: note = Related to JAHCDN010000001.1; note = Variovorax sp.
MSQLIALKSCINLSDVAVLLGYKPSTLSYLLYKIGEESKYSSFEIPKKGGGTRRIEAPQKELKLLQRKVADLLQNCFESADLTSPKYKSNPVSYGFIRGLSIIDNAQNHRSQRFVFNIDIQDFFGSINFGRVRGFFIKDRDFSLQPQVATVIAQIACFKNRLPQGSPCSPVISNLVGHILDMHLIKLAARTGCRYSRYADDLTFSTSKRDFPRQVAFYDEEKGLWHVGDELKRLLELSGFTLNSGKTRMQNRDSRQQVTGLVVNKRVNVSKEYRKTTRAMVHRLFTKGSFFFTDESNLEVKAQKESSDIGRLHGMLGHIYHVDTKCKTKIESSTNPPQKNASTYRRFLIYKELYATNKPIIICEGKTDPVYLVHAIRSLHRDFPMLAYRDAENQIRLSVRLLKYADKSMASILGLNGGVGDLRTFIDSYRSDIKRFNAPGKFHPVIILIDNDDGAKPILSIVKSINPNSTFDRDSFSHIVGNLYVVKTPLLGSEKSCIEDFFDGDLKSTMIDGKQFSLEKDANPEHYFGKVVFAHKVVRPQADKIDFSNFRHILKSMQDIITEFSSQKRI

SEQ ID NO: 946 - protein, 585 aa, unidentified
  source 1..585: note = Related to NZ_JAGSTT010000006.1; note = Burkholderia cenocepacia
MSQLALLTSATELHQVASLLNFKASALSYVLYKLPAAQKYTTFQIPKRSGGMRTIQAPCPQLKILQHNLSNTLQNCLEEINAREKRKNSFSNGFTRNRSIVDNAAPHRTKRFVFNIDLRNFFGTINFGRVRGFLIKDRNFRLEPKIATILAQIACHNNELPQGSPCSPVISNLIGHVLDVHLVGLARRSGCTYSRYADDITFSTNKPEFPADIATRTEPSHQWEIGEELKRLIKLSGFDVNSEKTRMQYCDSRQEVTGLLVNKKVNVRPEYRRTVRAMVHRLFTTGEFHIPEVVDDGTGKASITMTPGEMSKLHGMLGFVDQIDLYNKKNRPSGSNNDNLSSKESIFRDFLFYREFYSCDKPVLLCEGKTDNVYLKHAIHALAAHFPSLASVNAKGEVTRNIRIFKYTDSSTGRILGINGGTAPLSGFMRTYADATSRFKAPGENNPLILVLDNDSGVKGKGKIFNAVKQICKVEMTGAEKFVHVAGNMYVTLTPLLPGGADSMMEDLFDLNTKATIIDGKSFNPNNNLDSASHYGKHVFAQKIIAANPQSVDFGGFTQLLDNISAVIDAHKIKVSERQTANAIN

SEQ ID NO: 947 - protein, 583 aa, unidentified
  source 1..583: note = Related to SORC01000001.1; note = Paraburkholderia sp.
MPNLANLKAAASRQDLAELLGVKAGMLSYAIYKIPEANRYSRFEIPKRHGGIREILAPTPELKLIQRRLSVLLQDCAAEINSAHGHAEDGTRFGIAHGFKRHHNIMTNGRVHVTRRFVFNVDLHDFFGTINFGRVRGFFLKDKNFALHADVATVIAQIACFDNKLPQGSPCSPVVSNLLAHSLDIQLVRLAAKNGVSYTRYADDLTFSTNKPSFPAEIAAPGDTHSWKPGADLERIVANSGFSFNPSKTRLQYRDSRQEVTGLTVNRKVNVPATYRYTVRAMVDCLFRTGKFQFIYKKKDEQGKVVLELSHAGRNEQLHGMLSYIDQVDLFNQKVCKENGREPESTTGRVELFRRFLYFDTFYAAPEPIVVCEGKTDNVYLKCAIKSLVAKYPKLVAAGSPPKLKLRFFKYAETRTGQVTDLTGGVGGICKLLKSYDEDVKEVFKAPVSKFPVIVLIDNDSGAHGIYQVIAGINKKPKPQGLADFIHVTSNLYVVPTPFGPSKSHTAIEDFFDKPTLETKLNGKTFSRESKLDETSEYGKAAFARDVVAKNAGTIDFSGFQAILDRVIKVLDDYEIRFKNAKK

SEQ ID NO: 948 - protein, 618 aa, unidentified
  source 1..618: note = Related to FXAT01000001.1; note = Paraburkholderia susongensis
MACEIKVPGFAPRISSALSELRRLRKSIREPLPLRHMSSLQKLKAAAARRDLAIILDVSPRNLAYILYKTAPDTKYTRFTIPKRHGGEREILAPSLGLKLVQQKLASVLQDCSDEIALSHVKPGNGRRHGIAHGFKRHHTIMTNGRVHVTRRFVFNADLHDFFGTINFGRVRGFFIKDRNFALHPDVATVIAQIACFENKLPQGSPCSPVISNLLAHPMDILLSSLAAKHSASYTRYADDLTFSTNNPTFPPEIAALNGDHTWVPGAELDRLVSRSGFAFNPSKTRLQYRDSRQEVTGLTVNQKVNVPATYRYTVRAMAHSLFTTGAFEFVYKKRDTNGTIILENRKAGENKQLLGMLSYIDHVDRFNHKLAIENGREFESTAGRVALFRRFLYFDLFYGLREPIIVCEGKTDNVYLRCAMKALSATYPSLVEAGAPPKLKVRFYKYAETRTGEITELTGGVGGICKLLKHYHTDVQHCFKAPAPRFPVIVLIDNDKGAHSVYEAIAGITKKKKPQGLADFIHVTSNLYVVPTPRGPNNSETAIEDFFDEATLKEELNGRKFDRSNHTDDKPGFYGKGHFARDVVAKKAGTINFDGFTAILDRIIKVTDDYQAKLAKP

SEQ ID NO: 949 - protein, 581 aa, unidentified
  source 1..581: note = Related to SMOD01000073.1; note = Paraburkholderia guartelaensis
MRMINLTNLKSTTSRRDLSKLLDVKPGMLSFAIYKNPEAVRYRRFEIPKRHGGTREILAPASELKLLQQRLSVLLQDCVAEITAARGFAEDGAHFGIAHGFKRYHTIMTNGRVHVTRRFVFNVDLHDFFGTINFGRVRGFFLKDRNFALHPEVATAIAQIACFENKLPQGSPCSPVISNLLAHSLDIQLARLAARHGASYTRYADDLTFSTNKPAFPAEIGVLDDAHNCSPGAELERIVTRSGFSFNPAKTRLQYRDSRQEVTGLTVNRKVNVPASYRYTVRAMVDRLFKTGAFEFIYKKKDAQGNVVLERRVAAKNGQLLGMLSYIDQVDRFNQKICETNGREPESTAGRVELFRRFLYFDTFYATRQPVIVCEGKTDNVYLRCAIKSLAAKYPNLVTPGVQPKLNVRFFKYTETRTGQVMDLTGGVGGICKLLKSYSEDIEGIFRAPAPTFPVIVLIDNDKGAHGVYEVIAGITKKPKPLGLADFIHVTSNLYVVPTPFGPKKAHTAIEDFFDAFTLETELNGKKFNRNNKLDDSKEYGKAAFARDVVAKNAATIDFTKFHAIFDRVMKVLDDYEARRK

SEQ ID NO: 950 - protein, 580 aa, unidentified
  source 1..580: note = Related to NZ_LMNW01000004.1; note = Duganella sp.
MSSLQALKAASARRDLADLLGVKPGMLTYAIYITPEADRYTRSTIPKKHGGDREICAPNNDLKLIQRRLSTLLQDCLDEINVARGHKEDRVRFGIAHGFKRNHTIMTNGRAHITRRFVFNADLHDFFGTINFGRVRGFFLKDKNFSLQPEVATTIAQIACFENKLPQGSPCSPIISNFLAHPLDIRLVRLAAKHGVTYTRYADDLTFSTNKPAFPVEIASPIDSHGWIPGPELECVVTESGFSFNPSKTRLQYRDSRQEVTGLTVNRKVNVPATYRYTVRAMVNTLFKTGSFEFIYRKRGDDGKVTSENREPGTMPQLLGMLSYIDQVDLFNEKLCKDNDREPQPVVGRTALFRRFLYFDTFFSAQRPTIVCEGKTDNVYMRCAIKSLAAAYPRLIGGEKLLVRFFKYTESRTGRVMDLTGGVGGICNLLKSYHEDLKFYFKAPISKFPVIVLIDNDSGAHSIYEAVAGITKKKKPQGVADFIYVTGNVYIVPTPFGPGKSFTAIEDFFDAKTLATELNSKKFNRKNKKEDSEDFYSKAAFARDVVAKGASTIDFGNFKVILDRIEKVLDDYAVRRKTMT

SEQ ID NO: 951 - protein, 595 aa, unidentified
  source 1..595: note = Related to QMFZ01000026.1; note = Burkholderia sp.
MRRSIRESFLLPIKMSSLKDLKAATARRDLAALLHVKPGMLTYAIYKSPEANRYRKFEIKKRHGGEREILAPENGLKLLQRRLSTLLQDCIAEINSLHGHVEDEGRFGIAHGFKRNHTIMTNGRAHVARRYVFNVDLHDFFGTINFGRVRGFFLKDRNFALHPEVATVIAQIACFENKLPQGSPCSPVISNLIAHSLDIHLVRLAAKHGATYTRYADDLTFSTNRPEFPPEIATLKDTHSWIPGVDLERIVTRNGFSFNPSKTRLQYRDSRQEVTGLTVNRKVNVPATYRYTVRAMVDKLFKTGQFEFVHKKRDAQGNVVFENRCVGENKQLLGMLSYIDQVDRFNHKLCTDNGREPASTEGRIALFRRFLYFDTFYAAREPIIVCEGKTDNVYLRCAIKSLATEYPRLIDKGTPPKLEVRFFKHAETRTGHIADLTGGVGGICKLLKNYHEDVTEWFKAPVSKFPVIVLIDNDNGAHSIYEAIAGITKKPKPEGRADFIHVTSNLYVVPTPFGPKKKQTAIEDFFDEHTLATQLNGKTFNRSNKSDDSDKFYGKGAFARDVVAKQANTIDFTKFRAILDRVMKVLDHYEESQKK

SEQ ID NO: 952 - protein, 582 aa, unidentified
  source 1..582: note = Related to JAAOZT010000003.1; note = Glaciimonas immobilis
MPSLKQLQATTSLRELAPLLDIKPGMLSYLLYKKPKLDLYKKFTIPKRHGGVREINAPEGDLKLLQYRLSLLLQKCIVEINAEHGHAEDDEHLGIAHGFKRYHSIMTNGRAHVTRRYVFNVDLHDFFGSMNFGRVRAFFLKNNNFKLHANVATVIAQIACHENKLPQGSPCSPVISNLIGHTMDIPLARLARDEGATYTRYADDLTFSTNNPSFSHKIAVQGCDQKWLPGESLQRIVTKSGFSFNAQKTRMQYRDSRQEVTGLTVNRKVNVPATYRYKVRSMVDKLFKTGEFEFIYKKLDTLGKEVAFNYQGKRKQLLGMLSYIDQVDRFNSKLCEKNGLEPHPTTGRTTLFRRFLYFDAFFAPVEPIIVCEGKTDNVYLRCAIKNLAAAYPKLVVAGTKPLLKVRFLKYAERRTSQITELTGGVGGVCNLLKHYHDDVRTKFKAPAPKHPVIVFIDNDSGADSIYGAIAGITKQPKPAGRASFIHVIANLYVVPTPLGPKNKKTAIEDFFDKTTLATKLSDKTFSRDNKMENLKHYGKAAFAINVIAKNANTVNFNKFAPLLDRMVAVIDDYAKRLKVPLN

SEQ ID NO: 953 - protein, 580 aa, unidentified
  source 1..580: note = Related to NZ_JXQM01000003.1; note = Nitrosospira sp.
MSNLKQLQDATSLRQLAKLLNIQFGMLSYLLFKKPKSKLYKKFDIPKRHGGMREIHAPERDLKLLQYRLSVLLQKCADEIKASHGHVEDEKHWGIAHGFKRHHSIMTNGRAHTARRFVFNVDLHDFFGSLNFGRVRGFFIKDKNFKLHESVATGIAQIACYENKLPQGSPCSPVMSNLIGHTMDIPLAQLAASEGVTYTRYADDLTFSTNNSSFPEKIAYKSGNHTWELGRQLLRIVQRSGFSFNDKKTRMQLQDSRQEVTGLTVNRKVNVTATYRYTVRSMANALFNTGNFEFIYKKLDDSGVEQVYRSKGKPKQLIGMLSYIDQVDQFNRKLWVENGLEPDPTLGRIKLFRRVLYFDKFYALNQPLIVCEGVTDNVYLRCAIKSLAALYPKIVAAGAPPKPMVGFLKYADRRTSEITQLTGGVGGICKLLKNYHEDLGTRFRAPAPKHPVIVLIDNDGGADSVYGAIAGITKKPKPNKKASSIHVTGNLYVVPTPQLPGLSKTAIEDFFDAPTLATVVNGRTFSKENNYDGSKHYGKATFAHEVVAKNANVIDFKNFAPLLERIVAVIDAYGAKLKAK

SEQ ID NO: 954 - protein, 585 aa, unidentified
  source 1..585: note = Related to NCTK01000001.1; note = Ralstonia solanacearum
MSILKKLQEAKTRGQVAALLDVKPAMLSFILYKKPKATLYTKFSIPKKHGGTRDILAPEGNLKLLQHRLCQVLQDSLDEINVANGHGESRERQGVAHGFKRLHTIMTNGRPHVARRYVFNVDLHDFFGSINFGRVRGFFIKNKNFLLHEDVATVIAQIACHENKLPQGSPCSPVISNLISHSLDMKLVQLAARVGATYTRYADDLTFSTNNPDFPQYIALRKGTHEWVAGRGLEKIVMKEGFSLNPSKTRMQYRDSRQEVTGLTVNRKVNSPAAYRLTVRAMVNSLFKTGLFEHVRKKKGAAGGISVTKFAGEKKQILGMLSHIDQVDLFNRRLREKNGLEPHNTSGRVALFRRFLYFENFYALDAPLIVCEGKTDNVYLKCAIKSLASSYPKLATSDSLPKLKIRFFKYSERRAGDVIGLSGGVGGICKLLKNYHEDVREKFKAPSPKHPVIVLIDNDSGANSVYEAIAGITKKPKPAGMADFIHVTGNLYVVPTPLGRGGKKTAIEDFFDDKTLSVALNGKTFSRDKNIDETVHYGKVPFAINVVAKNADTIDFTKFKKILDRVVRVIDDYAIKMLASSHSAS

SEQ ID NO: 955 - protein, 582 aa, unidentified
  source 1..582: note = Related to JAJTWU010000005.1; note = Pelomonas sp.
MSQLKQLKAATTLSDVARLLEVKPGMLSFVLYKKPKAALYSKFDIPKRHGGTREIWAPDKDLKLVQHRLANLLQNCVEEINSSRGHVEDGKRHGVAHGFKRKHTIMTNARVHVTRRYVFNVDLHDFFGTINFGRVRGFFLKDKNFALHEKVATVIAQIACHENKLPQGSPCSPVISNLIGHVMDIMLVRLASATGCSYSRYADDLTFSSNKSKFSSRVARQDDADKDLWLPGQGLKRLVAKAGFSFNDKKTRMQYRDSRQDVTGLVVNRKVNVPATYRYTVRAMVDHALKTGAFERIFKKLDAAGVETTFKQPGTNRQLIGMLSYIDQVDLYNRKLREDNGLEPHDTSGRTEQFRRFLYFDAFHAIGSPVIVCEGPTDNIYLRHAIKRLAPKYPMLAAGTPPKLLLRLFKYGQRRTSEITQLTGGVGGLCHLMKHYHSDFINKIKASAPKYPVIVLVDNDAGAKDIYGAISGITKKPRPTGREQFIHVVGNMYVVPTPLGAGGAKTAIEDFFDAKTLAETLGTKTFSRAPKFDDTKHFGKAAFAREIVDKKADSIDFSGFSAILDGVVAVVADYAKRHPPVP

SEQ ID NO: 956 - protein, 582 aa, unidentified
  source 1..582: note = Related to JAGREY010000320.1; note = Ottowia sp.
MSQLTRLKAATSLSDVARLLEVKPGMLSFLLYKKPKAALYAKFSIPKRHGGTREIWAPDKDLKLVQHRLANLLQNCVDEINAARGHAEDDKRHGIAHGFKRKHTIMTNARVHVTRRYVFNVDLHDFFGTINFGRVRGFFLKDKNFTLHERVATVIAQIACHDNKLPQGSPCSPVISNLIGHMMDILLVRLASATGCSYSRYADDLTFSSNRSNFSPRVARQDDDDKDLWLPGQGLKRLVAKAGFSFNDRKTRMQYRDSRQDVTGLVVNRKVNVPATYRHTVRAMVDHAIKTGSFERIFKKVDAAGIETAFRQPGTNRQLIGMLSYIDQVDLFNRKLREDHGLEPHNTSGRTELFRRFLYFDSFHAIESPVIVCEGPTDNIYLRHAIKRLAPAYPTLASGTPPQLSVRLFRYGQRRISQVTQLTGGVGGLCHLMKHYNSDFTTKIKAPAPRYPVIVLVDNDAGAKPIYGAISGITKKPRPTGAERFIHVVGNMYVVPTPLGAGDAATAIEDFFDAKTLNEKLGTKTFSRAAKFDDTKHFGKAAFAREVVERKADFIDFSRFSDILDRVVAVMSDYAKRYPSLP

SEQ ID NO: 957 - protein, 480 aa, unidentified
  source 1..480: note = Related to WSYX01000004.1; note = Ralstonia solanacearum
MSNARAHVTRRYVFNVDLHDFFGTINFGRVRGFFLKDRNFSLQPKVATVLAQIACYENKLPQGSPCSPVISNLIGHMLDIALVQLAAVSGCTYTRYADDLTFSSNKPTFPIQIARQIDKSADKWAPGRSLERIVTKAGFTFNDKKTRMQYRDSRQEVTGLVVNRKINSPAIYRNTVRAMVDSALKRGTFDFIHKKVDAKGVATVVKQPGRNSQLLGMLAHIDQVDLFNKRLCEKADIEPPSTAGRIELFRQFLYFDAFYDISMPVIVCEGPTDNTYIRHAIRSLAFGYPMLVTGNAPPKLNVRLFKYAERRTSEVTQLTGGVGGLCHLIKSYHTDVTEKIKAPPPKHPTIVLVDNDSGANAIYGAISGITKKPRPTGKEPFIHIVGNMYVIPTPLGLHGEKTAIEDFFDAATLATKLGTKSFSREKKIDETTQYGKAAFAREVIEKNAGSIDFSRFSAILDRIAAVLADYSKKHPTSAVL

SEQ ID NO: 958 - protein, 580 aa, unidentified
  source 1..580: note = Related to NZ_CP034395.1; note = Herbaspirillum seropedicae
MSSLADLKNTKTLSDLGALLDIKAGMLSFQLYKRPKEVLYTKFSIPKKYGGLREISAPDPTLKLIQHRLSDLLQECLLEITKINGHVNDAKSFGISHGFKPGHTIMTNARGHVGMRYVFNLDLHDFFGSLNFGRVRGFFIKDRNFQLTPAVATVIAQIACADNKLPQGSPCSPVISNLIGHTLDIPLVRLAATLGMRYTRYADDLTFSTNQRIVPDEIALMDPVHKWIPGRELVRIIKRNGFAINESKTRMQYCDSRQEVTGLTVNHKVNVPATYRYRVRAMAHRLFTTGEFEFIYKNNEKTVVSSSKGSPQQLLGMLSYIDHVDQYNEKIKLENNLPVTETAGRTELFRQFLYFDAFFAPERPIVVCEGKTDNIYLRCAIKKLAAKYPDLATVARGVSLNVRFFKYSEQRTGSVIGLTGGVGGICKLLKHYHEDVSTRFKAPRPQHPVIVLIDNDSGANSIYEAIAGITKRKKPLGRAPFIHVFSNLYVVPTPFGPKNAYTAIEDCFDAATLARPLDGRTFSRDNKHDSSKHYGKKDFATRVVAKNVNTLNFHGFEPLLEQMVAVIKDYKTRISGAVVA

SEQ ID NO: 959 - protein, 592 aa, unidentified
  source 1..592: note = Related to JAJFMU010000006.1; note = Xanthomonas campestris
MALIYSTPVLDSLKAATSLHDLAQLLKLKPAVLAMQIYKKDKRTDWYTSFEIKKKHGGVRKINAPEKHLKLIQSRLSKILQDCQLEIALLNGHKEGPDRQGIAHGFKRHHSIMTNGRPHVNRQFVFNVDLQDFFETINFGRVRAFFQKNKNFALNPKVSEILAHIICYKGSIPQGSPCSPVVSNLISHSMDTLLAKAAKINGATYTRYADDLTFSTNRKVFPALIAKKISANEWEPGATLLGVVTKSGFCFNKNKTRMQYKDSRQEVTGLSVNKKVNVTADYRYTTRAMVHKLFTDGKFVFCYKVKNSHGEKEIFQEIEGRASQLLGRLTHIDHVDQFNELIRKKNGLPSALPEGRLKLFRNFLYFYHFYMPDQPVILCEGKTDNIYLKCALKANAAAFPKIVEVSTGSPPTLKVRLFKYSERRTGVVTDLSGGVGGICKLLKNFDSNLSMWNSGPKPAHPVIIVIDNDSGAQKIYQAIAGITKKPKPSGRNKFIHVIENIYVVPTPPAKGITNTDIECLFADATLNEELSGKKFNKSKEIEDSSEYGKTAFAINIVAKKSGEIDFTGFVPLLERIQEAMDHYYKSIKKFKK

SEQ ID NO: 960 - protein, 586 aa, unidentified
  source 1..586: note = Related to FLTX01000075.1; note = Xanthomonas bromi
MAKIFSTPALDSLKAASSLHDLAPLLGLKPAVLAMQLYKKDKRTGWYTSFEIKKKYGGVRSINAPEKHLKLIQSRLSKILQDCLLEIALIKNHKESPDRQGIAHGFKRYHSIMTNGRPHINRRFVFNTDLQDFFGAINFGRVRAFFEKNKNFSLDPKVSEILAHIICHKGSIPQGSPCSPVVSNLIAHSMDTLLAKAAKKNGVTYTRYADDLTFSTNKKEFPLAIAKKITSNEWVPGKEVSVIVEKSGFFFNEKKTRMQYKDSRQEVTGLSVNKKVNVTSDYRYTTRAMVSSLFKTGKFKFCFKAKNLAGEKEVVQEFEGRPAQLLGRLTHIDYVDQFNESLRKKNGLPPALPEGRLKLFRNFLYYYHFYMPEQPVILCEGKTDNIYIKCALKAHANAFPSMVKPGSPPELKVRLFKYSERRTGIVTDLSGGVGGICKLLKNFHANLSMWESAPQPTHPVIVVIDNDSGADNIYQAIAGITKKPKPKGYAKFIHVTQNIYVVPTPPVKGKKNTDIECLFSDATLKEELNGKKFNKSKEIEDSSEYGKTAFAINVVAKKAHEINFAGFTPLLQRIKEAMDHYYKSIK

SEQ ID NO: 961 - protein, 619 aa, unidentified
  source 1..619: note = Related to NZ_CP092971.1; note = Xanthomonas oryzae
MSRDMPSDILCSKYVVQVAPGSVRESFNQSRKSMVKTYSTPALDSLKAARSLHDLAQLLRLKPEILAMQLYVKDKRTGWYTSFDIKKKYGGVRTINAPEKHLKSIQSRLSKILQDCLLEIALISGHKEGPDRLGIAHGFKRYHSIMTNARPHTNRRFVFNADLQDFFGTINFGRVRAFFSKNKNFELDAKVSEILAHIICYRGSLPQGSPCSPVVSNLIAHSMDTLLAKAARTNGVTYTRYADDLTFSTNQKEFPSSIAERLVGNEWGVGRTVVRIVEESGFSFNQNKTRMQYKDSRQEVTGLSVNKKTNVTADYRYTTRAMVHSLFKTGKFKFYFKVKNASGAKVVINEAEGSPTQLLGRLSHIDHVDQFNESIRKINGLPAALPAGRLKLFRDFLYFYHFYMPEKPIILCEGKTDNIYIKCALKAKAASFPSLVTHSSPPELKVILFKYSDRRTGIITNLSGGVGGICKFLKNFNSNLSMWISAPIPAHPVIVVIDSDSGADKIYQAIAGITRNKKPKGSEKYIHVTKNIYVVPTPRKINEQTTDIESLFTQETLDTELNGKKFNKSKELDDASEYGKAAFATNVVAKRASEINFDGFIPLLNNINEAMTHYYRTIK

SEQ ID NO: 962 - protein, 588 aa, unidentified
  source 1..588: note = Related to DMZZ01000357.1; note = Comamonadaceae bacterium
MKLEELKAATSLRDVATLLQVKPAMLSYILYTKPKPELYTKFEIPKRTGGVREISAPYSHLKLIQQRLAAILLECTKELREKNASKSKNKNFEIRSVAHGFMPGHNIMTNGQSHITRRFVFNVDLSDFFGSINFGRVRGFFIKDNNFALDEKVATILAQIACYENKLPQGSPCSPVISNLLGHILDVALIDLARKNKCTYTRYADDLTFSTNRRVFPLAIAFAIQEDKNSWLPGKELIRIVQHNGFEFNKKKTRMQYKDSRQEVTGLSVNRKVNVPASYRYTVRAMASNLFRTGKFEHIVRYKNSSGEEVVSKVDGKTSQLLGMLSYIHQVDMYNEALAVKNNQPLADTPGRLELYRRAIYFDAFYAPERTVVVCEGKTDNTYIKNAIYRLFQGYPLLGELDAEGKPQLKIRLFKYADRRTASITKLSGGVGGLCHLIKYYNSDIVQKFRAPPAKFPVILLIDNDSGADSVYGAIAGILNIQKPKGKKPFIHVYENLYVVPTPFGLDGEKTSIEDFFDQATRATQLNGKSFERKNDADNQHHYGKAAFARDVISKNASTINFDGFRPILDRIEAVMKDYVGRIHQLAG

SEQ ID NO: 963 - protein, 584 aa, unidentified
  source 1..584: note = Related to NZ_BCWR01000008.1; note = Hydrogenophaga taeniospiralis
MKLEELKAATNLRDVARLLQVKPGMLSYVLYTKPKSELYTKFEIPKRTGGVREVSAPFSHLKLIQQRLAAILLECTKELREKHASKSKNKNFEFRGVSHGFMPGHSIMTNGQAHTTRRFVFNVDLSDFFGSINFGRVRGFFIKDNNFALDEKTATILAQIACFDNKLPQGSPCSPVISNLLGHILDVALVELARKNKCTYTRYADDLTFSTNKRIFPSEIALATEDDGNSWLPGNELIRVVRRNGFDFNERKTRMQYKDSRQEVTGLSVNRKVNVPASYRYTVRAMASSLFRTGKFEHIIKYKSASGDEIVSKCDGKINQLLGMLSFIHQVDVYNEALAVKNNHPIIETPGRLELYRRVIYFDAFYAPERPIIVCEGKTDNTYIKNAIHRLSQNYPLLGGLDSEGKPQLKIRLFKYADRRTASITKLGGGVGGLCHLIKYYKADIASKFSAPRPKHPVIMLVDNDSGADAIYGAIAGILNVQKPKGKRPFIRVYENLYVVPTPFGSNGEKTSIEDFFDKATLAVQLNGKSFERKNDADNEHHYGKAAFARDVIAKNAAAIDFNGFKPILDRIEAAIKDYATQTQ

SEQ ID NO: 964 - protein, 583 aa, unidentified
  source 1..583: note = Related to NZ_CP019236.1; note = Rhodoferax sp.
MTLANLKGATDLHGVAKLLDVKAGMLSYILYKQPKPDLYKKFEISKKTGGVREISAPCPHLKLIQQRLAAILLGCSLELKAKHATAVKNKNYVRREVSHGFTKGRSIVSNGEEHITRRFVFNADLSDFFGTINFGRVRGFFIKDENFSLFPAVATILAQIACSENKLPQGSPCSPIISNLIGHLLDMRLVEFALRQGCTYTRYADDLTFSTNKPEFPTAIAVQKEGDPHKWIPGGGLQKIVQKCGFSLNEKKTRLQYRDSRQEVTGLTVNKKVNVPATYRYAARAMANNLFKTGKFQHTIHFTDKDGAAQELRRDGHAGELRGMLSYVDQIDLYNSCREEANSLVPLGAPGRLQLYRRVIYFDSFYALSKPMIVCEGKTDNTYIKHAILQLAGHYPTLASASITGGKPELKVRLYKYADRRSAVVTDIGGGVGGLCHLIKNYHADVVNKFRAPRPMHPVILLIDNDLGADSIYGAISGLLKIKKPKGLRPFIHLFSNLYVVPTPLGPGNSQTMIEDFFDAATQAVTLNGKTFSRQDEDSSKHYGKAAFARDVVAKNADSIDFNGFRSILDRLRDVLLDYPTRP

SEQ ID NO: 965 - protein, 633 aa, Achromobacter sp.
  source 1..633: note = Related to CADIKS010000002.1; note = Achromobacter mucicolens
MAKEGNVRDICPRRTLLLHNHSVILLKECPQALSPEMALKKIEELKKVRTRIELAELLEVKPSRLAYELYKKKDSDRYQHFEIPKKYGGTREILAPNPTLKTIQRRLAIYLQDCLEEVIASTDSERHRGGGIKLGFSHGFMRDRTIITNARPHRAKRFVFNCDIVDFFGTINFGRVRGFFIKDKQFALAQEIATFLAQISCFQNVLPQGSPCSPVIANLIARKLDIKLGRLAYQTGMTYTRYADDLTFSTNKKIFSHSVGVQDASGFWRAGTELTKIVRASGFELNPNKTRLQQRDSHQEVTGLTVNRKVNTNSSYRYTARAMVNSVLKTGEFCFSYSIKNAPESLEAPEKKKGNLKQLLGILSHIDYVDRFNFELRKSNLAHLANKKNQKAVDDQLFPSLSRQETFKKFVYFYWFYACDEPVIICEGKTDNIYLKCAIKALKLRYPDLISNDKNNEKLKIRFFEYKESRAKSLSQLSGGVGGLCHFLENYHKYLNGAFFAPKPKHPVIVLIDNDNGGQSVYSKVAGITKKKKPTGKESFIRIEKNLYIIPTPLGPEGQQTAIEDFFDKAVLDEQLNGKSFSRDDDFDKSKFYGKAAFSRDVVLKNREKIDFQGFDSILSRINSVLRDYHLTP

SEQ ID NO: 966 - protein, 567 aa, unidentified
  source 1..567: note = Related to NZ_CXOO01000052.1; note = Limnohabitans sp.
MSKLQHLKSTSNLHSVANLLGLKPAHLAYNLYKKPDAEKYTKFEIPKRYGGKRIISAPNADLKHIQRLLAAVLMDCLNELNAKYNRQAAHGFITQRSILTNAHQHRGRGHVLNLDLQDFFGSINFGRVRGFFIADKDFSLHPAVATVLAQIACFENTLPQGSPASPVISNLIGNVLDTHLIKLARKHGCVYTRYADDLTFSTNLPNFPEELAYSKFGVWTTGTSLLKVIKQSGFDVNTSKVRMQLEDSQQNVTGLVVNQKANTAASYRSSIRAMAKNLFKTGNFTHDSFIKDSAGNVSKNSELGTVAQLQGMFGHIKHVDEFNLQIRRQEIPTGRASLYKRFFLFSQFFCSSKPVILCEGKTDNIYLLHAIRSRANHFPQLAETNATGSISLLIRIFKYVERKAGRTLGMSGGDGEISKFIGTYLTEVSKHFKAPGVSQHPVILVVDHDSGGKGPYETASKKVGKTLDILNPFEHVAANLYLVATPLPFGATSSCIEDCFQPTTLAKTLGGKTFNYKTKHLKPTEYGKSYFAEHVVQADAGTIDFSGFDPLLDRINSVIVHYAKLPK

SEQ ID NO: 967 - protein, 588 aa, unidentified
  source 1..588: note = Related to NZ_LOJI01000040.1; note = Polynucleobacter yangtzensis
MTLLAGLKSARTIQDVARLLNTKASALAFMLYKESPDTLYTEFSIPKKYGGFRAIAAPIPKLKLVQRKLADILQICLQEINEKENYSDKVAHGFKRGRSIVTNAQCHKRKRLVFNLDLEDYFGSINFGRVRGFFMADRNFQLHPSTATILAQIACYKNSLPQGSPCSPIISNLVGNILDVRLVRLAKESGLTYTRYADDLTFSTNAQSFPESIAVSSADSLHSWMVGKGLNELIERSGFRVNSSKVRVQYRHSRQEVTGLVVNKRVNIPSTYRRKVRAMVYSLVTEGYFEFKEIGEKDAESAQPTKKGSLNQLHGMLSYIYQLDSSNRKELSAANFKDGVPVSERDVPLTTTEKVFRRFLFFKNFYSTQKPVIICEGKTDNIYLHYALLSLATRFPNLVVKQAQKYSFAFSLHRYSRSSTERILGIQGGSGDLKMFMLNYLTSYNFFKVKVKKQPVILLIDNDDGANDIFSMAKNYLGYKPTGQEPFLHVDGNLYLMPTPLLNSRTKSTIEDFFDDKVKSVQVSGRSFDPKRKHNGSASTYGKNEFAREVVAKQANSIDFSKFSYVFKNIEDIIADFQSKVAAGKIKP

SEQ ID NO: 968 - protein, 577 aa, unidentified
  source 1..577: note = Related to NZ_AFWT01000016.1; note = Thiorhodococcus sp.
MSKLSRLRACKDLRDLAKLLGFRPSAVSYILYMESDSAKYREFEIPKTTGGTRQISAPHPKLKLLQTRLSNLLQDCLGELDKLNADAHRLDSLAHGFKRGRSIVTNAQRHRNRRWVFNLDLDGFFNDINFGRVRGYFIKDRNFLLQPKVATVIAQIACHKGSLPQGSPSSPVISNMVGRIIDLRLCRLAARAGCRYTRYADDLTFSTNKRSFPEAIAARDSQNDSSWSPGDELIKIIKESGFSINSKKTRMQYRESRQEVTGLVVNDRVNVPATYRHTVRAMVHRLCMTGTFDIQKATISSTKQSNQSDPGNLRQLHGMLGFIDAVDRFHQKNKPNDAHDKQKPRASELIYRRFLIYQNFYAAEKPVLICEGKTDNIYITCAIRSLAQQFPDLARIDKSGKISLEIRRFRYAKTSTGRILGLNDGGAPVLKNFIWEYKKEISKFRATISKHPIIILIDNDSASKQIFASLGKITTSKVCGNEPFIHAFANLYVVATPIPEGKDSSDIEDLFDQETLGATIDGKRFSRIVEDESRHYGKAVFAYKVVKPRADKIDFSGFRELLARFVRAIEDYQAKIH

SEQ ID NO: 969 - protein, 560 aa, unidentified
  source 1..560: note = Related to NZ_BCTR01000096.1; note = Sphingomonas azotifigens
MATSLSDVALLLGFHPKAFAWVIYKQTAKYAVFDIPKSRGGTRTIKAPEPRLKNIQARLAELLQDCIADINEARSQKEKLSHGFRRGHSIITNAYQHRGRRFVLNVDLADFFGTINFGRVRGFLITNRHFALHERAATVIAQIVCDDNSLPQGAPTSPVVSNLIAHILDVRLAKLARRFGLHYTRYADDLTFSTNSRDFPEEVAVPNDAGQWVAGPALDTAIQRAGFALNPQKTRVQMRQSRQDVTGLIVNEKVNIRSEYYREARAKCDHLFRTGAYRTKQLVRKDDGTAAVEEVPGTLDQMEGVLSFIDSVKRYKRPADRDHKLTGSEQTYRKFLVYRYFYAPSMPVILCEGKTDNIYLRCAIQAFADDYPGLAEKQGSAATLKVRLFNYSEHTKRLLGIAGGSGHFNNLIRDYRKNLKPFTAPHAERFPVILLVDNDSGADGIYKVVKATTKTACDGKESFYYVGDNLYVVPTPLGPSDAQTMIEDFLPAKWRAEKLGGKTLNLGKDCDITKEYGKALFAEHVIKRNRKDVDFTAMRVILDRIVTVIDDYAAMMGAGP

SEQ ID NO: 970 - protein, 572 aa, unidentified
  source 1..572: note = Related to NZ_WOTA01000025.1; note = Acetobacter oeni
MVGGNVKRIDQLRLTNCLADVAELLGFQPKLFAWVIYKQPYKYATFEIPKSRGGVRLIKAPEDRLKNVQSRLAKLLQDCISDINEKREQTEKLSHGFRRGYSIITNAYQHRSRRFVLNVDLTDFFGSINFGRVRGFLMTNKHFALQERTATVIAHIVCDDNSLPQGAPTSPVVSNLIAHILDVRLAKLARKYGLHYTRYADDLTFSTNSRSFSTEVATPDAAGHWVAGKALEKVITRAGFSLNTSKTRMQLQQSRQDVTGIIVNKKVNIRSEYYREARAKCHHLFCTGTYLTKKVVRKEDGTSAVESVIGTLDQLEGILSFIDSVKRFKMTFDREYKLTGPERLYRNFLYYRHFYAPPLPMILCEGKTDNIYLRCAIQKFASDYGQLAQEEGDAIKLRVRLFNYSDHTKRLMSLGGGTGQIKDLLSNYCKIMKPFLSMGERNPVIVLIDNDSGAKSIFSWISSTTGRRCDGKESFYYLGENLYLVPTPRTDEDGDTMIEDFLPLKWREEKLGGKTLNLGSNINRDKEYGKALFAEYVIKKNRKDVDFVQMKLVLDRIVAVINDYAAMMATST

SEQ ID NO: 971 - protein, 568 aa, unidentified
  source 1..568: note = Related to NZ_JAKREV010000015.1; note = Sphingomonas hankookensis
MKRIDDLKMATSLTDVALLLGFHPKAFAWVIYKQQPRYTVFEIPKSRGGTRTIKAPEPKLKNVQARLAELLQDCIADINEARSQKEKLSHGFRRGHSIITNAYQHRSRRFVLNVDLADFFGTINFGRVRGFLMTNKHFALHERVATVLAHIVCYENSLPQGAPTSPVVSNLIAHILDVRLAKLARRFGLHYTRYADDLTFSTNGRTFPEEVAAIDADGQWIAGPTLKGAIQRAGFELNPVKTRMQLRQSRQDVTGLIVNEKVNIRSEYYRDTRAKCHRLFKTGKYQIKQTIRKDDGSTIVEDADGALDQMEGVLSFIDSVKRHKQVVERDHKLSGVEQIYRAFLLYRHFYAPSMPTILCEGKTDNIYVRCAIQAFADDYAKLADKKGEAVSVKVKLFNYSDHTKRLLGIAGGSGHFNNLIKDYRKNLKPFTAPYAERFPVILLIDNDAGADGIYKVVRAITKGTCDGKDPFYFIGDNLYVVPTPLTDTGAATMIEDFLPSKWRDEKLGGKTLNLGKDIDITKEYGKSLFAEYVIKKNRKIVEFDAMRAILDRIVTVIDDYAAMMAAGS

SEQ ID NO: 972 - protein, 418 aa, unidentified
  source 1..418: note = Related to JACTGR010000001.1; note = Sphingomonas sp.
MKRIDELKLATSLSDVALLLGFQPKPFAWVIYKQPAKYSVFEIPKSRGGMRVIKAPEPKLKAVQARLAELLQDCIADINEARSQTEKLSHGFRRGHSIITNAYQHRSRRFVFNVDLADFFGTINFGRVRGFLMTNKHFALHERAATVLAHIVCDDNSLPQGAPTSPVVSNLIAHILDVRLAKLSRRFGLYYTRYADDLTFSTNSRTFAPEIAINDGAGGWAAGPALIKAIQRSGFALNPKKTRMQLRQSRQDVTGLVVNEKVNIRSEYYRDARAKCDRLFKTGKYQTKHLLRKEDGTFAIEELDGTLDQLEGTLSFIDSVKRHKQTIGRDHKRSGAERLYRSFLLYHHFYASQMPVILCEGKTDNIYVRCAVQAFVADYAKWPWRRKMGLNSRYGCSTIQTTQSACSVSLADQVTLMA

SEQ ID NO: 973 - protein, 562 aa, unidentified
  source 1..562: note = Related to NZ_LR733875.1; note = Sphingomonas sp.
MAYILGVTPKGLAYTIRIQPLANRYSSFTIPKKTGGSRNIDAPEVGLKLVQSRLADVLQDCISDIDKERGYPEKISHGFRRGHSIITNARNHSNRRFVLNVDIADFFQTINFGRVLGYFLKNRDFCLDKNAAVTLAQIACHNNGLPQGAPSSPVISNLITHILDIRLAKIAKNYGCYYTRYADDLTFSTNLRDFPEKLARLDSVSGKWIVGRSLEKAITQSGFALNASKTRVQLKQSRQDVTGIVVNDGVNVRREYYKNARAYCAELFKTGKFYINVKDIDENGQVSLKKIDGTRQQLKGILSFIDQVKSHRPKITLEKTTPDRKGVKGFNLLYKRFFYFDAFFANDKPMILCEGKTDNIYIQSAVAAMFNKFPTLSGEKNGKADFKFKLFNYTKTSLKIIGIGGGTGQLNAFISNYKSNVGDFKYKGEKHPVIIVIDNDSGSSSIYKTMKTILNIDVKGDKPFYFMGENLYIVPTPRGVNGEETMIESFLPQKWIDYKLNGKKFNMNNKGLDTKAEIGKALFAEYVVKKFKKDISFDNFSPLLDNITSAINDYYAMVAIKP

SEQ ID NO: 974 - protein, 447 aa, unidentified
  source 1..447: note = Related to SCRQ01000059.1; note = Sinobacteraceae bacterium
MLIAKECQPAAYFSLQHGVMNRLALLRSAKTINDLADLLGVKHSGLSFILYKKPTETKYQSFTVPKKAGGVRAIHAPTSELKLFQRRLADLLQECLNEIEATFRKTSEDRRPEKISHGFHPGRSIITNAIQHRRRRYVLNVDLKDFFGTCNFGRVRGLLIKNEHFLLHDRVATVIAHLACHEGALPQGAPSSPVISNLIGRVLDIRLVKLANSVGCSYSRYADDLTFSTNDRQFPPQLAAEIPPSSGRWEPGPALLGEIASSGFSLNPKKTRMQLHESRQMVTGLVVNTRVNVSSDYRHLIRAMVHRLLTKGEYEISTAAGPIKGTTEQLQGMLSFIDSIDEFNRKRFKERDVPFPRQRDETFRDFVFYRHVYQASRPTLICEGKTDNVYLTHAIRAMAKLFPDLASPGFYPVSADTSKKAEDGHKECLCRSEGSTALSSSVVLWSR

SEQ ID NO: 975 - protein, 599 aa, Pseudomonas sp.
  source 1..599: note = Related to AP019411.1; note = Pseudomonas syringae
MSELYQLQKATSLHDLAAILNYTPSALSYLVYKRPGKYTKFTIPKSNGSPRQICAPCDELKALQKQVKTLLDKCLATIESTGKARGAISHGFKAGHSIITNAETHKKRRYVFNVDLEGFFDSIHMGRIRGFLINNKDFQLNPKVATVLAQIMCHDDKLPQGSPTSPVASNLIGHLLDLRLVQLAKRNGCSYSRYADDLTFSTNKKNFPEEIASSDEGGNSWAAGPSLTKIIQKSGFELNHSKTRMQYRTNRQSVTGLVVNQVTNTPAEVRRTARAMAFHLFNKGYYLIKNEVVGEEKATAPMIRDYTQLASLDGLFSFIYMVDQFNRKKLVKNSTVKIESIKKTALEIIHGDFLFYKNFYASPTPTIMCEGKTDNIYLACAMKSLMERFPRLCKPNKDGKPALRVRFINYSELTHRALGLNGGSADLAAFIRSYAKNCGKYKAHPPLSPTIIVVDNDSGSDPIFKAIKDVTGNRYVIANGKGTILDKSQTTYYIAQNLAVVLTPLKKDGKPTMMEDFFPAKVLQTPWNNKTFEILTKSPNKNTYSKNTFAQKIVKADRANIEFKGFSPILKSISQIIRCYHVDKSLIDKSLRPKSINAQ

SEQ ID NO: 976 - protein, 598 aa, Pseudomonas sp.
  source 1..598: note = Related to NZ_CP060289.1; note = Pseudomonas protegens
MSELHQLRKATSLHDLAAILNYTPSALSYLVYKRPAKYTQFSIPKSNGSTRQICAPCDELKALQRRVKILLDECLATIENSSLARGAISHGFKQGHSIITNAETHKKRRYVFNVDLKGFFDSIHMGRVRGYLISNNDFKLNPNVATVMAQIMCHDNKLPQGSPTSPVVSNLIGHLLDLRLVQLAKRNGCSYSRYADDLTFSTNKKTFPKEIALSDENDNSWAAGPALTKVIQKSGFELNHDKTRMQYRTNRQSVTGLVVNQITNTPAEVRRTARAMAFHLFNKGHYLIKGEATGAEKAKALEVKDYTQLASLDGLFSFIYMVNNFNRKKIVENSSIKIESFKKTSLEMIHGDFLFYKNFYASPLPTIMCEGKTDNIYLTCAMKSLIDKFPQLCKLNKDGKPALKVRFINYSELTHRVLDLNGGSADLAAFIRTYAKNCGKYKAHPPLNPTIIVVDNDSGSDPIFKAIKDVTGNRYSIPNGKGAILDKTKTTYYIAQNLSVVLTPLRKDGQPTMMEDFFPANVLKAVWDNKTFEILSKSPSKNTYNKNTFAQRIVKADRPNIEFKRFAPILRSISEVIEGYHVEKSVIEQNLPPKPAKP

SEQ ID NO: 977 - protein, 596 aa, Pseudomonas sp.
  source 1..596: note = Related to NZ_FYDY01000001.1
MSKLHQLQKATSLHDLAAILNYTPSALSYLVYKRPGKYTQFSIPKSNGSPRLISAPCDELKALQKQVKVLLDECLATIEKVGAERGAISHGFKDGYSIVTNAEVHKKRRFVFNVDLQGFFDSIHGGRVRGFLISNKDFKLHPKVATVLAQIMCHDDKLPQGSPTSPVASNLIGHLLDLRLVQLSKKNGCSYSRYADDLTFSTNKKIFPAEIASSDNGSNPWVAGPALAKIIKKSGFKLNHDKTRMQYRTNRQSVTGLTVNQITNTPVEVRRTVRAMAHCLFNNGFYFVKDKASVSDKKNKPEIKDHTQLEKIDGYFSYIYMVDQFNRKKIVDNSSVKIESIKKAALEKIHGDFLFYKNFYASSQPTILCEGKTDNVYLTCAMKSLMDRFPRLCKPNKDGNPALRVRFINYSELTHRVLDLNGGSADLAAFIRFYAKNCAKYKAHPPLHPTIIVVDNDSGSDPIFKAIKESTGSRYSIANGKGTVLDKSQTIYYIAQNLYVVLTPLKGGQPTMMEDFFPSSTLQKVWEGKTFEVLSKPSKTTYNKNTFAQRIVKANRTDIEFKRFAPVLRSISEAIKDYPRIKKSVIEQNLALKSKA

SEQ ID NO: 978 - protein, 587 aa, Pseudomonas sp.
  source 1..587: note = Related to NZ_CP021132.1; note = Pseudomonas fragi
MSTLHKLQQASSLHDLAAILNYSPSSLAYLIYKKPVKYKQFEIPKSNGSPRVINAPCDELKALQRKIKLLLDKCLDAIEQAQGVRGSISHGFRRGHSIVSNADVHKRRTYVFNVDLEGFFDSIHIGRIRGFLITNNDFRLHPNVATVLAQIICHDDKLPQGSPTSPLASNLIGHLLDLRLIQLAKKTGCSYSRYADDLTFSSNKSEFPAEVSYKIDDGHTWIPGSSLLKVIYKCGFKLNHNKTRMQYARGRQSVTGLTVNQTPNTSAELRRAVRAMTHSLFLDGQYHTIKQPGDNDDSEKITKSYTQLAPLEGYFSYIYMVDNFNRKKIIENSSTKMENIPKTALENLHGDFLFYRYFYANSKPTIVCEGKTDNIYLTCAIKSLMGSFPRLCKSNKEGKANLKVRFINYSELTHRMLGLNGGSADLAALIRAYAKKCAPYKAHPPLHPTIIVVDNDAGSDPIFRAIKDTTGNRYAIPKGKGTVLDQSKTLYYIAQNLYVVLTPLKKDGGPTMMENFFTTKLLASRWEGKEFEVFNKNSPSGTYSKQIFAQRIVKSDQANIDFRKFKPILSSITEAIRHYPAIKVPKK

SEQ ID NO: 979 - protein, 584 aa, Pseudomonas sp.
  source 1..584: note = Related to JACYWS010000004.1; note = Pseudomonas syringae
MPTLKKLKSLTSLHDLAAMLNYTPTALSYLVYKRTGKYTSFQIPKSNGSPREILAPCDELKALQRKVKSLLDDCLDSIEKSKPLIGSLSHGFKSGHSIISNAEPHTKRLYVFNVDIKGFFDAIHMGRVRGFLITNRDFSLNPKIATVLAQIICHDDKLPQGSPTSPVASNLIGHLIDIRLVQLAKRSGCTYSRYADDITFSTNKSEFPAPIAYRMDDTHSWIPGDSLLKIIHRCGFELNHDKTRMQYARERQSVTGLTVNKTSSAPAEFRRTIRAMTHKLFMDGDYFIPDEPKHQSSSRVELNYTQLNRLEGMHSYLHMISRFHRQKIVDNTVRRPEDIPLTAMEKMHGDFLFYKYFYASELPTIVCEGKTDNVYLTCAIKSLHAKYPRLAKPDSKGVMRLRIRFLNYSNLTHRVMGLNGGSADLGHLIRRYAKQCARYKGHPPLKPTIIVVDNDSGSQPIFQAIRDTTGDRYLTPSGKGKTFDKSKTVYYIAQNLYVVLTPLIKGGDSMMENFFPPAVLNTIYNGKKFEVVHKGPKGSAYSKHQFAQYVVKPNQKKIVFSRFSSILKSINSAIKDYPLIKITP

SEQ ID NO: 980 - protein, 580 aa, Pseudomonas fluorescens
  source 1..580: note = Related to CABVHP010000013.1
MSTLHRLQKAATLHDLAIIFNYTPASLAYLIYKKTNKYTEFDIPKSNGSKRRIMAPCDELKTLQRKIKKALDECLESIEKKAPSPGPISHGFKKGHSIASNADPHKKRLYVFNIDIQDFFGTIHMGRIRGFLISNREFNFHPKIATIIAQIICHDNKLPQGSPTSPIASNLIGHLIDLRLVQLAKKTGCTYSRYADDLTFSTNKPKFPKEIAYRLEETQSWIPGTPLLKIMHKSGFSLNHEKTRMQYACSQQAVTGLVVNQKANTPAIFRRNVRAMTHKLFLDGDYFIHENHKTKEKKELTYKNLNQLEGMFSYIYMIDRFNREKIVNNSNKRHEDFPKTAIERLHGDFLFYRYFYASPQPTIICEGKTDNVYLTCAIKALHVNFPRLAKTDPEGKLKLRVRFLKYSNLTHHVMGLSGGTPDIGHFIRNYAKQCAKYKAHPPLHPTIIVVDNDKGSDTIFKAIKDVTGTTYSIPAGKGTTLDKSKTLYKIAQNLYVVLTPLSGGNDTMMEDFFHRSVLSMPYEGKNFEVFRKGPPGTTYNKNTFALHIVKANQKTINFSKFSPILKSINLAIRDYPKIKL

SEQ ID NO: 981 - protein, 576 aa, Acinetobacter sp.
  source 1..576: note = Related to MELH01000002.1
MPRLRALQKATTLHDLAVILNYSPTALAYLLYKKTGKYSRFQIPKKNGTPREILAPCDELKSLQRKLKKLLDECLESIEKKRSPLGSLSHGFKANHSIITNAEPHRKRLYVFNVDIKGFFDSIHMGRIRGFFISNKDFNLNTKTATILAQIICHDDKLPQGSPASPVASNLIGHLIDIRMVQLAKRLGCTYSRYADDITFSTNKSEFPPEIAYRLENSHDWIPGGALLKVIYKSGFGLNHEKTRMQYARAQQTVTGLVVNQSTNTPAEFRRKVRAMTHKLFMDGEYYVHEENGPRSPKKTELNHSKLNKLEGMYSYIYMTDCFNRKKIIENSNRRHEDFPLSSLEKLHGDFLFYKNFYASPAPTIICEGKTDNIYLTCAIKSLHEKFPRLAKPDASGKVKLKVRFINYSELTHRVMGLNGGSSDLGHLIRRYAKQCGSYKAHPPLNPTIIVVDNDSGSQPIFQAIKDVTGDRYSIPSGKGKIFDKSQTLYKVAQNLYVVLTPLLNGKDSMMEDFFPPAVLRATYNGKSFEAVSPGPKGTTYSKHQFSQHVVKPNQKIINFSRFSHILKSINLAIRD

SEQ ID NO: 982 - protein, 435 aa, Pseudomonas fluorescens
  source 1..435: note = Related to CABVHX010000009.1
MCHDNALPQGSPTSPFASNLIGHLIDIRMVALAAKNGCTYSRYADDITFSTSKKNFPTQIAYCIDESNTWIPGSAVLKIISKCGFSLNHDKTRMQYTSSQQSVTGLVVNKIAHTPADYRRTVRAMLHRLFLDGTYFTIKKPKHLNKTERITIPFGQLNKLEGMLSYIYMVDRYNREKIVNNSKTKHEEMLMTSIEKMHGDFLFYKYFYAGDTPTIVCEGKTDNVYLTCAMKSLFAKYPELVSVDKDGKRILKSRFINYSELTHRMLNMFGGSADIAQFIRFYARRCKKYKAHPPLHPTIVVVDNDTGSKEIFGAIKDTTGGRYIIGAGKAQALDKSRTLYYIAQNLYVVLTPLNAGKDTMMEDFFPTTVLTMPHKGRSFEILKGVKPGNTYSKHIFAQHIIKANQKSIDFSGFSPILDSMKAALLDYPKIKLIPA

SEQ ID NO: 983 - protein, 583 aa, Pseudomonas sp.
  source 1..583: note = Related to NZ_JACAOZ010000012.1; note = Pseudomonas edaphica
MSELRKLQKAATLHDLAVILNYEPKFLAYLIYKKTNKYSQFTIPKSSGAPRNISAPCDELKALQRKVKVLLDSCLETIALQVPNLATLSHGFKKDHSIITNADKHRKKLYVLNIDIQDFFGSIHVGRLRGFFITNRSFSLQPKIATILSQIMCHEDKLPQGSPTSPVASNLIGHLLDVRMVSLASKNGCVYSRYADDITFSTNKLKFPQSIAYKIDDTHDWIPGSDLLKIISKSGFGLNHNKTRMQYNRAQQTVTGLIVNSITHTPANFRRTVRAMAHKLFLDGDYYVQEKPKHLKKEKISIPRGQLKKLEGMFSYIYMVDNFNRAKIVSNSSKKQEEFSLRSIERIHGDFLFYKNFYGASAPTIICEGKTDNVYLTCAIKSLHAKFPELASLTKEGKTRLNLRFINYSNLTHRVLGLNGGSADIGLFIRNYARQCGKYKAHPPLNPTIVIVDNDSGSKPIFSAIKDVTGSTYAIPKGKGTVLDTSKTLYKIAQNLYVILTPKIGGKDSMMEHFFPAATLATQYKGKTFEVVRSGPPSTTYSKHVFAQNIIKANQKNIDFSGFEAILGSIKLALDDYPKIITP

SEQ ID NO: 984 - protein, 580 aa, Pseudomonas sp.
  source 1..580: note = Related to MUHV01000013.1
MLSLYALQKAKDLHDVASILGYEPKFLSYIVYKKNPKYTYFTIPKSTGAPRNIAAPCDELKTLQKKVKQLLENCLVSIQLQGTAQGSLAHGFKKGHSIITNAEPHKRRRFVFNIDISNFFGSIHVGRIRGFLISNNSFKLEPKVATILAQIMCHNDALPQGAPTSPIASNLIGHLIDIRLVNLAAKYGCIYSRYADDITFSTNKREFPEQIASNIEKDEWIPGTSLLKAIHKCGFSLNHNKTRMQYCENQQTVTGLVVNKTLNAPATYRRQVRAILHKLFLEGKYHLKDKPTEKNHSNISIYDYKKLENIEGMLSYLYMIDSFKRKKLSLNSKIRCEDMERTSLEELHGDFLFYKYFYANNKPTIICEGKTDNIYLGCAMKSLWKKFKRLAKEEDGDIKLKVNFINYTELTHRVLDLYGGTADISNLIRHYAKRCAKYKAHPPLKPTIIVVDNDSGSDKIFKAIKETTGKQYIITKGKETLLDKSRSIYYIAQNLYVVLTPLKNGNDTMMEDFFSKSTLKTKVDGRFFEVYKKSTTGTYNKNTFAQKVIKAQRKRKIFNAFTPILASITAAIVDYSKLKP

SEQ ID NO: 985 - protein, 580 aa, Pseudomonas sp.
  source 1..580: note = Related to NZ_SOCQ01000001.1; note = Pseudomonas helmanticensis
MSLHVLQKAKDLHDLARILNYEPKALSYVLYVKKPQYTSFTIPKSSGAPRHISAPCDELKTLQRKVKRLLDSCIASIELQGPAKGALAHGFKKGHSIITNAEPHKRRRFVFNIDITDFFGSIHVGRVRGFLITNKSFQLAPKVATILAQIMCHENSLPQGAPTSPIASNLIGHLIDIRLVSLAAKLGCIYSRYADDITFSTNKKDFPSSIAIEVDENEWVPGTTLLKIIYKCGFSLNHKKTRMQYSDNQQTVTGLVVNKSINAPAQYRRQVRAMLHKLFLDGNYHRKDEPRYKAHANSTIYDHKSLEPLEGMLSYLYMINNFKMDKLSKNGKIRKEDIKRTSLEDLHGDFLFYKNFYANKKITILCEGKTDNVYLSCAIKSLHKKFIRLAKTTGGKVELKTNFINYSKLTHRVLDLNGGTADIANLIRSYAKRCGKFKAHPPSQPTIIVVDNDSGSDPIFKAIKDTTGKRYEIANGRGTSFDKSRPVYYVAQNLYVVLTPLRNGQDTMMEDFFSKNILKTKLDGRSFEVYKKGLPGKTYSKHTFSQKVIKAQQKRKIFNGFVPILSSISAAVVDFSKLKP

SEQ ID NO: 986 - protein, 586 aa, Pseudomonas sp.
  source 1..586: note = Related to CP050147.1; note = Pseudomonas aeruginosa
MLSLNALQTAQTLHDLAHILNYEPKFLSYILYKKPVKYSHFTIPKSSGAPRDIAEPCEELKALQRKVKELLEVCLKTINNQKPQYGSLSHGFKKDHSIITNAYPHRKKRFVFNVDISDFFGSIHVGRVRGFFITNRDFRLSPKVATILAQIICHEDALPQGAPTSPITSDLIGHLIDIRLVEIAERYKCVYSRYADDITFSSNEKNFPSAIAFPVEGTTDWVPGRALLKAIHKCGFGLNHNKTRMLYRESQQTVTGLVVNQKVNPPATYRRQIRAALHKLFLDGQYFLQEKPRHSSSSKVDLGIDSLEKIEGMLSYVYMVDKFNRSLTVETSKSKKEEEIPKTSLEKLHGDFLFYKYFYAASKPTIICEGKTDNVYLTCAIKSLYKNYPELAKVSNDELKLNVKFINYSDLTHRVMGLNGGTGDIANLIRAYAKQCGKYKAHPPLHPTIVVLDNDSGSQQILNAVKDLTTPRYDVPNGKGTKLDTTQDFYKIAQNLYMVLTPLDKGKSTMMENFFPTKVLNTIYKGKTFEILKKSPPDQTYSKHIFAQHIVKAEQKKIDFVGFSPILDSITKAIKDYPTITLPKIK

SEQ ID NO: 987 - protein, 582 aa, Pseudomonas sp.
  source 1..582: note = Related to QJUQ01000005.1; note = Pseudomonas kirkiae
MSKLNILKNAKTLSDLAHLLNYKPKYLSYIIYKKQNLYHQFTIPKSSGAPRTILAPCDELKALQKKVSELLQDCLENMNQDLQIHSSLSHGFMRGHSIMTNADNHRKKRFVFNIDIQDFFGSIHLGRVRGFFINNKSFQLDPKVATVLAQIACYNNSLPQGSPCSPVVSNLIGHLIDIRLVSIAKKAGCQYSRYADDITFSTNKTSFPSTIAIQDETTGNWSVSEQLAKIIKKCGFSLNTTKTRMTYRKSQQTVTGLVVNQKVHTSASYRKQARAMAHKLFNDGSFSIPDKASLAAKENSPKMIAGTLNQLEGIFSHIYMVDQFNRNKLRGNNGIRGEDLELTAIEKTHRDFLFFKHFYSTSLPTIICEGKTDNVYIQCAIRSLATQYPELATIDAQGKRILKVRFINYSELTHRVLDLNGGTADIARLICGYVHLCGKYHNTAPKHPTIVLIDNDQGSQSIFSAIKSTTKDTHTAGTGKNKQIDRSKNFYYIAQNLYVVATPLINGKDSMMEDFFKNATLATLVDKKTFSVRTPTAPTGSTYGKHIFAQKVVKANRDKIDFSDFSPILDSLKSVIQHFKLP

SEQ ID NO: 988 - protein, 577 aa, Pseudomonas sp.
  source 1..577: note = Related to NZ_CP052862.1
MSKLAILRSAQGLHDLAELLAYEPKKLSYVIYKMPNRYTKFTIPKSSGGTRSIAAPREELKALQVKVSKLLQLCIHNMNADLNITTSLSHGFTKGHSIMTNADLHRKKRYVFNIDIENFFGSIHRGRVFGFLTKNKSFSLNPKVARALAQIACHDDALPQGAPSSPVFSNLIGHLIDVRLVELASKLGCSYSRYADDITFSTNKKTFPKEIALVSPSNEWVASPTLIKIVSKCGFALNENKTRMQYQESRQSVTGLTVNRKINSPAVYRHQARAMAHSLFNTGSFSVPDKDPKVKAKIPGTINQLGGMLSYIYMVNTFNRSKIVENSAIRDEDIKLSAMEKVHADFAFYKHFYGNQKITILCEGKTDNIYLQCAIKSLAKKYTILAKLNADGKAVLNVNFFKYTDLTHRLLGLYGGTGDIGELIKRYVSCCGKYKNHPFKHPTIIVVDNDEGSQKIFTALKVVTGNKYMIGSGKAQNLDKSLDFYYVAQNLYVVFTPLKMSGDDTMMEDFFTSDTLNTIVDGQRFSVVHKAPNQLVYSKHTFSQKVVKANQKTINFLGFTPVLDRIQKAAKHFYSLP

SEQ ID NO: 989 - protein, 588 aa, Pseudomonas fluorescens
  source 1..588: note = Related to JAGGOG010000003.1
MIKLKLLQSAATLRDLSIALGFQPKAVSFILYKYSKERLYTSFTIPKKSGALRDIHAPCAELKNLQSRVSEYLQDCIQEINESKKITQTLSHGFKRGYSIVTNASTHRKRRLVLNVDLEDFFGSINFGRVRGFFITNKNFSLNPNVATVLAQIICFDNKLPQGSPCSPVMSNLIGHLLDIKLAQMATSMKCTYSRYADDLTFSTNKQQFPLELVSPGDNHHDWVAGAKLEQIISKCGFKVNARKTRLQYQDSRQDVTGLVVNEKVNVPAPYRRQARAMAHRLFEHGSFQVERLSIKDKGQVTSERIEGSVDQLSGMFSYIAMVSQHNKDLVLKAGLKNAQTELSSIEKVHRDLIFYKSFYANPMPTIICEGKTDNVYLRCAIRSLAKQYPLLATFEDKNKLKLNVSLFKYSRLNSSLLGISGGTSNLKPFISDFSKNIARYKSRKSPFPVIILIDNDRGAKEIYSTIKTTTKTADTIDGSIPYYHIAQGLYVVPTPKLNGALESKIEDFFPLQTLKETLDGKKFNDKNEDLKADEYGKHFFAEHVIKKKQNSIDFTGFKPLLDIISSIISQSVALHMSAVVPPAPPKV

SEQ ID NO: 990 - protein, 588 aa, Pseudomonas sp.
  source 1..588: note = Related to NZ_LT607556.1
MIKLKLLQSAKSLRDLSIILGFQPKAVSFIVYKYSKDRLYTSFTIPKKSGSIRTIRAPCPELKNLQSCVSKYLQDCIDEINESKKITHTLSHGFKRGYSIVTNASVHKKRRLVLNVDLEDFFGAINFGRVRGFFITNKNFSLQPSVATVLAQIICYENSIPQGSPCSPVVSNLIGHLLDIKLAKIASEMKCTYSRYADDLTFSTNKQQFPLELVSPGNSPHDWVVGERLERVIQKCGFQVNSRKTRLQYRDSRQDVTGLVVNEKVNVPAQYRRRARAMAHRLFESGSFQVEKLSIKDDGRAVSETRAGSVEELSGMFSHIAMVSQYNNDVAIRAGIKDLRGELTSIEKVHRDLIFYKSFYANPMPMIICEGKTDNVYLRCAIRSLAKQYPSLVTVEAPDKVRLNISLFKYSKLNSQLLGINGGSPHLRTFITDFSKAAAKYKSRRSPFPVIVLIDNDKGAREIFSTIKATTRTTEKIDGSMPYYHIAQGLYVVPTPKLNGALESKIEDFFPVATLSETLDGKKFKAENEDLKADEYGKHYFAEYVIKKKQGSIDFSGFKPLLDVISTIVSQNIALQMSAVVHQVVVKK

SEQ ID NO: 991 - protein, 609 aa, Pseudomonas fluorescens
  source 1..609: note = Related to NZ_CABVHD010000002.1
MSEYIAPDRLCKRAVQMGRYEFRVRVSISLFMKIKLLQSASNLRDFAILIGFQPKAISFILYKHPKDRLYTQFEIPKKNGSFRTITSPCPELKNLQSIVSKYLQDCLAEIDERRPKKGTLAHGFKRGYSIASNAAVHRNRRYVLNLDLEDFFGAINFGRVRGFFINDRNFSLKPDVATILAQIICFENKLPQGSPCSPVVSNLIGHLLDIRLVALASKYGCSYSRYADDITFSTNKKTFPIELASSQLIPNVWSLGPELSSMIVRSGFTINVSKTRVQYSDSRQEVTGLVVNKKVNTVASYRRTARAMAERLFRTGSFQIEKLVLDSEGKSKSGTVSGTVEQLNGMLNFITMINRLSEEFRVSSDKHDLSSIEKVHRDLLFYKYFYANTMPTIVCEGPTDSIYLRCAIRKLAAHFPALAGFNKEGEIELKVCLFKYSDLNARLLKLTGGTAPLRTFASGFSSNAAKYKSRKSIFPVIVLIDNDKGAKPIYSFIKQLPGNGGVVDGSQKHYHVAQGLWIVPTPRSEGVPESKIEDFFEDKVLKMELGGKHFNPENMDLSDDEYGKQYFAEHVIKANHKSISFDGFAPILSTISSLITDSINQAKSALNRP

SEQ ID NO: 992 - protein, 578 aa, Pseudomonas sp.
  source 1..578: note = Related to NZ_UTCV01000055.1; note = Pseudomonas viridiflava
MKIKLLQSASSLRDLAILLGFKPKAISFLLYKVPKPYLYTQFQIPKKNGSTRTIMSPCAELKNLQSVISNYLQDCLEEIDEKRQKKGTLSHGFKRGYSIASNAAIHRNRRYLLNLDLEDFFGSINFGRVRGFFINDKNFSLHPDVATVLAQIICFENKLPQGSPCSPVVSNLIGHLLDIRLVGLASRYGCSYTRYADDISFSTNKKDFPAELAAPGSMPHEWHVGPVLTDVIMRTGFSINASKTRVQYSDSRQEVTGLVVNKKVNTAATYRRAARAMAERLFRTGSFQVEKMVLNSEGNSVSGVVRGSIDQLNGIFNFITMINRFSEVSRESIQKSELSSIEKVHRDLLFYKYFYANTMPTIICEGSTDNIYLRCAIRKLSANFPALAGVNEKGETELKVCLFKYSKLNARLLDLTGGTPPLRTFISEFANNAAKYKSRKSIFPVIVLIDNDKGAKIIYSLIKQLSGNASVIDGSQRHYHIAQGLWIVPTPKAVGVVESKIEDFFEDKVLEMELGGKHFNSENNDLSDNEYGKQYFAEHVVKANHKDISFDLFAPILSTISTLITDSINQANSARNRP

SEQ ID NO: 993 - protein, 579 aa, unidentified
  source 1..579: note = Related to JAHKPP010000027.1; note = Saccharophagus degradans
MKHLDLIKSCNNLQDVAFVLGYKPSRLAYILYKMPNSTKYREFEIDKKLGGKRKIFAPCPELKTLQQRLSKLLQNCIAVINKEKGIQKSISHGFKRDCSIFTNAEQHRNKRFVLNIDLEDFFGTINFGRVRGFFIKNKNFEIDENAATVLAQIACFNNSLPQGSPSSPVITNLISHTMDIRLAALAKQLKCTYSRYADDITFSTNEKNFPIELAEPTNAEGTEWKVGKKLERKIQKLGFSVNHKKTRLQFSQSRQDVTGLVVNKKVNIKSEYHRSARAMAHSLFKTGKFHIKENKQDANGNIVETKREGKITELGGYLNFIDMADKYRKRHVDDYKERRILSSREEIYRDFLFFRYFYQPSRPIILCEGKTDYIYLKCAIKSQFSKYPNLCQKNKQDEKILKVDFFKYTEVKSRLFSLSGGASTLSTFIGNYTKFCETYSVEISKNPVIIVVDNDMGVNKVFSSAKTKKYGKSKGSNIDGSLPFYHLGENLYLTAIPKKLGKDTAIEDYFKPTVLSTKYNGKTFNYKNKTKNVNPKTEYSKAVFAEHVIEKNRDKIDFSDFTPILDNICAAINDYSKKK

SEQ ID NO: 994 - protein, 604 aa, Chromobacterium sp.
  source 1..604: note = Related to NZ_LCWR01000203.1; note = Chromobacterium subtsugae
MQASPLKKFLTSSMQIPSLQDLKECRSRADIATLLGFKPAALTYILFKIDPPKKYRIFTIPKKSGGTREISSPCPEIKQLQKRLSYILSDAYTHLYDLNNTKKSVSHGFRKKHSIITNAVMHQKRKNILNIDLEDFFPTINFGRVRSFFIKNKDFNLHPDVATTLTQIVCHENSLPQGAPTSPIISNFIARPLDIRLLSLAKSHGCFYTRYADDITFSTNKSEFHSDIAKRNSIGNDWTIGGKLSSTIEKSGFILNDKKTRVMYSISRQEVTGLIVNKKINTRIEYRKLARSYVHSLINTGQYYLTSHEVENNKKIKVKRIGSIKQLDGILNFIYHTERFSNLKLNEKKNKKTNQNISYSNSEKTYRKFLKHTLFCENEFPFIICEGPTDDIYLKSALLMKGENFPLLYSSQSRPKIKLKFFKHSEKMRHLLGMSGGTGDIKNFIASYNKEIASEFKERPKNPIIVVIDNDQGSDEIFAWIKRNIEPFKSRKDSNVKGDENFYIVKPSLYIVPIPRINESDTAIENLLPSHLINNQIDGKEVNLSNKAVETNQINKMKLADHVRKNKKDIDFSGFNKLLESISMAYYHYKDETASVEKSYSHGM

SEQ ID NO: 995 - protein, 603 aa, Chromobacterium sp.
  source 1..603: note = Related to CP069442.1; note = Chromobacterium violaceum
MSNLNKLKNCETRADLADLLGFKASSLAYILYKMPPEKKYEEFLIPKKAGGNRSIAAPCPGLKKLQKRLCEILTECYQELYGGSGIKKSISHGFRPKHSVITNSLMHQKRRRVLNLDLKDFFPSINFGRVRGYFIKNKDFAISSDVATVIAQIACHDGVLPQGAPTSPVISNLVLRSLDLRLLTLAKKNSCFYTRYADDITFSTNKTSFPEEIAIKDQLTHKWDVGGELESTILRSGFQVNDNKTRVMYKVSRQEVTGLIVNKRVSTREEYRDQVRSMVYSLTKRGEFYFKQISIVDGQATTVKEPGDVWQLDGMLNYIYNVDMAYLTWAVGEKKVSEKKDKDVVYSAREQIYRKFLFYTLLCKSESPYVICEGVTDDIYIRCALSSLVGEFPTLRVASDEKKIKLKFFNHSKKMKYLLGMGGGTGDIKKFLIEYKAVIIKTFSERPSFPVIVIVDNDSGFRGSKGMYSWVRANAEAIDGPGFGIGPKAKEGFYFVKPSLYIVPIPRGEESEVAIEDLLPSKILTSKIGGKEVNLNNNGVSSSAEIGKTRLVEHVRKNRKDIDFGGFRPLLRLIEGALTHYDAATKSGVELVAGPNAVVDASM

SEQ ID NO: 996 - protein, 558 aa, unidentified
  source 1..558: note = Related to NZ_CP031124.1; note = Ephemeroptericola cinctiostellae
MTLLEQLRQARTLSDFAIILGYEPKKLSYLLYILPKEKPLYNQFSIKKRSGGERVISAPCEELKELQKRLLNLLDKCSQEINASKSKNHNSISHGFKKRHSIVTNAVKHKNKQYVFNIDLENFFGTINFQRVCGFFVKSREFQLHSKIAEIIALISCHQGSLPQGAATSPIISNLITHILDVRLVKFSTKIGVFYSRYADDLTFSTNKKNFPIEAALKSIELKHQWIIGKDLNEIINRSGFKVNSSKTRMQYKNSRQEVTGLIVNKKINTKREYKQKVRAMVHALVHRGEFNIFESDSGMYVKGSLNQLRGMLSFIESINPRDGCSKANEKMIGRDIYHKFLFYKYFYFGDKPILICEGKTDGVYIREAIKWFSGRDEFKGLKFDIFKYSKLNGRVLGLNGGYSDLTKFIAQYLTFFNVNTAPSSNMPVIVVIDNDDAAKKILKDERNENRDFYHKVKNLYVVTTPLVGTEVESEIEDLFKIEALRIELNGKTFHKEKDLNDGKHYGKHVFSEKIVKSKEYNIDFSGFEELLKRIQNAIKHFETQTNENRKSSIEPIN

SEQ ID NO: 997 - protein, 564 aa, unidentified
  source 1..564: note = Related to JAEMNU010000126.1; note = Rugamonas sp.
MSKLKDLKNAKSLTDLAKLLGFKPKALAYILYVMPKELRYAEFEIPKRTGGLRKISAPCSKLKKLQKNLSDLLLICCDELHSQRESQHNRKIYSAISHGFVRKKSIITNAANHRSRRYVFNLDLNDFFGTITFPRIRGFFIENKNFNLDPTVATLIAQIACNNDALPQGSPSSPVISNLLAHILDIRIVALVSKVGCTYSRYADDLTFSTNKNNFPEELAKFDDVEKLWSEGEVLRNIVNSSGYKINSSKTRMQEKRSRQEVTGLIVNSKVNSRVEYRKSVRAMAYSLFETGKFHRNISRLNDEGKIIVIKELGKMSELNGMLNFVDMLSDYNRGKDRTSSVGNEHLRKEPRKMVQLNTNERIYRDFLFYKYFYSSDTPTIICEGKTDYVYLQCAIRKLHQKFPMLAGVNASGKIEFKIKFFRFSALTSKLFGLSGGATQLKQFIIDYDDACSRFKAAGLNKPVIVVLDNDAEAKPIYSLIKNYLNINVDGSELFYEYKRNLYIVATPLLPGLKETMIENCFSTDVTEKILSGKKFSWANDYKKDETYGKKYLAEYVVKKSAIQ

SEQ ID NO: 998 - protein, 580 aa, unidentified
  source 1..580: note = Related to NZ_CP009962.1; note = Collimonas arenae
MTQLKNLKAAISLNDVATILGFTPKALAYILYKIPSAEKYAHFDIPKRSGGIRKISAPVARLKKLQTRLALTLQQCIIEINTSLKVKNVLSHAFTPKFSIITNAVNHRNKRFVFNLDLENFFGTINFGRVRGFFIENRNFQLHPDVATVLAQIACHENMLPQGSPSSPVISNLIGHILDIRLAELAHKTGCTYSRYADDLTFSTNKANFPSRVAQLINQTTHEWNTGKELERLILKAGFTINSSKTRMQYESNRQEVTGLIVNKKINTRTEYRHLVRAMAHNLYKTGQFYKTETVRDATGALVHTKVDGTVSQLNGMLSFVDSVGVYNLEKNEPKEFSVTKHKDAKPEAKLSAIETVYRRVLFFKNFYSPEYPVILCEGKTDSVYIKAALRKLVDDFPNLAVKKNGKVESKIRFFNYTKTADRIMNLNGGTGQINKFIVDYAPNCKKISAKGQLMPVIVLIDNDEGAKGIYSTVSKVTKKEVKNTDDFFFVAENLYIVATPLLEGKQSTIEDFFEPYVRDTKLHGKSFSGKNTFDPHTQYGKHYFAEYVVKKDESKISFEGFRPILARLDAALSDYKKKT

SEQ ID NO: 999 - protein, 601 aa, Pseudomonas sp.
  source 1..601: note = Related to RHQT01000006.1
MLGANAHISLPEWSTRLVTVIRVRVPINPFPSLIVMSKLASLKSATSLRELAVVLGYKPKNLSYILYIKPKKELYEEFEIPKKSGGVRKISKPCEELRALQRKLADFLQDCIDEINSEKKVKVSISHAFKRRHSIATNAFAHKNRRYVFNLDLEDFFGSLNFGRVRGFFMINKDFEFHEPVATVIAQIACFNGSLPQGSPCSPVISNLIGHVLDIRLAQLAKKTGCTYTRYADDLTFSTNKKVFPGDVAGFDVGASEWGAGRKLKKIIKDSGFVVNSKKTRMQFSTSAQSVTGLVVNKKVNVSYAYRRNVRAMADSLFKTGKFHLPGPEKKLGSVDQLSGMFSYIHMIIEFERAVRLNGSKDSQQERELLGIEKVYRQFIFFRKFYANPRPVVIYEGKTDAIYLHCAIRYFARIGKFPELAVKKGDEYHFNVEFFRFTKTTSRILGLSGGAEQLKNLIREYAQVCSLFKAPGNTKPVMMVIDNDKGAKNIYSLIKEFQKSEAPIDGSANNYNVVRNLFVIPTPKGKNKESKIEDFFDDQALASKLGDKTFDLNSDFDTANFYGKNAFAENVVNKNKDSINFVGFEPILARMVEVINYYKPS

SEQ ID NO: 1000 - protein, 555 aa, Pseudomonas sp.
  source 1..555: note = Related to CP066045.1; note = Pseudomonas stutzeri
MLGFKPKALSYILYIKNKADLYNQFLIPKKTGGARTILSPCDELKAIQRKLSDYLQDCINEINSQRKITFSIAHAYKKKHSIATNARVHRGRRYVFNADLENFFDSINFGRVRGFFISNNNFKLHPDAATVLAQIACHNNSLPQGSPCSPVISNLIGHILDIRLARLASKEGCTYTRYADDLTFSTNKKIFPKSIAMLSDSEEHIWSTGKQLEKEIKKTGFAINNKKTRMQYKDSQQTVTGLVVNSKVNTRYSYRRTARAMADALFKTGKFTIKKPVQANGKSILLETPGTVEQLCGIFSYIHMIAEYNRSISMSNNKKLELSGIEKTYKELLFYRRFYANPRPLIIYEGKTDAVYLRCAIRSLIKLGEFPELGGINDKSEVEINADLFTYTKTASRILGLPGGAAPLKTLISEYLHNFSRYQAPGNTSPVIMLIDNDSGSKDIYSLIKQLRKEKNPIDGSEEHYYIAKNLFVVPTPKVLGKESKIEDFFTRNTLEMKIGTKSFDCSNDHDTETSYGKNAFAEQIVKANQNTIDFTGFRPILQRIVNVINYYRAI

SEQ ID NO: 1001 - protein, 576 aa, unidentified
  source 1..576: note = Related to JAIZSB010000002.1; note = Burkholderia cepacia
MSRLAKLRRAAGIDDLAELLGFKPKAISYILYIKDPEKKYVQFEIPKRSGGTRLISAPCGDLMSLQRRLAELLQECIAEINEERKVRTVLSHGFRRKHCIKTNAWMHRGKRFVLNVDLSDFFGSINFGRVRGFFMANNNFKLNAKVATLIAQIACHENALPQGSPCSPVISNLIGHLLDLRLAELAKQSGCTYSRYVDDITFSTNKPQFPRNVAVQRDEDDHEWDAGADLVRIVGRAGFRLNDRKTRLQYHGSRQEVTGLVVNATLNTRVEYRHVARAMVHKLMTTGAFKRKRFVQNEDGTWALAEVDGKIEELNGMLSFIDSVDLYKRRRQLKEVERDKSLVTLKDLSATERYYGDFLFYKNFIFNERPVILGEGKTDNVYIQCALRSLLADYPSLIAKGANGFDQKISLFNRTSTIERLTQLSGGAEQFKTFVKEYLAARRKFPIKGKAPPIVIVADSDDGIGQVNAYLKNLTGSPVDMTADFTHIKENLYIVYTPLDAGGKGAPMENMFEKSVLQTQLGGKTFNPSNTKINHAKEYGKAYFAQHVVKKDADKIDFSGFKVLLDRIVKAIEHGS

SEQ ID NO: 1002 - protein, 579 aa, unidentified
  source 1..579: note = Related to QTSF01000012.1; note = Burkholderia cenocepacia
MSRLAKLREATGLEELAKLLGFKPKSISYVLYIKDPEKKYAKFEIPKRSGGMRQISAPCSELMGLQRRLAELLQECIAEINEERGVKTVLSHGFRRKHCIKTNAWVHRNKRYVLNVDLQDFFGSINFGRVRGFFISNKNFQLKEKVATLIAQIACHDNALPQGSPCSPVISNLIGHLLDIRLAELAKQSGCTYSRYADDITFSTNKPQFPKNVAVQRDEDDHCWVAGADLAKIISRAGFKVNDKKTRLQYHGSRQEVTGLVVNTKLNARSEYRHVARAMVHRLMKTGSFTRKGYVLDKEGKGSIQEVEGTVESLSGVLSFIDSVDLYNRMSKIKKADREKPLVTLQDKTATERCYGDFLFYKNFLANEKPVVLGEGKTDNVYIQCALRSMFAQYPYLIKKNADKFDFQFSFFNRTSTTDRVTSLSGGSEQFKTFVKEYLAYRRKFPIKEKAPPIVIVADSDNGVKQLNGYIRSVTGSAVDMNADFTYIKENLYVVYTPIAADGKGAPIENLFEKNVLEKELNGKKFNPSNSGINPAKEYGKAYFAQHVVKADADSIDFSGFKVLLDRIAKAIAHGSAKV

SEQ ID NO: 1003 - protein, 577 aa, unidentified
  source 1..577: note = Related to CABWIJ010000002.1; note = Burkholderia lata
MSRLAKLRGAAGIDELADLLGFKPKAISYILYIKDPAKKYTKFDVPKRGGGNRTISAPYDDLMNLQRRLAELLQECISEINGERKVKAVLSHGFRPKQCIKTNAWQHRKKRFVFNIDLQDFFGSINYGRVRGFFITNKNFKLTEKVATLIAQIACHDNVLPQGSPCSPVISNLIGHLLDIRLAELAKKNGCTYSRYADDITFSTNKPEFPRNVAVQRDEDDHDWVAGADLVKIINKSGFKINDKKTRLQYHGSRQEVTGLVVNRKLSARSEYRHVARAMVHRLMKTGAFVRTAFVQDKDGKVSLAKPAGTIPHLNGILSFIDSVDLYNRRSLLKVAERDKALVSLKDLSATERCYRDFLFYKNFLGNAKPMVVCEGKTDNIYIQCALRSLLAGYPSLIKKGVSGYEMELSLFNRTQTTDRLMSLSGGSEQFKTFVREYLNARRKYPINGKVPPIIIVADSDDGVKNFNSYIGGITGAPVDMKADFTYVKENLYVVYTPLGATGKGAPIEDMFDKSVLQKQLNGKTFNPSNSGINHATEYGKAFFAQHVVKKGAEGIDFSGFKVLLDRIVKAVEHSSK

SEQ ID NO: 1004 - protein, 591 aa, unidentified
  source 1..591: note = Related to NZ_JMLA01000001.1; note = Methylobacter tundripaludum
MSHLKTLKEATTLHDVAHILGFQPKSLAYILYKKPSAEKYKHFTIPKRTGGKRSISAPYPDLMNLQKRLSDLLQNCISEINQARKIESTLSHGFRRKYSIITNAAIHRNKRYVFNIDLANYFGAINFGRVRGFFITNRNFELKPAVATVLAQIACHENTLPQGSPCSPVISNLIGHLLDIRLAALSSQVGCSYSRYADDLTFSTNKRNFPAKVAKLAEGNHQWQVGKELVRIIDRTGFTINNTKTRMQYMDSRQDVTGLVVNSKINTRAEYRRIARAMVHRLLNTGSFQRKQISYDDQGNLVETEVNGTLDQLNGMLSFIDSVSVFNKRKDKNPTEKEKDLMPSKDPDNNEKVYRRFLFFKNFYASANPLIICEGKTDNIYLKAAIQRLADAYPCLAEKKEKGGISLKVCFFRRNATSGRILGLAGGTGELINLIKMYATESKHITAPGKKQPVILLIDNDEGAKGIYGYVKNLTKSKGDSKAAFIFVTENLYIVPTPLTHDGKNTMIEDFFEESLKNTKLNGKTFNPSDKGFNSKTEYGKNYFAKHVVKENQATIDFNGFKPILTRIEAVLNYHSKKPSSESMAESMGSD

SEQ ID NO: 1005 - protein, 581 aa, unidentified
  source 1..581: note = Related to NZ_FNKX01000001.1; note = Paraburkholderia tuberum
MSKLKILQAATSLHELADLLGFKPKAVSYILFKKDLAAKYTEFEIPKRAGGKRLIQAPYPELMNLQRRLSELLQDCIAEINAARDIDSVLSHGFRRKYSIITNAVVHRSKRFVLNIDLANFFGTINFGRIRGFFISNRNFALQPKVATLIAQIACHDHVLPQGSPCSPVISNLIGHLLDVRLSALAFQTGCTYSRYADDITFSTNKPLFPAKLAKAVEGDEHRWEVGKTLFRAITKAGFEVNAEKTRLQYTDSRQEVTGLVVNSKINTRSEYRRTARAMVHRLVSTGSFYRKRVERDGDGEVVISEKLGTLEQLNGILSFIDSVGVYNKKKGMKDDEREKPLTMPSSPDCQEKDYRKFLFYKHFFAIKQPMIVCEGKTDNIYLSCAIRRLAKSHLLLASPDGKGGSRLQVSFYKRTATTDRTIGLTGGTDQLISLIKEYRAESRRIKIAGKVQPLILLIDNDNGAKGIFAYLKNLLKVQIDPNAPYFEAHEGLYVVPTPLTSDAKGTMIEDFFDESVLKTMLNGKTFNPSNEGVNHKTEYGKAYFASHVIKKHENTIDFSGFKPILDRLEEVIAHHQKKHQ

SEQ ID NO: 1006 - protein, 577 aa, unidentified
  source 1..577: note = Related to JACVPK010000006.1; note = Polynucleobacter wuianus
MSILEKLQAAQNLHDVALLLGYQPKSLSYILYVKPKTQKYTTFNIPKSSGGTREIKAPYPDLKTLQKRLSKLLQECIAEINLQKEITTSVSHGFRKKHSILTNAAVHKNMRYVLNLDLKDFFHSINFGRVRGFFIANQNFLLNPNVATIIAQIACHENCLPQGSPCSPVISNLVGHILDMRLVQLARKFGCIYSRYADDITFSTNKKVFPVDLATAALDGEQLWSVSKPLHDIIKRSGFDVNSAKTRMQYKFSRQEVTGLIVNSRVNVRFGYRRIARAMLHKLITRGEFHKPNSKKVSSVTNTTAPSLDYLNGVLSFINSVNLFVHKKHSFRVKSDSKKALEKSFLNLSISRGYRNFLLYKYFFAAKNPVIICEGKTDNVYIRSATRQLSTQYPILGKSSPDGTINLKISFFKRTKTTDMFLGLTGGASQFNKFIEDLRQPIFKDFLLKIKQPIIIVIDNDHEALKVFSYLYKNFNINCDKTVGFIEVFRGLYVIPIPLLSGANQSVIEELFDIKDLTRSLDGKKFNYKSDSYNTKLEYGKSAFATRIVQAKEDQIIFDGFKPLLTQIEEAIKSFRC

SEQ ID NO: 1007 - protein, 573 aa, unidentified
  source 1..573: note = Related to PHCU01000169.1; note = Betaproteobacteria bacterium HGW-Betaproteobacteria-12
MSFLTELKSAKSLHDVAYLLGYKPKSLSYVIYKMPVKYETFTVPKKTGGVRTISAPHPELKLLQRRLSDGLQSCWDEINSEKKISKPISHGFRRRSSILTNASVHRGRRFVFNVDIKDFFDSINFGRVYGFFLKNTDFALPESVAKILAAISCHEGKLPQGSPCSPVISNLIGQVLDIRLAQLARSHGCSYSRYADDLTFSTNKRVFPSAVAALGINHAWVVGDALSKIIERSGFQLNPKKTRMQYCDSRQEVTGLIVNRRANTRPEYRRLTRAMTHKLVTTGKFQIAGMKADASGTFAPTLVDGSISHLQGMFGFIDWVDLSHKKATETHDGPPSSISKVYKRFLMHRDFWASSLPVILCEGKTDSVYLRGAIRRLATAHPSLVSMTTVGKAEYKVRFFNYSYTSQRILDLSGGAPAVKSFITGYLKSVKKTPAPSNRQPLIVLLDNDSGGKVFYSLIKEYNGKKTPVDGMDDFYHLEANVYVVFTPIAKPGDNSSIEDFFEPALLATKIDGKSFNPSNEDLDENTEYGKAIFAAKVVRPNIPKINFDKFGLILARLERVMDAHVKKHVSKV

SEQ ID NO: 1008 - protein, 574 aa, unidentified
  source 1..574: note = Related to NCCT01000010.1; note = Hydrogenophilales bacterium 12-61-10
MSFLTILKNAKSLHDVADLLRYKPKSLSYVIYKMPVKYETFTVPKKTGGVRTISAPRPELKLLQRRLSDGLQSCWDEINTEKKTTNNKTTKPISHGFRKGASILTNASVHRGRRFVFNVDIKDFFDSINFGRVYGFFVKNKDFALPESVAKVLAAIACHDGKLPQGSPCSPVISNLIGQILDIRLAQLAHRYGCSYSRYADDLTFSTNERIFPSAIALSNIDHSWVAGVGLSKIIEKAGFQLNPKKTRMQYLDSRQEVTGLIVNRRINTRPEYRRLARAMTHQLVTTGKFQITAMKADALGTLVPSKIDGNIRHLQGMFGFIDWIDWRHKKARGTLAGMPSSIDKVYKRFLMHRDFWASSLPVILCEGKTDSVYLRGAIRRLATAHPNLVLMSAAGKAEYKVRFFNYSYTSQRILDLSGGASVVKKFITEYIKSVKKTPAPANQKPLIVLLDNDSGGKVFYSLIKEYKKTPVNGMDDFYHLAANVYVVFTPIAKPSDNSSIEDFFEPALLEMKINGKSFNADNEGLDKNTEYGKADFATQVVRPNIAKINFDKFDPILARLEGAMEAHIKKHVS

SEQ ID NO: 1009 - protein, 571 aa, unidentified
  source 1..571: note = Related to JAGFNH010000001.1; note = Candidatus Accumulibacter sp.
MFFLTNLKSAKSLHDVACLLGYKPKSLSYVIYKMPLNYTTFTVPKKSGGVRSISAPRPELKLLQRRLSDGLQSCWDEINDQKKITKPISHGFRRDASIVTNASVHRGRRFVFNVDIKDFFDSINFGRVYGFFVKNKDFALTESAAKVLAAIACHDGKLPQGSPCSPVISNLIGQILDVRLAQLAHRHGCSYSRYADDLTFSTNERIFPSMIALSNADHSWVAGAVLSKIIEKSGFQLNPKKTRMQYRNSRQEVTGLVVNRRINTRPEYRRLTRAMTHQLVTTGKFQLTKTKADVLGKLVPTKIDGSITHLQGMFGFIDWIDLCHRKNQEVPNVQQSAIGKVYKRFLMHRDFWANSLPIILCEGKTDSVYLRGAIRRLATAHPNLVSTNAAGKSEFKVRFFNYSYTSQRILDLSGGAPVVRRFITEYIKSVKKTQAPVNPKPLILLLDNDSGGQVFYSLIKQYNGKKTTVNGMDDFYHLAENVYVVFTPIDKPGDNSSIEDFFEPSLLAKKIDGKTFNADDTTFDKNKEYGKADFAAKIVRPNIAKINFEKFDPILARIEGVIEAHSKKHFP

SEQ ID NO: 1010 - protein, 594 aa, unidentified
  source 1..594: note = Related to JAIQFH010000036.1; note = Acidobacteriia bacterium
MSQLQALRAASTLEHVADLLDYKPKTLSYILYKIPAANKYTTFSIPKKDGNPRDINAPCSELKELQSHLSDFLIGCANEINEIRKFKDQLSHAFKPEHTIVTNAVRHKKKRYVFNIDLKDFFGTINFGRVRGYFLKDANFMLHAKVATILAQIACHDHKLPQGSPCSPVISNLVGHILDIHLCGLAFKNGCTYSRYADDITFSTNKPIFPENIAKLLPGQAHAWQVGNGLEKIVSRSGFTINHQKTRMQYRGSRQVVTGLTVNKKVNIKNDYRRTVRQFTQRVFNTGKFQYLAVVTDAAGAKTPTKIDGSLEQLHGMFGHIDFVDNENKEAEEKRDSGSSKAKNAAKDALYSKRKLYRRFLIFKDLYSAPRPVIICEGKTDNVYLLHAIKSLAANYPILASITTAGKVQIHVRLLKALDSSIGTILHLGHGASDLDRLAKQYAEEILRFKADGMEQAVVLLMDNDDGADEMYKLAKDLTGKNVSRAEPYFHLVGNMYVVVTPLIGTNKQSEIEDSFADTLKNVVLDGKTLSTKNKFDTAKYFSKHVFAQHVRENASKIDFSGFSGILDRVAAAIQANQIRIAASAAPQAVPATV

SEQ ID NO: 1011 - protein, 588 aa, unidentified
  source 1..588: note = Related to JAIQFA010000126.1; note = Acidobacteriia bacterium
MSQLQALRAALSLHQVATLLQFQPKALSYILYKKPLPTRYTSFNMAKRDGGVRTINAPSPELRLLQHNLSDLLQNCVEEINEGKKWKDQLAHGFKRDCSIITNAVKHRKRRYVFNIDLNDFFGTINFGRVRGFFIKDANFMLHPKVATILAQIACHENVLPQGSPCSPVISNLIGHVLDIHLCKLAASNGCTYSRYADDITFSTSKPDFPESIARRVTGQAHTWEVGGGLQNIVAHTGFSINPKKTRMQYRGSRQVVTGLVVNKKVNIRTEYRRRARSLAHELFKTGTFQHVKTIPDANGVVTPTAVEGTLAQLHGIFGHIDAVDHHNFKIQSKADPREAKIVLRSKEKLYRRFLMFKDFYAASLPVLVCEGKTDNIYLLHAIRSLAAYYPKLATVAANKKITLNIRILKTVKTSTGRVLQLEGGASYLKAFIEQYVSEIHKFKAPGMQAAVVLIVDNDSGADEIYNTIRKLAKIKAPRSDAYVPVAGNLYVVPTPLKAGATKSAIEDCFADEIKNLKLGGKTFNANSDEDTVAYFGKHILSVYIRENASKVDFTGFAGLLDRITAAIEAHQAKQAAVGIASAPAAQP

SEQ ID NO: 1012 - protein, 595 aa, Pseudomonas sp.
  source 1..595: note = Related to NRAO01000002.1; note = Pseudomonas aeruginosa
MRNLELLKSIKTRSELAVLLGYKPKALTYLLFKMPPEQRYKSFPVPKRSGGQRTINAPCPELKALQKRLAGLLVNCSSELALAKKLPRISYGFNKGGSTLDNASVHRRRRYVLNVDLEDFFGSIHLGRVRGFFINNEDFKLLPDVATVIAQIACLDGKLPQGSPASPVISNIIGHILDVHLARLARRYGCSYSRYADDLTFSTNKPIFPQQIASLVDPLEHIWVAGGELEREITRCGFRVNHSKTRLEYNDSRQVVTGVVVNKKLNVPSEFKRGARAMADRLFKTGSFENVQVVELDGVKQFARTSGTINQLAGVFSYIYMVSHWNSKKLAIKPGTPLTSIERVHRDFLFYKDFYANQFPTILCEGKTDNTYLKCALKGLASSFPALIGRKPDGSPDYKIRFFRGSRLAARLLSLSGGTAQLKDFIAAYSSWCAKFKSQGGAKPVIIVIDNDAGATHIYNWYASVKRIPKPDGMLPYYYVGQNLYIVPTPKAAPADMSKIEDLFKADALGVILGGKRFNPNNDTENTTEYGKQYFADHVVKARQKTIDFSGFEPLLDTISKIILSHTTAVAAAAETSFAAAIEASTAVAPVAPPT

SEQ ID NO: 1013 - protein, 476 aa, Pseudomonas sp.
  source 1..476: note = Related to CP068986.1
MITNAINHRNKNLVLNIDLADFFGSIHFGRVRGFFLKNENFKLSPSVATVIAQIACHENALPQGSPCSPILSNMIAHILDIRLARLAAAEKSSYSRYADDITFSTNKKEFSESLVRCIDHVNHTWVAGTALENTINRAWFSINSKKTRLQYRDSRQIVTGLTVNSKVNVRAEYHRTAKAMTHKLFRTGSFEVLKANEHGIQEKTAGSLHQLNGILSFIYMINDYNRKLRAQNPLNPAFTPTPDRLKSIEKSHKRFIFYRDFYASPVPTIICEGKTDNIYLRAAIYSLSAKYPELVETNKDGSKKLKIKLFKYTEQIKHLMSLSGGTGEMTKFMTSYTKECAFFKAPIGLKPVIMLIDNDQGAIEIYKQIHKMKKLAKKPDGSDELHFIGRNLYVVPTPLNKGQNTMVEDLFEPKLLKTELNGKKFNPDDAKMTSNEYSKNHFAKFVVKAQQESIDFSGFEPILNTILKIVKQHGRL

SEQ ID NO: 1014 - protein, 590 aa, Pseudomonas sp.
  source 1..590: note = Related to NZ_CP065202.1; note = Pseudomonas fragi
MSELAKLKKIISLQDLSSMLGFKSSALSYLLYKKPKTELYRTFEIRKKTGGIRIISAPCPELKLLQSNLARLLQKCVNEIQEARININQNKIQKHRSLSHGFKPGFSILTNAKSHRKKRVVLNIDLEDFFGSIHFGRVRGFFLSNRDFNLSPKIATIIAQIVCHNNSLPQGSPCSPIVSNLIAHILDIRLSKLAFENKCSYSRYADDITFSTNQEKLPDSIARCTCEESHIWIAGKNLLRIIKDSWFSINSKKTRIQYRDSRQEVTGLVVNSKLNIKAEYHRTAKSMAHSLFQTGSFTILKRNESNELERCYGTINQITGIFSFIYWINKYNRELPIGVPPDDVPPPKIEDLKSIERTHRKLLYYKYFFANEIPTIVCEGKTDNAYLKAAIQSLAQNYPALVEVDKDNNKILKVKFFKYSKQVKYLLALTGGTGDLEKLISNHPKECSSFKARAGTKPVILVIDNDSGANGIYNRLHKFLKLSKKPDGSQEFYYYGNNLYIVPTPLAADGGQTMIENLFDPTLLQTVVNNKTFNPDEKASSSLYYGKSKFVENVVMPNRSTIDFGGFTKLLDTISKVVDNHALLVSQSKP

SEQ ID NO: 1015 - protein, 605 aa, Pseudomonas sp.
  source 1..605: note = Related to JAHUWE010000017.1
MSELIKLKKTNSLSDLALYLGYKPKSLSYILYKKPKEELYRSFEVPKKTGGSRTISAPCKELKLLQSKLLEKLQACINEIQSLKNLRKTLTQPFKTEKNTSLSHGFKPGFSIITNARQHRHKRHVLNIDLENFFGSIHFGRVRGFFIKNQDFNLHPKIATILAQIACHDNVLPQGSPCSPLISNLVAHVLDIRLAELAKKNDCTYSRYADDITFSTNEKKFPSSLAVCVCEEDHIWIAGKTLVDLVKKCWFSINHAKTRLQYKDSRQEVTGLIVNSKVNVRAEYHRTAKAMAHRLFHSGKYETLGFDKDGLSKKVLGSVNQLSGVFSFIYMINKYNRNLRTINPLEKFPNPQPKLKSIEETHRKLLFYKDFYANEVPTIMCEGKTDNVYLRTAIRSLSEKFPALIEKDKDGEKRLKLKIFNYTDQVKYLMHLTGGTGDMVKFTSNYPKECSFYKSKGGLKPVILVVDNDQGASDLYTRIQKFGKMPVKPDGSKPFYFYSNNLYIVPTPLTPDGKQTMIENLFDPELLKTELDGKTFNPDEKTATASNYSKNHFAEYVVKANQKTIDFSGFEPLLATISKIIQDHERLSALATLPLATASHKVAKA

SEQ ID NO: 1016 - protein, 561 aa, unidentified
  source 1..561: note = Related to CP028127.1; note = Xanthomonas vasicola
MSELNKLKACTTIGELALLLGFQAKTLGYIAWGLPSATKYSTFAIPKRSGGKRTIHAPSPQLKLAQGKLSILLQACEKEIEEELGVKHTVAHGFKLGRSILTNADVHRRQRYVLNFDLSDFFGTINFGRVRGFLINNRNFQLHPDVATLIAQITCHKDMLPQGSPTSPVISNLIGNILDVRLSKVARANGCAYTRYADDITISTSQTEFPKAIANQVDSTSGWTLAKDVEQAVAACGFRINHAKTRLLHHRSRQDVTGIVVNRHVNVNTDYRRAVRAMVNNLCSTGTYHRKKSIVAAEDTTTVSVEGSRPQLEGMLGFLLQVERYRRSDELPPPTLSSTELLLHRFLFFTTFASNDRPTILFEGKTDNIYISAAIRRLRESYPLLMAPGSKELLVKLLPHTKTRERIFNLTGGDNPLTSFIVSYRENYRRIKGPKGANPVIVIFDNDSGSNAVIAAIKKHYKLDMPDGDQYIRVYDNLYVLLTSKKGSGNHCIENYFSAATLAKTLSGKKLSLSNKKLKDDEYGKAWFAEKIIKPYYKDINFSNFSGLLDPICEIIQGHYP

SEQ ID NO: 1017 - protein, 561 aa, unidentified
  source 1..561: note = Related to NZ_CP064002.1; note = Xanthomonas translucens
MGELAKLKACTNTGELARLLDFQTKTLSYIAWGTPSAAKYSAFDIPKRSGGKRAIHAPSPQLKLVQGKLSKLLQACEKEIEEELGVKHPVAHGFKQGRSILTNADVHRRQRYVLNFDLTDFFGTINFGRVRGFLIGNRNFQLHRDVATIIAQIACHDDKLPQGAPTSPVISNLIGNILDIRLSKIARAQGCAYSRYADDITMSTSQPQFPHAIARQLLATPNWVVTKEIEEAVKACGFKINHAKTRLLHHRSRQDVTGIVVNRHVNVNGDYRRAIRAMVNRLCSTGTYHLEKTVLAAGQTMLASIEGSRPQLEGMLGFLLQVERYRRSDDLVPPILSATERLLHRFLFFTTFAANDRTAILFEGKTDNIYISSAIRKQRATYPALIAPGSNELLVKLLPHTKTRERIFNLTGGDSPLTNFIVGYRDNYRKIKGPKGSHPVIVIFDNDKGSNAVIGAIKKHYKLDMPDGDQYIHVYANLYVLLTSKKGSGDHCIEHYFSEATRAKKLSGKKFNLSNKKLKDDEYGKAWFAEKIVKPYYKDIDFSGFAGLLDPICGIIKSHHP

SEQ ID NO: 1018 - protein, 561 aa, unidentified
  source 1..561: note = Related to NZ_NSGT01000016.1; note = Xanthomonas sp.
MSELAKLRACTTIAEAAQLLGFQTKTLSFIAWGLSPAMKYSVFNIPKRSGGKRTIHAPSPQLKLAQEKLSRLLQACEKEIEDALGVKHTVSHGFKSGRSILTNAEVHKRRRYVLNFDLADFFGTINFGRVRGFLITNRNFQLHPDVATLIAQIACHEDKLPQGAPTSPVISNLIGNIMDIRLSKIARAHGCSYSRYADDITMSTSHPQFPGAIAHQIGTPFKWQISKELETAVGASGFKINHAKTRLLHARSRQDVTGIVVNKHVNVNTDYRRAVRAMVNNLCSTGTYYRENPVLGVDNTNMTLVEGSRPQLEGMLNFLLQVERYRRSDHLTPLELSATERLLHRFLFFTTFADNDKPTILFEGKTDNIYISSAIRRLRASYPLLMAPGSRDLLVKLLPHTRTRERIFSLTGGDSPLTNFIISYRENYRRIKAPKGTNPVIVIFDNDRGSNGIISAIKKHYKLDMQDGDQYIRVYDNLYILLTSKKGSEKHCIEHYFSEATRAKKLSGKKLSLSNKKLNDDEYGKAWFAEKIVKPYYKEIDFSGFAALLDPICEIIQSHSP

SEQ ID NO: 1019 - protein, 567 aa, unidentified
  source 1..567: note = Related to JAJA02000003.1; note = Lysobacter capsici
MSDLIALRACTTIAGVAKLLGFQAKTLAYIAWGAPSATKYSVFDIPKRSGGKRTIHAPAPQLKLAQGKLSNLLQACEKEIEDSLGVKHSVSHGFKRERSILTNAEVHRHQRYVLNLDLLDFFGTINFGRVRGFLINNRNFKLHPDVATLIAQLACHEDRLPQGSPASPVLSNLIGNILDIRLSKMARAHGCAYSRYADDITLSTSKPEFPTAIAHQVDAFKWQASEDLESAVGASGFKINHAKTRLLHHRSRQDVTGIVVNQHINLNSDYRRNVRAMVNKLCSTGSYQRDKTILAADNTTKVSVEGSYAQLQGMLGFMMQVERHRRSGGPLPSTLSATERLLHRFLFYTTFAGNDKPVILCEGKTDNIYISAAVKRLSASYPKLIEPESKNLLVKILPHTATQERIFNLTGGDNPLVNFIIAYRDNYRLIKAPKGANPVIVIFDNDNGSNAVIAAIKKHFKIEMPDDTQYIRAYANLYVLLTTKKGTGNHCIEHFFPSKTLKKTLSGKKLNLSNKKLKDDEYGKAWFAEKIVKPYYHDIDFTGFSGLLDPLSEIITHHANHKIDEKG

SEQ ID NO: 1020 - protein, 569 aa, unidentified
  source 1..569: note = Related to FOAX01000001.1; note = Pseudoxanthomonas sp.
MSNLSRLHACTSVVDLANLLGFQAKALGFLAWGLPPTARYSTFDIPKRSGGKRTINAPIPQLKLAQQKLAAILQSCEAEIELLLGVKRSVAHGFKPNHSILTNAAVHRRQRYILNFDLEDFFGTIHFGRVRGFLITNRYFKLHPDVATLIAQLCCHQNQLPQGAPTSPVLSNLIGKILDVRLSKLARIHGCAYTRYADDITMSTSAPEFPAALATECANSLTWQLSARVTSAIADSRFKLNPSKTRLQHRRSRQDVTGIVVNQTLNANSDFRRSTRAMVDKLCRTGCYQLVKPTLLAGDTVSEPREGTNAQLHGKIGFLLQVERFRRAGDPESPQLSATEKLLKRFLFYTTLANAERPVILFEGKTDEIYLRCAIKRLASAFPRLAAAATGEVLVNLFSHTPTRQRIFGLTGGDPPLTNFVNEYREHYRPIKGPKGTHPVIVLYDNDNGANSIFAAMDKIYKVKMADGLQFIRIYDNLYIVLSSAKCAPGTGHCIEHLFDKSVLTTTLSGKTLSLSNKPLKPTEYGKAWFAEKVIKTNYKSIDFSGFHPLLEAISTIVTTHKASSSPLP

SEQ ID NO: 1021 - protein, 562 aa, unidentified
  source 1..562: note = Related to JAIWPR010000054.1; note = Luteimonas sp.
MSKLLALHLCNSASDVARLIGFQPKAIGYLAWGTKARYTTFEIPKRSGGKRTINAPILHLKIAQRKLADLLQECESEIEEAIGVKQRVSHGFRRDHCILTNASVHRGKRYVLNLDLEDFFGTINFGRVRGYFITNKHFQLKADVATLLAQLACHDSKLPQGAPTSPVISNLIGNILDIRLLKLARAHGCSYTRYADDITISTSAPTFPVEIALEGPTNTWTLSKTLNDSVKSSGFAVNAKKTRLLHRRSRQDVTGIVVNKCLNVNSDYQRRVRVMVHHLRSTGKFYRKLSSLTAAGDTEVQSRDGTRAQLQGMLGFVMHVERFRRGDEPLPEKLTGIEKLYRRFLFYTQFANHEMPVLLFEGKTDTIYLGAAIRALAPAYPTLIAASALQVHMLRNTPRIERLFGLRGGGDQLFNFVGEYHEEYRHIQGPKGTRPVIVVVDNDAIGRNMVKKVEGMTKTTIPVGSQWFRVQDNLYVVLTSPFDPKGAMHCIEACFDPKFMATALGGKTLSKGSKGKKLDPAKEVSKAWFAEKIVKPNTKSISFAGFSSLLDCISDVITKHVP

SEQ ID NO: 1022 - protein, 563 aa, unidentified
  source 1..563: note = Related to CP018725.1; note = Xanthomonas vesicatoria
MSKLFALQQCSGASDVAHLIGFQPKALGYVAWGTKARYSAFDIAKRSGGKRTIHAPIPQLKLAQQNLAELLQECELEIEAALGVKKRLSHGFRRDHSILTNADIHCGKRYVLNFDLEDFFGTINFGRVRGYFTNNKHFRLKPDVATLIAQLACHESKLPQGAPTSPVITNLIGNILDMRLVKIARANGCAYSRYADDITFSTSAPEFPTAVASEIAPHAWTLSKTVEDSVKASRFSINASKTRMLYRRSRQDVTGIIVNKFVNVNSDYQKRLRVMVHHLRSSGIFHRKNSVLGASGNTSVQKEVGTRNQLQGMIGFALQVEAFRRYGAPPPPELTSTERLYKRFLFYTQFAAHDKPVLLFEGKTDVVYLKSAIKSLSASYPTLYTGSDILVHLLRHTPRMERLFGLSGGGHPLIAFIKNYHEEYRHITGPRGAKPVIIVVDNDQIGRNTINLIEKITKTVVAPGTQAVKVFDNLHVILTSPHDKDSELHCIEDCFDPAFIKAELDAKTIYNGKKIKKNNEFDPSIHISKSAFAETIVKAKAAAIDFAGFKPLLDHIAAVIAKY

SEQ ID NO: 1023 - protein, 645 aa, unidentified
  source 1..645: note = Related to CP011130.1; note = Lysobacter capsici
MIQIGLANAHRKLALAALTSIASQAALCLLLGVAGRFGCRRIAASEAIARWICPVTLSATRRSLGVRESSCNPSFPASHGDGMSKLLALQICNSASDLAHLIGFQPKALGYVAWGTKARYSTFNIPKRSGGKRTINAPIPQLKLAQQKLSSLLQECEREIEETLNVRHRLSHGFRKQHSILTNAAVHRGQRCVLNFDLQDFFDTINFGRVRGYFMTNKHFRLRPDVATLIAQIACHDSKLPQGAPTSPVISNLVGNILDMRLVKIARANGCAYSRYADDITLSTSAPEFPEAIAIEGPTHSWTLSKAVNDAVKASGFRVNAAKTRLQYRRSRQDVTGIVVNKCVNVNADYRRRVRVMVHHLRSSGKFYRKSSGLSAAGDTEVQQHEGTIAHLQGMIGFVLQVERFRRGEDPAPAELSGIEKLYRRFLFYTQFANHEKPVLMFEGKTDVIYLASAIKSLAAVYPTLIVKPPELLIHLLRYTPRIERLFGLSGGGHQLITFIKNYHDEYRYIQGPRGSKPVIAVVDNDKIGRDTINLVEKITKTPMPTGAQSVRVYDNLYVVLTSPHDKAGKHHCIEDCFDPEFVKSELAGKKISKGTKGVKLDPVTEVSKAWFAEKITKPSFKPIDFSGFQPLLNEIAAIIAKHAP

SEQ ID NO: 1024 - protein, 589 aa, unidentified
  source 1..589: note = Related to JACVAG010000008.1; note = Pseudoxanthomonas sp.
MSKLAALKACSSIGDLALLLGFKAQTLGYIARGLRDPAKYTSFDIPKRSGGKRTIHAPVPKLKLVQRKLCNLLEECQKEIESTLGVEKRLAHGFKKHHSIFTNADVHRRQKYVLNFDLEDFFGTINFGRVRGFFIANRHFKLNSDVAMLIAQLVCCNAKLPQGSPSSPIISNLIGNILDIRLAKLARANGCSYSRYADDITISTSLPDFPSAIASLVTGSHVWTLSSDVMNTISACGFKLNPKKTRLQYHHSRQDVTGIVVNRHVNVSSDYRRKLRAMVDRLRSTGSFTYSATELDTAASTKVSVKTGTRNQLQGMLSFALQAERYRQASTSTPAPECLTGNEKLLRRFLFYTTFASHERPLVISEGKTDGIYLASAIRSLAATFPELVAPKTGVPAVRFLRLTRSMERLFGLSGGDGPLKEFVHQYAEEYRHIKGPKGSMPVIAIFDNDTGAKGVLGLLKGFYKMPMPAGAQSVHVHGNLYVVLTSPHITGAPSHCIEDCFDAATLAITLSGKTLSLANKTLGPNEYGKAWFAEKVIKPNAKTIDFAGFNGLLGVISQIVKGHTPPPVAPPAPSSVALPLVTPKPSIP

SEQ ID NO: 1025 - protein, 580 aa, unidentified
  source 1..580: note = Related to JAHCAU010000005.1; note = Lysobacter sp.
MSALTNIKACNTFNDFARLLGFKANSLAYLLWGMHADTKYTTFDIPKRSGGKRTICAPNPKLKLAQSRLSELLQQCEKEVEVIHAVKKSLSHGFKKEHSILTNAEGHCGRRYVLNIDLEDFFGTIHFGRVRGFFIKNRQFALNPTIAMTIAQIACHENKLPQGSPCSPVISNLVANILDIRLAKLSKIHGCSYTRYADDITFSTSMPDFPESIAFKQIDSNHWVLGKPLVDAIKACKFRINLSKTRLQYRRSRQDVTGIVVNKQLNVRSEYRKALRAMVYKLRETGSFSRNYSQLGANGDTQVIAKDGSRAQLFGMLSYVIQVERWRNRRIDSPPERLSANEWLMREFLFYTMFANADRPCIVCEGKTDSIYIREAIKNLGASFPYLAKSNAGNNEVIVSLVRNTDLLARLFGLSGGETRLKDFVKNYRDEYRKIKGPKGSHPVIILFDNDSGAKDVLNLLANLFKVIPVVGRQYFHVHDNLYVMLTSPVGAGPHYIEKCFDAATLAMTLGGKTFNPANQTLGPNEYGKGFFAEKVIAPNAQSIDFSGFSTMLAEFSSIIVSHAAPSPSLPVPPGMAPSP

SEQ ID NO: 1026 - protein, 713 aa, unidentified
  source 1..713: note = Related to NZ_CP018756.1; note = Stenotrophomonas maltophilia
MSALKRLQAATTLSDVAKILGFKPRALAYLIRVMPAGSRYTEFEIPKRMGGFRRICAPNKKLALVQTRLADLLSDCAEEIAAQRSVKKYVAHGFRRGHSILTNADVHRGRKYVLNVDLLNFFDAIHFGRIRGFFHTSQDFQLELEVATVIAQIACHEAKLPQGSPCSPVISNLIANILDMRLAPLAQHYGCSYTRYADDLSFSTNRREFPEELAAQVKGQEPIWEVGPALLAAIKTAGFSINPKKTRVQYDCSRQDVTGIIVNKFLNTPIEYRRTLRSMVHHLTGTGKFYLKDVDPATGKKREGSRAKLQGMLGFAYQVEKWRSRRSPVVSGAHTAMEKLLQRFLYYTEFASPSIPAIVFEGKTDSLYLREAIRRTPSAMPMLATGVGGGYRLRVKLHRESVIMRKFFNLSSGGDPLKNFIRDFSKLFPRIVGPKGEMPVIVLMDNDSGFSSTKSMLKNCYGISVMPGDQKIHVFENLYILLTSPYAVGASHCIEDCFPSSVLATKLGSKSFSKSNDFDTSTHYGKEWFAEKVVKPGSKGIDFTGFNGIIDGVKAILLEHAVSFKAKALLPMAAPSVGGASIAAPSAARRLIPKVSKAPKTLAASTPSVASKSSTAVLDPTGPEAPKVPKAPNIPKAPKAPKAPKAPKAPKAPKAPKAPKAPKAPKAPTGPEAPKVPKAPKIPKAPKAPKAPKAPKAPKAPKAPKAPKAPSPK

SEQ ID NO: 1027 - protein, 572 aa, unidentified
  source 1..572: note = Related to SEBG01000120.1; note = Cytophagaceae bacterium
TTTIGFKPKALSFITRVTPPAARYIEFDIPKRSGGTRRICSPNKQLSLLQSRLAELLNECEVEIAQQRSIKRHVAHGFRKGYSILTNADVHRGRRYVLNIDLTDFFGTIHFGRVKGFFENSLDFQLKAEPALVLAQIACHEGKLPQGSPCSPVISNLIANILDMRLVALSKRHGCSYTRYADDLSFSTSKLIFSDALATPSEANKSIWQAGPDLIAAVHSAGFKINPLKTRVQLSRSRQDVTGVVVNRQLNTPVEYRRTLRSMVHRLCSTGEYLLQETDPATGKQKVGTPAQLQGMLGFAYQVERWRSRNDEPASGAQTAMERLLKRFLYYKEFASPMLTAIVFEGKTDSVYLREAIRRSGTAFPMLSKGAGTTFELKVKLHRESKIMKKLFGLTSGGDPLKNFIKCYRWEFSRIDGPKGQNPVIVLMDNDDGFTGTKAMLFNVYKISISSGQQFIHVWENLYILLSSPFGGAKHCIEDCFTASVLAVKLGIKEFSKTNDFDPNIYYGKEWLAEKVVKPNSATIDFSGFGNLLSALQDVILHHSATMLSARAANTGVPSLPMPLPIPGGPAP

SEQ ID NO: 1028 - protein, 585 aa, unidentified
  source 1..585: note = Related to NZ_WVHR01000032.1; note = Paraburkholderia madseniana
MKKPTHIAQLRSLAALHGLATLLGYEAKGLAYVVYGIKDKDKYVDFPIPKRSGGTRIISAPVKSLKLLQSRLSTLLAACAEEIEVERGGKNKFFHGFRKNHSILTNATVHRGKRYVFNVDLSDFFGSVHFGRLTGFFTKNRHFELEPVVARILAQIACHNTVLPQGSPCSPVISNLIAHILDVRMAQLAARNDCYYSRYADDLTFSTNRNEFPSAIATRVGDSNEWVAGKSLLKIVKDSRFELNHSKTRMQFHRFRQDVTGVVVNKKLNVPSEYVRDVRAMVNSFVKTEKFTLRKKYRNDTGAWVLETVQGTKEQLRGMLSFIDNVRVFPQKKLAMEKKDKREQRIPRVEFKDMDGASRMYRRYLQYTQFFNPELPFVICEGKTDNVYIKCALRQLAGTYPQLVSKTASANKLLLNFFNYTKVADRILHLGGGTGDFQTFIGNYGSEFKGFKSEKKRNPVILLIDNDEGTAKIFSSIKTAIKSKSPVDGSEPFYHIADNFYVVAIPRKGGKSTTIEDFFDPALLKTKLGTKIFSGKDGFDPATEYGKHYFAEYIVKKGQKTIDFSGFHPILERLVAVLMAHAVKP

SEQ ID NO: 1029 - protein, 585 aa, unidentified
  source 1..585: note = Related to NZ_QLTK01000030.1; note = Paraburkholderia bryophila
MKNPTHIAQLRAQTSLHGLARLLGYEPKGLAYVVYGIGDAYKYVDFPIPKRSGGTRIISAPVKSLKLLQARVSTLLGACAEEIEVERGGKNRFSHGFRKNHSILTNATVHRGKRYVFNVDLHNFFGTVHFGRVSGFFAKNRHFKLDPVVARILAQIACHNKVLPQGSPCSPAISNLIAHILDVRMAQLAARHDCYYSRYADDLTFSTNRKEFPESIATRVSDSNEWIAGKSLLKIIKDSRFELNHSKTRMQFHRFRQDVTGVVVNKKLNVPSEYVRDVRAMVNSFVKTGQFTLRKSYRNDAGAWVVEEVAGNKVQLRGMLSFIDSVRVFPQKKLAMEKKDKREQRIPRVELKDMDGASRTYRRYLQYTQFFNPELPFVICEGKTDNVYIKCALRQLADTYPQLVSKTASENKLLLNFFNYTKVADRILHLGGGTGDFQTFIGNYGSEFKGFKSKEKRNPVILLIDNDEGTAKIFSSVKTATKRKSPVDGSEPFYHIADNFYVVAIPRLSGKSTTIEDFFDPTLLKTKLGTKVFSGKDGFDSATEYGKHYFAEYIVKKGQKTIDFSGFHPILERLVAVLTAHAAKP

SEQ ID NO: 1030 - protein, 594 aa, unidentified
  source 1..594: note = Related to JAAGPR010000055.1; note = Paraburkholderia sp.
MSADILPLTMKTPTHIARLRSISSLHSLARLLGYEPKGLAYVVYGIDDKYKYTDFQIPKRRGGVRTISAPIEKLKLLQRRVATLLDACVEEIDAERGVRNTLSHGFRKKHSILTNAAPHRNRRYVFNVDLHNFFGTVDFGRVVGYLKKNKHFQLNPTVARMLAQIACHQKVLPQGSPCSPAIANLIAHILDIRLGRLAARNDCHYSRYADDLTFSTNRPVFPSEIARRVGDTNEWVAGKILLKIIKESRFEINPEKTRMQFARFRQDVTGVIVNRTLNVRREYVKNARAMVDSYVTKGVFYSEKQYRDEKGAWTNELVDGTVGQLRGILSYIDSVRLFEQQKHASAKKTKRDYRVPRVEIKDMDSAARTFRRFLLHTQFFNPEKPLIICEGKTDKVYIQCALRQLVDAHPQLATRTKSGVDIHVSFFNFTKVADRILRLGGGTGDFQDLIAKYGTEFKGFYAKGQRQPVILLVDNDDGTKKIFSTVKTATGSKTAIDGSASFYHIADNFYVVAVPQLGKKDTTIENFFDPVVLTERLGTKVFSGKDQFDPATQYGKHHFAEYVVKKKQNTINFAGFEPILARLDAVLKEHAAKP

SEQ ID NO: 1031 - protein, 585 aa, unidentified
  source 1..585: note = Related to NZ_BBJI01000006.1; note = Paraburkholderia kururiensis
MNKITHIARLRPLSSLHGLAHLLGYTPKGLASIVYGTPDSSKYNDFRIRKRSGGTRLISEPNDRLKLLQRRLANLLSECIDDIDSERRVTNSFAHGFRKKHSILTNASRHRRKRYVFNVDLHDFFGTVDFGRISGYLKKNKHFLLDERVARMLAQIACHNKVLPQGSPCSPVMANLIAHILDVRLARLAALHDCYYSRYADDLTFSTNRADFPSSIAKRVEDSNLWVAGKALEKIVSESRFQLNPSKTRMQLNRFRQDVTGIVVNSGINVRSEYQKTVRAMVHSLVTKGVFHIQKLHRDDKGAWVREKKEGTRAQLRGMLTFIDNVRLFEKTKRLPPDRAQDQRGQKGDPAEMDSATRTFRRFLMFTQFFHPEKPLILCEGKTDKVYIQCALRRLSTAYPLLSSKSATKTNIHVSFFNYTKIASRVLSLGGGTGDLNGLVATYGSEFAGFKSTTKRHPVILLVDNDEGTKGIFSAVKTRTKSTSPITGNEPYYHVADNLYVVSLPLVNSNMVTIENFFPKHVRDTKLNGKVFSGKNRFDAKNQYGKHVFAEQVIKKIQNAGDFSGFHDILMRIQAVLVVHSAKKP

SEQ ID NO: 1032 - protein, 583 aa, unidentified
  source 1..583: note = Related to NZ_JZUR01000039.1; note = Burkholderia vietnamiensis
MTTTHIQKLQATAGLYSLSDLLGYSAKGFAYILHGISDDHKYIQFDIAKRSGGKRIISAPIPELKILQRRLAELLEACVVDIDNSRKLKNTFSHGFRPKHSIMTNASFHRKRRWVFNVDLQDFFGTINFGRICGFFAKNKYFQLDPTVARIIAQIACHEKKLPQGSPCSPVIANLIAHILDVKLARLASSYGCFYTRYADDLTFSTNSEIFPELIASRIDGSNEWTAGKKLLRIIKDCAFEINPAKTRMQFREFRQDVTGLVVNSKINVRTDYVKSARAMVNSLVESGEFYIKRRFRDENGAFRDETEKGEPDVLRGMLTFIDSVRQFDALKNVRDIDKADHRPTRPLAKDLSSADRTFRRFLLYTQFHNPQKPLIICEGKTDKVYIQCALKQRKDKFPDLSKKEDETDGKLSFFNYSKVADRILHLGGGTGDTDAFIARYGKEFKGFFENKKQHPVIVLADNDSGAKSTFGVVKKAGNIPSVDGSAPYYYICRNLYIIFIPKIDGKDTTIEDLFDKSVREAELNGKKFSGSDKFDAKTEYGKHLFAEYVIKPKQKEIDFSKFDSILKSIVDVLADFEKRQPT

SEQ ID NO: 1033 - protein, 584 aa, unidentified
  source 1..584: note = Related to NZ_LT977071.1; note = Cupriavidus taiwanensis
MTTRLASLKAANSLHTLAQVLGYRAKGLAYVVHGIPDSIKYTDFQIKKRSGGLRTISAPIPELKKLQKHLAHLLEDCAAEINSTRGIKKSLSHGFRRKHSIMTNAAAHRGRRYVFNIDLQDFFGTINFGRVWRFFEKHREFQLNSAVARTIAQIACHNKVLPQGSPCSPAISNLIGHVLDIRMAQFAAKVGCHYSRYADDLTFSTNKKEFPALIATRMGDTTQWSPGTKLIREIRRCGFELNFAKTRMQFKDFRQDVTGVIVNSKVNVRTEYVKNVRAMVHALVTRGEFQIRKVFRDDSGAWTEAVAKGSEAQLRGMLSFIDSVRHFEECRDTPKNNGVPDYKLPRSSLDDMDGPARIYRRFLVFTQFFRPVQPLIFCEGKTDNVYIRCALRQLFAKYPALAAKKKSGEIEFKIDFFSHSKVADRILHLGGGTGDMCDFIAKYGSEFKGFKHDGKRNPVIILIDNDSGANRIYSAIRSAIKSKDTIDGSKPYYFVRDNLYIVPVPMLGGNPTAIEDFFEKKVLDTVLNGKKFSRADKFDAATQYGKHLFAEHVVKKGQKSIDFSNFAAILDRINDVLTIHAAKP

SEQ ID NO: 1034 - protein, 581 aa, unidentified
  source 1..581: note = Related to JAFEDJ010000026.1; note = Proteobacteria bacterium
MTRLKKLKAASSLHAFADVLGYKAKGLAYIIHGIDDSKKYKDFEIKKRSGGLRKISAPIPELKRLQKSVAHLLEDCVSEINSHRKTKGTLCHGFRPKHSIMTNAAIHRKKRYIFNIDLKDFFGTIHFGRVWRFFEKNRDFALDSSLARTIAQIACHNRELPQGSPCSPSISNLIGHILDIRMAKLAAQAGCQYSRYADDLTFSTNRKNFPPEIAQRVGDTNLWVPGKQLANEIKRCRFEINPAKTRMQFKDFRQDVTGIVVNSKLNIRAEYAKNVRAMVHSLVTRGEFTVRKTFRDEAGAWIEEVEAGTEARLRGMLSFIDSVRFFELHRQTIKKSVASDSRLSRRPVREMDRHERVYRQFLLFSTIFRPLQPLVICEGKTDNVYLRCALQKLSGKYPKLVNVSGAKITLQLNFFNYSNTTDRILHLGGGTGDLAEFIGNYGAAFKGFKYSEKRRPVIVVVDNDSGAQPIFAAIKKATFSKSAIDGSLPYYHIRDNLYVVPVPKQKGKETAIEDFFEKAVLDTKLGGKEFSRQDKFDPATQYGKHLFSEHVVKKNKGSINFDGFEPVLDRIVQVLDAHSVK

SEQ ID NO: 1035 - protein, 601 aa, unidentified
  source 1..601: note = Related to CP062062.1; note = Janthinobacterium sp.
MYRSLCQGVSVVPFQTIYLFENMSRLASLKSATSLHDLGHILGYTAKGLAYILHGVPDTAKYSEFTIKKRSGGSRVISAPIPELKRLQQHLASLLNDCMVESDANRGVVNTLSHGFRPKHSIMTNAAMHRKHRYVFNLDLKDFFDTINFGRVWKFFEKNREFGLNTAMARTIAQIACHKGTLPQGSPSSPVISNLIAHILDIAMVQLAAKAKCHYSRYADDLTFSTNESEFPGLIATRIGTTTEWAIAPKVVREIVRCGFQVNPLKTRMQYKTRRQDVTGIVVNTKVNIRSEYSRDVRAKVSSLITKDTFSINKTFRNDTGAWTTETKDGTDAQLRGMLSFIDSVRLFERRRNEQIPPETHIPRIELKEMDGNLRVYRAFLLFTQFYRPVRPLIICEGKTDNVYVRCALHSLAAAHPMLAKTTGKISECLIDFFSYSKTSDRVLHLAGGTGDLGNFIANYANEFSRFKKIDSRNPVIILIDNDSGSSKIFSVIKKVTESTVNVDGSLKFYPIKDNLYVVPIPKIGGKETTIEHFFTKKILGTKLNGKVFSGTDKFDPATQYGKHLFAEYVIKKNKDDINFSKFSIILKNIEAALKFHYGMP

SEQ ID NO: 1036 - protein, 606 aa, unidentified
  source 1..606: note = Related to NZ_JAJJOZ010000002.1; note = Paracandidimonas sp.
MAAFKITPPKTTLELFQTATSRAALASLLNIEPKDLTYLLYVLKDEDKYSVFSVPKRGGGERQISSPISQIKSLQERLADSLERCINDIELLTGRSNSASHGFRPEKSILTNASVHRNKRFVFNLDLEDFFPTITGRRIRGFLINDKNFKFHKDVATTIAHIACLDGKLPQGSPCSPVISNLIAGILDFHLARLAKACGCRYTRYADDITFSTNKKDFPKEIAFCDVEHTHIWKVGKQLRGLIAKSGFVINEKKTRMQYYTSRQQVTGLVVNKKINVTTEYRKLVRAYVFSLINHGKFTLKTTTKDASGQVTITTATGTRAQLHGMLGFIHSVDNVYRAEVKLHPYNYLGHQQSTKESVGNQAIYRRFLLYTRFYDNDTPLIVCEGKTDGVYISNAVHQSKAHFPKLLKKNDDGNDVLSFQLFKYARKHKKKDHVYLPNFSTASILGVGSGGGGNLGNLIRTYHKELEKFKTPVGASPVVFIVDNDDGGRAVYKVIKNILHITVSGHERFVHLFANLYIVPVPFKGSKDTSIEDLFSEVDISKGLNSRSFDFSKKIDARAAVGKADFAYEFVAKQAERMDWGGFYPLLQNICDALADYAKYRKENV

SEQ ID NO: 1037 - protein, 601 aa, unidentified
  source 1..601: note = Related to NZ_JACJUU010000033.1; note = Pusillimonas minor
MAAFKLPAPKSALERFQYASSRAALASLLSIEPKDLTYLLYVLKNSEKYSLFSIPRKGGGLREINAPIPKIKSLQRRLAEGLELCVADIARLTGRSNSASHGFCPGKSILSNASVHRNKRYVFNLDLKDFFPTITGGRIRGFLINDKNFKLHKDVATTIAHIACLEGKLPQGSPCSPVISNLIAGILDFHLARLAKTNGCRYTRYADDITFSTNKKDFPKSIAFCEKDAHRWEIGKQLQGLIIKSGFVVNEKKTRMQYKTSRQQVTGLVVNTKVNVTREYRKLVRAYVFSLVNHGRYTIKTVVKDDKGRLVEETEEGRRSQLHGMLGFIHSVDNVYQSDVRDHPYNYPGQQRSNKNPTGNLAIYRKFLLYTLFYDNKMPLIVCEGKTDGVYISNAVHQSKAIFPQLLTKNDDGKDVLSFQLFKYTRQHKKKKSVYMPNFSTASILGASSGGGGNLGNLIRAYHKELNSFKAPIGDHPVIFIVDNDDGGRTVYKIIKETLKIAMSGHESFVRLFANLYIVPVPFNGNAQRSIEDLFTETDISKGLNGKRFDFSNNANSSASVGKAEFAYEFVAKQAETLDWTGFHSLLNNICAVLVDYETSA

SEQ ID NO: 1038 - protein, 596 aa, unidentified
  source 1..596: note = Related to JAHJHQ010000474.1; note = Gammaproteobacteria bacterium
MELLQAAKSRPGLAKLLQIEHSQLTYILYKKSDAEKYKTFEIPKRGGGLRTISAPIAELKLLQRRLGDVLYMCAVNVENSTGRINYSAHGFKPDRSILTNAAVHRNKRFVFNVDLKDFFPTISAKRIRGYLINDKYYRVVPEVATTIAHIASRDGILAQGAPSSPVISNLIAGILDFHLTRLAKSCGCRYTRYADDITFSTNKKEFPKEIARLVAGAEHNWEPGGALVRLIKKSGFEINGDKTRMQYKNSRQQVTGLVVNKKLNVTQEYRKLARAYVFSLITHGKYTVTKFTKNTLGNIEKEVIEGTFAQLHGMLGFIHSVDNVFRADRKNNPYNYVGYGGEGKNGDQKLQIFRRFLYYTNFYCNSAPLIVCEGKTDNAYISNAVHQSKALFPQLLKKGDEDNDVLSFFLMKYDRKHKKRRHIYLPNFSTVSILGVGSGGVDNLKNLLIGYRAEIDRFRAKPGPHPVIFIVDNDHAGKKVFGTAVELSSPKVSSITGDEKFINIFANIYIVPIPKVKKPETSIEDLFSAKDIPAAINGKPLKFSNDNDKSFAGKADFAFEHVVKNADAIDWGGFYPLLNNICDAIEHRKAKLEGAI

SEQ ID NO: 1039 - protein, 612 aa, unidentified
  source 1..612: note = Related to NZ_MCAS01000001.1; note = Paraburkholderia fungorum
MLVPEITTLERFQAAHSREALANLLDIKHQHLTYLLYVKKDAGKYATFSIPKRSGGTREIRAPIKELKSLQRRLANRLQNCISDVSRITGRENQSSHGFCPNKSILTNASAHRNKRYVLNLDLQDFFPTITGQRIRGFLINDRNFKFHRDVATTIAHIACVDGVLPQGSPCSPVISNLIAGILDSHLSRLAQKNGCHYTRYADDITFSTNKKEFPSQIGFLDKSTSDKWVLGKELRRLVALCGFVINDGKTRMQCKNSRQQVTGLVVNEKVNVTSEYRHLVRAYVFSLVNRGSYKIRSTLKGGDGNEIVSEKDGTPEQLHGMLGFIHSVDSVFRTELKNNPHNHLPPYQLSGKTTPDPLPLRNLTIYRKFLLYTRFYRTTTPLVVCEGKTDIVYISSAVHQSKAVFPQLIKKNDAGKDILAFQFFKYDRKHKKKEHVYMPNFSTAAILGVASGGGPNLSNLIRTYHKESKKFQSPCGDKPVVFVVDNDSGATEVLKAIKDCSGKACDRDDPFIHVFGNLYVVLVPRNGLDKMDTEGLFSPLDLAKGHNGKTFDFSKDADSSTSVGKAPFAFEFVAPKAKELDWTGFHPLLANIIAAFDHYKGTMAAIVPSPP

SEQ ID NO: 1040 - protein, 601 aa, unidentified
  source 1..601: note = Related to FSRU01000001.1; note = Paraburkholderia phenazinium
MSSEKTILQLFQAATSRSDVAALLDIKVKDLTYLLYVMKAEDKYKTFDIPKRSGGMRKINAPIKKVKSLQRKLADRLEQCLTLIEGTTGLTNPSSHGFRRGKSILTNAATHRNRRFVFNVDLQDFFPSITGRRIRGLLIKDRKFGFHKDVATTIAHIACHNGELPQGGPCSPVISNMIASVLDFHLSRLARDNGCAYTRYADDITFSTNKKTFPSAIAVCDEASGHNWKLGNQLAGLIKKSGFSVNEKKTRMQYRTSRQQVTGLVVNKRVNVTNEYKRLVRAYLFSLINHNKFTIKKVEPSELGDKVSLIDGTREQLHGMLGFVHSVDSVFRTNVKQHPQNYPGMQTDIKKDTKKPTGTLELYRRFLFFTRFFSNTLPLIVCEGKTDIVYLSNAVHQSKLAFPKLITKNSGGADVLNFRFLKYARKHKRKKNVYLPNFSTVQILGAGSGGGPNLGNLILNYQSEFPKFRAPKGKYPVIFVVDNDSGGKDVFNKVKNIVKITGHESFVRLFGNLYIVPLPLNGAAEKSIEDLFSPADIAKGMDGKPFDFTKDSSDATSIGKAGFAYDFVAKQAEDLEWSGFHPLLQNICAALDDYAALAATP

SEQ ID NO: 1041 - protein, 597 aa, unidentified
  source 1..597: note = Related to NZ_LOVK01000019.1; note = Burkholderia ubonensis
MSSEKSILQLFQAASSRSDVAALLDIKLKDLTYLLYVMKDHDKYKTFDIAKRSGGKRQISAPIKNVKSLQRKLADRLEQCLTLIESAAGRKNPSSHGFRRGKSILTNAATHRNRRYVFNVDLEDFFPSITGQRIRGLLIKDKKFGFHKDVATTIAHIACHNGKLPQGSPCSPVISNMVAAILDFHLSRLARDNGCVYTRYADDITFSTNQKEFPIAIAVRKESNGHVWEASNQLQGLIKKSGFSINVGKTRMQYKTSRQQVTGLVVNKKVNVTTEYRRLVRAYVFSLINRNGFTVKKSRRTELGDEIVSVDGTREQLHGMLSFVHSVDSVFRTNVKQHPQNYPGMQADAKKPTGTLDLYRRFLFFTRFFSNTLPLIVCEGKTDNVYLSNAVHQSKVEFPRLITKGNNGPDVLAFHFLKYARKHKRKKHIYLPNFSTVQILGAGSGGGPNLGGLILNYHAEYTKFRAPKGKFPVIFIVDNDSGGKAVFNKVKHIAKVSGHEPFVRLFGNLYIVPVPLVGAAEKSIEELFAPADLAKGMDGRSFDFSKDSSDATSIGKAGFAYDFVAKQAKDLDWSGFHPLLQNICAALNDYDALSATL

SEQ ID NO: 1042 - protein, 601 aa, unidentified
  source 1..601: note = Related to NZ_CABPSB010000021.1; note = Pandoraea anhela
MFPKSMLERFKVAKSRETLAMLLDIKHKDLTYLLYVKKDVEKYSVFSMAKKNGGSRDICAPIPELKSLQRKLATALERCIADVETITKKNNKASHGFRPGKSILTNAAVHRNRRYVFNVDLQDFFSSITGKRIRGFLIKDRNFAFDASVATAIAHIACREGKLPQGSPCSPVISNMIAGVLDVHLAKLAQMHGCTYTRYADDLTFSTNKEDFPVEIAFRNDSTGHTWRVGAELNRLILQSGFSINETKTRMQYRDSRQQVTGLVVNKKVNVSTEYRYLVRAYVASLVKNGTFTVKRQAVGVDGKPQTLEEEGVTAKLHGMLGFIHSVDSVFRTDVKKHPYNYPGQQANEKKPTGNLAIYRRFLIYTRFYANTVPLIVCEGKTDGVYISNAVHQTKNIFPSLVRKDGEGKDVLSFQLLKYARKHKKRKTVHLPNYSTITILGGGSGGGANLGNLIRAYHSELSKFKAPRGKQPVIFIVDNDSGGKTVFKVVKDTLKMTIIGTESFVHLFANLYVVPVPLGEDKERSIEGLFAPIDLAKGLNGKPFDFSSDSSSGTSVGKADFAYEFVAKHANELDWAGFHPLLENIVGAMDDYAERVRAADL

SEQ ID NO: 1043 - protein, 581 aa, unidentified
  source 1..581: note = Related to NZ_CABPSK010000001.1; note = Pandoraea pneumonica
MLLDIKHQDLTYLLYVKKDPERYNVFSIPKSSGGSRDICAPTSELKSLQRKLAAALEQCLVDIAALTKRTNKASHGFRPGKSILTNAAAHRNRRYVFNLDLKDFFPSISGQRIRGFLINDRYFAFDAKVATTIAHIACRDGVLPQGSPCSPVISNMIAGILDAHLSKLAQMHGCTYTRYADDLTFSTNKEVFPAAIAYRDDSKEHSWHVGAELQRLILRSGFSINEKKTRMQYRDSRQQVTGLVVNKKVNVSTEYRYLVRAYVASLVKNGKYTVKRQVPDVHGKLQTFEEEGTPAKLHGMLGFIHSVDSVFRTDIKRHPYNYPGQQANEKKPTGNLAIYRRFLIYTRFYANTVPLIVCEGKTDGVYISNAVHQSKNLFPSLVKKNVEKEDVLSFQLLKYARKHKKKKMVHLPNYSTITILGGGSGGGANLGNLIRAYHGELAKFKSPGGKQPVIFIVDNDSGGKTVFKVVKDTLKLTITGDESFVHLFANLYIVPVPLGNAKERSIEDLFSQVDIAKGLNGKPFDFSSESSSTTSVGKADFAYEFVAKQAKELDWAGFHPLLANIVSAMDDYAARLAAAAA

SEQ ID NO: 1044 - protein, 581 aa, unidentified
  source 1..581: note = Related to NZ_LT984806.1; note = Cupriavidus sp.
MLLDIKHQDLTYLLYVKKDAEKYNVFSIPKKSGGSRDIHAPIPELKSLQRKLATALEECIADIEKLTNRKNNASHGFRPGKSILTNASAHRNKRYVFNIDLKDFFPSITGKRIRGFLINDRNFGFDASVATTIAHIACRDGRLPQGSPCSPVISNMIAGILDAHLSKLAKAHGCIYTRYADDITFSTNKEEFPTAIAYCDDANEHCWRVGSELYRLVLRCGFSVNEKKTRMQYRDSRQQVTGLIVNKKINVSTEYRYLVRAYVAALVKNGKYTIKRQVADATGKLETVTEDGTPAQLHGMLGFIHSVDSVFRTDVKKHPYNYPGQQVSDKKPTGNLAIYRRFLIYTRFYANTLPLIVCEGKTDGVYISNAVHQSKTIFPSLVKKDGEGKDVLSFQLLKYARKHKKKKMVHLPNYSTITILGGGSGGGANLGNLIRAYHGELTRFKAPRGEQPVIFIVDNDSGGRTVFRVVKEVAKINITGEERFIHLFSNLYIVPIPLGSAKERSIESLFSDADIAKGLNGKPFDFSADSSSATSAGKADFAYEFVAKHAKDIDWTGFHPLLENIVGAMNDYSARVAAAAL

SEQ ID NO: 1045 - protein, 639 aa, unidentified
  source 1..639: note = Related to WSNR01000001.1; note = Ralstonia solanacearum
MAFGNNVRTYAASGIIRRTPCVARGQFAMECLRGPHSMLLPKNKLQWFQAAKSRAELAILLDIKHKDLTYLLYVKKDPEKYKIFSIPKKSGGSRDIHAPIPELKSLQRKLATALEECIADVEELTNEKNKASHGFCPGKSILTNASVHRNKRYVFNIDLEDFFPSITGQRVRGFFIKDKNFAFDPSVATAIAHIACRDGKLPQGSPCSPVISNLIAGILDVHLSKLAKVHGCIYTRYADDITFSTNKENFPATIAYRDEANEHCWKVGEELRRLILKCRFSINEKKTRMQYRSSRQQVTGLVVNKRVNVTSEYRYLVRAYVAALVKNGKYTIKRQIVDATGKQETISTDGTPAQLHGMLGFIHSVDSVFRTDVRKHPYNYPGQQANDKKPTGNLAIYRRFLIYTRFYANALPLIVCEGKTDGVYISNAVHQTKSIFPSLVKKDKDGKDVLSFQLLKYARKHKKKDAVYLPNYSTITILGGGSGGGANLGNLIRAYHGELGKFKAPRGKQPVIFIVDNDSGGKKVFSVIKEVLKKNLTGEEPFVRLFSNLYIVPIPLGGNKERSIEQLFSDVDIAKGLNGKSFDFSADSSSTTSVGKVDFAYEFVAKQAKNIDWKGFHPLLQNIVAAIDDYAAHVVAEGL

SEQ ID NO: 1046 - protein, 612 aa, unidentified
  source 1..612: note = Related to CP028290.1; note = Acidovorax cattleyae
MDTAYLYVTIGSRKSVCGATFTDGHHFPTVVLSSLSRLKAATSRAHLASILGIKLQDLTYLLYKKPIYKKYTSFEIPKRSGGKRKISAPIDSLKSLQRKVAEVLQECISEIETSTKKINRAAHGFRLDKSILTNAAMHRNKRYVFNIDLEDFFPSITFPRIRGFLTSDKNFNLAPVVATTIAQIACLESKLPQGSPCSPVISNLIAGILDVHLSRLAKVNGCTYTRYADDITFSTNKKDFPIAIAIESQGNANVWVLGRQLAGLIKKSGFSVNVSKTRMQYRTSRQQVTGLVVNKKISAPNEYRHQVRAYVNSLVRRGFYMVDNGEKVEEGGIQKLHGMLGFIHAVESVYRTDLQRQPYNYPGVVIDERRPTGNLSIYRRFLLYTRFYANHQPLLICEGKTDNVYIGNAIHQRKSEFPLLIKKNDDGKDVISFQFFKYARKHRRKSDIYLPNYSTAMILGNGSGGGPNLAGLMSAYRSELKKFTSPGGKCPVIFIVDSDSGGKPVFKVIEGITKKKPSGTELFIHVFENVYVIPISKDGKSNVSIEHLFSENDKSILMDGKPFDFSGESSDSILGKASFAYDFVAKYPEKIDWSGFSRLLKSISDILELHKA

SEQ ID NO: 1047 - protein, 592 aa, unidentified
  source 1..592: note = Related to NZ_JACBGE010000023.1; note = Hydrogenophaga sp.
MSSWGSTYKMRKIEALKSVKSINGLADLLGFKASALGYILFKLPDAQKYNSFTIPKRSGGRRSISAPVPRLMLLQKKISTLLNDCLAEIEGKLSSPAHGFKLGRSIFTNAAHHRGRRYVLNLDLKDFFPSIHFGRIAGYFEKSRDFGLDPKIARILANVLCHKSSLPQGSPSSPVVSNLLARMLDIHLAKLAKRNRLTYTRYADDLTFSTNLNVFPEAVAKRVSEHVWQLGPELISTIGSCGFSINDLKTRMLYRSSRQEVTGLVVNDKVSVPVEYRRWARAAVARLVKTGAYFKPTPKGFIGPQPATPDAGSLDHLEGCLSHIYNAHRFQRSQAALGRALHHAPDELNSDEHVYRRFLFYTKFYVPEKPVIVCEGETDSIYIAAAISAMGGYYPDLIDAKLKPGEQNRFNVRFFKHSSIAGRLLELNGGTDALKNFCRIYVDQTKKFKGGLLSQPTIVIVDNDKAGRDVVNYAKGIAKNQGLPAIKGLNYVFTRPNLYVVSIQSPANAPDCVIEDLFPAHLLNTKLGGKVLTLSNQKVGDNEYGKMYFAKHVVPHADPKDFSGFSQLLDTLVEVIADFSSRVQVQPATKKA

SEQ ID NO: 1048 - protein, 573 aa, unidentified
  source 1..573: note = Related to MRCN01000005.1; note = Variovorax boronicumulans
MKLGKLQAATSTIDLANLLGYQPSAFHYLIYKLSEAAKYSVFQIPKRNGGTREIRAPEPKLKLLQQHLAEYLSECLKEIESSSDYASPAHGFKPGRSIFTNAEIHRQRRFVLNIDLKDFFTTIHFGRVKGYFEKSREFRLNSTIALAIAKIACYDRCLPQGAPTSPVISNLIGRVLDGHMCKLAKKHKVTYSRYADDLTFSTNLKEFPSALAIQNEEHKWHHGKELGEVVKHAGFEINEKKTRVQYRASRQEVTGLIVNDRVSIRAEYRAWARVAVHRLVHKDGFFEPIAKTFVGPLPNEKAPGSLRKLEGILSFIYSAQVFRREMIIEKGGQNKEKKAELHSDERLYQKFLYYTKFYRNEKPLIVCEGKTDNVYIRAAIVAMGEKFPTLKQEKGEKDSLLVRFYPHPKYGNRLLEMGGGTAGLRNFSHTYVDKSRKFSQIAPRNPVIIVLDADDAGKSVYSFAQKNHAKKDDFQGIVFLHPNLYFICIPEPKNSTHKAIEGLFPSVLTDQKLGDKSFNWKNTPLKEKEYGKAYFAKNIVPLATPEMFVEFTPLLEGIAAAIEHFRKLPEAKS

SEQ ID NO: 1049 - protein, 601 aa, Achromobacter sp.
  source 1..601: note = Related to JADCNH010000007.1
MGPLDYQAVLYMSQLIALRNADTRREMAALLGYESSKLTYALHGLKEESRYTQFAIPKKNGGHRTISAPDDATKALQRKLAALLANCVREIRSVESPRLPGQRRGVLSHGFEPGLSIITNARVHRKRRWVFNIDLADFFDSIHFGRVRGYFENNRNFQLKPIAALVIAQIACFKSKLPQGSPSSPVIANLVASILDIHLSRLATQVGCSYTRYADDLTFSTNQEEFPSAIAHQVDRDSNRWEASKELVDVISRSGFKLNSRKTRMQYRHSRQEVTGLVVNRVVNVPSEYRREVRARVHRLITKGEFYISGIGEAGQSTQVAGTPAQLRGMLAFIDRVDLFNLNLARESKGEPPITPASDLVDLTRNEETYRKFLYFTEFYATPLPLVICEGSTDYVYLVHAIRALVDDFPELAYRTGDEEIKFKIRFYRYPRNSTRRLTRIRGGTADLKKFVATYGAEVQRFKAGGQQHPVIVDNDAAGREVYGPAKKLGVVFNKSRPLTRVSANLYLTATPLLGADESCIESLFKTEDTARLVDGKSFDPDDKADRSLTYSKAVFAHQIVAKHAAHINFDRFRPLLASLSDAVTMHRESRTEEVAPAAIT

SEQ ID NO: 1050 - protein, 604 aa, unidentified
  source 1..604: note = Related to NC_020813.1; note = Pseudobdellovibrio exovorus
MMVNYLKELQQAKSLQDLAKLLGTNESNLNILLYKISRKSLYRTFEIPKKGGGFRIISSPDESLKVVQKRLASILSSILEPNYQLKHKKKLQNPKKERATRAYSNKSVSHAFKQNLSIATNAEQHLKKKYVLNLDLEDFFGSINFGRVRGFFIKDKQFKLDPVVATHIANIICHMDKLPQGSPCSPVMSNLIGRLLDRHLLRLANRRGCFYTRYADDLTFSFNGPKFPTEIAILEQDQWVIGDALTEVIEKSGFKIKKSKVRMHYRTSRQMVTGLVVNCHVNVPAEYYRDTRSMCLNIFTTGSCYLKTNRNKNLSMQQLEGRLNYIYQIKKFKNIYADQGGYRHSRHNGKYKSDSNLDRSTQYADNSHQVSLDGIKNIYGRFLFYKNFFAPQMPLIYCEGKTDPVYLKCALLALETKYSGMVSSGKLNVRFFAGNNLDGEMMKLVDGTGGMKYLISSYNRMKKECKFNGVPLHPVIIVVDNDSAGLEVKKAAKKKRSMTNGVFHIFHNLYILEIPKNPTDAVETVIEDYFTDKTLNMKFKGKTFKSGDLDEKDAVNHFGKAVLSMLVKKRCKKIDFSKFSEIFDKVDEIIKDYQTILSTKTSQE

SEQ ID NO: 1051 - protein, 561 aa, unidentified
  source 1..561: note = Related to NZ_JADPQF010000006.1; note = Aliikangiella sp.
MSYLERLKSCSNLKEFAEYLGYKPSNLSYLLYVLNDDLKYRTFEISKKSKEARVIKAPEKSLKGLQRRLASRLENCQKEIESNLGIVNPVSHGFRKGHSIATNANIHKRKRYVFNLDIKDFFGTLDFGRVRGFFIKNYNYELAPEVATIIAQISCFDNSLPQGSPCSPIISNLIGNILDVKLLKLAKKNGCHYSRYADDLTFSTNQKVFPADIAIQDPIKGDWDCGAEIYKIMKLVRFQINDSKTRMLYRNSRQLVTGLVVNRKVNIAADYWRDTRAMLWNLFNTGSFFIKDNSEEVAEGTLSQLNGRLDFIYQIDAYNTNKSKGENVKTAKKEAYKKFLFFKSFYVNEMPTIVCEGKTDPIYLKCALESLADSHRELIDKDGKLNIGLFNYSKVAADVLELSGGNAPISKFLDQYQKMFSLFRVNSSQNPTIIILDNDGAGLRTLNHAKRGATSEVKMDGFDEPIQCLPENIYVFRIPRIIDKDLEIEDYFKEEAFQIKLNEKSFKRKGVIDKKKEFGKFLFAEKIVKNNKKNIDFSQFSLIFNVIQQIISHSKASAPTD

SEQ ID NO: 1052 - protein, 577 aa, unidentified
  source 1..577: note = Related to NZ_QJSU01000001.1; note = Psychrobacter fozii
MNDFSKLKALQKTTTLSELAHLLRVQPKTLSYNIYIIDKNKTTTKKYSEFSIPKKSGGTRIILAPNQNLKFIQSQLSKILYSCIDEINKEKGVTGSLSFGYRKKSSIFDNAKVHKKKKFVFNIDLKNYFDSINFGRVRGFFIKNRNFCLDENVATVIAQIACHNNILPQGSPVSPVISNLIGHILDIRLSKIASSCGCSYSRYCDDITFSTNEKVFPKKLAYSNTDKTWHPSKLLISIVSQSGFEINMQKVRMSLFYSQQRVTGLTVNKKVNTTRAYRDLVRALVHSLCTKGDFEFRGDFYKDKISETNKLNSLQGMLNYISRIEYQELRGNRENKRFYPNINKLTKSEITLRDYVLFRYFFNPEKVTIFGEGKTDKSHLKHYLNFRSNIDTSKNPMPESFSDWKNMNFHDFESRIFDVISKSGGTGDIKKLVTEYKKYCNKFCIPEVQNPVIILVDDDDGSADLLMKLEKVKKDKLIKVVRKDFYHIDNNLYLIFLPRINSTDTDIESFYSKEVIDIPRNGLYFEKSNLSNNKRNYSKKVFATEIIPRNQELVDWSKFDQIFEKVQLAIEHFQSKK

SEQ ID NO: 1053 - protein, 583 aa, unidentified
  source 1..583: note = Related to NZ_BMXO01000001.1; note = Halomonas johnsoniae
MSALKKLKSACDINDLAKLLNFKSSNIAYIIYRLKEEEKYSSFEIKKSSGGLRTIDAPEPKLKNLQSNLAYLLQECLTEIEKTSQIKSTASQAFQPKKSIITNASLHRKKRFLFNLDIENYFGSINFGRVRGFFIKNKNFELDPKIATLIAQIACYRNRLPQGSPASPIISNLISHILDMRLIELSAKNKCFYTRYADDITFSTNLTEFPPEIAYESEDKIWSPSQKLTKLILKNGFNINYQKVRMQLHFSRQEVTGLTTNRIINTPIEYRKNARAMVRSLIMKGSFHMPKEEQEASVEQLHGILSFIDHVKLVTKHGHSNDPHSLPAAKEEKKSSFEKDFADFLFYKYCYAPTKPLIICEGKTDNIYLKCAIKSLDSKYPKLIHPNNKQDFKIDFFKYSRSQGGDSQKGRLLELRGGEGNLKNFISAYDKKCTKIRAPGKLHPVIVLIDNDKGGKQILSLIKNLKRETSTVTGNEDYYFINNNLYVIPIPDIMGNKNTTIEDFFYKKTLNRKINGRVFNRKNDHSGKNFYGKYEFAQKIVQKDLKNINFKKFIKILDRFELVISDYKRYLKSKALQNSRANH

SEQ ID NO: 1054 - protein, 573 aa, unidentified
  source 1..573: note = Related to NZ_JACTAG010000001.1; note = Sulfitobacter aestuariivivens
MTTMVSRLQACIGRSDLSSLLGFKPKAFAYVLFHVADAEKYTDFEIPKKNGGVRVISAPIPQLKLLQSRLSECLQTCLAEIEKADGVKESCAISHGFRKGRSIYSNAEVHKGRRWVFNIDLEDFFPSINFGRVRGYFIKNKNFALSPDVATVIAQIACHKNALPQGSPCSPVISNLLAHMLDMRISRIAKKARCSYTRYADDLTFSCSKKLFPDGIAQLSQADQGVWIPSDKLRHTIFSSGFKINKSKTRMQVYWSRQDATGLVVNAKVNVPREYVKTARAQCHQLITKGSVFNKEELWGQDVKVPYDPAKLQGKLSHIFNIKGQDLNFERQKGSLKTWPNFYRDYRSFLDYQSFGSSPKPVFLFEGKTDNIYIRCALNSLAADYPELISDGAPKQLMVRLFNYSRPTNAVQQLAGGTGDLQLLINNYELRLRGFSAATLAFPVILVVDNDKGSTDLFKAAGSKSDTKAKVDGSQPFYHITKNLYLVPTPTPKGMVESYIETFLPNSVLKKKLGKKTFHLPEKGFDVTKHFGKVLLAEQIVQRQQKAISFVGFKPLLDNMRAAMQDYAAKMAP

SEQ ID NO: 1055 - protein, 591 aa, unidentified
  source 1..591: note = Related to NZ_FOPM01000016.1; note = Methylobacterium gossipiicola
MTLTVILRIESACKLTMSIERMNQLKNSQGKFGFANALGISLKQLTRAVYGIPVQNRYSTFLIPKSTGGHRVIHVPHREIKFVQKALANLLQICLSEIETKKGVVRPVSHGFHPGRSIFSNAWAHRNKNYVMNFDLENFFHSIHFGRICSFFEKNNDFLLHPKVANLIANLSCHRIDGGGTFLPQGSPCSPIISNFIAMPLDQKLRKLARDNGCRYSRYADDITFSTNKDLFPDDIAIFDVSSKKWIAGSGILKVISKSGFKLNIQKTNMSIAGTRQIVTGLVVNKQVSVSRPVYKWARAAADHMFKDGVAFKRDPSTASIHTTDRQVTLGHIIGQVNHICYARRKSNIPLLNSRKMVGPELLYRRLTYYERFFAHKETLIICEGETDNTYLKIAIDKLGHKFKNVARRADGNPQVKLLNVTPHITIYTALNGGSDQQKSFLQNYDNDMSIVGERWADKCVIIFGDNDSGANSIMQILRGKSIIPGDIKTADFTYYTRNLYVILTPIPNKNSISMIEDFLDPNASRVKLENKVFHLGGKGFDEKKHYGKKALSEHVRQNASKYDFSKFEIILKRIDLAIDDYSSRLAALKL

SEQ ID NO: 1056 - protein, 575 aa, unidentified
  source 1..575: note = Related to JAKSXV010000098.1; note = Methylobacterium sp.
MSNGQLDRLKNAQGKLGLAMALGVPLRQLTRAVYGIPIPNRYTVFEIRKSSGGSRIIHVPHREIKFVQKSLAQLLQSCLSEIETRNGVKHPVSHGFHPKRSIFSNAWPHRNKNYVMNLDLEDFFHSIHFGRVYGYFEKNNDFLLNPKVANLIANISCHRNDVGGTFLPQGSPCSPVISNLIARPLDSKLRIFAKENKCRYTRYADDITFSTNLDNFPESIALLDSVKKYWVVGSGTTKIITKSGFRLNLGKTRMSVAGTRQMVTGLVVNRQVSVNKTTYKWARAASDRLFKEGVAFKRDPSTASIHTTDRQVTIAQLIGQVNHICHARRKSNIPLLHSRDMVGPELLYRRLTYYDRFFSNKNTLIICEGETDNIYLKIALKKFGANFKNLYNHVDDKATVQLLNITTHVTSYTALNGGSDQQKSFLQNFDNDMRIVKDRWADKPVILLGDNDSGANAIMQILRGKSIIAGDIKTAQFTHYIKNLYVIFTPVTSKTDNSMIEDFLDPKASKAILGGKSFHLGGKGFDEKKHYGKKALAEHVKENADKYDFSSFNSILKRLDLAVGDYAERLARSMA

SEQ ID NO: 1057 - protein, 586 aa, unidentified
  source 1..586: note = Related to QYRN01000007.1; note = Aureimonas flava
MSSLPSESTLERLKACKGKLGLAMLLGVQLKHLTHALYGIPMPVRYAVFTIPKSSGGVRIIHAPNDRLKFVQSALAAVLQECLIEIETKSGVQRPVSHAFHPKRSIFSNAWVHRRKRFVVNFDLQDFFPSLHFGRVCKFFEKSSDFQLHPKVANLIANLATHPDGAGGTFLPQGSPCSPVISNLLTRPLDLRLRKLAQRCDCRYSRYADDLTFSSNTTAFPEAIAKLDNECWIAGDEFEKIVVQSGFFLNHAKTRMALKGTRQVVTGLVVNKQVSVNRDTYKWLRAACDSMFKKGIASRHDPRTVKVYTMARKLELKQLIGHAEHVFHARRKSGIELPAMSLMKGPELLLKRLIYYERFFAHDRPIVICEGDTDYVYLRIALAKFGHQFANLAPSKEGLPAIRFLRFTPVIGRFTGLQGGSDQLKTFLQNWDVNMAMVGDRYPSQPVILFMDNDSGANATMQILRGKKVISQDIKMMEFTHATKNLYVIFTPVPDVKSQSCIEDFVDPTAKSVKLDGKTFHPGGNATYQGKKWSDTLHYGKRVLAEKVVAENVAKYDFSLFKPILDRLDKAIADYPKQVAKIVASK

SEQ ID NO: 1058 - protein, 548 aa, unidentified
  source 1..548: note = Related to JAFUJV010000004.1; note = Treponema sp.
MKYLKRLQDARTTEDFAKLLGFKAGNVSYLVYHYSGQKYYSFQIPKKNGGTRTINAPNDELKNLQRRLSDYLYKCLEEIHLQNNIHDTVSYGYQKNKCIYDNALIHRNRRYVFNVDLKDFFNSINFGRVRGFFINNKNFKLDPHIATLIAQTACNDNILPQGSPLSPIITILIGGILDHRILRLTHKIRCSYSRYVDDLTFSTNLKTFPPEIAFFDETGKWVIGKELNNILKTSGFESNEKKVSMQYKDSRQTSVGLIVNKKVDVPREYYKTVRAMCNSLITRGYFVKKDAAEDEPPTLNQLEGMLNYIFSVKSKNTNVRVKDHYPGFQNIYIDFYIYRFFFANEKPILFTEGKTDIIYIRSALKHLKAEYPKLITSEGLLNFQLMWINDYLQSVFHISSGCSGSLKLLVQYESFLKRYKKTESMNQVFFLFDHDSGIKEIVNKYKKYDSAKDYFSKNDFSSLSVEVYKNVRFIFTHEEHDKYIEQYFDEALLSEKINGKSFTPENNVHDPEHYFGKQVFATKIIKKKQDSIDYSNFRPLFNELSKYL

SEQ ID NO: 1059 - protein, 562 aa, Salmonella sp.
  source 1..562: note = Related to AANPCH010000002.1; note = Salmonella bongori
MSFLTKLKQAKNVSDVAHILGCSPAALTYTIYKNNAKYTTFKIKKKSGGERCITSPDRKLKELQKRLAKGLQEYFDEINKGRDTETSAHGFVKGKSILTNAYKHKNKNLVLNIDLENFFDTINFGRVRGYFIYNKGFALTEKVASVIAQIACNENKLPQGSPCSPIISNLIGQILDVKLSSMAKKNKCFYTRYVDDITFSTNQKAFPESIANINDTQVIIGKKLRNEIEKAGFKVNDSKTRMQLRNSRQDVTGLVVNQKVSVRSEMRHLARAMTDSFFKNNTAFISIDGKEENISIERLNGILSFIYNIRTGVYGANGCKNTSLHDSFERMYACFLFYKNFAANKSTVIICEGETDNIYLKYAFRSLVGCYPELQVIKKGVKKRLDLSIYRQTKTLENLLNITDGTGNNIKFIKTYRQSMRRYASPPKVFPVIVLLDNDSGSSSIDGIINRDFIDTREVCDGFTYVCENLYIVKTPLIDKKKESKIEDFFDSHTLSKTLGSKTFTSENKFDKEQHYGKKKFAEIIVKQNYKEIDFSNFKKIIDLFNDVILHYQEKRNQRFNF

SEQ ID NO: 1060 - protein, 557 aa, Salmonella sp.
  source 1..557: note = Related to CP074306.1; note = Salmonella enterica
MSFLAKLKQAQSTSDIAKILGCSPAALTYTLYKNRTKYTEFKIKKKNGGERIISVPEKKLKELQRRLSKGLQECINEINAKRKFETSSHGFVKGKSIFTNAYKHKNKNLVLNIDLANFFDSINFGRVRGYFIHNREFALSDKVSSILAQIVCYDNKLPQGSPCSPVISNLIAQILDVKLSALAKKHNCYYTRYVDDITFSTNQNKFSASIISFQEREVIVSGQLKKEIERAGFKINSGKTRLQFKNSRQDVTGLVVNKKVNVKHELKHIARAMTNSFFKLNSAYISIDNRVEEVSLDRLNGMLSFIYHIRSKMNDNNDTKNKGTLDSFDKMYSKFLFYKTFAANKSTVVICEGETDNIYLQYAFQNLVGSYPELQLIKKGVKKKINIFLYKQTKTLSHLLNVTDGTGNNIKLIKTYKQNMSGFVCPPQNYPVILLMDNDSGSNGIEGLINRDFSDTRKIHDGYTYVCENLYVVKTPLIDGKKETKIEDFFDCKTLSKKLGDKTFSASNNFDKSLYFGKRKFAELIVKQNHKEIDFSNFKMIIDLFYLVICDYQKRLS

SEQ ID NO: 1061 - protein, 448 aa, unidentified
  source 1..448: note = Related to NZ_LT615367.1; note = Dickeya aquatica
MSFLAKLKESQNISDIANLLGCSPKSLAYTIYKSQNNYITFKIRKKNGGHRDIKAPAKKLKELQRRLAKGLQECIEEINGKKNKRISSHGYTKGKSIFTNAYEHKNKNLVLNLDLENFFDSINFGRVRGYFIHNKNFMLPEKTATIIAQIACHENSLPQGSPCSPVISNMIAQILDVKLSALAKKNKCFYTRYVDDLTISTNRNIFPNDIMELHDHKPIIGKSLINEIKRSGFTINDNKTRVQCKDSRQDVTGLIVNKKVNVKSEFKHLARAMANNFFKNNQAFISLNGEKTPISLEKLNGMLSFIYQIRNRMDMQNANGQPRKTHDSFEKTYSDFLFYKNFAANNRTVVICEGETDNIYLNYAFKNLVSYYPELQNYGKGIKKRIDIHLFKQTKLLYRLLNITDGAGNNIKLLNTYQKRMSRFSSPRESFQLYCYLITTADQLGSKE

SEQ ID NO: 1062 - protein, 568 aa, unidentified
  source 1..568: note = Related to JAGGMP010000001.1; note = Erwinia rhapontici
MSALETLKKLKNLKDVAVFLDCKPKFLSYLLFFEKDKYSEFELRKKSGGVRIIHAPNKKLKAIQKKLSDVLYECQDEIYPKQKFKVLSHGFVRKEKIKNKILIHGALSNAKAHKNKNNVFNIDLENYFGSFNFGRVRGFFIKNKDFLLTDKCATVIAQIACYNNSLPQGSPCSPIISNLISRSLDVKLANLAKRNSATYSRYVDDITISTNKKIFPKNIALNDSHKISLGDEFSKIISSSGFTVNSKKTRLQYSDSRQEVTGLVVNKFVNIPHEYRSNLRPKAHSLFLTNSYFYVDNEGNKCEGSIDKLNGLFSYIHFIRKNTINHGKYIRDKNGELALDGSDYLYSQFLYYKYFANNDKPIVICEGKTDVIYLKAVLKTLAADYPDLIEVNNDKTSLKIQILPASKTVQDLLGLLTGTADLRKFILSYEARLEDFKSPSLLNPVIVLVDNDDGPRKINNAIKDKYKISPEAGKPSIIFSNMVYVRTPELEKKKETSIEDFFSDGIRKIKIDGRTFSPDIDDDTTAHFGKKTFAEEVILKKRKTLDFTSFKPVLNLLVESIRIYKKGA

SEQ ID NO: 1063 - protein, 311 aa, unidentified
  source 1..311: note = Related to NZ_NRNL01000028.1; note = Cronobacter malonaticus
MTTLETLKKLKDLKDVAGFLDCKPKFLSYLLFFEKEKYTIFKVPKKNGGVREIYAPNQKLKAIQKKLSDILYECYSEIYPKNKYKVISHGFVKKENNSKKEVIYGALSNAVEHKNKRNVLNVDLENYFGSFNFGRVRGFFIKNKDFALSEKCATVIAQIACYNNLLPQGSPCSPIIANLITRPLDIKLACLAKKNSATYSRYVDDITISTNKKTLPKCFCLNNKHEIFPGKALVEIINKSGFSINDNKTRLQYSDSRQEVTGLVVNKFVNVPYEYRHNLRPKAHSLFNENSYFYEDNEGNRLSGSIEKLNG

SEQ ID NO: 1064 - protein, 578 aa, unidentified
  source 1..578: note = Related to SZZV01000010.1; note = Pantoea sp.
MMSSLESLKKLKNLKDVATFLGCKPKALSYLLFFDENKYRTFEIKKKSGGSRKILAPNDKLKAIQKILSNVLYDCYAEIYPTKKYSVISHGYVRKEKNQINKENNHTKDQNLSYGTITNSIPHKNKHNVLNIDLADYFSSFNLGRVRGFFIKNESFKLSTECATVLAQIACYENELPQGSPCSPIIANLISRSLDVKLAGLAKENSATYTRYVDDITISTNKKVFPTKIAGVIDNKVTLGKSLQRIVIKSGFTINPPKSRLQFSDSRQEVTGLIVNKFVNVPSNYRHTLRPMVHSLFKNNTYTYMNDEGDNVKGSIDRLNGMLSYIHYIRSNTINKGKYVRDDKGGIRLDGSDQLYADFLFYKYFANNTRPVLICEGKTDVIYLKSTLKALADNYPSLIEKDGSKTHLKIQILPASKTIQNLLGLLSGADDLKKFMETYEARFSKYAKPSALHPVIVLVDNDEGPRNINSKIKNKYKVIPSPGTPVKVWGNLLYVQTPEIVGMKNTAIEDFFSSEIRKIKVEGRTFSPQTETETIAHYGKRVFAEDVISKKRKILNFDSFKPILDLLVSSIDLHNLKK

SEQ ID NO: 1065 - protein, 585 aa, unidentified
  source 1..585: note = Related to NSDJ01000002.1; note = Rahnella variigena
MATGGSPYECDKSVYRPLPSIFNMDIMSKLADIRSLKSLSDVADFLGCEPKNLAYSLYFAKNKYKSFEIYKKSGGVRIINAPNEKLKSLQKILAGYLSECLDEIYNTHGGNKISHGFVKGKTIITNASQHRNKNLVFNIDLSDFFNTINFGRVRGFFIKNKYFSMDEKAATVFSQIACHEGRLPQGSPCSPVISNLILNILDIRLASLAFKNSCNYTRYADDLTFSTNRKEFPIDIVKDELGDWVVGNKLHKEITKCGFIINKSKTRLQYKDSRQDVTGLVVNKFVNVPSDYRRLTKSMAHELFRTNEFYIKLPDGESIEGTQNQLNGMLSYIYSTRKITIHKNFDSTIPRDGKGIPILDASDRLYSDFLFYKNFVANDKPIVICEGKTDVVYLKHAIKSRYEKYPNLVEIKKKEKALKIQILGASFLVNHLLDLLTGTTAIKRFVESYATRLSKYKCPPLNNPVIILTDNDDGIKGLIHAINGKYKESEDRDGIYFITSNLYLIRTPLLNDKNSSKIEDFFTKELLARKLDGKTFHPDNDTDNTMHYSKQVFVEKIIKKEYKSIDFSGFDSIINLLEKTIIDHK

SEQ ID NO: 1066 - protein, 557 aa, unidentified
  source 1..557: note = Related to CP060807.1; note = Klebsiella variicola
MSKLTEISQLQSLRDVAIFLGCEPKNLAYSLYFEKNKYKSFEIHKKSGGVRIINAPNEKLKSLQKILACQLNECLEEIYRMHGGNKISHGFTKGKTIITNASKHRNKRLVFNIDLTDFFSTINFGRVRGFFIKNNHFNLNEKAATILAQIACHEGKLPQGSPCSPVISNLILNILDVRLAKLASTNSCTYTRYADDLTFSTNKNDFPSDIARQSAENTWIPGSRVRKEILRSGFSVNDKKTRLQYYDSRQDVTGLVVNKVVNVPSEYRRLVKSMVHQLFNTNEFYLKLSDGESLEGSQEQLGGMLNYIYSTRKTTIHHGKVKRDAEGNLLLDASDRMYADFLFYKYFVANNKPIIICEGKTDVAYMKYAIKSRSNHFPSLVEETEGKKQLKIQILAASNTVNHLLDLLNGTSSIKKFIELYDSKLKKYKNPILKNPVIILTDNDSGSSNLIPTIRGKYKNSEEKDGFYFITKNLYLIKTPLINGNDSSKIEDFFTKELLSRKLDGKTFHPDNDTDNTMHYSKNVFVEKIIRKEYKSIDFSGFDSILNFITNVISTHK

SEQ ID NO: 1067 - protein, 558 aa, unidentified
  source 1..558: note = Related to NZ_CAKLIS010000018.1; note = Pectobacterium versatile
MSELIEISKLQNLSDVAHYLGCKPQSLAYTLYHEKNKYTTFEIKKKNGGVRLINSPCDKLKVLQRILANKLSECLDEIYKENGGNKISHGFVKNKTIITNASEHRNKNLVFNIDLTDFFNTINFGRVRGFFIKNNNFMLNEKVATIFAQIACHDGKLPQGSPCSPVISNLILNILDIRLAKLAFSSNCYYTRYADDLTFSTNKKVFSKNIVKYRDDGAPESGPLLTKEISRSGFIINDKKTRLQFCDSRQDVTGLIVNKVVNIPSDYRRLIKAMTHELFCKNSYYIKNANKKDQKGNLEQLNGMLSYIYSVRKNTIHKNITTRDSKGNPRLDANEKIYSDFLFYRYFVANDKPILICEGKTDVAYIKYAIRSRSSRYNSLVEEEYGEKKLKIQVLNSSGQVNHLLDLLNGTSSIKKFIENYSARLKKYEKPLFTNPVIILTDNDDGSSKLVPAIKGKYRGSKEINGFHFITNNLFLIKTPLFPDKPDSKIEDFFTKELLSRKLNGKTFHPDNDTDNTIHYSKNIFVEEIIRKEYKSIDFSGFDEILDLIVSVIDEYKK

SEQ ID NO: 1068 - protein, 638 aa, unidentified
  source 1..638: note = Related to NZ_JAFBFW010000001.1; note = Pantoea coffeiphila
MSWRFLGSCQVCVRVPINLFKWGRRVNRLLLLKSAKTKPDLARILGVKPSALTHCLYIVKPENQYVQFEIPKRNGGKRFISAPSGMLKTLQSSLSDLLLDCLDEIIFLKFPDSEITRPKAKNSLFLKVKCSGSETKQPSLSHGFERKRSIITNAMMHLGKKHVFNIDLENFFSSFNFGRVRGFFIKNGNFLLEPEIATVIAKIACYNNELPQGSPCSPVISNLITHALDIKLAAVAAKHSCTYTRYADDITFSTRKESLPSSIAKSDNHTFVAGKVIRNEIVRSGFSINESKTRNQYKDSRQEVTGLVVNKKPNTKKEYWRLVRAQCNHLFNTGEFKETINGAEVSGNIHRLEGKLTFIDQVDHYNRLRQGEKLNPKYHLKKDAIRKSNPSIRRYLHTSRETTFSKFLFYRWFYGNTKPTILTEGQTDNIYLKSAIWKLAANFPKLATGKSATEPYKALTRFFKYNERTRYLLELFGGGDYLRDFVDNYKELFNAYKAPKPSHPVIIFVDNDSGPNNLINKVKRVKGIEIFPAGVGLADIRQSEFVHIFCNLYLVLTPQGAGSSETDIEYFFSDADRLREHKGKRFNTVADRDEVNDLSKEAFATHIVKTQKGIIDFSRFTHLLERIEKVIDHYNSIK

SEQ ID NO: 1069 - protein, 611 aa, unidentified
  source 1..611: note = Related to AP025009.1; note = Raoultella ornithinolytica
MKKLDLLKAAKTKPDLAKLLGVKPSALTYCLYKTKPETQYVQFEIPKKNGGNRIISAPSGMLKNIQASLSELLLDCLDEIIIDKFPNSEIARQKAKNSIILKLKCSGSEIKQPSLSHGFERKRSIITNAMMHLGKKHVFNIDLENFFGSFNFGRVRGFFIKNKNFLLEPEIATVIAKIACYNNELPQGSPCSPVISNLITHALDIKLAAVASKYSCTYSRYADDITFSTRKDSLPSSIAKSDNHTFVAGKVIKSEIKRSGFSINETKTRNQYKDSRQEVTGLVVNKKPNTKKEYWRLVRAQCNHLFRTGQFKEIVDGVEVVGNINRLEGKLNFIDQVDHYNRLRQSEKLNPKYHLKKDALKNGYAKSRRYLHTSREKTFSKFLFYRMFYGNKKPTILTEGKTDNVYLKAAIHKLAALFPKLAIEKTALAPYKLLTQFVEYNERTKYLLELFGGTDYLKDFVIHYRHYFHDYKAPKPSNPVIIFVDNDSGPKNLINYVNGVEGIQIFPAGVADIRQSDFVHIFCNLYLVLTPQVEGCPETDIEYFFSNVDRLKQHKGKCFNTVADRDPSNDLSKEAFATHIVNAHKNDIDFSRFTSLLERLEKVIDHYNLIK

SEQ ID NO: 1070 - protein, 611 aa, unidentified
  source 1..611: note = Related to LMLK01000003.1; note = Erwinia sp.
MKTLQSLKEAKTKPQLAKILGIKPSTLTHCLYVLNTNNQYIKFEIPKKNGGIRVIHAPTPILKMIQKSLSKLLLNCLDEIIFTKFPNSELARQKAKNSGILKVKISNAEIKQPSLSHGFERNRSIITNAMMHLDKKFVFNIDLHDFFGSFNFGRVRGYFIKNRNFELHPDIATVIAKIACYQNKLPQGSPCSPVISNLITHALDIKLAKLAKLSSSTYTRYADDITFSTRLSELPKSIAEKENHKYEPSKKITKEINRSGFSINTSKTRNQYADSRQDVTGLIVNKKPNTKKEYCRLARSQCNHLFKRGEFKELINGNEEKGNINSLEGKLNFIDQIDHYNRLRQTKKLNPKYQLKKDTIKNGNAKLRRYLHSSREKTFSQFIFYRHFYGNELPTILTEGKTDNVYLKSAINKLSAQFPELSRSKTSQAEYKLLLKFFNYNERTRFLLELFGGTDYLRDFIVNYKKNFSYYQAPKPKKPVIILVDNDSGPRDLINYAKNIEGVMIYPAGTTEIRDADFVHIFHNLYLVLTPKKPGHNETDIELFFKDVDRLRIYNGKHFNTAAQRDKNRDLSKEAFAEHVIHAQKDVIDFSEFPAILERLVKAMNHYDTIK

SEQ ID NO: 1071 - protein, 549 aa, unidentified
  source 1..549: note = Related to CP071802.1; note = Yersinia ruckeri
MIQSSLSGLLLDCLDEIIHNKFPESELARQKAKNSKILKIKCSSAEIKQPSLSHGFERKRSIITNAMMHLGKKYVFNIDLEDFFGSFNFGRVRGFFIKNRNFLLDPEIATVIAKIACCNNELPQGSPCSPVITNLITHSLDIKLAAIAKKNSFTYTRYADDITFSTRKSDFSSSIAKKQNNKYVISKRVRNEIILSGFIINESKTRNQYKDSRQEVTGLVVNKKPNTKKEYWRLVRAQCNHLFKNGEFVEIIDSKETKGNINRLEGKLNFIDQIDHYNRLRQGEKLNPKYHLKKDAIKKGQAKSRRCLHNSREKTFSKFLFYRLFYGNNLPTILTEGKTDNVYLKAAIHKLASLFPKLAVVKSASSPYKILTNFIDYNERTKYLLELYGGADYLKDFIIHYKNNFNYYKAPKPSNPVIIFVDNDSGPKDLINYVSKINDIKISPTGLMDIRSSEFVHIFHNLYLVLTPQIKGYAETDIEHFFTDTDRLRPHKGKVFNTASKRDPDNDLSKESFATHIVHAKKHDIDFSGFTSLLERLEKVINHYDTVKE

SEQ ID NO: 1072 - protein, 547 aa, Escherichia coli
  source 1..547: note = Related to NZ_CP080146.1
MQSSLSRLLLDCLDEIVCIKFPDSELARQKAKNSKILKLKCSNSEIKQPSLSHGFERKRSIITNAMMHLGKKYVFNIDLDNFFGSFNFGRVRGFFIKNRNFALDPEIATVIAKIACYNNELPQGSPCSPVITNLITHSLDIKLAAIASRNSSTFTRYADDITFSTRKGEFPSAIAKNQNGKYIVSKKIRGEITRSGFIINDGKTRNQYKDSRQDVTGLVVNKKPNTKKEYWRLVRAQCDHLFKHGEFLEVIDGKEIKGNVNTLAGKLNFIDQVDHYNRLRQGEKLNPKYHLKKDANKNGHAKKRRYLHSSREKTFSEFLFYRLFYGNELPTILTEGKTDNIYLKAAIHKLASSFPNLAVAESPGLSYKPRTKFVNYNERTKYLLELYGGADYLKDFVIHYKQHFNRYKAPKPSNPVIILVDNDSGPKDLINYVSKVDNIGIFPTGVPDIRASEFVHIFCNLYLVLTPQVKGYTGTDIEHFFKDADRLRPHKGKFFNTVSKRDHDNDLSKESFATHIVHAHKHEIDFSGFTSLLERLVKVINHFDTVK

SEQ ID NO: 1073 - protein, 618 aa, unidentified
  source 1..618: note = Related to NZ_CP065024.1; note = Rahnella inusitata
MNRLQSLKEAKTKPDLAKLLDVKPSALTYCLYILKPENQYTQFKIPKKNGGERTINAPNGLLKSIQSSLSKLLLDCLDEIIFNKFPDSELAAEKANNSKVLKIKCSAAEIKQPSLSHGFERKRSIITNAMMHLGKKNVFNIDLENFFGSFNFGRVRGFFIKNRNFELDQEIATVIAKIACYNNELPQGSPSSPVITNLITHSLDIKLAALAVKNSCTYTRYADDITFSTRKIDFPSFIANDKCGKFAPSKKLRSEIVRSGFLINDKKTRNQYKDSRQDVTGLIVNKKPNTKKEYWRLVRAQCDHLFKYGTFVEKIDDIEIKGNINRLEGKLNFIDQLDHYNRLRQAEKLNPKYQLKKDPTKNTQAKTRRYLHGGRESTFSRFLFYRLFYGNTLPTILTEGKTDNVYLKAAIHKLAALFPKLASEKSAGSPYKSLTRFLDYNERTKYLLELFGGADYLKDFVIHYKSYYKYYTAPEPSHPVIIFVDNDTGPKDLINYINKIDNASIFPKGLKDIRSSDFVHVFHNLYLVLTPQTKGYSETDIEHFFKDKDRLRQYKGKSFNTVSLRDPNNDLSKEAFSKHIIHANKHDIDFSGFTSLLERLVKVIEHFNSLKIKNSSAP

SEQ ID NO: 1074 - protein, 613 aa, Vibrio parahaemolyticus
  source 1..613: note = Related to LQCW01000011.1
MERLQLLKNAKTKPDLAALLNIKPSVLTFCLYKVKPQNQYTQFIIPKKNGGERIINAPTGVLKSIQSALSNLLLDCLDEITRNKFPKSELVIEKAKHSKVLKVKCSNSQSKQPTLSHGFERKRSIITNAMMHLGKRHVFNIDLEDFFASFNFGRVRGFFIKNKNFELEPDIATVIAQIACHNNELPQGSPCSPVITNLITHSLDIKLSALASKNSCTYTRYADDITFSTRKKEFPIDIARKKGEQFISGKKLRSEIIRSGFKINKGKTRNQYKDSRQDVTGLIVNKKPNTKKEYWRKVRAQCDYLFKYGEFIDTVNGKEVKGNIHSLEGKLNFIDQVDHYNRLRQTLPLNSKYQLKKDAIKNGQAKLRRYLHSGREETFSKFLFYRLFYANESPTILTEGKTDNIYLKAAIHKLAGSYPRLASEKNDNSPYKLLTRFVEYNERTKYLLELYGGADYLKDFVVHYKHHFKYYEAPNPQNPVVIFVDNDSGPNNLINYVNKINGKCIYPEHINDIRASEFVHVFHNLYLVLTPQVAGFKETDIEHFFVESDRLRPYKGMIFNTISKRNPEKDLSKDAFATHIIHAKKNEIDFNGFKSLLDRIVKVIEHYDSINKK

SEQ ID NO: 1075 - protein, 611 aa, Vibrio sp.
  source 1..611: note = Related to KB662759.1; note = Vibrio cholerae
MTRLQALKKAKTKPELAHLLNIKPSVLTYCLYKIKPQNQYTQFKIPKKNGGERTINAPTGTLKSIQSALSELLLDCSDEITRNKYPESELAREKAKHSKILKVKCSNSIIKQPTLSHGFERKRSIITNAMMHLGKKHVFNIDLEDFFGSFNFGRVRGFFIKNKQFELEPEIATVIAQIACYNNELPQGSPCSPVITNLITHSLDIKLAALASKNSCTYTRYADDITFSTRKKEFPSFIAQQKDDQFFASKKLRSEIVRSGFKINPSKTRNQYKDSRQDVTGLIVNKKPNTKKEYWRTVRAQCDYLFKYGEFIEVIDGEGVKGNINSLEGKLNFIDQVDHYNRLRQTLPLNPKYQFKKDTIKNGQAKLRRYLHSSREDTFSKFLFYRFFYASELPTILTEGKTDNVYLKAAIHRLASSYPELALEKKGDSPYKLLTRFVEYNERTKYLLELYGGADYLKDFVIHYKQNFRFYKAPKPENPVIIFVDNDSGPNNLINYVSGIQGKYIYPESVKDIRASEFVHIFHNLYLVLTPQVAGFKETDIEHFFTDNDRLREYKGMCFNTILNRKPEKDLSKDAFATHIVHAKKNEIDFDGFKILLDRMVKVIEHYVSIK

SEQ ID NO: 1076 - protein, 611 aa, Vibrio parahaemolyticus
  source 1..611: note = Related to JACBSO010000017.1
MERLQTLKQAKTKPDLANILGIKPSTLTYCLYKLKPQNQYAQFNVPKKNGGVRVINAPTGTLKSIQAALSILLLDCWDEILKSKFPASEISREKAKHGKTLKVKCSNSETKQPSLSHGFERKRSIITNAMMHLGQKHVFNIDLEDFFGSFNFGRVRGFFIKNRDFELDPEVATVIAQIACFNNELPQGSPCSPVITNLITHSLDIKLAALASRNSCTYTRYADDITFSTRKSSLPKCIAQNRDGEFLVGKKLRSEITRSGFNINDKKTRNQYKDSRQDVTGLIVNKKPNTKKEYWRTVRAQCNHLFNNGFFIESINGKDVKGNINRLEGKLNFIDHVDHYNRLRQTLPLNPKYQYKKDAIKNGQAKLRRYLHTGREDTFSKFLFYRLFYANDLPTILTEGKTDNVYLKAAIHKLAGGFPKLATEKNGNSPYKLLTRFVEYNDRTKYLLELYGGADYLKDFVINYNHHYKYYKAPTPNNPVIIFVDNDTGPSGLISYINKIQDSVIYPDGVKNIRDSDFVHIFHNLYLVLTPKENGYDGTDIEHFFVEKDRLRKHKGKCFNTVADRDSENDLSKDAFANHIVHARKHEIDFSRFNTLLERIVKVIEHYDSIK

SEQ ID NO: 1077 - protein, 610 aa, Aeromonas sp.
  source 1..610: note = Related to JAKZFL010000005.1
MSKLQDLKKATTKPDLAHVLGVKPSVLTYCLYVLKTENQYTQFKIPKKTGGERVINAPTGKLKTIQSLLSNLLLDCLDEINHKAFPKSQLAKETVKNAEVLKIKCSTALVKQPALSHGFERKRSIITNAMMHLGKKQVFNIDLEDFFGSFNFGRVRGFFIKNRNFELHPEIATVIAKIACHNDELPQGSPCSPVITNLITHALDIKLARMASKNSCIYTRYADDMTFSSRESTLSKNIAYEDDNIFVVSKKLRAEITRSGFTINDKKTRNQYKDSRQEVTGLVVNKKPNTKNEYWRTARSQCDRLFKTGGFTELVNGEVVPGNINRLEGRLNFIDQVDHYNRLRQKLPLNPIYQTKKEVLKKTNQAKLRRYLHSGREDTFSKFLFYRLFYANELPTILTEGKTDNIYLKAAIQMLAKNFPRLATEKTAVSPYKLLLRFVEYTERTKFLLELHGGADYLRDFVINYKKHFEYYKAPRPENPVIIFVDNDTGPNDLINYVNKIEGITIYPSSQNEVRKSDFVHVFCNLYLVLTPRDSNGNTDIEHFFTNKDRLRQYKGRCFNVESKRDVKNDLSKDAFANHVVHANKASIDFDGFSGMLGQIAKVIEHYDSI

SEQ ID NO: 1078 - protein, 610 aa, Aeromonas salmonicida
  source 1..610: note = Related to QLLM01000001.1
MSRLQELKKATTKPDLAKLLGIKPTMLTYCLYILKTENQYAQFNIPKKNGGERTINAPTGILKSIQSLLSKLLLDCLDEINHKKFPKSELAREVARNSKVLKIKCSNALIKQPSLSHGFERKRSIITNAMMHIGRKNVFNMDLENFFGSFNFGRVRGFFIKNKHFELNDEIATVIAKIACHNNELPQGSPCSPVITNLIFHSLDINLAKLASKNSCVYTRYADDITFSSREKELPKDIAHEDNGEFVLSKKLRYEITRSGFIVNDKKTRNQHKDSRQEVTGLIVNKKPNTKKEYWRTVRAQCNSLFKTGVFTEIENGKAIPGSINRLEGKLNFIDQIDHYNRLRQAPPLNPKYQPKKEAIKNGQAKLRRYLHSGREDTFSKFLFYRLFYANELPTILTEGKTDNVYLKSAIHMLAKNYPQLSSEKTDKSPYKLLLRFVEYTERTKYLLELYGGTDYLKDFIIGYKQHLKFYKAPRPEKPVIIFVDNDTGPKDLINYVNKIDGKEISPSTEVDIRSSEFVHIFYNLYLVLTPKDNNINTDIEYFFTEKDRLRQYKGKCFNIVSKRDLDNDLSKEAFATHVIHANKKDIDFSGFTGMLDRIVKVLKHYDSIK

SEQ ID NO: 1079 - protein, 615 aa, Vibrio sp.
  source 1..615: note = Related to POSH01000027.1; note = Vibrio diazotrophicus
MVKLKALKEAKTKPDLARLLGIKPSLLTHCLYVIKTENQYIQFKIPKKNGGERIINAPTDKLKFIQSALSNLLLDCLDEINYDKFPKSDFSNITSKRAKVLKIKIPNSNIRQQSLSHGFERKRSIITNAMMHLGKKYVLNIDLEDFFGSFNFGRVRGFFIKNRNFELSPEIATVIAKIACHNNELPQGSPCSPVITNLIVHSLDIKLAKLAEKNSCIYTRYADDITFSCRKRDLPKAIAYELNGEFILSKKLRSEITRSGFNINHKKTRNQYKDSRQDVTGLIVNKKPNTKKEYWRTVRAQCDNLFKTGAFTELVDGKDVEGNINRLEGKLNFIDQVDHYNRLRQTPPLNPKYQTKEDLIKNNQAKLRRYLHNGREKTFSKFLFYRLFYANELPTILTEGKTDNVYLKAAIHMLSKDFPKLSSVQTTTSKYKLLLRFFEYKVRTRYLLELYGGADYLKSFVINYRYQYNYYKAPKPENPVIIVVDNDTGPNGLINYVNGITEKKIFPSASKDIRTSEFVHIFNNLYLVLTPKGLGGCNTDIEYFFTDKDRLRTYKIKDSLKCFNTVDKRDPNNDLSKEVFATHIVHANKKDIDFSGFKVILERIVKAIDHYDSIK

SEQ ID NO: 1080 - protein, 611 aa, unidentified
  source 1..611: note = Related to BPEY01000057.1; note = Shewanella sairae
MQKLQLLKKTKTKPDLAHLLGIKPSALTYCLYIVKTENQYSQFKVPKKNGGERIINAPTAALKSIQSSLSNLLLDCLDEINAEKFPSSEIVKEKAKNSKVLKVKCSNAKTKQPSLSHGFERKRSIITNAMMHLGKKHVLNIDLEDFFGSFNFGRVRGFFIKNKHFELSPEIATVIAKIACHKNELPQGSPCSPVITNLIVHSLDIKLARLASNNSCIYTRYADDITFSTRNRELPVALASERDGEFILSKKLRSEIRRSGFLINDKKTRNQYKDSRQDVTGLIVNKKPNTKKEYWRTVRAQCNSLFKTGGFTELVNGEVVKGNANVLEGKLNFIDQVDHYNRLRQSPPLNPKYNTKKEAIKNNQAKLRRYLHSGREDTFSKYLFYSLFYGNELPTILTEGKTDNVYLKSAVHMLAKSFPKLASEKTATSRYELLLRFVEYTERTRYLLELYGGTDYLKDFIINYRQHFKFYKAPKPKKPVIILVDNDVGPKNLINYVNHIEGKSIFPSSAKDIRASDFVHIFHNVYLVLTPLGKENSETDIEYFFSDADRLRKYNGKCFNTVSKRDPDSDLSKDSFATHVVHANKKDLDFSRFKGIFDRMVKVIEHYDSIK

SEQ ID NO: 1081 - protein, 610 aa, unidentified
  source 1..610: note = Related to WMDE01000004.1; note = Photobacterium carnosum
MEQLKSLKKVTTKPEFAQLLGIKPSVFTYCLYVIRPENQYSQFKIPKKNDGYRTINAPTGTLKTIQSALSNLLLDCLDEINKDKFPSSEMFKAEAINSKFLKIKCSNSVIKQPSLSHGFERKRSIITNAMMHVGRKNVFNIDLENFFGSFNFGRVRGFFIKNKNFKLCPDIATIIAQIACNNNELPQGSPCSPVITNLIVHSLDLRLAKLASNDSCIYTRYADDITFSTRENKFPINIAKEDDNKFHSSKKLNSEIKSAGFVINDKKTRNQYKDSRQDVTGLIVNKKPNTKKEYWRTVRAQCDSLFKTGEFKELVGDSYIIGNINRLEGKLNFIDQVDHYNKLRQSVPLNPKYYLKKEANKSQAKKRRYLYTGREITFSNFLFYRLFYASELPTILTEGKTDNVYLKAAIHMLADKHSSLASAKSGNSSYKLLLKFVEYSERTKYLLELYGGTDYLMDFIKNYNLNYNLYKAPKPNNPVIIVVDNDDGPKGLINYINKIKDAKLFPQTAKDIRSSEFIHIFNNLYLVLTPRTEDNCPTDIEYFFTDKDRLREYKNKCFNTHSNRDTENDLSKDSFANHIIHANKNDIDFSRFNGLLNRIGKVIEHYNLGK

SEQ ID NO: 1082 - protein, 612 aa, unidentified
  source 1..612: note = Related to NZ_SODO01000007.1; note = Oceanimonas baumannii
MTQLQALKDAKTKPDLARLLNIKPSIFTHCIYIVDTKNQYTQFTIPKKNGGERTINSPSDKLKKIQKSLSNLLLDCLDEINKLQFPDSEISRPRASNSKYLKVKCSNSKIKQPSLSHGFERKRSIITNSMMHVGKKHVFNIDLEDFFGSFNFGRVRGFFIKNKNFLLEPEIATAIAKIACYNNELPQGSPCSPVITNLITHSLDIKLSKLAFYNSCIYSRYADDITFSTNESKMPRHIARSVDGELIVGKKLYSEIRRSGFSINKNKTRDQYKDSRQDVTGLVVNKKPNTKKEYWRTVRAQCNMLFKTGSFNEVLNGEIIKGNINRLEGRLNFIDQVDHYNRLRQHPALEAKYQSKKEALHLRNMAKLRRHLHNGRENTFSKFIFYRLFYANETPTVLTEGKTDNVYMKAAIHMLASSYPQLAQENNGSTPYKLLMKFVEYSERTRYLLELFGGADYLKTFVMHYRQHYKYYKAPKADNPVIILVDNDEGPKDLINYVNGIKSKHVYPTSSKDIRSADFVHIFHNLYLVMTPRGNNNQHTDIEYFFKDFDRLRKYQGKCFNTISKRNPNTDLSKDSFANHIIHAHKKSIDFSGFDAILNRILLAIDHYKSRK

SEQ ID NO: 1083 - protein, 616 aa, unidentified
  source 1..616: note = Related to NZ_FNXF01000003.1; note = Rheinheimera pacifica
MQKIEALRKITTKPELAALLGIKASVLTYALYIVKPQNQYIQFKIKKKNGGERLISAPTDKLKSIQSALSDLLLDCLDEIYKSKFPDSEIAKQKLKHSKVLKIKIGSAKNKQPSLSHGFERNRSIITNAIMHIGKKNVLNIDLEDFFGSFNFGRIRGFFIKNENFKLDSNIATVIAHIACCNKELPQGSPCSPVITNLIAHSLDIRLAALAKKHSCTYTRYADDITFSTREDTFPESVMRQEGGGYIAGKKLRSEIRRAGFSIKESKTRIQYADSRQDVTGLIVNQKPNVKREYWRTVRAQCNSLFKTGKFVEVAGEEQTVGNINVLEGRLNFIDQLDHYNRLRQKPALDPNYHLKRDALVQQKKAKQRSHLLNSREKVFSKFLFYRYFYAFDKPLILTEGKTDNTYLKSAIWKLAAHYPKLAKAKSNTSAYELLLRFFNYTERTNFLLELAGGGDYFKDFASGYAENYKKYKAPRPEHPVIIIVDNDSGPKDLVNLIATKKIGSIYPTNPAHSNVDVRNSDFVHLFHNLYIILTPLSAGSSSSDIELLFKDVDRLRLYKGKSFNTATKRDNSKDLSKEAFATHIVSAQKNIVNFDGFKELLDRVVSVINHYDSVK

SEQ ID NO: 1084 - protein, 615 aa, unidentified
  source 1..615: note = Related to NZ_JYNJ01000140.1; note = Thalassomonas viridans
MRKLNSLAQITTKAELAALLGIKTSFLTHCLYVIKPANQYTQFKIAKKNGGERTINAPTNRLKSIQSALSHLLLDCLDELNRKKYPASELAKSSAQHSHILKVKCSNTKTKQPSLSHGFERKRSIITNAMMHTNKKNVLNIDLKEFFNSFNFGRVRGFFIKNDNFKLDPHIATVIAQIACYNNELPQGSPCSPVITNLITHSLDIRLALLAQKHSCTYTRYADDITFSTRESIFPPQIMREENGQFIAGKKLRSEIRRSGFSINNKKTRIQLKDSRQDVTGLVVNQKPNTKKEYWRIARAQCNNLFNTGAFTKTVNGETIKGNVRELEGQLNFIDQLDHYNRLRQKSPLNPKYHLKKDEIIKQKKAKQRSYLFSGREKTFSQFLFYQFFYASDKPTILTEGKTDNVYLKTAINILAANFPDLAKTKTVTTPYELLLRFVEYSERTKFLLELHGGTDYLKHFIMGYESKLKRYKAPKPKHPVIIVIDNDTGPQGLLHYVANISSAIISPNSLILKQDYRKADFIHIFHNLYIVLTPRGAGNTHTDIEYFFKDIDRLRTYKGKCFNTVANRDEERDLSKDAFAKQIIKAQKKVVDFSNLKPLLERFVMVIKHYSTIN

SEQ ID NO: 1085 - protein, 635 aa, unidentified
  source 1..635: note = Related to JAHVIP010000004.1; note = Marinobacter daepoensis
MTKLELLQAAKTKSDLASILNIPPRALTYRLYKIRPESQYHTFSIPKKTGGSRTIRAPEKELKNIQSALSNLLLDCLDEINKKRFPNSELASPKARHARTLKVKCNSARQKQPSISHGFERNRSIITNAMMHIGQKNVLNLDLANFFESFNFGRVRGYFLKNENFKLTPEVSTTIAQIACTDNSLPQGSPCSPVITNLITQSLDIRLAALANRHSCIYTRYADDITFSTRKKSFPSQIIRNSQGIQTLGKKLASEIRRSGFSVNPKKTRVLYHSSRQEVTGLVVNQKPSVKKDYWRLVRAQCHQLFTHGSYLEEVDDNFVTGSITELEGKLNFIDQIDHYNRLREKPPLDPRYHYKKDALAKSSSSKSREYLFNNREKTFSQFLFFKYFYANSTPTILTEGHTDNIYLKTALLQLSSNYPSLTKGSPPKLSCHLFNYTERTKFLLELAGGTDYLKSFVEKYNTRYEKYNAPTPTQPVIIVVDNDSGPSSLLHSLKKYDQAKLFPTNLKISDINDVKKSEFIWIFHNLYLVLTPLKGKNDTDIESLFKEKERLRKHNGKCFNTVEKRNEEKDLSKDSFARNIIRANRKSIDFSNFHGLLNRITAVQKHYEGIKNDNGSKDIQPFLATLLKPSQSPP

SEQ ID NO: 1086 - protein, 612 aa, unidentified
  source 1..612: note = Related to NZ_VMHP01000002.1; note = Marinobacter halotolerans
MGRLDELRAVKTKSELAKLLGIKPSFLTYQLYVVGLASQYKNFHIPKKSGGLRSITAPDAKLKSIQSALSNLLLDCVDEINKETFPRSELANEKAQHAKVLKIKCNSARTKQPSLSHGFERKRSILTNAMVHVGQKNVLNIDLQDFFASFNFGRVRGFFIKNREFSLTPEIATTIAKIACFNNELPQGSPSSPVITNLITHSLDIKLAGLAEKYSCLYSRYADDITFSTREETFPHQIMRETRGEYQPGKRLRSEIRRSGFTINNKKTRILYRSSRQDVTGLVVNQKPSVKKEYWRTARAQCHSLFRTGKFTKSTDGQIFEGNINELEGQLNFIDQVDHYNRLRQKPALNPRYHLKKDELSKNKDSKKKRQYLLNSREKTFSKFLFYRIFYANTKTTILTEGKTDNTYLKSAIRELSHSYPSLAKPNPYELQCQFLNYSERTKFLLELHGGGDYFKSFVESYLEKFRGFTAPKPNHPVIIFVDNDKGPQELISRIKGLKGVQIHPIHLDIQKDIRQAEFLHLRANLYLILTPQTSSLGETDIEYFFKDKDRLRQHNGKSFNTVKKRDEAKDLSKAAFAQHIVKSQKKSIDFSDFTLLLDRIVAVQNHYDSIK

SEQ ID NO: 1087 - protein, 610 aa, unidentified
  source 1..610: note = Related to JAHMIN010000032.1; note = Hahella sp.
MSRLENLRAVVSRPQLANLLGIRPSFLTYTLYVRGVSSQYCKFSIPKKAGGKRYIKAPQKELKYIQSALSTLLLDCLDEINKEKFPKSELVSPKAEHSKTLKVKCNSARVKQPSLSHGFERQRSIITNSMMHLGKKNVLNIDLKDFFQSFNFGRVRGFFIKNEYFKLDPTIATTIAQIACYDNQLPQGSPCSPVITNLIAHSLDIRLARLAKKYSCTYSRYADDITFSTRERIFPPQLMREDDGIYTPGKRLKSEIQRSGFSLNDRKTRILYRDSRQDVTGLVVNQKPNVKKEYWRTVRAQCHWLFNIGAFTMVVDGKDIEGNINALEGKLNFIDQLDHYNRLRQKPALNPKYQLKREVKGRDSLKARRYLFSAREKTFSQFLFYRLFYANDKPTILTEGKTDNIYLKSAIQSLAASYPKLAIENPYQLLCHFVSYTERTRFLLELYGGADYLKGFIDSYKDNFEMYKAPKPRHPVIVFVDNDSGPKDIISRVNGLGEASVFPPKIEKVKDVRKADFTHLMKNLYLVLTPRSEADKDTDIEFFFKDEDRLRKFNGKYFNTVDNRDETKDLSKEAFARNIVKFQRKSIDFSKFTSLLDRVVAVIDHYETIK

SEQ ID NO: 1088 - protein, 609 aa, unidentified
  source 1..609: note = Related to CP091442.1; note = Pseudoalteromonas sp.
MSKLAKLRAAKTKPELADVLGVHPSFLTYTLYVRGTNSLYTSFNIPKKSGGVRTIQSPDSGLKSIQSALSNLLLDCIDEINLANFPDSELASPKASHSNILKVKCNSAKTKQPSLSHGFTRHRSIITNAMMHVNKKAILNIDLKDFFSSFNFGRVRGFFIKNKNFELDDNVATTIAQIACHDNELPQGSPCSPVITNLITHSLDIRLADLARKNSCTYSRYADDITFSTGKRKFPSEIVSEENGICALGKKLKSEVRRSGFSINSKKTRVLYKDSRQDVTGLIVNKKPNIKAEYWRTVRAQCNLLFKTGKFYDLINNKEVEGNIYELEGKLNFIDQLDHYNRLRQKPALNPQYHRQKDALAKGGNQKQRRYLYNNREKTFSNFLFYKLFYANPLTMILTEGKTDNIYLKAALSRLATAFPSLAKSQPYEPLCQFFKYTERTRFLLELHGGGDYFKSFVGSYEERYRLYKAPKPANPVIIFVDNDTGPDQLISRIKGMKGIGIYPTSLNKGDIRKSDFVHISNNLYLILTPQSNTGDNTDIEYFFTDFDRKRPYNGKCFNTVKLRNDNVDLSKDAFSRHIVQAKKNVIDFSGFHKLLERIVLVQNHYKTL

SEQ ID NO: 1089 - protein, 606 aa, unidentified
  source 1..606: note = Related to BLIJ01000065.1; note = Alteromonas sp.
MSRLDRLKAVNTKPQFARLLGIHPSLLTYTLYKKRPEHCYHEFKIPKKSGGKRTINAPDEKLKSIQRALADLLLDCLDEINAVYFPSAETLKPKAKHADILKVKCNSALSKQPALSHGFERKRSILTNAVMHLDKKHLLNIDLKDFFPSFNFGRVRGFFIKNNHFKLHPSTATLIAQIAILNNELPQGSPCSPVIANLITHHLDIRLASLAAKYSCTYTRYADDITFSTRRAAFPRQIMNEKDGGYIPSKRLASEVNRAGFRINSQKTRILYRDSRQEVTGLVANKKVGVKKEYWRTLRAQCHSLFTTDSFTKIVDGKKVEGNINELEGQLNFVDQVDRYNRLRQKQPLNPLLALRSEQKNGDKKSKRHLLNNRERTLSDFLFYKLFISNSKTTILTEGKTDNTYLKSAIQALAKRFPTLAETKPYQPLVQFMNYSERTRFLLELFGGCDYLKAFAENYSSRRKKYLKEKPTSPVILLLDNDQGPKDLINRFSKDKSITLLPSTSKNIRDAEFVHVCDNLYLVLTPISPKRKETDIEYFFMAKTRLLKDSKTGKCFNTISKRDEKRDLSKEAFAQLVKTNKGSINFSRFGPLLTRITKVQKHYAAL

SEQ ID NO: 1090 - protein, 618 aa, Vibrio sp.
  source 1..618: note = Related to NZ_CP016347.1; note = Vibrio natriegens
MSKLKYLKSVSTKPGFAKALGVDAVFLTRCLYINQPETQYHQFSIAKKSGGKRVITAPSDELKSLQKRLSILLLDCIDEINATKYPNSQRARPKLRKNGDPDYAAEVLKIKVPTTEIKQPSLSHGFVRERSIITNAMMHVGKKHVLNIDLKDFFDSFNFGRVRGFFIKNVNFQLDPHIATVIAQIACFDNKLPQGSPCSPVITNLITHALDIRLASLAKKYKCTYTRYADDITFSTRKADFPPQIMRQDTDGYIAGKKLRSEIERAGFAMNTSKTRIQYKDSRQDVTGLVVNKKPNTKKEYWRLARAKCNQLFKTGKFTTIHDGNEIEGNLNELEGQLNFIDQVDHYNRMRQKAPLSMEYEHKKVTKSTRNILTGRERTFSQFLYYRLFCGNDKPTILCEGKTDNVYLKSAISELSTSYPQLSVTKDGKYELLVRFVEYSKRTRFLLELFGGADYLRGFIDNFEKNMRLYDKVKPKHPVIVFLDNDEGPKQIVNLLKQKSFQDKIELIPSSMNKMDDIRSSEFIHVVKNLYVIFTPLTEDGKETDIEYFFDEKTRLFKHPKNGKCFNTISKRNSKKDLSKEAFATHVIKEKKKDVNFNGLKPLLDSIVKVINHYDSIK

SEQ ID NO: 1091 - protein, 617 aa, unidentified
  source 1..617: note = Related to AAXY01000057.1; note = Marinobacter sp.
MSKLRHLKSTSSKPGFAKVLDVDAAFLTRCLYIKKPETQYHQFSIAKKSGGTRVINAPSEELKSLQKSLSKLLLDCIDEINATKYPNSQWSKPKLRKNGETDYAAEVLKIKIPTAETKQPSLSHGFVRERSIITNAMMHVGMKHVLNIDLKDFFDSFNFGRVRGFFIRNANFQLDPHVATVIAQIACYDNKLPQGGPCSPVITNLITHSLDIRLASLARKYKCTYTRYADDMTFSTRRADFPAQIMRQSSNEYLAGKRLRREIESAGFAINSNKTRVQLKNSRQEVTGLVVNRKPNTKKEYWRLARAKCNHLFKIGRFTVAKNGNNVEGNLNELEGQLNFIDQVDHYNRMRQKAPSIPEYASSKIGKNTKNLLTGREKTFSQFLYYRLFYGNDKPTVLCEGKTDNVYLKSAISELNKYYPLLVDVKDEEYDLSIRFVRYSKRTRFLLEIFGGADYLRGFIDNFEKNVKLYEAIKPKNPVIVFLDNDEGPQQIVKLLSTERFQKKIEIIPSKLNKKNDIRKSHFIHVVKNLYVVFTPLTHEGKETDIEYFFNDKARLIKHSNGKCYNTVKNRDAKKDLSKDAFATHIIKENKKSIDFEGLKPLLNSIVNVINHYEKIK

SEQ ID NO: 1092 - protein, 617 aa, Vibrio sp.
  source 1..617: note = Related to JXXT01000002.1; note = Vibrio nigripulchritudo
MSKLNRLRLISTKPSFARILGVDAAFLTRCLYINKPENQYHQFPVKKKSGGERIIHAPSDELKSLQKCLSILLLDCIDEINAKKYPHSQHVKPKLRKNGEPDYAAEVLKIKIPSALSKQSTLAHGFVRDRSIITNAMMHVGQRHVLNIDLKDFFGSFNFGRVRGFFIKNAHFQLDPHIATVIAQIACFDNKLPQGSPCSPVITNLIAHSLDIRLASLAKKYKCTYTRYADDITFSTRQAEFPAGLMKQDANCYVPGRKLKSEIERAGFYINGNKTRIQHKDSRQEVTGLIVNKKPNIRKEYWRLVRAKCNQLFKTGKFTSKEEEKEVEGNLYELEGQLNFIDQVDHYNRLRQKSPLSNEYAVNKVGKNTRLILTGREKTFSQFLFYRMFCGNEKPTMLCEGKTDNVYLKAAISSLKGNYPQLARVSGEKYELLVRFVEYSKRTRFFLELFGGADYLRGFIDSFERNMKIYNSIKPVNPVIIFLDNDKGSQQIVNLLTSKTFVNRIKLFPVTLDAKQDIRKSEFIHIVKNLYVIFTPLTNTGNETDIEYFFDEKTRLMKHSNGKCFNTLQNRNSKADLSKDSFATHIVKEKKKDIDFIGFKSLLDSIVKVINHYDSLK

SEQ ID NO: 1093 - protein, 617 aa, Vibrio sp.
  source 1..617: note = Related to NZ_CP046804.1; note = Vibrio cidicii
MSRLKRLKSASTKPEFAKVLGIDAAFLTRCLYINKPENQYHQFSIPKKSGGERLINAPSEELKSLQKNLSILLLDCIDEINSEKYPDSQWSKPKLRKNGDPDYAAEVLKIKIPNAQVKQPSLSHGFVRERSILTNAMMHVGKKNVLNIDLESFFDSFNFGRVRGFFIKNANFNLDPHIATVIAQIACFDNKLPQGSPCSPVITNLISHTLDIRLASLAKKYNCTYTRYADDITFSTRKSEFPPQIMRQNESGYVPGRLLKSEIKRSGFSINSSKTRIQYKNSRQDVTGLVVNKKPNVKQEYWRLARAKCNQLFKTGKFTTIKDGNEIDGNLNELEGQLNFIDQVDHYNRMRQKTPLSTDYTHTKVGKNTKVILSGREKTFSNFLYYRLFCGNEKPTILCEGKTDNVYLKSAISELSKDYPQLAHRKGNKYELLVRFVEYSKRSRFLLELFGGADYLRGFVDNFEKNMKLYDAITPKHPVIVFLDNDEGPQQVVNLLKSKNFQKKIELIPSTLDKKEDIRKSEFIHVIKNLYIVFTPLAKDGGETDIEYFFDDKTRLMKLPNGKCFNTVKNRDSKNDLSKDAFATHIVKENKTKIDFNGLKPLLESVVKVINHYDSLR

SEQ ID NO: 1094 - protein, 617 aa, unidentified
  source 1..617: note = Related to AAVS01000020.1; note = Alteromonadales bacterium TW-7
MSKLKRLRSASTKPQLARVLEVDAAFLTRCLYINKTQNQYHQFSIAKKSGGTRLINAPSKELKSLQKKLSILLLDCIDEINAEKYPRSQLVKPKLRKNGDPDYAAEVLKIKISTAETKQPSLAHGFVKERSILTNAMMHVGKKNVLNIDLNDFFDCFNFGRVRGFFIKNENFKLDQHIATVIAQISCFDNKLPQGSPCSPVITNLITHSLDIRLASLAKKHKCTYTRYADDITFSTRLSEFPAQIMWHDSTTYRAGKALRKEISRSGFSINNSKTRIQYKDSRQNVTGLVVNKKPNIKQEYWRLVRAKCNKLFKTGKFTVVEDGEKKDGNISELEGQLNFIDQVDHYNRMRQKPPLSTDYSHNRVGRGTRSILNGREKTFSKFLFFRLFYGNQKPTILCEGKTDNIYLKSAISELSQSYPQLSSSKGDDYELLVRFVKYTKRTRFLLELFGGADYLRGFIDNFEKNTKAYAKITPEHPVIIFLDNDEGPNNIVKLLRDKGFQKKINLVPPTLDKSEGIRKANFIHVVENLYIIFTPLTPDGKETDIEYFFDDKTRLMKHPNGKCFNTLQKRDSKVDLSKDAFSTHIIKEKKKQIDFNGLRPLLDSVVNAIDHYNSVK

SEQ ID NO: 1095 - protein, 619 aa, unidentified
  source 1..619: note = Related to PYOV01000005.1; note = Photobacterium angustum
MSKLNRLRIASSKPDFAKVLEVDSSFLTRVLYINKPESQYHKFTIAKKSGGLREISAPSIELKSLQKSLSKLLLDCIDEINAKKYPYSQLNKPKLRKNGENDYAAEVLKIKIPTSSIKQPSISHGFVRDRSIITNAMMHLGKKNVLNIDLEDFFGSFNFGRVRGFFIKNKNFRLDPHIATIIAQIACYDNKLPQGSPSSPVITNLITHSLDMRLASLAKKFKCTYTRYADDITFSTRLIEFPAQIMKQNEDGYIAGKILRREIKHAGFSINESKTRIQYKNSRQDVTGLIVNKKPNTKKEYWRLVRAKCNHLFKTGYFVSIVDGKEIKGNINELEGQLNFIDQVDHYNRMRQRAPLNPEYARSSVGKHTRNLLTGREKTFRNFLFYRLFCGNDKPTILCEGKTDNIYLKSAISELVKEYPQLARKKASEYELLVRFVEYSKRTRFLLELYGGTDYLRNFIDSFEANMKVYSNIKPKNPVILFVDNDKGTSNIKNLLSSKSFIKKIKISPSSIDKNEQIRKSQFIHVVKNLYVVFTPLASNDDFTDVEYFFDDKARLMKHSNGKCFNTVRNRNDNKDLSKDAFATHIVKENKKNIDFTGFKPLLNSIVEVINHYESIKKA

SEQ ID NO: 1096 - protein, 617 aa, Aeromonas sp.
  source 1..617: note = Related to NZ_CP024930.1; note = Aeromonas veronii
MSKLQSLKSISSKPELAKLLGVDAAFLTRTLYIVRPENQYHQFTIDKKSGGKRVINAPSEELKSLQRKLSNLLLDCIDEINKIKYPTSQLAAPKVRENGDIDYTAKVLKIKIPSSKSKQPSLSHGFSRKRSIITNAMMHIGKKNILNIDIENFFDRFNFGRVRGYFIKNNDFKLDPHIATVIAQIACYDNKLPQGSPCSPVISNLICHSLDINLSSLAKKYKCTYTRYADDITFSTRKSEFPKKIAEQNEGYYTLGNELLYEIKRSGFSVNNGKTRIQYKNSRQDVTGLVVNKKPNTKKEYWRLARAKCNALFKTGTFTTIEDGVSVIGNLDELEGQLNFIDHVDHYNRLRQKAPLSPEYSLKTIGKSTNILLSGREKTFSQFLYYRLFYGNEKPTILCEGKTDNIYLKSAISELMAHYPSLAIKTDGKYELLIRFVEYTKRTRFLLELFGGTDYLKGFIENFHKNMAPYKNLKPKNPVIIFLDNDTGPSNIVSLLQGNKFQKMITLIPSHLDKKDDIRKSEFIHVMDNLYVIFTPLGNSGEETDIEYFFDDKTRLMKHSNGKFFNTVEKRDTKNDLSKDAFATHIVKEKKKSIDFTGLKVLLDPIAKVIEHYKNIK

SEQ ID NO: 1097 - protein, 617 aa, Aeromonas sp.
  source 1..617: note = Related to JAHUWA010000001.1
MLNLERLKQISTKPDFAKLLGVDAAFLTRTLYIVKPDNQYSQFTIDKKSGGKRIINAPSDELKSLQKKLSNLLLDCIDEINAKKFPKSQSIKPKLRKNDENDYAAEVLKIKIPTSESKQPSLSHGFVRERSIITNAMMHIGKKNVLNIDLENFFDSFNFGRVRGFFIKNNNFKLNDHIATVIAQIACYENKLPQGSPCSPVISNLITHSLDIKLAFLARKYKCTYTRYADDITFSTRKDDFPNQLARHDGNTYILGKKLLREIKSSGFSVNNNKTRIQFKNSRQDVTGLIVNKKPNTKKEYWRLARAKCNTLFKTGTFTSIKDNVEVKGNLNELEGQLNFIDHVDHYNRLRQKPPLVPEYTLKTIGKSTRILLSGREKTFSQFLYYRLFCGNEKPTILCEGKTDNIYLKSAISEMKKDYPLLADTKDDHYELLVRFVEYTKRTRFLLEIFGGADYLRGFIDNFEKNMKTYENVRPKKPVIVFLDNDTGPDKIVNLLQGKGFQDKITLIPSHLDKSCDIRRSEFIHITKNLYVIFTPRGSAGEETDIEYFFDEKTRMMKHSNGKFFNTIKKRDTKSDLSKDAFATHIIREKKKNIDFKGLKPLLDSIIKVINHYDDIK

SEQ ID NO: 1098 - protein, 615 aa, unidentified
  source 1..615: note = Related to NZ_MUNJ01000002.1; note = Plesiomonas shigelloides
MSKLKLLRKITSKPELAKLMGIAPVFLTKCLYVTRPEHQYHQFQIDKKSGGKRTISAPSEELKSLQKKLSLLLLDCLDEINSEKFPYSQVPSPKKRNNGDDYSANKLKIKIPSAKTKQPSLSHGFERNRSIITNAMMHIGKKNILNIDLADFFDQFNFGRVRGFFIKNKYFNLDTHIATVIAQIACYDNKLPQGSPSSPVITNLITHSLDIRLLSLAKKYKCNYTRYADDLTFSTRLDDFPEQIMKQVDGEYIPSSKLLHEITRSGFTINNKKTRIQFKSSRQDVTGLVVNKKPNVKSEYWRQVRAKCNSLFKTGEFFSIKNGKIIEGNINELQGQLNFIDQVDLYNRLRQKPPLQPEFELKKLGTSTKQILSSRERTFSQFLFYRLFIGNDRPTILCEGKTDNVYLKSAINSLKGDYPSLAKMEDGKYNLLINFVEYSKRTKFLLELSGGASYLRDFILNYEKNFKIYKDHSPKYPVIIFLDNDSGANTIINLLQQREWQRKISLSPNTLDKKDDIRKSNFIHVEYNLYVILTPRTPIGGDTDIEYFFDDKTRLLAHSNGKCFNTVSKRNPNTDLSKEAFATHIIKEKKNSIDFTSMKPLLNLIVDVVTDYNTR

SEQ ID NO: 1099 - protein, 336 aa, Pseudomonas sp.
  source 1..336: note = Related to DOLN01000112.1
MSRLDKLRSTSTKSGFADVLGVSAVFLTRCLYINKPENQYHQFTIDKKTGGKRVINSPSKDLKSLQKSLSDLLLDCVDEINSKKFPKSQLASPKLRKNKEPDYAAEVLKLKIPSANSKQPSLSHGFVRKRSIITNAMMHVGSKYVLNIDLQDFFDSFNFGRVRGFFIKNRNFQLNPDVATVIAQIACYDNKLPQGSPCSPVITNLISHSLDIRLASLAKKYKCTYTRYADDITFSTRMPTFPVQIMAQQDGCYYPSKALIGEIERAGFFVNNKKTRILYEDSRQEVTGLVANKKPNTKKEYWRTVRAKCDTLFKTGNFSTVIDGKKVEGNLNELEG

SEQ ID NO: 1100 - protein, 617 aa, unidentified
  source 1..617: note = Related to JABSPA010000005.1; note = Colwellia sp.
MSRLEHLKSITTRPSFAKALGVNPSFLTRCLYIIRPENQYHQFEIKKKSGGKRIIKAPSVDLKSLQKKLSDLLLDCIDEINASKFPKSQLASPKMRNKKDLDYAAKVLKIKIPGAESKQPSLSHGFVRDRSIITNAMMHLGKKNVLNIDLENFFDSFSFGRVCAFFMTNRNFNLNKKIATVIAQIACYERKLPQGSPCSPVITNLITHSLDIRLAVIAKKYKCTYSRYADDITFSTNKSTFPYQIMNQYADAYIPGKELIWEIERAGFSINDKKTRIQYKDSRQDVTGLIVNKKPNTKKEYWRTARAKCNSLFKKGKFTSIKDNVETDGNINELEGQLNFIDQVDHYNRMRQKAPFIPEYTIKNHGKNTKLLLSAREKTFSHFLFYRLFYGNDKPTILCEGKTDNVYLKSAISELQANYPSLATIKDKKYKLLLRFVEYSKRTRFLLELFGGADYLRGFIDNFEKNTKQFEAPKPQHPVIIFLDNDEGPQQIVNLLQSKSFHNKISLFPDGLDPKKDIRKATFLHITLNLYVIFTPLNSSGKETDIEYFFDRKTRLMKHSNGKCFNTVRKRNSRTDLSKDAFATHIVKAQKKRINFKKFKSLLDPITKVIEHYKTLK

SEQ ID NO: 1101 - protein, 616 aa, unidentified
  source 1..616: note = Related to NZ_CP048031.1; note = Shewanella sp.
MSQLNYLRRISTKPSFAKALGVDPRFLTRCLYIIKPENQYHQFTIEKRSGGKRIINAPGDDLKSLQKKLSDLLLDCIDEINISKYPSSQLAKPKMRNKKDLDYAATVLKIKIPTAESKQPSLSHGFVRERSIITNAMMHLGKKNVLNIDLKNFFDSFNFGRVRGFFIKNNNFKLDPHIATIIAQIACYDNKLPQGSPCSPVITNLITHSLDIRLAKLAKKYKCTYSRYADDITFSTRKSTFPKEIMNEDIDGYTPGKKLVGEIVHAGFSINHNKTRIQFKDSRQEVTGLIVNKKPNTKKEYWRTARAKCNNLFKKGKFTSIEDGFEIDGNLDELEGQLNFIDQVDHYNRMRQKAPLTAEYAINNIGKNTKNLLSARESTFSRFLFYRLFYGNDKPTILCEGKTDNVYLKSAISELLPKYPSLARIEDNNYKLLVRFVEYSKRTRFLLELFGGVDYLKDFINNFEKNTKCYTAPEPKHPVIIFLDNDDARIPNLLKGKSFNKKVTLFPSSLNSIDDVKKADFIHIFQNLYVVFTPLGKSGEDTDIEYFFHKKTRMIKHSNGKFFNTVDKRNPEVDLSKDAFAMHIIKAQKKSINFTRLKPLLNRIVKVTEHYDQIKK

SEQ ID NO: 1102 - protein, 617 aa, unidentified
  source 1..617: note = Related to JAHKRD010000030.1; note = Shewanella sp.
MSKLKYLKSISTKPSFAKALGVDPRFLTRCLYITRPENQYIQFTIDKKSGGKRIINAPKDDLKSLQKKLSIMLLDCIDEINISKYPSSQLAQPKMRNKNDLDYAAEVLKIKIQSTESKQPSLSHGFVRKRSIITNAMMHLGKKSILNIDLEDFFGSFNFGRIRGFFIKNENFKLDPHIATIIAQIACYNDQLPQGSPCSPVITNLISHSLDIQLAALAKRYKCTYSRYADDITFSTRRSTFPSEIMNYESDSYVPGRKLIREIKRAGFSINEKKTRIQYKDSRQDVTGLVVNKKPNTKKEYWRIARAKCNVLFKTGKFSSISNGIEVEGNINELAGQLNFIDQVDHYNRMRQKAPFTPEYSPRVIGKNTKVILSGREVTFSRFLFYRLFYGNNKPTILCEGKTDNVYLKSAISELIADYPTLAKIEDKKYELQLHFVEYSKRTRFLLELFGGADYLKGFIDNFEKNTLPFKAPLPQHPVIIFLDNDKGPEKIKQLLQGKTFNEKISLFPKGLDPKTDVRKANFIHVIKNLYVVFTPLKNTGEDTDIEYFFDSKTRLIPHQNGKFFNTIENRNSTTDLSKEAFATHIIKSKKKNINFKGLKPLLDRIVEVIEHYNTIK

SEQ ID NO: 1103 - protein, 618 aa, unidentified
  source 1..618: note = Related to NZ_SEUL01000049.1; note = Pseudoalteromonas fuliginea
MPRLTHLKTVSSKPGFARALNVDPRFLTRCLYVVRPENQYHQFSIDKKSGGQRLINAPSDDLKSLQSSLSNLLLDCIDEINKNKYPESQIASPKMLSPKKKDHIAEVLKIKIPSSEHKQPSLSHGFVRERSIITNAMMHLGKKNVLNIDLKDFFDSFNFGRVRSFFIKNINFRLDPSIATMIAQIACYKDTLPQGSPCSPVITNLITHSLDIRLASLAKDYKCTYTRYADDITFSTRKSVFPPQIMRGKVDDNHGYIPGEKLTNEIKRAGFLINHKKTRIQYKDSRQDVTGLIVNQRPNTKKEYWRTVRAKCNFLFKTGEFTSIKNDIVVAGNINELEGQLNFIDQVDHYNRIRQKSPLKPELALKNVGSNTKLLLSGREKTFSQFIFYRLFYGNDKPTILCEGKTDNIYIKSAISELVISYPKLARVAKNEYKLLVRFVEYSKRTRFLLELYGGASYLKDFIVNYRTQFKKYKAAKPQHPVIIIIDNDAGPKDAGIFGYISNQKEAKIYPQTLDLKKDLRSANFVHLFHNLYIVMTPKGIKDCDTDIEYFFTDKDRLREHSKKCFNTVAKRNADKDLSKGAFATHIIKAQKKNINFNGLKPLLDRIMMAIDHYDINK

SEQ ID NO: 1104 - protein, 619 aa, unidentified
  source 1..619: note = Related to NZ_CP011029.1; note = Pseudoalteromonas espejiana
MLSRLKNLKGAATKPQLASILNVSPVFLTKCLYIIKPENQYHQFEVNKKSGGKRVITAPSEDLKGLQSKLSELLLDCIDEINTLKYPDSQLVSPKKNISKKNDPSAEVLKVKISNAAIKQPYLSHGFTRQRSILTNAVMHLGQKSVLNIDLENFFDSFNFGRVRGFFIKNKNFELSPSIATVIAQIACYKDTLPQGSPCSPVITNLITHHLDIRLASLAKRYKCTYTRYADDITFSTRLSVFPPEIMCDSLNGFAPGKRLKRAIKHAGFSINERKTRIQYKNSRQDVTGLIVNKKPNVKSEYWRTARAKCNSLFNTGHFITNKNGRSVEGNINELEGQLNFIDQVDHYNRMRQSPPLSPEYSLKNYGKRTNGLLSGRETVFSKFLFYRLFYANEKPTILCEGKTDNVYLKSAINQLHNQYKQLVNIGDEYKLLVRFIEYSKRTRFLLELYGGADYLRGFIDTYAVKSKIYNAPKPENPVIIFIDNDDGPKQIETLLQSRNFNKKTTLVPNTLDPKKDVRKAEFIHVIDNLYVVFTPRGDQDEDTDIEYFFGDDARLRKHTNGMFFNTVQNRDPLKDLSKEVFATQIIKAQKKHINFNGLIPLLDRIVNVINHYDSVKGL

SEQ ID NO: 1105 - protein, 380 aa, unidentified
  source 1..380: note = Related to NZ_RRZA01000072.1; note = Pseudoalteromonas prydzensis
MSRLKYLKVAKTKPQLADVLGVSPVFLTKCLYVVKPENQYHQFEIDKKSGGKRKITAPKTELKSLQSKLSELLMDCIDEINKSKFPNSQQVSPKKNIQQKKDPAAEVLKIKISNSAIRQPSLSHGFTRQRSILTNAVMHLGQKNVLNIDLENFFDSFNFGRVRGFFIKNKNFELSPSIATVIAQIACYKDTLPQGSPCSPVITNLITHHLDIRLASLANRYKCTYTRYADDITFSTRLSIFPPEIMRDTLNGFAPGKRLKRAIKHAGFSINERKTRIQYKNSRQDVTGLIVNKTLGVKSEYWRTARAKCNSLFNTGSFTTERKGELVEGSINELEGQLNFIDQIDHYNRIRQKAPLQPEYSIKKVGKETRRLHSGREKNF

SEQ ID NO: 1106 - protein, 629 aa, unidentified
  source 1..629: note = Related to JAEMUI010000038.1; note = Marinomonas spartinae
MSKLNYLRSISSKPEFAKALNISPKFLTHTLYVVRPENQYHTFNIDKKSGGQRTINAPSDELKSLQAALSNLLLDCVGEINASKYPKSQLASPKLKNNKIDSDYSAEVLKIKISNSAIRQPSLSHGFTKDRSIITNAMMHIGKKNILNIDLENFFDCFNFGRVRGFFLKNKNFQFNPEIATVIAQIACYENKLPQGSPCSPIITNLIAHSLDIQLASLARKYKCTYTRYADDITFSTNLSTFPTEIMAEEKGIYTSGKKLKNEIERAGFSINDKKTRIQYKNSRQDVTGLVVNKKPNVKNEYWRTVRAKCNSLFKTGRFMTTKNGVEVEGNINELEGQLNFIDQIDHYNRMRQKPPLVSEYAIKKIGINDHSTKELLTGREKTFSQFLYYKSFYGNDKPTILCEGKTDNIYLKSAISELAINYPNLASFTSEISKKGIPYKKYNLLVNFFEYSRRTRFFLELFGGVGDLKKIILNFEKSQRKYQCSNPKNPVIILLDNDTGPKDIVALLQRKPLVNKITLVPQGLDPKTDVRKAQFIHVTRNLYVIFTPLDPSGNATDIEYFFDDKTRLMKYSGKCFNTVKNRNGTTDLSKDNFATHIVKAQKKGVDFNGLKPLLDSIVSVIKHYDTIK

SEQ ID NO: 1107 - protein, 621 aa, unidentified
  source 1..621: note = Related to NZ_UATK01000001.1; note = Photobacterium damselae
MTKIELLRKATHKRELAALLGCTTSALTYVLYILKVDTQYKQFEIDKRNGGKRIITAPTDRLKRLQASLSNLLLDCIDDINRIKYPNSQVNSPKLINKKFKDASADILKVKISNAKTKQPSLSHGFVRERSIITNAMMHLDKKNVLNIDLHNFFDSFNFGRVRGFFISNENFKLDPNIATVIAQIACYDNKLPQGSPCSPVISNLITHSLDIRLASLAKKNSCTYSRYADDITFSTRKSVFPTKIMRQEDGEYIPSKKLRNEIKKSGFTINNKKTRIQYKDSRQDVTGLIVNKKPNVKKEYWRTVKSQCHSLFQTGAFTKKVGDDIVEGNINELEGQLNFIDQVDLYNRLRQKKPLNPVYKHATHGYNTSILLSGRERTFSRFLYFTLFYGNTKPTILCEGKTDNVYLKSAINKLAATYPALAQAKTPNKEYELLIRFLEYSKRTRFLLELYGRTSYLNYFIGKFDKNFKFYKAPTPQHPVIIILDNDSGFVGKKDSGIAGKLKKIDSATAYPTTLKKDDFRNADFIHVIHNLYIVLTPLGTAKETAIEDLFDDETRQVKVSGKSFNHKDDRDNAKEYGKEVFAQKVIKAHKSSINFDGLKPLLDRVVQAIEHYDTISAAK

SEQ ID NO: 1108 - protein, 614 aa, unidentified
  source 1..614: note = Related to NZ_CP012737.1; note = Pseudoalteromonas sp.
MTKLEALKKITTKKELAALLGVKTSFLTYTLYFIKPHTQYTQFKIPKKNGGERIISSPNGKLKTLQKKLSILFLDSIDEINKAKFPEAEAFKNINDKIMYSPILKVKIGSAKIKQQPSLSHGFVRNRSIITNAMMHLGQKNVLNIDLSNFFDSFNFGRVRGFFIKNDHFKLDPAIATVIAQIACYDNKLPQGSPCSPVITNLITHSLDIRLASLAKKNSCTYSRYADDITFSTRKKSFPSNIMSELSGEFTPSKKLSFEIKRAGFSINNVKTRIQYKDSRQDVTGLIVNKKPNTKKEYWRTVRSQCNKLFKSGKFTKTVNDKVEDGNINELEGQLNFIDQVDSYNRLRQAVPINHNYATSKHGHNTSKLLSGRERTFSRFLYYRLFYGNDKPTIICEGKTDNVYLKSAINRLMTGYPTLANKTLNSKSNKTEYKLLIKILKYTKRTRFLLQLYGGTSYLNYFISKFDKQYEYYDAPKPQHPVIILLDNDSGFDCIEKELKKVQPAIILPPPLKKHDFRNADFIHVFHNLYIVLTPMNNQPKTMIEDLFDVATRQIQVDNKTFNPEKDFDKTKEYSKQIFAQKVVSTQKSTINFDGFKPFLDRIVRVIEHYDTIK

SEQ ID NO: 1109 - protein, 621 aa, unidentified
  source 1..621: note = Related to CP044399.1; note = Moritella marina
MNKLKSLQKVSTKSELASLLGVKASFLTHTLYVVKPSSQYTNFKIPKKSGGERSINAPTKKLKTLQSCLSKLLLDCIDEINTIKYPDLASYEVTRNKILKVKIPNSKIKQPSLAHGFVRNRSIITNAMMHVNQKNILNIDLNNFFDSFNFGRVRAFFIKNKNFKLPENIATTIAQIACNNNTLPQGSPCSPVISNLITHSLDIKLAYLAHEYSCRYSRYADDITFSTRKKAFPTKIMSYENNCYVAGKKLQGAIKQAGFSINDKKTRIQYKDSRQDVTGLIVNKKPNVKNEYWRRVRAQCHSLFTTGQFTKELKGEIVAGNINELEGQLNFIDQVDHYNRVRQSPPLDPKYHLKRDELLKTNQAKERQYLFTGRERTFSRFLYYRSFYANNKPTILCEGKTDNIYLKSAISERVKRHPTLASQKKGAVPYELLINFFNYSPRTRFLLELAGGTDYLKDFVINFNKHFNSFKAPKPKHPVIIVLDNDKGPNGLLHYLSNVKGASIIPNTLKLKTDYRKAEYIHVFHNLYVVLTPLSNKGKSQKIEDQYTDIESLFKKADLLRTYQKKCFNIASKRNEDIDLSKNAFANQIVKGQKKQVNFSGFNKLLNRIEEVIKHYDNMIF

SEQ ID NO: 1110 - protein, 575 aa, unidentified
  source 1..575: note = Related to RRZC01000044.1; note = Halomonas sp.
MPKKNGGKREINAPIEKLKSLQSSLSNLLLDCIDEINKVKFPRSEVNKNRDKSSKANNHEILKIKVPNADIKQQSLSHGFVRNRSIITNAMMHLGQKNVLNIDLKDFFDSFNFGRVRGFFIKNKNFKLDSHIATVIAQIACYDNKLPQGGPCSPVITNLITHALDIRLAALAEKYSCIYTRYADDLTFSTREKVFPEKIARLDNGKYAAGKKLKSEISRSGFSINDKKTRVQFKDSRQDVTGLVVNRKPNVKKEYWRTAKSQCHSLFRTGSFTKIVSDVVVEGNINELEGQLNFIDQVDSYNRLRQKAPLNYVYQFAKHGHNTLPLLSDRERTFSRFLYYRLFYGNAKPTILCEGKTDNVYLKTAIKRLVSAYPKLAKTRVNSETKKPSYDLLVRFLEYSKRTRFLLQLFGGTSYLSYFISKFEAQYAFYKAPKPQHPVLIVLDNDSGFYKEIENKLKKIETPTVYPVSLKKHDFRKADFIHVMHNLYIVLTPLSATGKDTMIEDLFDDTARGVVVSGKTFNPKDGRDNAKEYGKEVFAKKVIQDQRNKINFDGLKPLLDRMVKAIEHYDSIKNS

SEQ ID NO: 1111 - protein, 320 aa, unidentified
  source 1..320: note = Related to JAFWFN010000035.1; note = Halomonas sp.
MNKLNKLKAVTTKQELAELLGVKASFLTYVLYILRPENQYVQFSIPKKNGGKRKINAPIEKLKSLQSSLSNLLFDCVDEINKVKFPFSEINKDRDRNSKTNNYEILKVKVPNADVKQQSLSHGFVRNRSIITNAMMHLGQKNVLNIDLKDFFGSFNFGRVRGFFIKNKNFKLDSHIATVIAQIACYDNKLPQGGPCSPVITNLITHSLDIRLAALAERYSCIYTRYADDLTFSTREKFFPEKIARLDNGKYVAGKKLKSEISRSGFSINDKKTRVQFKDSRQDVTGLVVNRKPNVKKEYWRTAKSQCHSLFRTGSFTKVV

SEQ ID NO: 1112 - protein, 616 aa, Pseudomonas sp.
  source 1..616: note = Related to GL385078.1; note = Pseudomonas syringae
MKKIEALQAVRTKPELARLLGVKASMLTYVLYVLRPENQYSSFTIPKKSGGTRTINAPHDRLRLIQRALSDLLQDCIEDINDSKPKSAVKGKFIAAKKDDNPDYRRHKFFEDVFTPTLSHGFVRKRSIITNAMMHIDRKNVLNIDLKDFFDSFNFGRVRGFFIANNHFGLSPEIATVIAQIACYNHKLPQGSPCSPVITNLIGHILDIKLALLAREHSCTYTRYADDITFSTRSKHFPDALMREYKGIYVPGLELENRIRQAGFRVNSKKTRIQYQDSRQIVTGLVVNEKPNIRSEYWRTAKSQCHLLFKTGAFTEGDKEKSLPGNIEQLEGRLNFIDQLDFYNRLRQKPPLNSEYVLEKHGVDTRKLLGGRERTFGRFLYYRSFYASSSPTILCEGKTDNIYVKAAINRLAADYPSLARVKASESEYKLLVSIFKYTPRTRFLLGLYGGASYLKEFITRFEEAYSYYKAPDPENPVIIIMDNDGGFDGVDSLLKGKKLHATPFPKGAGKLEYRGADFIHVTKNLYIVLTPMSSSGGSSEIEDLFTPSTRSEPFDGKHLCLEKDIDRATQYGKDTFANKVILPKKNSIDFSGFKVLLDRVVMCIEHYKSAKLALSK

SEQ ID NO: 1113 - protein, 615 aa, Pseudomonas sp.
  source 1..615: note = Related to CP089282.1; note = Pseudomonas amygdali
MKKIDALRTVTTKPELARLLGIKASMLTYVLYVLRPETQYSIFEIPKKSGGTRTISAPHDKLKSIQRALADLLQDCIEDINDSKPKSAVKSKFINSKKNDNPDYRKSKFFEDVFTPTISHGFVRKRSIITNAMMHLNRKNVLNIDLKDFFDSFNFGRVRGFFIANDHFGLDEHIATVIAQIACYEHKLPQGSPCSPVITNLIGHILDIKLALLAREYRCTYTRYADDITFSTRSKEFPVELTREYKGTYIIGSVLENRIRQAGFRINPRKTRIQYKDSRQTVTGLVVNEKPNVRSEYWRTVKSQCHMLFKSGAFTEDGPEEPVPGNIDQLEGRLNFIDQLDFYNRLRQKPPLTPDYMLEKHGVNTHKLLSGRERTFSRFLYYRAFYGNARPTILCEGKTDNIYVKAAISRLAADYPRLAKIKTATSDYKLLVSIFKYTSRTRFLMGLYGGAAYLTDFVARFENTHRFYKAPRPTNPVIIIMDNDGGFDGVEGIFKGKKSNATPVPKGTGRTEYRGADFIHVVENLYVVLTPLGPSGSKSEIEDLFTSSTREELVDKKTLCLDKEIDRSSQYGKDTFANKVILPKKASIDFSGFKILLDRIVLCMEHYESSVLAST

SEQ ID NO: 1114 - protein, 479 aa, Pseudomonas sp.
  source 1..479: note = Related to GL384649.1; note = Pseudomonas amygdali
MMHLNRKNVLNVDLKNFFDSFNFGRVRGFFITNNHFRLAPEIATVIAQIACYDNKLPQGSPASPVITNLITHILDIRLSILAREQSCTYTRYADDITFSTREKVFPEQIMKEIGDTYSPGHLLSGEIRRAGFSLNAQKTRIQYKDSRQEVTGLVVNKKPNVKKEYWRTVKSQCHLLFKIGNFVEIINDEPQPGNINQLEGRLNFIDQVDYYNRKRQKPHLNPEYALSKHGTNTHELLSGRERTFSRFLYYRSFYGNDKPAIICEGKTDNIYLKSAINRLAPVYPRLATAKSTTSDYTLLVDIFNYSARTRFLLELYGGTSYLKDFIVRFEKHYSFYKAPRPQNPVIIILDNDKGFDEIDKLLKSEKSKSTAYPEIAGQNKYRGADFIHVIHNLYVVLTPLAATGGQTAVEDLFPQVTRDEIVDGKSFSTDKEIDRTTQYGKDVFANKVIAAKKGSIDFSGFSVLLNRIVSCIEHYDSIK

SEQ ID NO: 1115 - protein, 613 aa, Pseudomonas sp.
  source 1..613: note = Related to NZ_UTBG01000001.1; note = Pseudomonas viridiflava
MRKIDALKAVRTKPELASLLGVKASTLTYVLYVLKTSTQYKSFTIPKKTGGTRTIHAPHDRLKAIQSSLSDLLQDCIEEINSAKPKKAAKTKFVNTTKDKNPDYKKTKFLEDTFTPTLSHGFVRKRSIITNAMMHLNRKNVLNVDLKNFFDSFNFGRVRGFFITNNHFRLCEETATVIAQIACYENKLPQGSPCSPVITNLITHILDIRLAALARDNACTYTRYADDITFSTREKIFPEGIMRENDGEYSTGHLLNGEIKRAGFSLNIQKTRIQYSDSRQDVTGLIVNKKPNVKSEYWRTVKSQCHLLFKSGSFIEIIDGEPKRGNINQLEGRLNFIDQVDYYNRLRQKPPLNPEYEPSKHGHNTRELLSGRERTFSRFLYYRSFYGNEKATIICEGKTDNIYLKSAINRLAAAYPRLAKAKSASSAYQLLISLFNYSARTRFLLELYGGAPFLKEFISNFEENYELYKAPAPSNPVIIVFDNDAGFDIVDSLLRGKKIQAVAFPASSGRNEYRGADFIHVTKNLYIVLTPLTAAGTQTDIESLFTKVTRDEIFEGKTFSSAKDFDRALHFGKDTFANKIIAAKKGSIDFSGFNILLNRIVQCINHYDSIKQP

SEQ ID NO: 1116 - protein, 612 aa, Pseudomonas sp.
  source 1..612: note = Related to WIBD01000035.1
MKNIDALRAARTKPELALLLGVKASFLTYVLYVLKPDTLYRSFTLKKKSGGTRTIHAPYESLKSIQSSLSNLLQDCIEEINKAKPAKAIKTKFIITKKDKNSDHKKKKRPDHTFTPTLSHGFVRKRSIITNAMMHLNRKNVLNVDLKDFFDSFNFGRVRGFFITNRNFQLHPDIATVIAQIACYNNTLPQGSPCSPVITNLITHILDIKLAALARTYSCTYSRYVDDITFSTRKKIFPEQIMKDLEGSYTAGYLLNGEIQRAGFNLNPKKTRIRNQDSRQEVTGLVVNKKPNVNSKYWRTVKSQCHLLFKSGTFVDIIDDKPAPGNINQLEGRLNFIDQVDYYNRLRDKAPLNPEYMPHKPSNNTRRLLSGRELTFSRFLYFRSFYANEKVTIICEGKTDNIYLKAAIKKLSPAYPKLAKPKSATSAYQLLVSIFNYSARTRFLMELYGGTPYLKDFIAEFKENHKFYKAPKPANPVIIILDNDKGFNIVESLLRGDKVQATPYPRTPGQFEFRGANFIHVTENLYLVLTPLAPPPDRQTAIEDLFTQDTRDEQVDGKILSLEKEFDKATHYGKDAFANKVVLVKKSSIDFSGFNVILNRIMQCIEHYDSIK

SEQ ID NO: 1117 - protein, 611 aa, Pseudomonas sp.
  source 1..611: note = Related to NZ_LHVB01000014.1; note = Pseudomonas chlororaphis
MKKIDALRAVRTKPELALLLGIKASSLTYLLYVLKPSTQYSSFEIPKKSGGTRTIHSPSERLKSLQSSLSILLQDCIEEINKDKPARANKTKFITTKKDKASDSKKSKFIEYAFMSTLAHGFVRKRSIITNAMMHLNRKNVLNVDIKDFFDSFNFGRVRGFFITNNHFRLDPNIATVIAQIACYDNKLPQGSPCSPVITNLITHILDIRLAALAQANSCTYSRYADDITFSTREKLFPTQLMSEEGGTYIAGNELKREIQRAGFELNAKKTRIQYQSSRQDVTGLVVNKKPNVKSEYWRTVKSQCHLLFKSGKFTAKKGDEILEGNILELEGRLNFIDQVDFYNRLRQKPHLNPEYALSKHGLNTRQLLSGRERTFSRFLYYRSFYANDKPTILCEGKTDNIYMKSAISSLATDYPKLARPKSATSPYQLLISLFKYNERTRFLLQLYGGTSYLKDFIETFAMHYKFYKAPKPNNPVIIILDNDGGFDSINALLNGDKTRATCYPNTPGKNEYRDAEFIHVLENLYIVLTPRGVPDKHTAIEELFTQKVRDEVVSGKTFNHTNKIDITKEYGKEIFAKKVILAKKGSVDFSGFRVLLNRVVQCIEHYDSIK

SEQ ID NO: 1118 - protein, 609 aa, Pseudomonas sp.
  source 1..609: note = Related to NZ_VJOY01000005.1; note = Pseudomonas mangiferae
MKKIDALRAVRTKPQLALLLGVKASALTYLLYVLKPATQYSSFDIPKKSGGVRTINAPSERLKLVQSSLSELLQDCIEEINKAKPPRAPKGRFAKTEKEAGGKRSKHVEYVFTSTLSHGFVRKRSIITNALLHLNKKNVLNVDIKDFFDSFNFGRVRGFFISNNNFKLDPGIAKVIAQIACYDNKLPQGSPCSPVITNLITHGLDIRLAALAKKSSCTYSRYADDITFSTRERLFPSNIVKEIAGIYSYGDDLKAEFGRADFKLNEKKTRIQYHDSRQDVTGLVVNKKPNVKSEYWRLVKSQCHLLFKSGRFLVKEDGKVKDGNVLELEGRLNFIDQVDYYNRLRQKKPLNPEYALENHKLNTRKLLSGRERTFSRFLYYRYFYANEKPLVLCEGKTDNLYLKSAVNRLVAAYPRLAKAKTVNAPYHLLISFFKYSERTRFLLQLYGGASYLKDFIESYEKNYSFYKAPKPSNPVILVFDNDTGFNSVEALLKGSKMKEVVAHPVGSKKSSFRNSEFIHVFYNLYVVLTPLGAAKSTAIEDLFTRSTLDEVVSGKKFNPTKEIDVDKEYGKEVFAKKVVLAKKGSIDFSGFCPLLDRIVKVLEHYESTK

SEQ ID NO: 1119 - protein, 609 aa, Pseudomonas sp.
  source 1..609: note = Related to NZ_JYHV01000007.1; note = Pseudomonas stutzeri
MRKVDALRAVRTKPELALLLGVKASALTYLLYVLKPSTQYTSFNIAKKSGGIRKINSPSERLKAVQSSLSTLLQDCIDEINKAKPPRAPKGMFAKTDRLSDGKRAKRVEYVYTSTLSHGFVRKRSIITNALMHLNKNSVLNIDIKDFFESFNFGRVRGFFIKNNNFRLRPDVATVIAQIACYDNKLPQGSPCSPVITNLITHSLDIRLAALARKNSCTYSRYADDITFSTREKVFPSNLVRWDSEGYVYGDDLESEFARAGLKLNKKKTRIQYKDSRQDVTGLVVNRKPNVKCEYWRTVKSQCHLLFRTGKFAIKDGDEIKDGSIFELEGRLNFIDQVDYYNRLRQKIPLNPEYALANHKLNTRGLLSGRERTFSRFLYYRAFYGNDKPTILCEGKTDNVYIRSAINRLAAEYPKLARAKTSTKPYELLVSLFKYNERTRFLLQLYGGSSYLKDFIETYEKHYDFYMAPKPANPVIVILDNDTGFNSIEVLLKSKMTNAAVYPTGLGVAGYRNSDFIHVLHNLYLVLTPLGTAKSTAIEDLFTRSTLKEIVSGKTFNPSNKMDPAKEYGKEIFAKKVVLAKKGNIDFVGFRPILDRLVQCIDHYESIKG

SEQ ID NO: 1120 - protein, 609 aa, Pseudomonas sp.
  source 1..609: note = Related to NZ_AVEF02000221.1; note = Pseudomonas syringae
MRKIDALRAVRTKPELALLLGVKASALTYLLYVLKPSTQYSSFEIPKKTGGTRTIHSPSERLKVVQSSLSMLLQDCIEDINKAKPPRAPKGKFAKTEKLPAIKRTKLVDYVFTSTLSHGFVRKRSIITNALMHLNKKKVLNVDIKNFFDSFNFGRVRGFFIKNNNFRLDPNIATVIAQIACYDNKLPQGSPCSPVITNLITHGLDIKLAALAKKNSCTYSRYADDITFSTREKVFPLNVMKEEAEGYVCGDGLKSEIGRAGFTLNNKKTRIQYKDSRQDVTGLVVNKKPNVKCEYWRTVKSQCHLLFKSGGFVTKNGDEIEEGNIFELEGRLNFIDQVDYYNRLRQKAPLNPEYDLAKHGLNTRNVLSGRERTFSRFLYYRSFYGNDKPTILCEGKTDNIYIKSAISRLAAVYPRLAKVKALTSAYQLLVSLFNYTERTRFLLQLYGGTSYLKDFIETYEQHYNFYKAPKPINPVIIILDNDTGFNSIETLLKSNKKNQAVVYPIGVRGAGCRNADFIHVVHNLYIVLTPLGKEKSTAIEDLFTRPTLDEIVSGKKFNPSNKMDITKEYGKEIFAKKIVLVKKGSIDFSGFRVLLSRIVQCIEHYDSVK

SEQ ID NO: 1121 - protein, 607 aa, Pseudomonas sp.
  source 1..607: note = Related to QLTL01000007.1
MRKIDALRAVRTKPELALLLGIKASALTYLLYVLKPSTQYARFEIPKKSGGTRTIFAPSERLKAVQSSLSILLQDCIEEINKAKPPRAPKGRFAKNEGKTRGRRAKRVDYVFTSTLSHGFVRKRSIITNALMHLGKKNVLNIDINNFFDSFNFGRVRGFFITNNNFRLDPNVATVLAQIACYDNKLPQGSPCSPVITNLIAHSLDIRLAALAKKNSCTYSRYADDITFSTRKNVFPIAIAKDVSGSYECGLDIEREIIRAGFKLNAKKTRVQYKDSRQDVTGLVVNEKPNVKSEYWRTVKSQCHSLFRTGEFVINNGAVSRRGTLFELEGRLNFIDQVDYYNRLRQKLPLNREYALADHKLNTRELLSGRERTFSRFLYYRHFYANDKPVIICEGQTDNIYIRSAIHSLAAAYPRLANVKTPVAPYKLLISLFGYSERTKFLLQLYGGANYLKSFIEQYERHYGFYQAPKPKNPVIIMFDNDSGFGTTENFLKGKSSAVVYPVASRGAGYRHAEFIHVIHNLYIVLTPLGGAKSTAIEDLFLKSTLDEKVSGKKFNPDKNIDTATEYGKEVFAKKVILAKKGSIDFSGFSTILNRTVQCIEHYDSIK

SEQ ID NO: 1122 - protein, 608 aa, Pseudomonas sp.
  source 1..608: note = Related to NZ_CP018743.1; note = Pseudomonas putida
MRKIDALRAVRTKPELALLLGIKASALTYLLYKLKPSTQYHTFEIPKKSGGTRTIHSPSERLKALQSSLSNLLQDCIEDINKEKPARTPKGRFAKLYKNLQGKRGKHINYVYISTLSHGFVRDRSIITNALMHFRKKNVLNIDIKDFFDSFNFGRVRGFFISNKNFRLNDEIATVIAQIACYDNKLPQGSPCSPVITNLIAHSLDVRLAALAKKYSCTYSRYADDLTISTREKLFPPNIMKEDAGVYTCGRDLVSEISRAGFSLNHKKTRIQYKDHRQDVTGLVVNKKPNVKCEYWRTVRSQCHLLFRTGKFLTKVGDEVRDGSIFELEGRLNFIDQVDYYNRLRQKPALNPEYALSKHGVNTRELLSGRETTFSRFLYYRHFYANEKPVILCEGKTDNVYIKSAINVLAAAYPRLAKAKTANSPYELLVSMFNYTERTRFLLQLYGGASYLKDFIETFKKHYGFYKAPKPSNPVIILLDNDTGFDSICSLLKGKSFGAEAYPPGLAMNDCRDAEFIHVGLNLYVVLTPRVAAKHSAIEDMFTKATLGEVVGGKTFNPSNKMDSSKEYGKEIFAKKVVLAKKGSINFSGFNVILKRIVQCIEHYDKIK

SEQ ID NO: 1123 - protein, 403 aa, Pseudomonas sp.
  source 1..403: note = Related to NZ_JZRI01000162.1
MRKIDALRAVRTKPELARLLGVRASELTYVLYVLKPPTQYISFKIPKKSGGDRTIHSPSDRLKAIQSSLSDLLLDCIDDINKSKPGKPHLDRFVKGKKEKLLDSKKKKPLEYIFSPTLSHGFVRNRSIITNAMMHLHKKNVLNVDLQNFFDSFNFGRVRGFFISNRHFQLDANVATVIAQIACYDNKLPQGSPSSPVITNLITHSLDISLAKLAFEHSCTYSRYADDITFSTREKIFPPQIMSEESGSYTAGSQLTHEITKAGFSLNSKKNRIQYNSSRQDVTGLVVNKKPNVKCEYWRTVRSQCHLLFKSGSFVTKINDEEVVGNINKLEGRLNFIDQVDYYNRLRQKPALNPEYTLSKHAINTRELLSGRETTFSRFLYYRAFYANEKPTILCEGCLLYTS

SEQ ID NO: 1124 - protein, 614 aa, Aeromonas sp.
  source 1..614: note = Related to JAGDEY010000009.1; note = Aeromonas veronii
MKKLDALRAAKTKPELAHLLGVKPSSLTFLLYKLKPSTQYSSFDIPKKNGGSRTIHAPSKKLKKLQSSLSNYLQDCIDEINSAKPAFSNKKKFIKIDKDRVLDGKTKNFTEYKFISTLSHGFVRERSIITNALMHLNKRNVLNIDLKDFFESFNFGRVRGFFISNRNFCLDPDIATVIAQIACYDNKLPQGSPCSPVITNLISHILDIQLAALAKANSCVYSRYADDITFSTRERVFPSDIMSIEAGEYIVGRKLRGIIKRAGFSLNEKKTRIQYKDSRQDVTGLVVNKKPNVKSEYWRTVKSQCHSLFKNGTFTVKKGCDIVEGSISELEGRLNFIDQIDLYNRRRQQPKINPEIALCEPGINTRILLNGREKTFSRFLYYCYFYANKKPMIICEGKTDNIYIKLAMSKLATDYPLLAKPKSSNSAYEPLVSLFKYSKRTRFLLQLYGGTSYLKNFIETYKKNFAFYKAPKPCFPIIIILDNDAGFKDINSWLDKSKYVTPYNINIKASENNKFRYAEFIHVVENLYIVLTPRENPDKNSAIEDLFNPEILKEEVSGKTFNPSNSKIDITKEYGKEIFAKKVIFAKRNSIDFSRFKVLLDRIVKCLEHYDSNK

SEQ ID NO: 1125 - protein, 500 aa, Aeromonas sp.
  source 1..500: note = Related to NZ_UETN01000024.1; note = Aeromonas allosaccharophila
MRKIDALQKVKTKPELAELLGIKASSLTYLLYVLKPSTQYSYFEIPKKNGGRRTIHAPSKRLKKLQSSLSKFLQDCIEEINNERPASTHKSRFVKINKDRVLDGKKTKFIEHKFTSTLSHGFVRDRSIITNAMMHLNKKNVLNVDIDNFFDRFNFGRVRGFFIKNRHFSLDPNIATVIAQIACFDNKLPQGSPCSPVITNLITHILDIKLAALANDNSCVYTRYADDITFSTRERVFPKEIMRLEDGVYTPSEKFERVIKKAGFKLNEKKTRIQYKDSRQDVTGLVVNKKPSVKSEYWRTVKSQCHSLFKSGHFTVKKHDEIIEGSISELEGRLNFIDQIDLYNRLRQKPCIPPEISIQQHGINTRELLSGREKTFSRFLYYRYFYAHDKPMILCEGKTDNIYIKLAMNKLAVDYPKLAKPKTATSAYEPLVSLFKYNKRTRFLLQLYGGTNYLKEFITTYKKHYFFIKHQSLVIQLLLSWITTKDSTLLTPCLKEIKSM

SEQ ID NO: 1126 - protein, 586 aa, Pseudomonas sp.
  source 1..586: note = Related to JACAQA010000043.1
MRKVDALRAVRTKSELALLLGFKPAAFTYLLYKLKPSTQYQSFTIPKKSGGTRTIYAPSERLKALQTSLSLLLQDCSEEIEKAWVGGSDSKSTLSHGFVRKRSIITNAMMHLHKKNILNVDLKDFFDSFNFGRVRGFFITNREFCLNPDIATAIAQIACHDNKLPQGSPCSPVITNLITNILDIRLAALARSHSCTYSRYADDLTFSTREKVFPSQIMKEDVGSYTPGKKLKSEIKRAGFELNHKKTRIQYMDSRQDVTGLIVNKKPNTRYEYWRTVRSQCHSLFKSGSFTKKVDGKFIEGNIFELQGQLNFIDQIDYFNRLRQHPPLNPEYALSNHLINTRKLLTGREVVFSRFLYYRHFYGNETATILCEGKTDNVYLKSALNKLALKYPRLAIPKSAANPYKLLVSFMNYTERTRFLLQLYGGTSYLHVFLNSFEEHYKFYNAPKPKNPVVVVLDNDSGFNSIDGLLKGKLSGTPYPDTLSKSEFRKADFIHVTKNLYVVLNPLGPKGEFSAIESLFSPATRNIKISGKSFNPENNMDKNTEFGKEIFASKVVVANKDTIDFSGFDVLLSRITMCLEHYDLIR

SEQ ID NO: 1127 - protein, 588 aa, Pseudomonas sp.
  source 1..588: note = Related to POEK01000001.1
MRKINALRAAKTKPELALLLGVKATALTYVLYVLKPDTQYSTFTIPKKSGGLRTICSPSDRLKTIQSALSELLQDCLDELTAVKVKENHDYKSNLSHGFLRNKSIITNAIVHTGQRNVLNLDLKDFFDKFNFGRVRGFFISNKDFQLNEHIATVIAQIACYDNRLPQGSPCSPVITNLITHILDIKLAALAESYSCIYSRYADDITFSTRERLFPPKLMKEIAGEYIPGKKLRSEIRRAGFEINAPKTRIQFQDSRQDVTGLVVNKKPNVKSEYWRTVKSQCHSLFRTGSFKKKVDGTFADGNIYELEGQLNFIDQVDYSNRLRQKPPLDTEYEQRKSNIKTRELLSGRETTFSRFLYYKFFYANEKPTIICEGKTDNIYLKSAISSLAANYPKLATPKSANNPYELLVKFFNYNNRTRFLLQLHGGTNYLHTFINDFESHYDFYKAPRPKQPIIIILDNDSGFNGIDGLLKGKASAKRYPVAKGKKKDFRNANFIHVAHNLYIVLTPPTATGGHTAIESLFTAATLNEKVQKKTFNPESKINTTTEYGKEIFAKKVILANKKTINFSGFDVILKRVIQCMKHYETAK

SEQ ID NO: 1128 - protein, 589 aa, Pseudomonas sp.
  source 1..589: note = Related to NZ_LT629790.1; note = Pseudomonas mediterranea
MKKISALRLAKTKPDLALLMGIDASFLTNILYRLKPTTQYTSFTIPKKSGGVRTIYAPSDELKSIQSALSNLLQDCIQEINTSKGPKFKSTLSHGFVRDRSILTNAIMHLNKRNVLNIDLKDFFDQFNFGRVRGYFISNKIFQLDPAVATVIAQIACYDNKLPQGSPCSPVITNLITHSLDIRLASLARDNSCTYTRYADDITISTRKKDFPSNLTSDRASGYVIGSRLAAEIKRAGFSVNSTKTRIQYEDSRQDVTGLIVNKKLGTKSEYWRTVKSQCHALFQTGKFLENSSNPPQAGSIFVLEGKLSFIDQVDFFNRKRSKPLLNPEYELSKHGSKTRKLLNGRERTFSRFLFYKHFYGNTKPTIVCEGKTDNVYLKAAINKRAAAFPSLAKAKSGNAPYELLVHFINYTNRTRFLLELYGGTPYLKEFMLDYDEQFKFYKAPMPTHPVIIILDNDDGFGKIEGVLKGNKYSPTVFPVTLPVTDFRNAEFIHVVHNLYIVLTPLKGKGNKSSIEDLFTKKTRATKLGGKVFNKQNKTDSDTEYGKEYFASKVVAPNKHKINFSGFNPLLGRIDQCIQHFATVKLVKP

SEQ ID NO: 1129 - protein, 592 aa, Pseudomonas sp.
  source 1..592: note = Related to JAJSQA010000022.1; note = Pseudomonas monteilii
MKKISALRLAKTKPDLALLMGIDASFLTNILYRLKPTTQYTSFTIPKKSSGVRTIYAPSDELKSIQSALSTLLQDCIQEINTSKGPKFKSTLFHGFVRDRSILTNAIMHLNQRNVLNIDLKDFFDQFNFGRVRGYFISNKIFQLDPAIATVIAQIACYDNKLPQGSPCSPVITNLITHSLDIRLASLARDNSCTYTRYADDITISTRKKTFPNNLMSGQTSGYIIGSRLAEEIKRAGFSVNSAKTRIQYKDSRQDVTGLVVNKKPGTKSEYWRTVKSQCHALFQTGKFLENSSNPPQAGNIFVLEGKLSFIDQIDFFNRKRNKALLNPEYELSKHGSKTRKLLNGRERTFSKFLFYKHFYGNTKPTILCEGKTDNVYLKAAINNRATAFPSLAKAKSGNAPYELLVNFINYTNRTRFLLELYGGTPYLKEFILDYDEHFKFYKAPMPTHPVIIILDNDDGFGKIEGALKGKRYNPTIFPITLPPTDFRNAEFIHIVHNLYIVLTPLKGKDTKSSIEDLFTKKLRATKLGGKVFNKENKTDSDTEYGKEYFASKVVTPNKHKINFSGFNPLLGRINQCIQHFATLKPVKPVKP

SEQ ID NO: 1130 - protein, 590 aa, Pseudomonas sp.
  source 1..590: note = Related to NZ_CP076652.1; note = Pseudomonas savastanoi
MKMISALRVAKTKPDLALLMGIDASFLTNILYRLKPATQYTSFTIPKKSGGVRTIYAPSDELKSIQRALSNLLQNCMQEINTSKGTKFNPTLSHGFVRNRSILTNAIMHLNKKNVLNIDLNNFFDQFNFGRVRGYFISNKNFQLDPAVATVIAQIACYDNKLPQGSPCSPVITNLITHSLDIRLASLAKDNSCTYTRYADDITISTRREAFPNNLTSDGASGYIIESRLAAEIKRAGFSINPAKTRIQYKDSRQDVTGLVVNKKPATKSEYWRTVRSQCHALFQTGKFLENNSNPPQTGNIFVLEGKLNFIDQIDLFNRKRSKPLLNPEYEPSKNKSKTRKLLNGRERTFSRFLFYKYFYGNTKPTIICEGKTDNVYLKAAINKRASAFPSLAKPKSGNDPYELLVRFINYTSRTRFLLELYGGTPYLKEFILDYDEYFNFYRAPVPTHPVIIILDNDDGFGKIEGALKGKRYNPTIFPSTLPANDFRNAEFIYIAHNLYIVLTPRKGKTEKSSIEELFPIKIRATKLGGKVFNKQNKTDSETEYGKEYFASKVVTPNKDKINFSGFNPLLERINKCIQHFTTVKLVKPL

SEQ ID NO: 1131 - protein, 607 aa, Pseudomonas sp.
  source 1..607: note = Related to NZ_JAHTKI010000003.1; note = Pseudomonas botevensis
MRKSARKPPHFPAWQQRVLKKIDDLRAARTKPDLALLLKIDSSHLTNVLYRLRPETQYKSFTIRKKSGGDRTIHAPSDELKSIQKALSTLLQDCAQEIEKSNGPKFKSTLAHGFVRDRSILTNSVMHLNRKNVLNIDLKDFFDGFNFGRVRGFFIANRNFQLHPEVATVIAQIACYDNKLPQGSPCSPVITNLITHALDIRLASLAKDNSCIYTRYADDITISSREKEFPLTIMAEGASSYTPGKRLQLEIKRAGFEINHPKTRIQYKDSRQDVTGLIVNRKPGVKSEYWRTVRSQCHSLFNTGAFKEDVSGTPTEGNIFVLEGKLNFIDQIDFFNRKRNKPILNPNYEPSNHGSNTRKLLSGRERTLSRFLYYKYFYGNAKPTVVCEGQTDNIYLKAAINRLAVGYPKLVRPKTVAAPYELLVQFINYTGRTKFLLELAGGTDYLKKFVAEFGSYFKSYKAPVPTRPVILILDNDDGFNAIEGILKGNKYKPTIFPSGLAANDFRKAEFIHVVHNLYIVLTPLAKSGTKTSIEDLFPQSVRDTKLGEKTFNKENKIDIMKEYGKEFFATKVVTPKRNEIDFSGFNIILKRLEQCIEHFATMTLTKS

SEQ ID NO: 1132 - protein, 587 aa, Pseudomonas sp.
  source 1..587: note = Related to NZ_LN854573.1
MISALRDAKTKPQLALLLGIDASFLTNVLYRLKPSSQYKSFTIPKKSGGVRTIYAPSEELKSLQRALSSLLQDCQQEIYKSKGPKFKSTLSHGFVRERSIMTNAVMHLNKKSVLNIDLKDFFDQFNFGRVRGFFISNTNFQLDPAVATVIAQIACYDNKLPQGSPCSPVISNLITHSLDIRLASLAKDNSCTYTRYADDITISTREKDFPVNLMSEEAGEYSPGKKLESEIRRAGFEINHKKTRIQYKDSRQDVTGLIVNKRPGVKCEYWRTVRSQCHALFNTGEFIENESSNSEKGNVFVLEGRLNFIDQIDYFNRKRSKPILNPEYQLSDHGSKTRRLLSGRERTFSRFLYYKMFYGNAKPTILCEGKTDNVYLKAALNRLAAGFPKLVKPKNGKDPYELLVQFFNYTERTRFLLELSGGTPYLREFIASFDEHFNYFKAPVPTRPVIMVFDNDDGFKVIESVLKGKKVKPVVYPNTLAASDFRNSDFIHVIHNLYIVLTPRAAANGDTAIEDLFPQTVRDVKLGGKGFTKKNNIDKDTEYGKEFFASKVVVPNRNNIDFSGFDIFLKRIMQCIEHFDTVKLTKP

SEQ ID NO: 1133 - protein, 570 aa, Pseudomonas sp.
  source 1..570: note = Related to NZ_VLKY01000029.1; note = Pseudomonas duriflava
MGVNASHLTNVLYRMKPENLYKSFTIAKKSGGVRTIHAPVDELKSIQTALSILLQDCVQEINKSKGDKFTSTLSHGFVRERSILTNAVMHLSQKNVLNIDLKDFFESFNFGRVRGFFIANKNFQLDPAVATVIAQIACYDNKLPQGSPCSPVITNLITHSLDIRLASLAKENSCTYSRYADDITISTRKKEFPSNLMTDGQQGYSPGKRLQSEIKRAGFEINRSKTRIQYKDSRQDVTGLIVNTKLAVKKEYWRTVRSQCHSLFQTGAFKENASGTPEEGNIFALEGRLNFIDQIDLFNRKRNKTAPALDHDSSQKKYNTRRLLSNRERTFSRFLYYKLFYGNAKPTIVCEGKTDNIYLKSAIGRLAGAYPNLAKPKSGNDPYELLVRFVKYTERTRFLLELSGGTPYLKEFILGFDEHFKYYKAPAPKQPVILVFDNDDGFGKIEGVLKGKKYSPTIFPTTLPTDAFRKAEFIHVAHNLYIVLTPLKEKGEHTSIEDLFPQAVRDIKLGGKKFNKENEIDIDIEYGKEYFAKKVVLPNKNDIDFSGFNIILTRMVQCIEHFATLTLTKP

SEQ ID NO: 1134 - protein, 589 aa, Pseudomonas sp.
  source 1..589: note = Related to NZ_CP044074.1; note = Pseudomonas oryzihabitans
MLKIDALRQIKTKPELALLLGINASHLTNVLYIKRLETQYSSFTIPKKSGGVRTIYAPSDELKSIQAALSHLLQDCIQEIRNSKGEVSKSTLSHGFVRGRSIITNAVMHLRQKNVLNLDLKDFFEGFNFGRVRGFFIANKDFQLDPVIATVIAQIACFNNKLPQGSPCSPVITNLITHSLDIRLASLAKKNSCRYSRYADDLTISTRKKDFPSNLMAEGVSGYSPGKKLQAEIKRAGFEINSSKTRIQYKDSRQDVTGLVVNKKPAIKSEYWRTVRSQCHALFQTGAFIESTSGTPEDGNIFVLEGRLNFIDQIDLFNRKRNRFDFVSEWDSSQKKINTRRLLSGRERTFSRFLYYKLFYGNSKPTVVCEGKTDNVYLRCAMAQRANGFPELFKSKAGDEPSELLVQFVKYTERTRFLLELAGGTSYLKEFILNFDEHFKYYKAPAPTHPVIIVLDNDDGFGKIEGVLNSKKFKAVSFPATLEGGSFRQAEFIHVVHNLYIVLTPLQGKGEHTSIEDLFPQAVRDIKLGEKKFSKKNEIDAATQYGKEFFASKVITPNKNTIDFSGFDIILSRMVNCIKHFASVDLAKS

SEQ ID NO: 1135 - protein, 586 aa, unidentified
  source 1..586: note = Related to NZ_PNRF01000034.1; note = Halomonas endophytica
MSKLEALRKIKTKHELATLLGIKTSVLTYTLYVLKPDTQYSSFTLKKRSGGERTIFAPSERLKSIQSTLSELLQDCRDEINNKKQDDGKFNSTLSHGFVRRHSIITNSMMHLNQKNVLNIDLENFFDCFNFGRVRGFFIANNNFKLDPHIATVIAQIACHNNKLPQGSPCSPTISNLITHSLDIQLANLARTYSCRYTRYADDITISTRENLFPRKIMRHEDGKFIAGKRLRREIKRAGFTINEKKTRIQYRDSRQDVTGLVVNKKPNIKSEYWRTVKSQCHALFSTGSFKDKENGEFIDGNEKILEGRLNFIDQIDRFNRLRQKTPLNPDYALAKYGYDTSKQLSGRERTFSRFLYYRFFYGNKFPTILCEGKTDNVYLKCAIHMLTSGYPQLAKEKTETEPYKLLLTFLKYTKRTRFLLQLHGGTSYLSFFINSFDKHYNFYKAPKPNNPAIIIADNDSGFSSIESKLRKIDSAKGYHGKKAGKNYRQAEFIHVVHNLYIVLTPTTKTNKETAIEDLFDSSTRKIQVSGKSFNPSNDMNNDTEYGKEVFAKKVIQAQKGSINFNGFKPLLNRIVAAMNHYDAIK

SEQ ID NO: 1136 - protein, 587 aa, unidentified
  source 1..587: note = Related to QOAT01000087.1; note = Thiothrix sp.
MSKLEALNKSTSKPQLAALLGVKAQFLTHVLYRLKPATQYTNFTIPKKSGGTRTIFAPSEKLKSLQSSLSTLLLDCIDEINEANTVKYTYKHALSHGFVRECSIMTNAVMHLNQKNVLNIDLKDFFDSFNFGRVRGFFIKNNHFKLDPHIATVIAQIACYDNKLPQGSPCSPVITNLITHPLDIKLASLARKHSCIYSRYADDMTFSTRKAVFPSQIMRQEHGKFITGKKLKNEIKRAGFFINDKKTRIQYKDSRQDVTGLIVNVKPNVKKEYWRTVKSQCNRLFHTGAFIKKTAAGDIDGNINELEGQLNFIDQVDRFNRSRKKPPLNHTYKLDNHGINKTPLLSGREKTFSKFLYYRLFYGNTKPTILCEGKTDNIYLKSAISILVKKYPNLASTKTNKAAYELLIRLVKYSKRTRFLLGLYGGASYLSYFTSKFDKQYVLYNEAPKPQHPVIIILDNDSGSTSVKKQFEKINSATAYPATLPKKDYKNADFIHVTHNLYIVLTPLTTKGNDTDIEYFFDDPTRLKQHNDKCFNTADKRDDKADLSKEAFAKNIIKAQKGSINFDGFKPLLDRIVAVITHYDSIK

SEQ ID NO: 1137 - protein, 587 aa, unidentified
  source 1..587: note = Related to JAHJJI010000033.1; note = Gammaproteobacteria bacterium
MSKLEALKQITTKPRLAALLGVKVQTLTHVLYILKPSTQYTGFTIPKKNGGTRSILSPSDKLKSLQSSLSNLLLDCIDEINETKHKKNYRYKHALSHGFVRECSIMTNALMHLNKKNVLNIDLKDFFDSFNFGRVRGFFIKNNHFKLDPHIATVIAQIACYENKLPQGSPCSPVITNLITHSLDIRLASLAKKYSCTYSRYADDMTFSTRESVFPRQIMGQEEGQFIIGKELKSEIERAGFSIHDKKTRIQYKDSRQDVTGLIVNKKPNVKKEYWRTVKSQCHLLFQTGAFIKKTVNGDVEGNINELNGQLNFIDQVDRFNRSREKPPLNPIYQLQNHGQNTTSLLSGREKTFSQFLFYRLFYANIKPTILCEGKTDNIYLKSVISILAEHYPKLANPKTKKNPYELLIQFVEYSKRSRFLLQLYGGASYLNYFVSQFDKHYRHYKAPTPQQPVIIVLDNDSGSSSIVTKLKALDSVKAYPATVKKEDCAKADFIHVVHNLYIVLTPLNAKNEPTDIESLFDDSIRLKQHDGKCFNTRDKRDEKVDLSKDAFANHIINAQKNTLNFDTLKPLLDRVVAAISHYDSIK

SEQ ID NO: 1138 - protein, 584 aa, unidentified
  source 1..584: note = Related to NVWS02000073.1; note = Zetaproteobacteria bacterium
MNKLERLKKITTKPALANLLEVNPSFLTHVLYILKPNTQYTTFTIPKKSGGIRTIKAPSVKLKSLQSNLSKLLLDCIDEINKSKSLEEKNYKQTLSHGFVRKRSIMTNALMHLNQKNVLNIDLKDFFDSFNFGRVRGFFIKNHNFQLDPAIATVIAQIACDDNKLPQGSPCSPVITNLITHSLDIKLASLARKHSCIYSRYADDMTFSTRKSVFPQQIICQEGDHFVTGKNMNSEIVRAGFSINENKTRIQYKDSRQDVTGLIVNKKPNVKKEYWRTVKSQCHSLFRTGTFTKKTAAGVVAGNIKELEGQLNFIDQVDRFNRPRQKAPLNPIYQYKNYGNDKTPLLSGREKTFSKFLYYRLFYGNTKPTILCEGKTDNTYLKSAISILAGSYPILASAKTRGSAYELLIRTVKYSKRTRFLLGLYGGAPYLCSFIKAFEKHYKFHKASKPKCPVVIVLDNDSGFKNFPKILKGIKSATPHPTTLESDDYRNAEFIHVIHNLYIVLTPLRSKGEETDIEYLFDDATRLKQHSGKCFNIVDKRNDETDLSKDAFAKHIIKAQKASINFDGLRPLLDRITSAINHYN

SEQ ID NO: 1139 - protein, 601 aa, unidentified
  source 1..601: note = Related to NZ_BDMN01000304.1
MKNLRALKDIRTKPELAKLLDVTPQNLTYTLYKIGRKNLYISFDIPKRNGGIRTIYAPVCNLKLIQSRLSNLLQDCIDEINNKPNKSSKLAHGFVRKGSIITNANVHKNQKYVLNIDLSNFFDSFNFGRVRGFFIKNRNFELDPHIATVLANIACFNNKLPQGSPCSPVITNLITHSLDIRLASLAKKNSCSYSRYADDITISTRKAVFPNQIMEQHENGKYLAGKKLTHEITRAGFSINEKKTRIQHQYSKQDVTGLTVNKKLNVKKIYWRTVRSQCYQLFCTGTFYKTTYKGREQGNINELEGQLNFIDQVDHFNRIRKTYNKNLHNSHHRKIGNSRERLFGRFLFFRSFYGNSQPTILCEGKTDIIYLKSAIKILATDFPNLARNNPKKGGYKLLIRFIKNSNRTNFFMDLPKDGGYGCLVTFMKKFNENSLGYKAPSPQHPVIIVVDNDKGFDNFTTAINQTKKEYSRKNKSTINPSNPTEEKDYRKKGFIHVIRNLYVVLTPLRDGESASDIEALFDEDTRLKKHEGRCFNTVLNRNDKDDLSKNAFATHIIKKQKTSINFSNFKCLLNRISGAIDHYAENGSVAKSVKTDYILVL

SEQ ID NO: 1140 - protein, 591 aa, unidentified
  source 1..591: note = Related to NZ_VTUU01000001.1; note = Marinobacter salinexigens
MSKLTTLKSITTKKELADLLEIKRSNLTYTLYVLKPSTQYFQFQIPKKNGGFRTIDAPAKRLKDIQSKLSDLFLDCIDEINKGKEKNQHNEKHGIHTYPMLSHGFSRKKSIITNALMHINNKNVLNLDLDDFFDSFNFGRVRGFFIKNRNFELHPDIATVIAQIACYNNKLPQGSPCSPVITNLITHSLDIKLASLARKYSCTYSRYADDITFSTREEVFPRQLMAEEKGKYTPGKRLRREIESSGFTINSKKTRIQYKDSRQDVTGLIVNKKPNIKKEYWRTAKSQCHSLFRTGTFYKLTDQGMAIGNINELEGQLNFIDQVDFFNRLRQKPPLNPLYKLENHRKNTSNLLTGREKTFSRFLFYRYFYGNNKPTILCEGKTDNVYLKSAINVLQDHYPRLAKSKSKHGEYKPIVHFFNYSKRTRFLLEIFGGADYLKGFVENYQKNYSFYKAPKPKNPVILLLDNDSGSNGIINLIKGLRTTTIHPSTTKKNDIKNADFIHIMHNLYLILTPLNGSSDTAIEDLFDATTKSIKVGGKSFNPGKPDTSKEYGKEIFANRVVKEKKNSINFDGFKPLLNRISAVIEHYSKHT

SEQ ID NO: 1141 - protein, 599 aa, Aeromonas sp.
  source 1..599: note = Related to NZ_CP045311.1; note = Aeromonas dhakensis
MSILINLQNAKTKKDLAAILDINTSTLTNALYRKKVSSLYTEFKIPKKKGGERIIYAPQRELKIIQKKLSLILQDCLEEITSNDEKISNLSHGFMREKSIYTNATHHKNKKNVLNIDLKDFFDCFNFGRVRGFFIKNKNFELHQDIATVIAQIACYNNSLPQGSPCSPIISNLITHSLDIKLSQLASRYSCFYTRYADDITFSTRECIFPTPLARIENNEYVIGKKLRQEITRSGFEINTIKTRIQYLSSRQDVTGLIVNKKVNVKKEYWKSVRAKCDFLFKNGYYYVLDDTGKEIKGSLSQLYGQLNFIDQIDYLNKLKKPIEINPLYILAKHGNNKTPLFSSRERVFSHFLFYKSFYGNENTTVICEGKTDIIYIRCAIKSLYKSYPSLVDKDGIIKFDFFKYTRRTRYLLSLHGGTTYIADFIKNYRQYYSLYKSAKPTKPVIIILDNDKGLGDIIGGLQKERKPRLVTADGETTLNGINSLKKSLYVHVCFNLYLLIVPHLNQKETSIESLFDKSVLDTKLNGKSFTTENEFSHEKFYGKHVFATAVIENNKHKVDFSGFNQIFKAIEKIQDDYKDVQKNTAKPPIKGSTINATP

SEQ ID NO: 1142 - protein, 415 aa, Aeromonas sp.
  source 1..415: note = Related to NZ_CP012504.1; note = Aeromonas veronii
MAEILDINTSTLTNALYRKKVSSLYSEFKIPKKKGGERTIFAPQRELKIIQKKLSLILQDCLEEMTSEDERTPNLSHGFMREKSIYTNASCHKNKKNVLNIDLKDFFDSFNFGRVRGFFIKNKKFELHPDIATVIAQIACYNNSLPQGSPCSPIISNLITHSLDIRLSQLASRHSCFYTRYADDITFSTREYIFPTSLARIENDDYVIGKKLRQEIRRSGFEINSIKTRIQYHTSRQDVTGLIVNKKVNVRKEYWKDVRAKCESLFRTGTYYILDDNEKAKPGTLSQLYGQLNFIDQIDYSNKIRKPIKTNPLYVLAKHGSNKAPLFSSREKTFSRFLFYKNFYGNEKTTIICEGKTDIIYLRCAIKSLHNLHPSLVDKDGLANFEFFKYTRRTKYLLSLNGGTPYLSDFSRELL

SEQ ID NO: 1143 - protein, 610 aa, unidentified
  source 1..610: note = Related to JABXIW010000056.1; note = Gammaproteobacteria bacterium
MLADKLDSLKNIKTKRELAILLGVKPSFLTHTLYIRKPENCYSEFEIPKKKGGYRKIKAPNPQLKSLQSKLSVLLLDCMDIIKSINFPNVISHKRLSVSRNHLKIKVPGSPRKESTLSHGFERNRSILTNAVMHTNQKNILNIDLKDYFDSFNFGRVRGFFIKNRNFQLHSDIATVIAQIACFEDKLPQGSPCSPVITNLITHSLDIRLASLSKKHSCTYTRYADDISISTRKKTFPAKIAKEVNGEYVLGKKLRQEIKRSGFKINNTKTRIQYKDSRQDVTGLVVNNKPNVKKEYWRTVRSQCHSLFHTGEFTQRNSDGELEEGNINRLEGKLNFIDQVDRYNRMRQKEKINHLYALSNYGHKMSPYWSGREKTFSRFIFYRLFYSNVKPTILCEGKTDNVYLKAAINELVKDYPKLASPPTKDERYNLLVRFVEHTKRTKFLLELSGGSSYISFFIGNYKSRYGFYKAPKDNAPVILVLDNDSGFDCIEKKINKIDSVQIYPTTLKKDKLREAEFIHITENLYIVLTPISATAKKTDMESLFDDKTRLIKYDNKCFNTIDKRDEDKDLSKDSFSRHVIKNQKTSINFDGYRPLLDRLNKVIEHYDKLK

SEQ ID NO: 1144 - protein, 588 aa, unidentified
  source 1..588: note = Related to WOBJ01000032.1; note = Aliivibrio fischeri
MDTITKLKNCRSKIDLALLLNCKPSHLTYLLYKQSPSQKYTQFSVNKKNGGIRNISAPISQLKELQSNLSHLLLDCIDDINATKSMKSTLSHGFVREKSIITNAEMHKNTKNVLNIDLENFFASFNFGRVRGFFISNNNFLLNKDIATVIAQIACHNNELPQGSPCSPVITNLITHSLDIRLANLAKKYSCTYSRYADDITFSTRKTQFPKEIMCERENVFTPSRRLNGEIIRAGFKINPKKTRIQYKDSRQDVTGLIVNKKIGVKKEYRQITKSMCNSLFHSGGFTKLVDGKHEKGSIEELEGRLNFIDSIDLYNRLTFPEKLSIHYPHVKHGIKTKKLLTGRERTLSKFLFYKNFFANEKPKILCEGKTDNIYLMAALNNLSSNYPSLASPATATKLFEPLVSFLNYSKRTKFLLELAGGTSYLVGFILDYHKYYSFYKAEKSNNPVIIILDNDDGLGEVIKAIAKIKTCVVEAPVIAGQNINDQVKSSRFVHVCHNLYLVITPLDQGKDTMIENLFEPQLWATPIKGRTFDPTEKKKPTDNYYGKNIFATEVVNPKKGQINFDGFKPLFDRMVEVLEHYKVNRQP

SEQ ID NO: 1145 - protein, 582 aa, Vibrio sp.
  source 1..582: note = Related to NZ_JABEQC010000006.1; note = Vibrio plantisponsor
MNSITQLKNCNTRVDLALLLKVKPAVLTFTLYKKGPQNNYTSFNIPKKNGGVRTINAPIGKLKTLQTNLSKLLLDCIDDINKERGFNSGLAHGFVRERSIITNAIMHKNSKNVLNIDLDNFFGSFNFGRVRGFFQKNRNFLLNDEVATTIAQIACCNNELPQGSPCSPVITNLITHSLDIQLLKLANKYSCTYSRYADDITFSTRKSKFPPEIMVENNGVYNPSKRLKHEIKRADFKINDKKTRIQYRDSRQDVTGLIVNKKIGVKKEYRRTTKSMCNSLFHTGSYTKIVNDKHVAGTINELEGRLNFIDSIDLYNRINYPEKLSIHYTHRNYGYKTRALLTGREKTFSKFLFYKWFFAPSKPTILCEGKTDNIYLKSAIFQLAAHYPKLVKATPFEHLVNYFSYNKRSRFLLELSGGTSYLAGFISSYSDHYSLYSAPKSGQPIIIILDNDSGLNDIISALAKIDTCTVYPIDKATGNIKEDIKTADFIHVVHNLYIVLTPLNGKNDSMIENLFNPALWSTPIQGRTFDPTEKRTPKNSFYGKNTFATEVIKRQKATIDFSGFHPLFERMTLAITHYEGIR

SEQ ID NO: 1146 - protein, 588 aa, Vibrio sp.
  source 1..588: note = Related to NZ_SMJS01000006.1; note = Vibrio echinoideorum
MNSIEKLKKCSSRNDLSILLDVKPSILSYVLFVESDASKYQEFTISKKTGGERLIKAPNDRLKEIQKSLSDLLLGCIDDINKEKNISNTLSHGFVKEKSIITNAEMHKKSKNILNIDLGNFFDSFNFGRVRGFFIKNNNFLLDPNVATAVAQIACHNNSLPQGSPCSPVITNLITHSLDISLAKLAKKNSCRYTRYADDITFSTRKNSFPVEIMAELDGVYKASKRLDKEISRAGFVINEKKTRIQYKDSRQDVTGLVVNEKVGIKKEYRRTVKAMCNSLFHTGSYTRLINDEHVEGSILELEGRLNFIDSVDRHNRVHYPEKLSTHYQHRHHGIRSREVWSSREKTLSKFLFYKWFYANSKTTILCEGKTDNVYLSSAIYKLKGKYPSLIDAKAKSGEPKSLVKFMDYSRRTKFILELAGGTSYLANFIDAYKERYEFYKSEKPEYPVLIILDNDDGLNDNGGIIAKLQKISTMSMHPTPPKKGNMKSKIKNSEFIHVMHNLYVVITPLNSGNDTMIENLFEQKLWSTPLNKRTFDPTEKKEPKSSYYGKNDFATRVVKKKQDSINFNGFIPLLDRMQRAIEHYKTV

SEQ ID NO: 1147 - protein, 585 aa, unidentified
  source 1..585: note = Related to NZ_CP028355.1; note = Shewanella baltica
MDAIDKLQSCKTRRDLAILLNYNPSHFTHLLYHSIPEQRYKSFLIPKKNGGERSISAPNEKLKQLQRNLSNLLLECIDNINKRNGVNNSLSHGFVRERSIITNAEMHKNKKNVLNIDLENFFGSFNFGRVSGFFIKNNSFLLEEVIATTIAQICCFNNELPQGSPCSPVITNLITHSLDIRLASLAKKYSCTYTRYVDDITFSTRKSTFPIQIMNFEYGEYLPSQRLLHEITRSGFNINNSKTRIQFKDSRQDVTGLIVNKKVGVKREYRQLTKAMCNKLFNTGRFTKEIDGQEIEGSLLELEGQLNFIDSIDYYNRVNYPQNLSIHYTHRNFGFRTKLLLNGREKILSKFLFYKNFYSSDKPTILCEGKTDNVYLLSALHALSSSFKKLATPPTKTTDFKTEIKFLNYTKRTKFLLELAGGTSYLAMFIANYHSNYIQYKAPKPKHPVIIILDNDEGLKDIINELEKIKTCTFSPPKTKGSTTRDAVKTSTFVHVVHNLYLVITPLSDGNDTMIENFFEKELWETVVNGRKFDPTEKKEPKNIFYGKNIFANDVVKLNRKKINFEGFRPLFYRLEKVISNYNKI

SEQ ID NO: 1148 - protein, 584 aa, Vibrio sp.
  source 1..584: note = Related to NZ_CAJFAE010000018.1; note = Vibrio jasicida
MNAITQLKNCHSRIDLAILLKCKPSFLSYVLYKKAASSKYHEFEIDKKNGGKRKICAPADDLKSIQRNLSDLLLDCIDDINKDKNYYNTLSHGFSREKSIISNAEMHRGQKNVLNIDLDNFFGSFNFGRVRGFFIKNRNFELNEEVATTIAQIACYENQLPQGSPCSPVITNLIAHPLDIRLAKLAKQHSCIYTRYADDITFSTRLKDFPAKLMAQPTPNEYVVGSKLNREIQRAGFNINHDKTRIQYKDSRQDVTGLVVNKKIGVKREYRQLTKAMCNSLFHTGSYTKLVGDNHIDGSLDELEGRLNFIDYVDLHNRLQYPEKLSIHYPHRNYGSKTRALLTSRETTLSRFLFYKYFVGNEKATVLCEGKTDNIYLKAALRQLAAHYPTLQNESNHECYLDFLNYSKRTKFLLELFGGTAYLAGFITSYNDLYSYYKGPKANNPVIIVLDNDDGFDAIASALNKTKSCTINPTPTHTTGHNFNSTEYKNSNFIHVCHNLYVVLTPLNNGSDTMIEDLFDRSLWQTSISGRTFDPTGKLKPSSSYYGKNIFATEVVAPRQSSINFDGFKPLLDRLTDVVGNYAP

SEQ ID NO: 1149 - protein, 585 aa, unidentified
  source 1..585: note = Related to WMDE01000033.1; note = Photobacterium carnosum
MNKILQLKNCRTRIDLAILLKCKPSFLTFLLYKTKQEDHYEEFEIPKKTGGIRKICSPKGDLKLLQKRLSLLLLDCIDDINSKNKIKNTLSHGFEREKSIITNAEMHRGKKNVLNIDLNNFFDEFNFGRVRGFFISNKDFQLTPEVATTIAQIACYKNKLPQGGPASPVITNLITHILDVILSRLAKKNSCIYTRYADDITFSTRKKLFPSGIMEETDANIYIPSKSLNHEIKRAGFSINSKKTRIQYKDSRQDVTGLTVNKKVGVKREYRQLTKSMCNSLFHTGEYTKKVNNEDVAGTLKELEGRINFIDSIDFYNRKKHPKKLSIHYQQKNHGLNTRLLLSGREKLLSKFLFYKNFIGNDKVTILCEGKTDNIYIKSALKTLVNNYPKLAEKKAEEPYKSYLNILNYSKRTKFFLELAGGTPYLNFFIKNYEKHYNFYKSVPAEKPVIIILDNDDGFKLIINTIKEIKNHTCLPYPNRRQTPIEYLKNADLIHVTHNLYIILTPLSNGNDTMIENLFPPDLWNQDIQGRTFDPTEKLKPEENYYGKKTFATEVIAPNRDHINFDGFRPLFDRLTNVIEHYEKI

SEQ ID NO: 1150 - protein, 587 aa, Vibrio parahaemolyticus
  source 1..587: note = Related to CP040103.1
MNSIESLKSCVTRKDLARLLSCAPSHLTYVLYKLPAATKYKQFPVSKKSGGVRQINAPTTDLKKIQRCLANLLQDCIENISEEHEYDNKAAHGFVRKRSIISNAEMHKRQKNVANLDLESFFDSFNFGRVRGFFIKNRHFALSEEVATTIAQIACHNGVLPQGSPCSPVITNLIAHSLDIRLINLARKHSCVYTRYADDLTFSTRKATFPPQILREEDGKIIPSKTLRNEIKRAGFSINHKKTRIQYKDSRQDVTGLVVNKKVNVSSDYSRLTKAMCHSLYTKGFYTKEENGKLVQGTIKELNGRLLFIDSVDKYNRINYPDKLSVHYNHKTHGYRTRVLHNGREKTFSKFLFYKHFFANTKVCVLCEGKTDNIYLKCALDSIGAQFPKLYTPAGNGKDAITHIELFKYSKRTRFLMELYGGSSYLGGFIQSYKERLKSYKKLPLTRPVIILLDNDEGLSKHIRTEMKSAHATIYINGKIVTNFDKNIKKADFVHITDNLYAILTPLKADGSDSMIEDFFEPAVLNRQVNGRTFDPKEEKKPPEKFYNKNTFATQVVEADKKNINFNGFNSIFERISLAINHFESRT

SEQ ID NO: 1151 - protein, 617 aa, unidentified
  source 1..617: note = Related to NZ_JAFFZP010000001.1; note = Amphritea pacifica
MVMDDEHSKLLKLARYNRLFSCDSRSELASLLHVSPVFLTNILYIQKPENLYRSFNIPKKSGGIRQIEAPAESLKEIQSKLANLLLDCIDALNTIKGNDSNLTGSFNNTLSHGFSRKKSIITNAERHRNRKIILNTDIEDFFGSFNFGRVRGFFLKNRNFSLSENIATTIAQIACYNNALPQGSPCSPVISNLICHSMDVRLAKLAKRHSLYYTRYADDLTFSTNKRTLPSEIAIENGSRYEIGSVFQREIHRSGFSINHNKTRVNFKDSRQVITGLTVNKKINTHRNYWRLERSKCHYLFMTGDIPDDGSSTDLASKINRLHGRLNFIDTMDRHNRVNLSKIEQHLISHKSINGILKEDIEEILLGKENGKNSRTKKKLNSREETFSKFLFYKNFYNNQKPLIILEGKTDNIYIGCALERLFSHYKDLIKYDIKEKKYEKNIKLYEHTKRARYLLDIHAGADHLFEFVRQYDKRYSYYKAPIDNHPVILLLDNDTGPKAIINFLKNTLLKRSGIDPKNEDFVHICHNLYLVLTPLNKGRDTSMEDFFDKSVLGTTIKGKTFDPSNEKSTGTTYGKHVFSTEVVKKNKNTISFASFRPILDRVTAVINDYASKKSSS

SEQ ID NO: 1152 - protein, 615 aa, unidentified
  source 1..615: note = Related to NZ_PYGI01000034.1; note = Marinobacterium halophilum
MDEKKARSRKLDRYFRLSNCTTRSELASLLNISSVFLTNVIYIQKPDNLYRSFNIPKKSGGHRVIFAPAPQLKEIQSSLAHLLLDCIDAINIKKGENLKLGKPFISTLSHGFSRKKSIITNAEKHRNRRVILNTDIEDFFGSFNFGRVRGFFLKNRNFQLFPDIATTIAQIACYNNALPQGSPSSPVISNLICHTMDIRLAKLASKHSLYYTRYADDLTFSTNKKEIPVEIAINKGGQYEVGIALKKEIHRSGLSINHGKTRVNFKDSRQDVTGLTVNKKINTNRHYWRLERSRCHYLFMTGDIPDDGGSYDLESKISRLHGRLNFIDTIDRHNRVNLAKIEQHIISNKSINGILKEDIEEVLLGKDNNKKTKRNKKLNSREINFSRFLFYRNFYNNSKPLIICEGKTDNIYISCALESLSPSYPGLIEHDKKEKKYKKLIKLYEHTKRARYLLDIHGGADHLLDFIRQYEKRFSYYKAPISNSPVILLLDNDTGPKAIIQYLKNTLLKGTGIDPKNEEFIHICKNLYLVLTPLSNKKDTSMEDFFENTVLKTKVNGKSFNPSNDAATDTTYGKHIFSTEVVKKHKNSISFDMFRPIFDRIVAVIEHYESIKNSL

SEQ ID NO: 1153 - protein, 588 aa, Aeromonas sp.
  source 1..588: note = Related to NZ_CP077301.1
MSRLALLKQATTKRMLAKVLDVNPSFLTKTLYLTSDELKYKSFEIPKRNGDPRTIYAPNKELKDLQSRLSVLLLDCIDEINKERKITPKLSHGFVRNRSIITNAKNHIHKKNVLNIDLNDFFGSFNFGRVRGFFIKNQHFELHEHIATVIAQIACYKNFLPQGSPCSPVITNLIMHSVDIRLAKLAKKNSCTYTRYADDITFSTRENVFPKDIAIADKNKVHLGRRLSKEITDNGFTINEKKTRVQLMDSRQDVTGLVVNKKVNIKSDYWRITRAMCHSLFQTGSYIKCEQNGQAVAGTLYELDGRLNFIDYIDKYNNVKEKGPIDNRFSLRNHGLNYREKLNVREKTFSRFLFYKYFFGHNKPTVLCEGKTDNIYIKAAILRLSEKFELLSNAKTDEKEYELLVNFLEYNKRTRYLLDLYGGASYLKRFVERYRSDYSYYRAPAATQPVIIVADNDSGSTELISYLVNHKPLYPELKKDKAESNKIIKESSFVHVEKNLYIVFTPLIDGRDSFMENLFLPETLNIEVDGRKFSPQQEADTKNSYGKNTFATKVVSAKKHSIPFSGFEPLLTRMEEAIIHYRTKIEKK

SEQ ID NO: 1154 - protein, 581 aa, unidentified
  source 1..581: note = Related to NZ_KB902175.1; note = Mariprofundus ferrooxydans
MTELERLRKATTKVDLAKILNLNAPFLTRTLYINKIENQYTQFQIPKRSGGHRTINAPTSELKDIQSRLSKLLLNCIDEINASKNVEPRLSHGFTRKRSIITNAEKHVHQKNVLNIDLSNFFDSFNFGRVRGFFIKNNNFLLHKDIATVIAKIACLNDGLPQGSPCSPVITNLISHSLDIQLASLAKKNSCTYSRYADDITFSTRNREFKPELVKVDGVDIFIGSKLLREVERAGFKINETKTRVQFKDSRQDVTGLVVNKKVSIKSEYWRTTRAMCHQLFISGSYTIKTSTGTREGTINELQGRLNFIDSIDRYNHMRPKGPPDKLHIPIQDRKNYREKLNVREKVFSKFLYYRNFHANEKPTILCEGKTDNIYLKAAIHSLSKQYGLLAKSKTKTTPFELLIKFFNYSKRTRYLLDLHGGGSYLKDFVQHYQENLKYYQKTIPKNPVILLLDNDSGPKELIDLLVHSKKFPDFPNGKDDIKNGEFVHITSNLYLILTPLKGNKDTMIENFFDKKTLSIKVDGRSFDYSKEADSTTKYGKNTFATKVVLENKSSISFKGFKPILSRIEKVIKHYKALSGG

SEQ ID NO: 1155 - protein, 585 aa, unidentified
  source 1..585: note = Related to JABWTG010000018.1; note = Desulfuromonas acetoxidans
MTKLERIRLAKDKKDFAKLLKVSTVFLTNTLYLTPIEDQYEEFQIPKRSGGFRTIHAPTAELKDLQSRLSNLLLDCIDDINKEKEIISTLSHGFVRKRSIITNARLHVRQKNVLNIDLEDFFGSFNFGRVRGFFLKNNNFKLDKNIATIIAKIACLNDTLPQGSPCSPVITNLITHPLDIRLAQLAKKSSSVYTRYADDITFSTRERNFSEKIVSIENKKVTLSKKLKEEIRRSGFNINHKKTRLQFADSRQDVTGLIVNKKINIKREYWRETRAMCHSLFKTGEFTINENGNLRKGTIDELYGKLNFIDSIDRYNHYNCKESLDHRYSLKDRGIDTHREKLNGRESTFSDFLYYKNFIANNKPTLLFEGKTDNIYIKYALKSKSNTSNELKPTKNDNDQLELPVSLFDYTKRTRYLLDLYGGGNYLKFFSQRYKKSLKYYNVKTPQNPVILVLDNDNGPNGLIGWLSSQKIIFPKIEEDNKNNSIRNSDFIHIVSNLYLILTPRDNGNDSMMENLFDDKALSYKIDGREFEPSNEYDSTTKYGKNTFSLKVVKDKHKEINFDGFIPLLLRIAKVIKYHKKFVNS

SEQ ID NO: 1156 - protein, 586 aa, unidentified
  source 1..586: note = Related to WJFN01000003.1; note = Morganella morganii
MVHRRNYLLLKQAKTKPELASLLDVSAAFLTRTLYRPGELSHVNSHYHQFDITKKSGGVRKISAPSDELKELQRRLSDLLLDCKEVIHFDNKVECTLSHGFEREKSIITNARIHRGKKNVLNLDLADFFGSFNFGRVRGYFISNKDFKLDPHIATTLAQIACYKNSLPQGSPCSPVIANLITNSLDIKLAKLAKRNGCSYTRYADDITFSTRKEIFPKDILKNVENTILGSKLLGEIRRSGFSVNPTKTRLQFKDSRQEVTGLVVNKKVSVKSEYWRLTRAMAHSLFKTGKFQIIEQDGSYRNGHLSELEGRLTFIDSVDFYNNLEKKKKPEPKYEPKVHTGINKFRGRLNSREKIYGMFLQYKNFFANEYPTILTEGKTDNVYLKSALSQLQALYPNLVNSKSATTEYSPKLKFPDLNRKTMYLLDIGDGATPFVRFVQRYVDDLKNFEDKKAKNPVILILDNDSGPKDLLNHLVKSVKSCPNDILMLKSSGFIHLFHNLYLILTPLNSGGKDSAMEDLFDSTTLATVIDGKTFSPEKNIDITKQYGKHIFSTKVVRSNKAKINFDKFKYLFDEIEKVKLHFLTL

SEQ ID NO: 1157 - protein, 562 aa, unidentified
  source 1..562: note = Related to NZ_QKLW01000003.1; note = Marinomonas alcarazii
MIHRRNYLLLKQTKTKPELAEILGVSAAFLTRTLYKPGVQSHVNSHYHQFDVAKKSGGVRTISAPSDELKDLQRKLSDLLLDCKSVIHLDNKVECSLSHGFERERSIITNARIHRGKKNVLNLDLADFFGSFNFGRVRGYFISNRDFKLDPHIATVIAQIACYENRLPQGSPCSPVIANLITNSLDIKLSKLAKRNGCSYTRYADDITFSTRKKIFPTAILKDAENVILGSKLLGEIRRAGFSVNPKKTRLQFKDSRQEATGLVINKKVSVKSEYWRLTRAMANSLFKTGKFLIAEQDGSYREGKLSELEGRLTFIDSIDFYNNIEEKKKPEPKSEPKIHNGINKFRGKLNSREKVYAEFLQYKHFFANEYPTILTEGKTDKSDYSPKLKFPDLNRKTMYFLDIGDGATPFVRFVQRYADDLKRFENKKAKNPVILVLDNDTGPKDLLKHLVNKVKSCPNDMGTLKSSGFIHLFHNLYLILTPLNAGGKDSAMEDLFDAATIGTVIDGKTFSTADHIDISKHYGKHIFSTKVVRSNKAKINFDKFKYIFDEIEKVKLHYKKL

SEQ ID NO: 1158 - protein, 586 aa, unidentified
  source 1..586: note = Related to NZ_FOGS01000013.1; note = Halomonas subterranea
MIHRRNYLLLRKAKTKPELASILGVSAAFLTRTLYRSGVKSHVNSHYHQFDIAKKSGGVRTISAPSDELKDLQRKLSDLLLDCKEVIYLDKKVECLLSHGFERERSIITNARIHRGKRNVLNLDLADFFGSFNFGRVRGYFIANREFELDPHIATVIAQIACYKDSLPQGSPCSPVIANLITNSLDIKLSKLAKSNGSSYTRYADDITFSTRKKSFPAAIVKDVKSITLGSKLLGEIRRAGFSVNPTKTRLQFKDSRQEATGLVVNKKVSVKSEYWRLTRAMAHSLFKTGKFQIAEQDGSFRDGHLSELEGRLTFIDSIDFYNNLEKKKQPESKFEPKIHTGINKFRGKLNSREKVYGRFLQYKHFFANEYPTILTEGKTDSVYLKSALNQLQASYPNLVNFKSSKEEYSPKLKFPDLNRKTMYLLDIGDGATSFLRFVQRYTDDLKYFEGKKAKNPVILVLDNDAGPKDLLNHLVKKVKSCPDDIAVLKSGGYIHLFHNLYLILTQLNAGGKDSAMEDLFDAETLSTVIDGKTFSPAKHIDVSKHYGKHIFSTKVVRANKEKINFDKFKYIFNEIERVKLHFSTL

SEQ ID NO: 1159 - protein, 601 aa, unidentified
  source 1..601: note = Related to BMQV01000045.1; note = Shewanella saliphila
MSYFFALTIEECNLIHRRNYLLLKQAKTKPQLASILGVSAAFLTRTLYKPGVESHVNSHYHQFDITKKSGGVRTISAPSDELKDLQRKLSDLLLDCKAVIHLDNKIECTLSHGFERKRSIITNARIHRNKKNVLNLDLADFFGSFNFGRVRGYFIANRDWKLDPHIATIIAQIACYKDTLPQGSPCSPVIANLITNSLDIKLSKLAKRNGCSYTRYADDITFSTRKKAFPTAIVKDVKNITLGSKVLGEIRRAGFAVNPKKTRLQFKDSRQEATGLVVNKKVSVKSEYWRTTRAMAHSLFKTGKFQVAEQNGSFRDGHLSELEGRLTFIDSVDFYNNLENKNHPEPKFEPKVHNGLNKFRGKLNSREIVYGRFLQYKHFFANEYPTILTEGKTDNVYLKSALSRLQTTYPKLVNPKSAKAKYSPKLKFPNLNRKTMYLLDLGDGATPFVRFVQRYADDLKYYECKKAKNPVILVLDNDTGPKELLNHLAKKVKSCPDDIATLKSSGFIHLFHNLYLILTPLNAGGKDSAMEDLFDAATLGKTINGKTFSTANHFDDTKHFGKHVFSTKIVRSGKSSINFDKFKYIFDEIVKVKIHFSKIKN

SEQ ID NO: 1160 - protein, 586 aa, unidentified
  source 1..586: note = Related to NC_008750.1; note = Shewanella sp.
MIHRRNYLLLKQAKTKPELALILGVPAAFLTNTLYKPGVNSHVNSHYHQFDITKKSGGVRTISAPSDELKDLQRRLSDLLLDCKAVIQFDKKIECTLSHGFEREKSIITNARIHRGKKNVLNLDLADFFGSFNFGRVRGYFIANKDFKLNPHIATVIAQIACYKDTLPQGSPCSPVIANLITNSLDIKLSKLAKKNGCSYTRYADDITFSTRKKCFPIAIVKNVESLTLGSKLLGEIKRAGFSINTSKTRLQFKDSRQEATGLVVNKKVSVKSEYWRLTRAMAHTLFKTGKFQITDQDGSVKDGNISELEGRLNFIDAVDFYNNLEKKKHPEPKFEPKAHTGINKFRGVLNSREKVYGRFLQYKLFFANEFPTILTEGKTDNVYLKSALNRLQNLYPNLVTPKSANIKYSPKLKFPDLNRKTMYFLDIGDGATPFTRFVQRYADDLKHFENKKAQNPVILVLDNDSGPKDLLNHLVNKVKSCPNDIATLKNSGFIHLFHNLYLILTPLNVGGKDSAMEDLFDTATLGRTLNGKTFSTAKDFDETKHYGKHLFSTKVIRSDKENINFNKFKYIFDEIEKVKNHFSNI

SEQ ID NO: 1161 - protein, 582 aa, unidentified
  source 1..582: note = Related to BAEQ01000054.1; note = Glaciecola pallidula
MIHRRNYLLLKKAQTKPELASILGIPAAFLTRVVYKPGVSTHYHQFKIPKKSGGARSISAPSSELKDIQRRLSDLLLDCKAVIHVDNKVECTLSHGFERERSIITNARVHSNKKNILNLDLEDFFGSFNFGRVRGYFIANKHFKLHPHIATVLAQIACFENKLPQGSPCSPAIANLITSSLDIKLSTLAKRSGCSYTRYADDITFSTRKSAFPVAIIKDDENLTLGSKLLGEIRRAGFSVNPRKTRLQFKDSRQEATGLVVNKKVSVKSEYWRLTRAMAHSLFKNGKFHIPQQDGTHRDGLVSELEGRLTFIDSVDFFNNLANKKHPASKFEPRVHSGLNGFRGKLNSREVVYGRFLHYKHFFANEYPTILTEGKTDNVYLKSALSILQGTYPNLVTAKTATGPYKPKLKFPHLNRKTMYLLDIGDGATPFVRFVQRYANDLKQFEDKKAINPVILILDNDDGPNVLLNHLVNKVKSCPNDKATLKNSGFIHIFHNLYLILTPLKAGGKDSAMEDLFDKATLARKVGGKTFSTAEHFDNAKHYGKHIFSTKIVRSDKNNINFDKFNHLFEEVEKVIQHYETL

SEQ ID NO: 1162 - protein, 582 aa, unidentified
  source 1..582: note = Related to NZ_RXNU01000007.1; note = Shewanella canadensis
MIHRRRYLLLKQAKTKPQLASLLGVSASFLTRVLYKPGANTHYHKFDIPKKSGGIRKISAPTSELKDIQRKLSDLLLDCKMVNHIDNEIECSLSHGFERERSIITNARVHRGKKNVLNLDLEGFFDSFNFGRVRGYFIANRDFKLDPHIATVIAQIACYNDTLPQGSPCSPVIANLITNSLDIRLARLARKNGCSYTRYADDMTFSTRKSEFPFGIVKDAGNRILGAKLLGEIRRSGFSVNNKKTRVQFKDSRQEVTGLVVNKKINVKSEYWRSTRAMAHNQFKNGSFEVVGINGESRVGTLSELEGRLTFIDSVDYYNNLQNKKHPKPIFEPMKHNGLYQFRDKLNSREVVYSRFLHYKHFFANELPTILTEGKTDNIYLKSALSMLQPIYPNLVKPKTINNQYEPKLKFPNLNDKTMYFLDLGDGATPFLRFVKRYVEDYKYYGNQEAKSPVILVLDNDDGPETLLKHLVKNVKSCPNDLVTLKKSGFIHIFHNLYLILTPLNAGGKDSMMEDLFSPATLSTVIGGKTFSTAKNIDITKEYGKHIFSTKVVRSNKSTISFDKFKYIFNEIEKVKAHFTSL

SEQ ID NO: 1163 - protein, 587 aa, unidentified
  source 1..587: note = Related to NZ_RSFE01000007.1; note = Pseudidiomarina gelatinasegens
MILIHRRDYQLLKKAKTKPELASLLGITAAFLTRVLYHPGANDHYHQFEIDKKSGGKRKISAPSNELKDIQSRLSTLLQNCLDVIRFDTEVSRECLVSHGFERERSIITNAAIHKGKRNILNLDLDDFFGQFNFGRVRGYFIANKHFELDPHIATVIAQIACYENSLPQGSPCSPVIANLITASLDMKLLNLAKSCGCSYSRYADDITFSTRKKEFPSSIVKVLEPLELGGKLIGEIRRAGFSVNALKTRLQYKDSRQEATGLVVNRKVSIKSEYWRLVRAMAFRLFKKGEFEILDVNGEPRMGTLNELEGRLAFIDAIDRYNNIVARRRPKAPWGTIKHTGLNAFKGRHNSREAVYSRFLFYKYFYSSEYPTILTEGKTDNVYLKSALSELQGSYPSLVSPKGQDNAYSPKLKFPNLNKRTMYLLDLGDGATPVAKLVQRYETELAYFHGKKATSPAILILDNDSGPSELLKELAKPKYRSCPNSVTDIKKSGFLHIFENLYLILTPLNSGGKDSMMEDLFDAKTLATPINGKTFSTLSSFDTAKHYGKHVFSTKVVRSSKSSIKFDRFRYIFDEIEKVKAHFAKL

SEQ ID NO: 1164 - protein, 577 aa, unidentified
  source 1..577: note = Related to NZ_JAGPNM010000010.1; note = Rheinheimera sp.
MLLQHARTKPDLALILGVSAAFLTRVLYRPGVDSHYHQFNIVKKSGGTRIINAPSEELKEIQRRLATLLQDCLEVVHFDNKISLECTVSHGFERNRSIITNASVHQGKKKVLNLDLNDFFGSFNFGRVRGYFISNRHFKLNPHIATVIAQIACYDNCLPQGSPCSPVIANLITNSLDMKLSRLAERGGCSYSRYADDITFSTRKSHFPKSIVKAIEPVELGGKLLGEIRRAGFSVNARKTRLQYKDSRQETTGLVVNKKVSIKSEYWRLTRTMAHRLFKKGAYEITEADGELRPGTLNELEGRLAFIDSVDRHNNVVDSRRPKPPYEIEKHSGLLGFKARHNSREAVYSRFLFYKHFYANEYPTILTEGKTDNVYLKSALSELQSSYPKLVNPKTNSKPYKPKLKFPDLDKRTMYFLDLGDGATPFLRFIKRYEAERSYFHDNKAKSPVILILDNDDGPSTILKHLAKEVKSCPNSVDDIKKSGFLHIFQNLYLILTPLKSGGKDSMMEDLFDTKTLNTTIDGKTFSTQSSFDGSKHYGKHVFSTKVIRSQKSSVNFDGFKHIFNEIEKVIAHFEKL

SEQ ID NO: 1165 - protein, 572 aa, unidentified
  source 1..572: note = Related to NZ_JADZGP010000013.1; note = Shewanella algae
MLKQIKTKPELAALLKICPSFLTNTLYIKKSTTNYHDFEIPKKSGGVRTISAPPEDLKEIQRKLADLLQDCKQVIHFDKSIKCSLSHGFEREKSIITNASIHKRKKTVLNLDLEDFFGKFNFGRVRGFFISNKDFRLDPHIATVVAQIACYNDKLPQGSPCSPVIANLITNSLDIKLSKMARKYGCSYTRYADDITFSTRKIEFPKSIIKNNVPLELGGKLLGEIRRSGFSVNPNKTRLQFKDSRQEATGLVINKKVNIKSEYWRDTRAMAHRLFKKGKFDVYDSDGNVRDGKISELEGRLAFIDSIDYFNNVNSKNKVDKQKNGGLNSHLEKLNSRERIYARFLHYKNFFANEHPTILTEGKTDNVYLKAALCNLQNIYPNLVSKKTDTSQYIPLLRFPNLNSKTMYFMDLGDGATPFLRFVQRYTVDFNYYENQKPKSPVIMILDNDDGPKTLLNHLVKNIKSCPNTLPELKSKGFVHLFKNLYIILTPLNTDGSDSMMEDLFDKKTLGTVLDGKTFSTEKSFDEKKHYGKHIFSSKVVRSNKANVNFDKFTYIFNEIEKVRAHFSTLKF

SEQ ID NO: 1166 - protein, 585 aa, unidentified
  source 1..585: note = Related to NC_016745.1; note = Oceanimonas sp.
MIRKRRYLLLKRATTKPELADLMNIDPSFLTRVLYVEKTKSHYTEFKIDKKSGGFRTIFAPSAELKDIQRSLSDLLLDCKDVIQFEKGVKFTLSHGFEREKSIITNASVHRNKKNVLNLDLEDFFGSINFGRVRGYFISNNNFNLDPHIATVIAQIACHNNSLPQGSPCSPVISNLIAQSLDIKLSKIARKNGCSYTRYADDITFSTRKEKFSKSIVKDVENVKVGSVVLKEIKRSGFSVNDKKTRVLFKDSRQEATGLVINKKVSVKREYWRETRAMAHSLFKKDFFEIQEGNSNARKGTLSELEGRLNFIDSIDHYNNIHEEKKPAHKYELKKHSGLYDYKNKLNSREKVYSKFLYYKYFISSEFSTILTEGKTDNVYLKLALSSMRNLYPKLVEVDKETKLYRPLLKFPNLNSKTRYFLDLDGGASHFTRFVQRYVKECEYYGERKPKSPVIMILDNDDGPKSLLNHLANHVKSCPNNIDSIRGSKHLRLFKNLYLILTPLGEYSKESMMEDLFEPTLLDTKLDGKAFSRNDKFDSDKYYGKHVFSTKVVAKNKAQVNFDGFKYIFDRILEVNKHYASLDKV

SEQ ID NO: 1167 - protein, 580 aa, Aeromonas sp.
  source 1..580: note = Related to NZ_JRBE01000001.1; note = Aeromonas veronii
MIHKRNYLLLKLAKTKPELAALLNISPSFLTRVLYHPGVEHHYNSFTIPKSSGGARSINAPSKELKDIQKRLANLLLDCKDVILRDNKVKCTFSHGFERKKSIITNAAQHQNKKVVLNLDLSDFFGSFNFGRVRGFFISNRYFKLDPHIATVIAQIACFNNSLPQGSPCSPIISNLISNSLDIRLSTLAQKNGCTYTRYADDVTFSTRKPTLPTSILKELNPVTLGSRLIKEIESAGFLINHKKTRVQLKDSRQEATGLIVNKKVNIRAEYWRDVRAMAHSLFKYGSYEIKEMNGNKRKGTIQELEGRLTFIDHLDHYNNIIRSKKPKPIFEPAKHLGLFHFRNKLSSREKTYSIFLFYKHFYANSYPTIMTEGKTDNIYLKCALNSLQNEYPSLAKKKSITQQYEPKLSFLNLNKKTMYFLDIEGGASHFQRFVARYESEFKYFTNQSPSAPVIMILDNDSGPNALINDLSKKQSSNSVPIRKQRFTHIIHNLYLILTPLGNSENTMMEDLFDKNTLSIKIDGKSFSKKDNFDIKKEYGKHIFSTKVITQHRDTIDFHKFKYIFDAIVDVCSHFSGNKG

SEQ ID NO: 1168 - protein, 585 aa, Vibrio sp.
  source 1..585: note = Related to ABBKEB010000006.1; note = Vibrio vulnificus
MINLLPYFLLKQAKSKSDLASALGVTPSFLTNVLYRQRPENLYTDFDINKKSGGKRTISAPSDQLKDLQRRLSVLLLNCKDAIHYNQGTKFTVSHGFEREKSIVSNAAVHRNKKNVLNLDLMDFFGTINFGRVKGFFEKNRSFALAPEVALTIAQIACYQGKLPQGSPCSPVIANLIANTLDMRLVKLAKKCGCSYTRYADDITFSTRKSAFPKEIVKFTDGHSYELGGKLVNEIKRAGFDINPDKTRVQYQNSRQDVTGLIVNKKVNVKSEYWREVRAMAHQQFKKGSFHIADSDGKPRAGELSELEGKLTFIDQVDKYNNIQRKKQPKILFSLAPLKLSEHRLTLNSREKTYSRFLYYKYFYANNYPTILTEGKTDNVYLKCALNRLQKDYPTLVESTHSKTTQYKPKLLFPHLDKRTYYFLDLDGGATHFLRFIQRFSEEFSYFENQKPKSPVILVLDNDDGPKTILTHLAGKVKNCPNTVDEIRNKPFIHIFHNLYLVLTPLSGGGGTAMEDLFTQDTLQQVVDGKVFSRKDKLDTNKEYGKHIFSTKVVRDKMQEVDFAGFKPVFDAILAVNAHFSRLRF

SEQ ID NO: 1169 - protein, 587 aa, Vibrio sp.
  source 1..587: note = Related to MAKF01000119.1; note = Vibrio splendidus
MSKNKSLLKLQEAQTKPDLAKLLGLKSHFLTYILYKTDIDSHYKEFEVKKKTGGVRVISAPSPELKDIQRRLSKLLLDCKDAIMVKNDIKKECMLSHGFERHKSIASNAYVHIGKKNVLNIDLEDFFGTINFGRVRGFFIKNRDFQLDPDVATVLAQIACHNNKLPQGSPCSPVIANLITNSLDIKLSKLSKSKGCSYSRYADDITISTRKAEFDKSIVKLVNGDITLGKRLVQEISRSGFSINPKKTRVQFKDSRQDATGLVVNKKVSVKSDYWRTVRAMAHSQFKKGSYETVNKKTGLVMKGSLAELGGKLAFIDSIDRFNNYLKKSHPKPIYELVQHKKSASYRNRLNGREAVYSRFTYYRTFYANEYPTILTEGVTDPIYLKSALYGLRQMYPNLVRRKLLDKTYKPKLLFPEFDSRTKYFWDLDDGAGTFSKFLERFESEFHYFKNQKPKNPVILVLDNDDGVGTLLGKLTNKKYPNCPVKTEDMRNQEFTHIFHNLYMILTPRKKGQAESDIEELFDEKTKAIKLDGKSFSKEPNPENEYGKKPFALKVVRANRDTIDFTNFKPIFDTIEKVKLDFEKRYS

SEQ ID NO: 1170 - protein, 604 aa, Vibrio sp.
  source 1..604: note = Related to CP016228.1; note = Vibrio crassostreae
MPAAQGSVYKPTFFLPIYVTFMKSTQQDSIDCLNELKNAKTKSDLAHILGITPSFLTRVLYVEGTQNQYVQFSITKRSGGTRTISAPSIELKDIQSRLSKLLLDCNDALNFREGRKGGASHGFERKKSIISNAEKHKNQKNVLNLDLEDFFGTVNFGRIRGYFIKSKDFALNSDVATTIAHIACYDRKLPQGSPCSPVIANLIARILDVRLVKVAKKYGCTYTRYADDITFSTRKKVFPSSIVESVNDKDVVLGTSITREIRKCDFKINHKKTRVQFKDSRQDVTGLIVNKKVNIKREYWRDARSKCHKLFTDGEFFTKNSNGDKVVGKIKELEGTLTFIDSVDEYNNKRPKGYEKPVFQKIHKQKHYRIRLNVRERTYSEFLYYKWFCANETPTILTEGKTDVVYLKAALSQLASDYPMLAKSEPYKPQINFFGCSGKTNYLLNLDGGAAHFIDFVNSYELNASMYKNIKKTSPVIMILDNDTGPVNLLNQLKGKYGLPQTVDEIRKSNFLHIKSNLYLILTPLNGSSKTDMEDMFEDHVLNAEVKGKKFNKSNNINTSKEYGKHIFSLKVVQARKSKISFSGFCPIFDAINNVINHYDKMKS

SEQ ID NO: 1171 - protein, 597 aa, unidentified
  source 1..597: note = Related to NZ_LR134189.1; note = Providencia rustigianii
MRKGVPAYSNLSEIIYMRNNMSSLNKLKSARNKVELAKVLGVSPVFITNILYIIKKENQYTTFTIKKKSGGDRVISAPNDSLKNLQQKLSDVLLNCLDQIRKDENISTNISHGFERKKSIITNAMKHIKKKNVLNLDLEDFFDCFNFGRVRGFFIKNNRFSLNEEVATVIAQIACFDNKLPQGSPCSPVITNLICSSLDIKLNKLAKKNKCTYTRYADDITFSTNKQSFDTEIVSSKSTFSDIIIGNELDKEIKKSGFKINSRKTRLQTKNSRQDVTGLVVNKKINTKVEYSKSVRAMCNTLFKTGSYTLIDRKTHEERNGTVNELGGMLSFIDYIDRYNNIIYKKSIDRPINNKVKIEKKLNKRERVYSDFIYFNKFHNNDFPTIITEGHTDQIHIKCALTSLNGNYNNLIENHDKNYHLKFRFLKLSNKLKWLLNISEGTDPIKKFISNYICNYRKYPCFKAKKPVIIILDNDSGSKGSGGILSILTNGSFSNITEDRNSLRRKNYIHVYENLYIIFTPMISDKDSCIEDLYDKEILETKLNGKKFKNSNIDLKVDEYSKNHFAKYVIQNNIENINFSNFKSILNTIDEIIRIYQ

SEQ ID NO: 1172 - protein, 575 aa, unidentified
  source 1..575: note = Related to WLUH01000023.1; note = Providencia sp.
MSSLTKLKSAKNKVELAAVLGVSPVFLTKTLYKIKVENLYTSFTIKKKSGGDREILAPDDSLKDLQQRLSNILLNCLDDIRKNESTSTNISHGFERKKSIITNALKHTKRKIVLNLDLENFFDCFNFGRVRGFFIKNDRFLLNEEVATVIAQISCVYNKLPQGSPCSPVITNLICSSLDIKLNKIARKNKCTYTRYADDITFSTSKISFGNEIVSPNSTNKDIVLGKKLKKEIIKSGFTINYKKIRIQNKNSRQDVTGLVVNNKVNTKIEYHKNVRAMCHNLFKTGNFNLIDRETKKERIGTIDELEGMLSFIDNIDKHNNIIYKKNIKTNSKKSKLEKNLNKRERVYSDFIYFRKFHSNELPTIITEGHTDQIHIKCALTSLYSDFPNLIEMKNENYHLKFNFLKLSKKNKWLLGMGEGTDPIRFFISNYIKNYNKYPCFKAKKPVIILLDNDSGSKGSGGILSLLTQGTFSNIKENRNELRKKKYIHVYENLYVIFTPLIKGNDSCIEDLYDRKTLEKKLNGKKFKNSNLNLKPDEYSKNHFAKYVIQDNIENINFDNFKQILESLDKIILEY

SEQ ID NO: 1173 - protein, 581 aa, Proteus sp.
  source 1..581: note = Related to JAGKMM010000039.1; note = Proteus mirabilis
MKSRSLDLLRQTNNKVDLAKLLGVSPVFLTNTLYRIKVETLYNQIKIPKKTGGIRYIYSPDSRLKEIQRNLSNLLLNCLDEIRAENKTKAIISHGFEREKNIITNAKKHINKNIVLNLDLESFFDSFNFGRVRGFFIKNKYFLLNDEVATVIAQISCLNIQIGERKISILPQGSPCSPVITNLISSSMDIKLNSLAKRNRCTYTRYADDITISTNLMSFGKQIVKDVDENNNVSLGNKLISYIEKSGFVINDKKTRIQYKNSRQDVTGLLVNKKINPSRKYSDILRSMCNSLFNSGEFELIDKEKKKRKGTINELEGKLSFVDQIDRFNNKDILSKGGVLLKNRRENLYSKFIYFKKFIFNDEVTVITEGHTDHIYIRSAAISRKDKFNDLIKEDNKKIKLNFSFLKINNKIEYLLDVREGTSSIKKFIERFPENYSKYNIGKPKKPVIIILDNDSGSSGSGGIFQLLISDKFKNITNDKDEIRNVEFIHVFGNLYIIFTPLKDGKDTSMEDLFSDEILNKKMNEKKFNRTNKKCKNDEFGKDYFARFVIKPNVKTIDFSKFDTIFNRIKLVISDYEKKEI

SEQ ID NO: 1174 - protein, 585 aa, Proteus sp.
  source 1..585: note = Related to JH815505.1; note = Proteus mirabilis
MTSPLIKLKSCKSKPDLAHLLRLDPVFLTRVVYIRNTDNLYTDFSIKKKNGTNRIISAPDSELKEIQSKLSKLLQDCLDDIRESLKLNNTISHGFERKKSIITNAEKHKRRKWILNLDLSNFFDEFNFGRVRGYFLKNKNFSLDETICNLIAKIACYKNRLPQGSPCSPVITNLILLSLDQRLNKICKSVGCTYTRYADDITISTNKSFFPTKIVTSYDNESIVLNKKFLKEITSSGFSLNEDKIRLHNKTYRQEVTGLTVNQFVNVNAKYARKVRAMTHSLFINGIFHLVDKKTREIRAGTINELAGMLGFIDSLDKHNNKNIRDRTLQYSNKDKKLEHNKREKLYANFLYYKAFYANTRPMIITEGKTDITYLRVALNSLAGSYPSLIEKKLVGSDSICDYKLTFFKNSGKTKYFLNLDGGTGHLKDFLSKFDKKSKQYKGNENMNPVIMILDNDSGSDGSGGIFSILNGKSFPNITSSKDELRNKEWLWVIQNLYIIFTPLNGAKDSSMEDLFDKETLDIKLGNKVFNKTNKPCTENQYGKEAFATGVVLKQRENIDFSGFSLIFNSIVKIIEHYNSIKQMN

SEQ ID NO: 1175 - protein, 578 aa, unidentified
  source 1..578: note = Related to NZ_CP086257.1; note = Providencia rettgeri
MPTRLEKLKKCTSKPDFARLLGVDPVFLTRVVYIRNTEKLYTEFKIKKKNGDDRIISAPDKELKEIQSKLSKLLLDCLDNIRSSLEIDNNFSHGFERKKSIISNAEKHKRKKWILNIDLKNFFDEFNYGRVRGYFLKNNYFSLNENICNLIAKIACYKNKLPQGSPCSPVITNLILLSLDRRLNQICKNSGCTYTRYADDITISTNKSIFPKKIISSYEENSITLGKKFINEIISSGFTLNEKKIRLHDTTHRQEVTGLTVNQFVNVENKYARKVRAMVHSLFTKGEFYLIDKVTQEARLGTVNELTGMLGFIDSLDKYNNKILKNTIKQSNFNIELNKREKIYANFLYFKSFYFNAKPVLLTEGKTDITYLRVALDSLAYKYPDLIGYKENGRNKIRDYKLTFFKNSPKTKYLLNLDGGSSHLKEFLNNFEKKARIYKTSGEINPVIIILDNDSGSGGNNGIFESLMNKLRGKISSKEELRSKKWIWVTQNLYIIFTPLNGKKESSMEDLFDKDTLNIKLGGKVFNRTNSKCTAEQYGKEVFANGVVLKKRKSINFSGFSPIFDAISEIITYHNSSK

SEQ ID NO: 1176 - protein, 573 aa, unidentified
  source 1..573: note = Related to NZ_JAJAVX010000005.1; note = Yersinia bercovieri
MATRLEKLKECYSKPDFSRLLGVDPVFLTRVIYIRNTDKLYSEFTIKKKNGSDRVISSPDSELKEIQSKLSNLLQDCLENIRESLKLENNLSHGFERKRSIISNAEKHKQKKRVLNLDLSNFFDEFNFGRVRGYFLKNNQFLLNESICNLIAKIACYNNKLPQGSPCSPVITNLILLSLDQRLNKICRNAGCTYTRYADDITISTNKSIFPKNIITSHEDDLVTLNKRFIKKITSSGFSLNERKIRLLDTKCKQEVTGLTVNKFVNVDDKYARKVRAMAHRLFIDGEFHLIDKKTHKKRVGKINELAGMLGFIDSLDKHNNTFPHNKKLSLNKRERIYSKFIYYTAFCANTIPTILTEGKTDITYLRVALNSLADKYPNLIGDKKVANETVRDYKVKFFKNSAKTKYFLHLDGGSSHLKEFLVSFDKKTDGYKTVRNSNPVIMILDNDSGSTGGNGIFQALIGKSFPNITMSRDELRSQKWIWAVKNLYIVFTPLNGSKDSSMEDLFDVPTLQTKLEGKVFNRTNEKCAENEYGKEAFATGVVLRQRKSIDFSKFSSIFDSIIEIIDHHKDKE

SEQ ID NO: 1177 - protein, 574 aa, unidentified
  source 1..574: note = Related to NZ_VOUX01000033.1; note = Serratia bockelmannii
MTTRLEKLKACNSKPDFARLLGIDPVFMTRVIYIRNTDNLYSQFAIKKKNGSDRIISAPDSELKEIQSKLSDLLQDCLNNFRENLKEDNHFSHGFERNRSIITNAEKHKSKKWVLNIDLCNFFDEFNFGRVRGYFLKNNNFSLNTELSTLIAKIACHQDKLPQGSPCSPVITNLILVSLDRRLSNLCNSVGCTYTRYADDITISTNKKEFPKGIIRDHDEKSITLNNKFLNEITSSGFKINHNKLRLLDKKIRQEVTGLTVNRFVNVDRRYAKTVRAMAHSLFKKGEYTLIDKKTRKERVGNINELGGMLSFIDFVDKYNNRLPHSIKSSHNNREKVYSDFLYYSAFWANTKPTILTEGKTDITYLRVALDAVSEKHPNLIGNKNPGNKTVRDYGIKFFKNTSKTKYLLNLDGGAPHLKDFIVGFEKKTEAFKVIANQKPVIVILDNDSGSAGANGIFQILIGKSFPNITLTRDELRNQKWTWVTRNLYIIFTPLNGLKDSSMEDLFHSSVLQTTLGGKVFNRTNTKCKDNEYGKEFFATGVVLKKRKTIDFSNFNYIFESISEIIEHNNSRKK

SEQ ID NO: 1178 - protein, 574 aa, unidentified
  source 1..574: note = Related to NZ_CP067391.1; note = Klebsiella grimontii
MTTRLDKLKSCNSKPDLARLLGIDPVFMTRVIYIRNTDNLYSQFTIKKKNGSDRHISPPDPELKEIQSKLSDLLQDCLNNIRENSKEENNFSHGFERNRSIITNAEKHKSKKWVLNIDLSNFFDEFNFGRVRGYFLKNKNFSLNTELSTLIAKIACHQDKLPQGSPCSPVITNLILLSLDRRLSNLCNRAGCTYTRYADDITISTNKKEFPRKIIKSHNENSIDLNKKFLKEIISSGFQINLNKLRLFDRKCRQEVTGLTVNRFVNVDNKYAKKVRAMAHSLFTKGGYTLTDEKTREQRAGNINELGGMLSFIDYVDKHNNRLPHATKTSLNKRENVYSDFLYYSAFWANPKPTILTEGKTDITYLRVALDSLSANYPNLIGNKKIGNKIVRDYGVKFFKNTTKSKYFLNLDGGASHLKDFIVGYEKKTNAFKAIAEQKPVIIVLDNDSGSGGSNGIFQTLIGKAFPNITLSKDELRNQKWTWVTKNLYLIFTPLNGLNDSSMEDLFHSSVLQTKLGGKVFNRTNAKCKDNEYGKEFFATGVVLKQRKAINFSNFNYIFESITEIIDHNASRKP

SEQ ID NO: 1179 - protein, 576 aa, unidentified
  source 1..576: note = Related to UKYY01000005.1; note = Klebsiella pneumoniae
MTTPLDKLNSCNSKPDFARLLGIDPVFLTRVVYIRNTDNLYSQFTIKKKNGSDRFISAPDDELKEIQRKLSNLLQDCLSNIRESLKVENNYSHGFERNKNIITNAEKHKNKKWVLNLDLSNFFDDFNFGRVRGYFLKNNNFSLNAEISTLIAKIACHNNKLPQGSPCSPVITNLILFSLDRRLSRICQQVGCTYTRYADDITISTNKSTFPRNIIKSLENEKINLNRKFLKEITSSGFSLNPEKIRLHDRKCRQEVTGLTVNQFVNVDNKYAKKVRSMVHHLFTQGEYQLVDKKTGEKRNGKINELAGMLGFIDSLDKYNNSLSHERNATLNKRERLYGEFKYYTTFWANTIPVILTEGKTDITYLKVALSSLAAKYPNLIGEKKLSNKVVHDYKIKFFRNTAKNKYFLDLDGGTSHLKNFMMKYNKKTDAFKLVATQQPVIIVLDNDSGSTGSDGIFNALVGKSFPNITDSMVTLRNKKWVWVTKNLYIIFTPLNGKSDSAMEDLFEDSVLQRQLGGKVFNRTNKRCEANEYGKEAFATGIVLKQRDNINFSKFSSIFDSVMEIIQHHAHQKSSS

SEQ ID NO: 1180 - protein, 580 aa, unidentified
  source 1..580: note = Related to JAHVXV010000003.1; note = Pantoea allii
MTTRLKKLQNCKSKPDFARLLGIKPVFLTRVVYIRNTEKLYTDFKINKKNGDKRIISSPDPELKEIQSRLSTLLQDCLTDIRDSHEVINNLSHGFERERSIITNAEKHKRKKWVLNLDLSNFFDEFNFGRVRGYFIKNSNFKLNEEVSNIISKIACYNNRLPQGSPCSPVITNLILHSLDQRLNLICKKVGCTYTRYADDITISTNKSEFPKKIIASCESNIVNLNQIFLKEITKSGFSLNFSKVRLLGKNCRQEVTGLTVNKIVNVSDKYTRNVRAMANNLFKNGEFYLFDKQTNQKRLGSINELTGIFGFIDSLDKHNNKISHKNQGSLNKRERLYSDFLYYKSFCANEKPMILTEGKTDITYLKVALDSLAKDYPTLIGDKEERMSYVRDYKISFFKNSIKSKYLLKLDGGTPHLKDFLVNYDKKSSKYSKSKNEKPVIMILDNDSGSNGGGGIFQCLLGKSFPNITIDSKKSLRDEKWIWVTKNLYIIFTPLNGKQESSMEDFFDESVLKRTLSKKTFNRSNNKCKDNEYGKEAFAKGVVLKRRKKINFTKFSIIFDSINEIINHHESVNNLKTIA

SEQ ID NO: 1181 - protein, 572 aa, unidentified
  source 1..572: note = Related to CP003085.1; note = Pantoea ananatis
MTTQLARLKLCFSKPDFARLLELDPVFLTRVVYMRDTEKLYTDFTILKKNKTQRVISAPDEELKEIQRKISDLLLDCLTTIRNENKSNNKLSHGFELGKNIITNAERHKSKKWVLNIDLLNFFDQFNYGRVSGYFIKNKFFELHSNIANLIAKIACYKNKLPQGSPCSPVISNLILQSLDQRLNNICKKNGCTYSRYADDITISTNKKKFPKAIVSNHSDKEINLNNGFIKEILRAGFSINNDKTRLRFNTLRQEVTGLTVNSKISVDDKYSRRVRSMVHKLFLSGEYTLIDKKTREPRFGTINEIQGMLGFVDSIDKYNNNLPNNSKHTPNKRERLLADFIYFTRFHFNTKPTIITEGKTDITYLRVALNALCKKYPSLIEKKKSYKGEINDYKFSFFIKNAKTKFLLKLEDGSSHIKNFIKDYDRNIEKYKADGGVNPVIIILDNDSGSTGSGGIFSLLLSNVFPNIKLSREDIRKVDWLWVTKNLYVIFTPLKDGQDSSLEDLFDTKTLATTLNGKVFNNTNKDCKPNEYGKEYFAKHVVLKNKDTIDFKNFIKIFDSIEEIIKHHSKK

SEQ ID NO: 1182 - protein, 571 aa, Citrobacter sp.
  source 1..571: note = Related to CP056336.1; note = Citrobacter freundii
MSTKIELLKQCTTKPDFARLLGLDPVFLTRIVYRKDTENLYSNFTILKKDMSERHISSPDSKLKEIQRKVADLLLNCIEDIRVLTESKNLLSHGFEKQRSIITNAERHKRKKWVLNIDLSNFFDQFNYGRVRGYFIKNTHFALDENIANMIAKIACYQNKLPQGSPCSPVITNLILSSLDQRLNKICKNSGCSYSRYADDITISTNKKTFPSEIVKSYDAEHVELNKNFTKEIMRAGFSLNDKKTRLQGRTQRQEVTGLTVNYNLSTDVNYSKKVRAMVHHLFMDGNYTLIDKKTRKPRNGTINEVEGMLGFIDSIDKYNNKLAYRAKGGLNKREKLYANFIYYRSFHSNEKVTILTEGKTDVTYLKVALHMLKGKYPTLISSKTVSHKTVNDYKLSFFKNNNKSNYFLGLGEGSSHFKNFVKKYQGKISEFKAVGGRKPVIIISDNDSGANELISLLNGKGFPHITSDKNELRKNKWLWITENLYIILTPFDGKTDTSIEDLFDTKTLSRSLNGKTFNRTNKECALNEFGKEYFAKHVILKDRDLIDFNMFSYIFDAILEIIKEHDSKVS

SEQ ID NO: 1183 - protein, 646 aa, Escherichia coli
  source 1..646: note = Related to CP061264.1
MFINTHVGRFVGCESQPVALMAGGIASLKSLIQSYTAGVLCEGVPACVSPWPFFLWDEEEMTKTSKLDALRAATSREDLAKILDVKLVFLTNVLYRIGSDNQYTQFTIPKKGKGVRTISAPTDRLKDIQRRICDLLSDCRDEIFAIRKISNNYSFGFERGKSIILNAYKHRGKQIILNIDLKDFFESFNFGRVRGYFLSNQDFLLNPVVATTLAKAACYNGTLPQGSPCSPIISNLICNIMDMRLAKLAKKYGCTYSRYADDITISTNKNTFPLEMATVQPEGVVLGKVLVKEIENSGFEINDSKTRLTYKTSRQEVTGLTVNRIVNIDRCYYKKTRALAHALYRTGEYKVPDENGVLVSGGLDKLEGMFGFIDQVDKFNNIKKKLNKQPDRYVLTNATLHGFKLKLNAREKAYSKFIYYKFFHGNTCPTIITEGKTDRIYLKAALHSLETSYPELFREKTDSKKKEINLNIFKSNEKTKCFLDLSGGTADLKKFVERYKNNYASYYGSVPKQPVIMVLDNDTGPSDLLNFLRNKVKSCPDDVTEMRKMKYIHVFYNLYIVLTPLSPSGEQTSMEDLFPKDILDIKIDGKKFNKNNDGDSKTEYGKHIFSMRVVRDKKRKIDFKAFCCIFDAIKDIKEHYKLMLNS

SEQ ID NO: 1184 - protein, 493 aa, Enterobacter sp.
  source 1..493: note = Related to NZ_QZCS01000001.1; note = Enterobacter chuandaensis
MKKNKSIILNAYRHRNKRIILNIDLSNFFGSFNFGRVRGYFMSNKDFLLNPIVATTIAKAACYRGVLPQGSPCSPVISNLICSIMDMRLAKLAKQYGCSYSRYADDITFSTNKPSFPTELALLQPEGVILGKYLVNEIKRAGFEINDAKTRLAYKPSRLEVTGLTVNKIVNVERRYSDKTRALAHTLYTTGEYKLPDENGDEVAGSLDKLEGMFGFIDQLDKFNNIQKKKSKQPEKYALAPATLHSFKSKLNAREKAYGKFIYYKFFHGNTCPTIVTEGKTDRIYLKAALRALSNNYPELYRERKDKKGKEIDLNILKITDKLNYFLNISGGTADLKKFVERYREHYSSYYGSIAKQPVIMVLDNDTGPNELLNFLKNKVKQCPDDVGAIRRMRYLHIFHNLYLVLTPLTEGGNETSMEDFFPTEVLSIELDGKIFNKNNDGDSKTEYGKHVFSVKIVKDKKRVIDFNRFSYIFDIVREIKIDYQKILIKNKP

SEQ ID NO: 1185 - protein, 518 aa, unidentified
  source 1..518: note = Related to NZ_JAJNQS010000015.1; note = Lelliottia nimipressuralis
MVATSKLLLLKVASSRADLAKLLDVKLVFLTNILYRIGTDSQYKDFSIPKKGKGVRLISAPEDSLKDLQRRIADLLMDCRDENFKIKKIKNNYSFGFERNKSIISNAFRHRGKNIILNIDLKDFFESFNFGRVRGYFLSNRDFLLNPIVATTLAKAACYKGSLPQGSPCSPVITNFICSIMDIRLAKLAKSLGCSYSRYADDITFSTNKKEFPAELAISLPEGVVLGGILVSEIKRAGFDINDAKTRLSYKSTRQEVTGLTINRFVNVDRKYSNKTRALAHSLYSKGEYKLPDEDGKLVVGSIEKLEGRFGFIDQIDKFNNIQNKLSKQPEKYAPIHITLKNYRLKLNAREKAYSKFIYFKFFHGHASPTILTEGKTDRVYLKSAIRSLSTKFPEFLKKSADGKRNDINLNIFKSDEKSSYFINMSGGSADLKKFIERYMDEYSSYYGSIPKHPVIMLLDNDSGSDEVLNFLKNKVKSCPDDTDIMRKMSFIHVFKNLYIILTPLNASGEQTAMDYRV

SEQ ID NO: 1186 - protein, 591 aa, unidentified
  source 1..591: note = Related to NZ_CP084222.1; note = Arsenophonus sp.
MTDTKKIDALKNASSRSDLAKLLNVNVIFLTNILYKVGTDNQYKQFSIPKRGTGIRVISAPNDKLKDLQRRIANLLIDCRQELFNSKKIKNNFSFGFEKDKSIISNASRHKGKRIILNLDLRDFFGSFNFGRVRGYFISNRDFKLTPVVATTLAQAACYKGVLPQGSPCSPVITNFICNIMDMRLAKLAKELGCTYTRYADDITFSTNKKIFPEELAIPELEGVILGSRLVNEITKAGFKVNDAKTRLAYKSSRQEVTGLTVNQIVNVDRRYAKKVRALAQTLYSTGKYKLPDKNGNMILGNLARLEGMFSFINFIDKSNNIENKKNKQPEKYVKVQEKLNGYRLRLNAREKAYSKFIYYKYFHGNTIPTILTEGKTDRIYLTTALHSLSAIYPNLIEETNNGKKIKLNICKSNTKASYFLDLSGGTANLKKFVMRYRDEYELYYGTDAKNPVIIILDNDSGPNKLLDHLKNKVENCPNDVKSMRRMKYIHVTHNLYIVLTPLSESVRETSMEDLFSPEVLNITLNGKYFNKANDQDTETEYSKHIFSTKVVRDKNRNIDFKGFKPIFDAIEAIIKHYQELSKSRIINKAR

SEQ ID NO: 1187 - protein, 586 aa, unidentified
  source 1..586: note = Related to QKNL01000001.1; note = Klebsiella pneumoniae
MKNTPGLDDLKAATTRRDLAKLLNVKLVFLTNVLYRIGVDNQYSNFPIPKRSGGVRIISAPSSKLKDLQSKIAKLLINCRQEIFAINGIENNLSHGFEKDRTIITNALKHRGKNVVLNLDLSDFFKSFNFGRVRGFFLYNKDFKLHPDIATTIAKAACYQGSLPQGSPCSPVITNLICNILDVRLAMLAKKLGCAYSRYADDITFSTNKKDIPEELALNVTDGVTLGRKLRNEIERAGFEINDSKTRLSFKPARHEVTGLTVNRFVNVDRRYSKKVRALAHRLYQTGSYTIKNADGEVDGTLQQLEGMFGFIDQIDKFNNIVNKKNRKKEKYILAKQSILEHRSRLNAREKAYAKFIYYKNFHGSIIPTIMTEGKTDRVYIKTALLSLSGRYPGFIIRDNKTKKEKINLKIINPQFKEKYFLDIEDGAASFEKFVRRYDSEFKSFYGTKANNPVVMILDNDTGPNELLNYISRECPTCPNTVEDIRKMPFVHVMHNLYLILTPLDATGGMTAMEDLFDAKTLGKDLEGRKFNRGKKFNPKKEFGKDEFSIKVVRDMAKDIDFNGFNSIFEALTDVVKHYRDSIKAP

SEQ ID NO: 1188 - protein, 441 aa, Escherichia coli
  source 1..441: note = Related to AP022044.1
MFKPTYLARLQACCNKFELADLLQIKVTFLTNVLYRIRPENQYKKFTIKKKSGGEREIFAPDEKLKDIQQRLSELLYICQEEIWAKNNIKQNVSHGFEKNKTIITNAERHRDKNIVFNIDIENFFPSFNFGRVRGYFIANQNFKLHPNVATIIAQIACLDGSLPQGSPCSPVITNLICRILDFRLSKLAVTYGCSYSRYADDITFSTNKKNIPDALVSNEKENEPGKILVEEIHRAGFTLNHNKNRVSRCTSRQQVTGLTVNKKINVSREYIKNTRAMAHSLYFEGSYTLIEKDGKHRKGTLSELEGRFAFIDMLDKYNNVEAKKNARPERYVVKGFGLDFKQRLNSREKAYSKFLYYKNFYGNEQITILTEGKTDPVYLKCAIDSLFLDYPQLVREEKNTKNRVLKVNLFKTNDKKKIFSRFVWWSCRLFEVFQTTWFTL

SEQ ID NO: 1189 - protein, 589 aa, Enterobacter sp.
  source 1..589: note = Related to JABXQH010000001.1
MEFTIMFTPSYLERLKSCKTKFEFARLLQIKVSFLTNVLYRIRPEHQYERFIIKKKSGGDREIFAPTEKLKDIQRRLSDLLYVCQSEIWKTNNITPSLSHGFEKNKTIITNAERHRNKTNVLNIDLEDFFPTFNFGRVRGYFIANQYFNLHPSIATIIAQIACYDGKLPQGSPCSPVISNLICNILDIRLSKLALSNGCSYSRYADDITFSTNKNQFPDSIVINENSNELGPLLVNEIEKAGFKINNNKTRILRHTSRQEVTGLTVNKKINVNKDYIKKTRAMAHALYKEGDFTLLDISGKPRKGTLNELEGRFVYIDMLDKYNNINAKKHTLPEKYVLKKTGINFTLKLNSRETAFSNFLHYKYFYGNIKPTVLTEGKTDPIYLKCAIDSLYLSYPALVRVDDRTKNRILNITLFKTNAKKEYFLDLYGGAADYVRFFRRHREQCKKFERQPPKNPVIIVLDNDTGPSDFINNIIKEYSHLPRKSEDVRKHKFLHLENNLYVLLTPLLAGDKQSCMEDFFKDEVLTKTINGKSFDKSNNHDSTTTFGKDRFANNIIRENRQTIDFSLFKPILDAMVDINNHFKNLYYP

SEQ ID NO: 1190 - protein, 579 aa, unidentified
  source 1..579: note = Related to CP047281.1; note = Klebsiella quasipneumoniae
MVAPTTIERLRLITTRQELAALLNLKAHFLTNILYRNGVNTQYSQFRIPKKDGSFRLISSPSSKLKDIQKRLAELLYECQANIHFERKINPVLSHGFEKNKTIVTNATRHRNKRILLNIDLENFFESINFGRVRGFFIANNDFKLSPLIATTIAQIACFNNSLPQGSPCSPIISNLICTILDIRLSKLAQKNGCQYSRYADDITFSTNKKEFPQELVIDNDVVNVGAVLLKEIERAGFRINHRKTRLLYSTSRQEVTGLTVNKKVNVDNRYYKKVRAMAHTLYKDQSFAIIKENAKPQKGTLNQLEGMMSFIDSIDKYNNKLKLANKQPQKYQSFNYGLNYEGKLNRREKTLSKFLYYKYFHGLHVPTILVEGKTDRVYLKCALRSLFLTYPTLVKKNNATGNINYSLNFFRESTRTSYFLDISGGAAEFEKFITRYPEQYKRFNHTPLYPVIMILDNDSGTRTIVRKISKSLGVTEDSIKKNSFTHIIHNLYIVLTPLLPGDRDSCMEDLFDSSVLSTVIDGRSFDKSNNYNKSTHYGKNDFSLKVIKVNEKNINFSGFLPVLNAVRDCLVHYNNISK

SEQ ID NO: 1191 - protein, 585 aa, unidentified
  source 1..585: note = Related to WBVV01000002.1; note = Klebsiella pneumoniae
MAPLSILERLQNAANRQDLASILNLKTAFLTDVIYRLKAETQYTQFTIPKKNGAPRVISAPTTKLKDIQRRLADVLYLCRAEIYKKYNINPVLSHGFEKEKSIITNAERHRGKTLLLNIDLEDYFDSFNFGRVRGFFLSNRDFRLNNTVATTIAQIACFQNGLPQGSPCSPIISNLISGVLDIRLSKLAKKYGCNYSRYADDLTFSTNKKTFPKEIADVGGESVTLSPTLIKEIIKAGFKINDKKTRVCYKTSRQDVTGLTVNKKVNVGKEYAKVTRAMAHSLYKDGSFVIVTESGKIEKGTCAKLEGRFGFIDSIDKYNNLKLKNARQLEKYQSVNHGLNYTAKLNSREKAYSYFLYYKNFHGMEMPTILTEGKTDRVYLKCALKSLANSYPLLFNSSDDSSKNEYRVNFFKATEKTSYFLDISGGATDFKRFILRYQEQKKRFEKFKPKHPVIMLLDNDSGPKDLLNHLKDKVKNCPNDVDTIRKARYTHIFDNLYLLLTPLLPGGKESCMEDLFDSTVLSTVLDGKTFNKSNDTDTKTEYGKHVFSTKVIKANCKTISFEKFKVIFDGIEEIIADYSKRCKV

SEQ ID NO: 1192 - protein, 545 aa, unidentified
  source 1..545: note = Related to JAGOYO010000023.1; note = Vitreoscilla sp.
MKISRLKLLSSPSELAQLLNIPQKFFLYHLYGQQPTNQYMQWSIPKKNGGKRNITSPNPELKMIQSRLANYLQECLQEIRSNQNFHINLSHGFEVDKSILTNAEIHIGQKYILNIDLENFFHSINFGRIRGFFIKNVHFQLHPTIATCIAHIACYNNYLPQGSPCSPVISNLICSVLDIRLKNLAKKYKCFYTRYADDLTFSTYLKYFPEQIAKSNYYLNVELSALLIKEIQKAGFNINPTKTRLQHTNIRQEVTGLTVNKKLSVHTDYRNLCRAKAHHLFSHGYYFTFDKQTLSQRSGSLKELEGQLAFINSLDKYNREINKAKTEKTNKRENLYGKFIFYKNFLCNEKTILLTEGKTDIQHIKCALIGLKLNTLSNSLQFYKHSPSKTFLMTYICQQKLNFCAGSPGLKAFIKAYNRLYKSILKGKHKPSNPVIIIVDNDHEGEDIKKIIMKEFNIPINTNQPTRIIYNLFIIFLSPPSFMSSHTNTAPHRNIEIEDLYPQYILDTQLNGKKFNRTNHESTDTEYGKDSFVSKVIKSKIDKPI

SEQ ID NO: 1193 - protein, 582 aa, Bacillus sp.
  source 1..582: note = Related to CP024204.1; note = Bacillus altitudinis
MKEFNQIKTRNELADFLNIPRKQLSYVLYVKGINNLYNSFKIRKKNGGFREINAPLEELKGIQRRLQEVLYKKIGNKWINRNISHGFERNRSIITNAIVHRNKRIVLNIDLENFFESIHFGRVRGFFNKNKNFSLPIDVATVIAQIACYEGRLPQGAPSSPIISNLICEILDYRLLKIAKKYKVNYTRYADDLTFSTNDKNFLFLQREFYEEISQELIRTGFKINEKKNRLQLRDSRQVVTGLVVNKKINVNRIYYKETRAMAYQLYKQGSFKINDEPATINQLEGRFAFINQLTWHNNLVDGITANFNNFTSREQQYQRFLFYKYFFANSKPVIVTEGKTDVRYLKSALKSLYKDYPKLIVKHKDGSFEFKIHFLKKTKRLSYFLGIYKDGANALNNIYQFFGSKNSKLNYLNYFKKISGNSPENPVILLFDNEIKSGNKKPIGKFLNYAGLDDEKKTTLKKENMVNIVDSLYLLTVPLINGKLECDIEDLFDNNTLFLKIEGKEFSKKDSYDVSKYYGKEIFSQHISQNYSDINFNQFRPVLDNINKIIDVYTRQNDNMLVNLELKKVDKRNMNKVELFK

SEQ ID NO: 1194 - protein, 582 aa, Bacillus sp.
  source 1..582: note = Related to JH791914.1; note = Bacillus cereus
MREFNEIKTRNELADFLNVPRKQLSYVLYKKGVDNLYTSFEINKKNGSVRKINAPLEELKDVQRKLAEVLYKHMRNKWKKKNISHGFEKNKSIITNAKIHRNKRLVLNIDIENFFESIHFGRVRGYFSKNNNFLLPIEVATVIAQISCYKGKLPQGAPSSPIISNLICEILDHRLLKIAKKYKLDYTRYADDLTFSTNDKKFLGLQKAFYKVISKELIRAGFKINEKKNRLQLRDSRQVVTGLVVNKKINVNRIYYKETRAMAHQLYKEGSFEINGEPATLNQLEGRFAFINQLTWYNNKVDGIKTNFNNFTSRERQYQRFLFYKYFFSNSKPVIVTEGKTDVTYLKSALKSLYKEYPNLITKHSDGTFEFKVSFLKKTKRLGYFLGIYQDGGSALNNIYNFFGSKKSTLNYLNDFKKISGNLPKNPVILMFDNEIKSGKKKPIGQFLSHAGLADKKRLILESEYMVDVIDSLYLLTVPLIDGKSECDIEDLFEKSTLSHKIEGREFSKKDHYDTSKCYGKEIFSQYILKNYSDINFSEFRSVLNNINNIIDIYKKRLADAEHNLEAENIDKSSADKMLLEI

SEQ ID NO: 1195 - protein, 581 aa, unidentified
  source 1..581: note = Related to JACWFJ010000008.1; note = Cytobacillus firmus
MMEFDEIKTRNELADYLNVSRKQLSYVLYVKGINNLYTSFEIHKKNGGVRKINAPLEELKDIQRKLTEALHSHMKKKSKKKNNISHAFEIDKSIITNAEVHRNKRLVLNIDLKDFFGSIHFGRVRGFFNKNNKFLLPIEVATVIAQISCFEGKLPQGAPSSPIISNLICEILDYRLSKISKKYKLDYTRYADDLTFSTNDKNFLGLQDEFYIEISKELIRAGFSINEDKKRLQLKDSRQVVTGIVVNNKLNVNRDYYKETRAMAHQLYKQGKFEINGEVATLNQLEGRFAFINQLTWYNNKKNGIKPKSFRNLLSRELQYQKFLFYKYFFANPKPLIVTEGKTDIVYLKSALKNLHSEYPNLITKNSDGSFEFKVSFLKKTKRLKYFLGIYQDGGSALNNIYDFFTGKKNTPDFLSYFRLISNTLPKNPVILIFDNEGKNKPLGLFLNHAVLDVKKREILDSSYMVDLIDNLYLLTVPLIDGKSECDIEDLFEDITLSYEISGRKFTKEDKYDTSKYYGKDMFSKYILNNYADINFNEFRSILDNINSIIGIYTNGIVGTGQELEAKNIDKSSADKVLLEI

SEQ ID NO: 1196 - protein, 583 aa, unidentified
  source 1..583: note = Related to NZ_ML122604.1; note = Rummeliibacillus sp.
MSEFSEIKTRNDLADFLNIPRKQLTYVLYVKGINNLYTSFEIYKKSGGARRINAPIEELKDIQRKLAEALYKHKKRKWKKKNNISHGFEKDKSIITNAKIHRNKRFVLNIDLENFFESFHFGRVRGFFIKNHNFLLPIEVATVIAQISCYEGKLPQGAPSSPIITNLICEILDYRVSKMAKKYKLNYTRYADDLTFSTNDKNFLRLQTEFLKNISKELIRAGFKINEKKTRLQLRDSRQVVTGLVVNKKINVNRIYYKETRAMAHQLYKQGEFEIKGEPATLNQLEGRFAFINQLTWYNNKIDGVKHHFNNLTSRELQYQKFLFYKFFFANPKPLIVTEGKTDIAYLKSALKNLYKEYPNLISKNSDGTFEFKVSFLKKTKRLKYFLGIYQDGGNALNNIYNFFDSKKPAPNYLSYFKTISNTLPMNPVILMFDNEIKSGNKKPIGKFLNYANLDAAKRETLENNYMVDIIDNLYLLTVPLIGGKSECDIEDLFEEITLLNKIDGKKFIKADKYDVTKYYGKEIFSKYIINNYTDINFTKFRAVLDKISNIIETYTKGLVDTGHNLETKIKDKSSADKVPLEI

SEQ ID NO: 1197 - protein, 585 aa, Bacillus sp.
  source 1..585: note = Related to NFCM01000080.1; note = Bacillus thuringiensis
MMEFQDIKTRNDLADFLGIPRKKLSYLLYKKEINTLYTSFEINKKNGGVRKINAPLAELKDIQRKLSEALYKHKKKKQDIKNNLSHAFEKEKSIITNAKIHRNKRLVLNIDLENFFGSFHFGRVRGFFIKNNNFLLSSEVATVIAQLTCYEGKLPQGAPTSPIITNLICEILDQRLLKISKKYKLDYTRYADDLTFSTNDKNFLERQTEFYELLSSELIRAGFKINEKKKRLQLRDSRQVVTGLVVNKKINVNRIFYKETRAMAHQLYKEGKFEINGKLATLNQLEGRFSFINQLTRYNNKIDGDKHNFNILSSRERQYQKFLFYKYFYANPKPIIVTEGKTDIAYLKAALKNLHNDYPNLITKSSDGSFEFKVSFLNKTKRLAHFLGIFQDGGSALNNIYNFFDDKAKKTTPSYLDYFKEISNTLPTNPVILMFDNEINSKKNKPIGSFINHAKLGDKKKGILLEQNMVNIVDNLYLLTVPLIDGKLECDIEDLFEKSTLSQKINGREFCKKDKYDYSKYYGKEIFSKYILDNYTDINFNEFRSVLNNINNIIDIYTKGLVDTGGNPKAKSLDKSSEDKVPLEV

SEQ ID NO: 1198 - protein, 582 aa, Bacillus sp.
  source 1..582: note = Related to NZ_CP015611.1; note = Bacillus safensis
MEFQDIKTRNDLADFLRIPRKKLSYLLYKKGINTLYTSFEINKKSGGFRKINAPLAELKDIQRKLSEALYKHKKKKRNIKNNLSHAFEKEKSIITNAKIHRNKRLVLNIDLENFFGSFHFGRVRGFFIKNNNFLLPTEVATVIAQLTCYEGKLPQGAPTSPIITNLICEILDQRLLKISKKYKLDYTRYADDLTFSTNDKKFLERQTEFYEILSSELKRAGFKINEKKKRLQFRDSRQVVTGLVVNKKINVNRIYYKETRAMAHQLYKKGSFEINGQPAKLNKLEGRFAFINQLTWYNNKVEGIKTHFSNFTSRELQYQRFLFYKYFFANPKPLIVTEGKTDVIYLKSALKSLYKEYPNLITKHTDGRFEFKVSFLKKTKRLGYFLGIYQDGGSALNNIYNFFGSKKSNLNYLNDFKKISGNLPTNPVILMFDNEIKSGKKKPIGQFFIHAGLADEKRKKLENEYMVNIIDSLYLLTVPLIGGKPECDIEDLFEKSTLSHKIEGKEFSKKDNYDVSKYYGKEIFSQYILKNYSDINFNEFRSVLDNINNIMDIYQKRLADTERNLEAKNIEKSSADKVLLEV

SEQ ID NO: 1199 - protein, 583 aa, Bacillus sp.
  source 1..583: note = Related to CP048002.1; note = Bacillus velezensis
MREFNDIGTRNELADFLKIPRKQLSYVLYVKSINNLYTSFEIHKKNGGVRNIKAPLEELKDIQRKLAEALYKHKKKKQGRKNKLSHAFEKNKSIITNAEIHRNKRLVLNIDLENFFESFHFGRVRGFFTKNKNFLLPIEVATIIAQLSCYEGKLPQGAPTSPIISNLICGILDYRLLKITKKYKLNYTRYADDLTFSTNDKNFLNVQTKFYEEISNELIQAGFKINEKKTRLQYKDSRQTVTGLVVNSKINVNRTFYKETRAMAHQLYKQGNFKINSESADLNQLEGRFAFINQLTRYNNQKDGDKHNFYNLSSRELQYQKFLFYKYFFANPKPLIVTEGKTDIVYLKAALKKLYNEYPDLITKDINGTFEFKVSFLKKTKRLGYFLNIQEGGTGLKNINDFFNSNNAKKSAMNYLNYFKTISNTLPQSPVILMFDNEIKSGKKKPIGDFLHHAKVDNEQVDTLKSEHKINIIDNLYLLTVPLIGKSECDIEDLFDNTTLSHKINGKKFIKKDDYDTSKYYGKDIFSKYILDNYLNIDFNNFRSVLDNINNIINIYMKRVVDTGRNIETTKNIDESEKVPLEI

SEQ ID NO: 1200 - protein, 584 aa, unidentified
  source 1..584: note = Related to nan
MMEFNDIKTRNGLADFLKIPRKQLSYLLYFKDVNNLYTSFEIRKKNGGSRKIKAPIEELKDIQKKLAEALYKHKKEKRGKKNNISHAFEKDKSIITNAKIHRNKRLVLNIDLENYFESFHFGRVRGFFAKNNDFLLPIEVATVIAQISCYEGKLPQGAPSSPIISNLISKILDHKIMKIAKKYKLDYTRYADDLTFSTNDKKFLDLQSEFYEEISKEIKRAGFKINEKKKRLQFRDSRQVVTGLVVNKKINVNRVYYKETRAMAHQLYKYGKFGINGKPATLNQLEGRFTFINQLIWYNNKINGEYSNFNYLHSRELQYQKFLFYKYFFAHPKPLIVTEGKTDIAYLKSALKSLYKEYPNLITKKDDGTFEFKVSFLNKTKRLKYFLGINQDGGSALNNIYNYFDSKKPAPNYLSYFKQISNNSPINPIILMFDNEIESGKNKPIGKFLKHVGLDDGKKVILEDKYMVNLIDNLFLLTVPLIDGKAECDIEDLFKDDALLHKIDGREFIKKDKYDVSKYYGKEIFSRYISDNYSNINFKNFKSVLNNISNIIDIYTHRLVDTEHDTEGKKIDESNANKVPLSII

SEQ ID NO: 1201 - protein, 585 aa, Bacillus sp.
  source 1..585: note = Related to CP048852.1; note = Bacillus tequilensis
MMKFNDIETRNDLADFLKIPKSQLSYLLYFKDVNNSYTSFDISKKNGGIRKIKAPTDELKEIQRKLAEALYKHREKKQNNNNISHAFKKDKSIITNAKIHRNKRFVLNIDLENYFESFHFGRVRGFFANNKNFLLPMKVATVIAQISCYDGKLPQGAPTSPIISNLISEILDRRIMKIAKKYKLYYTRYADDLTFSTNDKNFSNLQTEFYEEISEEITNSGFKINDKKNRLQFRDSRQVVTGLVVNKKINVNRIYYKETRAMAHQLYTHGKFEINGEPATPNQLEGRFSFINQLTWYNNKIDGEKHTFYNLSSRELQYQKFLFYKYFFANSKPLIVTEGKTDIAYLKSALKNLYAEYPNLINRNSDGTFEFKVSFLKKTKRLAYFLKINQDGGSALNNIYDFYNDRKRNKSTPNYLRIFKELSNTSPENPVILMFDNEIKSEGKKPIGSFLNHAKLNFKKKTKLSNDYMVDIVDNLYLLTVPLVKGKSECDIEDLFDDGALSQIIDGKEFTKENDYDHSKYYGKEIFSKYVESDYSNINFDRFKSVLDNMNFIIDTYKKEHLNKEHSLDTINTDNSNKDQVPLEV

SEQ ID NO: 1202 - protein, 562 aa, unidentified
  source 1..562: note = Related to JADPRZ010000022.1; note = Sporosarcina sp.
MRAFYDVKNRNEFADLLKIPRKQLSYVLYIKGINNLYASFEIPKKDGGIRKINAPLEELKVIQRKLAEALYEHKKSKRKNNNISHAFEKDKSIITNAKIHRNKRFVLNIDLEGFFESFHFGRIRGFFLKNKDFLLSEEVATVIAQISCYEGKLPQGAPSSPVITNLICEILDHRISKVAKKYKMNYTRYADDLTFSTNDRKFLDLHVKFYGEISEELIRAGFIINEKKTRLQFRDSRQVVTGLVVNKKINVNRIYYKETRAMAHQLYKHGNFEINGEPATLNQLEGRFSFINQLTWYNNKIDGSKNHFSNLKSRELQYQKFLFYKYFFSNPKPLIVTEGKTDIAYLKSALKNLYNEYPNLITKNSDGTFEFKVSFLKKTKRLRYFLGINLDGGSALNNIYNFFDSKKPAPNYLNYFKSTSNTSPTNPVVLMFDNEIISGREKPIGKFLNHSALDTIKRKTLEKEYMVDVIDNLYLLTVPLIDGKPECDIEDLFEDITISHRIDGKEFTKDNKYDNSKYYGKEMFSKYILNNYSDINFNEFRLVLDNLNNIMNNYKNAFVERV

SEQ ID NO: 1203 - protein, 317 aa, unidentified
  source 1..317: note = Related to NZ_LQYA01000064.1; note = Sporosarcina koreensis
MKEFYNIKTRNEFADFLNIPRKQLSYVLYVKGVKNLYTTFEIPKKNGGIRKINAPLEELKDIQTKLAEALYNHKEKGRKKNNNISHAFEKQKNIITNAKIHRNKRFVLNIDLENFFESFHFGRVRGFFNKNGNFLFPIEVATVIAQISCYEGKLPQGGPSSPIITNLICEILDFRIMKIAKKYKLHYTRYADDLTFSTNDKKFLNLQDEFYNEISKEIVRAGFNVNEKKTRLQFRDSRQVVTGLVVNKKINVNRVYYKETRAMAHQLYKQGSFEINGEPATLNQLEGRLSFINQLTWYNNKIDNIKHHFNNLSTRER

SEQ ID NO: 1204 - protein, 583 aa, unidentified
  source 1..583: note = Related to NZ_QRDZ01000063.1; note = Cohnella phaseoli
MGEFNDIKTRNELADFLKVPRKQLSYILYVKGSNNLYTSFEISKKNGGTRNINAPSKELKDIQKKLAEALYNHKKKRGSADKISHAFEIDKGIITNAENHRNKRFVLNIDLEDFFDSFHFGRVRGFFNINIHFSLPIEVATAIAQISCYEGKLPQGAPSSPIITNLISEILDHRLLKIAKQYKLDYTRYADDLTFSTNDKNFLELQTEFYIKASEVIIRAGFKINEKKTRLQLRDSKQVVTGLVVNKKININSVYYKETRAMAHHLYKYGEFEINDKPATLYQLEGRFAFINQLTWYNNKLDGEKHHFQRLCSRERQYQKFLFYKYFFANPKPLIVTEGKTDVAYLKSALKKLYNEYPNLITKNSNGKFEFKISFLNKTKRLKHFMGIFQDGGTALKNIYDFFDSKKSDTTNYLSFFKKTSNTLPINPVILMFDNEIHSGDKKPIGNFLNHAKLDEKKREDLKHKNFVDIIDNLYLLTTPLIGDKSECDIEDLFEDSVLSHKIDGKEFTKKDKYDVSKYYGKEIFSKYILTNYSSINFTNFRTILDNIDNIINTHRKGGAGAGHDLEEKNIDMISAGKVLLEI

SEQ ID NO: 1205 - protein, 559 aa, unidentified
  source 1..559: note = Related to NZ_CP073365.1; note = Paenibacillus tritici
MGEFNNIKTRNGLADFLKVPRKKLSYILFVKGTNNLYSSFEINKKNGGTRKINAPSEELKDIQKKLAEALYNHKKKKQRGSLEKISHAFEIDKGIITNAENHRNKRFVLNIDLEDFFDSFHFGRVRGYFHKNDHFSLPLEVATAIAQISCYEGSLPQGSPSSPIITNLICEILDHRILKITKQYRLDYTRYADDLTFSTNDKTFLESQTELYKRISEEINRAGFKINDKKTRLQHKDSQQVVTGLVVNKKINVSSVYYKETRAMAHNLYKYGEFNINGNLATLKQLEGRLSFINQLTWYNNKIDGEKHHFQHLCSRERQYQKFLFYKYFFANPKPLIVTEGKTDVVYLKSALKKLHKDYPSLIIKKSNEEFEFKVSFLNKTKRLKHFMGIFQDGGTALKNIYDFFASSKSNINYLSYFKKTSNKSPNNPVILMFDNEIESGNKKPIGNFLNHTKADDRTKMDLKQKYFINIIDNLYLLTIPLIGGKSECDIEDLFEDSVISHKIEGREFTKKDEYDISKYYGKEIFSKYISKNYSSIDFTNFRSILDNIDNIIKCTGCK

SEQ ID NO: 1206 - protein, 492 aa, unidentified
  source 1..492: note = Related to NZ_BMEY01000002.1; note = Ornithinibacillus halotolerans
MITNARRHRNKRIVYNIDLEDFFETIHFGRVRGFFNKNRNFQLPIEVATVLAQISCFKGKLPQGSPSSPIISNLICQILDNRLLKVAKKYKLVYTRYADDLTFSTNDNKFLDNQFNFYKDLSEEINRSGFKINENKNRIQYKESRQVVTGIVVNKKLNVNRDYYKETRAMAHQLYKTGSFEISGESGTINQLEGRFAFINQLTRYNNELDNQKHDFHNLSSREYQYQKFLFYKTFYYNPKPVIVTEGKTDILYLKAALKNLYDEYPKLITKNNDGTFKYNISFLKRTKRLKHFLNINMDGASALTNIYDFFSNRNNKKAPNYLKYFKSLNNSLPKNPVILLFDNELNNNEKPISHFCRKVAKIGDEKIEALKTEFKVNLTENLYLLTVPLIGEKSECEIEDLFDESTLLERIEGKTFTKAAKYDVTKYYGKEIFSKYILKNYADVNFNEFRAVLDNINDIIDQYNVDFVTVGDKAKEVQLKRSDIDKVPVEI

SEQ ID NO: 1207 - protein, 575 aa, unidentified
  source 1..575: note = Related to FNNT01000003.1; note = Paenibacillus sp.
MEQFNNLKSRNEFSDFLNIPRKQLSYLLYIKKINNSYTTFEIQKKSGGVRKISAPSDELKAVQKKLVEALYKHRKSGNGNKFSHAFEKQKSIITNARIHRKKRFVLNIDLENFFESIHFGRVRGFFNKNKNFLLPIEVATIVAQLSCYEGKLPQGAPSSPIISNLICEILDYRLFKIAKKYKLNYTRYADDLTFSTNDNNFVNNQDDFYNILYTELEKSGFKINEKKKRLQLNSSRQEVTGLVVNEKLNVNRVYYKETRAMAHQLYKQGEFTVNGNKATLLQLEGRFSFINQLTWYNNKIDDRKHNFHNLSSRELQYQKFLFYKYFFANPKPLIVTEGKTDVVYLKSALKSLYKEYPNLITKNKDGAFQLKVSFLNKTKRLQYFMGIFRDGGSALNNIYNFYDHKKSLPDYLKYFQNISNTSPSNPVFLLFDNEIKSKSKKPIGQFLNHISLTEKRKSLLEIDYIVKLIGNLYLLTVPLVKGKEECDVEDLFDNTVLSHTISGRIFTKEDNYDVSKYYGKDIFSKYILKNYNNINFNDFKPILDNISQVVDSYSKETVTNGVLEISHKDKVPLEV

SEQ ID NO: 1208 - protein, 565 aa, unidentified
  source 1..565: note = Related to JAIEZV010000001.1; note = Halobacillus sp.
MLKFNEIKTRNELAEYLNIPRRQLSYILYVKGINNLYTSFEIPKKNGGSRKINAPSGDLKDIQLKLAEALYAHVKKKLNKKNNISHAFEKNKSIITNAKIHRNKRWVLNIDLENFFESIHFGRVRGFFNKNNNFLLPIEVATVIAQISCYEGKLPQGGPSSPVISNLICEILDYRLLKIAKKYKLNYTRYADDLTFSTNEKKFPELQMDFYKEISKEIRRAGFIVNEKKKRLQYEDSRQEVTGLVVNKKVNVNRTYYKKTRAMAHQLYKQGSFEIDGEPATINQLEGRFAFINQLTWYNNKIDGVKRNFRNLSSREREYQKFLFYKYFFSNPKPLIVTEGKTDIAYIKSALKNLHDEYPDLISKNSDGTFELKVSFLKKTKRLKYFLGIYQDGGSALNNIYEFFDSRKPIPNYIKYFKKISNSLPQNPVFLMFDNEIRSGKKKPIGKFIDHVKLGDEKKGILEKDYMVNIVDNLNILTVPLIKGKSECDIEDLFDDTVLSHIINGKEFNKKDNYDSSKYYGKEIFSKHILKNYTSVDFSEFRSVLNNINNIVNDQKKALKEKSMV

SEQ ID NO: 1209 - protein, 558 aa, unidentified
  source 1..558: note = Related to NZ_RBVX01000055.1; note = Salibacterium salarium
MKELHNVKTRNEFADFLKIPRKKLSYILYIKKVNNLYHSFEIYKKSGGIRKINAPTVELKDIQQKLAKALYKHQADKWNKKRNNLSHAFEKKKSIITNAKIHRNKRFVLNIDLENFFESFNFGRVRGFFIKNNHLLLPNEVATVIAQLSCYQGKLPQGAPSSPIITNLICEILDLRLLKIARRYKVDYTRYADDLTFSTNKNSFLEQETRFLEEISKELKRSGFEINEKKTRLQFKDSRQVVTGLVVNKKVNVKRDYYKNTRAMAHTLYTQGKFEIDGEEATIDQLEGRFSFINQLDWSNNMKINRNNKDYKNRFASFKSSEREYQKFLFYKYFYANSKPLIITEGKTDIAYLKSALKNLYSEYPDLITKKNDGTFEFKISFLKKSKRLNYFLDINKDGAEGLKKIYNLFCEKGDVRNYSKYFNKISDTFPNNPVILVYDNEPSNGKPLNQIINYAGLERETIRDKLMITIVDNLYLLTVPPVNEPSESDIEDLFDIKTLEHKINGKTFNKNNEMDPTKHYGKERFSQFISENYCDINFDNFKHILNNISDIVKEYKK

SEQ ID NO: 1210 - protein, 550 aa, unidentified
  source 1..550: note = Related to LFJO01000006.1; note = Alkalihalobacillus pseudalcaliphilus
MMEFYDIRTRRDLVDFLHISQKRFTYLLYRKGIDNLYTSFDLHKKSGGIRKIHVPNDELKSIQKALETILYTHKSGLLGGENNISHGFERKKSIITNAKIHRNKRLVLNIDLEDFFESFHFGRVRGYFKNNKNFLFSMEVATIIAQLTCYKGTLPQGAPSSPIITNLICKILDHRLLKISKKYKLDYTRYADDLTFSTNNKKFLEQQTEFYERIKGEIIRAGFKINDNKTRLQIKDTRQMVTGLVVNKKINVNRIFYKKTRAMAFQLYKEGNFQIEGKPGSLNQLEGRFAFINQLCRYNNKIDGEKHSFHNLNSRETQYQKFLFYKYFYANPKPLIVTEGKTDIAYLKSALKNLHLDYPNLITKKGGNFEFKVSFLKRTKRLRYFLNIDKDGADSLKNIYNYYDDKKQGPNYFSYFREISKDVPKNPVIFMFDNEIESGAKKPIGNFLKHSSIKAEKIEFLKTEYKIGLTSNLYLLTVPSIPGLPESDIEDLFNETTLSTLIGGKSXIDFNKFRPLLDKLNDTLEEYTKKRSKTLGVIKVSEKVKEPLNV

SEQ ID NO: 1211 - protein, 569 aa, Bacillus sp.
  source 1..569: note = Related to NVIC01000027.1; note = Bacillus toyonensis
MKKFNDIKTRDDLSDFLKIPTSKLTYVLYKKKTSNLYTSFEIPKKNGGIRHIKAPLKDLKEIQKRLALSLWTHQKYIWKENGINPNISHAFQKEKSIITNAQIHRNKRFVLNIDLENFFDSFHFGRVKGFFEKNKHFLLPQGVATIIAQLTCYEGNLPQGAPSSPIITNLICNILDMKLLKISKKYKLNYTRYADDLTFSTNSKQFLVQQSDFHEEISKIIEKAGFKINEKKTRLQFRDSKQEVTGLIVNKKINVDRNYYKATRSMAHSLYTTGTFQIDGETGTINQLEGRFTFINQLDQYNNKINKSIDKTTKLGFHHLNSREKQYQKFLLYKYFFVNNKPLIVTEGKTDIDYIKSALKNLYIHYPNLVTKNSDGTFEFKVSFLNRTKRLRYFLDIQQDGADTMKNIYNYFNNNGKDSYPNHFKKFQESGFTPANPIIFILDNELSNKEKPLKNLTNHIKLDKDTAKKDFFKTNFYINITSNLYLLTHQLVKELPECEIEDLFDDLTLNQTINGKRFERDTKIFNSALHCSKAKFADHISQNYEKIDFNNFKCMLDNLNTIVSSYGNN

SEQ ID NO: 1212 - protein, 568 aa, Bacillus sp.
  source 1..568: note = Related to NVFR01000056.1; note = Bacillus toyonensis
MDKFNNIKTLYDLSYFLKIPTRKITYILYKKGIDNLYTSFEIPKKNGGVRHINAPSKDLKDIQRKLVLSLWAHQKHIWEESGKNLNVSHAFQKEKSIITNAQIHRNKRFVLNIDLENFFESFHFGRVRGFFEKDKNFLLPKKVATIIAQLTCYEGHLPQGAPSSPIITNLICNILDMKLLKLSKKYKLNYTRYADDLTFSTNNKHFLDQQSDFYEEISKIIERAGFKINEKKTRLQFRDSKQEVTGLVVNKKVNVDRNYHKITRSMAHSLYTKDNFQIDGEFGEITQLEGRFSFINQLDRYNNLVKKDRDKNVKLNFRNLNSREKQYQMFLFYKYFYKNKRPLIVTEGKTDIEYLKSALKNLYKDYPNLITKKSDETFEFKVSFLRRTKRLSYFLDIKLDGADTMKNIYNYYIGKENNGYPNFVKKFKDLGSIPNNPVIFILDNELNNSNKPLKKIMNHMGLNKGVSKSSFFSEDYYIHITENLYLLTHQLVKDLHECEIEDLFDDSILNQKIHGKNFERDDKKFNINNHYGKANFADYISKNYRSINFSKFKCMLDHLNSIVTFKSN

SEQ ID NO: 1213 - protein, 571 aa, unidentified
  source 1..571: note = Related to NC_016894.1; note = Acetobacterium woodii
MNKFNEIKTRNDLADFLDIPRSRLTYILYGKKIENFYTSFEILKKNGGTRQIDAPNKELKIVQKKIANALWNHYKGLAKKTSSKTNFSHAFEKEKSIITNAKIHRNKRFVLNIDLEDFFHSFHFGRVRGFFEKNNNFTLPKEVATVMAQLVCYEKHLPQGAPSSPIITNLICNILDFRMLKLSRKYKFDYTRYADDLTFSSNNKYFLEKHQEIYDEISNEIERAGFRINERKTRLQYRDSKQQVTGLVVNKKINVDRVYYKKTRAMAFSLYSCGSFEIEGDQGSINQLEGRFAFINQLDRYNNKLSSEKNDFRTLNSREKQYQQFLYYKYFFANKKPLIVTEGKTDVRYLKAAMKSLCDEYPNLITKSSDTEFEFKVSFLRRTKRLNYFLNITQDGADTISSIYKFSQANNEKGYINYLEYFKKISNTNPKNPVILIFDNELNGDQSKGKNNKNKPLQKFINLINLDNESHEKFKNSLSYNILGNFHLLTNQLVNNKDQCEIEDLIESKVWNNRIGGKTFSIDKEFDLDKHFGKEIFSQYIEQNYETIDFENFKPILDNISQIIDEYNVKS

SEQ ID NO: 1214 - protein, 566 aa, unidentified
  source 1..566: note = Related to NZ_AP024845.1; note = Eubacterium sp.
MDTIDKVKSRNELADFLDIPRKKLSYILYIKGVDDLYTSFEIPKKSGGFRHIYAPQKDLKVIQRKLAEALYNCQKEIWNKCNVNPNISHAFQKEKSFITNAKIHRNKRFVINIDLENFFDSFHFGRVQGYFLKNRSFQLPSEVATVIAQLTCYQGKLPQGAPTSPIITNLICNIFDVRISKLAKKYRLDYTRYVDDLTFSTNNKEFLNIKNIFFEELEKEIINAGFSINKKKTRIQYRDSRQEVTGVVVNKKLHVSRDYYKRTRAMAYQLYKSGEYFIENEIKGTINQLEGRFSFINQLEWYNNKLNLEGKKLTYEYLNGRERAYSQFIFYKYFFANPKPLIVTEGKTDVTYLKAALKNLWKEYPNLVSRNSKGQFEYKVSFLQRSKRFAYFLNFKKDGADTMNNIYKFFSEEGGEKYPNYIEMFKNLGSTVPLNSVILLFDNELNNKNKPIYKFVSNKISDDRKKQLCTRTWINLLENLYLMITPLVGESEECDIEMLFDEATLSHEIGGKKFCKKDTYDTSKFYGKEIFSQYIMKNYSSIDFGGFKPLLNNIDVVIKDYKERIQ

SEQ ID NO: 1215 - protein, 565 aa, unidentified
  source 1..565: note = Related to JAAYPT010000052.1; note = Clostridiales bacterium
MNTIDKIKTRNELADFLEVPRKKLSYILYVKGVDNLYTSFDIPKKNGESRHIHAPQKDLKVVQKKLADALCTYQKEIWKRRNINPNISHAFQKGKSFITNAKIHRNKRFVVNIDLENFFDSFHFGRVRGFFLKNDDFQFSVEVATVIAQLSCYQGKLPQGAPCSPIITNLICNIFDIRLLKLAKKYCLDYTRYADDLTFSTNDVKFLEIEELFFEKLEKEINSAGFRINEKKTRIQFRDSRQEVTGVVVNRKLHVSRVYYKKTRAMAYNLYKTGEYFIEKDTQGTINQLEGRFSFINQLEWYNNKLYPGNKKLIFNNLNGREREYSQFVFYKYFFANPKPLIVTEGKTDVIYLKAALKSLWKEYPELVSRDKNGHFEYKIAFLRRSKRLAYFLNLKEDGADTMNNIYNFFSKNGGEKYPNYIEVFRKLGNRFPLNPTILLFDNELSNKEKPVCKFTKGKISEEQREELNSKTWIHMTENLYLLMTPLINERNESDIEMLFDNFTLSKEIDGKKFCKKDRYDTDKFYGKEIFSKYIMKNYSNIDFSGFKPLLSDIKIICENYKKKM

SEQ ID NO: 1216 - protein, 587 aa, unidentified
  source 1..587: note = Related to NZ_LT727777.1; note = Oceanobacillus iheyensis
MSSILVGYLSASHNELPHVLFYVLGDSMNNFKDVRTRIALANLLGVPENKLTYVLYIKKIENLYTSFSIPKKNGESRHINAPQKDLKDIQKKLADCLYEYQKENRINNNIKTNISHAFERDKSFITNAKVHRNKRFVYNVDLENFFGSFHFGRVKGFFEKNKDFQLPSNIATVISQIACYQGELPQGAPSSPIITNLICNIFDIRLIKLAKKYKLDYTRYADDLTFSTNNKKFLDTISDFHSELSKEIKQAGFEINNNKTRLQFQDSKQEVTGLTVNKKLNVDKSYFKTTRAMAHHLYTQGSFKINDKDGTINQLEGRFAFINQLDRYNNKLDNGSHNIRELNSRERQYQKFLFYKYFYANNKPIIVTEGKTDILYLKAAIKKFHSEYPALINKRSDGKFEFKISFLRRTKRLNYFLDLQKDGANTMKKLYNFFSNKESRHFPNYSAYFKKNSVVPPKNPVIFVYDNELKNKKKPIIDFLNYANIKPEKRLELAEILSIKIINNLFLLTNPLIVEPESEIEDLFDEKTLSIVLNGKTFSRNDDSNDKEHYGKEIFSKHISSNYSKINFDNFRPMLDRITAIMETYEK

SEQ ID NO: 1217 - protein, 554 aa, unidentified
  source 1..554: note = Related to JAJCRR010000003.1; note = Lachnospira pectinoschiza
MKKLKELQTREDLALYLAIPLQKLTYILYKSKPDSYYDTFEIPKKNGESRQIHAPSGDLKQLQRKLAQRLWDVYREFIEENEIQDNISHAFQKGKSIITNANIHRNKRYVLNLDLKDFFDHFHFGRVRGFFMKNKNFELPVEIATMIAQLTCYEGKLPQGAPTSPIITNLVCNILDMRLLKIAKKYRVVYTRYADDMTFSTNDKKFLENQENFMKSIKKEIESFGFEINDKKTRLLFCDSRQEVTGLVVNKKISVNREYCKRTRAMADAFYRRGIFEICGEEGSVNQLEGRISFINQIDCYNNKNDREQKHTFWTLNARERQYQKFLFFKYFYANTKPLIVTEGKTDIVYLRAALKKYYKEYPELIKKQDDNFEFQVTFLRRSSRLKYFLGIQKDGADTMKNIYNFYSGKNNAPKLYSWFAQNSCKKSQNPVIFIFDNEQVSDRPLKKFLNHLNNKGLLESSNYNHIQDNLYILTNPLVNGKKECEIEDLFDDVVLSHTIDGKIFSRKETDNEKYYGKAIFSQYVERQYDSIDFSNFKPMLEDIKSIVGSKKQG

SEQ ID NO: 1218 - protein, 552 aa, unidentified
  source 1..552: note = Related to JAFTZX010000234.1; note = Lachnospiraceae bacterium
MLKFNEISYRDELAEFLNIPLKKLTYILYVKKVDSYYTSFQIPKKNGDYRSIDAPYGDLKYIQKILAIKLWEYHNKYTSDNNINMKVSHAFEKKKSIITNAIIHKNKRFILNIDLSDFFASFHFGRVRGFFEKNKEFNLPIEVATIIAQLTCYKGHLPQGAPSSPIISNLICNILDMRLLGISQKYKLDYTRYAEDMTVSTNDFKFIYLVDDFMKEITKEIEKSGFSINNKKTRFVFNDSRQEVTGLVVNKKISVNRDYCKKTRAMADSLYRKGEYVINGSKGTIQQLEGRFAFINQIDRFNNNFNYVKHKIWDFNSREKQYQKFLFYKYFYANTKPLIVTEGKTDILYIKAALKKYYYKYPELIFKKDEDYIFNISFLKRSSFLEYFLNIYQDGADDIKNIYNFYVGNNHYPNLYEFFLEKSSLKPKNPVILIFDNEQNSDRPLKKFLNHIKIDSKNFKSGQCIYANIYLITNPLVKGKAECEIEDLFEETILENVIEDKKFSREKKYDINKFYGKDIFSKYINDNYKTINFDGFIPILDDINKVVTNMDF

SEQ ID NO: 1219 - protein, 561 aa, unidentified
  source 1..561: note = Related to NZ_FNYT01000006.1; note = Trichococcus ilyis
MKKLMEIKTRNEFADVLEIPRQKLSYILYVKHVDEMYTSFQIPKKNGDFRNINAPIEDLKNLQKKLSELLWECQKEIRMNNGIDSNMSHAFEKEKSIITNAIIHRNRRIVLNIDLEDFFGSIHFGRVKGFFEKNRDFKLSSEVATIIAQLACYRGVLPQGAPSSPIITNLICNMIDIRLLKIATKYKVNYTRYADDLTFSTNNKPFLDKQSEFLSEVTKEIERSGFKVNNKKTRILFRDSRQEVTGLIVNEKISVNRKYYKKSRAMSYQLYKSGSFEIDNEEGSVNQLEGRFAFINQLDWYNNKRDGLEHNFWSLNSREKQYQKFLFYKYFFNNNKPLVITEGKTDIDYIKAALKNLYIEYPDLVTKNSDGTFNFKVSFLRKSKRLRYFLNIHLDGADTMKNIYKFYSDKENNKFPNFCKYFKELSGNIPTKPVILIFDNELTNKEKPLYKFVNYAGLNGLSQCIKEKLNTKLTDNLYLMTNPLVSNKTECEIEDLFDRETLSHEINGKFFSRNKTSDNNKFYGKEVFAKYISSNYREIDFDNFKPILNMLNDIVSLRKQA

SEQ ID NO: 1220 - protein, 570 aa, unidentified
  source 1..570: note = Related to NZ_WIQQ01000012.1; note = Pectinatus frisingensis
MKFNEIKSRNELANFLGISIRKLTYILYSKKTESCYTSFDIPKKNGGVRNINAPTEDLKHIQVKLANALWEYKKSIIKEKNINVKISHAFEKRKSIITNAQIHRKKRFIFNIDLENFFNSIHFGRIRGYFEKNENFKFPIEIATIIAQLTCYNHCLPQGAPSSPIITNFICNILDMKLLKIARKYKMDYTRYADDMTFSTNDNNFLNEISTFYAEIEEKINQNGFTINGNKTRLAFQNSRQTVTGLVVNNKISIPREYYKLTRAMIYSLYKNGEFTANGVNSTIRQLEGRLAFINQIDLYNNRITDGPHSMRTLNSREKQYQKFLFYKYFFIPQKPLIVTEGKTDIVYLKAALKKYYYKYPDLITKIGDKFIFHISFLKRTKRLAYFLNINLDGADTIKNIYNFYTGIDSVPNICKWFDEKTNVRRINPVILIFDNEQENNKPLKKFINHMQKSRQNKEIKLENPRYKNIIDNLYLLTNPLMKGKNECEIEDLFNNQTLSHKINGKSFCRNGKFDSEQYYGKEKFSQYIASDYESIDFKNFQEMLNDINITINEYKSANENEEPIKKVCK

SEQ ID NO: 1221 - protein, 560 aa, unidentified
  source 1..560: note = Related to SAAV01000006.1; note = Clostridia bacterium
MDGFTNIASRNELADFLRIPRKKLTHILYIEEVNNLYTSFDIPKKSGEKRHINAPTDDLKSVQKRLAYALWEHQKNVWEEKDVNPNISHGFEKNKSIITNSRIHRNKRLVLNIDLENFFDSFHFGRIRGFFDKNIDFKVPIEVATVIAQLSCYKGCLPQGAPSSPILTNLIGNILDIRLLKLAKQYKLDYTRYADDLTFSTNNRDFLANYPTFIKELSIEIESSGFRINHQKTRLQYRDSKQVVTGLIVNQKINVDKCYYKVTRAMAHSLYSKGGLTINGKEGTINQLEGRFSFIDQIERYNNTIDEDSHDFRNLNGREEQYRKFLFFKYFFSNSKPLIATEGKTDVAYLKAALKNLFALYPDLISKTESDDFEFKVSFLRRTKRLRYFFGLSLDGADTLKNVYNFYTGKEGLPNYLKYFNVMSSDKPKNPVILLFDNELANKNKPLYKLVNNNGLNETQKKDLSDKLNVKISENLFLLTHPLAEGKDECEIENLFDIETLSHVIEGKTLSLDSKFDNNLYYGKEIFSKYISSNYKDIDFSGFRQLLDKLNEIITTFNST

SEQ ID NO: 1222 - protein, 594 aa, unidentified
  source 1..594: note = Related to KE136354.1; note = Enterococcus dispar
MASFTDIKTQDDLFKLLNIPKKNMTYLLYNKEEKGPENAYHTFSILKKNGDKREIDAPNDELKFVQKRLAILLWANQKKSWRLNNTKPNISHGFEESKSIITNAKIHRNKKIVLNLDLEDFFPSIHFGRVKGFFEKNKNFKVPKEVALVIARLVCYKGRLPQGAPTSPIISNLICRILDFRLLKLAKKYRLDYTRYADDLTFSTNSSSFVDEEQFFLDKLEKEIIRAGFKINAKKTRLQFSNSRQEVTGLTVNKKLNVSKEFYKNTRAMAHKLYTTGEFLIDGESGTINQLEGRFAFINQLDKYNNGLEYEISLNKNNIEYQKFLLSTIKVENNHQIMLLNLNSREKEYQKFLYYKYFYGNEIPTIVTEGKTDIRYLKAALKKMYKDYPILIEKNGNDYKFKVHFLKRVNKKGNKDISRLKYFFNLPIDGADAMKNLYNFFSDKNNKLYPNYLEYFNFLSTSKPSNPTFFIFDNELNNDKKPLRGFINYINEKKNMQSLKDNGSLRVTENLYVLTNQLIGEAEENEIEDLFDKKTLEHKIGGKSFSKKSISEKNNFYGKEIFSKYVLDNFENIDFENFRPMLNNLSRIISDYGK

SEQ ID NO: 1223 - protein, 582 aa, unidentified
  source 1..582: note = Related to NZ_MPSN01000002.1; note = Ligilactobacillus murinus
MNVFKDVENRDDLFERLGISKQLATYLLYGKGIDNCYSTFVIEKRNGDPRVINAPNKELKSVQKRLVNAILLQRSCNNQNGKSLKIAHAFEKNKSIITNAKVHRNKRFVLNVDLEDFFTSFHFGRVRGFFENDNTFKVPRKVATVIAQLTCYKGVLPQGAPSSPIITNLICRIMDLRILKLSKKFNLNYTRYADDLCFSTNDQKFLLDEQVFLSKLTREICKAGFKINSKKTRLQFRDSRQKVTGLVVNRKLNVPREFYKNTRAMANKLYANSEFTIDGKKGSIDQLEGRFAFINQIDRWNNSLELEQSITSNMLNYQKLLLRSKYQNKEIFGRLNAREREYQKFLYYKYFYGNDKPIVVTEGKTDILYIKAALKNLYQSYPDLVERIGNDYKFKVSFFKKSKNNKEIPRIKYFLNIPQDGADSMKNLYSFFSDKNSCYPNYLDYFQKKYSSKPLNPVIFIFDNEIENNKKPARNFVNHIKIRGALSELRDKQRLRIIGNLYMIVTPLVNSLKETDIESLFSSQTLGHKIDGKSFNRNGGKEYYGKGIFAQYVSKNYENIDFTNFKPLLDNLNKVIIDYKDG

SEQ ID NO: 1224 - protein, 594 aa, unidentified
  source 1..594: note = Related to NZ_NGLI01000001.1; note = Enterococcus sp.
MSNLSEIKSREDLFRLLNIPKKNMTYLLYNKDKKGTENSYTTFTIKKRNGEDRIICAPNNELKFVQRRLANLLWVTQKKIWRENNIKSTISHGFEKNKSIITNARIHRNKKFVLNIDLEDFFSSFHFGRVKGFFEKDRNFKVPQEVALVIAQLTCYKGVLPQGAPSSPIITNLICNIMDLRILKLARKYKLDYTRYADDLTFSTNDIVFLHFEKEFLIKLEKEIVRAGFKVNPKKTRIQFSNSRQEVTGLVVNKKISVPKEYYKKTRAMAYNLYKNKEYFIDNVPGTINQLEGRFAFINQIDKWNNVLEYETSLDNNNLEYQKHLLTIKRKEKNHYNMLKLLNRREREYQKFLYYKYFYSNEKSTIVTEGKTDIRYLMAALKSLYKDYPNLVEKVGENFNFKVYFLKRSKKKDKREVSRFKYFFNLPIDGADAMKNLYNFFSDKNTLCPNYLKYFSSFESSKPASPNFFIFDNEISNKDKPLKTFINYVYAKSQSAKAEEMKEKLYLKIEENLYIVTHQVLDGCKENEIEDLFDEKTRGHIIGGKTFSPKGDSNNHYGKEIFSKYILKNYKYINFENFRPMLDNINKIITEYKN

SEQ ID NO: 1225 - protein, 572 aa, unidentified
  source 1..572: note = Related to JAARYB010000009.1; note = Listeria booriae
MDYFSDIKTREDFFNILNIPLKNMTYLLYNKEKKGTENSYHSFEIKKRNGGVRVIHAPNKELKFVQQRLLKALWRNQTKVWHDKKINPSISHGFQKGRSIMTNAEIHRNKKFVLNVDLEDFFNSFHFGRVKGFFEKDRDFKVPQAVALIIAQLVCYKGALPQGAPTSPLITNLICRIMDLRLLKLAKRYKLDYTRYADDLTFSTNDSSFSRLSQEFLLKLESEIKRAGFNLNPEKTRLQYKNSRQSVTGLVVNKKLNVPNEYYKKTRAMAHTLYTNGSFLIDGVEGTLAQLEGRLSFINQLEKRNNLSINSGSKDYKNLGRREKEYQKFIYFKYFYANTRPTILTEGKTDSRYLKAALKKLYKNYPNLIEYKNGEFVFKILFLHRADKEKPNKTTRLKFFFNIGPHGADSLAELYYFSSNKKSKVPGYINYLEYFKKLNQNMLTKPTIIVFDNELSSNGKPLRTFINSLKDEQEMHISNIRRDLSTQVTDNLYILTNKLVGTRTEAEIEDLFDDKTRNKEIDGRTFSATDIGEQYYGKNIFSLYILKNYKEVDFSNFKPMLDKLNEIIINFK

SEQ ID NO: 1226 - protein, 598 aa, unidentified
  source 1..598: note = Related to CP022488.1; note = Enterococcus faecalis
MVSYSDIQSRDDFFKLLNISKQHMTYLLYNKDKKGTENSYYTFEIEKKNGGVRVIHSPNDELKFVQKRLASVLWNKQKEIWNKKGIHPNISHAYEKNKSIITNAKIHRNKKFILNVDLEDFFSSFHFGRVKGFFEKDNNFKVPSEVALIIAQLTCYKGVLPQGAPSSPIITNLICKIMDFRILKIARKYRLDYSRYADDLTFSTNRTSFLDDKEAFMKILEKEINRAGFKLNENKTRLQYNSSRQEVTGLIVNKKLSVPREYYKQTRAMAHTLYKTGEFFINNEKGTVNQLEGRFTFINQLDKWNNKLEYDTTLNNNNFEHQKFLLSLNRKGDGGVQEKLKLLNTREREYQKFLYYKYFYGNTKPTIVTEGKTDIRYLKAALKKMYQDYPNLIEKKNNKFIFKVYFLKRIGNKETSRFKYFFGLEKDGADTMKNLYNFFSDLGNEKLYPNYLKYFNTFDKHPLNPTIFIFDNEISNSKKPLGSFMNYAFNKKKKVKQSKIDCLKENLFLKIEENLYVVTNQLLPEKDETEIEDLFDEKTLHHSINDKTFSKKGDPNLNYGKEIFSKFILSNYEEINFENFRPILNNINQIVRNFSKNL

SEQ ID NO: 1227 - protein, 591 aa, unidentified
  source 1..591: note = Related to NZ_CP011102.1; note = Listeria weihenstephanensis
MPSFSDIKTRDDFFKLLNIPKQHMTYLLYNKEKKGTENSYYTFELEKKSGGVRIINTPNDELKFVQKQLTSLLWKAQKNIWNNSSLHPNISHAFQKEKSIITNAQIHRNKRFVLNIDLENFFNSFHFGRVKGFFEKDKNFKVPPDVALIIAQLTCYQGVLPQGAPSSPIITNLICRILDLRILKLAKKYKLDYSRYADDLTFSTNIRSFDAQEKEFLSVLETEIKRAGFKINTKKTRLQFNNSRQEVTGLIVNKKINVPKEYYRNTRAMANSLYKNEKFFINNEWGTINQLEGRFAFINQLDKFNNSLEYNSSLRKNSIEYQKSLLSTQLKENSNHNMLLLLNAREKEYQKFLFYKYFYANQKPTIVTEGKTDIRYLKAALKSLYKDYPEMIEKKGTKYIFKVSFFKRSKRFRYFFNFSLDGADSMKNLHNFFSDNNNKLYPNYWQYFDALNSSSSVNPIFFIFDNELSNKNKPLRNFVNHVCSVEKENADAQLKLLKEKLNLQLKDNLYLLTNQLLDGFTENEMEDLFDAKTLKHIIKGKTFSKNGDNKDHYGKEIFSKYILDNYTKINFENFRLILDNMNEIIHDYSPN

SEQ ID NO: 1228 - protein, 349 aa, unidentified
  source 1..349: note = Related to NZ_MAEJ01000004.1; note = Enterococcus sp.
MRLTEIEDKNIFFEEFDISKRSMTHLLYVKGTDSFYESFEIPKKNGGFRNIDAPKGKLKYVQKRLAEILWETQIDVWKKYANTYEYNLYQKNLKDGIRYRVPMISHAFEVNKSIMTNAKIHRNKKFIINVDLKDFFKSFHFGRVKGFFEKNKDFKVPTEVAVIIAQLSCYKGVLPQGAPSSPIITNLICQIMDYRIMQLAKRFKLNYTRYADDLTFSTNNVQIVNEYQTFLKKLEKKIVKAGFEINEDKTRLQFNNSRQTVTGLIVNKKLNVPREYYKDTRAMANTLYKTGSFDVNERTGSINQLNGRFAFINQLDKYNNKLENNASIMKNNIEYQKYLLSVEKKEKNI

SEQ ID NO: 1229 - protein, 573 aa, unidentified
  source 1..573: note = Related to NRQF01000015.1; note = Carnobacterium divergens
MIFINKFNAINSRNELFEFLKVKKEIMNYILYVKKTECSYNSFKIEKKSGGFREINAPDDELKVIQKKLALSLWLYQKEIWDEKGINPNISHAFEKDKSIISNARIHRNKKFVLNLDLENFFKSFHFGRVKGFFEKDRDFKVPPEVAVVIAQLTCYDGYLPQGAPSSPIITNLICRILDFRILKLAKKFKLDYTRYADDLTFSTNRKGFLADYIDFLEELSKEILRAGFKINDSKTRMQYSNSKQIVTGLIVNKKINIDSTYYRKTRAIAHTLYKGKEIEINGKKATIDNLEGRFAFINQLDRYNNAINAEITVGKKKKFAFNGREMQYRKFLFYKYFFANTKPLIVTEGKTDIKYIKSALKKLYKDYPNLVSKTSDGIFEYKISFLKKTNRLRYFLGIQKDGATALTEIYKYYAPSNGLNDPYINYMDEFKRISDSQAEKPVFLLFDNEMGKKSDKPLKKFVGCAKINEDKISELKDTLKLKLIDNLYVLTNPLVSNKEECEIEDLFDKKVLETVIKGKTFQRNEKKFNKEKHYGKEIFSTYIAENYESIDFSNFKKILDNIESISQKFKLG

SEQ ID NO: 1230 - protein, 576 aa, unidentified
  source 1..576: note = Related to NZ_NFIW01000013.1; note = Megamonas hypermegale
MCEINNIKTKKDLVKILDISIKKLTYILYVKKVDNMYFSFDIPKKNGGVRKINAPEKTLRFIQRNLAKALSNYKKNICENEKISNRVSHGFEKNKSFITNARIHRNKLYVINFDLKDFFDCFHFGRVKGYFEKNIYFKLPKEIAIIIAQLTCYHGYLPQGAPTSPVITNLICNIFDMRILKLAKKYKLDYTRYADDLTFSTNEKEFIKVYSNFYKDLVKEIDKSGFKINEKKSRIQYSNSRQEVTGVVVNKKLNINREYYKKTRAMADSLYKTGRFFIDGKEGTINQLEGRFSLINQVVWYNNKILKEKEKHNKYIKKNVEIYKKSCTRERDYERFLIYKYFVINKEPLLITEGKTDKLYIQAALKSLYKEYPKLIIKNKNGNFEYKIDFFNRTKRINYFLDVNKTGADTLKNICNYYFDKVKNGYENYIEDFFKIINIKPKNPVILLYDNEFDTSGKKNNKPVAKLFNNDRLSNKKDYIIKNRFLKIKENLYVMVIPLVNDKKNCEIEDLFKDELLKQKIDDRIFDRKSNDNETKIGKDTFSKYVKANYKDIDFSNFRLLLDTIKNILNDYKNNE

SEQ ID NO: 1231 - protein, 582 aa, unidentified
  source 1..582: note = Related to nan
MCVIDHIKTRKELANILNISEKKLTYILYVKKIDNMYRTFSIPKKNGETREINAPEKMLNFVQKNLAKFLLNYRNGIYKTENINNKVSHGFEKEKSFITNAELHKNKRYVLNFDLKDFFDCFHFGRVKGYFEKNRYFKLSKDIATILAQLTCYKKCLPQGAPTSPIIVNLIFNMVDIQIIKLAKTYKLNYTRYADDITFSTNDKFFLEKYSEFENKFLYIIEKYGFVVNKNKTRLQYKDYRQKVTGLVVNKKINVTREYYKETRAMAHQLYKTGSFFIEENKSGTINQLEGRFSFINQIEKYNNIIDIKKGGKKHRIVTLSNKEKEYSKFLFYKNFFNMGKPIIFTEGKTDVMYIKAALKNLYKKYPNLIEETKTGFDYKIIFFRKSKKIRYLLNIEANGADTMKNIANLYSGSESFPNYIEYLKSISKQKPNNPIILLFDNEIESKNKPIKNFLSCKAVKSFYKDDILEKQLKEKNYACLKDNLYVQVTPLIGNIKEGDIETLFKKETLAHKINGKSFIKKDKYNNEYYYGKEIFSKYVYDNYRNIDFSNFVYLLDNINDIIKDYQIRKAGNDMHPKYWTY

SEQ ID NO: 1232 - protein, 555 aa, unidentified
  source 1..555: note = Related to CP024698.1; note = Fusobacterium sp.
MSNYNNARESLSNFLNISLKYLTYILYVKKIENLYTTFKIPKKNGGCREINAPQNELKMIQKKLVFFLEEKMKDKFKTINISHGFVKERNIITNAKIHKNKKIVLNLDLKDFFDSFHFGRIKGFFEKNKDFKFSPELATLIAQLACYNGKLPQGAPSSPLITNLICNIFDIRVLNLARKYKLNYSRYADDLTFSTNYKGFIKNLEEFKEDILLEIKKNGFEANMKKYRLTFQNSRQEVTGLTVNKKINVSKIYYKNTRAMAYSLYKNGEFKIDGIKDGTINQLEGRFSFINQLDIYNNFEKNRTKKEKGKKDGIKSWNIYNSREKEYQKFLFYKYFFMNQKPLIVTEGKTDILYIKAALKNLYNDYPSLIIKEENKFIFKVSFLKRTKLLKYYLNLALDGADTIMNIYNHFVDAYSSFYNYNDYFKKLTKKQAFNPVVLIFDNEIETEKPLKKFLAHAFPKSREINEKKDIIKKNCKLNIIDNLYLLTINLVDDMKECEIEDLFIKDIHERFSFNKDNPDKNKFSKNILKNYKNIDFSNFKPFLNNLASILKEYN

SEQ ID NO: 1233 - protein, 559 aa, unidentified
  source 1..559: note = Related to NZ_CP068114.1; note = Fusobacterium canifelinum
MFNFKNAREILSKILNIHLNYLSYILYVKKIENLYTTFKIPKKNGGYREINAPQNELKMIQKKFVSFLEEKMKEKFKTINTSHGFVKERSIITNAKIHKNKKIVLNLDLKDFFDSFHFGRVKGFFEKNKDFKSFFPELTSELSTLIAQLVCFNGKLPQGAPSSPLLTNLICNIFDVRVLKLAKKYKLTYSRYADDLTFSTNYKGFIRNLEKFEEDILLEIKKNGFEANMEKYRLTFQSSRQEVTGLTVNKKINVSRKYYKYTRAMAYSLYKNGEFNIDGIDGTINQLEGRFSFINQLDKYNNSESEKRKKFIARNVLNSREKQYQNFLFYKYFFMNEKPLIVTEGKTDILYIKAALKNLYNEYPNLITKEENEFIFKISFLKRTKLLKYFFNLSPDGADSMKNIYNYFGDKNSKFYDFYNYFKKLTNLEALNPVILVFDNEATENSKKPLKKFLNHIFSDKNDNDKKNLISYVRTKFKLKIINNLYLLTINLVDGLEECEIEDLFFEDTYKKFSFDKINPNKDKFSKNILKNYKNIDFSKFKPFLNNLESILKEYNKKD

SEQ ID NO: 1234 - protein, 566 aa, unidentified
  source 1..566: note = Related to JAGAAC010000102.1; note = Clostridia bacterium
MKLSEIRCREDLACLLKIKTSSLTYVLYRAKVNSFYKTFDIPKKNGGVRQINAPTDILKIIQERLASAIYSYMKNLRTEKNINVNIAHAFEKKKSIITNAQIHKNKYIVLTFDLEHFFDSFHFGRVAGFFEKNRDFHLPHNMAIILAQLTCYNGHLPQGAPTSPIITNLIFQICDMRILKLAKKYKLDYTRYADDLTFSTNNHSFIDEKESFQRELEREIGKAGFSINQTKTRMSLRNSRQEVTGLVVNKKINVNAGFYRKTRAMAHQLYQNGSFTIDGKEGSIQQLEGRFAFIDQLDHYNNKIDGKIHSFRDRNGREKQYSKFLFYKFFYANEKPLIVTEGKTDIRYLKAALKSLYLDYPELISRNKNGSYTFKVQFLHRTKRLSYFLDIAVDGAKPLYNIYKYFIKGRDSAYPNYYKFFSKDGEKKPRNPVVILLDNEMKPNKPLKGFLDQIKSTESEKNDLQQKLSLRLLASGNLYLLTNPLVDNKDECEIELLFTEETRGIKLEGKSLCLEEESFEKSNSYGKNIFSNYILQHYNEIDFSRFIPLLNALSSIIKNYSAEMRN

SEQ ID NO: 1235 - protein, 568 aa, Bacillus sp.
  source 1..568: note = Related to NVHA01000086.1; note = Bacillus toyonensis
MKTFANIKTLDDLSIILKIPKKKLTYILYIKKPNNSYKSFKIPKKSGGERTINTPSTDLKDIQRSILKILWKQQKILWEEHKIKSNISHAFVKKKGILTNARVHKNKRYVFNMDLEDFFDSFHFGRVRGFFEKNRDFLFPQNIATILAQLTCYNGCLPQGAPTSPIITNLICNILDMRLLTVAKEFKLDYTRYADDLTFSTNDEKFVENLEDFKTKAKEIINHSGFKINEKKTRLQYKNSRQVVTGLVVNKKVNVNRDFYKETRAMANSLYKNGEIKINEKSATINQLEGRLSFINQIDRDNNKVNKKSNKKFHSHLSTLNGKEKQYQMFLFYKYFMANNNPCIITEGKTDIIYIKYALKKMHRDYPKLIKKNYDGTFQYKISFLNRTKRLKYFFNLELDGADTMNKIYEFYSNRNNDSFPNYNEKFEKFGVSPENPIIFILDNELSSKENKPLKKLISQVALDKTKIASFKENNFINITSNLYLTTHQLVKDLKECEIEDLFDNDTLNVKLNNKSFERDSKKFNDKIHYGKAIFADHVSKNYKNIDFSEFRPLLDNLNNIITNYSVN

SEQ ID NO: 1236 - protein, 567 aa, Bacillus sp.
  source 1..567: note = Related to NTTM01000084.1
MQTFENIKTLDDLSIILKIPNKKLTYILYIVKPDNSYKSFKIPKKSGGERTINTPSTDLKDIQRSIVKILWKQQKILWEEHKIKSNISHAFVKKKGILTNARVHKNKRYVFNMDLEGFFDSFHFGRVRGFFEKNRDFLFPKNIATILAQLTCYNGCLPQGAPTSPIITNLICNILDMRLLTVAKEFKLDYTRYADDLTFSTNDEKFVENLEDFKTKAKEIINHSGFKINEKKTRLQYKNSRQVVTGLVVNKKVNVNREFYKETRSMANTLYKKGKFEINGKTATINQLEGRFAFINQIERYNNGIYKNNNAPLKLCDLNGKERQYQMFLFYKYFFGNSKPCIITEGKTDIVYIQSALKNLYESYPKLVKKKADGTYQFKITFLRRSKRLRYFLDFQLDGADTMTKLHNFYCNTNNNSYPNYPEKFRKLGTTPKNPVIFVLDNELHNNEKPLRKLIKNVKLDKNLSEFDSSKEKYHINITSNLYLSTHQLVKGLQECEIEDLFDDNTLNTKIYDKTFERDSKKYSDKKNYGKAAFADYISKNYKDIDFENFKPLLNNINEIITTYSLS

SEQ ID NO: 1237 - protein, 568 aa, unidentified
  source 1..568: note = Related to NZ_CP071798.1; note = Sporosarcina sp.
MYTFKNISTITDLAKILKIPKKKLTYVLYIKKTDNSYKFFKLPKKSGGERTIYNPSDDLKDIQRSIVNLLWTQQLIIWKENNIKPNISHAFIKEKSIITNARVHKNKRYVYNMDLEDFFDSFHFGRVRGFFEKNKDFLFPQNIATVLAQLTCYNGCLPQGAPTSPIITNLICNILDMKLLQIAKKFKLDYTRYADDLTFSTNDGHFLENIEEFKIQTERIIKYSGFKINKKKTRLQYQNSRQVVTGLVVNKKVNVNRKFYKETRSMANKLYVNGEFKINGKKASINQLEGRFAFINQIDRYNNSIKINNNKIQSKTRNLNGKEKQYQMFLFYKYFFANNNPCIVTEGKTDILYIKSALKNLYEEYPNLIQRNSDGTFNYKISFLNRTKRLRYFFNFELDGADTMNQIYNFFSNKNNDKYPNYQEKFRKLGSSPNNPVIFILDNELSNRDKPLKKLIKPLELENNSLKFNHFKDNNFVNLTSNLYLLTHQLVKNLTECEIEDLFDESILNTTLHNKTFEKDSKKFDDKLNYGKAAFADYISKNYNKIDFTEFKLLLDNLNEIITSHSSK

SEQ ID NO: 1238 - protein, 568 aa, unidentified
  source 1..568: note = Related to JPUW01000004.1; note = Lysinibacillus sp.
MNTFENITTLDDLSRTLRIQKKKLTYILYVRRIENSYTYFTIPKKSGGERTINSPSTDLKEIQKSIDRLLRKQQIIFWEENNIKPNISHAFNKKKSIMTNAKVHKNKRYVFNIDLEDFFDSFHFGRVRGFFEKNKNFLFPQNIATILAQLTCYNGSLPQGAPTSPIITNLICNVLDMKLLKIAKKFKLDYTRYADDLTFSTNNTNFLENFEEFKDRVEAVIKYSGFKINEKKTRLQYKDSRQVVTGLVVNKKININRDFYKETRSMANTLYKHGEFKINGEQATLNQLEGRFAFINQIDRFNNDIYIKNNTVKPKLCDLNGKEKQYQMFLFYKYFFGNNKPCIITEGKTDSIYIKSALKKLYNLYPTLIKKNQDGSYNFKVSFLRRTKRLRYFFDFPLDGADSMKKLYNFYCNTNNDSFPFYAEKFKELNVVPKNPVIFILDNELENNSKPISKLIKATKLESDKQKLAFFKSKYYANISSNLYLSTHQLVKEKKECEIEDLFDVNTLETIINNKTFERNSTKYKDQNNYGKAVFANYVSKNYKKIDFNNFKPLLDAINEIVSNYTTT

SEQ ID NO: 1239 - protein, 571 aa, unidentified
  source 1..571: note = Related to VHRP01000005.1; note = Enterococcus faecalis
MKTFENISTLDELSQILKVPKKKLTYILYVKRIENLYTSFEIPKKTGGERTISSPSTDLKEIQKNIAELLRKQQNIFLEENNIKPNVAHAFNKKRSIMTNANLHKHKRYVLNIDLENFFDSFHFGRVRGYFEKNKNFLFPQNVATILAQLTCYNGKLPQGAPTSPIITNLICNVLDMKLLKIAKKFRLVYSRYADDLTFSTNDRNILENLEEFLAQLEFIVNKSGFTINKKKTRLQYKDSKQVVTGLVVNEKVNVNRLFYKETRSMADTLYKTGEFRIGDDKGNLNRLEGRFSFINQIDRFNNKIGKGKNIGNKESKKLNGRERQYQMFLFYKYFYCNTKPCLITEGKTDIIYIKSALKKMYLSYPNLIEKNSDGTFHFKFLFLRRSKRMRYFFELKLDGADTMSKIYNFYCDTNNHNYPNYVKKFTEKSVSPINPTILIYDNELKNKDKPLSKVTNTTKIRQDEEKYNFLKTNHYVNVTSNLYVLTHQLVKGLPECEIEDLFDSNTLSVTINDKTFERDLKKFDENKNYGKAIFAGYISKNYLNINFDEFKPLLDNLNTIVTSYNLKSQT

SEQ ID NO: 1240 - protein, 564 aa, unidentified
  source 1..564: note = Related to NZ_CP046022.1; note = Enterococcus faecalis
MKTFDNIKNLEQLSQVLKVPKRKLTYVLYVKRIENLYMDFEIPKKTGGTRKISSPSKDLKEIQKNIAKLLERQQEIFLKENNIKSNISHAFTKDRSIMTNALIHKRKKYVLNIDLENFFDSFHFGRVAGYFEKNENFLFPKKTAVILAQLTCYNGKLPQGSPSSPIITNLICNILDMKLLKISKKFKVDYSRYADDLTFSTNNNKFIEELDIFLSQLEKIINKSGFEINKKKTRIQYRDSKQMVTGLVVNNKVNINRKFYRETRAMAISQYHTGTFKIDNEEGNLKRLEGRFSFINQIDRFNKKITSKNTVVGKKTNILNGKEKQYQMFLFYKYFYCNSKPCIVTEGKTDIMYIKAALKNLYKFYPKLIEKKSDGTFHYRISFLKRSKRIRYFFDLSLDGADTMIKIYNCYCDVNNVNFPNYAKFFENKGVLYTNPTVLIYDNERSNTEKPLYKALKATKINENKEKLESLKSNYYTNITSNLYILTHQLVNGLAECEIEDLFDSKILEMKIDGKSFERNLKDFNDTEHYGKAIFADYILKNYHAINFDNFRPFLDCLNKIVES

SEQ ID NO: 1241 - protein, 575 aa, unidentified
  source 1..575: note = Related to CP076644.1; note = Listeria monocytogenes
MDTFEDINSLEELAKILKIPKKFLTYILYKKKVENSYTNLLIPKKSGGQRNISIPMKELKDVQRNIVKVMLTQQNIFQFENNIKSNISHAFTKDKSIITNAEIHKNKRFVLNIDLEDFFKSFHFGRVQGYFEKNKSFLFPKNIATVLAQLTCYNGSLPQGAPSSPIITNLICNILDMKLLKIAKKYKLDYSRYADDLTFSTNNKNFEEKSEEFFYQLEIIIKQSGFKINPKKTRLQYKTSRQIVTGLVVNKKVNVTREFYKNTRAMANSLYKTGAFTINDTKGTLRQLEGRFSFINHINKVNNKKRQINDKESTLNFRCLNGQEKEFQKFLFYKYFFNNEKPCILTEGPTDILYLKSALKSLYEDYPKLIKKVNGEFIFKIFFLERSKKKKTQKVSKMEYFFGLKENGADTMIQIYNYYVSNKQKKHCPNYSELFKKMNVTSKNPCILILDNELSVKEKPLKNLLNYMGIIDGCKIAELKEKCYLNSTSNLYVATNPLVNELKECEIEDLFEEAVLKTELNGKTFEKSEKAFNDTRNYGKRALSKYVWNNYDNINFENFRPLLDAIDQIVTKYNH

SEQ ID NO: 1242 - protein, 583 aa, Bacillus sp.
  source 1..583: note = Related to NZ_CP009684.1; note = Bacillus subtilis
MNTFEDITSIDNLSNILRTPKKKLTYILYIKKIQNSYTTFQISKKSGGQRIINVPSKDLKDIQRNIVNMLLNQQKKFYYENKIRLNIAHAFTKEKSIITNAKIHKNKRFVLNIDLENFFESFHFGRVQGYFEKNKNYLFPKNIATVLAQLTCYNGSLPQGAPSSPIITNLICNILDMKILKIAKKYKLDYTRYADDLTFSTNNKGFDEKSEEFISQLEMIIKQSGFKINRKKTRLQYKQSRQVVTGLVVNKKVNMPRNFYKNTRAMANSLYKNGSFTINGVEGSLKQLEGRFSFINHINKENNKEKKKIDKNSKLGFRNLNGQEKEYQKFLFYKYFFNNEKPCILTEGPTDIIYLKSALKNLYTDYPKLIKKVNDDFIFKISFLKRGEDPKASKAHKKIKGQKTSKLQYFFGLEKDGADTMKQIYNFYVSDKQKKDCPNYSEIFKNMNVNSKNPCIFILDNELNNKDKPIKTLTNYMDLKPDKLDELCDKNYLKIISNLYIVTNPLVNELNECEIEDLFELDTLKTELNGKTFERCEKKYNPSENYGKRAFSKYVWKNYEDINFENFRPLLDNINQIVTNYND

SEQ ID NO: 1243 - protein, 566 aa, unidentified
  source 1..566: note = Related to NZ_PYWN01000149.1; note = Metasolibacillus meyeri
MDTYKDITSLDDLSRILKTPKKKLTFVLYIKKAENSYTSFKIPKKSGGERVINAPSNDLKDIQRNIVKMLLKQQRVFLFENNIKSNIAHAFTEDKSIITNAKVHKNKRFVLNLDLENFFESFHFGRVKGYFEKNKNYLFPENIATVLAQLTCYNGSLPQGAPSSPIITNLICNILDMKLLKTAKKYKLDYTRYADDLTFSTNNKNFADQLEEFTKQLEVIIKQSGFKINEKKTRLQYKQSRQVVTGLVVNKKVNVKKDFYKDTRAMVNSLYKNGSFTINDSEGSLNQLEGRFSFINHINKESNKERKKIDKNLKLNFRNLNGKEKEYQKFLFYKYFLSNKNPCILTEGPTDITYLKSALKNLYTDYPNLIEKVDENFHFKISFLKRTKKMKYFFDLEEEGADTMKKIYNFYTVNKEKNDCPNYSEIFKNINVLPKNPLIFILDNELANDNKPLKNLVNYMALKKEKIHELQTKNYINVTSNLYIVTNQLADNVKECEIEDLFDAETLDAKLNGKTFERDKTKYTDAANYGKKAFASYIWKNYKDINFENFRPLLDCINLIAKDYID

SEQ ID NO: 1244 - protein, 565 aa, unidentified
  source 1..565: note = Related to JAARXI010000004.1; note = Listeria booriae
MGSFENIKTRGDLAGLLNIPSSKLSYILYIKKIENLYSSFKLPKKSGGHRVINSPEEDLKDIQKSLAKFLSRQQKIIWDARGINQNISHAFIEGKNIISNAENHMNKRFILNVDLEDFFDSFHFGRVRGFFAQNRDFRFPIDIATIIAQISCYNRTLPQGAPSSPIITNLICNILDIRLLKISKKYRVNYTRYADDLTFSTNDRSFSDKYMKFLVEISLEIKHAGFMINNKKTRLQLKDSRQEVTGLIVNKKVNVKKEYYKKTRAMADNLYRHKTFDIDGKPGTINKLEGRFSFINQLDRRNNEINRKRVELTQKSNSRHCLNTREKGYQYFLFYKYFFACPKPTIITEGKTDIRYLKAALKNLYLEFPKLIERKADGTFEFKVSFLRKTKRLKYFMELQLDGADTLKNIYNFYNEKGRQPNLSKYFEMKSKTKPDNPVIMVFDNEISNKNKPLYTFTNYASTQPESKQMLMKNLSINITNNLFLLTHQLVGQRTECEIEDLFNKKALDTKLDGKSFSKNPDTKQEYGKEYFSSYVLKNYQNIEFDNFRPMLQALNSIIESYSKG

SEQ ID NO: 1245 - protein, 563 aa, unidentified
  source 1..563: note = Related to NZ_KE386795.1; note = Veillonella magna
MNQRGSGIQDKRDLCRKLRIQYRLLTYILYKKGIDSFYEQFKISKKSGGIRIISAPKRPLKFVQKRLAQMLQTFYDGSTTKKNNIAHGFLKSRSIITNARNHRNKRYVINIDLENFFDSFHFGRVCGFFEKNKNFLFPKEVAVTLAQLTCYEGSLPQGAPCSPIITNLICQILDYRVLRIAKKFKLNYTRYADDLTFSTNDRKFVNEYDEFIKQVEAEIIRAGFRMNTKKTRFMYKDSRQVVTGLVVNKKLNIPHEYIRRTRAMAHSLYTKGEFNIDGVLGSIEQLEGRLSFINYIDKYASTYAEYKRYNRFTPKEMSGRERLFQQFLFYKYFYHNELPVIITEGKTDKRYIKAALKSLCHHYPALVTAVGNGRFKFHISFLRRSKRLERFLGIQHDGADSMKVISNYYGSPNSEGLPDYYSYFSKYSCEATNPVFLLYDNEISNKNKPIRKMLNFWKQKVEDIVNIVEKQQYCCLQGNLYILTFPTLNGMAENEIEDLILKDNPLIQIGGRNFSREERYDISKFFGKNEFSQYVLDNYDKLRFDSFRPLLDTLNSIIKEYKE

SEQ ID NO: 1246 - protein, 567 aa, unidentified
  source 1..567: note = Related to NFKI01000003.1; note = Pseudoflavonifractor sp.
MKKFCDIQSRNELADYLGISHKKLTHILYIKKPDNYYTTFEIPKRNGESRTICAPSGHLKALQVKLANMLWCYQKSIWEEKGVKPNISHAFEKEKSIITNAKIHRNKRFVLNLDLENFFDSFHFGRVQGYFEKNNNFKLPYDVSVILAQLTCYQGRLPQGAPSSPIITNLICQTMDIYLLRVAKKYKLDYTRYADDLTFSTNDRHFVENQEKFLAEAIAAIKRAGFSINEKKTRLQFRDSRQEVTGLIVNKKLNVNHAYVRKTRAMAHQLYSTGEYLIDGVPGTIKQLEGRFSFIDHLDHHNNILDPQEIKHDAFHLNGRERQYQAFIFYKYLYAHTVPVIVTEGKTDIRYIKAALKSLYTKYPRLIQKDAEGNFIYNFSFFKRTKRWKYFFGISLDGADAMKILYHYHAGNGKKIPAYHSYFRQLSGLEQHNPVILLYDNESKSERPLKKFLGEGVHATAEQKATLKSDLHIRLIPDSKLFLVTPPLVGSKEECEIEDLFSDELLSLNLDGKTFCRKDKFDDSKYFGKEIFSQYVYENYQTIDFSRFIPLLDVIDTIIAEAESPKK

SEQ ID NO: 1247 - protein, 566 aa, unidentified
  source 1..566: note = Related to JAGZJF010000013.1; note = Oscillospiraceae bacterium
MKKFCDIQSRNDLADCLGIPHRKLTHILYGKKPDSYYTTFEIPKRNGDPRTICAPSGDLKTLQVKLTNLLWSYQKSIWEEKGIKPNISHAFEKEKSIITNAKIHRNKRFVLNLDLENFFDSFHFGRVQGYFEKNCNFKLPHEVAVILAQLTCYQGRLPQGAPSSPIITNLICQAMDIYLLRVAKKYKLDYTRYADDLTFSTKDRHFVEKQEKFLAEAIAAIKRAGFSINEKKTRLQFRDSRQEVTGLIVNKKLNVNHAYVRKTRAMAHQLYSTGEYLIDGVPGTIRQLEGRFSFIDHLDHYNNILDPQEIKHDAFHLNGRERQYQAFIFYKYLFANDKPLIVTEGKTDIRYIKAALKSLYARYPRLVQIGADGNFTYNFSFFRRTKRWKYFFGISLDGADAMKFLYRYHVGKNHVPEYLKYFRQLSGCEQHNPVILLYDNELEHKKPLKQFLAEEVHATEEQKTELKSHLQLHLIPDSKLYVVTNPLVDSKDECEIEDLFAEEVQNINLDGKTFCRKDSFDNSKFFGKDIFSKYILENYKQIDFSRFIPLLNAIDSIIAQTQPTEK

SEQ ID NO: 1248 - protein, 566 aa, unidentified
  source 1..566: note = Related to NZ_JACOEA010000001.1; note = Intestinimonas sp.
MKKFCDIQSRNELADYLSVPRNKLTHILYVKKPDSYYTTFEIPKRNGETRTICAPSGDLKTLQEKLSNMLWLYQKSIWEEKGIKPNISHAFEKGKSIITNAKIHRNKRFVLNLDLENFFDRFHFGRVQGYFEKNNNFKLPHDVAVVLAQLTCYQGRLPQGAPSSPIITNLICQPLDTYLLKIAKKYKLDYTRYADDLTFSTNDRHFVENQENFLAEANAAIKRASFSINEKKTRLQFKDSRQEVTGLIVNKKLNVNHAYVRKTRAMAHQLYSTGEYLIDGEPGTIKQLEGRFSFIDQLDRYNNVLDPQEIKHDAFHLNGRERQYQAFIFYKYLFAHNAPVIVTEGKTDIRYIKAALKSLYAKYPRLIQKDAEGNFIYKFSFFRRTKRWKYLFGISLDGADAMKILYRYHVGNGKKIPAYLGYFRQLSGGEQHKPVILLYDNEPNSDRPLKKFLGEDVHPTADQKAALKENLHMRLIPDSKLFVVTPPLVGDKEECEIEDLFADELLKLSLEGKTFCRKDKFDNSKYFEKEIFSQYVYENYQKIDFSGFIPLLDVIDSIIAQTESAE

SEQ ID NO: 1249 - protein, 567 aa, unidentified
  source 1..567: note = Related to QUKQ01000046.1; note = Ruminococcaceae bacterium TF06-43
MKKFCDIQSRNELADYLGIPRSKLTHILYVKKPDSYYTTFEIPKRNGDTRAICAPSGDLKVLQKKLSNILCLFQRNIWDENGIKPNISHGFEKEKSIITNAKIHRNKRYVLNLDLASFFDSFHFGRIQGYFEKNNHFKLPHDVAVILAQLTCYQGRLPQGAPSSPIITNLICQSLDAHLLKAAKKYKLDYTRYADDLTFSTNDRHFVENQKKFLAEAIVAITKAGFSINEKKTRLQFRDSRQEVTGLIVNKKLNVNHSYVRKTRAMAHQLYSTGEYLIDGVPGSIKQLEGRFSFIDQLDHYNNILDPQEIKHDAFNLNGREKQYQAFIFYKYLFANDTPVIVTEGKTDIRYIKAALKNLYNKYPRLIQKDAEGKFVYTFSFFRRTKRWKYFFGISLDGADAMRILYRYHIGSNKRIPPYLSYFQKLSDHEQHNPVILLYDNESKSERPLKKFLGEDVHATVDQKAELKAKLHMRLITSSKLFVVTPPLIGDKEECEIEDLFSDELLSLNLEGKTFCRKDKFDSNKYFGKEIFSQYVYENYRTIDFSRFIPLLDVIDMIIAQAESHKQ

SEQ ID NO: 1250 - protein, 563 aa, unidentified
  source 1..563: note = Related to NZ_CP035283.1; note = Caproiciproducens sp.
MEKFCDIQTRNELADFLKIPRSKLTHLLYIEKPENDYKTFEIPKKSGGTREICAPSGSLKSIQSKLAEALWEYQKSIWADRKIHPNISHAFEKGKSIITNARIHRNKRFILNLDLENFFNTFHFGRVQGFFEKNYNFMLPHKAAVAIAQIACYKGVLPQGAPSSPIITNLICQILDTRLLKIAKKYKLDYTRYADDLTFSTNNRFFMDNHEKFLTEVALEIRKAGFTINHKKTRLIFRDSKQEVTGLIVNKKISVDRNYYKETKAMAHRLYTQGEFEINKQSATMQQLEGRFSFIDQLVHYNNKLDGGTHNPHTLNGREKEYQAFLYYKYFFANDRPLIVTEGKTDICYLKSALKNLHAKYPNLIEKDSKGKYVFKISFFKRSERWRYFFGIGLDGADTMKNLYHFFTSKNDAPDYLTRFRKLCKCSPRKPVILLFDNETESSRPLKKFLCENKINDEDKKQLEQNLHIRLIPESKLFLATTPLVSDKLECEIEDLFPDEVLKHKVDGRTFTRKDNYDKKKYYGKEIFSTYIAANYEKIDFSRFEELLNTLSMIVKSEEAPQD

SEQ ID NO: 1251 - protein, 571 aa, unidentified
  source 1..571: note = Related to JAGAWV010000307.1; note = Acidaminococcaceae bacterium
MKNINDLKTRSELADYLGISRRRLTYILFIKTPDSYYQTFDIPKASGGVRNICAPTGILKRLQTILAKRLWLKYVSDKVRNKIENTNISHAFEKRKSIITNARIHRNKRYVINLDLENFFDSFHFGRVLGYFEKNKNFMLPHEVAVALTQLVCYQKHLPQGAPTSPIITNLICQILDFRLLKIAKKYKLNFTRYADDLTFSTNDKKFLDLKEHFFKEITTDILRAGFSVNNRKTRIEFKDSRQEVTGLTVNKKVSIKREYVQNTRAMAHHLYTQGHFSIDGQDGDISQLEGRFSFINQLDVYNNRLLLQFLKIDKNNDLKLNKREKEYQKFLFYKYFYANEKPLIVTEGKTDVLYLKAALQNLYARYPELIEKNDKGHFSYKIAFFNRSDKWERLFKFVKDGADSIKNLYFCFSEKNNSSFPNYFKYFLKLSNEKQKNSVILLFDNEIDSENKPLKKFLGVIKASNDAKDTLRTSYTLQLIPDGKLFLVTNPLAVDKKESEIEDLFPVEVLNIKIEGKVFCRDDKFDKTKYYGKHIFSKYVYKNYKMINFTGFIPLLDVIRSITVNLSDQK

SEQ ID NO: 1252 - protein, 584 aa, unidentified
  source 1..584: note = Related to JAHAER010000020.1; note = Firmicutes bacterium
MKEFSDVNSREELALALRVPLSKLTYILYVATVDSCYRTFEIPKKNGGTRVINAPQRDLMDIQKNLAKLLYEHRSNIKNFNNVKCNIAHAFEKEKGIITNGSVHRNKRIVLNYDLENFFDSFHFGRVRGYFWKNRYFRMNLDVATIIAQLTCYQGKLPQGAPTSPIITNMICEIFDFKLLRLAKKYKLDYTRYADDLTFSTNNAEFENRIDEFTEELSKEIDNAGFKINRDKTRLQLRKSRQTVTGLVVNEKVSVDHRYYKATRAMAHNLYREGGFDICGEEGSLEQLEGRFSFVNQIDKYNNKLEMSGRIGRSGRASGRAGAGAGGNEKKKHDFRHLNGREREYRKFLFYKYFVAGERPMIVTEGKTDILYIKAALKSFYKEYPELIEKRKDGTFDFKIDFLRRSEKLKYFFGLTADGADSMKNLYNYFSDMNNNSFPNYAEYFGEKMKCAPLHPTILIFDNELEGKDKPLKKFTDHIKMQDRKESLKRDLAMHISGSLFIATLKLPEGKKEAEAEDMFAPSVLEHEIRGKRFSRSDEYDKSKFYGKNDFAQYVFFNYKEIDFSGFRPMLDSILMIKRKYRYM

SEQ ID NO: 1253 - protein, 569 aa, unidentified
  source 1..569: note = Related to JAAYIN010000072.1; note = Clostridiales bacterium
MGNFKDIATRNELADFLGFPRRKLSYILYVKSTDAYYQSFTIPKKSGGERCINAPTGDLKDIQKKLAMALWKHQLDIRTSRNIRTNISHAFEKGKGIISNAQIHRNKRYVLNLDLKNFFSSFHFGRVKGYFEKNRDFELPNQVATVIAQLTCFQGCLPQGAPTSPIITNMICQILDMKLLRIAKRYKLDYSRYADDLTFSTNNRAFLGMQSEFYEDVAKEVTSAGFTINEKKTRLQYKDSKQVVTGLIVNKKLNVDRIYARKTKAMAHTLYTNGEYTIDGKIGTLKQLEGRFAFINQLDKYNNKRDGKGEHKGWNLNSREKQYQKFLFYKYFFSNSKPIIVTEGKTDVVYMKAALRKLHAEYPCLIERKPDGTFEYHVSFLKRSKRLSYFLHISQDGADTMKNLFNFFSPTSDNKRVYPDYLTYFMKAGNCSAQNPVILVFDNELSSKNKPIKKFSDHVKLDDVRRETLKRILHLKLIDKGNLYLLTNPLVDGKDECEIEDLFDENTLSQVIDGRTFSRDIKKGDTQHYGKETFSMFVSRNHMNIDFSRFREMLNILNEIIGLYHKPEV

SEQ ID NO: 1254 - protein, 572 aa, unidentified
  source 1..572: note = Related to JAJCJJ010000005.1; note = bacterium 210917-DFI.7.65
MSFFQHIETRNELADFLGIPRKKLTHLLYVQRIENCYHMFEVPKRAGGTRVICAPTGDLKSLQRSLARRLQEHCLRCREERGLSVNIAHAFQPRRGIITNAYIHRNKRYVFNTDLEDFFGSIHFGRIRGYFQKNEYFQMPAEVATILAQLCCYQGKLPQGAPTSPVLSNLICEILDFRILKIAKHYKLDYTRYADDLTFSTNDKTFCSRYDAFYQQLQKEIRRAGFAVNEKKTRLEYRDARQTVTGLVVNRKLSVDRCYCRETRAMAHTLYKTGEYRIQGAAGTMAQLEGRFAFINQLDRYENKHSLSKPRDFKTLNGRERQYQKFLFYRYFYANTHPLIVTEGKTDILYLKAALMNLHRRYPELVVRQPDGTFAFQVRFLHRSKRLRYFFDLSLDGADAMKNLYELYTGKGAHWKTAYYPYFLALSGKKPQWPVILVYDNEINDKTRPISKLLHSIGMGEEGKERLKKSLKEQLVAGGNLYLVTHPLAEGKSVSEIEDLFAERTRAVVIDGRGLSLRDDYDPQVSYGKDAFSKYVLSHYQTIDFVRFIPLLDRIRDAVAETQAAEQEPEGV

SEQ ID NO: 1255 - protein, 620 aa, unidentified
  source 1..620: note = Related to SVGI01000005.1; note = Clostridiales bacterium
MTAFKNIKSRSDLADYLNIPPSKITYILFKRGVDSYYTEFEIPKKSGDPRRICAPTGDLKGVQRQLADALWEHQKSIYEELWIKPNISHAFEEGKSIITNAKIHRNKRVVVNVDLKDFFDSIHIGRVCGFFEKNKYFNLPHEVAVTIAQLACYQGKLLQGAPTSPIITNLICQVLDMHLLSLAKRYKLYYTRYADDMTFSTNDRSILERWDSFYEELDKKVKKAGFSINEKKTRITYRDSKQIVTGLVVNKKISVDHSYCRKVRAMAHSLYTNGSYQADGVEGTARQLEGRFAFIDQIEKYNNTCDSTGKHDAFVLNGREKQYQQFLFYRYFFDVDKPLIVTEGKTDVRYIKAALRNLYTEYPELIEKDAKGKFIYKVNLFKRSKRFKYLFVLALDGADSLTYLYNHFVSTGKDNRINYLDYFLKITQRVPQHPVIFVYDNEITNSKKPLYKFANHAKLDNNQRALLGTELFLRLTPRGNLFLLTNPLVEGKNESEIEHMFTEETRGVELGGKKLSLESKFDNAKFFGKDHFSNYVLENYAKIDFSGFRPFLNTIRTVLQEYERSIAKEQTTPMRTKILIGVCFSCQPLPHSKQRKDSAENCDEKTKNAEIAGFLRRNLL

SEQ ID NO: 1256 - protein, 565 aa, unidentified
  source 1..565: note = Related to BK026599.1; note = Siphoviridae sp.
MTFEYVCTRNDLADLLEIPHGKLTHVLYVAKVDSFYKIFEIPKKSGGTRKICAPTGDLKQIQEKLYSILLHHQQFLRKQNNIRTNISHAFEKGKSIITNGEVHRNKRIVVNIDLQDFFDSFHFGRVCGFFEKNRDFALPHELAIVMAQLTCYQGKLPQGAPTSPIITNYICQTFDMRIIRIAKKYHLDYTRYADDLSFSTNDKKFIEQWEPFYNELTHEVERAGFKVNTKKTSVQYRDSRQTVTGLVINKKLSVDHRYYKQVRAMADSLYKTGCFDNNGVEGTVSQLEGKFAFIDQLDKYNNIKDVSQQHSVFCLNGREKQYQKFLFYRYFFAHEKPVIVTEGKTDIKYIKAALKNLYTEYPELIEKTPEGHFEFKVSFLKRSKRFKYFFHMSQDGADAMKNLYNFFSDKNPKYTNYFKVFSGCSDKNLCNPVILIFDNELSNKCKPLHSFVSHIGLSSSDKDRLKEDLCMKIIDEGNLFLVTNQLVDGKAECEIEDLFDDTTRNHVIAGKTFSSNDKADKEKHYGKEIFANFIQSNYKSINFDNFRPMLNNIVKVIAEFAGTEG

SEQ ID NO: 1257 - protein, 520 aa, unidentified
  source 1..520: note = Related to NZ_NFJU01000007.1; note = Proposed Anaeromassilibacillus sp.
MLKKDGNIRTIKAPSSELKSIQKKLASKLESCQRNIWTGIGVNSNIAHGFKKGKSIVTNAQIHRNKKYILNIDLQDFFDSFHFGRVRGFFEKNRNFALPIEVATVVAQLTCFEGCLPQGAPTSPIITNLICQILDNRLLKLAKRYKLDYTRYADDLTFSTNDKAFVERKDEFLCAIQKEIERAGFKINEKKTRLVYKDSQQKVTGLVVNQKVNVAQDYYRKTKAMAHSLYKKGEFTIDGQAGTIEQLEGRFSFINQLNCYNNQHDGEKHEFGLLSGREREFKRFLFYKFFYGNDIPILVTEGKTDVRYLKAALKSLYNEYPNLITKSKDGKFRFKFSFMKRTKRLRYFLGVQADGADTIQNIYKYFVGGKGRESKNYPNYFAYFLRMGTQPKAPVILLFDNELESKRPLRKFLNEQKFSETQIDQLRNELCLKVFNSGKLYLLTNPLVLEKTECEIEDLFSEETLNLLIGGKNLCLKDKYDTEKYYGKEIFSQYVLNHFEQIDFSGFRPLLDKLSLIVRQ

SEQ ID NO: 1258 - protein, 561 aa, unidentified
  source 1..561: note = Related to BQOK01000001.1; note = Oscillospiraceae bacterium
MAQFCDIASRNELADFLGIPRQRMTYVLYVKKVESYYTSFEIPKKNGETRTIKAPTGELKFIQKKLVSKLVQYQREIWRSKGMKPNISHGFEKGKSIVTNAKIHKNKRYLLNIDLQDFFDSFHFGRVRGFFEKNRDFALPLEVATVLAQLTCFEGCLPQGAPTSPILTNLICRILDNRLLKIAKRYKLDYTRYADDLTFSTNDKTFAGLKDEFLCTIQKEIERAGFKINEKKTRLACKNSQQKVTGLIVNQKVNVAQDYYRKTKSMAHSLYTKGEFTIDGQTGTLEQLEGRFSFINQLDWYNNKLDNETHEFGVLAGREREFKRFLFYKYFYGNSTPIIVTEGKTDVRYLKSALKSLSKEYPNLITKSKDGKFEFRVTFLKRTKRLQYFLGIRLDGADTIQNIYRYFMGGKGRESKRYPNYFSYFLRMGAKPKKPVILLFDNELESKRPLRKFLTEQKLSEAQIEDLRSKLYLKILDNGKLYLLTNPLISGEKECEIEYLFSEETRNLKIEGKSLCLKDKFDTEKYYGKEIFSQYVSANFEQIDFSGFRPLLDKLDLIVQQ

SEQ ID NO: 1259 - protein, 561 aa, unidentified
  source 1..561: note = Related to DWWX01000035.1; note = Candidatus Gemmiger stercorigallinarum
MAKFCDITSRNDLADFLEIPRKVLTYVLYVKKTENFYASFEIPKKNGGTRTIIAPSGELKSIQKKLARELERYQQDIWASKGIKPNLSHGFQKKKSIVTNARIHRNKKYVLNIDLQDFFDSFHFGRVRGFFHKNKDFALPIEVATVLAQLTCFEGRLPQGAPTSPVVTNLLCQILDNRLLGIAKKYKLDYTRYADDLTFSTNDKMFVEHKDEFLRTIQKEIEHAGFKVNENKTRLAYKDSQQKVTGLVVNEKVNVAQEYYRRTKSMAHSLYKTGEFTIDGEVGTLQQLEGRFSFINQLTWHNNRQDGKEHSFGTLSGREREFKRFLFYKFFYGNDIPIIVTEGKTDVRYLKAALKALHKDYPDLIEKNKDGKFEFKIVFFKRTERLRYFLGIQLDGADAMQSVYKYFVGGKGRESKNYPNYFAYFQRMGAQPKKSTILLFDNETKSKRPLGKLLTEQKFTEEQIRKLKQELHLKVLDKGNLYLLTNPLVPGEEECEIEYLFSEETRSTLIDGKSLCLKDKYDTEKYYGKEIFSQHITDHFEQIDFSGFRPLLDALTSIVRQ

SEQ ID NO: 1260 - protein, 560 aa, unidentified
  source 1..560: note = Related to NZ_JHVL01000054.1; note = Clostridiisalibacter paucivorans
MNRFYNIKNRRELASFLGIPLKKLTYILYKKGVDYYYETFEVPKRNSGARIINAPSGDLKTLQKKLSKILYEHQIIHIQNHKIKNKISHGFEKEKGIITNAEIHRNKRFVMNVDIKDFFESFHFGRVKGFFNKSKAFNMSEEVAIIIAQITCFNGKLPQGAPTSPIITNLICNILDMRILSICKEYKLDYSRYADDLTFSTNDKHFIKNKNGFYDNLKREIQGFGLLINEKKTRIEYKDSRQVVTGLTVNKKISVKREYYKNTRAMADKLYRTGEFTIGEKAGTIRQLEGIFSFINQIDYFNNKKDNNKKHNVNNLNSREREYQKFLFYRYFLSNSKPLIVTEGKTDVMYIKAALKKHYKEYPNLIEKHRDEFEFKISFLNRTKRLRFLMGIQIDGADTFLNIYNFYTGKNNFNNYFKYFNDKYKITPSNPVILIFDNEQKEKNKPLYKFKKAVKMNTIDLSSEIIANLFLLTVPLCNNKEECEIEDLFDEKALNHKIGGKKFSRKNENNKKYYGKADFAKYIYKNYKDIDFSNFKLMLDELNLVVNNHNNNSSLSTVGV

SEQ ID NO: 1261 - protein, 562 aa, unidentified
  source 1..562: note = Related to JAFVVV010000369.1; note = Clostridia bacterium
MKNLSEVSTRNELADFLGIPIKKLTHILYVKKPDTFYKQFEIPKKSGEPRIINAPTGALKSIQKRLLFAIEKTICDGSSNKSNISHAFEKNKSIITNAKIHRNKKIVINFDLNDFFGSFHFGRVCGFFQKNRCFNLPYEVAVAITQLVCFNGTLPQGAPTSPIITNLISQIMDVNLLKLAKKYKLDFTRYADDLTFSTNDKKFLEKYDEFYDQLSRTISFLGFEINETKTRLQFCDSHQTVTGLTVNKKIQVPRNYYKKTRAMAHSLYKSGSYTIDGEEGTINQLEGRFSFIDQLTKHNNKIDGQKHRLGTFCARETDYQKFLFYKYFFAAEKPLLVTEGQTDITYLKAALKNLYLEYPSLISKKEDGTFEFKISFLNRTDRLSYFLGFSKDGADAMGCLYNFFIKSKSKEHPNYYEYFLKTSGSKAHYPAIFVFDNELESKGKPLKKFFDNYVKDEETKKEIKTQLYVHLIKSANIYLVTNPILESSSKEAEIEHLFSKEVLETKIDGKPLSLSGDYDKSKYYGKVAFSKYIMNNYKSIDFSNFRIILDNIDKILKEYNEH

SEQ ID NO: 1262 - protein, 566 aa, unidentified
  source 1..566: note = Related to JAFYAQ010000001.1; note = Oscillospiraceae bacterium
MISFSEIKSRNDFADALQIPRSVLTHVLYIAKPESFYESFTIPKKNGEDRIIMAPKGTLKSIQTKLSKQLVEYRASISQKGQEKSNISHGFEREKSIITNAQIHRNKRYVINYDLKDFFDSFHFGRVVGFFEKNKHFLLPYEVAVIIAQLTCYNGRLPQGAPTSPVITNLICEILDYRVLKIAKRYKLDYTRYADDLTFSTNYSRFLEVFDSFAKELLQEISNSGFTINQSKTRLLYRDSRQEVTGLVVNKKIGVNREYVKSTRAMAQALYSTGEFTINGIPGTIKQLEGRFGFIDQLDHYNNVIDDAKHDAYSLNGREKQFQEFLFFKTFFFNEYPLVITEGKTDIRYLKAALKSLHQKYPELICKEDDGTFRFKISFFRRSKRWKYFFGISKDGADAMKLLYRFFTGQKGVKNYYRLFAEKYKAVQRNPVIMLFDNEMESKRPLNKFISEEVKIPSSEQQLFKEQLYYHLIPGSKTYLMTHPLPPGKTEAEIEDLFPTEVLGVKLDGKSFSTKDKFDTSKFYGKDIFSSYVYEHWKSIDFSGFIPLLDKINMLVQNEKKPGLNT

SEQ ID NO: 1263 - protein, 564 aa, unidentified
  source 1..564: note = Related to ABABDZ010000001.1; note = Clostridium perfringens
MIKFTNIQDKNQLANVLNIKPKYLNYILYVKKVDNYYTEFEIPKKNGEMRKIHAPTGILKSIQKNLSILLSEYQSYPYSKNYKGNKISHAFEKNKSIITNAKIHRNKKYILNIDLECFFDSFHFGRVKGFFEKNNFFKLPSEIALILAQMCCYKGCLPQGAPTSPIITNLICKILDIRLLKISKSFKLDYTRYADDLTFSTNDNAFLENKTKFMKLLTKEIEHAGFKLNTTKTRLQYNTSRQEVTGLVVNKKINVKKSYYKTTRAMANTLYRTGQFTIDNNSGTINQLEGRFSFINQIDKYNNSLIKKKDFFNLNSREKEYQKFLFYKYFFSNEKPLIVTEGKTDIVYIKSALKNLYTEYPNLILKKDDGSFEFKISFLKRTKRLNYFFNFAQDGADSMKNLYNFFDKNKSNNSYPHYSNYFSKISNRKPNFPIIFIFDNELNTKNKPLHKFINYINLCESKSLKFQEYYKVNLVDNLYLLTNQLIQHKSECEIEDLFDNQTLTHIISGKTFNRNLKKLDGTNHYSKEIFSKYISENYKTINFDNFKPLLNNLNEILKDYISDI

SEQ ID NO: 1264 - protein, 572 aa, unidentified
  source 1..572: note = Related to AACDFA010000001.1; note = Campylobacter lari
MLFKKEDCILSAELQKFANFFNIKANIISYVLYVKRTENCYTAFEILKKYKKETRIIHAPNKTLKNIQRNIAKKLHELQQDIDSKNNIKTNISHGFEKNKNIATNAMIHKNKRYILNIDLENFFNSFHFGRVMGYFNKNRYFNFDKKMSIIIAQLCCLNGALPQGAPTSPIISNLICRIFDYRILKITKKYKLNYTRYADDLTFSTNDNFFLHHYDNFLKDISSEIQKSGFKINKNKTRLQYKNSKQVVTGLVVNKFINTEKMYYKTTRAMAYNLYKSGSFTINDKEGELNQLQGRFNFILNIKSYSPVIQKDTKNNILHSKEKEYQKFLFYIFFYINTKPLLITEGKTDILYIKAALKNMYKNYPRFIIKSDNKFDYKIAFFKRSSKNIEEYLNIKKDGGHELVKIIIYYFNKKYFDFFYNLNKNITPNNPVIILVDNEKAKDKPLETLKKNIPQAYRNDLNFKEKPWFRIGDTNLYILTYRSNPNLKDIEVEDLLEESFIKELKIQNRVFDKTANKDSELYFSKNTLANYVYKNYLKINFNNFKFIFDDIQDIINDHNNHYPINQTLHTL

SEQ ID NO: 1265 - protein, 548 aa, unidentified
  source 1..548: note = Related to NZ_FYBR01000008.1; note = Listeria sp.
MSLGKIKNRNELARLLEVPTKFLTYILYIKKTDNLYSRINILKKNGDERIIYAPEKELKSIQKKLASILYQERKAYFEGRGITPNISHGFEQKKSIISNARIHCNKHVIFNLDLEDFFGSFHFGRVKGYFEKNNQFKLDSQIAILIAQIACYKGFLPQGAPTSPIITNMICSILDYRLLKLAKQFKLDYTRYADDLTFSTNDKKFLDNKDVFYKKINREIEKAGFKINCKKTRLQFKDSHQEVTGLTVNKKVNVKRFYYRQTRAMAHRLYKTGEFEIDGKRGTVDQLEGRFSFMYEVASYGSTKKNYCYKEYKKFIFYKYLYMNDKPVVITEGKTDIIYLKAALKNLYEDYPSLISKQTDGTFKFKITFLNRKSERLKKLLNLQKDGADGIRTFINEHFLCKNPTAKYFKNIDGPLSKNAVICIFDNEIEDQDKPLRHVWNGFKKDSKRKEALKNNQNTHWVDNVYILTNPLVSGKKICEIEDLFDEQTLNQQIMGKKFDRSEENHKHFFSMFINKNYNDIDFTQFKPMLDNLDKIIYDYGNSMDKCQ

SEQ ID NO: 1266 - protein, 568 aa, unidentified
  source 1..568: note = Related to JACVVC010000001.1; note = Enterococcus sp.
MGKLNEINNRSDFANLINVPIQKLTFILYKKKVENLYSSFSIPKKSGGYRRIYSPHEDLLDIQKKIARLLATQKNVFQEENRIKLNISHGFEKNKSIITNAKIHRNKRFVFNVDLENFFESFHFGRVKGYFEKNKNFQLPTEVAVILAQLCCYQGVLPQGAPTSPIITNLICNILDLRLLKLAKKYRLDYTRYADDLTFSTNDRHFLDLKSAFYYELNGEIKKAGFKLNEKKSNFQYKDSRQMVTGLVVNKMINVDRNFYKETRAMAHRLYQTGSFTIDNEEADIKQLEGRFAFINQIQWYNNRIDNEKHNFRSLNTKEKQYQALLFYKYFFANNKPLIITEGKTDIKYLKSALKKYYNEYPELVTKDEKNNYDFKISFLRRSKRLRYFFDLSLDGADTLTDFYKRFMSNSYPEKGAINYLMHFKKMSENKPKNPVIWIFDNEIANKDKPICKFINGVKLTEYKKECLKSSQQTLLHDNLFLLTNPLSNGAEECEIEDLFSEDVLKKEINGKTFCRDKKVDPEKYYGKEIFSNFIVNEYERIDFENFKPMLDNLTLIVRNYRSDSVIP

SEQ ID NO: 1267 - protein, 560 aa, unidentified
  source 1..560: note = Related to QPVP01000009.1; note = Enterococcus faecium
MIKLKNVKNRKEFAEFIGVPLQKLTYVLYIAKIDNLYTSFQIPKRSGGVRTINAPQKDLLDMQKKLAKLLATHKSIVQEENHIKLNISHGFEKNRSIITNAKIHRNKRFVFNVDIENFFDSFHFGRVKGYFEKNNNFELPSEVATIIAQLCCYKGVLPQGAPTSPIITNLICNILDIRLLKLGKKHNLDYSRYADDLTFSTNDRLFLISESLFYDELTKEIESAGFKLNEQKSRLQFKDSRQTVTGLVVNEKINVDRRYYKETRAMANKLYKTGIFEINNQSATIKQLEGRLTFINNIQRYNNSIDGKKHDPWSLNSKEKQYRAFLFYKYFFANEKPLIVTEGKTDVKYLKAALKKYWELYPNLISKDSKGDFSFKVSFLNRTKRLSYFFGINRDGADALKNLYNFFTSSSQNNPPNYLYYFKKISNRNPANPVIMIFDNELVNKKKPLSKFANHCKLNEDSRNNLQTQLYIRLQDNLFLMTNPLVEGKEECEIEDLFGEDVLNTKISGKIFSREKKADPKEHYGKEIFSNFITNEYEKIDFENFKPMLDNLSRIVENYK

SEQ ID NO: 1268 - protein, 560 aa, unidentified
  source 1..560: note = Related to NZ_CP042833.1; note = Enterococcus faecium
MENLKKAKNRKDFAELINVPLHKLTYVLYKAKVENLYTSFQIPKRSGGVRTIHAPHQDLRDIQKKLADLLVKYKNIIQATNNMKLNISHGFEKNKSIITNARIHRNKRFVFNVDLENFFESFHFGRVKGFFEKNEHFMLPSEIAVIIAQICCYNRKLPQGAPTSPVITNLICNILDIRILKLAKKYKLDYSRYADDLSFSTNDKNFLNSKDDFYNELVKEIIKAGFRVNDKKSRLLFKDSRQVVTGLVVNEKINVNRMYYKETRAMVNSLYTTGSFEINSKIANIKQLEGRLSFINHIERYNNNIDKNNHDFRKLSSKEKQYRSFIFYKYFFANETPVVITEGKTDIKYLKAALKKHYKEYPALVLKESDGTFSYKVTFLRRTKRLQYLFGLFRDGAPALKNLYNFFSPISNKDFPNYLDYFKKISNSNPKNPVIMIFDNELANKTKPLANFANHCKLDEGTRSILKEKYQVKLQDNLFLMTNPLVENKAECEIEDLFHDAVLKTIIGGKIFSREKNADPNKYYGKEIFSNYIMRNYSNIDFSNFKPMLENLNEIVGRYK

SEQ ID NO: 1269 - protein, 562 aa, unidentified
  source 1..562: note = Related to NZ_MCRG01000029.1; note = Enterococcus mundtii
MVKINEVTNRDEIAYALGIPKKKLTYILYVKRTENLYYSFEIPKKNGGFRRINAPDKDLRDIQKSLADILVKYQKAIWDRKNIKPYISHGYEKDKGIMTNAEVHKNKRFVFNVDLKDFFDCFHFGRVRGFFEKNKDFCLPIEVATIIAQLTCYNGVLPQGAPTSPVITNLICNIFDMRVMKVAKKYKLNYTRYVDDLTFSTNDKNFFLNKELFFENLIIEVENAGFKINDKKTRLQFKDSRQTVTGLVVNKKINVDRRFYKDTRAMLDSLFRNGSFEIDGYLGDIKQLEGRLSFINQIEWHNNLKDNSKHNVYNLSSKEKQYQAFLFYKYFFSNKKPILVTEGKTDIKYIKAALKKYYLDYPDLIIKNEKQEFEFKITFLKRTKRLQYFFNLYKDGADAMLHIYNYFYDVNNDKFTNYVNFFTARCKRKPANPTIFIFDNEINVKGKPLKKFVDNVSLNALKVSKLLEDNYVDIAGSAYILVNPIIDRSKNESEIEDLFTPELLSHKINGKTFCRDKSFNSNKHYSKEIFANHVVKNYRSIDFTNFKPMLDNLDKIIKNYNK

SEQ ID NO: 1270 - protein, 560 aa, unidentified
  source 1..560: note = Related to JAKNTG010000011.1; note = Enterococcus hirae
MEINEIKNRTELAWKLGIPKKKLTYVLYIKGTDQLYTTFEIPKKSGGVRKIHAPEKDLKEIQKNLANILVDYQSEMWKKRKIKPNISHGFEKNKGIMTNAEVHKNKRFVFNIDLENFFESFHFGRVRGFFEKNKYFELPLEVATIIAQLTCYKGTLPQGSPCSPIITNLICNIFDMRIMKLAKRYRLNYSRYVDDLTFSTNDKRFIDDKEYFFEELSGEVEKAGFKINENKTNLRYKDSKQIVTGLVVNKKINVDRCYYKKTRAMLNSLYKTDTFEIEGSTGTVKQIEGRLSFINQIDWHNNQIDSNKHGFRNLSAREKQYQAFLFYKYFFINDKPIVITEGKTDIKYIQAALKKYYLNYPDLIVKNDEHKFEYKIMFLKRTKRLNYFFGLNQDGADAMQNLYHYFYDYNNNITANYMKYFKDISKKLPRNPTIFLFDNELAGGEKPVRKFVKHISLDKAQYTKLEKEEYARLHESAYLLVNPLVDSKKECEIEDLFLPETLEHKINNKTFCRDKSFKSDVHYGKEIFSNYIMKNYKTINFKNFQPMLNNLSGIISSYKK

SEQ ID NO: 1271 - protein, 418 aa, unidentified
  source 1..418: note = Related to NZ_CP063383.1; note = Listeria monocytogenes
MKTLKNIEDRKDLADYLNIPIKRLTYILYIKRTENLYYSFEIPKKSGGVRNIDAPKSELKALQKKLAASLTKYQEILQKSKRKAPNISHGFEKGKSIISNAKIHRNKKIVYNLDLENFFESFHFGRVRGFFEKNKDFELSTEVATIIAQLSCFNGALPQGAPSSPIITNFICRIMDMRILKLAKNYKLDYTRYADDLTFSTNDKKFIDQIDYFLHKLTKEIEKAGFKLNKNKTNLNFKDSRQLVTGLVVNKKINVDRRYYKETRAMAHRLYKTGEFQIDDKNGTLNQLEGRFSFINQVQRYNNVIDSSKHDFNNLNAFEKQYQAFLFYKYFYANNKPHIVTEGKTDINYIKAALKKHHLEFPNLIVKKEDGEFDFRVAFLKRTNRLAYFLNIKKDGADTMKNICKYFLILKIMRSPII

SEQ ID NO: 1272 - protein, 566 aa, unidentified
  source 1..566: note = Related to RKEI01000021.1; note = Clostridiales bacterium
MRKFCDAETRNEFADFLKISRSQLSYVLFVKHPHSYYKTFEIPKKSGGTRVINAPYGELKFIQEQLNKRLAEYQKYIWEVKGVRPAISHGFEKGKSIITNAKIHRNKRYVVNLDIENFFGTFHFGRIVGFFEKNRYFRLPHEVAITIAQITCYNGTLPQGAPSSPIITNYICQVLDRRLLLLAREYRLDYTRYADDITFSTNDIHFTDKYRAFLDAVDTEIQRAGFRINSKKTRLLFESSRQEVTGLTVNKKINSNKQFRKETRAMAHHMYANGEFSIAGDSGTLEQLEGRFSFIDQIEHYNNSLSGNKKNYHNLSGCEREYQKFLFYKYFFANQRPLILTEGKTDVRYLKAALRNLYNEYPTLIKKNEDGSFQFEVSFFKRSRRWEYFFGLSSDGADTLGNICQCYFSKRNTGLPQVFDYMKNISGRQPQHPVIFLLDNEMKSDKPLKKFLQKQRITDEKRRQLVARLYIQIMDGTNLFLVTNPLANGDEESAIEILFPEEVLLHEIDGKKFSLENDYDTATYYGKELFSKYIEANYESLDFSGFRPLLNALAAAVETYRLSCNT

SEQ ID NO: 1273 - protein, 380 aa, unidentified
  source 1..380: note = Related to JAFXUW010000045.1; note = Oscillospiraceae bacterium
MNPFSFVRSRADVADAIGIQLKSLTYILFVKRIENCYSTFLIPKKSGGNRTICSPCDELKLIQKKLADALWEQQQDIWKKANIHPNLSHGFEKGKSIFSNAKNHVNRRFVLNIDLENFFDTFHFGRVCGFFEKNRYFMLPHEAAVTIAQIACYNGKLPQGSPCSPIITNMICQALDIRLLQVAKKYKLDYTRYADDLTFSTNNRHFLDCYERFYKSLLREIQHMGFSVNETKTRLLYRNSRQTVTGLTVNQKININCDYYKATRAMAHSLYQKNEFQINGSPATINQLEGRFAFIDQIDHFNNRKDTFPHNARNLNRREREYQAFLYYKYFFTNDRVLIFTEGKTDVLYLKAALMALYTEYPNLVQRDEAGKFLFNVSFF

SEQ ID NO: 1274 - protein, 548 aa, unidentified
  source 1..548: note = Related to NZ_LIWN01000009.1; note = Campylobacter mucosalis
MENFNDLKTIKEFAKFIDTPLQKITYIIHRQKIENLYNSFEIPKKNGGIRTIDAPHDDLKQIQIKIKNMLWKHQKKIWEKYNQNKIPNISHGFESGKTFITNATVHKNKRFVLNIDLLDFFYFFHFGRVKGFFEKNKYFKVPSEIAITIARLACYQQRLPQGSPCSPIITNLICNILDIRLLKLGKKYKLDYTRYADDLTFSTNNKIFPKHYDEFLFEITSVIEKAGFKINDKKTRLLYKNSKQEVTGLVVNKKLNVSNDYYKTTRAMANTLYKDGSFTINGADGTINQLEGRFAFIDRLSKHNNKLDTNKHDFWHLSGREKEYQKFLFFKYFLQNTKPLIITEGKTDIVYIKSALKNLYKNYPRLIIKEGNNFKFHISFLNKTKRLSYFLNINIDGGSVMSNIYKNMYNNENSLAKLFKDKYKTEAKNNVILLVDNEQKNENKPLRQLLNSAKINLNQNISSHITHNLYLLTHQLVDNKKECEIENLFTNETLGTKLNNKSLNLKEKDFNKEIHYGKEIFSQYVRKNYKHIDFSNFKPLLDELNNLL

SEQ ID NO: 1275 - protein, 568 aa, unidentified
  source 1..568: note = Related to RBJN01000156.1; note = Campylobacter sp.
MLSLKDVKTRKDFAVFLGIELKLLTYILYHIKVENLYTTFEIPKKNGGTRIINAPDKKILKKIQNRLMNKLYNYQNKIKKDENIKINISHGFEKGKSIITNARIHRNKRFVLNIDLKDFFASFHFGRVVGFFEKNINFRIPKDIAIIIAQLCCYKGSLPQGAPTSPIISNIICNIFDMRILKLAKKYKLDYTRYADDLTFSTNNKDFLNIYNEFLLCISKEVEKAGFCINQKKTRLFYKDSRQEVTGLVVNKKISINHSYCKYTRAMANSLYKNKSFNIDGKDATMNQLEGRFAFINQIDRYNNIININDNKHNDGKKSNDKKLNCREKEYQKFIFYKYFFANQKPLIITEGKTDILYLKSAIKSLYAYFPDLIKKNSNDEFEFKVSFLRRTKRLEYFLNFVKDGADSIQNIYRFFVGREVVNYSEYFKKITKDIAANPVILIFDNEIPNNKKPVRKFINFTNKKEFENILEKKLYANIVDNLFIITNQLVRDKKECEIEDLFNDKTLNHKIDGKVFCRDSAIFDKQKHYSKEIFSKYISKNYKDKDIDFINFKPMLKNIVEIITNYK

SEQ ID NO: 1276 - protein, 502 aa, unidentified
  source 1..502: note = Related to NZ_CP060707.1; note = Campylobacter concisus
MQKSIVFKILDHIRETEKDKYIKTNISHAFEKGKSIITNAKIHRNKKFILNIDLKDFFDSFHFGRVAGYFEKNRELKFSRETSILLAKIFCCDGKLPQGAPSSPIISNLICNIFDMRILKLAKKFKLDYTRYADDLSFSTNDKNFIKFYDDFMTKLNNEVKRAGFNINDKKTRLLYKDSRQEVTGLIVNKKISIKREYVKSTRAMANTLYNNGSFHINEKEANLNQLEGRFNFIDQIDRYNNKIQKTNKNHRMLNSREKEYQKFLFYKYFYANNKPLILTEGKTDILYIKAALKNLYSEYPKLIEKVNNKFNFKISFLERSSRLEYFFGITKDGADSLINIYNYYSGEDVKLNLLNFFEKKETKSCKPAILLYDNELHKINGIEKPLSKFIRKSVKENQDNFKKIIQKNLYNKLLGNLYLATIPIVDTNKQEAEIEDLLNKEVLEHKINNRSFSKDPKNGNEYGKNELSKYVFKNYSNINFQNFKKLLDTLQNIIEEYEIKI

SEQ ID NO: 1277 - protein, 556 aa, unidentified
  source 1..556: note = Related to JAFRHU010000008.1; note = Clostridia bacterium
MISIDQVETRDELADLLHIRHNLLTYVLYIAKPDSYYQTFYIPKKNGESREIQAPRRELKRIQKRLALELSVYQQSMYKTFDINTNIAHAFRKGRSIITNAKIHKNKRYIVNIDLKDFFHSIHFGRVKGFFEKNTFYQLPSTIATIIAQLTCYNGRLPQGAPSSPVITNLICQVLDYHVLRIAKKYRLDYTRYADDMTFSTNMTEFWNERETFLSDLTREIDRNGFRINDAKTRFIKRESKQTVTGLTVNKKINADRIYYKETRAMADRLYKTGSFNINGKPGTISMLEGRFSFIDQITKFNNKKDGKTHDIRTLCARERDYQKFLFYKYFYANERPLIITEGKTDIIYIKSALKKLYDVYPQLIKKNSDGSFCYKISFFHRTPRMKYFFNISMDGADTITKIHLFYSGNNKMPNYYQELSTNQKMKNAVIFLFDNETKSDRPLKKFIGYCKLDDAQKEELQEQCFTRLIDGSELYLATVPLVEGDDESEIEDLFPKAVKDIRIEGKMFYRKNDFNPKIHYGKEVFSKYIYNNYDAIDFSGFIPLLDAIVKAIKTK

SEQ ID NO: 1278 - protein, 554 aa, unidentified
  source 1..554: note = Related to JAFWMS010000015.1; note = Clostridia bacterium
MKLINDISTRYELADLLHIRLRPLAYVLYISKPNSYYRTFYIPKKNGDLREIQAPCGKLKYIQQRLMAELNNYQDYLSKTQGIKTNIAHAFIKKKSIISNASIHKNKRIVINVDLKDFFHTIHFGRIKGFFEKNHFYQLPSDIATMIAQITCYNGHLPQGAPSSPVITNLICQVLDYNILRIAKKHRLDYTRYADDLTFSTNKGDFMDNYQSFMTELSKEIERNGFIINENKTRLVRRESKQTVTGLTVNKKINVDRSFYKLTRAMADCLYKTGSFDIDGEPGTINMLEGRFSFIDQIVHYNNINDGKKHDYRSLCAREREYQKFLFYKYFYANERPLIITEGKTDVLHLKAALRKLYLQYPDLIQKKQDGSFEYKISFFRRTKRMKYFFNISPDGADTMKSIYQFYTGRNNVPNYFQTLSARNMENAVIFLFDNETCSERPLKKFMDWAKLQTAQRTELKSKLYAQLIDDSKLYLATTPLLAEKKETEIEDLYPESVQNIKLSGKEFCRASVFDSERYYGKDIFSKYVYNHYDSIDFSGFVPLLDAIRNAIQS

SEQ ID NO: 1279 - protein, 553 aa, unidentified
  source 1..553: note = Related to JAFZIH010000156.1; note = Clostridia bacterium
MIDIVETRDDLADLLNIRHSLLTYILYVAKPDSYYETFSIPKKNGDLREIEAPQRELKRLQKRLANELTAYQHYMYKQFEIKTNIAHAFIKGRSIITNARIHKNKKYIINIDLKDFFHTIHFGRVKGFFEKNEYYKLPSDVATIIAQLTCYQGRLPQGAPTSPVISNLICQIFDYRVLGIAKKYRLDYTRYADDLTFSTNRSEFWNEYQAFLSELAKEIKKNGFAINDAKTRIVKQESKQTVTGLTVNKKINVDRTFYRNTKAMTNCLYKIGSFTIDGQPGTLNMLEGRYSFIDQITRYNNKIEGKKPESRKLNAREKDYQKFLFYKYFFANERPLIVTEGKTDILYIKAALKKLYRKYPQLVIRNANGNFEYRVSFFRRTSRIRYFFQISQDGADAITTIYQLYAGKDDERNYYKKIANQTMRNAVIFLFDNETQNKKPLKKFIDVAKLNDTQKDNLRTKLYTRLLDNSKLFLATTPLPAGNRKSEIEDLFTEATRNTIIGGKRFSANDQHDTAQFYGKKIFSEFIYDHYDAIDFSGFIPLIDAINNAIQSK

SEQ ID NO: 1280 - protein, 422 aa, unidentified
  source 1..422: note = Related to JAGFBC010000073.1; note = Schleiferilactobacillus harbinensis
MEIQGLQSRRQIAELLGVPLKELTYILYVQKPETFYRLFEIPKKNGGFRKIDAPEGPLIYIQRMLARRLTAWILEKKLNTSVSHAFKKGRSIITNARAHRNRRFVLSVDFRDFFNNIHFGRIEGFFRKNKYFGFSREAAIVIAQLTCYHGSLPQDAPTSRVLSNLICQIMDRRILELASKYRVHYSRYADDLTFSTNWANFGNESKNFLSELTVVIGQSGFQINESKTRLQYKDSRQEVTELIVNDKVGVPKRFVKNTRAMANTLYKTGQFEINGKQGSINQLEGRFTFINQIDWYNHRVIDGVEPTHSSTRARLMKLNSRERQYRQFLVYKYFISNSQPLIVTEGKTDIPYIKSALRSLNQQFPDLVTFNDEGEYSLKISFFEQGIRLDHGRSGNKKNQRLPYFLGLKMDGADELQHIYDY

SEQ ID NO: 1281 - protein, 584 aa, unidentified
  source 1..584: note = Related to JAHADJ010000026.1; note = Dialister sp.
MEKFSDIITRKQLAQFLEVKLSQLTYILYKQGIDSNYHSFSILKRDGGFRRIDAPKNVLLKIQMSLVNRLWEVQESIWENKGYRSKTAHAFIKGRGIITNAKIHRKKRFVINLDLENFFGSIHFGRVKGFFQKNKYFNMLPEIATIIAQLTCYKGCLPQGAPSSPIISNLICQILDLRLRKIAKKYRLDYTRYADDLTFSTNADFISVEKDFFSEIKVEIERAGFHMNDRKTRIQDYHHRQNVTGLVVNEKLNVNSDYCRQTRAMAHNLYTKGTFTIGSIEGTMDQIEGRFSFINQLDWYNNQANNKANKKKNNFLGRVDAFNKREKEYMKFLFYKYFWQNKKPLIITEGKTDVRYLKSALKSLSLEYPELVNVEDDGGVKFLVSFLNKTRRLEYFLGINRDGGDTLTNLYSNYFDIKRNEREAGTNGRNNKSKFGYIEYFKKYSSTERKAPIILFFDNELSIRNKPLNKFSVKLNSEEKNRLKTNGYIQLNSDMKLFVMTMKLAENQTSCEIEDLFDERTLCHEDAKGRSFSREDRPDLNEFYGKDYFSKYVCSNYKQINFEKFKEVFNTIRSIMDECNYQEE

SEQ ID NO: 1282 - protein, 1009 aa, unidentified
  source 1..1009: note = Related to SCPI01000001.1; note = Dialister invisus
MNKFCEIGTRKEFAEFIGVSLKKLTYLLYVKHVDNYYHSFEIPKRSGGSRQIDAPIGDLKKIQYSLADKLWEHQKIVWRENNIYPKVSHAFIKGKSIITNAKVHRNRRFVINLDLEDFFGGFHFGRVRGFFQKNRYFSLPIEIATIISQLTCYKGHLPQGAPTSPIITNFLCQTLDYRLIKLSKKYGLNYTRYADDLTFSTNRNFVDIQGNVLLEIEQEVGKFGFHLNRKKTRIQFNDSRQVVTGLVVNKKINVDRNYYRETRAMADKLYKTGCFSINDSYGDIKQLEGRFSYINQLNWYNNQLDDEKHNLYSLKGREKQYQKFLFYKYFWGNEKPLIITEGKTDIIYLKSALKKLYKQYPNLVNKKDDVFQFNLSFLNRTKRLKYFFGIEKDGADTMAGVYNKFWSSDKNKNTIDYINYFRTYAKQKTNKPIILLFDNEFKKGKPLYKFAESTGLKNRIQGMLKDKKRRLLYIKLREDYNLFLLTMKLPEGKEECEIEDLFDEKTLGHEDKNGKNFSRGSKFDNSKYYGKACFSQYILQNYQNINFDKFQNMLESIQQIVSGYRVAIRDLGVHGEGIGSVDGFTIFVPGALPGETVTAEITLLKKSYALGELLSIEWESPFRVVPKCPVYENCGGCQLSHLTYEGQLDMKYRRVKDVIERIAGESGDLVRPVLPAAHPFAYRNKMAVPAGLVKGKAALGCYRQGSHDIIPVSSCAIQKEENNRLLQFARRFIEKYRISVYNEKTRKGNLRHVMGRVGDDGKVMAVLVTASETLPEEKRWIEEIKKELPEVVSLWHNIQPKPGNTILGAKIRHLWGRETLTASLCGLRFEVSPYSFFQVHKEQAEVLYEKALEYADLKGGETVIDAYCGTGTISLCLAKKAKRVIGIEIVKPAIEDAKKNAKKNHMENTEFYAADAGKLMPQLYRKGLVPDVIVMDPVRAGCSGEVLKAAAGMKPKRIVYVSCNPATFARDAKILKSEGYEIKKVQPVDMFPQTMHVETVALMIRGKSK

SEQ ID NO: 1283 - protein, 566 aa, unidentified
  source 1..566: note = Related to CP016202.1; note = Eubacterium minutum
MEYTKIKNRRDLSLALGVPPSELTYVLYKKGVDQYYSSFLIPKKSGGNREIDASKGALKYIQRRLVGLLWERQNTVWSEETILPNIAHAFQKKKSIMTNANVHKNKRYVVNLDLENFFGSIHFGRVKGFFAKNRYFCVGEEVATVIAQLVCYKGRLLQGAPSSPIITNLICGILDIRLLKLAKKYRLDYTRYADDMTFSTNSVTAEDYLNDFIADLAIEVEHAGFKINERKTRVIYRNSRQEVTGLVVNKRISVKRDYYKLTRAMAANLYKENEFTIGGTRGTITQLEGRFAFINQIDKWNRKMGVLSKELTSREEQYKKFLVYKYFFATERPVIITEGKTDVQYLKAALKANAEKYPDLVSKTDNDKFKFKISFFNRTKRIKHFFGSAEDGADAIKPFVLMYGSSKDAMIEWFKQFTGNNPCKPVILIFDNEDSKEKPLSKMIGTLLNDKVLRNKRKANDMRCELNEHGKMHVKDNLFFATTPKNANKDCEIENLFNKNELDGIRINGRTYHEGFEKSAGWDPAKHFSKNVLSLYVLKDYKNINFEGFIPLLDAINSIVKNDDHY

SEQ ID NO: 1284 - protein, 559 aa, Staphylococcus sp.
  source 1..559: note = Related to CP009676.1; note = Staphylococcus schleiferi
MNLNKINDLKDLASYIGVKPSYLAYHIYHNPRIKLNQHYTEFEISKSSGGSRIIATPNKNLKIIQKKLAFKLNQHLKSLGFYRNNKILHAFIKENKPYQRGFISNSKIHRKKNYILNVDLENFFESIHFGRVRGYFQKDDKFNFNKDVATIIAQICTYKGSLPQGAPTSPIISNLIGNLLDSKILKLSKKYKLHYTRYADDMTFSTNDYKFVRNINQFNKELENIISSAGFKINTSKTRLQYRTSRQQVTGIVVNEKLNIPREYYKKTRAMAHNLYKNDEFEINGEKSTLNQLEGRFSFINQLEWYNNKNNKNKKKPYLKLSSKETEYQRFIFYKYFIKNDLATIITEGKTDVLYIKAALKKTWKEYPKLITKDNNGNFLFKIKFLNKTKRLNYFLGIGIDGGDSLINVYNHYKGKDNVNDLRKYFNKFNCNYSNPIIMLLDNEIDVKGKPLNKMINIIKFEKDELERNLYVNLVENLYLSTIPKTKEKNESEIEDLFNEETLNKGIEGRPFTKKDNYNKKEYCGKDEFSKYVYNNYTNIDFKKFHPLLKALSEIVNKK

SEQ ID NO: 1285 - protein, 558 aa, Staphylococcus sp.
  source 1..558: note = Related to CP022056.2; note = Staphylococcus saprophyticus
MNFNQINDRKDLAKFLGVKPSFLTYHIYHNPQIKLNQHYTEFEIPKRSGGIRVIAAPNKKLKIIQKKLAFQLNEHLISLGFYRKNKSIHAFIKENKSNKRGIISNSKIHRNKKYVFNIDLENFFESIHFGRVKGYFQNDDKFNLSKDIAIILAQICTYKGSLPQGAPTSPIISNLIGNILDSKILKLTKKYKLHYTRYADDMTFSTNDYKFLENMAGFNRELENIIELSGFKINTSKTRLQYRTSRQQVTGLVVNDKVNIPRDYYKKTRAMANNLYKNGKFEIEGKEATLNQLEGRFSFINQLEWYNNKKFKNKKKPHMKLSGKEIEYQRFIFYKYFIKNEFLVIITEGKTDPLYIKAALKKYWKSYPQFIMKDSDGHFLFKIKFLNKTKRLNYFFGINKDGADSLINLYNHYKGSNGVNNLSDYFKKFNCKYSNPLIMLFDNELNIKGKPLKKFHNHIQFNEPELQNNLYVNLVENLYIVTTPLIDKKKESEIEDLLPQKILDEGIEGRSFTNQENYNKNKHCGKDEFSKYIYNNYNEINFENFIPLLDALCKICND

SEQ ID NO: 1286 - protein, 558 aa, unidentified
  source 1..558: note = Related to NZ_JACSMB010000004.1; note = Exiguobacterium sp.
MTNFKDIKTRNELAEFIGIPIRHLTNVLYKINVDNMYSSFKIPKKSGGERVIQSPNKDLKNIQVKIAQSLDVHITKQQKYDNNISHAFKKNKGIITNSKVHRNKRIVVNMDLENFFESIHFGRVRGYFNKNDMFKLPIEVATILAQLTCYKGSLPQGGSTSPIISNLICEVLDYRILSLAKKYKLKYTRYADDLTFSTNNNEFVNLYSQFSDEISKVILKSGFRINQKKTRLQFWNSRQTVTGLVVNKKINVPREYYKNTRAMANQLYKTGEYVIDGDLGTIGRLEGRFTFIDQLTKYNNSLDDDIKHNRFHLSGREVEYQKFLFYKYFFSNSKPLLITEGKTDVRYLKAALKKHSLEYPELVEKDTNDNFNFKITFLKKTKRMKYFFGIVPDGASALNNVYNFYKGVNLDPNHYEHFMKISENRPTNPVVLLFDNEITKEKPLNKFINHAKINNKKSIIKQNLTLNVIGNLHLLTTPLMDNRLEGDIEDLFKTSELAIVIKGRKFDKTEKLDKSLYYGKDQFSKYVLLNYEEIDFDNFKPLLDKLSDLIRNHSVASK

SEQ ID NO: 1287 - protein, 557 aa, unidentified
  source 1..557: note = Related to JAFPWD010000023.1; note = Clostridia bacterium
MKKFNEIQSRNDFADLLKIPLSSLTYLLYVLKPDNCYNVFSIPKRSGGEREISAPNKRLKSVQTAVAMELWRYIKNIPDFNRSAVSHAFTKKKGIITNAAIHRNKRIVVSFDLNDFFPSIHFGRVVGFFEKNRHFKLPHAVSLIIAQIACHNGSLPQGSPCSPIISNLICQILDYRILRLAKKYKLDYTRYADDLTFSTNWKGFVDAETCFYSDLSVLISKAGFTINEAKTRTVFRNSRQTVTGIVVNKKLNINREYYKETKAMAHNLYSKGSFVINGKEGTINQLEGRFAFIDQIELYNNRIDGNRHNYRNLCGRELEYRKFLFYKYFYAADKPTLITEGKSDELYIKAALRKMFLMYPSLINKKADGRFEYKVRFLKRSKRLQYFFGFSPTGADAMTELRKCFIDESNSTSLFSFFNRICASGQIHPVIFIFDNETERDKPLKKFLNQKPATSEVDKEFLQNNLYLNIIKGSKLFIITNKLVSGKSEAEIEDLFSENTLSTEIGGKSFCRKDNFDESKFYGKAFFSKYIYKNYESIDFSNFIPMLDALNNIITTY

SEQ ID NO: 1288 - protein, 560 aa, unidentified
  source 1..560: note = Related to JAFVFJ010000126.1; note = Eubacterium sp.
MEQGFNTISNRNELADYLGISRSSLTYVLYVKGIDSFYVSFDVPKKSGGTRTIHAPQGTLKGIQKILLIKLYNYRYTINENENIKLNISHAFENKKSIITNARIHKNKRFIINFDLKDFFESFHFGRVKGYFEKNKYFCMPEDVARIIAQLTCYSGTLPQGAPTSPIITNLICQSLDYKILSLAKKHHLDYTRYADDLTFSTNDKKILENYDTFYKSLVNIIHGSGFEINEKKTRFVYKHSKQIVTGLVVNKKVNVDSTYYRNVRSMAHHLYTEGTFWDNGNECTINQLEGKLSFINQIDKYNNKLCEEKKNLANLNRREREYQRFLFYKNFYGNPQPVIITEGKTDILYIKAALRKYYLDYPELIEKSNSGQFHYKLTFFRRSSIKQFFFGMSYDGADAIKKIYNFFTDNDSGRFPNYYEKFNQISAIKTSSPIILLFDNELNNKNKPIKNFCNYVGLKPETVDCIKNGGFIPIVDNKLFLLTHQLVNDLAECEIEDLFDEITLNHTINGKTFSRQSDFDIDKHYGKEIFSKYIISHYESIDFSNFKPLLNSINQLIAH

SEQ ID NO: 1289 - protein, 480 aa, unidentified
  source 1..480: note = Related to CP033618.1; note = Lactiplantibacillus plantarum
MKKSPFYQISTRQELADALNMRLKSLSYVLYKLDPQSLYTIFSISKKSGGKREITAPKKPLANIQSKIANVLMLQPENSALRSKASHGFIKNKSILTNATVHRNKNYVLNTDIQDFFPSFSFGRVLGFFKKNNAFMMDHKVAVALTNLCCYKKKLPQGAPSSPPITNLIFHIVDFKIIKLARKYNLDYTRYVDDLTFSTNEKSFPKVSQNFLNELNALITHEGFKLNEDKTHLEYKNSRQEVTGVIVNKKLNVHKEFYKNTRAMADNLYKNTEFTIDGKLGTINQLDGRFNYINQLVRYNKKSIKRKVAYKTKYNVEKKDFKHQSRFILFSGKEQQYRKFLFYEYFIYGNSSIILTEGKTDVSYIKLALRVYKQEYPQLITSHGKKTEYSVSFLKHTQNTSTKGQKKGKKNNQMSHRIPYFIGISEDGGTSIDNFLNYYSEISTTNLNMYPNYPKYFISDLGKLPDKKVIILLDKADCKI

SEQ ID NO: 1290 - protein, 372 aa, Streptococcus sp.
  source 1..372: note = Related to WTXU01000099.1; note = Streptococcus thermophilus
MEKSPFYQISTRRELASVLNMQLKALSYVLYKLNPQNLYTSFSIPKKSGGVRNIVAPQKPLANIQNKIANVLMLQPENKASGSKASHGFIKNKSILTNAKVHRNKKYVLNTDIQDFFPSFSFGRVLGFFEKNNAFMMDHKIAVALTNLCCYKQKLPQGAPSSPPITNLIFHIVDFKIIKLARKYKLTYTRYVDDLTFSTNNHSFLKTYHDFLTELNALITHEGFNLNNNKTHLEFKNSRQEVTGIIVNKKLNVHKEFYRKTRAMADNLYKNNKFVVDNAEGRIQQLDGRFNYINQLVRYNKKVKKRGAPYKTKYTHSSESFSKLDRFLSFTGKEQQYRKFLFYKYFVYGDSSIILTEGKTDVSYIKLALKKY

SEQ ID NO: 1291 - protein, 667 aa, unidentified
  source 1..667: note = Related to VHJC01000059.1; note = Lactiplantibacillus plantarum
MEMMMQMNKSAFFKISTRKELANALDIRLKTLTYILYKKKPQTLYTNFSIPKKSGGTRDIVAPEKQLANIQIKIAQILMSQPENDSSHSKASHGFIKNRSILTNAQIHRNKKYVLNTDIKDFFPSFSFGRVLGFFEKNNAFKMEHKVAVALTNLCCYNQSLPQGAPSSPPITNLIFHIIDFRIIKLAKKYHLDYTRYVDDLTFSTNENSFPVTYKKFLIDLNNLIDHAGFSLNQDKTHLAFKNSRQEVTGIIVNEKLNVHNEFYKSTRAMADKLYKTNSFSIDGTLGNIRQLDGRFTYINQLVRYNKQRKLIRYRTKYSTPHNEKETKNTISNKDRYRFFTGKEQQYRKFSFYEYFVYGNNSIILTEGKTDITYIKVALKKYAKNYPDLIKLQGNKYDFLISFLNHQKNKEKRSKNFKRKKTKILANQMSHRIPFFLGISEDGGTTYSDFLYYYAEMTIEKESISYNMQRSYPNYPKYFISDLNKLYKKKVIILLDNEGSNHPLDHFIKTCAKLKIKKKEDIENDFKNKGYSHLKYNLFLLTIPKKNTSNSQNCAIESLLNKDEIEKLNLKGKSFSSKNNETSKNSFGKQALVTKIKSAPTNFDLSGFRSLLDLISKINSLQPIGNEQYKYKKKKVETNKEVYIRNSLGFRIPIEYQSITQYKDFVK

SEQ ID NO: 1292 - protein, 624 aa, unidentified
  source 1..624: note = Related to JXDF01000031.1; note = Apilactobacillus kunkeei
MSDLILFLYSGGIFLFKDVKSVESLSRYIGVSVKLINFVVYFKGVDSFYEEFSLPKKSGGSRFISCPKGPLKKLQKKLQKKLSEEYDNKYGSFNVSQAFIKKRNIMSNAKVHRNKKFILNLDIEDFFDEFNFGRVYGYLQKSNDFKMNKQLSVILSKIFTYKNKLPQGSPSSPVLTNFIFRIVDFKILKLSKKYKLDYTRYADDMTFSTNDSNFKYRYINFVEELKFLLYRQGFKINKKKTRLQFSSSKQEVTGLVVNKKINVSRKYYRDLRAQAFNLYSDGKYFIDGKKFDKLNKLEGRFAFVNQVKRYNFLIESRKYARKSKEYSNFIKSTTKYRYEPYLGGFDEQYRKFLFYKYFIHGSKPLIFVEGKTDIRYIKAAMMMYYNRYPELIRNNNGTFEFNIDFFKRGNEDLLKENYKRNEIDYSIKDYYLGLSDDGASVMSKIVEYWGIALDKKTKENKNYYDYFVNKLGNKSKKVILLFDNEYLDKKNKPLRSFLNHVYGNKATSQYRKLISEGKLVIADNLYLITLIKDKNYKKELENYIDDHINDKNFKGNNDLSIDIENLIDLSTITINQKTFNRNANKDSDKEFGKQTLSKYVYKHYNTVGLSGFIPLLDQLKEFCK

SEQ ID NO: 1293 - protein, 533 aa, unidentified
  source 1..533: note = Related to CP033058.2; note = Metamycoplasma phocicerebrale
MSSKYKGNSSRFFIMKKFEEIKKVEDLAKALNITINKLYYFSNNSNKPNKLYTQFTITKKLGGERTINAPKKELKKALNKLFIILKNRHLNYTKEKKIKDKISFGFKKNNGIIDNAKNHRNKKYVLNVDIKNFFDSFHFGRICGFFMKSKEFKINSKNNDTVKKISILISNLLCYKQCLPQGSPCSPILSNLIFRTIDYEILKLSKKYKLKYTRYADDMTFSTNDNNFLNSYENFISELNECINKNGFKINDKKTQIEFYKSRQRVTGLVVNQKLSVRREFYKNTKSMALNFYRNGYFKINDKIGKLNQLEGRFSFINQIDKFNNIESNKYENKNKDFYYVLNSREKQYKLFLFYKFFYNPSKPIIITEGKTDILYIKAALKKFYEKYPNIIQKNLNGTFSYKVKFLAKENKQFSNYKERLDKNFQQIEIILKDVIENIDDKKLEDIIQYVIDSIEKIKEIFKSKIVANKTSFEKIKLKLNYFWEEIVNKKTSKELNEIWNEIINIYKNIKITNLKKVNKFLYFFKYWFFRGF

SEQ ID NO: 1294 - protein, 594 aa, Streptococcus sp.
  source 1..594: note = Related to JAJEOY010000010.1; note = Streptococcus sanguinis
MDWNEIKSCRDFARYLNIPYKHLTYLLYNRKIDKLYESFEIPKKNGGIRIIQAPKKELKEVQQQILKILEKRALSLEKENKISFRLSHGFIKYKSIITNAEKHRNKKIILNIDIENFFPSFHFGRIVGFFEKNKNFKLPKEVAIFLAQLTTVDGSLPQGSPCSPIITNLICQILDFRISKLAKEYKLNYSRYVDDMTFSTNKENFLDCYPEFFSKLSNVLIKAGFSINDKKTRIHFNRNKQIVTGLVVNKKINVQKNFYKNTRAMAHNLYKQGTFFIDEKEGTINQLLGRFNFIDQLERYNNKNKKQLSLQKNYIEQQKYLTKGQQEIKGDFGYLGKLSSREKEYRKFLYYFHFFSSSKPVIVTEGKTDSRYLKAAMKKCFKDFPNLIQKNEDGTFLFKVKFLKRTSLLKYYFKFYEDGADSMKNLSNFWITGEENKLFPNYNKFFQELTGRVASNPIIFLFDNELSNKKKPIRNFINHILKSTPNEAGSLRNEISNVKYINIVDNLYMLTHASLSGNEDEEIEDLFTNDVLNHRINGKSFSRENDYDFTKFYGKNDFSKYVLKNYRSIDFKNFIPLLNNLNKIILEYNSKLTF

SEQ ID NO: 1295 - protein, 592 aa, Streptococcus sp.
  source 1..592: note = Related to NZ_CZFC01000010.1; note = Streptococcus suis
MQWDEIKTREDFATFIGVPYKYLTYLLYNQRIENLYIAFEIPKKSGGVRIINSPEDRLKKILKKIMRKLEERMVFLEQEGKISSKVAHGFIKSKNIITNASSHRNRKIVLNVDIENFFPSFHFGRVKGFFEKNKYFKVPKEVAVFIAQLTCYNGSLPQGSPCSPIITNLICQILDFRIIELAQKYNLKYTRYADDMTFSTNDMQFVDTYIRFVEELGDLLTRSGFSLNDEKTHIQFQREKQTVTGLTVNKKVNVSRHFYKNTRAMVNTLYKKGEFMIDGERGTINQLFGRFNFIDQLVKYNNRIEREAIIRNDYVNQQKNLIKSVPDAENKFDYLKKLSAREREYRKFLYYYYFFSSTVPVIVTEGKTDSRYIKAALKNLYRRYPKLIERDEKGKFVFKIKFLRRTALLKYYFRFFEDGADAMKNLSNCWFGKTDEKLFPNYSELFKEITNRKALKPVIFLFDNELKNNKKPIRNFINHVSNNTIHDNKTIENEIRENNIFNVIDNLYLLTHPSETEDEEIEDLFDDPTLDYRIAGKVFTKESKFDVDKYYGKNDFSNYILQNYSQINFKNFTPLLDNLNKIVDVYEAKYKS

SEQ ID NO: 1296 - protein, 655 aa, Streptococcus sp.
  source 1..655: note = Related to NZ_AP024276.1; note = Streptococcus parasuis
MNRLKQVTNKDDFAKLLGFKNSRYINYVLYCIGTDKLYKEFEIPKKNGGVRIICAPKPELKLLQKKLAYVLWDCFVDDLSSKSKEKNYKIPMLSHAFEKNKSIITNAQAHRNKKYILNVDLKDYFETFNFGRVRGFFIKDKDFQVSPEVATVIAQIACYQGKLPQGAPSSPIITNLITRILDYRIVKIAKKYRFTYTRYADDLTFSTNRKLYSNKLKATKELDKFLEELEKLIVSSGFEINSKKTRLSDAMQRQEVTGLIVNKKLNVKREYIKNTRAMAFKLYKDEKFEIDGKQGTIEQLTGRFAFIFQIDQYNNYLLYKKSLVENSLNSQKNLLGRNLSKKSDSKYYWKYIFYNRDLRKELFYNKQHKTYNLPKEFYAISKEDKKNYMAFFDSKEKEYKKFLFYKYFYGNSNPIIVPEGKTDPRYIKAALKNLYLKYPELIKKSGNKFIFEIDFLKHSNTIEYLFNVPEGGPGFQYWYNYFSDKKDFPMSDKEKLLYPNYIEYFYNQTSAHPKKPTIFLFDNEPSGNPLYAFVNYAKDLEISSSNLNQIRGSSFSKIVKKNSLYIMATPLIKNWNQGTSSDIEDLIVSNDKNIEPIQNFMKINKIDSLNVLDVKKHKEIFSKFVLRNFNKFDFTAFIPLLDGIRDNILDYKMKK

SEQ ID NO: 1297 - protein, 652 aa, Streptococcus sp.
  source 1..652: note = Related to NZ_KB904582.1; note = Streptococcus ovis
MNKLKQLDNKDDFARLLGFKNSSYINYILYNIGTDNLYRVFSIPKKNGEVRPIHAPKPELKFLQKKLVNVLWDCYIDDLTVKSKEKNFKIPMLSHAFEKNKSIITNAQLHRNKQYILNIDLKDYFESFNFGRVRGFFIKDKDFQVAPEVATVITQIACYQGKLPQGAPSSPIITNLITRILDYRIVKIAKKYRFTYTRYADDLTFSTNRNLRSNKLKATKELDKFLEELEELIVSSGFEINSKKTRLSDDMQRQEVTGLIVNKKLNVKREYIKNTRAMAFKLYKDETFEIDGKQGTIEQLTGRFAFIFQIGQYNNYLLYKKSLVENNLEAQKNLLGKKSSKKSDSKYYWKYIFYNRDLRKELFYNKQHKTHNLPEEFYSIGKEEKKMYMALFDSKEKEYKKFLFYKYFYGNSKPIIVTEGKTDPRYIKAALKNLYPQYPELIERDGDKFIFKIDFLKHSNTIEYLFNVPEGGEGFNYWYNYFSNKEDFKMSAKEKLLYPNYIEYFQKLTSRQPKHPTIFLFDNEPTGHPFYQFASYSKDLDISPNNLDTIRNPMVNYRINQKSSLYIMSTPLVKNVNSGSSSDIEDLLIAKQKMPTLYLDGQNKTFKKNGGFNYYGKEILSNYVLKYYQNFDFSEFIPLLNGIRDNILDYRK

SEQ ID NO: 1298 - protein, 645 aa, Streptococcus sp.
  source 1..645: note = Related to NZ_AQYA01000033.1; note = Streptococcus henryi
MNKLKQLESKDDFARLLGFQNSKYINYLLYSVGTDNLYKTFSIPKKGGGERIINAPKKELKFLQRKLANVLWDSYIDSLKLKSKDKKFKIPMLSHAFEKNKSIITNAQVHRNKRYIINIDLKNYFDSFNFGRVRGFFLKDRDFCVTPDIATIIAQIACYQGKLPQGAPSSPIITNLITRILDYRIVKIAKKYRFTYTRYADDMTFSTNRDLYSNKLQATKELEKFLRELNELVISSGFEINSQKTRLSNEMQRQEVTGLVVNKKLSIKREYIKNTRAMAFRLYKDGYFEIDGKLGTIDQLTGRFAFIFQINQVNNYLLYKKSLVKNNLEFQKNLLAQQTLKKSESKYYWKYIFYARDLRKELFYNEKHKTYNLPTEFYDISKNEKRMYMSLFDSKEKEYKKFLFYKYFFGNDKPIIVTEGITDPRYIKAALKSLHQQYPELIEKVDDKFIYKVEFLNHSNTIEYLFNVPEGGEGFKYWYNYFSNKENFPMDSNEKILYPNYIDYFQKLTIRKPKNPTMFLFDNEPTGSPLYNFARYAKDLDINSNNLNQIRQPMLNYRINRKSSLYLMLTPLIMGSNSSDIEDLLLSKNTPPILKGKSFSKGGGSNNYGKDVFSKYVLKKYSQFDFSDFCPLLDKIRDNILDYRK

SEQ ID NO: 1299 - protein, 652 aa, Streptococcus sp.
  source 1..652: note = Related to RQZA01000003.1; note = Streptococcus minor
MNKLKKLDNKDDFARLLGFKNSTYINYILYNIGTDNLYRTFSIPKKNGGTRLVHAPKPELKFLQKKLVNVLWDCYVDDLTAKSKEKNFKIPMLSHAFEKNKSIITNAQVHRNKQYILNIDLKDYFESFNFGRVRGFFIKDKDFQVVPEVATVIAQIACYQGKLPQGAPSSPIITNLITRILDYRIVKIAKKYRFTYTRYADDLTFSTNRNLHSNKLKATKELDKFLEELEELIVSSGFEINSKKTRLSDDMQRQEVTGLIVNKKLNVKREYIKNTRAMAFKLYKDEAFEIDGKQGTIEQLTGRFAFIFQIGQYNNYLLYKKSLVENNLEAQKNLLGRNLSKKSDSKYYWKYIFYNRDLRKELFYNKQHKTHNLPEEFYSIGKEEKKMYMALFDSKEKEYKKFLFYKYFYGNSKPIIVTEGKTDPRYIKAALKNLYPQYPELIERDGDKFIFKIDFLKHSNTIEYLFNVPEGGEGFNYWYNYFSNKEDFKMSAKEKLLYPNYIEYFQKLTSRQPKHPTIFLFDNEPTGYPLYQFASYSKDLDISPNNLDTIRNPMVNYRINQKSSLYIMSTPLVKNVNSGSSSDIEDLLIAKQKMPTLYLDGQNKTFKKNGGFNYYGKEILSIYVLKYYQNFDFSEFIPLLNGIRDNILDYRK

SEQ ID NO: 1300 - protein, 658 aa, Streptococcus sp.
  source 1..658: note = Related to NZ_CP075172.1; note = Streptococcus equinus
MNKLKQLTTKDEFARLLGFKDTKYINYLLYKIRTENLYETFSIPKKNGGERVIHAPKRDLKILQKKLAEVLWDCYVFDLEKKSKNKNVKVPKLSHAFEKNKSIITNAQVHRNKKYVLNLDLKNYFDSFNFGRVRGFFIKDKNFQVVPEIATMIAQIACYDGKLPQGAPSSPIITNLITRILDYRIVKLAKKYRFSYTRYADDLTFSTNRDLSSNKLRSAKILEKFLCELENLIVSSGFEINSQKTRLSDNMQRQEVTGLVVNKKISVKREYIKNTRAMAFKLYKDEEFEIDGKQGTIDQLTGRFAFIFQISQYNNYLLYKKSLIENNFESQKNLLGRNSLKKSESKYYWKYIFYNKDIRKELFYNKQHKTYNLPQEFYSINKIEKEIYMSLFDSREKEYKKFLFYKYFYGNSKPIIVTEGKTDPRYIKAALKNLYRKYPELIEKKGDKFKFKINFLKHSNTIEYLFNVPEGGEGFKYWYNYFSSTMPSNIFKENFPPKSLGQDLYRKMYPNYIEYFQGLTTRKPNYLTIFLFDNEPAGSPLYKFVNHASELQIDTNNLDQIREKNFYRISTKNSLYVMATPLLNKGNSSDIEDLLLARNQLPVLNGKNFSKSGGSNYYGKDVLSKYVLKNFKKFDFTEFIPLLDGIRDNILDYRKNRI

SEQ ID NO: 1301 - protein, 659 aa, Streptococcus sp.
  source 1..659: note = Related to AP010655.1; note = Streptococcus mutans
MNKLKQLSTKDDFAELLGFKNSRFINYLLYSIGTDNLYETFTIPKKNGGERIIHAPKKELKFLQKRLANVLWDCYLYDLKSKSKEKKLKIPMLSHAFEKNKSIITNAQVHRNKKYLLNIDLKDYFDSFNFGRVRGFFVKDKDFQVTSEIATVIAQIACYQGKLPQGAPSSPIITNLITRILDYRIVKIAKKYRFTYTRYADDMTFSTNRELNSNKLRATKELENFLAELERLIISSGFEINPKKTRLSNNMQRQEVTGLVVNKKINVKREYIKNTRAMAFKLYKDGTFEIDGKQGTLEQLTGRFAFIFQTDKYNNYLLYKKSLIENNLDEQKYLLGRNSSKKSESKYYWKYMFYNRDLRDELFYNQKHNTYNLPKGFYSISENEKEVYMTLFNSKEKDYKRFLFYKYFFGNDKPMIITEGKTDPLYIKAALKKMYLNYPELVEKVGNNFVFKIEFLNRSNTIEYLFNIPEGGSGLNYLYNYFSNQIPANFFKQRFPTNNDRKDIYKELYPNYIEFFSNLTLRNPKNSTIFLFDNEPSGNPLFKFVNYAKDLQVESNNLDQIRGTAFKRITKKGSLYIMATPLLPNMNGGNSSDIEDLILSKNTAPILKGKTFLKNGGSNHYGKEIFSKHILKNYKQYDFSDFIPLLDGMRDNILDYRKK

SEQ ID NO: 1302 - protein, 325 aa, Streptococcus sp.
  source 1..325: note = Related to CABHMZ010000033.1; note = Streptococcus constellatus
MNKLKQLETKDDFASLLGFKNSKYINYILYSVGTDNLYKTFSIPKKNGGERIIHAPKEKLKRLQRKLAGVLWDCYLESLKIKSKNKSFKIPAISHAFEKNKSIITNAQIHRNKKYILNIDLKDYFDSFNFGRVRGFFLKDADFKVPEEIATVIAQIACYKGKLPQGAPSSPIITNLISRILDYRIVKIAKKYRFTYTRYADDMTFSTNCELSSNKLQATNELEKFLKELEKVITLSGFKINPQKTRLSNNMQRQEVTGLVVNKKVGVKREYLKNTRAMTFKLYKDEKFEIDGKQGTMEQLTGRFAFILQISQYNNYLLYKINCKI

SEQ ID NO: 1303 - protein, 650 aa, Streptococcus sp.
  source 1..650: note = Related to NCUE01000019.1; note = Streptococcus oralis
MTKLNRLETKTKNDFARLLGFKNARYINYLLYIIKTDNLYNSFTIPKKNGGERVIHAPKKELKFLQKKLADVLWECHLESVESKSKDKNFKTPVLSHAFEKGKSIITNSQMHRNKKYILNIDLKNFFDSFNFGRVRGFFIKDKDFAVSPEIATVIAQIACYQGKLPQGAPSSPIITNLITRILDYRIVKIAKKYRFTYSRYADDMTFSTNRELNSNKLRASKELDNFLTELEEVIVSSGFEINPQKTRLSNNMQRQEVTGLVVNKKINVKREYVKNTRAMAFQLYKDGAFEIDKKTGTLNQLTGRFAFIFQIDQYNNYLLYKKSLIQNNLDSQKYLLGRNSSKKSESKYYWKYIFYNKDLRKKLFDNTKHNTDNLPKEFYSIGKEQKKIYMSLFNSREKEYKKFLFYKYFFGNDKPVIITEGKTDPRYIKAALKKLYQKYPELIEKVRNNFVFKIEFLNRSNTIEYLFNIPEGASGLSFWYSYFSDIKYQTEEAKKLFYPNYMEYFSKFTSRKPKNPTMFLFDNEPSGHPLFEFANHAKDLKDSFKNLDSKRNTSSKKLAKKGSLYIMATPLSPDINYGYSSDIEDLLLSRNSAPTLKGKTFSKDGGANHYGKDIFSKYVLKNYKEFDFTEFIPLLDGIRDNILDYKSLF

SEQ ID NO: 1304 - protein, 685 aa, Streptococcus sp.
  source 1..685: note = Related to JYGT01000002.1; note = Streptococcus infantis
MTKLNRLETKDDFARLLGFKNARYINYLLYIIKTDNLYDSFTIPKKNGGERVIHAPKKELKFLQKKLADVLWECHLESIESKKTLQKRLAAILWECYLKCLNFNYIENNLANVLWECFLKVLEFRPKEKNPVLSHAFEKGKSIITNSQMHRNKKYILNIDLKDFFDSFNFGRVRGFFIKDRDFAVSPEIATVIAQIACYQGKLPQGSPSSPIITNLITRILDYRIVKIAKKYRFTYSRYADDMTFSTNRELNSNKLRASKELDNFLTELEEVIISSGFEINPNKTRLSNNMQRQEVTGLVVNKKINVKREYIKNTRAMAFQLYKDEAFEIDKKPGTINQLTGRFAFIFQIDQYNNYLLYKKSLIQNNLDSQKYLLGRNSSKKSESKYYWKYIFYNKDLRKELFYNKKHNTYNLPKEFYSIGKEEKKMYMSLFNSREKEYKKFLFYKYFFENDKPIIVTEGKTDPRYIKAALKKLYKKYPELIQKVGNNFVFKIEFLNHTNTIEYLFNVPEGGEGFKYWYNYFSDKEGVQMSDNEKVLYLNYIDYFEKLTKKSPKNPTIFLFDNEPSGNPLFKFFNYATDLNVSSNNLGQVRGTSFNRITKKNNLYIMATPLLSTRNNGNSSDIEYLLLSRNPSPILKGKTFSKGGGANHYGKDIFSKYVLKNYKKFDFTEFIPLLDGIRDNILNY

SEQ ID NO: 1305 - protein, 683 aa, Streptococcus sp.
  source 1..683: note = Related to NTGM02000001.1
MTKFNQLQTKDDFAKLLGLKSAKYINYLLYNIKTDNLYNSFPIPKKNGGERVIHAPKKELKFLQKKLSNVLWECYLESIESKSKDKNFKTPVLSHAFEKGKSIITNSQMHRNKKYILNIDLKNFFDSFNFGRVRGFFIKDRDFAVSPEIATVIAQIACYQGKLPQGAPSSPIITNLITRILDYRIVKIAKKYRFTYSRYADDLTFSTNRELNSNKLRASKELENFLTELEDLIISSGFEINPKKTRLSNNMQRQEVTGLVVNKKINVKREYVKNTRAMAFRLYKDGAFEIDKTPGTINQLTGRFAFIFQIEQYNNYLLYKKSLMQNNLDSQKYLLGRNSSRKSESKYYWKYIFYNKDLQKELLHNTKHHTYNLPTEFYSIGKEEKKTYMSLFNSREKEYKKFLFYKYFFGNDKPIIITEGKTDPRYIKAALKNLYQKYPELIEKEGNNFIFKIEFLNRSNTIEYLFNVPEGGEGFKFWYNYFSDKFYYNEKKEKKFFALNSEERILYTNYITYFKQLTNSLPNYPTIFLFDNESNNRNGNDKSALFLFASHAKDLMIPKNKDLEDSKNIKLEEKISDNLEKVRRDKPWRINKKDSLYIMATPLMPHMNDGKSSDIEDLLFSSSQNSLPILKGKEFHKDGGDNHYGKEIFSKYVLKNYKEFDFTEFIPLLDGIRDNILDYKSLF

SEQ ID NO: 1306 - protein, 659 aa, Streptococcus sp.
  source 1..659: note = Related to NZ_CP066059.1; note = Streptococcus oralis
MTKLNQLKTKDDFAKLLGFKNARYINHLLYNITTDNLYEPPIVIPKKNGGERVIHAPQKELKFLQKKLSNVLWECYLESIESKSKDKNFKTPVLSHAFEKGKSIITNSQMHRNKKYILNIDLKNFFDSFNFGRVRGFFIKDRDFAVSPEIATVIAQIACYQGKLPQGAPSSPIITNLITRILDYRIVKIAKKYRFTYSRYADDMTFSTNCELNSNKLRASKELDNFLTELEEVIISSGFEINPKKTRLSNNMQRQEVTGLVVNKKINVKREYVKNTRAMAFQLYKDGAFEIDKKPGTINQLTGRFAFIFQIDQYNNYLLYEKSLIQNNLDSQKYLLGRNSSKKSESKYFWKYIFYNKNLRKELFYNKKHNTYNLPKEFYSISENEKEVYMCLFNSKEKEYKKFLFYRYFFGNDRPMIVTEGKTDPLYIKAALKKLYKNYPKLIEKDGDDFIFKIEFLNRSNTVEYLFNIPEGGEGLKYWYNYFSNQIPANFFNQKFPAKNDGKKIYKELYPNYMEFFSHLTSREPKNPTIFLFDNEPSGNPLFKFFNHATDLNVSSNNLGQVRGTSFYKITKKDSLYVMATPLMPHMNNGNSSDIEDLLLSCNPSPILKGKTFSKGGGANHYGKDIFSKYVLKNYKEFDFTEFIPLLDGIRDNILDYTS

SEQ ID NO: 1307 - protein, 698 aa, Streptococcus sp.
  source 1..698: note = Related to NZ_LR134002.1; note = Streptococcus sanguinis
MNKLNQLKTKDDLARLLGFKNARYINYLLYDKQTDNLYESFTISKKNGGERIINAPKKELKFLQKKLANVLWECYLESLESKNFLQKRLAGILWKCYLKSLEINYIKNNLSDFLWECFMKVLGFKPKEIKTPVLSHAFEKGKSIITNSQIHRNKKYILNIDLKDFFGSFNFGRVRGFFIKDRDFGISPEIATVIAQIACYQGKLPQGAPSSPIITNLITRILDYRIVKIAKKYRFTYSRYADDMTFSTNRELNSNKLRASKELENFLAELEELIISSGFEINPKKTRLSNNMQRQEVTGLVVNKKISVKREYVKNTRAMAFQLYKDGAFEIDTKPGTLNQLTGRFAFIFQIDQYNNYLLYKKSLIQNNLDSQKYLLGRNSSRKSESKYYWKYIFYNKDLQKELFDNKKHNTYNLPKEFYSIPENEKEVYMSLFNSKEKEYKKYLFYKYFFGNDKPIIITEGKTDPRYIKAALKHLYQKYPELIEKDGDRFTFKIEFLNHTNTLEYLFNVPEGGEGFKYWYNYFSNQIPSNFFKQRFPTKNDGKDIYKELYPNYIEYFSNLTTRKPKNPTIFLFDNEPSDNPLFKFCNHAVDLKVSSNDLDQVRGTSFNRITKKDNLYIMATPLLSNRNNGNSSDIEDLLLSRNLPPILNGKTFSKSGGDNHYGKEIFSKHVLKNFTEFDFAEFIPLLDGIRDNILNYW

SEQ ID NO: 1308 - protein, 656 aa, Streptococcus sp.
  source 1..656: note = Related to CDMW01000001.1; note = Streptococcus sanguinis
MNKLNQLKTKDDLAKLLGFKNARYINYLLYNIQTDNLYNSFTIPKKNGGERIIHAPKKELKFLQKKLANVLWECYLESIESKSKGKNFKTPVLSHAFEKGKSIITNSQMHRNKKYILNIDLKDFFDSFNFGRVRGFFIKDRDFAVSPEIATVIAQIVCYQGKLPQGAPSSPIITNLITRILDYRIVKIAKKYRFTYSRYADDMTFSTNRELNSNKLRASKELENFLAELEELIASSGFKINPKKTRLSNNMQRQEVTGLVVNKKINVRREYVKNTRAMAFQLYKDGAFEIDTKPGKLNQLTGRFAFIFQIDQYNNYLLYKKSLIQNNLDSQKYLLGRNSSKKSESKYYWKYIFYNKDLRKELFDNTEHNTYNLPKEFYSIGKEQKKMYMSLFNSREKEYKKFLFYKYFFGNDKPIIVTEGKTDPRYIKAALKKLYLSYPELVEKVGNNFIFKIEFLNRSNTVEYLFNIPGGGEGLKHWYNYFSNKEKFQMDSKEKLLYPNYIEYFQKLTTRKPQYPTIFLFDNEPNNRKKDDKAPLFLFASHARDLEIDSDNLEQARRGSSSRITKKGSLYIMATPLLPNMNNGNSSDIEDLLLSQKKPPILKGKAFSKKDDPNHYGKEIFSKYVLKNYTQFDFTEFIPLLDAIRNNILDYQNIND

SEQ ID NO: 1309 - protein, 653 aa, Streptococcus sp.
  source 1..653: note = Related to NZ_OU540596.1; note = Streptococcus salivarius
MNKLTNVESKDDFARLLGFSNSRFMNYVLYVLRTEELYETFTIPKKSGGERTINAPKKELKILQKKLANLLWDCYIEDLESESKVKNKKIPNLSHAYEKNKSIITNAKLHRNKKYVLNIDLEDFFDSFNFGRVRGFFIKDRNFCVSSDVATVIAQIACYKGKLPQGAPSSPIITNLIARILDYRIVKIAKKYRFTYSRYADDMTFSTNRELASNKLRTTKELDKFLAELEKVIVASGFKINNKKTRLSNNMQRQEVTGLVVNKKINVKREYIKNTRAMAHKLYLSQRFEIDGREGTINQLIGRFAFVQQIDQFNNYLSYKKSLIKNNFDAQKYLIGKDSGKKSESKYYWKYIFSNRDLRKHLYYNSRHDTYNLPKGFYTIGKEEKKMYMSLFNSREKEYKKFLFYRYFYGNDKPIIVTEGKTDSRYIKAALKKLYYKYPELIEKNGSDFVFKIEFLKHSNTIEYLFNVPEGGSGFEYWYRYFSDKKRFQMGEVEKVVYPNYIEYFKKLTNRPPDNPTIFLFDNELQGPLYNFANFAKDLAISTNNFNQIRYSSFDRIVKKDSLYVMATPLIPKINNGVFSDIEDLLLVRNSTPILRGKQFSKHGGSNHYGKDIFSKHVLKNYSKYDFTEFIPLLDGVKNNIKDYYQKSNNRKN

SEQ ID NO: 1310 - protein, 651 aa, Streptococcus sp.
  source 1..651: note = Related to NZ_RCVM01000028.1; note = Streptococcus hillyeri
MSDYVNLKTKDDLAKNLGYRDSRYLNYLLYKVGVDNLYRTFSIPKKNGDERIINAPLKELKIVQRKLANLLWNRYLEILETKSRDRGIKIPSISHGFEKNKNIITNAQQHRNKKYIINVDLESYFDCFNFGRVRGFFIKDRDFKVSSDVATVMAQIACYQGKLPQGAPSSPIITNLIARILDYRIVKLAKKYRFTYTRYADDLTFSTNRNLLSNKLRAEKEFNEFLVELEKIITTSGFNINPSKTRISNSYQRQEVTGIVVNKKINVKRDYFKNTKAMAYKLYKDGEFEIDGKSGTLEQLSGRFSFIFQATQYNNYLFYKKSLIDNNLEYQKNLLGQGTNKKSESKFYWKYIIYNRDLRRELFYNEKHKTYNLPDEFYAISKEEKKNYMALFDSKEKEYKKFLFYKNFYGNDKPIIVTEGKTDPRYIKAALKKLYLYYPELIEKVDNRFVFKIDFLKHSNIIEYLFNVPEGGSGFMFWYNYFSNKEKFHLSNEEQLLYPNYIDFFRKFTSEKANNPTIFLFDNEPFGNPLYQFVNYAKDLQIDTNNLNTVRGPSFNRISKKESLYLMATPLVSNLNNGNSSDVEDLLISTNKLAIQTFFNIKKINYKRLEDVKNHKEIFSKYVLKNYEQFDFTEYIPLLDGIRNNILDYRK

SEQ ID NO: 1311 - protein, 661 aa, Streptococcus agalactiae
  source 1..661: note = Related to LR134265.1
MGKLQELETKDEFARLLGFNDARYINYLLYHNENNQDKKFINTENLYYSFTIPKKSGGVREINAPKDELKFVQRKLAEILWDDYVEMLKVNSKNKDFKIPSISHGFEKEKSIITNAKQHRNKRFVLNLDLDNFFDSFNFGRVRGFFIKDKDFGTTPEIATVIAQITCYQGKLPQGAPSSPIITNLIARILDYRIVKIAKKYRFTYTRYADDLTFSTNRELYSNKLKSRKELENFLEEIKIKVEASGFSINEKKTRLSDQSQRQEVTGIVVNKKLNVKREYFKNTKAMAFKLYKDEKFEIDGKEGTIDQLNGRFSFINQIDQYNNYLLYKKSLIQNTLSHQKNLIGQELSKKSESKYYWKYIFQSKDLLKETYYNKTHHTYNLPVEFYDIAKNEKKLYMSYFNAHEKEYKKFLFYRYFFGNDKPIIVTEGKTDPRYLKAALKNLYLNYPELIEKVEGKFLFKIDFLSHSDTIEYLFNVPEGGEGLKWWYNYFSDKNYQNKMSEEEKLLYPNYISYFRKRTGRDPRKATIFLFDNEPKGSPLFNFANYAKDLQIDSNNLEQVRRDNFYKISKKESLYLVAPPLLTNMNFGNSSDIEDLLLSRQKMPTLYMDKQMKTFNKNGGLKHYGKEILSKYVLKHHQKFDFTEFVPLLNAIRDNILDYNV

SEQ ID NO: 1312 - protein, 642 aa, Streptococcus sp.
  source 1..642: note = Related to NZ_BCLE01000009.1; note = Streptococcus orisasini
MNKLQTIQSKEDFAHLLGYKKYSSITYLLYKIGIDNLYTSFEIPKKTGGTRTIYAPQKALKKLQKRFASLLWEAYVENFQPTSNKKHKKLPNVSHAFEKNKSIITNAKRHRNKKFVLNLDLEDFFGSFHFGRVRGFFLKNRDFQVPEEVATLIAQLTCYKGSLPQGAPSSPIITNLICQILDHRIVKLAKKYRLTYTRYADDLTFSTNAELPAESFEAFFTQLQDIIHRSGFSINHRKTRISDNGQRQEVTGLIVNKKVNIKREYFKNTKAMAFHLYKDGQFEIDGKPGTIDQLNGRFAYIQQIENYNNYLLYKKSLSTNGIEYQKYLLPKYENKKGRDNFYHHYIFNEQDLVEPTNFWNSKHKKYELPQTFYKAEKNSNYNYMENFSSREKEYQKFLFFKNFFMNNRPLIVTEGKTDIVYLKAALKNLASKYPSLIEKEDNQFNFKINFFSHTATIDYLFNIPKGGGEVFKHLYNYFSDNTGIKQQKYLYPNYLKYFRELTSREPKNPTFFLFDNEPKGNPLYNFANHARDLKLDSQTLDILRINAVDIFVKNNLFLLLIPLLSGKSSSDIEDLLLAEQSMPILNNKSFSKNNNDEGRNSYSKEILSKYILRHYQSFNFNKFIPLFDALEKRILEYKESTK

SEQ ID NO: 1313 - protein, 560 aa, unidentified
  source 1..560: note = Related to QSGD01000014.1; note = Holdemanella biformis
MKKKNILYNVISKRALATVLNVQYKTLTYVLYRRGVDSFYNGFEIQKKTGGTRIINAPQGELKTIQKNLAKILEKSINNSSNISHGFIKNKSIYTNAAIHRNKCFVLNMDLQNFFDSFHFGRVRGFFIKNRNFNCTNEIATMIAQIVCYKGKLPQGAPSSPVITNLVCGSLDYRISKLSKKYKLDYTRYADDITFSTNNRHFICEYENFLNEITEIIEKSGFKINDKKTRLTFSHKRQTVTGVVVNKKLSVPREYYKQTRAMAFNFYKNRIAYLDESNKTLNQIEGRFSYINSFDKLNNILESDKNNKKKNLKDLNNREKDYARFIFYKYFYMNSKPLIITEGKTDILYIKAALKNLVGSYKDLYNGEFKINFLRRSKRFAFLLKISTDGADTIKNFYKNYYTKPVIKDLSFDYFLDFGYYPDCPIIILLDNEPDGKHPLGKFVSSDKSSELLEQLRLNGFIRLNKVHNVYLSVVPKNPDKKLDRYEIEDLFDEELLHMELNGKKFNREGLKGYYTKDDLSKYVYSHYEEINFNNFNAMFENFRNIIVDYQKWYLANINN

SEQ ID NO: 1314 - protein, 657 aa, Streptococcus sp.
  source 1..657: note = Related to RJOU01000001.1; note = Streptococcus gordonii
MSCHALFIIMKYTEIKTIIDFIKAIKVNNYSYINYLLYGIKPNKQYSLFEIPKKNGDSRQIVSPNPKLKKIQKRIYSLLWQRYEEVMLSKTGKYQKTPSLSHGFLKNRSIITNAQKHRNRKIILNIDLKDFFDSFHFGRVRGFFLKNKYFKLPEEVATILAQLTCYNGKLPQGAPTSPLITNLICEILDYRIVTLSKKYRVTYTRYADDLTFSTNNNSFLQSVSEFIIELTNIIQKSGFEINDSKTHLSLYNQRQEVTGLIVNKKINVRREFYKKTRAMAHNLYKNGEFYIDENNNKGSINQLHGRFSFIYNIEKYNNFLSYKKSLSKNSVEYQKNLLSRNIGIKGNNDLYTKFLLQEHDINNTTYYSPEHNKLFLPKDFYSYFLKYESDYIKYLSAKEKEYQKFLFYLNFYGNSYPTIVCEGKTDPLYIKAALKNLYKDYPELVTYDDQKFTFKINFFKRTSDTNKLLFGVPEGGGSSLKFLYNYFSDIKPKNNTQEDIYTNYLEYFENLTLHSAISPTIFLFDNEGSGQPLSNFICHVAKDIRIPNNDLDDRRKEMYCQKVKKNLFVLSTPKAAHDTKSDIESLLINKPVINGRTFSSQESYKREFEYGKNELANYVLKNYKNINFEKFKPLLNTIREINISYKKEYNKLNSKRE

SEQ ID NO: 1315 - protein, 575 aa, unidentified
  source 1..575: note = Related to NZ_SCWC02000010.1; note = Macrococcus equipercicus
MENLSLINTKRTLAFHLSIPYKSFVYLLYHLDHPYSTFEILKKNGESRVINSPHPKLKRLQYKIKDLLETQYNLMMKDRVSHNVSHGFIKERSIFTNAKIHRNKKIVFNIDIKDFFKSIHFGRVRGFLIKNKYFLLNDEVATTISKLICYEGSLPQGAPTSPIMSNLILNIFDMKVLDICQKYSVDYTRYADDLTFSSNSRKFYQSFGDFYYEIEQLINKNGFKLNGSKYRVQLNNSRQEVTGLVVNNRLNIKRDYYKATRSLVHKFLLDQSPIINEQVLNANQIEGRLSFIHSIEIYNKKIEYNKERQEKSYRKDFTTYLHDSVLNAKEREYQKFLFYNLFYKPNNIVVFPEGKTDIYYIKAALKKYYKEYPELVEFKDNKYHYKINFIKRNKRLYYFFDLAIDGADTMSKILNYYSSKPGGKHNKNPINYFQYFNERLDIQPSKPVVLLFDNEGKDKPLHKFINTAKKQLDIDSDMLKSKLNTCDPSPVNLIGNLYILTINKLEADKEYEIEDMIKEYTDNLVINGRKYLNKGEGNSISKIVLAQNVLENYETINLENIKPLLNKLKILKNLY

SEQ ID NO: 1316 - protein, 559 aa, unidentified
  source 1..559: note = Related to JAHAAI010000002.1; note = Veillonella sp.
MNDYKAARAEVSRLFGIKLKMITYVLYKKGVENLYTSYDIPKKNGGTRVIYAPDSKLNKIQKKISEKLYEIHINYMNQEKIKSTISHGFEKNKGIITNAYRHKNKRYLVNVDISDFFSSFNFGRVQGYFHKSQEFGFSKEVSTIIAQLVCHNGKLPQGAPTSPIISNLIFNIVDRRILTLAKKYKLYYTRYADDMSFSTNNKEFQKEYKGFIQELTDLLEKSGFMINHNKTRFVYYSSRQEVTGLTVNNKINASRNFINQTRAMANQLYKKDNFQINGKDGTLAQLEGRFSFINQLDWFNNRLEYKRTNKKKNKKYISDLNAREKQYQYFLFYKYFFKPIKPTIVTEGKTDILHIKAALMKYCDRYPKLITKSADGKYEFKLYFLNKTKRLEYFLGIYREGADTMKNIWNFYKGAHGFTNIFSYLSKKCLGDSLNRVNPVILLFDNEQVTDKPLRKFLNHIGIKAKINPDLMNLTANLYLQTISLINDFDECEIEDLYSEDILNIIIKGKKFEKTVEKDKEDTFSKDIFSKYILEHYYEIDFSNFIPLLDSINDVCKTD

SEQ ID NO: 1317 - protein, 573 aa, unidentified
  source 1..573: note = Related to JAHAFZ010000010.1; note = Veillonella parvula
MKNYKDARKKVAGWIKVNQKELVYVLYGKKVDYFYKSFPIPKKNGESRVIYAPKDELKIIQKRLSQKLYETHREYIRQYRIKSTISHGYEQKRNIITNARRHKNKRYLLNIDISDFFPSFNFGRVQGFFYKSREFSFSKEEATIIAQLVCYNGKLPQGAPTSPIISNLIFNIVDLRILSLAKKYKLYYTRYVDDLTFSTNHKRFKETCSDFIKELTDLLKKNGFEINQGKTRLEYYSSRQEVTGLTVNKKINASRNFINITRAMANQLYRTDEFQIDGEKGSLEKLEGRFSFINQLDWFNNKLEHKIKKGNFSKRYNSGFNGREKQYQYFLFYKYFFKPKKPTIVTEGKTDILHIKAALMKYSDRYPNLIVKEDNGTYKFKIYFLNKTKRLEYFLGISVDGADTMKNIWNFYHGMENCFNIFKYLSVKNNNATLDKANPVILLFDNEQEKNRPLKKFLNYTKINLEEANICQKLNFNLYLQTIPLIGKLDKCEIEDLYQEETLNLTINGKKFSRDAKFDQKIYFGKAIFSRYIIDHYNEIDFSNFIKLLDSINRICIKDQNAYLDINNKVLSN

SEQ ID NO: 1318 - protein, 556 aa, unidentified
  source 1..556: note = Related to AWXD01000007.1; note = Peptoniphilus sp.
MNDYKIARKELARLISVDLKEITYVLYKTGIENSYVSFEIPKKNGESRVIDTPKDKLKWIQRKLSEKLYQMHSDYMTQNGIKTNVSHGFEKNKSIITNAYRHKNKKYLLNVDISDFFSSFNFGRVQGYFYKSREFMFSKEIATIIAQLVCYKGKLPQGAPTSPIISNLIFNIVDIQILALAKEYRLNYTRYADDMSFSTNNKVFEKEYLNFIQELSDLLGKNGFEINQNKTRLEYCSSKQEVTGLTVNNKINASQKFIKNTRAMANQLYKTNSFLIDGKDGTINQLEGRFSFINQLDWLNNKLEYRTTKKKTNKKFISGLNAREKQYQYFLFYKYFFRPNKPTIVTEGKTDILHIKSALMKYCDRYPNFITKVADGEYDFKVYFLNKTKRLNYFLGISGDGADTMKNIWNFYSGKNNYENIYEYMKKKNQAESSNKVNPVILLFDNEQKSDRPLKKFLTYSDVKMDDGQIFKQLKANLFLQTIPLANGLEECEIEDLYQKEVLNVIINGKKFCRNEEDDSEKYFGKHIFSVYIMEHYNEVDFSNFLPILDSIDSLI

SEQ ID NO: 1319 - protein, 549 aa, unidentified
  source 1..549: note = Related to NZ_ADFU01000011.1; note = Veillonella parvula
MVAKLINVELRAITYVLYKKGIEKSYTSFEIPKKAGGTRVIDSPNKQLKRIQRRLGKKIYDIHKNYLDQNRIASNISHGFEVGKGIITNARIHKNKKYLLNIDIANFFSSVNFGRVQGYFNKSQEFLFSKEVSTIISQLVCYDKKLPQGAPTSPIISNLIFNIVDLRILSLAKKYKLSYTRYADDMSFSTNNRAFQTDYINFIQELRNLLENSGFEINENKTRLEYYSSRQEVTGLTVNKKINVSRKFIKQTRAMVDQLFKANSFYIDDTFGTEEQLEGRLAFINQLDWYNNELEPESKKQKANKKYMSGLNAREKQYQYFLFYKYFFKPSKPTIVTEGKTDILHIKAALMKHSDRYPNLITKNDEGKYVFNLYFLNKTKRLKYFFGIVQNGADTMKNIWNFYNGKNNCDNIFKYINDKSQYGVIRNVNPVILLFDNEKEPDKPLRKFLNHIGMQSGIDKPFLKLKANLYLQKIPRINNSDCEIEDLYSKEVLNISIDGKKFEKNVKDSVEDTFSKDIFSKYILEHYQEIDFKNFLPLLDSINNICKIE

SEQ ID NO: 1320 - protein, 558 aa, unidentified
  source 1..558: note = Related to LTGD01000005.1; note = Anaerosphaera sp.
MSLYKNAREEVARMLNIHHKELTYVLYKVGIDKSYKTFKIPKKNGKYRIINAPTEKLKRIQKKLADELYNMHIEYLHNNNIKSIISHGFEKNKSIITNATVHKRNRYLLNMDILDFFPSFNFGRVQGYFEKSREFMFSKEVSTVIAQLVCFNGELPQGAPTSPLIANLIFNIVDMQILPITKKYKLNYTRYADDMSFSTNDYKFKQNYVYFIEELTNILEKNGFGVNTEKTRLQYYSKRQEVTGLTVNDKINANRKFINETRAMANQLYKTGGFKINGEAGSLLQLEGRFSFINQLDKSNNKMNGVSGNNRYINKLNAREKQYQYFLFYKYFYKPQKPTIVTEGKTDIIHIKAALMKYCDMFPKLVSKNDGHYDFKISFLNKTSRLKYFLGISEYGADAMLNIWNFYTGNNNRTNIYKNICDKSIRDKNENINPVFLLFDNEKESDKPLKKFLGSTKTELEDRETLKLLIYNLYLLTIPLEKGLKECEIEDLYSDELLNIIINGKKFSRSSLDDSKNHFGKHRFSIYVLNNYEHIDFEKFLPLLNTINSVIINNNNSN

SEQ ID NO: 1321 - protein, 507 aa, unidentified
  source 1..507: note = Related to NZ_ADFR01000009.1; note = Bulleidia extructa
MHAPKDNLKWIQRKLNNKLFEIHLDYLEDNNIKSIISHGFEKGKSIITNASVHKHKKYLLNIDIADFFPSFHFGRVRGYFHKSKEFNFSKEVSTIIAQLTCYKGKLPQGAPTSPIISNFIFNIVDLRILKLAKNYKLDYTRYADDMSFSTNNKAFKKDYLAFIQELKELLEKSGFEINQNKTRLEYYSSRQEVTGLTVNDKINASRTFINNTRAMANQLYKTNSFQINGKDGTINQLEGRLSFMNQLDFSNNKLGCRITKKKANRKFFSGLNVREKQYQYFLFYKYFFRPAKPTIVTEGKTDVLHIKSALMKYYDRYPKLITKTSDGKYEFKVYFLNKTRRLDYFLGVSSDGADTMKNIWNFYTGKNNCANIFEYINNKNQNESLDKANPVILLFDNEQKSDRPLKNFLKYLDIKLDDGQISKQLRANLFLQTIPLMKGLEECEVEDLYRDEVLSVTIHGKNFCRSAEDDSEKYFGKHIFSMYIKEHYNRIDFSNFLEILDSINNLC

SEQ ID NO: 1322 - protein, 583 aa, unidentified
  source 1..583: note = Related to JAEUGG010000004.1; note = Peptostreptococcus stomatis
MSSYTLFLFIMNNYREARQSVSKLIGIELRKLTYILYEKKTHSFYSTFIIPKKNGGNRKIYAPDDELKWVQKKLANKLHSIHAQYLEDNNIKSVISHGFEKDKNIISNAYIHKNKRFVLNVDISNFFDSFHFGRVKGFFIKNKAFNFSDEESTILAQLVCYNGKLPQGAPTSPLIANLIFNIADLQILKLARAYKLNYTRYADDLSFSTNISTFGSAYSLFLEELSSILIKNGFKLNEDKTRLQFFSSRQEVTGITVNQKLNVSKKFIKDTRAMADKLYKTDEFQINGTNGTLNQLEGRFSFINQLDWFNNKCEYKINKKSSEKKYIHSLNTREKQFQIFLFYKYFYNPDKVTLVTEGKTDIIHVKAALKKYYNKYPELIVKKGDEFEFKINFLKRTDRLAYFLGIVSDGADTMKNIWNFYTGHNNHYNINDYLENKSLNNIKQVNRKPSILLFDNEQIKDKPLDSFLKYTNLELKDNQISIKLISNLYLQTFPLISNMREAEIEDLYSTEVLNTEIRGKTFKKDKKINKNKKKNSDNDTESSNKHYGKHIFSQYIKENYASIDFTNFIPLLDSINTIVMNNK

SEQ ID NO: 1323 - protein, 484 aa, unidentified
  source 1..484: note = Related to JABZQL010000055.1; note = Mogibacterium diversum
MNRYKLARKNIANLIDVNPSTLTYVLYVEKIEQSYKIINIPKKSGGTRDICIPSPQLKSVQRKLANMLCTKHSEYVVYNNINQAVSHGFERKRSIITNASNHKNKKYLLNVDILDFFDSFHFGRVKGFFKKNRNFVFSEEEATIIAQLSCYKGKLPQGAPTSPIIANLIFNIVDLQILKLAKKYRVYYTRYADDLSFSTDMNKFKNMLPSFLKELKLLLEKHGFELNDEKTRLQTRECRQEVTGVTVNEKLNPCPIFVRKTRAMADRLYKTGDIYLEGCVDDEDISLKKKRLEGRFCFINQFDSFNNMIEYGHNNSKLYKKHQAKLNKRETQYQRFLFYKHFYNPDAPLLVTEGITDIIHIESALMKHYVRYPRLITKTEKGFEFNFKFLNRTDKLKFFFGISEDGADTMVNIYNYYSGTNCTNIDKILEKKLPPKQSMGTRNPVILIFDNEQQGNKKPLKKFLNYSRKKLNGNLYSRICSNLY

SEQ ID NO: 1324 - protein, 543 aa, unidentified
  source 1..543: note = Related to MNSF01000070.1; note = Coprococcus sp.
MYINEVNDRERLAILLDVPLQKLTYILYVKKTDNCYKQFQIPKKDGTMRIICAPNDELKVIQRKLANELWKYHLYYMEKKNIESNISHGFVKGRSILTNANIHVNKKYIVNMDIEDFFPSIHFGRVRGYFNKSNEFNLSENVSTIIAQLTCYQGVLPQGAPTSPILANLLCNILDMRLLKVCAKYKVDYSRYADDMTFSTNDKYFIVNQSRFIDEIEKEVEEFGFKINKKKTRLDFYSSRQNVTGLIVNQKIGVDKKFRKDTRAMAYSLYKNGEFKIDGEIGSVYQLEGRFAFIDQIDKYNNKSDIQKNIWGLNSREREYLKFLFYKNFFATNKPVIITEGKTDIYYLKAALQKYYVQYPKLITKKDEKFIYNINFFERNSKTQFFFNIKKDGADTLKNIYNLYTGLNNFPNLYKYFLEVCKYIPKTPVILLFDNEQKTNRPLKNFLKYINYKDGKLIGKKCLIGNLYIMTNPLVKNLEECEIEDLFDDEVLNVELAGKTFSRDKNIDLSKKFGKSIFADYVLKNYKSINLENFKPILDSINE

SEQ ID NO: 1325 - protein, 561 aa, unidentified
  source 1..561: note = Related to FMEJ01000011.1; note = Clostridium sp.
MKNIKTRNDFAKFIGVKLQTLTYLLYIKKIDNCYNTLEIPKKNGDTRTICVPNKNLKKVQKKLYNKLSTYYDEIKTQNNFTSKISHGFEKNRSIVTNAEVHKNKRYVVNLDLLVFFPSINFGRVRSYFIKNNYFEINDDIATILAQLTCYKGTLPQGASTSPLIANMICNIMDIRILKIAKKYRLDYTRYADDLTFSTNNKYFLNDYDKFLEDIKNIIHRSGFELNSKKTRLLFSNSRQEVTGLVVNKKISVPKEYYKNTRAMAHSLYKNGYFLIDDEVGTIEQLEGRFSFINQINLYNIDNKKKNMWHLNSKEKQYQKFMIYKTFYANEKPLIITEGKTDVLYIKAALKKYYKYFPNLITKKDNGNFVFHVNFFKRKQKHSYYLNLVKDGADTIKNIYSNCYIKTKNNKNITTVHDFKKLCGERETNPVILIFDNEMVSNKDRPLKKFLNEIKVNASQKDKLKENLYINICDNLYLCTYQLNNKEACEIEIEDLFPADVLEHEINGRKFSKKDSTHDNGFYGKNEFSQYVYSNYESIDFSNFISLLSAINEIIELYPNNI

SEQ ID NO: 1326 - protein, 660 aa, Streptococcus sp.
  source 1..660: note = Related to FIHB01000001.1; note = Streptococcus suis
MFFKEIKDLNHLSSILGIDRNTLNNLLNQKYREKLYETYYIPKKDGSDRQICAPKEPLKSIQKKIAELLWQNQLWVNHKKEEKYIQDKKMLREEKYRIQTFSETLEDINSSYKLTLEIKKDYRFQNDIIQAFEKGKSILTNAEIHRNKKYIIKIDLEDFFDSFTFYRVKGYFEKNRDFQLSKEISMTLANLVCYKSKLPQGAPSSPILTNMIGRILDSRILKICKRYRLKYTRYADDMTFSTNDDTITKTLDDFLSELDNVIENSGFKINEKKTRVSYWNSRQLVTGLVVNKRVNIPREYYKATKGMAHQLYLGNDVHIKGKKIKKPINQLTGRFAFINQVERFNNERTNLEQTEFSSKEKSFQRFLFYKNFYGAEKPVLITEGKTDIRYIRAALKKLHDKHPSLITLEEGGKAKYKLTFFKKSDVIEQYLDLNKHGGSIFEKIWNLYCNNQIFKKKNFNNVYEYFKRIDSKYKSPVIMIFDNELDVKDSPIQQFINKFGSNVKIVWNTEYKENIHVKLQELKQAGKTRQQIDSEIKKFQKDFTENKKTQLITELRKKDYAHLKDNLYLMLIPLVKPNQSKSDIEALLLPEDIEKINQKLGKQFNPSEKEFIEKDNYSKDKLSKQVIYNYQNISFENFDSLFKNVEKIIQHNFLKRVFKK

SEQ ID NO: 1327 - protein, 311 aa, Streptococcus sp.
  source 1..311: note = Related to NZ_UHFV01000002.1; note = Streptococcus macacae
MIFKEIKDLNHLSSRLGIDRNILNNLLKQKYREKLYDVYNIPKKDGSDRQICAPKEPLKSVQKKIAELLWQEQLWINHEKEEKYIKDKKMLREENFRTQTFSEAIEDMNSGYKLTLETKKYYRFQNDIIQAFEKGKSILTNAQVHRNKKYIVSIDLKDFFDSFTFYRVKEYFEKNRDFQLSKEIAMTLANLVCYKSKLPQGAPSSPILTNMIGRILDSRILKICKKYRLKYTRYADDMTFSTNDDVIIKKLDDFLSDLNSIIDNASFKINEKKTRVSYWNSRQLVTGLVVNKRVNTPREYYKATNWTFCIH

SEQ ID NO: 1328 - protein, 350 aa, Streptococcus sp.
  source 1..350: note = Related to NZ_GL878548.1; note = Streptococcus sanguinis
MDLKDFFDSFTFYRVRGYFEHHKDFLLSREIAMTLANLVCYKSKLPQGAPSSPILTNMIGRILDSRIRKLCKKFRLKYTRYADDMTFSTNDDDCFARVKDFLHELNIIVEDAGFTVNDKKSRICYWYSRQTVTGLIVNKRISVSKKYYKATRGMAHQLYIGREVYVNKEKVDNPIKILSGRFAFINQVDQYSDNILGLERNIFSTREKTFQRFLFYKYFYGIDRPMLVTEGKTDIRYIRASLKKLNKKFPELINLENDGKAEYSITFLKKSTVLEKYLGLNKHGGSIFEKIWNLYLNNNLLNNKNFGDIYNYFKRIGSPYKSPVIMLFDNELDEPDRPIKQFLDKIQKNG

SEQ ID NO: 1329 - protein, 546 aa, unidentified
  source 1..546: note = Related to JAGZSC010000015.1; note = Clostridiaceae bacterium
MEFKDITDKRLLAKFLGIKYKELTYILYSKRTENLYQTFEIPKKNGKMRCINAPQEPLKYVQRNLAKQLISIQEKYYLETNNIIQGFTKKRDIISNGSYHRNKRYILNLDLENFFDSFHFGRVKGYFQKNQYFMLNSNVATCLANIACYKGKLPQGSPSSPVITNLICSILDRRLATIAQKYRMTYTRYADDLTFSTNRRDFLENKDELISELYAVIDKSGFKVNRNKTRVLFWNSRQEVTGLVVNKKISVKREFYKETRAMLDHLYKGLIVEHNGIEVSLQQIEGRLSFINQIDKYNNKHGGERKNVQKGMNGREKEYQQFLFYKYFFCPSKPVIVTEGKTDPVYIRSALQKFYIQYPKLIRKKEDGSFEYLITFLKRTSRLEFFLGIQQDGANAMKNIYNEYVGNNQYPNLYEPLRKYGLKSSNPVILLFDNETVTKRPLKDFLNHINNKSGMDYRLWLNIHENLYLATIPLVKGQKECEIEDLFSDEVLSHEIDGKYFDRKGKDGEKSYSKQIFASYIAQNISSIDFTNFVPLLDALNEIVKN

SEQ ID NO: 1330 - protein, 569 aa, unidentified
  source 1..569: note = Related to JAFUUI010000025.1; note = Ruminococcus sp.
MLRIKECDNVYQLAMCLNLNTAVITNILYNIKTDNCYRQFKIPKKNGKTRTICAPNAELKSVQKRLANALYYELKLIREENNINSKISHAFEKKKSIISNCEIHKRKRFILNVDLKDFFDHFHYGRVYGYFLKNKYFLCTDETARTIANIACFQGKLPQGAPTSPIITNLIFQAVDARILQLTKKHHLDYTRYADDLTFSTNEQDFIETYNDFLNKLTRLIEKSGFEINQNKIRISCHDSRQTVTGLIVNDKINVCNDYYKLVRAYAHSFYKTDSFDIKDNNGKVIKSGNANQLEGMLAFTHMIDKHNKTIKKNPAELQHSLNKREREYQRFLFYKYFYHNERPLIITEGKTDQIYLCCAMKKYYREFPELIEQRKSGFHFKVQFMKKSKRMLEMFSFVQDGASAMTTLYLNYYKKNSKFPDYYQYFSQITCKSASNPVLFIYDNELCSKDKPLYELMKKEKKSMVDKIEKDGWVSMSSKKNLYIVTNPLVDSKKECEIEELFTTETLQKEINGKTFSLEKNYDTNEHFGKDIFSKIIAKEYEQIDFSRFIPFLERIRDAIVDYNNTEA

SEQ ID NO: 1331 - protein, 564 aa, unidentified
  source 1..564: note = Related to NZ_WQRC01000021.1; note = Anaerostipes hadrus
MQMINEVTTRDELADLVGIPYRKLTYILYKKYVENMYTSFEIPKKNGGRRLINSPNEELKYIQKNLVKALYRYEQTLLDKDINIHSSVSHAFENEKSIFTNARIHRNKRFIINVDLENFFDSIHFGRVRGYFLKNNYFRLTDEVATVIAQLTCYKGSLPQGAPTSPIISNYICNIFDLRIMKLAKKYRMNYTRYADDLTFSTNDKHCIEYQDEFLLKLKKEIDRAGFSINQTKTRISYKNSRQEVTGVVVNQKISIKREYYKITRAMADRLYKTGEFFIDGEKGSIHQLEGRFDFINQAEWFDNKYFKKKRNFYSLNGREKEYKKFLFYKYFFANEKTLIITEGKTDVIYIKAALKNLYKEYPELVTRNEKGEYQYKFSFLKKSKRLDYFLNIKKDGADTLKNIYAYYSGKSEVNYPEYMTEFENSQGIRAQNAVIMLYDNELQQKTKPVAKFCKVNMSDDQIKKLKKEEYVLLNSNLYLMVTPLQKGKSISDIEDLFHSELLKTKLDGKIFTKNDKYDTKIYYGKDRFSKYVMKNYAKIDFEAFKPLLNNIKKIVYEYKKIEE

SEQ ID NO: 1332 - protein, 562 aa, unidentified
  source 1..562: note = Related to JAGZGD010000017.1; note = Lachnospiraceae bacterium
MKMINEVKSRNELADLLGISRKRLTYLLYIKHLENMYTSFEIPKKSGGQRLINAPNKELKLIQRRLANELYEYHTRLNKDKQINGVSQAFEKEKSIFTNAKIHRKKRFIINVDLENFFDNIHFGRVRGYLIKNKDFQLSEEVATVIAQLTCFKGSLPQGAPTSPIISNYICNIFDLRIIKLAKKYKLNYTRYADDLTFSTNDKYFMENWEAFLGNLEKEVERAGFHLNEKKTRISYEDSRQEVTGVIVNKKISIKREYYKNTRAMANNLYKTGEFYINGEKGSLNQLEGRFTFINQAECFGKKINFQQLNGREKEYQKFLFFKYFYANEKPLIVTEGKTDVIYLKAALKKMYRDYPELVTRDDKGGFHYNLSFLKKSMRLKNYLNIQSDGADTMKNIYLYYSKQSNKNYPQYIKKFENIRGSRPQNVVIMLFDNELKEKDRPISKFCKGTVKDEQKVELQDKLHILLETNLFLMVTPLKEGKEISDIEDLFPDEVLNIEIDGKKFTKKDKYDTKENYGKDRFAKYVMKNYGKINFDGFRPLLDKIKFIIMQYKEGDKGEKEN

SEQ ID NO: 1333 - protein, 557 aa, unidentified
  source 1..557: note = Related to NZ_AUJA01000011.1; note = Butyrivibrio fibrisolvens
MLLSEIHTRYEFAQLLGIELKELTYLLYIEKVENLYTTFSIPKKSGGERCINAPQKKLKYIQKLLKVLLESYEEEICCANHINTGVAHAFKKRRSIITNAQKHKNKKYIINIDLENFFDSFNFGRVRGFFIKNKYWNLDPNIATLIAQISCYNGVLPQGAPTSPIITNMICNIMDWHITKIAQKYKLIYTRYADDLTFTTNDKKIVDKYDDFLLELNREIEKSGFKINNSKTRFTNNLNRQVVTGLVVNSKVSINREYYKKTYAMAHSLYRSGEFTIDEKKGTINQLEGRFSFIDQIDKYNNRIDCNIKHDIWHLNHREKKYQEFLFYKYFCANNRPLVITEGKTDIIYLKTAYRILRQDDTKLFIPEDNEIDYGVSFLRKSDRLDYFFNLKKDGASPMTNILDSYLGNKTFKISYYEQLMAKYKITPNAPVILLYDNELNKKGAVRDVINSKKLDIESLKEKNYIRVIGNLYIQVVPLVKGKEDCEIEDLITENVDDLIIEGRHFDRKGKADKEKFYNKDVLSHYIEEHENEFHFDCFKELFKTWDLIIEDYNSLK

SEQ ID NO: 1334 - protein, 573 aa, unidentified
  source 1..573: note = Related to KE159810.1; note = Lachnospiraceae bacterium 10-1
MNLEDVCTRNDLADFLGIKRGKLTYILYIQKVDTMYSTFSIPKKSGGERTINAPNDDLKQIQRKLADALWNYQVKIWEKNKIQTNISHAFQKSKSIVTNSMRHVRKRYVLNIDLKNFFDSFHFGRVRGFFMKNLFWGMTEEAATVIAQLTCYKGALPQGAPTSPIITNMICNIMDMHLLSIAKRYKLNYTRYADDMTFSTNDKHFMEHYDAFYKDLSKEVLGAGFQINEEKTRLLYNDSRQEVTGLIVNNKISIKREYYKNTQAMAHSLYTNGFFTINGEDGTISQLEGRFSFIDQIEKYNNSHDGAKHSAISLNHREKKYQEFLFYKNFCINPKPLIVTEGKTDILYIKSALRKMYLQYPDLIEKKDNQWIYNLSFLHRSSKLSYFFDFNVDGADTMQNIYNMYTGSGRTHVNYYRHFREKYDLNMHQPVILLFDNEFENSEKPIKKFMNNIGSDKKGKNKAKGESKQRETSLQNELFLHLIGNLYVQAVPLAPSETSGEIEDLLGKNILNMEIDGRKFDRTGKKDKSRFYNKDILSKYILSHYEEIDFSLFIPLFDTFRKIKNDYSDQKNT

SEQ ID NO: 1335 - protein, 564 aa, unidentified
  source 1..564: note = Related to JRFX01000003.1; note = Lactococcus lactis
MSYNEARNNVAEKLGVPPKLLSYLFRRGIDKFYKEIEIPKKTGGLRKIMIPQNQLKSVQKEILKMLQKIYIENNVETTFSHGFEKNKSIISNARMHKNKYLVLNLDLEDFFGSFHFGRIRGYFEKSNNFQLSHEESAVLANLICYKGFLPQGASTSPIMTNMICHFLDLKLHYIAKKNKFTYTRYADDLTFSSNNIKTESECEQLLFNIEKQIKKAGFKINKSKTRLQFRNGSQKVTGLVVNKKVNVNNTYYKTTRAMANKLYREGSFNINGNKGTVNQLEGRFSFIDQLNFESNKNDKSMSTVKHGFSWGSDNRKDYLVNRREKSYQEFLFYKYFYANEKPIILTEGKTDITYLKAALKNMYQDYPSLIEKKDGKFNFKVEFMKRSKRFNYFFGYFEGGNGMKNIYRLFFHSPYKYYEKFYKKRQIENHNPVFLIFDNELVDNLKPLRSFINFTNLNTNDNIRFLEEQHYLNLDKNLYAITHQLMNDKSMMEIEDLFLEDVLNVRLNNKSFNRKDNADRESTFGKSRFSDYIAEHYKTINFENFKPMLDIIRNISDNEKNIRL

SEQ ID NO: 1336 - protein, 558 aa, unidentified
  source 1..558: note = Related to NZ_JADPDD010000032.1; note = Lactococcus lactis
MNYNDARNSIADKINVPPKLLSYIFLTGIDKFYTEIEIPKKNGGVRKISIPQNQLKSVHQEVLKFLQKIYKNSDLATVFSHGFEKNKSIITNAQVHKNKRIVLNMDLEDFFYSFHFGRIRGFFKNNKFFKMTHEEATVLSNLICYKGVLPQGAATSPIMTNMICHFMDLKLQHVAKKHKCSYTRYADDLTFSTNNKNTVENYKELIKDIKTQINKAGFKINDDKTRLQSKENSQRVTGLVVNKKVNVSHYYYKKTRAMAESLYKTGKFYINDQEGDIKQLEGRFSFIDQLNFANNIQGKKDGTGYHGFFTTGNDGKIAVNNREKSYQKFLFYKYFYANDKPTILTEGKTDIKYLKAALKKMYLLFPNLIKKKETGFEFKVNFLERSRRFDFFFGYVEGAEGMKKIFELYFRKPFYYYNEFQLKRTFPNQKPVFLIFDNELKNNKKPIRKFINFTNGNVELKVSKVESENFLHIDKNLYLITHQLMNDKDEMEIEDLFSTDVLSAKVDGKIFDRNDNADRSKTFGKAVFAEYITRNYRNIDFSNFIPMLHRISEIISNT

SEQ ID NO: 1337 - protein, 636 aa, unidentified
  source 1..636: note = Related to JAFREC010000076.1; note = Leuconostoc mesenteroides
MKNKNKANDIKKFVMDNIKIDTIRHSDDYLPYFYYLYPQWAPDHTKIINTLANISASYCNVSIPKKISGTRNLSVPNKFLKPLQEFVKLLITNQLKSNNFSFSPIAQGFIEGRGIYTNAHIHRNKKYILHLDLKDFFTSIHFGRVSGFFIKDKNFKLQPHIAYFFANLCCLDGVLPQGSPTSPIISNLIAQHLDKKVLLLSKKYHFTFSRYADDLVFSTNDTKIIVNELPNFLNSINSIVKNQGFEINWDKLSLMGPDVRHTVTGLSNNVRVSVTKNFYLETRAISENLYVSNSFFVDNKLFLGHSDKSITENLKIVEGRFAFIYDIEKRNRQFYSKKTFGKALQGKNNNNYQPNHKITFLESKNKKQGASDIGQNAFNGKIWAYSKFLFYKYFIYGDKLTIFCEGKTDPIYLKAAMGALGYNNAVTMYSIETWLNEKNVFVNLFGLPMGGSGLQKLIYYFLTPIKNSKSYYDFFEKKTLSMKPVVLLVDYELKKDKPLNNIINAICIAKKLSNNEKVKLKNEIESDLDKNGYYFLGNNVYIAVTIDFNSKKDTDRAIEEYFPTNTLLDIEGNQTRHFGDENCKVINKNKHLISNNSQPMEKIDFAIWSLNHRYNRNLFIGFINILNILITSEMTI

SEQ ID NO: 1338 - protein, 660 aa, unidentified
  source 1..660: note = Related to QFDJ01000030.1; note = Leuconostoc pseudomesenteroides
MNIKKISLKISDFSHRDSFISTLEKYKKHFGTFDVQSTIQNASALYSEKKIPKKISGFRVISIPSPELKIIQVFVKELIENQLEYFDYKFSVVNHAFQKEKSIYTNAQVHRNKKYILHVDLKDFFSSIHFGRISGYLSKNKNFKLPSYMAYFFADICCLNGILPQGSPASPVISNLIAENLDKKVLSLSKEYHFIYTRYVDDLVFSTNDTAIIMNYMQDFLYKLNAIVENQGFHINWEKLNLMGPDVRHTVTGLSNNKRVSVTKDFYLTTRSIANNFYCTNSFYSKGILYSGYESSDRQKNLNFIAGLFSFIYDIEVRNKNFHKEKTYGESLQGLNHNNYQPRHKVSMETNNSLSDQIFNGKIFLYSKFLFFKYFLFGDIITVFTEGITDPLYLNAAIKSLDYQNEVELISIQEMQNKEMVFPKLFNLSRGGSALRRLIDYYNDTVKNGKTYYDFFKNKMVPLKPVVLLFDYEIKKNKPLGQAINLLLNYGHNSQTVEDELRENGFYFVGDNLYIATTVNFNDKTDDDRAIEDYLPIQFLGDVNGDHTRHFADEKSKFFREKKIAISELSTPMYKEELAQTVLKKTSDIVIFKDFSMILSIFSEIRLGYMNKVIDCINEDRINTIYNILDSKSASEIIDKNTELKKKFDEKLSDLLKIHA

SEQ ID NO: 1339 - protein, 695 aa, unidentified
  source 1..695: note = Related to NZ_CP086132.1; note = Lacticaseibacillus paracasei
MKHFEYHRQKKISDFHSRDSFIHELHIVSWITDERKQLFSRLLNSPGNFYKEFSIPKKYGEGERIIDAPNEDLKSLQIIIKSLIENQLKVKEFVFGKYDQAYQKNKGIFTNAQIHRNKKYLVHIDLEGFFPSIHFGRVSGFFQKSRLFKLEPPMAFFFANLCCYKGHLPQGAPTSPLIANLIGEKLDREVLLLSKKFRFTYSRYADDLTFSTNNVKSITNDFRSFMDALNYMIEKMGFNINWDKVGIEGPDVRHTVTGLSNNKRVSSTVDFYKLTRAMANSLYVDNEFFDAKRSYNAYTQKSLEKAIQVIEGRYAFINDIEDKNKKLYERHSGGEEYQSITPTDFREHHYISSRLNGVSKENLPAIYSGKKLSYSRFLFYKKFLAGDAMTVFTEGKTDPMYISAAMKALTPNLKITFTIPQVEGENQTQFANLFDLNRGGASLRRILDIYFGISTGGHASISHPLYFEKKIISIKPCVLLLDFEFNDGQQKSEKANSKKKNSSSPHPLVVVLNYIFQNRRIAKKKASIIKDDLIKNGFYFVDENLYIATTTDRSGDKTNRAIEDYFPASFLNDPYGDGTKHFENAPMLKKDNGFKDSDSLRKYDFAKYVKTQTETVDLFKDFNVLFDIFNNIRKDYNRRLLKKIADVSTNYTILAKNTMYRILDSDILRKEIAHDSDLNQLFFDNYKKLFDVSSY

SEQ ID NO: 1340 - protein, 674 aa, unidentified
  source 1..674: note = Related to VBTH01000020.1; note = Pediococcus stilesii
MTKFKYNREKKISDFKTRLSFVRELYSIGLNSIDIFKLSKNINNYYTEFTIPKKYGTGVRTISAPLGDLKQIQQIIKKLIENELTYCNYTFGKYNQAFQKNKSIFTNAQIHRNKKYIIHLDLKDFFSSIHFGRISGYLQKNSKFRLTKDMASFIANLCCYNGMLPQGAPTSPIISNLLGESLDRKLLKISKTYHLTYSRYADDLVFSTNDEKIIAQKLSELIEVISTSVKKSGFQLNWDKLNFMGPDVRHLVTGLSNNKRVSSTIDFYKNTRSMALNFYVKNSFYAGKHFYNGYTIRNQQRSMQVLEGRYAFINNIESQNRRLYENHLSGAEYHAITPQDFKDRHNLIKAKKHDEPSFSGKELSYSRFIFFKKFLFGNNISVFTEGKTDPRYIQAAMRALNSDIQLEVTSFQTESDLNTQFSKMFNLTQGGTSLKRIIDLYKGTNYQYGKRALSAYYNYFDLDNSKIKFVPMKPCILLLDFELLGPTSPLQTIINRLMGARKNSYTIDSKENIQKNLKEKGFYYIFDNLYIVTTIGSNDTENQKNRAIEDYFPKEFLADIYKDGTTCFENAENKSDNSRKLISKNDFSILIESNFFNDPEIFKNFQILFDIFGKVQFDYLNKLLNRIDNNPSAQHVIFNILDSNFIRNIINENHSLREKFLMIFNKYFLRNYQK

SEQ ID NO: 1341 - protein, 669 aa, unidentified
  source 1..669: note = Related to SGAX01000001.1; note = Weissella paramesenteroides
MSYKISDLNTKNDIINYLMSTKSISSPKIFYKILNDVSAHYSDIYLKKKYSNDVRHINAPDEQLKSIQHKIKILIENQLSYKNYKFNNISQAYQNGKSIFTNAQIHRNKKYVLHLDICNFFDEITFKRINGFLQHNSKFMLNYTVSTIMTKLCCYDGHLTQGSPVSPIISNLLGEKIDLVLVKVAKKYHFVYTRYADDLVFSTNDTYTINEKLTEFINKVSEIINSQGFSINWDKLSIAGPDVRHTVTGLTNNKKVSVPLEFYKQTRAIANHFYIYDEFYNNQQIYRDCYVKNFNKTPMKIIEGRLNHIYNIENQNRTLYSDHLSGFEYQAITPIDYKRHVFSPTENKETHEVINEFSGKELEYSKFIFYKFFLYGDFITLFTEGKTDPLYIKKAKKILGIDDFDLKIYDADTEINKKSIFSRLFNLHTGGKSLIKIFEIYVGRATDQHFINYSKYFEEKTFSIKPTVLLYDFELYSRNSPLGNFISIICGKKYKHYGFKRNVIIKELKTKGFYRVYKNLYIAVTMDFNMIGLNTQEEDIKRSIEDYFPSQLLSNTNGLNTEHFEGVSAPNSHSVVIDKNQFSKRIQTYTDKKIFNNFNNLFDIFLDIQKDYLSVLLSRLDKSNLDNPVEKRMVINCLYRILNSNKTLQLIEQFKLTKLFMDVYNKNFL

SEQ ID NO: 1342 - protein, 665 aa, unidentified
  source 1..665: note = Related to SDQQ01000001.1; note = Weissella paramesenteroides
MAKKLSDITNKNQLIQVLIVAHAITNGKTFYNVLNNIDKHYTEFSIPKKYSNELRTINAPDSELKKIQKQIKRLIENQLLSKKYYFNISSQAYQKNKSIFTNAQIHRNKKYILHFDIENFFDNITFRRINGFFQKNKRFKLPYNISTILTRLCCCKGHLVQGSPISPIISNLIGDGLDYKLRKLSNKYHFIYTRYADDMIFSTNDSKIITNKLQEFMKDLQDIIEQEGFSLNQRKYTLMGPNVRHYVTGLTNNKKVATPIEFYKSTRAMANHLYKYGEINVNGKIFDSNSYPSPVNIVEGRLNHIYHIEQENRKLYQEHSAGFEYFPITPLDYQKHTNKLKINNDTGSIINELSGKELEYSKFIFYKNFFYGDYIKVFTEGKTDPRYIKKAYSMLRPNDNSIRLSSVESLLNHNNILTKVFNLHQGGDGLTDIFNMYTGNQSNENKYFNYTQYFNLKTLPIRPTIILMDFELNNKNKTSPLNNFINNIVNTLLGGKGRNKEKERNKIKQELKEKGYYRIYSNLYLAVTTDLIEITSHTENKTIDRDIENYFDIDLVKDMFQRNMIHIKDIRSVCKVSELINKNEFSKSIKKINDATKFTGFQNLITIFSNIHLDYLELVLNKLLLTRDNPLIYTQTIKKIKSSNYIIHMITGNQKLNNLYKQLNL

SEQ ID NO: 1343 - protein, 606 aa, unidentified
  source 1..606: note = Related to BJJW01000002.1; note = Leuconostoc citreum
MLNEAKTIDELAACIEMQPWQLKKVLYSGGGANTKYRQFEVIKKTGGIRKIDAPEQSLKHVQKRIAAKINDLLALEKGDAPFVPLSQAYQKGHGIYTNALVHRNKKLVLNIDISDFFPSLHFGRIAGFFMKNKNFLLSKEVAVSIAQLTCHNGVLAQGSALSPVISNLIFQAVDQHILKVTRKYKLTYTRYADDMTFSTNNFGFLNELEEFVKSIESQIKADGFSINWSKMRLSGPDVRQTVTGLSINKKVNVSKQYYKNTRSMALSLYTTGFFHVDGQRYDQNMLSKLEGRFSYINDIVRKNNLLYEQYSFEYLATRANNKSRLLNEKKSKPSLHPEAFSSSEKAYRNFLFYKYFYKNKKPLIVTEGHTDAIYLKTAIKNLKISNLNLDFLKRSKMTKYFFGFIKGGDSLKNIANLYLSSQKSNVNISNKMYNYGVIPDQPVILLLDHEMHKKEKKDSPLLPLANYLKGVSKFPEIEDFFCELHKHGFIHLTSNLYIAVVSKKGTTKDDIYEIENLFPNTLLNDVFGMGTFEKVYSGKGRKIDKNDFALIIRKHWNNDIFQGFKVMLDVIDKVCLDYEKRKQRMLEKRQNDEKKAVKVGNTNNKL

SEQ ID NO: 1344 - protein, 584 aa, unidentified
  source 1..584: note = Related to FN822744.1; note = Leuconostoc gelidum
MYLNEAKTIDDLAECLEIKTWQLKKVLYSHGGANNKYFQFEITKKSGGTRKINAPEKSLKLVQKKLATKINDLLHEEKGEAPFTPLSQAYQKKHGIYTNGLIHRNKNLVLNIDLLNFFPSLHFGRVVGFFMKNKKFSLTNEVSVAIAQLTCHDGMLAQGSSLSPVISNLICQSIDQHILKISKEYKLTYTRYADDMTFSTNDFNFINRLEQFVKLLETQIKRDGFDINWSKMRFSGPDVRQTVTGLSVNKKVNVPYQFYKNTRSMALSLYTTGHFTIDGQEYDRDKLYKLEGRFSHINDIDWKNNLLYERYSFEYQAMRPNNKSHLLNGKISTPYLYPEAFSSREKAYRNFLFYKYFFKNKKPLIVTEGHTDIVYLKSAIKNLQRNDLNVDFLKRSKSTKYFFGFIKGGDSLKNISNLYHNSSLMNISNKMYKYGIKPDQPVILLLDHEMYKKVQKDSPLMPLANYWKDVSKFPIIQNFYDELHQHGFIHLTSNLYIAVVSKKGTTKDNIFEIENLFSDYVLDKVFGLGTFEKKYKGSGRKITKNDFSLIIRKHQKDSIFEGFDKMLDIIHLVCVDYEKRSGQQ

SEQ ID NO: 1345 - protein, 610 aa, unidentified
  source 1..610: note = Related to NZ_CP060724.1; note = Weissella diestrammenae
MNLNEVNDVVDLARVLHYPSRKIKKILYRDRVDNQYFEFSLAKKSGGSRLINVPNEVLADLQNCILIELKRYMNNHDIKFSRVSQAYQKDREKGIYRNARIHRGRKYVINVDLEDFFPSIHFGRVVGFFEKNNKFKFTHRCAILLAQLVCYKGYLPQGASTSPLISNLICHTLDIHILKIAKKYHLRYSRFADDLTFSTNDDEISTEEQMHNFIKELTRQIGRDGFKVNWKKMRIAGPDVRHTVTGLVNNKIVKVKKEYYKNTRAMVNQLFYTHRFIIDGVKYNIENDESKKGGIKKLEGRLAFIDDINRRNNIEYLDDITKKAMTRVQNPKRYDKFSAFERMYRQFLFFKNFWQRNTPLIVTEGKTDVLHLKEAIKNSDILLPNISFFKPSSRFDFFLGIGFDGASKMDKFINLYIKENSFENLSIKFRKIDDIKKENDLFGLSGESKPVILLFDHEFADLESPINMFINNLSKDRTYRHIESKKIEELEKYESEKQNSNAIKKFLKKKLNENGFIHLVDNLYVLVIKKDVPSINEKYAIEGLYPIEVVNNVFGLGVLETYADNNFENVLSKNDFSKIIRHKPAEIFRGFRPTLSCIEEILKDSENRNN

SEQ ID NO: 1346 - protein, 564 aa, unidentified
  source 1..564: note = Related to LFQN01000005.1; note = Exiguobacterium acetylicum
MKFNELRNRNDLASILKIPKNQFSYLLYKLNVNKQYEKFEIPKKSGGTRTIHSPNDRLKYIQKRLNEEILNFIDDSDYPKSKISHGYEKGKSISTNASVHVKKRYVLNIDIEDFFGSINFGRVRGFFNKNKFFSLPLEVSTIIAQICCKDGVLPQGAPTSPIISNLIGHTLDYRISILAKKYKMNYSRYVDDLTFSTNEKNFELYLENFLSEFDAHLNNAGFKRNKKKTRLQYKRSRQSVTGVIVNEDLSIPNDFYKNTRAMLNEFIKNEKFFIDKKDNYGTLNQLEGRLSYINHFEKMKNMRNAKNKEVNKKNHTKFSTKEKEFKKFLFYKNFIINDKPLIITEGKTDVLYLKAALKNLHSEYPNLIEKKDNGNYDFKVKFFQRSKRNRYFFIISKDGADAMKNLVDLFIDKRSNNVNECVMTKIKTMRKTKALNPVILLFDNEMVTDRPLKNFLNFIKISPEDRLKFGLSLNTCISDNLFLLTNDIPLKKKDVGEAEIEDLLPENILNHVINGKMMNYTNGKDKQSISKDFLSKYVVSNYEKINFDKFRPLLNSLNSIIENY

SEQ ID NO: 1347 - protein, 558 aa, unidentified
  source 1..558: note = Related to DPHU01000079.1; note = Eubacterium sp.
MVISDIESREQLAFLLNIPLSKLTYLLYVKKIDNCYTSFDIKKKNNGVRVISAPNEDLKDIQRKLGYLLESHHKAFLKEKNIDNKISHGFEKNKSIITNAAVHRNNKYILNIDIKDFFDSIHFGRVRGFFNKNIEFNLPLDMATVMAQLVCYKGVLPQGAPTSPIVSNLICNILDIRILNLVKKYRMNYTRYADDMTFSTNDRCIVDNYDGILEEIANELDKFGLYINDKKTRLIYKDSRQEVTGLVVNKIINVNRDYCKKTRAMAENLYRKGSFYIGDEEGSIKQLEGRFAYINQLDFYNNKRKGEKKDCWHLNSREKNYQKFLYYRYFFNNEKPLIVTEGKTDILYLKSALKKMYDSYPNLISKTKNGFEFKVSFLKRSKRLEYFFNINQDGADTIKNVLNMYTGQKGFANYYKYFKDKSEKDGRNPVLLIFDNEQKTDRPLKKFKKDAKIQDVNIKNWINILGNLYLVTNPIVNGKDECEIEDLFSESTLNTLIGGKSFSRNSKSENDKYYGKAIFADYVMKNYQKIDFSNFVPFLDSINSVLDDYQKKNLIQSQ

SEQ ID NO: 1348 - protein, 608 aa, Streptococcus agalactiae
  source 1..608: note = Related to LBLH01000065.1
MMSYKEIDSKRKLALYIGVPVKQLTWLLYVRKIENCYNNSFSIKKKNGDDRIINAPNKSLKYVQRRLARLLLKRLNEVYVEGNIINNISHGFFKGKSIKTNAVPHRNKKYILNIDLKDFFDSIHFGRVQGFFKNNNHFKLPEVATIIAQLTCYEGKLPQGAPTSPVISNLICQILDYKILSLCKKYRLTYTRYADDLTFSTNDNNFKDNYSNFLSELDKVVVRSGFEINSNKIRFQEFNYRQTVTGLTVNKKVNVRQDYYKRTRSMAHSLYTTEKYEINGRNGTINQLEGRFSFINDLVKYNNRLVEQNSLRLNSIEYKKNLLYTQDSEFVNRTNKNPWKTNLNSLSIREKDYQKFLFYKYFIANPQITFIPEGKTDEKYIKAALKRYYKDYPNLVKKVGKKFVYNITFIDRSKRWKYFFGVLEGGGSDLYQLLNYFTNAENRTCRNYLSHFKSIIPNPPKKPVIFLLDNEFDKKKPLNQFIKKLLIANGLDSNKIESTVHEEYLYNIDLNAFIMTIPFDNIKNEDDKEIEDLLDIETINNELISNEFDGKIFDKNKQHDDPKYIGKEIFANTILKNHNSKLIDFTQFKPLLDLINQLSTNYSQFQNK

SEQ ID NO: 1349 - protein, 615 aa, Streptococcus sp.
  source 1..615: note = Related to NZ_JALDUR010000001.1; note = Streptococcus parasanguinis
MQYSDIKSIRTLAYALGVQTKQLTGLLYGIKIENCYTSFKISKKNGDERTINAPSKSLKYVQRRLTRLLVKRQEEFFLERNVKNNISHGFSKGKGIKTNAVPHRNKRYVLNVDLENFFETIHFGRVQGFFKNNEYFKLPEVATIIAQIACYEGSLPQGAPSSPIISNLICQILDYRIVHLCKKYRLTYTRYADDLTFSTNDKNFEDMKDEFEDELKKVISRSGFIVNSNKTRFQKNDSRQIVTGLSVNKKINVTRDFYKKTRSMADKLYRNGSFTINEKNGTIDQLEGRFSFINDLVKYNNRLDELNSLKSNLIEYKKNLLYTEERKYKNDNDNNQVLDWERNLGNLNIREKDFQKFLFYKYFIANPKVTVITEGKTDSRYIKAALREYYLEYPNLITKDEGGFKYNIHFLKPSKRLRYFFDYMSGGGGGFVLINLMEFFSGKDSRTKRNYIKYFNSILSEKTLPQKPTLFLVDNEWQGSNPLPGVIGKLVKDKNLERKDIEQKIKSDFLYHIDLNAFVITLPVESVDYKTNIEIENLFNLEEINNELIAPNYDGKIFDPKKKNGDNKKKIGKEIFSNYILSNYDSEVINYSKFKPLLDLINKLSEDYTKFKDNK

SEQ ID NO: 1350 - protein, 610 aa, Streptococcus sp.
  source 1..610: note = Related to UHFT01000001.1
MNYEDIHSRDMLAFALGIPIKQLTGLLYGVKIENCYTTFTISKKNGSERTISAPNKSLKYVQRKLARLLLERYEEFLTEKNTNNRISHAFFKGKSIKTNALPHRNKRYVLNVDLQDFFDSIHFGRVHGFFKNNDFFKLPDVATVIAQLTCYEGVLPQGAPTSPIISNLICQILDYKIIELCQEYHLTYTRYADDLTFSTNEKNFDNNYQDFLDKLDKLVTRSGFKINAEKTHFQEYNGRQTVTGLSVNKKLNVKKGFYKHTRSMAHSLYKTGKFMINGKEGTLNQLEGRFSFINDLVKYNNRLEELPSLKLNSIEYKKNLQFTDGKEFEVKKNEQKQILDWKKNLSTLSIREKDYQKFLFYKYFIANTNITVVTEGKTDSKYIKAALRKYYAEYPELVTKEKDGFKYKINFLPRTKRMRYFFGFLSGGGSDQIQLFNYFINRDNHISRNYIKYFKEISEDVPLPQKPTVFLLDNEWETKKPLHNIIKVLCSAQNLNNKDIIQKIHTDYLYHVDLNAFLMTLPVDNLSPKCEVEIENLFDLEKINTELIEPLHDGKKFDIKKEHDDDKSIGKEIFANTILTNYDSEIIDFSNFKPLLDKLSDISKDFTKYT

SEQ ID NO: 1351 - protein, 621 aa, unidentified
  source 1..621: note = Related to JAGEKB010000001.1; note = Lachnoanaerobaculum sp.
MCKYSSIDSKEALASTIGVSVRQITGLVYGIRIDNCYHSFYISKKSGKKRQISAPNKSLKYVQRRLCRLLIEKLNDFYLEYNIKNQITHGFFKGKSIKTNALPHRNKRYVLNIDLKDFFGSIHFGRVQGFFLKNNYFKLPKVATLIAQLTCYNGKLPQGAPTSPIISNLICQILDYKIIILCKKYRLTYTRYADDLTFSTNNKVFSENYTLFLEELKDIVTSSGFDINAEKTHFQKFNSRQTVTGLSVNKKLNVQNDFYKKTRSMANTLYKTGEFTIDGKEGTIKKLEGRFSFINELVKYNNRLVEDRSLTSNIIEYKKNLLRTQEKLFRLSDRKIKTLAWDENLRSLSMREKDYQKFLFYKYFIANKKTTLITEGKTDPRYIKAALKHYYSDFAGLVSSDGNNFKYNVSFLSRSNRMRYFFGFKEGGGGELQNLLRFFTEGNTVENLLEYFRKIIPLKPSKPVIFLVDNEFSKDDPLYCVAKFLKNKIHTTEYIEKKLHTDYFYHVGLNTFIITLPISNIDMDNKDKSKLKGTDIEIEDLYNLNEINEKLIKPNHGGKIFNKKKEDNSKYIGKEIFSKFMISNYSNSCIDYSKFRPLLDLINDLSENYHLKTDGERYNTK

SEQ ID NO: 1352 - protein, 384 aa, unidentified
  source 1..384: note = Related to JABZPB010000073.1; note = Lachnoanaerobaculum sp.
MYSYSSIDSKENLAANIGVTVKQITGILYGIGIDKYYHTFFIPKKNGQQRQINAPTGSLKYVQRRLNVLLLKRLDEFYLEHNIKNRISHGFFKGKSIKTNAFQHRNKRYVLNIDLKNFFDSIHFGRVQGFFLKNDYFKLPKVATIIAQLTCYNGKLAQGAPTSPIISNLICQILDYRILKLCKKYRLMYTRYADDLTFSTNNKAFSEAYTLFLDELSNIVNDSGFAINTEKTHFQEFNKRQTVTGLSVNKKINVQNEFYKKTRSMANTLYRTDKFTIDGKEGTINKLEGRFSFINDLVKYNNRLEEDNSLASNIIEYKKNILRAKEKHFNKSNNNQIKILDWNENLRCLSIREKDYQRFLFYKYFIANNKITLISEGKTDPRYI

SEQ ID NO: 1353 - protein, 615 aa, Streptococcus sp.
  source 1..615: note = Related to VKGS01000001.1; note = Streptococcus cristatus
MKYTDICSRDDLAIALGIGKRQLTGLLYGIGIDKCYSSFEIPKKNGGKRLINAPNKSLKYVQRKLNKLLLKRLDDYNRENGSKQNIAHAYFKGKGIKTNAFPHRNKRFILNIDLDDFFGTIHFGRVQGFFQKNAYFKLPEIATILAQLTCYEGKLPQGAPTSPVISNLICQILDYKILDLCKRYKLTYTRYADDLTFSTNDRKFFESRQQFVEELGRIIKKSGFNINNEKTYFQSSENRQVVTGLSVNKKINVTVDFYKKTRSMAQHLYKTGGFSVDGKEGNLNILEGRFSFINDLVRYNNQTKKNESLVSNSPEYQKYLSLPIEKLISLKGKRFTGKLTRNEKLYNLTIREKDYQKFLFYKYFVANPKTIIITEGKTDSRYIKASLKRYYTDYPNLIKKEGNKFSYNITFLPRSQRLKYFFGFLDGGGSDLINLVSFFIDTNNYSFRNYVSYFKSIITNNPPKPVIFLLDNEEKSGKPLGSFKSFISKNTSATSSQIDSAIKSDFFYHIDFNTFLMTLPVERTSNSDILDVEIENLFDLDKINNELIRGMHGGKTFSPKKAEGDDLHIGKEIFSKTILTNYESEIIDFSQFKPLLDNISNLSNNYSEYTKDKIQ

SEQ ID NO: 1354 - protein, 613 aa, unidentified
  source 1..613: note = Related to NZ_KV790849.1; note = Granulicatella sp.
MKYYQISSIDMLAFALRIPVKQITGLLYGVKIENCYSTKEIPKKDGSKRILNAPNKSLKYVQRQICKLLINRLDELTEKNGVKNNISHGFFKGKSIKTNALPHRNKKYVLNVDLEDFFDSIHFGRVQGFFKNNKYFKLPEIATVLAQLTCFNGKLPQGAPTSPLVSNLICQILDFKILKLCKKYKLTYTRYVDDLTFSTNDPYFFYLYNYFLDELNNLINKAGFKINLQKTHFQPFNNRQVVTGLSVNKILNVKKEFYKITRSMANSLYKTGTFEIDGKKETVEKIDKLHGRFTFINDLVKSNNRLHEINSLRLNGIEYKKFLLTTYEKEFEYKSANQKSELKWKNNLGHLNLREKDFQKFLFYKYFIANTSVTILTEGKTDSRYLKAALKKTYSQYPELINFEDSKFKVNINFINRTATQRYFFGILEGGGGDLTQLLKYFTDGKNDIERNYLSYFKRIIPEAPKKPVIFLVDNESDNKSPLENVASFLASRQGVKKQDIVKKLQNDFYYHVDFNVFIVTLPTNIFNNKTNIEIEDLLNLDEINNQIIRERYSGKSFSPKKSHNDINHIGKEIFSNFINRNYSNPLIDFSGFRQLLDLIDSLSQDYHSYTNN

SEQ ID NO: 1355 - protein, 584 aa, unidentified
  source 1..584: note = Related to CP014160.1; note = Aerococcus sanguinicola
MNLQINNFTTRTELANLLEIELQILTRLLYSPTQNVNTQYHTFELEKKRGGATRTIAAPNDSLKIVLRKLNDLLSQYYLKAFAFREAEKQISHGFVRKKNIFTNASQHRNKKYILNIDLEDYFDHFHFGRVRGFFEKDKRFNLSKEMATVLAQLTCYKKVLPQGAPTSPTIANMITAILDRRILSLCQKYKLKYTRYADDLTFSTNDNTFSDKYGEFLIELDRIVKACGHEINQDKTHFLTYNNRQTITGLSVNKIVNVPRTYSSKTRAMAHNLYTKGEYFIGDNVYNINENEKTLEILTGRFNFSNWIDNLKLQNNQFAQNNKSLRTYSKREKDFSKFLFYKTFYVNATPLLITEGKTDFSYIDSAYKSLLPRDIEVVNKFDYKLFKKNNSITTYFLNSKSDNKTGEGGDEISKLFFQYTSQITFGKGIVEDCEINIGLSKVSPHFYHYFRKYGHPFNHHPVVILLDNENSSNKPLKKFLKAIYTGGNYQPPYELLQSTNFLHLVGNLYLTTIPSPQKNPNAFEIEDLFTEEDKKRLSFSRDRKAPFSEAVEENRETINFDNFIKLFKILDDIKQHYLTFESY

SEQ ID NO: 1356 - protein, 586 aa, Staphylococcus aureus
  source 1..586: note = Related to NZ_UHCA01000002.1
MSDYNFSNIKTRKDLARFLKIPLKKLTFLLYIDQNLYTNFSIPKKSGGIRNIYAPNKNLKEVQRVIKHKLEQHINEYQKLNGIKNNVSHGFEREKNIITNSEIHKNKKIVFNTDIKDFFSTIHFGRVRGFFIKNKYFRMEENIATMLAQLVCYNGSLPQGSPTSPIIGNLICNTLDIKILKLCKKFKLNYTRYADDLTFSTNNKLFSDEFQLFYNNLEEQVNQSGFLINTNKNRFLCKDNRQTVTGLTVNKKVNVNRDFYLKTRAMAYCLYNSGEFYIDGEKANINQLEGRFSFINQLDKHQNIKKFNMLLPSEKKEKFFSNLFLNSREKEYQKFLFYKYFWRNSKPLILTEGKTDILYIKAALKKYYKAYPELIEKIGEDEFYYKISFFKRSDKMKFFFSFISDGADNLTNIFNYYIDNFDDKKNKSFNYCNYFKNKLSIPFKNPIIILYDNERQNKPLHKAIDNVITGLIRGKSEEKKKQRREKKESLKKSLNDSTPFAENILENIYFLTNPQLEDKNTEIEDLLTNITNHLELDGKSFNKDGGKNNFGKNILSQYVYKNYKKLDLNSLKPILDNIKDVKSKYF

SEQ ID NO: 1357 - protein, 575 aa, unidentified
  source 1..575: note = Related to JAIMFU010000001.1; note = Salinicoccus roseus
MNKLSEIKTRSDLAATLSVSEGDLVKILYYEKDLYQNFDIAKKNGTSRKINAPKENLKKILQTLNILLNKHVHDYYDENNSSLNVSHGFEKGRDIVSNAEVHINKKFVFNTDIKDFFPSIHFGRVRGLFHKHTIFQMDEYAATMLAQLTCYNGSLPQGAPTSPLISNLICRELDIRMLRICKKFRLHYTRYADDLTFSTNNKNFQLNYENFYKKLNNEINSAGFSLKHNKSRLQQKTERQEVTGLTVNNKVNVNRKFYLKTRAMAHSFYENGSFYINNNIGTMRQLEGRLAFINRLDKENNIRKYERLTNEKDKMGFFKHKPLNAREKEYQKFLFYKNFWVRTKPLIITEGKTDPLYIKAALKKYYKEYPELIELNNNNDFEFKIDFFNRTSKLRYFFELEKDGADTMNRLINYYVHKNYNSKRNDKFNYYHFFHSKMGVPPLYPIVFLFDNEYEKKPLHKFIDNVAPLTNKPVKTLKKELNKTNPTPQNLIGNTYILSVPKSTPNVNGEIEDLLLNITKDLTIKGKKYNKNGGDQYIGKDILSKYIYQEYESLNLDSLKPLLDRIVNLKIMYEK

SEQ ID NO: 1358 - protein, 596 aa, Staphylococcus sp.
  source 1..596: note = Related to NZ_VELK01000002.1; note = Staphylococcus hominis
MKYAFINNKYDFFNVLGVPATKMNYLLYNRERMGTNNMYHTFSIPKKSGGKRTIHAPNDELKNIQKKLAKVLENHYYESIQDNKNKDAFLQGFFKDRGIITNAKIHRNKKFILNIDLEDFFQTIHFGRVKGFFEKDNTFKVPSEVALIIANLVCYRGILPQGAPTSPIISNLIGRIMDVKLLKLCKRYKLKYTRYADDLTFSTNDNSFLELEDKLIYEIKNEIRKCGFEVNEKKTRVQDYRLRQSVTNITVNKKLNVSKTYIKNTRAMAHHLYKHQEYYIDNEVGTINQLEGRFAFINQLDKYNNNIVKIKSFEKNSIEEQKNLGSVFQTKKEISKTFFFKNLNSREKEYQKFLFYKYFYANPKPIIVTEGKTDVRYLKAALKNLYKEYPDLIEKNENGFDFKISFLNRFSNRHQKISKLHYFLNIVPDGADTIYNIYGYYDSKNSTYPNFIEFFKNISQSSPANPVIFLFDNELNNKNKPLAKFCKKLNMKEHQKEKLSSDNKIYLTENLYLITHQLLENCDENELEDLFSKSTLSKEINGKKFIKRDSFDNKKYYGKEIFSNYISSNYSVLDFNNFRPILNNIVDVLKKYKSIL

SEQ ID NO: 1359 - protein, 317 aa, Staphylococcus sp.
  source 1..317: note = Related to NZ_CP023497.1; note = Staphylococcus simulans
MEYAFITDKNDFFQALKIPTQKMNYLLYNKHQMGPENMYSTFSISKKSGGERIIHAPSDELKSVQKKLAKLLENHYYESIRNNKNKDTFLQGFLQNRGIITNAKVHRNKKHILNIDLEDFFHTIHFGRVKGFFEKDKTFKVPSEVALIIARLTCYKGALPQGAPTSPIISNLIGKIMDFRLIKLCKKYKLSYTRYADDLTFSTNDNSFLKLADRLIIEIKNEVRKSGFKVNEKKTRVQNYRLRQDVTNITVNKKLNVSKTYFKNTRAMAHHLYKHQEYFIDDEIGTLEQLEGRFAFINQIDKYNNKLSRAETYEKNH

SEQ ID NO: 1360 - protein, 585 aa, unidentified
  source 1..585: note = Related to JALGOX010000003.1; note = Mammaliicoccus sciuri
MKYTYINNKYDFFALLGVPSNKMNYLLYNRVNMGPENMYSTFTIPKKNGGERTINAPNKELKNIQKKLVVLLENHYNELVEKKKFRDSFLHAFIKDRSIITNARIHRNKNFILNIDLENFFETIHFGRVKGFFEKDFNFKVPSEVALIIAQLTCYKGSLPQGAPTSPIISNLIGKILDLRLIKLCKKYKLNYTRYADDLTFSTNDYSFVKNFNKILEDIKIEVNKSGFKVNDKKTRVQNYRLRQDVTNLTVNKKINVQKKYFKNTRAMANHLYRNNEFFIDGDLGTLNQLEGRFAFINQIDKYNNKNIIHKYNSSKKKSNKEYIHNLNSREKEYRKFIFYRLFYANPNPIIATEGKTDIRYIKAALKNLYDEYPELIEKNDNQFLFKISFLNRFRKKTDEMNKLQYFLNLAPHGADSLKNIFKYYKESESSYPNYMEYFKKLGNNMPNNPVIILFDNELHNKKKPLSKFCTNLKLTDDDKSILKLNLNICLKDNLYLLTNQLIGTSKENQLEDLFQEETLSKIINNKSFSTSDEYDKSIYYGKEIFSQYISSNYETENFDNFRPLLDNIVKIINDYKMNKCEDNN

SEQ ID NO: 1361 - protein, 595 aa, Staphylococcus sp.
  source 1..595: note = Related to CP068216.1; note = Staphylococcus pasteuri
MEYNLIADKYDFFNMLGISTRKMNYILYNREHMGTENMYETFSIPKKSGGERTIHAPKAELRIIQKRLASILENHYYESIEDKKYSDTFIHAFIKNKSIITNAKIHRNKKNIMNIDLEDFFHTIHFGRVKGFFEKDSIFKVPSEVALIIAQLTCFKGALPQGAPTSPIISNMIGKILDLRLLHLCKKYNLDYTRYADDLTFSTNDKAFEKNTDTILSEIKMEIVKSGFKVNDKKTRIQNYRIRQDVTSLTVNKKINTKKTYFKNTRAMANNLYKNHEFFIDNKLGTIEQLEGRFAFINQIDKYNNKISKIKSFERNTLVHQKYLESMYLIKKENSKTQYFKNLNKREREYQTFLFYRHFYGNSKPIIVTEGKTDIRYIKAALKNLYKYYPDLIEKDGNSFIFKINFLKRFKSKPSKMNKLHYFLNILPDGADAMKNIYNYYNENDSYYPNYIKKFKLLGKNVPYNPVILMFDNELQNTKKPLSNFCKHAKLSNDKKNKLKTDYYINLIENLYLLTHQLMPNSNENELEDLFDQQALSKKIGGKTFKRGDGFDTNQYYGKEIFSQYIISNYKRINFDNFRPLLDNLVEIIKDYSKK

SEQ ID NO: 1362 - protein, 595 aa, Staphylococcus sp.
  source 1..595: note = Related to PZEX01000047.1; note = Staphylococcus warneri
MKYSFITNKKDFFNLLGVSAKKMNYILYNKQFKGPENMYTTFLVPKKNGGERKISAPNGELKIIQKKLATILENHYYETYKSQNYCNNITHAFQKNKGIITNAKVHRNKKNILNIDLEEFFHSIHFGRVKGFFEKDSTFKVPKDVALIIAQLTCYQGYLPQGAPTSPIISNLIGNILDMRLLKLCKKYKLNYTRYADDLTFSSNDLSFSKVKDKIILDIEMEIERCGFKVNNSKTRIQNYKIRQEVTGLTVNKKINVKRSYYKNTRAMANNLYRNKEFFIDNKIGTINQLEGRFSFINQLDKYNNKILKYKSFEKNSVGHQKNLESLYKIKKESSNTQFFKHLNAREKEYQKFLFYKYFYNNPQPLLATEGKTDIRYLKAALKNLYIEYPDLIEQQDGKFVYKIGFLNRFNYNAKKMNRLHYFLNILPDGASALKNIYSYYNEQNSHYPNYVKLFKKLDDDKPLNPVILLYDNELANKKKPILNFCNHIDMSENEKASLQSGSYFHISENLYLLTHQLINSAKENELEDLFDKKTLSKIINNKTFCKKDKFDTSKYYGKDIFSKFVICNYNNINFENFKPLLDNIVRVVKDYENR

SEQ ID NO: 1363 - protein, 608 aa, unidentified
  source 1..608: note = Related to NZ_MJBI02000011.1; note = Macrococcus goetzii
MNYNFIVDKQSFCNELGISVGLLNYLLYSNKENGIESFYINFSVPKKNGEERRIHAPNEQLKFVQKKVQELLQIRNDELFAKLNVENKIVHGFVPGKNIITNARKHRNKKIVINIDIQDFFESLHFGRVKGFFEKDKFFGLPKEVALIIAQLTCYKGHLPQGAPTSPIISNLIAKILDIRMLKMCKKYNLDYTRYADDMTFSTNKYLTTKQLEKLLKDLEKVISNSGFSINNKKTRIQQNNLRQDVTGITVNEKLNVNKEYIKKTRAMAHNLYCNNEFYIENEKGTLDQLEGRFSFINQLDKFNNNISKTKSVEYNLIKNQKNFSYISTYQKKVNTKSDQFFKQLNSREQEYQKFIFFKLFYGNPKPLIITEGKTDIKYLKAALKSLHKEYPGLVEKQGDKYIYKVSFLDKSSRKNKKISKLQYFLNISEHGGDVMKNIFSYYDVQNNYYPSYYDYFDELRNFTGANKPVILFFDNEVDRRKKDSPVKSFIKHAKISSKVDEFKKNKKIHITKNLYLLTHSLEEGALEGEIEDLFDEDVLNHEINGKIFSRKDEEETNKYGKEIFSKYVYSNFQNINFHNFKQILDDIVYIIEIYEMSKKNRKKVVTE

SEQ ID NO: 1364 - protein, 570 aa, unidentified
  source 1..570: note = Related to NZ_JQBL01000009.1; note = Kandleria vitulina
MRLKDVKNRKDLAQLLDVKVKVLTYCLYVLPETMRYSSFVIPKKDGSERQILVPCAQLKRIQKKLAEVLNEDYLEINSNNVAQGFIKNKGIITNARYHRNKRVIINVDISDFFGTIHFGRVKGYFENNKFYKLNNKVATMIAQLTCYQGKLPQGAPTSPVIANMIGQIIDYHILKLCKQYKLYYTRYADDMTFSTNINYSLVEIEKFICDLSETLSRLGFEINTKKTRVCFNSSKQEVTGVIVNKKLNADKTFIKETRAMAQNLYSTGGFVIDNKIGTMDQLEGRFAFINQFDKYNNIVNNTSKGKHLEKLNVREKAYQQFLFYKLFLGNDRPVIYTEGKTDSRYIKAALKKLYIQYDDLIEKNENGKFEYKILFGSRNKKYEYFLDFMQYGADSFNIIALLYTGRNGYANLCSILKSKMRRKPNAPVILLMDNEQTNGKPLNKFLQSYRDEHYKNLTDHEKAFFNDYNYIRLVENLYLATFPLEPGVEEMEIEDLFSKEFLDGKINGKSFKRSPKKGETNVMSKDELSRYVLSHYRSINFSGFKGLLDVISAIKKDYEKYINMDDNKWY

SEQ ID NO: 1365 - protein, 596 aa, Acinetobacter sp.
  source 1..596: note = Related to CP077398.1; note = Acinetobacter nosocomialis
MKYLKELKSCQTQKDLANLLGYSEKNFTRILFSQNISLRYQSFEIPKKNGDKRKILAPTSELKVLQTRLSILLSNCYEELELKRLSTSSYIKCISSHGFRKKLIVNIPASKQNRKIIEYKEINFGIYSNAKQHTGKRLVLNIDLKDFFESITFSRVVGFFTKNKLFLLPLDIAVLIAQIVTYRTSTSQEGFLPQGSPCSPIISNLIGNILDVKMVKLAKEYKFTYTRYVDDLTLSTNLPQFSEDIIEFDGEKWVLGSALNHTINSSKFKINPKKTRLTDKYNKQEVTGLTINKKVNIDRTYYRYTRSMVQKFCAEGEFFKSKVHMDKQKISREALNGILSHIYQIKNQQDINFPNCARNFSELNSLEKLYAKFLFHHYFVHPQRMLIIGEGYTDPLHFKLACHKLYKESLSFLKFSSLEGTKRFSKITGYGGGTGLLKIFLQNYKQFYKARNICLKPCLIIVDGDSDGDAVISKASAEFKTTFKKISHSSMTTAGLLDWYHIFNNLYILQLPKNKVIEDFYDPLILTIPIGSKTFHSDDKKKNTKFDSKIHYGKKVLLEKIIYEQQDTIDFSKFDLIFNTIFHIQFYHYIYCNMES

SEQ ID NO: 1366 - protein, 592 aa, Acinetobacter sp.
  source 1..592: note = Related to CP059039.1; note = Acinetobacter baumannii
MKYLKQLKSCQTQKDLAILLGYSEKNFTRILFSENITTRYQDFEISKKSGGKRRIFAPTPELKILQTRLSILLSNCYRELELKRLSTSSYVNCISSHGFRKKLKINIPTSKQNRTSLEAKEINFGIYSNAQKHTGKRLVLNIDLKDFFESITFSRIVGFFSKNKLFSLPFDIAILIAQIVTYRESTSKEGFLPQGSPCSPIISNLIGNILDVKMVKLAKEYKFTYTRYVDDLTLSTNLPQFSEDIIEFDGEKWVLGSALNHTINSSKFKINPKKTRLTDKYNKQEVTGLTVNKKVNIDQNYYRYTRSMVQNFCAEGEFFKSKFHMDKHKTNREALNGILSHIYQIKNQQDIKFPNSTRNFNELNSLEKLYTKFLFHHYFIHPQRVLIIGEGYTDPLHLKLACHKLYPDSLKFIKFSSLSGTKRFSKIMGLTGGTGLIQKFLKNYNVIYKSQVISHLPCIILVDGDSDGEHVIKCANKEFNDFIKHISLTALNKSAILDYYHAHHNLYIIKLPKNTVIENFYDPSILLKTISGKTYNSSNSTFDLTKFYGKKDLFEKIIFQDQNTIDFSKFDLIFNTIFHIQFYHYIYCNMEE

SEQ ID NO: 1367 - protein, 591 aa, Acinetobacter sp.
  source 1..591: note = Related to KB850198.1; note = Acinetobacter colistiniresistens
MNFLHQLKTCQTQKDLAALLGYSEKNFSRILFSQNIITRYRSFEIPKKNGNKRQILAPTSELKILQTRLANLLSNCYEELEVKRLSSSSYVNCISSHGFRRNITINIPTSKQNRTPIKSKKVNFGIYSNAEKHIGKRLVLNIDLKDFFENITFSRIVGFFTKNKFFLLPLDVAILIAQITTYRTSISQEGFLPQGSPCSPIISNLIGNILDVKMVKLAKEYKFTYTRYVDDLTLSTNLPQFSDDIVKLNNEKWVIGSILNHTVNSSRFTINPTKTRLTNKYNKQEVTGLTVNKKVNIDQTYYRYTRSMVQKFCSEGEFFKSKVHMDKQKISREALNGILSHIYQIKNKQDIKFQNITRNFDELNSLDKLYAKFLFHHYIVHPQRMFIIGEGYTDPLHLKLACHKLYKNSLEFIKFSSLQETKKFSKIMGYSGGTGLLQKFLKNYKLIYKGSLLSLKPSVILIDGDKAGDDVIKTAKNEFKDSFQEIKNSSMNGSYILEFKHVFKNLYIIQLPKNDVIENLYDVSVINTKIGTRTYNPSNNKFDLTKYYGKKELIEKVIFPNQNTINFSKFDLIFNTIFHIQLYHYIYCNGN

SEQ ID NO: 1368 - protein, 596 aa, Acinetobacter sp.
  source 1..596: note = Related to JAKZGD010000010.1
MNFLNQLKTCQTQKDFAALLGYSEKNFSRILFSQNITTRYISFEIPKKNGNKRQILAPTSELKILQTRLANLLSNCYEELEVKRLSSSSYVNCTSSHGFRRNITINIPTSKQNRTPIGSKKINFGIYSNAEKHIGKRLVLNIDLKDFFENITFSRIVGFFTKNKFFLLPLDVAILIAQIATYRTSTSQEGFLPQGSPCSPIISNLIGNILDVKMVKLAKEYKFTYTRYVDDLTLSTNLPQFSDDIVKLNNEKWVVGSILNHTINSSRFTINPTKTRVTNKYNKQEVTGLIVNKKVNIDKTYYRYTRSMVQKFCSEGEFFKSKVHMDKQKISREALNGILSHIYQIKNKQDIKFQNSTRKFNELNSLEKLYAKFLFHHYFVYPQRMLIIGEGYTDPLHFKLACHKLYKNSLHFLKFSSLEGTKRFSKITGYGGGTGLLKIFLQNYKQFYKAKNIFLKPCLIIVDGDSDGQAVISTARSEFKSTFKQINHSSMTTTGLLDWYHIFNNLYILQLPKNEVIEDFYDPSVLMYSIGSKVFHSDDKKKNTKFDPNIHYGKKVLLEKIIYEKQDIIDFTKFDLIFNSIFHIQLYHYIYSNLHN

SEQ ID NO: 1369 - protein, 593 aa, Acinetobacter sp.
  source 1..593: note = Related to NZ_CP039031.1; note = Acinetobacter indicus
MNNLFLLRTCQTQKDFAKVLGYSEKEFTLILFSQSIQNKYQSFDIPKKNGNKRKILAPTPDLKILQTRCLSTLLTNCYEELEKKRLSKSSYVQSISSHGFRKKLLLDIPFTKKSRTPFEKKVIKLGIYSNASKHVGKNLILNIDLKDFFQSITFSRIIGFFSKNKYFQLNFDIAVLIAQIATYRPNQSQEGFLPQGSPCSPIISNLIGNILDIKMLKLGKKYKFTYSRYVDDLTLSTNLPKFNEEIVKLVDNTWVIGSELKNVVNSSKFKVNPQKTRLTNKYNRQEVTGLTVNRKVNVSKEYYRYTRSMVQSFCTEGNFVKSKVHMDKQKISREALNGILSHIFQIKNKQQIEFNNQTRNFDELNSIEKLYAKFLFHHYFIHPQRMIVIGEGYTDPTHFKLASHNLYPDILKFLKFSSLQETKRFSKIMGYSGGTGLLNKFLKNYKLIYKANVISCKPCLIIVDGDKAGNDVIKTARSEFSKTFKAINNVSLNLSAKLEFFHIFENLYILQLPKDQVIEDFYDTTVTGSLIGTRTYNSSNNKFDLTKYYGKKELLEKIIFPNQDTINFSKFNLIFNTIFHIQIYHYIYCNLKN

SEQ ID NO: 1370 - protein, 592 aa, Acinetobacter sp.
  source 1..592: note = Related to NZ_CP054822.1; note = Acinetobacter lwoffii
MDNLFLLKTCQTQKDFASLLGYSEKEFTRILFSQPIQNKYKSFKIPKKNGSRRNILAPVPDLKILQTRLSILLTHCYDELEHKRLSKSSYVQCISSHGFRKKILVEIPISKKSRTSFESKVINFGIYSNAKKHVGKNLVLNIDLKDFFQSITFSRIIGFFTKNKYFQLNFDIALLVAQIATYRPNQVQEGFLPQGSPCSPIISNLIGNILDIKMVKLARKYKFTYTRYVDDLTLSTNLPQFSEEIIKLDGKSWVIGSTLKYAINSSKFEVNPQKTRLTNKYNRQEVTGLTVNRKVNISKEYYRYTRSMVQSFCAEGHFFKSKVHMDTDKTTREALNGILSHIFQIRNKQQIEFNNQTRNFDELQSTEKLYTKFLFHHYFVHPQRMILVGEGYTDPLHLKLACHKLYPNSLNFLKFSSLQQTKRFSKIMGYQGGTGLLNKFLKNYKLIYQAKNISLKPCLIIVDGDTAGNDVIKLAKSEFKETIKLINKSLLTTSSILKFFHVFENLYLIQLPENKVIEDFYDSSITGSCIGTRTYNPSNKKFDLDKYYGKKELFEKIIFTNQNTINFSEFDLIFNTIFHIQLYHYIYNNLKT

SEQ ID NO: 1371 - protein, 592 aa, Acinetobacter sp.
  source 1..592: note = Related to NEGA01000008.1
MNNLFLLKSCQTQRDLAILLGYSEKDFTRILFSKPISTKYQSFDILKKNGNKRNILAPTSELKTLQTRLSKLLTNYYEELEQKRLSTSSYVKCISSHGFRNKISVQIPISKKNRTSFESKIINLGIYSNAHKHVGKKLVLNVDLKDFFQSITFSRIIGFFTKNKHFQLPFDIALLIAQIATYRLNQSKEGFLPQGSPCSPIISNLIGNILDIKMLRLAKEYKFTYTRYVDDLTLSTNLPQFDNEIIKLEGDTWILGSTLKYTIQSSKFNINSQKTRITNRDNRQEVTGLTVNTKVNINQNYYRYTRSMVNKFCTEGEFFKSKVHMDKDKTSREALNGILSHIFLIKNQQQIEFPHTTKNFNELNGIEKLYIKFLFHHYFVHPQRMLIIGEGYTDPIHLKLACHKLFPNSLNFLKFSSLQETKRFSKIMGYSGGTGLLNKFLKNYKTIYKAKTISLKPCLIIVDGDNAGDGVIKTARGEFKETFRPINNPPLSSSGKFEFFHIFENLYIVQLPKNQVIEDLYDTTVTTSLIGKRTYNSSNNKFDLTKYYGKKELFEKIIFPNQDTIDFSKFDLIFNTIFHIQVYHYFYSNLNN

SEQ ID NO: 1372 - protein, 591 aa, Acinetobacter sp.
  source 1..591: note = Related to SGSS01000016.1
MKYLEQLKSCKTQKELAILLGYSEKNFTRILFSQKISTRYQSFEIPKKTGSKRIIFAPNSELKILQTRLSIILSNCYEELEIKRLSTSSYSQCISSHGFRKKLTLDIPISKSNRESLGSQIINLGIYSNAQKHVGKRLVLNIDLKDFFQSITFSRIVGFFNKNQRFLLELDVSILIAQIATYRETTEEGFLPQGSPCSPIISNLIGNILDVKMVKLAKEYKFTYTRYVDDLTFSTNLPQFSEKIVKLNDNNWVIGSTLKHVINSSKFEVNSQKTRLTNNYNRQEVTGLTVNSKVNINKEYYRYTRSMVQMFCAEGKFFKSKVHMDQDKNTRGALNGVLSHIFQIKNKQQIEFDPKTKNYDELQSIEKLYTKFLFHNYFVHPHRMVVIGEGYTDPIHLKLACHKLYPNSLNFLKFSSLQQTKRFSQIMGYNGGTGLLNKFLENYQLIYQAKSISLKPCLIIVDGDKAGDGVIRTARSKFKDTFQSIRYTPLNSSSILNFFHVFKNLYIIQLPKTKVIEDLYDTCVTSTLIGTRSYNPSNKDFDLSKFYGKKELFEKIIFPNQNTINFSEFDLIFNTIFHIQLYHYIFSNSKN

SEQ ID NO: 1373 - protein, 593 aa, Acinetobacter sp.
  source 1..593: note = Related to JAGJSX010000002.1; note = Acinetobacter nosocomialis
MNILKFPISKLALASDKKDLSNLLNYDYKDFCWILYSQPIHMRYKLIEIPKKNGKIRIIHAPDSHLKQLQKNLAIQLNKIFEEKNLYEPAFSFAFRRNNNKQKFGIYFNAKRHRNRKLVINIDLKDFFHTIEFKRIVGYFKRNKYFNFPIDVAIGIAQIACYKDPNTGKTFLPQGSPVSPIISNLITEILDAKFTKLAKKYKFYYSRYADDLTLSFDTNNIPSEIVKCNENNYSLGREVIKAIKSSGFNINKDKVSFRTNFDRQQVTGLVVNKKINIPRNYYDFSKSMAYNYCQYATFKKSSYHTFAKKNSNQGESIIGVLNYIYNIKMEYKNRTTDKPPYIYTEFKIDKPKSPEQLFWSKNSFIRLLLQTYFQESFVYRKKIHLLCEGKTDPLHFKNYISTLPIEIQSYYDFTAFKEEDLTIFQKELNIRSGTPNLKRFIEIYSTLYISKMIFVNPTILIVDNDKAGNEVFQCATGRYKKTTKNGKVIINSIEIEYAYICKNLFIIKLPKINPETTIEDLYDTTLTSTILNGKSFTKDNVYDPNIHYGKVDFFKNVIRKNRTTIDYKNFEAIIEIINRIFNLNFYLNLTNIN

SEQ ID NO: 1374 - protein, 583 aa, Acinetobacter sp.
  source 1..583: note = Related to NZ_VOZD01000001.1
MLATDKKDLANFLNYDYKHFCWILYSQPIHTRYNIIEIPKKSGKLRVIHAPDSHLKQLQKNLAVQLTELFEQKNTGKPSFSFAYRRNNKEEKFGIYFNAKRHRNRKLVINIDLKDFFHTIEFKRIVGYFTRNNHFKFPIDVAIGIAQIACYKDPKTGKVFLPQGSPVSPIISNLITEILDAKITKLAIQYKFYYSRYADDLTLSFDTKKLPQEIIQSNENNFFLGDKIIKAIKSSGFNINNDKICFRTNFDRQQVTGLVVNKKINIPRNYYNLSKSMAYNFCQFATFEKSSFHTFSKNNSDKGKSIIGIMTYIYNIKNEYNNRTINAEPNIYTDFKMEKPKSPEHLFWSKNSFNRLFLHTYFQEFFVYRKKIHLLCEGKTDPLHFKNYISTLDKKIQNYYEFTAFNEDKLTIFQKELNIRSGTPNLKRFIDIYSTLYVSKLSFLNPTIIIVDNDKAGNEVFQCGVGRYNKTSQHGKTTINKLEVEYAYICKNLFILKLPKILKDTTIEDLYEPSVTSTLLNGKSFTKDNNYDSNLYYGKVELLRNVIKKNKLSINYKNFETMLEAIDRLFLMNLYLNLTNSIK

SEQ ID NO: 1375 - protein, 594 aa, Acinetobacter sp.
  source 1..594: note = Related to NZ_VOZV01000004.1
MSKQLNALKQCQTSRDLAKLLGYSYKGFCYVLYSAPIHTKYRMVTIPKKNSPIGRQILIPSNRLKILQQRLATLLTNIYLEINQNNPSCCYAFIPDSNTQNFGIVENAKQHINKNIVLNIDLKDFFTSITFSRIVGFFTKNIQFRLNYDVAITLAQIACYRASPTSHAYLPQGSPCSPIISNFVGQIIDSKITFLAKKFHFTYSRYADDLTLSFDKNQIDSKILEYDQTTREYKLGKLLEKEILKTNFQINYQKLCVRTKRERQQVTGLVVNKSVNVNKAYYYHTKSMALEYCRNGTFTRSTSHAKKIGQPNFHSLMGYFNYIHYIKRENLKRHQPLQPKIILPELTNNDIQRNKKIPKSLNSFEKMMIKAIFHYRFVHSEKIKILCEGKTDPQYLNLYLKIKKSNCFHPTAFSDHTPTFFQNELNIRSGTQNLKRFISAFQNLYISKNEYQLPTIIMVDPDKDGFDVFNYAKSKSNSYIEIQTNSSIKVAHVFHNLYLISLPQNSSINQQQINSIEDMFDKTLQQQKIGNKTLCLDNKCSGQKHNNHYGKVEYFEHIIKSQNNLSFSNFDRLYEVIENICYLHFFKCFSKTFH

SEQ ID NO: 1376 - protein, 565 aa, Acinetobacter sp.
  source 1..565: note = Related to NZ_FMYO01000016.1; note = Acinetobacter kookii
MSSNLLLLQNCKNRQDLADLLDIDYNQFCYILYAQPISKHYNKALIYKKNGKPREILAPDNHLKYIQQRLAILLAKIYDEVNFRSTQLCYSYRKDSEQKFDFHENAKLHIGSKLVINVDLKDFFTNITFSRIVGYFSKNKNLKINYEVAVTIAQIACYKDPISNKSYLPQGSPCSPIISNFIGTILDDRLFKLANRKKFTYSRYSDDLTFSFNTNSFPSDIVTKIEKNWVLCKTIRNTINLCQFEINEEKIVIRDKYKRQQVTGLTVNKKANINANYYKYTRAMIDKYCKTGLYERSKHHSIGIDFSEKSLIGIANHIKNIKGIKYNHTNIIDKNLEPLQIYQNLKGFSKSYIDLMFHINFVHQSKIKIICEGKTDPQHIYNYLRNTDLFHKNQFDIISFEKHLSSFTQPLNLSGGTDQLCKFIKMYSHLYKSIDKSKYPTIIFVDNDPAGNSTFNTAKSYSTYNEIKILRDSIRVAFVCKNLYIIQSAKHCPGIEYLYPSHVLEEKLEGKTLNLSNDKIKDDSEYGKIVFFHKIIKPLGKKIYLGKFRYLCFGFYQIAQHLKNT

SEQ ID NO: 1377 - protein, 316 aa, Acinetobacter sp.
  source 1..316: note = Related to NZ_CP032279.1
MSSNLQLLKQCQNRQDLANLLILDYKLLCFTLYSQPIHNNYKKAIIYKKNGSPREILAPNKQLKFIQQKLALLLNDIFDEINFRKTQLCYSYRKDSDQKYGFHENAKLHTKSKLVINIDLEDFFTNITFSRIVGFFHKNKNLKINYDICIAIAQIACYRDPNTNDSYLPQGSPCSPIISNFLGTILDERLFKLSKRKKFIYSRYSDDLTFSFTTNSIPQDIAQKNGNIWTLNKTLINTINSCQFKINKDKIIIRDQYQRQQVTGLTVNKKANINKNYYKYTRAMIDKYCKSGLYERSAYHSLGMALLHKDLKYKAP

SEQ ID NO: 1378 - protein, 601 aa, unidentified
  source 1..601: note = Related to NZ_CAJHAW010000011.1; note = Psychrobacter salsus
MSSLQALRKCEDRKDLATILGYSLKQFTAIIYAQSPQYKYNSFTIPKKTGGNRNILAPKSDLKQLQQKLATLLSKCYEEIECNRLTKLPKPVSILSFSSHGFRRKIDNKLSSDKFNFDIYSNAKSHTNKKYVLNLDIKDFFKSITFSRIVGYFVKNRDFLLDVDVSVTIAQIATYRETDSTEGYLPQGSPLSPIISNFIGSVLDIKILRLAKKYKLDYTRYADDITLSTNLKDFPYQIAVHRQDRWIVGLQLEKIIKSSGFEVNKSKTRLYTNNERQEVTSLSVNKKVNIRKEYYRYTRSMVNQYCMTGMYFKSSEHRRANIANDNSLNGILSFIYYIKRDRNLVVDDGYIKYCDMKGLQKLYTKFLFHYNFIYQSRTTVIGEGFTDPRHLRIAYKVIYNAHNTSIKFTYLGNTKRFSHFTGMKGGTGLINKFLSEYQLIDKSIAISKFPCIILLDGDKAGNDVIKMAEKLFNKTIRKINIPKVGIMLFYHVYNNLYILQLDKDVDVEKLYDSNVLQTKVDQRTFNPSNKKTDQTKFYGKKEFLEKVIEPNRSSINFSNFEIVFKTLNHIQLYHLIAYRSEAGLAAKTNLSLISAKSSNTT

SEQ ID NO: 1379 - protein, 586 aa, unidentified
  source 1..586: note = Related to NZ_CAJGZW010000014.1; note = Psychrobacter immobilis
MNKLSNLRSCSDRKGLASLLGFSEKQLTNILYSSNINEKYYKFSIPKKSGGDRRILAPHASLKLLQSNMAILLSQCHDEIENERVTKTAQQSSILSFSSHGFRKALKTDNSLEPFSFNIYSNAKKHINKKYVLNIDIVDFFESITFSRIVGYFHKNRHFLLDIDVAILIAQIATYRPSISVEGYLPQGSPLSPIISNLIGSILDARILRLSQRYKLDYSRYADDITLSTNMKSFPTEIAYLKNDEWVVGSKLKKAIEGSRFTVNKKKTRLYTRNKRQEVTSLTVNKKVNISKKYYRYTRSMVNEYCKTGSYSKSSEHRYTEIDSDNSLNGILSYIYYIKKDRNDIAIDHKFREYEKLVSIEKLYVKFLFHYYFIYPEKMLVVGEGVTDPLHLKVACNQLSKSSRKYIKFSYLGEMARFSKFMRFSGGTGHIHNLLTNYHTIFKAKSLSLKPCIILVDGDKAGNDVVKHAKSLFKERQLVFKGANCIRAYHLDHNLYIIQLNKGKEIEDLYHPDIKKTKIGIREFSSENDSKKLDVTKHYGKKEFYEKIVVEEQDTINFSGFNDVLATLYHIQMYHFILWLFSERKI

SEQ ID NO: 1380 - protein, 592 aa, Acinetobacter sp.
  source 1..592: note = Related to AAYLMD010000006.1; note = Acinetobacter baumannii
MNILEQLKSCTDLNSLATLLGYSPKVFSYILFSKSINYQYEKFEIDKKDGSKRIIHAPKEKLKELQRSLANVLNECYNIIEKNRLNLTNKYQCVLSHGFRNKLVLDLPISNKTNIKLKSKEFIFGITSNAKAHINKKYILNIDLKNFFHSITFGRIVGFFEKNINFNLTKKVAILIAQIATYRDSTNMVGFLPQGSPCSPIISNLISGILDKRLYEFAKENKCTYTRFADDITFSTNIKNFPTNLAILSNEKYTPSNQLIRIIEKTGFLINPTKTRLNTFEDRQVVTGLVVNKKVNVSSNYYRYTKSMVNKYCQEGIYYKSKLHTNEKITTSNSLQGILDFIFNIKKPAFVNPTNYKEFSKLDSIEKLSLKLNFHKNFIHNTETRIICEGVSDPMHFKNAYKSLYKSNKYPFFFKVLTSFNSLVKITGIGNGTGNLKHFLSMYKKINTSKINNINPCIVLVDGDNEGEKVLTAAKKIFDKNCYKELSFFSPFYNLDDFQVLHCEKNLYIVMLPTNFTIEDLYDPIYKTFTLGTRTLKLSNEDLDHTKFYGKTEFFEYVIKPNSHVIDFTNFKKIFEVLFHVQLYNFFHSNLS

SEQ ID NO: 1381 - protein, 586 aa, Acinetobacter sp.
  source 1..586: note = Related to JEWN01000001.1; note = Acinetobacter baumannii
MNDLILLKNCKNLQDLAYLLGYTPRILSYTLFKRSILQPYTKFEIPKKSGGKRVILAPNKDLKKLQSALAELLDSCFNIIEKNRLENTSYTTCILSHGFRSKFKIDIPKSHKNREVLKTIDLKLGIYSNAFKHKNKKYVLNIDLKDFFTSITFNRIVGYFCKNENFLLDKKVAILIAQIATYREIRSSEGFLPQGSPSSPIISNLIAGILDNRLNNLAQRYKCTYTRYADDLTFSTNISTFPTELYDYENKVIGKKLNKIIKDSWFEINPSKTRLTHNQNRQEVTGLTVNKKVNISKNYYRYSRSMIHNFCINGTFTKSKLHNKPLVLNINSLTGITNYIFNIKNPNFEKSRTLRDLEDLSSIEKLYVSFNFHKYFSNNEQPNIICEGITDPLHLKNSWKNLNKDQLEYKITSLEEIKSLHEVMGLSNGVPNMTKFLRQYHKLHKSKYKNPQPCILLLDGDDEGEKLLTNISSSFKQKKSLDFYNFRDPSNSLLRVTHLINNLYIMQLPNGKCIEDIYDPSVLTLTLKGRTYNPSNNSFDTTTYYGKKDLIKKVIIPQKNSINFDSFNIIFDTILHIRLYSFFCSK

SEQ ID NO: 1382 - protein, 623 aa, Acinetobacter sp.
  source 1..623: note = Related to NZ_VTRF01000001.1; note = Acinetobacter baumannii
MKNLENLKSCHTAEDLSTLLDFPYKRFLIILYHGHISSKYSSFEITKKDQSLRSINAPHKELKMIQERLADLLEQCLSEIENDRLKKNLEKFHENSPNKYPKFHLTSHGFRKKLYIDPPYNIHTITPGIFTNAYVHTNKNLVLNIDIKDFFTSIKFNRLVGFFIQNKYFELSEEVAFTIARIATFRKNDDEMGYLPQGSPCSPVISNLFTSMLDSRLVKLCKKNKCVYTRYADDITISTNLKKFPQEILTIINDKVKLNDRLERQFEAFGFNINNKKTRISNRKQRQVVTGLVVNKKVNVNRSYYKATRAMVDNYCKTNTFVKSKYHVFHELKIENSQSLNGILNYIYNIKKVEPYKLIENHDDYLKHHNDFIDKKNWESRLLYHHINTLNGLDKIYASYIFHKKYVYNEKKSIICEGVTDVIHFKKAADKLGITSIKFSSFSPDYQFEKLIHLDGGTDNLKKFLSNLKLLYKSEVSLNLLNPTIIIVDRDDAGKGVIAEAKKLFKNSWHEHSSSTVPNMKFYNFFKKFYIFHLPIVPYDPNKTVIEFLYNNSTLLNDTISINGKTLICEAIATSEQIKKKEVYSKISFIKTIIPKHEPSLDYKYFKQVLDVVDEISKLMKTA

SEQ ID NO: 1383 - protein, 623 aa, Acinetobacter sp.
  source 1..623: note = Related to NZ_BKVP01000163.1; note = Acinetobacter ursingii
MKNLENLKNCENARDLATLLDIPYKRFSIILYRGHISSKYSSFEIKKKDQSLRKIHAPYEYLKILQKKLANLLERCLSEIENDRLAENLSKFQENRPNKYPKFHLASHGFRKKLYIDSPYNVHTITPSIFTNAHTHTNKNLVLNIDIKDFFTSIKFNRLVGFFIQNKYFELSEEVAFTIARIATFRENDDVMGYLPQGSPCSPIISNLFTAMLDSRLVKLCKKNQCLYTRYADDITISTNLKEFPQEILTVVNDKVKLNDRLQRQFEAFGFNINHKKTRISDRKQRQVVTGLVVNKKVNINQSYYKATRAMVDNYCKTNTFVKSKYHVFHEHQIENSQSLNGILNYIYNIKKVEPYKLLNSHDDYLDNHNNLINKRNWENRLLYHHINTLSGLDRMYALFIFHKKYVYDHKISIICEGITDVLHFKKASEKLGINNIRLSSFNSEYQFEKLLHLDGGTDNLKKFLSNLKLIYKSEIPLKDLNPTIIIVDRDKAGKGVIEEARKLFKNSFKEHNSSSVKDMKFYTLFQKFYIFCLPIVSIDSNKTVIEFLYNNRDLLNETMSVNGKPLICEAIATKEQIDQKKVYPKILFIKNILPKYESILDYTYFQQVFDVINEISTLMKTV

SEQ ID NO: 1384 - protein, 623 aa, Acinetobacter sp.
  source 1..623: note = Related to JADVON010000009.1; note = Acinetobacter bereziniae
MKNLENLKNCENARDLATLLDIPYKRFSIILYRHHISSKYSSFEIKKKDQSLRKIHAPYEYLKILQKKLANLLEQCLSEIENDRLTENLAKFNENRPKKYPKFHLTSHGFRKKIYIDSPYEVHTITPGIFTNAYTHTNKNLVLNIDIKDFFSSIKFNRLVGFFIQNKYFELSEEVAFTIVRIATFRENDDEMGYLPQGSPCSPVISNLFASMLDSRLVKLCKKNRCVYTRYADDITISTNLKEFPQDILTIVNDKVILNDRLKRQFDAFGFNVNNKKTRLSSKKQRQVVTGLVVNKKVNINKNYYKATRAMTDSFCKTNTFIKSKYHTFHESEVSNSHSLNGILNYIYNIKKIEPYKLLESHSDYLKHHNELIDKKNWESRLLYHHINTLSGLDKMYALFIFHKKYVYNEKNSIICEGITDVLHFKKAAVKLGVDNLKFSSFHSDYQFEKLLHLDGGTDNLKKFLSNLKLLYKSEVSLKDLNPTIIVVDRDDAGKGVIEEAKKLFKNSLEEYSSSSISTLKFYCIFKKFYIFQLPIVPYDSKKTVIEYLYNNSTLLNETMTINGKTLICEAIATAEQIKKKEVYSKIAFIKNIIPKYESTLDYTYFKQVFDIVDEISTLMKTV

SEQ ID NO: 1385 - protein, 623 aa, Acinetobacter sp.
  source 1..623: note = Related to SJOH01000014.1
MTNLENLKRCETARDLAILLDIPYKRFSIILYRGHISSKYSTFEIKKKDQTSRKISAPYEYLKIVQKKLSVLLEQCLSEIENNRLAETLSKFQENRPNKYPKFHLVSHGFRKKIYIDSPYNFHSITPGIFTNAHIHTNKNLVLNIDIKDFFTSIKFNRLVGFFIQNKYFELSEEVALTIARIATFRENDKVIGYLPQGSPCSPVISNLFTAMLDSRLVKLCKKNKCVYTRYADDITISTNLKEFPEAILTMDENLIVLNERLIRQFETFGFHINNKKTRLANRKQRQVVTGLVVNKKVNINRHYYKATRAMVDSFCKTNTFVKSKYHVFHEPQIEDSQSLNGILNYIYNIKKVEPYKLLEQHDDYLKHHNEFIDKKNWESRLLYHHINTLNGLDKMYGSFIFHKKYVYNDKPSIICEGITDVIHFKKAAEKLGITNIKFSSFNSDYQFEKLLHLDGGTENLKKFLSNLKILYKSEVQLNLLNPTIIIVDRDGAGKGVITEAKKLFKNSWKEHSSTTVPTMKFLALFKKFYIFELPVVPFDPEKTVIEFLYNNSTLLNETMMINGKHLICEAIASKDQIDKKKVYSKISFIKNIIPKHESSLDYTYFKQVFDVIEEISTLMKTI

SEQ ID NO: 1386 - protein, 365 aa, Acinetobacter sp.
  source 1..365: note = Related to SJOG01000001.1
MKNLENLKKCETSKDLAILLNVPYKIFLITLYNGHISSKYSNFEIKKKDNTLRKIKAPIQNLKDIQKKLADLLEYCLSEIENERLKKIQLNFSEHSPNKYPKFHLTSHGFRKKIYIESPYNVHTINLGIFSNASVHTNKNLVLNIDIKDFFSSIKFNRLVGFLIQNKYFELNEEIALTIAQIATFRENDDEVGYLPQGSPCSPVISNLFTAMLDSRLVKLCKKNKCIYTRYADDITISTNLKEFPKEILTIDEDRIVLNERLIRQFETFGFNINNKKTRLANRKQRQVVTGLVVNKKVNINRSYYKATRAMVDSFCKTNTFFKSKYHVFHELQIENSQSLNGILNYIYNIKKVEPYKLLSPHDDY

SEQ ID NO: 1387 - protein, 610 aa, unidentified
  source 1..610: note = Related to NZ_LN776178.1; note = Necropsobacter sp.
MNALSRLKNCNSIADIISSFSLNISPKNFSYILYILSDNDKYKEFTIPKSDSSIRTISCPEPRLKYLQKEFSKIINDCVIEIQHKNPSYLIGNHAFEKYKSIASNAYKHEKQRYILNIDIENFFSSIHYGRVVGFLQNDRYFSLSEKTSKIIAKLATHKGVLPQGSPLSPILASLIGNIVDSRLMKLARKYKLTYTRYADDITFSSNRNFSTDLLTFKDGIWVANKKLISAINHCGFKINHKKTRFSDQNHKRVVTGVIVNEFLNTDKKYRKNTRAMVNSLLSKGEFKILDRDNNEIQGTIEQLIGRLNHSISIKYRDRVLNPRLPRDVRIEVQNKIKENLIKIIQYKENTTFLPKNIGLDKIEKAFNIEKDEAKYLLSFVQKRDDRLIIPDCNIRLLRNVLFYKYFLSMDKPVIITEGKTDALYFKAAMKKLLISNDLYFVKHKKNGELDKLGLTGGTAPINAFFKYVYNDNNFVDFHKINVKPKSPVIFILDYDDGLDKVKNLLKKNFSEGKRFSQIKRNIYILLLNKFGDGEDFKKDNKVCIENLISFDGEKIAVSNERVSFQGKELSKNEFSKIVLEEYERFDFTNFSIVFSEINNIINHFNYNRD

SEQ ID NO: 1388 - protein, 617 aa, Pasteurella sp.
  source 1..617: note = Related to PPWW01000004.1; note = Pasteurella multocida
MSTLNKLRKCDSIEDLISSFSLKITASQFSYIVYRVQDSDKYHQFTIPKSDGTTRIISSPHKTLKYLQKEFSKIFMQCITEIQQKHPSYLAKNHAFEKYKSIASNASLHKRQKYLLNIDIKDFFSSIHYGRIIGFLKKDKYFCLSDRTAKIIAKLATYDGVLPQGSPLSPILASLIGNIIDTRLSMIARKYHLVYTRYADDITFSSNRDFSKYLLDNKNNIWHPNNKLISAINKCGFSINIKKTRYINRYHKQVVTGIIVNHSLNVDKKYKKHSRAMVNNLLRTSQFQIHKGYNYKYTGNIDQLIGRLNHAISIKYRDRILNLNLLSEIRKYIQFSIKRNLINIIKYNGRTDKIKKHIGIDRLERTFDINNEQVKKYLTFIQKKDDTLYPSDNQIKLLRNVLFYKYFIGIESTYIFTEGKTDHIYLKYAFQALNFTKNVKIIKHNSNLEKLGLSGGTEPINQFIGRAYTDNFYVDFDKINIKPKHPVIFLLDYDDGLKKIESYIKRCFKTGDQFAHIKENIYILLLEKLTPQQDKYNYTEKNKQTCIENLIHYNDSKIMISSNNHDCVIFDGKEISKNDFSIKVRENKNSFDFNNFSSLITAIRDIENHFKTKVKLD

SEQ ID NO: 1389 - protein, 613 aa, unidentified
  source 1..613: note = Related to NZ_CP031477.1; note = Haemophilus parainfluenzae
MNTLSKLQKCNSIDELISSFSLNITPKKFSYILYVLQDNQKYKDFTIPKSGGGIRTISCPEPTLKYLQKEFNKIFISCIDEIKQINPSYLISNHAFEKYKSIASNAYKHKNKKYILNIDIKDFFSSIHYGRIIGFLQKDRYLKLSEKTAKIIAKLATYNGTLPQGSPLSPILASLIGNIIDARLLKLAKKYKLTYTRYADDITFSSNLDFSSFLLEKENNIWVPNKNLISAVESLGFKINNKKTRYTDKYHKQIVTGLVVNKFVNTDKNYKKKTRAMVYQLFKIGEFKLTGKNKDTITGSIDQLIGRLNHSISIKYKDRILNPFLLNNVRSEVKNKLRDNLINIIQYRGESNLLPKDVGINKLEESIFIEIEEAKKLLSFNKNKNDKLIIPDDSIKQLRNVLFYKYFISFAMNGPVIITEGKTDFFYFKAAMKSLSMNNNFKFIRQNNRSLEKLGLSGGTDPINKFIKNVYHDEKFVNFSKLKVRPKYPVIFILDYDDGLDKVSHIIKEKFKDGTQFAQIKENIYILLLKKITLNSSGKMDYTNEPSKVCIENLILLNGNKINVINDEVDYEGTRTSKSCFAKEVSSNLEKFDFSEFKNIFDKIEDIVTHFHT

SEQ ID NO: 1390 - protein, 614 aa, unidentified
  source 1..614: note = Related to NZ_CP072548.1; note = Aggregatibacter sp.
MNLQKLRNCQSIEDLISSFSIKTTPRKFAYVVYKIPDNQKYIEFEIKKANGSLRKIAAPNSTLKYLQKLFADIILNCVLEIQQKDKNFLVTNHGFEKHKSIISNARIHQGKKYLLNLDIKDFFESIHFGRIKGFLSNDQHFLLHNKTAEIIATLATYGERKTLPQGSPLSPILSVLIGSILDANLMKIANKYNLSYTRYADDITFSSNKDFSKFLLRKDQNGNWQLKGKFEKYINKVGFHINKEKTRYTNINNKQIVTGLIVNKFTNTDQRYRKQSRAMVHKLFQTGTFTPDSKNDGRLYNEDYLIGRIYHSISVKYREIVINPNLLTNDINIINKEINKKISNLIRYDKVCAPDYKPNYTANDILNKLTPPFTDGLIESLSKSLVKRNMPIDSDNQIKLLRDILFFKYFVNINSPVIIPEGHTDSKYLKIAMKMLNINIDLKFYNINPSLDKLGLNGGTAKINSFIQNCYSDNNFVSFNKLKIKSKHPIIFILDYDEGLKSCDEILKYFKDGSNYARIKENIFVILLNKYKILEDKKKKDFNIKDHQVCIENLISHNSQRINVDKDNHDKVSFNNELISKSKFSELVENNTHLFQFLNFSTIFDTIKKIIHEY

SEQ ID NO: 1391 - protein, 582 aa, unidentified
  source 1..582: note = Related to MLHL01000009.1; note = Rodentibacter trehalosifermentans
MAKYIDRLRKCTCIADLVSEFKLKVTAKEFGYVVYHLSDDLKYEEFDIPKKNGTLRRIHSPKPTLKYIQKEFSLIIFNCINEIRLDNANYLACNHAFERDKSILSNADLHKNKKFILNIDIKDFFDSIHYGRIKGFLANDSHFKLNEKVSQIIARLATYHKILPQGSPLSPILATLIGNIMDVRFLKLAKKYRFTYSRYADDITLSSNKAFDKNIVYWCENNKKWVAGEIVINILTDSGFTINSEKTRVSYSNDRQTVTGIVVNKQRNVTLEYRRTNRSMVYSLLSTGSFRLNDNVGKITQLMGRLNHSIYIKYYDSKFSIPLDMNERIKYKEKKQKELIKIINDNWKSDKNNITCADHQMKLLRSVIYFKYIINVDQTTIFPEGFTDPIYFSSAKEKLNINSNIKFQKINNGLKKIGLLGCASSVNTFIHNVKEKIDKFISYKQIGVIPKHPVIFILDYDDGLDDCRFILDKIQIDQQYVFIRDNIYVLLLEPKGKSKNHHKTIENMSCIENLISFEGNRIEAVQGKKEYINFKGIEFKKGSFANYVKEHSSDFDYSGFDKIFKKITEIEEDYAKRMITNA

SEQ ID NO: 1392 - protein, 597 aa, unidentified
  source 1..597: note = Related to VSFH01000001.1; note = Lonepinella koalarum
MEVFISMSSYLEKLKSCTSISDLISEFELNITPQQFSYIVYKVEDSKKYQTFTILKKSGDDRIIQKPHNSLKEIQKSIANILMHCVDDIRKDKPNYLKCSHAFEWGKSIVSNSEIHINKKFVLNIDIADFFDSIHYGRIKGFFVSDYYFSLNETIARVIAKVATCNGTLPQGSPLSPIISSLIGNLIDIKFLELAKKYRFTYSRYADDITLSSNKELSDELVIWDRENNVWKVTNTIESLLNRKSGFKINEKKTRYNRFSSRQLVTGIVVNKEKNVVREYKKQNRSMVNSLLNTGEFFIKDISDEHIKGTIEQLIGRLNYCIYVKYYKPNNLTKLDLDSKIDNKEDNRKNIRKMVSLRIDKNDENFPLQKPDHQMYLLRSVLFFKYFTNITQTTIYPEGYTDPMYFSIATEKLNKKGLFYFQKINDSLKKLGLSGGASSVNYFISKFVEHSYFIRFSSIVPTHPAIFVLDYDNGLDGCQYILNSKRFGFIKKKNIQFSHIKDNVYVLLLSPISNEKSWKKKENYKCIENFITYQGKIIQVSDEEGEYVSFKDDKIKKYNFAQYIMNKPDEFSFSEFSNLFDQISLIESDYKERLAMK

SEQ ID NO: 1393 - protein, 590 aa, unidentified
  source 1..590: note = Related to NZ_JTLX01000008.1; note = Haemophilus haemolyticus
MNKTTIDRLRSCTSIADLISEFQLKISPSKFSYIVYCLRDEDKYTKFEIPKKSGGVRIIHSPKDSLKYIQREVATILLNCIDDIKLSNPNYLRCNHAFEKDKSIVSNANLHEHKRFVLNIDIKNFFSSIHYGRIKGFLISDANFLLNEKVGQIIAKLATYNGYLPQGAPTSPILASLIGNILDIRLLKLAKEYRFSYSRYADDITLSSNQELPNELIYWEKEENIWIAGNKITKVIKKCGFELNPLKTRYIRNTNRQIVTGIVVNKKRNVVSLYRKINRAMTYSLLSTGQYTIRDVSGLLSNGTINQLIGRISHCIYVKYHNPPMIHPLNSQRADLRKKNSERVTKIISDNWNRDSKSNINYYSDHQTMLLRSVLFFKYFISNERTTIIPEGFTDPIYFKTALSSLEINLNLHFQKLNRELKKIGIYGGASFVNSFLCNIETEKKGFISYGMIKQTPQKPVIFILDYDSGLEDCKYLLSKMKDGEQYINITDNIYILLLRVKHNKDHKNINNHIYTERLISYQGNKIQAKDDNHEYILFKNEEYKKYNFAKYISQHKDEFNFDSFKDIFDKIKEIEDDYQAKLATKNIKL

SEQ ID NO: 1394 - protein, 586 aa, unidentified
  source 1..586: note = Related to JQHF01000020.1; note = Neisseria mucosa
MTLYLEKLKKCNSISDFIREFNLGLSAKQFGYIIYGLPDHKKYDSFEILKSNGDLRTIHAPKKSLKFLQKQFASIFLQSILDIQKQNHHYLRCNHAFEKNKSIISNARHHQKKKFLLNIDISDFFGSIHYGRIKNFLINDKYFSMTEKGASIIAKLAVYQGKLPQGSPLSPILATLIGNLIDVRLTQIAKKYRLTYTRYADDISFSSNFPLPEKLVYWDDSQQIWVAGKILEKVILKTGFLINPKKTRYTTIPFRQLVTGIVVNIHTNSPSPYKKQNRAMVNSLLKTGKFYIEKNGIQTKGTLNQLIGRLNHTIYAKYHKPTTDIKLDQEEREKFKEENRNYIIEILSKKWHKGKSSYSEADHQTKLLRNVLFYKYFNSLDKTKIFTEGVTDSIYFQIAAEKFNLKDDLSFQKTNISLKKLGLKGGVPTIKSFFKNIKDNNFINLKQFKTNSEYPAIFILDYDQGLDGCPEIIEKFSNGRQYCHITRNIYVLLLKPYNGKGDYKKNKICIENLIRYEGGQIEVDGAKNENVCWNNSLISKMAFSKYISNHKTDFDFTEFKKIFNLIQDIERDYFRRLTQAQAQDEW

SEQ ID NO: 1395 - protein, 591 aa, unidentified
  source 1..591: note = Related to CP091516.1; note = Kingella potus
MFNHLIKLKLCNNGIDVVNNFHNYLGISVKDFWYIAYSLNHFSQFTSFTILKASGGERTILIPPQPLKDLQKKFATILNFCIREIQQENPNYLICNHAFEIKKSILTNAQIHRNKRYVLNIDLSDFFGSIHYGRISNFFKADKYFRLNDKVAKTLAQLACFRDENNKTFLPQGSPLSPIIASLIGNLLDIRLVKISKEYKLTYSRYADDLTFSSNKPIPEDLVRWNSENFIWEAGDRLRRVIEDSGFKINDKKTRLFSAKKRQTVTGITVNKTLNISEYYQKHNRAMLYSLFTSGKFLIGDKEGTINQLIGRLNYVASVKYLKQHHDMSIQEWEEERKKFAYLCAGNFDNKENSNRSIRLLRQAIFYKYFIGNNKPIIFPEGITDSIYFKLANKILNPNEHKENYIIQSINSELTKISLGGGTALINSFLLHAYKDYFINLKNLKIKSKHPVIFVLDYDQGLDVKDKNEKSKNNIPETHHMKDGQQWVHIRENIYLVLLRPLALENKKPTFRNALEMTCVENLLSHVSIGKIKVDDENHENIKFRNRSYPKTVFAKYVAKRSTHFDFSEFKKIFEIIDEIKKHFYQNSISI

SEQ ID NO: 1396 - protein, 619 aa, unidentified
  source 1..619: note = Related to NZ_CP042408.1; note = Lactococcus lactis
MKEKLSKLKKCTTRIDFLNILFPGEGSKNEYLKVIFSVPDEKKYSTFKIPKKSGGTREILAPKEDLKKIQKKLGDFLSDCYQELYGDKNNYSNAYLKEKSIITNAKKHRNKRYVLNIDLENFFPSITFGRVRNYFIKNKYFELTEEIATLIAKIACYKGILPQGSPCSPIISNFICQILDIRLGKLASKNKCHYSRYADDITFSTNLMMFPENIAHWNGDKIIVGQELGSEVTRAGFNCQHSKTRIYGKDKRQEVTSLTVNRKVNVSRKYFDSTKAMARKYYLTGTCEINGQEATYKQILGRFNYINQLEKYNNKIFFKQNEAKEPENIFTPANEKPLETNQKDSVIAPVQLTYNSKYHTFAVNGSKEKELGKYGYKVGYDYLSAREQAYSKFLYYSTFIANQKPIILTEGKTDILYLKAAIKNLYLEFPNLVEKVQDKFNFKISFYNYSKLNRYLLNIIPSGGGILRVLSPQYLFPSDSLISKHPTILLLDNEEKKGKPLARLLGNGKLKKEIVKKDFASLDKTKITLKESDELFNRVKGVDKFFLLTIPRIESDKESDIENLFTEDFIKEQEFDKESKGAKNELSKIVSRDYKKIDFTNFKPLLENLTNIIRANDNK

SEQ ID NO: 1397 - protein, 450 aa, unidentified
  source 1..450: note = Related to NZ_CM001979.1; note = Dickeya sp.
MPIAPQLTIVKNKTKTMSKNNKLSELKSAKNITDLAKIISVPRQSITYVLYGINRLNLAKYHTFKIPKKDGSERTINAPVKELKDIQKKVSSLLQECFRIVCILEGHRNHLKKINSLSHGFIKGKSIITNATPHKNKRFVLNVDLKDFFGQIHYGRVYGFFKNNKHFQLSDEVAKVLANITCYQQGLPQGAPTSPVISNLIAGILDIKLASLAKKYSCYYTRYADDLTFSTNLKEFPPRIASIENGDVRIGSSLEGIIKKCGFDINHKKNRLQFCNSRQDVTGIVVNKKVNVPYDYRNKARVIWHKLKNGKEIYAINSQPEIKKDINYLIGILSHIHNVRREHRVTTKEEYIIPKKPNKKTFDDIFDADSRMYRDVLFFKNFVKNKKPVIVCEGKTDITYLQCALESQAAKHRSLIIKKELQISFFRPTKTISELFKVTGGTGDIGNLIS

SEQ ID NO: 1398 - protein, 576 aa, unidentified
  source 1..576: note = Related to CP011427.1; note = Pantoea vagans
MSKNNKLSLLKSANNTKDLAEVLSVPFQAITYAIYGINRLRLPKYTTFTIPKKDGTARRINVPVKDLKDIQKKVAALLQECFRIICILEGHRDHDKEITSISHGFIKGKSIITNAIPHKNSRYVLNLDLKDFFGQIHFGRVYGFFKNNKHFELEDEVAKALANICCYQSGLPQGAPTSPIVSNLIAGILDIRLASLAKKHSCFYTRYADDLTFSTNLKEFPKELAIFENGNVTIGTSLNKVIDKCGFEVNVKKNRLQFCDSRQDVTGLIVNKKVNVPSDYRNRARVIWHKMKSGKEIYAINAKPEKKENINYVTGILGHIHNVRREHRITTATEYVIPKKPTKALMDSIFDADSRMYRDMLFFKNFVSGKKPLIVCEGKTDIVYLKCALHSQAAKHRSLILSKELKVDFFRPSKTIGELFRVTGGTGDIGNLISNYSSYCDEFKRFSLPQPVIILIDNDSGAPSVRSLVSQITKSKFDNTDTFTHIIKNLYILQTPLVMGGDSAIEDFFDAKTLNEKLGKKSFSYKGNFDSSKHYGKNHFAEYVVKVKKNSIEFKGFNVLFDSIKAIIKDYKSKPH

SEQ ID NO: 1399 - protein, 577 aa, Salmonella sp.
  source 1..577: note = Related to ABDODY010000002.1; note = Salmonella enterica
MSTNSKLKELQEARSLEDLASILSTPLQLLTYVLHGRHHHGLVNYKSFNIIKKSGGIRTINAPIDELKSIQKKLSTVLQDCQKTINILEGHRTHDKKLVTIAHGFIKGKSIITNAEPHRNRKFVLNIDLQDFFDSIHYGRIYGFLVNNKHFKLNENIARAITNLACHDGKLPQGAPTSPIISNLIAGILDIRLAALAYKHKLHYTRYADDITLSTNLNEFPSSIAYIDNAHVVIGNKLRTSIEKQGFSINPQKSRLQFKNSRQDVTGLIVNKKINVKNEYRNRARVLWNKIQNGKEIYAIGSEPEKTKNINYLVGVLSYIYHVRNSNLVRNGIPSITHKKPTKKEIDSTLDANARMYRDVLFFKYFIANKKPIIICEGKTDIIYIRSALLSLARKHRSLIDKKEAKIDFLRVSKTIKELFKISGGTGDIGNLISNYSSYCEHFKRFSPMAPVIILIDNDSGAAPLRSLIKEITKTPFKKEDDYKYIINNLYIIQTPSIDGKDSAIEDLFDKKILQTKLDGKSFIHKQSTFDIKKHYGKNHFAEYVVRQHQKEIDFSRFNLLFDSIKKIIKDYKSKPH

SEQ ID NO: 1400 - protein, 577 aa, Enterobacter sp.
  source 1..577: note = Related to JAJKGJ010000001.1; note = Enterobacter hormaechei
MSTNNKLKELQDAKTLEDLATLLAIPLQMLTYVLHGRYKLKLENYRSFTLTKKNGGERLINAPINELKTIQRKLSILLQDCQRIISILEGHRTHQKEIKSIAHGFIKGKSIISNATPHRNKKFVLNTDLQDFFGSIHYGRVYGFFLTNKHFQLNEDVARAIANLACHEGKLPQGAPTSPVISNLIAGILDIKLSTLAYKHKLYYTRYADDLTFSTNQKEFPSSIAYEEEGIVVIGHALNSIIQKHGFEINASKNRLQYKNSRQDVTGLIVNTKINVKNEYRNRVRVLWHKIQNGKEIHAIQGDKDDKKNINYLVGVLSYIYQVRKSNKTRTNTITNLGKKPQKKEIDSILDADERMYRDVLVFKNFITNAKPLIICEGKTDITYLRSALLSLSNKHRSLIEKKEIKVDFLRITATIQELFKISGGTGDIGNLISNYSSYCDHFKRFTPASPVIILIDNDSGAAPLRSLIKEITKTPFTRETEYAHIINNLYIIQTPLIDGKDSAIEDLFESKTLNTKLEGKTFVYNKANFDTKKHYGKNHFAEYVIRQSRKDINFNGFNPLFESVKKIIKDHKKKPH

SEQ ID NO: 1401 - protein, 578 aa, unidentified
  source 1..578: note = Related to LR134155.1; note = Serratia rubidaea
MSHSDKLSKLKNAKTLQDLADVINVPLQSLTYALHGMHRLGINKYNSFPIPKKSGGVRIINSPVKELKDVQKKLSQTLYDCYNEMLIVSGYRGLDKKGITISHGFIKNKSIITNAECHRNRRFILNLDLEDFFGSIHYGRVYGFFKTNKHFGLHDLIAHALANLVCYTHGLPQGAPTSPLASNFIAHILDIRLASLSKKHGLYYTRYADDLTFSTNKKIFPADIAYLEAGKTVIGFELNKIINKHGFSVNSAKTRLQFNDSRQDVTGLIVNKKVNIRKEYVRAARILANKLFNNKVIYRIESKKTEDDICDINYLIGVMAFIYNVRQSQLIRVSGDKSAELKNFTKKDIDSSLDANARLYRDLIFFKKFIVSDEPLIICEGKTDVIYLRTAMLSLSAKHRSLVTKGRVNVAFLNHTQTIKELFKIRGGTGDLGNLISNYSSYCGKFARFKPKSPVIIIMDNDSGAPKIRSLVKAITGKVYDKNDGFRHLTNNLYLIQTPPLAGGADSAIEDLFDKKTLDVRLSNKKFSYKGEFIKSKHYGKNHFAEYVVKPRRKDIDFNGFNPLLDEIKAVIKHYKKS

SEQ ID NO: 1402 - protein, 588 aa, unidentified
  source 1..588: note = Related to NZ_CTIT01000003.1; note = Yersinia enterocolitica
MSSADKFLKLKQATTLSELAEILGYKHNSLSYILYGKFRLGLSNYSTFSIPKKNGGYRTISSPAPELMELQRRVSDLLHDCFVQIQIINGFRYRNKNIKTISHGFMRGKSIVTNAETHKKKKFVLNIDIENFFDSIHFGRIYGYFLSNKNFELNPTIAKILANIVCHNGSLPQGAPTSPIISNLVAHILDIKLAKIAQENSCQYTRYVDDLTFSTNKNIFPIGLGTIDEKHDCKINEKLIGLIKHSGFTINNKKTRVQYKDSRQEVTGLIVNKKVNVKSEYRNKARILVNKLYSNKEVYKINSTTNEPATIEYIQGVLNYIYQVRLHNSIKHTENILESQRKKCVSKEQIDTTLDADARMYRDFLFFKNFVINNSPLIICEGKTDVIYLRAAISVLSKEFPNLSNSDNGHQLSFFNNTNTTSQLFKINGGTGDLRNLISNYKKYFTKFERFTPESPVIILIDNDSGSATIRSILKEVTKKEFTKKDNFIHIEKNLYVMQTPLQKNQTESEMEDFFTKETLSLKLKNKSFCYKGEFNKNSHYGKNHFAEYVIKPQKKTINFSNFKVIFDIINLICDDYKQKIKNPIKTR

SEQ ID NO: 1403 - protein, 651 aa, unidentified
  source 1..651: note = Related to JAIBBO010000111.1; note = Methanobacteriaceae archaeon
MSWFCQSIGSSFVTFFSQKLFNKLELLLQSFQSFSQLLTGIKNMSENDLERLRNCKDLQDFSKLIGYKKTKNLSYIIYKIPENLRYNEFKIKKKNSEFRIIHAPVEKLKTVQSRLSSLLQNCYDLISVDLKSKEILSHGFIRGRSIITNALIHKNKRFVFNIDIENFFGSINFGRVRGFFIKNRYFKLNENIATIIAKIACHNNSLPQGSPCSPIISNLIASILDIYLFKLCKKYKLYYSRYVDDLTISTNLNYFPENIAYKNPSSKNEWVIGNELTKIFERVNFKFNFKKTRMQLKNSRQEVTGLIVNKKVNVKYEYKKKVRAMIHNLFMNGKIFIKKEDKEKNVEVEKKINSLHGMIQFIGHIIEYQLETFNLSKVDKKNENAISNMNYWLKMYENFIIYKYFYGIKAPTIITEGKTDTIYLKCAIERLNFQFCTNSFSSLSKAICFHPHTHRNNFQNKIKNKDNYKKSFDKKLKRKPVFLGGNSGATFLMKNYIPNNKLFKNADKILSAPLIYIIDNDESGKKSLNNFLSNKKFINHRLNDNTCFVGLNLYIIKLPQISSENNDYEIEDYFDTDTLSSIIDGKSFNKSNDSFDIKDVYFGKMDFALKIIKNNKNNIDFSKFNKLLDEINFVIQDFYNNKRHQNSLVSN

SEQ ID NO: 1404 - protein, 557 aa, unidentified
  source 1..557: note = Related to SAXY01000032.1; note = Brachyspira pilosicoli
MFLIFENMYKKEEIERAVKKLEELVNCKSKKDFSDWLDIRLKTIYYILLINKEPLYNEFTIPKKNGSMRNISAPNEHLKRIQHNLKKNLDMCYIAITHNNFNKRLAHGFIRKKSIITNSQYHKNKRYVLNIDLKDFFPSINFGRVRGFFIKNKYFQLNEDIATLIAQIACHNNQLPQGSPCSPIISNLLALSLDKYLFSLSKKYRFTYTRYADDITISTNLREFPKGIAYFDEYEEKWFLGNKIIEVINNNHFDINFEKIRMQYKTSRQEVTGLITNKKVNIKRSYIRATRAMLDHLVLYPSSDDYISRRKIVEGRIAFIHQIRKINIENNRDLSLKMLENFFCFDNFINNNNITILVEGITDKIYIKSAFKYFKSEYKFKLKIITKNPFSRTNSQKNSGEGSLNQLLSRFKETKFLDRINMFLKRSKLVKPKNPIIIIFDRDNKKFVNDFEQKNAQYLFLEPNVYYFPIPELPDKKYISIEYYFSDEVLNTPFKGHKLELDIQNKDKKIFYKIGEKGLSKNKFAIHIVRKLAESEFINFKKIFDIINEINIDYKNK

SEQ ID NO: 1405 - protein, 563 aa, unidentified
  source 1..563: note = Related to NZ_SAXU01000001.1; note = Brachyspira aalborgi
MDTLDKLKNCKSKFGLSKIIGIKLKKITYILFVKKYNLYTEFQIPKNNGKFRNISAPNKYLKIIQKKLKKVLEECYNEIQLNKNASHGFLKKKSIYTNSNFHKNKRYVLNIDLKDFFPSINFGRVRGFFIKNKNFQLNEEVATLIAQISCYNNQLPQGSPSSPIISNLIAISLDKGLSILSKKYKFNYTRYADDITISTNLKNFPIAIAYKDDDGNWKLGSEIIKMINNNHFDINFDKVRMQYKSSRQEVTGLIVNKKVNVKRNYIRKTRLMLYNLIKNPNSDDYQSIRNCIEGRIAFIYQIRKMNFENNKRDIAKKMKDMFFYFDKIINNQKITIITEGKTDKVYLSSAYSHFKEYYKLNFQIITKIPYTKHDSNNINNTGDQTLMNFVKELKEKNNIKPYKYLLEKSKIKNPKNPVIVIFDRDRINIIKEFEKNIKNENCKFVFFEPNIYYFVLPKLIGKEYLSIEYYFPNKILNKKIKGKNLSLCQEKHKKHIIYKIDENNDGLSKNEFSKYIKKLRYNTKRDNILNEKNKKYFDNFKSIFDIINDIRKDYKNKLQNINK

SEQ ID NO: 1406 - protein, 578 aa, unidentified
  source 1..578: note = Related to NZ_CP019600.1; note = Brachyspira hyodysenteriae
MILEKLQNCQDKKDLALLLKCDLQNLSRILFKDFNNNYSIFFIDKKDGGKREILAPKKDLKIIQKKLSKILEECYIEISEKNNKINFNSINGFITGKSIITNAKKHTNKRYVLNIDLKDFFPSITFNRIVGFLKKNKYFKLEHDVAMLIAQIACHKGSLPQGSPSSPIISNLIMLSLDKEINILAKKHGLTYSRYADDITLSTNKKNFPNEIASGNGIEWNIHKKLETLINNYKFNINHKKIRMQYKTSRQEVTGIIVNKKVNVNRKYIRNVKAMLNKSIINHSMENYEYFKLSLRGKIDFIYQVRKLYMENDKSNEKDLISKIFNNFLYFNHFINNNKVTILTEGKTDKIYIDTAFSHFKNEYNYQINILKQSDMFTNITKLNGINNLVNFIKSYDSKNGIINKLINKSNIHIPKKPVIIIIDSDEPTKSKALELLDNKNGFIFKEPNLYCFQLPEIKDKKFFSIEYYFPERIRNYENNGKKLGENTKNKYNNKETIYKIEDGGNNLSKSYFSNYIKTLKHKEISDKKNKTKEDIDNIKRINEVNKNSFEEFKKIFNKIDEIINDYKKICNSKTSEQ

SEQ ID NO: 1407 - protein, 557 aa, unidentified
  source 1..557: note = Related to SAXX01000003.1; note = Brachyspira aalborgi
MNLEKLKECKSKYDLANLLKYSLQSLSCILFKDIDSNYSMFYIDKKDGTKREILAPNEKLKKVQKNLSKILCKSYECINKNPKAVHGFIEKKSIITNAKMHKNKRYVLNIDLKDFFPSITFNRIVGFFKKNKHFQLEHEVAILIAQILCHKGKLPQGSPSSPIMSNLIMLSLDKELNILSKKYGLIYTRYADDITFSTNKRKFPKEIAYSINNVDWNVSKILERLINNYHFEINHNKTRMQYRTSRQETTGIVVNKKVNVSRTYIRNIRAMLNKMICNYTMDEYDSFKSSIKGRIDFIYQVRKDYIDLKDKKNYEKDLIVKLFNKYFYFDKFVNNSNVTILTEGKTDKVYIDVAFSHFKNEYNYDIDIVRHSDMFLNITKLNGIKKLKGFIDNYKDKYKQEIVPLLKKSKIENSKYPVVIIIDSDEIEFLKQLKLFDDKYNLKNKYIFKKPNLYCFHLPQLDDKEFFSIEYYFQENIRNKYINGKRLRDIIEKENIYKIDDKSLTKSKFSQYIRKLRYDNEKKTDINSNNKKIFSEFKKIFDLIDEILKDYNTRIQK

SEQ ID NO: 1408 - protein, 565 aa, Desulfovibrio sp.
  source 1..565: note = Related to NZ_VOIQ01000010.1
MYGLHGGPNGQYTDFTIKKRNGTDRNISAPTTALKAIQRSLAIRLSGVYEPKKAAYGYIKKSDNNQDKTVFGNALVHSKKRYVFNVDLKDFFPSIHFGRVMGLFRSNPYKLDRSIAILIAKIACYNDFLPQGSPCSPIISNMICSHMDRDLSDLAKNYRCYYTRYVDDITFSTNVKDFPEDIAFFDGIWNPGEGLVEIIDDHGFKINGEKTSLRTQSDRQIVTGLTVNDFPNVRKRSINQVRAMLHDWKVNGLELAYTKYIEKYDTRNNQHEEEDKTVFGKIIKGKLEWIGSVKDKRFEINEKHKGNKAKLNRLGYSKNLLERQSYKKYIERLKHLTINESDMVTVLGEGQTDWMHLKTAYKRLCSDPELSFPIYFYPHSRKEKGGEDNLWTFCSTAKDHYVTYRHPVVCVFDCDLERINNKHKGKKFIDHGNNVFSILLQKPEGSIYEKYAIEQIYDLHDMLKTDEYGRRLYLSSEFDGNSVHKMNPNIFSKKKTSNDEKIVDNEVFLRKKDGTEKSIALSKTNFAVSIARGIQPFRTMNFSGFMPTFLRIKEIYQLHISDSSH

SEQ ID NO: 1409 - protein, 399 aa, unidentified
  source 1..399: note = Related to NZ_JONL01000015.1; note = Maridesulfovibrio frigidus
MTRINNLSRFQQISTLNQLALFLGFKPKDFSYILYRLSDGPNGQYTEFAIKKRNGKDRTIAAPHTALKTIQRSLTSKLEGIYDPKKAAYGYIKETPHNKDKTVFGNALVHSKKRYVFNIDLCDFFPTIHFGRVMGLFQSNPYKLKRNIAILLAKIACYNDCLPQGSPCSPIISNMICSHMDRELSDLAKAYGCYYSRYADDMTFSTNIIEFPRDIAFRDENWKPGEGLIEIIDKNGFEINSEKTTLRTQADRQIVTGLIVNDFPNIRKRSINQVRAMLHDWKLNGMEAAYEKFINYHDTRNSENKEDSTELFSMVVRGKLEWIRSVKDKRFNIQEIQNKAKSKQNRLSYSSRLLEKQSYKKYFNRYKHLRINESDMLTVLGEGQTDWRHFKNAYEVLYR

SEQ ID NO: 1410 - protein, 351 aa, Leptospira sp.
  source 1..351: note = Related to NZ_RQGA01000001.1; note = Leptospira perdikensis
MELKLNRTDEEILALFKSLNSVETVANILEVSPKILNYYTFKSENYQKFFIRKKNGKPRTIYSPNTNIKILQQKLLYIFNLLYKPNQYAYGYIKERNIVDNANKHLKKKFILNVDLSDYFPSITYRRVIGYLVKNLKIENTAARIITKLICVEDEKNTFLPQGGVTSPLISNFISENLDKDLSYYLKRFRCEYTRYADDLTISSEDLKFPDKIAVEDQFRQVWLHNDFERIIKKNGFEVNYEKIRLRKPNQRQTVTGLIVNGSKPNVKRSYIRNLRSILYNWETKGYTHIQTAYELKYRKFDNAEFKPIPKIENVIDGKLNFLSMVKGKDDEIYLKLKKRFLKLKATLDDV

SEQ ID NO: 1411 - protein, 347 aa, Leptospira sp.
  source 1..347: note = Related to JACCKC010000006.1; note = Leptospira yasudae
MKLELVKTNEEIIECFYSLRTKSDVADLLEIPIEVLNYYLYISSNYTIFTIPKRDGSPRVIYSPITPIKILQRKLLYVFNLIYEPDDNSFGFIKNRSIVQNAARHQNKKYVLNIDLKDYFPNITFGRILGYLKKNLMLGDEASVIITKLACVETEENTFLPPGSPLSPILSNMISRKLDVEISNFVKKYDCTYSRYADDISISTDRIVFPEQVAIRDLYGDIWLNAKFVKVISDNDFNINYRKVRLRSNKQRQEVTGLIVNGVRPNVKREYIRNLRAMIFDWEKNGLENAQSNFEINYWKPKDSDFKQIPRIENVIDGKLNFLSMVRGKDDLLYQKLKTKYDKLVSI

SEQ ID NO: 1412 - protein, 571 aa, Bacillus sp.
  source 1..571: note = Related to LITP01000001.1
MKNKFKRLVDFEDVALLLEIPTEFLWKILIRDKQINYTSFPLGKKSGGFRTIYSPSKNLAILQAKLAYILSLNFTPHNRAHGFIEKRSIVTNASEHLKKSFVLNIDLENFFESISFARVRKMFISYFKLGETVATTLANICIHPGGFLPQGAATSPIVSNILAKSLDKELKQLSIESKGVKYTRYADDITFSTNKRVFPRSIASLNEDGQVELSERLMQIIKKNGFNVNGKKVRMQDSKKNQSVTGITVNEKLNISRTYIRRIRSILNCIEKNIDDLDRAREVFERKYPFRQRAKENYPEMFSVLRGMINHVGHVKGKSDPVYLKLANRFNDVSPEHKVIKSVDKQSSKRKMYEDYTYVIEQENPVVAFASEQRNEFEHVYHNQGTGFLLKGFGLVTNAHVLKDLVDAIELEMVILEPYYVRVFKSNDINVHMMRIECYDIEKDIAILRSNSVDHNTEGFNYNELIQKEQLIDLVGYPDYRRGQEIRVDNGFVRGIRMHTDSSDKTTAHKRYEITPTIYGGNSGGPIVNEKGEVIAVAVKGATMNGVVPNEVIPISEVIELAKRQLFSHSL

SEQ ID NO: 1413 - protein, 551 aa, unidentified
  source 1..551: note = Related to JABMKX010000008.1; note = Paenibacillus tritici
MEIPTEFLWKILIRDKSNNYTSFPISKKSGGYRTIHSPSSNLAILQKKLAYVLSLQFNPHNRAHGFIEKRSIVTNASEHLKKSFVLNIDLENFFESISFARVRKMFASYFKLSGVVATTLANICSHPEGFLPQGAATSPIISNIIAKSLDKELKQLSVESKGVKYTRYADDITFSTNKKDFPRNIAFLNEDSHVVLSEKLLRIIENNGFNVNEQKIRLQDRQSNQSVTGIVVNEKLNVSRTYIRRIRSILNCIEKNNNDLDAAREIFIRRYPFRQRAKVNQPEMFSVLRGMINHVGHVKGKSDPVYLKLANRFNSVSPEQKVIKSVEKQINKRKMYEDYTFVIEQEKPVVALVSKESTEFEHVYHNQGTGFLLKGIGMVTNAHVLKDLVSAIELEMLIPIPYYVRGFNSKDFNVHMMRIECFDTEKDIVILRSKSLDHNKEGFSYSEAIQTDQLIELVGYPDYRRGQEIRVDNGFVRGIRMHINSGDKTVTHRRYEITPTIYGGNSGGPIVNEVSEVIAVAVKGATMNGVVPNEVIPISEVIGLAKRNSLI

SEQ ID NO: 1414 - protein, 582 aa, unidentified
  source 1..582: note = Related to NZ_FCOQ01000017.1; note = Paenibacillus sp.
MKPVLLSTDEEIKNKFKNLTDFGDVALLFEIPTEFLWKILIRDKWINYVSFPLHKKNGGYRTIHSPSKNLAILQKKLAYILSLNFTPHNRAHGFIEKRSIITNASEHLKKAFVLNIDLENFFESISFARVRKMFISYFKLSEIVATTLANICTHPDGFLPQGAATSPIISNILAKTLDKELKQLSIESKGVKYTRYADDITFSTNKKLFPKSIAFLNEDGQIVLSERFMKIITKNGFNVNKKKIRLQDSEGNQSVTGITVNEKLNVSRNYIRRIRSILNCIEKNINDLDYAREVFERKYPFRQRANRIHPEMFSVLRGMVNHVGHVKGTSDPVYLKLASRFNNVSPEHKVIKSVEEQSNKRKLYEEYTFVIEQENPVVAFPFKGSMDFEYVYHNQGTGFLLKGIGLITNVHVLKDLVDAIELEMYIPQSYYVRVFNSIDFKEHMMKIECYDIEKDIAILRSSSLDHNAEGFSYNELIQKDQPIDLVGYPDYRMGQDIRVDNGFVRGIRMHNDSCDNTVKHKRYEITPTIYGGNSGGPVINVNSEVIAVAVKGATMNGVVPNEVIPISEVIELANRKLFVYSV

SEQ ID NO: 1415 - protein, 589 aa, unidentified
  source 1..589: note = Related to NZ_JAKGAO010000024.1; note = Paenibacillus tarimensis
MIFISTLVRPLLQSSDDKIKSKFKTLTDFEDVALLLEIPVEFLWKILIRDKQINYKSFPLAKKNGGYRTIYSPSKNLTLLQKKLAYILSLNFTPHTRAYGFIEKRSIVTNASEHLKKNYVLNIDLENFFESISFARVRKMFISYFKFNDTVSTTLANICVHPDGILPQGAATSPIISNILAKSLDKELLRLSLESKGVKYTRYADDITFSTNKKTFPKAIALLNDDKQVILSDNLIQIIKSNGFNVNERKIRLQDREGNQSVTGITVNEKLNVSRTYIRRIRSILNCIEKNINDLDFARSIFERKYPFRQRVKGNYPDMFLVLRGMITHVGHVKGKRDPIYLKLASRFNRISPKKMIINSAEKQNNKRKAYEDYTYVIDQDDIKCVFDPKMDDMVDLYYGQGTGVLLKGIGVVTNTHVLGTIIDALDNGAKLPSSYRIRVFKHDSELACTITCYDPERDIAILTPDDIDCSAIGLEYNTSITKGQSIDLIGYPNYRQGQEIRVENGFVQGKRIHKGTKGEYIRHEISPTIYAGNSGGPVVNENAEVIAIAAKGATENGVVPNEVIPISEIIKLAQDNGLLNERMSSVQL

SEQ ID NO: 1416 - protein, 568 aa, Bacillus sp.
  source 1..568: note = Related to NZ_CP033906.1
MRTELLANEDKIKRNFQNLNTFNDIANLLEIPVEFLWKILIRDRAHSYRRFELRKKNGDPRIIYSPNTNLSILQKKFLYVLELNFNSHQRAHGFVKNRDIITNANEHINKRFVLNFDLENFFESINFRRVRHMFISYFKLNETVASTLANLCCHPDGFLPQGAATSPIISNILSKSMDKELTRIAINVRGCNYTRYADDITFSSNKRIFPTQIAIQHSDGNIEISEEVIKIINKYGFSIKESKTRMSDWKQHQSVTGIVVNSKLNVSRKYVRKVRSILHSAEKNIDNLDVAVELFNSKYNFRQKNNNTYPDMFSILRGKIAHIGNVKGKIDPVFLNLAKRYNQIAHLNEEPLIIIPPNDIQFYQENTFVMECNEFELYIDKNDETGEFIYGQGSGFLLKGIGLITNAHVVKEVIDLMKNEVKFINKYYVAIHRASPYDIIYKARIICYSIEKDLAILEVENLDIESIGYSANESIKKDMQINLVGFPSYREGNDIKSQSGYVEGIRMHEKINVRYEISATIYEGNSGGPVFNASNEVIGVATKGTTSNGVSPNEIIPISEVLKLAKEV

SEQ ID NO: 1417 - protein, 586 aa, unidentified
  source 1..586: note = Related to JACBYI010000030.1; note = Paenibacillus sp.
MSGHVNVELKSSPTDIRLKFRKLNTFDDIAHLLEIPVQFLWKILVRDKLVNYRTFKLRKKNGDERTIYSPLSNLAILQKKLSYILSLNFTHHDRSHGFIENRSIVTNASEHLRKKYVLNLDLENFFESISFRRIRHMFISYYKFNDKVASTLANICSHPDGFLPQGAPTSPVVSNIIAKTLDKELKRVAIGAKWTQYTRYADDITFSTSKEQFPKEIATINESGIITLNENIIKIIEKNGFKVNDKKTRLQNHKQSQSVTGITVNEKLNIDRRYIRRIRSILSCIEKNINNLDEAHKIFEMKYPFRQRKRGSNPDMFLILRGMISHVGNVKGKQDSVYWKLANRFNKVTPHEPIKLQLSRREFHEDNTYVIDSDYTAKYYNHNENIFDEALYGQGTGFILRTIGLVTNAHVIEGIIEGLEQKFIFSKKYYIEAYKSTLYSFPENAKVLCYDIEKDIAILSVEGLEIHEKGYMYNESIKEEQQIELVGFPGYRKGQDIKIQKGFVQGVRMHLSKDGTKRYKRREISATIYGGNSGGPIVNTDNEVIGLAVKGATMNGVSPNEIVPISEVIELAKKHGIINEHVSISF

SEQ ID NO: 1418 - protein, 585 aa, Bacillus sp.
  source 1..585: note = Related to NZ_JAKUFL010000007.1; note = Bacillus cereus
MELKSDVSVINKRFKKLQNFDDIALLLEIPVEFLWKILVRDKHTNYRVFKLRKKNGGERTIYSPASNLAILQKKLAYILSLEYKVHSRVHGFTKKRSIVTNAFEHLDKRYVLNFDLENFFESIEFRRVRKMFISYFGFNDKVAATLANICCHPNGFLPQGAATSPIVSNIIANGLDKELTRIAKNSKWCKYTRYADDITFSTNNKKFPQEIAHIVDENIVLGETILNVVEKHGFKINHEKTRLQNHKQNQTVTGITVNKISNVNRTYIRRIRSILNCIEKNKNDIVNAEKIFKMKYPYRQKREDNKPDMFHILKGMIAHVGNVKGKKDPLYLKLATRFNGVVELSDLTPFRLPITKKGFQENHTYVIDNPDFEMYFTEDGYEEVMYGQGTGFLLKDIGLVTNAHVIEDVIKTVEKKQGKFQKEFYISFFRAVDYHVKHWAKLLYYDTDMDIAILDVKDINISKTGYEYNEFIEKGQNVELVGFPNYREGQEIRIQEGTIQGVRINESRDRSRKYIRHEITTTIYGGNSGGPIVNENNEVIAVAVKGATLNGVSPNEVIPISDVIKLINQNKQPEEKSEASIEVVQ

SEQ ID NO: 1419 - protein, 591 aa, Bacillus sp.
  source 1..591: note = Related to PPFT01000033.1; note = Bacillus cereus
MSNHTYVELKSDVSVINKRFKKLQNFEDIALLLEIPVEFLWKILVRDKHINYRAFKLRKKNGGERTIYSPASNLAILQKKLAHILSLQYKVHSRVHGFTKKRSIVTNAFEHLDKRYVLNFDLENFFESIEFRRVRKMFISYFGFNDKVAATLANICCHPNGFLPQGAATSPIVSNIIANGLDRELTRVAKNTKWCKYTRYADDITFSTNNKKFPHEIAHIVDGNIVLGETIINIVEKHGFKINHEKTRLQNHKQNQTVTGITVNKISNVNRTYIRKIRSILNCIEKNKDEVARAEKIFESKYQYRQSRKGDKPDMFRILKGMISHVGNVKGKKDPVYLKLANRFNEVVELGNSTPFKLPMTRRAFHENHTFIIDNEDFEMYLNKDGTGDVLSEQGTGFILKGIGLITNAHVLEDFIKVLETEEGRFVNEFYISFFRSVSTHVKHKAKILYYNTDMDIAVLSVKDMDISKIGYEYNEFIERDQKIELVGFPNYRDGQEIKIKEGTVEGIRIQRSKDGSKRYERYEISATIHGGNSGGPIVNENNEVVAVAVKGATMAGVSPNEVIPISDVIKLINQKKQPEEKSEASIEVVQ

SEQ ID NO: 1420 - protein, 587 aa, Bacillus sp.
  source 1..587: note = Related to NZ_CP082279.1; note = Bacillus amyloliquefaciens
MVYKLNFELQSNLEDIKQNFKNLSCFEDVALLLEVPKELLWKVLIKNKGANYKAFKLKKKNGSERVIFSPTLSLSILQKKLAYILESNYKNHRQSYGFVKGRGIVDNAQKHLNKKYVLNFDIENFFESITFRRVRSMFMTYYKFNEKVATTLANICCHPNGFLPQGAATSPIISNIICNRIDKEFSKLAKNNRCQYTRYADDITFSTSRRVFPHDIAYIKEGSIFLNSNVISIVEYQGFKINKEKTRLQNYRQNQTVTGITVNEKLNVKRSYVRRIRSILHCIEKNVEDLQKAEQIFEEKYPFRQKKYLDNINMFAILKGMISHVGHVKGKDDPLYLKLAKRFNKISYLSETISPFKLESLKKFHETYTYIIDYDDKVPLVCFENDKMEEILYGQGTGFLLKGVGLITNAHVIEDAIEAIKDNKKFNNEYGISFFRGNYPDLKYKAKVSKYDLDKDIAILDIKGFNIDNQGYEYNIDMKDGQKIELIGYPDYKIGQEIKIETGHLKGIRKHRDSTGTFHSRREISAIIYGGNSGGPIINESNEVIGVAVKGATLHGVSPSEIIPIEDVINLNSSNSEVSSKIATKPH

SEQ ID NO: 1421 - protein, 583 aa, Bacillus sp.
  source 1..583: note = Related to CP018574.1; note = Bacillus altitudinis
MVYKLNIRLQSNLEDIKQKFQNLSCFEDVALLLEVPKELLWKVLIKNKGNNYNAFKIKKKNGSERFIFSPTSNLSLLQKKLAYVLKCNYKNHNQSFGFVEGRGIVANAQKHLNKKYVLNFDLENFFESVTFRRVRSMFMTYYKFNEKVATILANICCHPNGFLPQGAATSPIISNIICNRLDKEFSQIAKKNRCQYTRYADDITFSTNKRQFPYDIAYVREGSLFLSTNIISIVESQGFKINKEKTRLQNFKQNQTVTGITVNEKLNVKRSYVRRIRSILHCIEKNSNNLHKAEQIFKEKFPFRQKKLFDFNNINMFAILKGMISHVGHVKGKDDAVYLNLAKRFNDTVYLDPTISPFRLESLEKFHKSYTYIIQDDEKVPLAHFEDGMEVIGYGQGTGFLLKGVGLVTNAHVIEDVIKAIEDGKKLNIEYGISFFKGNDPNIKYKAKVAKYDLDKDIAILDIKNFNIGEHGYEYNINMTTGQKIELIGYPDYSIGQEIKIESGYLKGIRKHGDSTGKFHTRHEISAIIYGGNSGGPIINESNEVIGVAVKGATLRGVAPSEIIPIEEIINLNSNLTDVSKRI

SEQ ID NO: 1422 - protein, 586 aa, Bacillus sp.
  source 1..586: note = Related to KB976282.1; note = Bacillus cereus
MSKKMNVRLLSEEDVIKKNFKSLKDFADIANMLEIPTKILHQILVESKKNNYSTFVIKKKNGTDRTIHAPKKNLSIIQKKLSNILALVYNNHLNSHGFIKNRSIVTNAAQHLKQKYVLNFDLENYFETINFGRVRAMFIHYYGFNESVASTLANICCHHEGFLPQGAATSPIISNIISFKMDKELTKIAKKYHCTYTRYADDITFSTKKSVFPKEIAFIKDSSVQISHEVVKIVKGNGFFINKDKTRLNHQQERLSVTGITVNEKLNVERRYIRKIRSILHCIEKNSSDIEVAKSIFNEKYTFRQRRDEGNPDMFDVLRGMISYVGLVKGKEDEVFLKLAQRYNKCVDAMGVSVIKLPVERRRFQELNTFVIEQEYCYYKYDGVPDNSQCVVVGQGTGFLLKGIGLITNAHVIGKDYFDLWELSGVEFNGISINRSKYEKDKTYYAKLLCYDYIKDIAILDVDGIDIDKVGFEYNDSISTDEEIQLIGYPSYQKGIGLSVKDGKVLEQRYTIEDELSRSIRYEISATVFGGNSGGPVVNMNNEVIALAAKGSSEKGNVPNEVIPIKQVIDLAIKKKLIPSREEISV

SEQ ID NO: 1423 - protein, 577 aa, unidentified
  source 1..577: note = Related to WKKF01000013.1; note = Metabacillus idriensis
MLNRMKPELVCEDDAIKRKFKNLENFEDVARMLEIPVKKLREIIVLSKKNNYITFKIKKKNGNDRTIHAPNKNLSILQKKFSYILSLVYNNHLSAHGFIKDRSIVSNATQHIKQRYVLNFDLEDYFENINFGRVRAMFIHYFGFNEAVASTLSNICCHHDGFLPQGAATSPAISNILSFKLDKDLTKLARKHHCIYSRYADDITFSTKKNQFPKDIAFIENSSVQLSNEVIKIVKGNGFFINENKTRLNNNKEHLSVTGITVNEKLNVERTYIRKIRSILHCIEKNIDDIEVAKTMFNEKYKFRQRKENKNPDMFDVLRGMISYVGQVKGKEDEVFLKLANRYNRAIEFFDLPLIKIPVPKKKFQEDNTYVIESLNYDYTFGGERHYSLVSQGTGFILKGIGLITNEHVLKEYIEMLELGVQYDSSENIVIHRSKYSHEKQYAKLLCYDKIKDIAILSIKGLDIKKVGFDYNVSIEPDQEIQLVGYPNFRENMDISIKNGVILGERYTDKTGFVSEKRFETSAHIYGGNSGGPVVNMANEVIAVAVKGATENGVVPNEVIPIKEVIDLAKKNKIITT

SEQ ID NO: 1424 - protein, 581 aa, Bacillus sp.
  source 1..581: note = Related to NUBD01000031.1; note = Bacillus wiedmannii
MIKKMSPELLCEDAILKERFKSLNDFEGVAHLLEIPVKELRKVLVLNKKYNYTTFKIKKKNGNDRTIYAPQKNLSIIQKKFSYILSLVYNNHLNSHGFIKERSIVTNAEQHIKQKFILNIDLENFFESINFGRVRAMFIHYFKFNELVATTLANICCHYDGFLPQGAATSPIISNILSFKMDKELTKLAKKNHCIYSRYADDITFSTKKNQFPKDIAYIENSFIKINSELLKVIMGNGFFINKNKTRLNSHREKLSVTGITVNEKLNVERKYIRKIRSILHCIEKNINDIEVAKSIFNEKYRFRQRKEHGKPDMIDVLRGMISYVGQVKGKNDQVFLKLAKRYNLIVELIDMDLPIIKLPISKRKFQEDNTFVIESLYYPYFIDGESAGEAPIGQGTGFLLKGIGLITNAHVFKGEYTEMLEIGATFKKIEIHRSKYSSGKKHYASLLHYDKIKDIAILSVDGLDMAKMGFEYNEFIEPNMEIQLLGYPNFRDNMDISIKSGTVLGVRYTDTYRLNSEKRYEISAHIYGGNSGGPVVNENNEAVAVAVKGITDDGSVPSEVIPIKEVIELAKKKNIIPLKG

SEQ ID NO: 1425 - protein, 578 aa, Bacillus sp.
  source 1..578: note = Related to PCNZ01000039.1
MTYKLNVDLVQNPEIIKEKFKSLSNFNDVANILEIPSSFLRQILIVSKKSNYGTFTIKKKSGDDRKIHAPSKNLLIIQKKLTSILNLVYKNHNNSHGFVKDRSIITNANKHIRKQYVLNFDLEDFFNNINFGRVRAMFIYYFKFNETVATILANICCHYDGFLPQGAPTSPIISNILANKLDKDLTRLAKRHRCDYTRYADDISISTDKNKFPKAIAHTKDKKTYLSSEIISIVKNNGFFINDKKSRLNSKFENLSVTGLTVNEGLNVKRSYIRRVRSILNCIEQNLDNLDEAKRIFIEKYPFRQISYATEPDMFAILKGMIAHIGHIKGKTNSVYRKLAIRYNDIAEIENILSIKLPSTRRQFQETNTFVIESSFFYKSGDDEEFEPCGQGTGFLLKGIGLVTNAHLFDIYFKKSNDGYNITNFSIEVHQSKYSTNKKYAKLLWHDRIKDIAILQFTNGNLTDQGFDYNTSIKTGMEIELLGYPAHTLDNSIKIESGVVRQERNNPMPDRQKQTRFEISPLIYGGNSGGPVVNKENQVIAIATRGITSNGVVPSEVVPIGDVITLFEKHNPILTKNV

SEQ ID NO: 1426 - protein, 570 aa, unidentified
  source 1..570: note = Related to NZ_NPBG01000156.1; note = Niallia circulans
MTTIYINLKSDDDVIKNRFRTLDTFEDIANLLEIKPKMLRDILVINKGKNYKSFVIKKKNGGERTIYSPEKNLSILQKKFLYILNLVYRNHENAHGFVRDKSIKTNATSHLGQNYILNFDLKDFFENINFGRVRSMFMSYFKFNTIIATTLANLCCHEDGFLPQGAATSPAIANILSYNLDKTFSKLAKKEKCVYTRYADDITFSTNREKFPKNIAFQKKGQVLLSSYVEKIIRENGFLINESKTRLHNKYQNLSVTGITVNQKLNVSRKYIRKIRSILHCIEKNISNLELAEKLFCEKYTFRQRKNSNTPNMFDVLKGMISHLGNVRGKSDDIYIKLATRYNILVNNIDKPEIKLPISAQKFQERNTFVVDSLYSKYSLYGAEDQVLNGQGTGFLLKNVGLITNAHVLYDNIDLLDDGAEYKTEYYIRVHQSKYSIDNKQYYAKIVYYDSFRDIAILSIKDINLNTEGYSYNEEINPNQSIKLIGYPQYIDGQDLRVLDGHIMNSRIHTDGTRTQKRYEISATIFGGNSGGPIVNANNEVIAVAAKGISDKGSVPFEVIPISDVIKIYN

SEQ ID NO: 1427 - protein, 590 aa, Bacillus sp.
  source 1..590: note = Related to NZ_JAHQCS010000163.1; note = Bacillus tamaricis
MNVELTKPDTLLIYEFQNLHSFSDIANLLEIPIEVLWKNVVDKKKYHSLKIPKKQSDKFRIINKPSKNLNIIQKKFNYILSLVYKSSHSTSHGFEKHKSIRTNAICHLNRQLVLNLDLEEFFSSIIFPRVRAMFMTYFKFNNEVATTLANICCDNNNKLPQGAATSPIVSNIIAYKLDKQLSRLARTNGCIYSRYADDITLSTNNKKFRFEIFNGNDGVKEVGEKVKQIIQSNGFKINSSKTRICENSKAQYVTGVKVNSKLNVNRTYVRRIRSILHTIEKNLDNIEEAVKIFKEKYPYRATLFNNYDMFNIVRGMISHIGHIKGKQDAVFQKFVIRYNRIISEINTKEGTNYAFLYRPYTWTEFRQQNIYVIEEDEISYRLGSLNKKIISSQGSAFLLQGIGLVTNWHVVKCFIEGVINNELATFNSNYYIPVTKSRYSDKIWFAKIIMFDKGRDIAVLKIDGVDEKLYGFDYSLDIKENMECCLLGYPEYIRDQTLHEVEGKIQSQRISRYYPNDYVRYTTTMAIHGGNSGGPVVNKENNVIAIAVKGSNNTVAEVIPIGDLLESINQQQMIKIEQHNIVQTTEVSKS

SEQ ID NO: 1428 - protein, 575 aa, unidentified
  source 1..575: note = Related to NZ_CP013661.2; note = Planococcus kocurii
MHVDLKSEDTAILNKFNSLQTFDDIADLLEIPPKKLWEAVIQNKTYSEFTIPKKNSSNFRVINKPSKNLDIIQKKMNYVLSLAYKSTSNVSHGFEKNKSIRTNAQVHLRKKLILNIDLANYFSSITFPRIRAMFLSYFRFNEVVATTLANICCDNNNELPQGAATSPIISNIITYKLDKDLVRLARKHRSNYTRYADDITFSTNRKEFQSDIFNMDEDFYDVGDKVIELISKNGFSINTSKTRIHDSSQPKYVTGVKVNTKLNLNKRYIRRIRSILHCIEKNINSLDEAITIFEAKYPFRKTKFKNRDMFNIVRGMISHLGHIKGKQDHVYQKLAIRYNLIISAVNGSSNENYPYIHRPLTHSEFREQNVYVIESDFVNYKFFESKKNIVTYQGSGFLLKEVGLVTNYHVVKEYIEILEEENTSFEEEYYIPLSKSRYSQDIWFAKIIMYDKARDLAVLHINIVDHFEHGFNYNQSITEGMDSVIIGYPEYKESSSLHIDQGKILGERIHYYNDKRFTRYSTRMPIHGGNSGGPIVNMKNEVIAVAVKGKDNSVTEVIPVSDLLKSIEAKEMCLV

SEQ ID NO: 1429 - protein, 581 aa, unidentified
  source 1..581: note = Related to PDYK01000012.1; note = Sporosarcina sp.
MSFQGSPKLQDSDDNITKKYKSLNSFQDIAGLLEIPQELLWKTLMKNKENNYRTFTLKKKSGGDRIINAPTNNLSIIQKKLNYILSISYKKSHTNSHGFVLKKSIVTNASQHVAKKFVLNFDLDNFFGTITYARVRAMFMTYYKFNNSVASTLANICCNNDGVLPQGAATSPIISNIISRRIDEDLSRLAKKMNCTYSRYADDITISCDSNYFPSEIAYFEESITKIGSQVKSIISKNGFSINMKKNRLRSQYQNQSVTGITVNQKTNVDRQYIRKIRSILNCIEKNIDDISMAEKTFREKYSFRQSQIKKPKMFDVLRGMISYVGLVKGKDDQLFLKLAKRFNKVIKNQNLAFIRVPISKVELREENTFVIDSLYSIYSMDGEKSEACNGQGTGVLIRNMGLVTNAHVLYENIEVLEYGAEFEREYYIRIHKSKYGSQEYFAKIDYFDSFRDIAILTIKDFDTSKYGFEYNEEIEFNQIIELIGYPSYKDGQDLRVSSGVVMGERTHADRVRKQKRFEISAQIFGGNSGGPIVNSDNEVIAIAAKGSTEKGSVPNEVIPISDVINVFDNKTRKFYHLAHS

SEQ ID NO: 1430 - protein, 356 aa, unidentified
  source 1..356: note = Related to CP035485.1; note = Salicibibacter halophilus
MAKGRVTTALLLMLPRRCEFMEIEIRNTDEDVKRNFENLINFKDVAHLLEISAETLYKILFINKHLNYKEFTLNRGKVRTIYSPKKNLMIIQRKLAYILSLLYSHHTKSHGYIKEKSIISNANEHVQQRYVLNFDLKDFFDSISFGRIRAMFMTYFKFNDKVSTTLANICCHPNGFLPQGAPTSPIISNIISYRLDKNLDSISRRYNCKYTRYVDDITISTSRIYFPKAIGHGQKGSDQAVVSEKIKSIVHKNGFKVNDKKTRLNSKYENLSVTGITVNETLNVKRSYVRYIRVILHSIEKGIEEDNLDKAQKKFNEQYNFRQRKKGNLPDMYSVIRGRSPMLDKLKGRKIMSIIS

SEQ ID NO: 1431 - protein, 575 aa, unidentified
  source 1..575: note = Related to JAARUK010000009.1; note = Listeria booriae
MNEKVSEFKNINGFESIAEFLEIPKPELWLMLVKRKKFNYTQFKIPKKNGEFRIIHSPSEKLAESQKRLASVIGHLYASNHTTHGFVAGKSIKTNAQEHVRQSSLLNLDLADFFENISYGRVRAMFGEYFKFNYKDSSTLANLVCHPDGFLPQGAVTSPMISNIICYSLDKEINRLAKRNGCIYTRYADDLTISSKKIVFPRSIAHKNINEGVVLNRQLESIINKNGFSVNASKTRLNTKYECLSVTGVKVNDKLNVNRVFVRRVRSILNSIEKCEGDLISAQKIFDEKYHSRNQGSGNSPNMFEAVRGMIGHIGFIKGEEDLVFIKLADRYNSIINGTSRSGLIKVPLSIEKSRQTYTFVVESNDFIKYKYEEDDGYFICEGGSAFFLKGIGLVTNAHLFGELKDTLKYCENGLIDLVMDEEYYILTHRSRYNAKKMKFRLVAIDFMKDIAILQPENKDAYKYGFEYSCDLKKGDKVVVLGYPEYKANQELRSMVGEILGERSHELETKPAEYAARYEVSATIYSGNSGGPVVNEANEVIGIATKGTTERGQVPNEFVPIVEIVELHKAMITRE

SEQ ID NO: 1432 - protein, 446 aa, unidentified
  source 1..446: note = Related to NZ_CABGOR010000004.1; note = Enterococcus gallinarum
MHLQELKSFTDIASSLDVTAGHLRRLLFEEKNNLYFEFEIPKKNGSLRKIYAPNDSLLFIQKRLSAILSSSVKLHDKAYGFINKRSIVDNAQLHIRKNVLLNIDLENFFPSISFGRVRSMFMNYFRLDKNVATTLTNICCHPGGFLPQGSPTSPVISNILCKTLDKDLDRLAKNSFGATYSRYADDITFSTKTSWEEIISSKVTLFQKLNDILFDQTIVLDIASSYNPSIHKYEERLLKKKYYSALQSIGFISKHELDTDLSVLHGDIGEFLMHHLVSNYISDNNSVKYLYPKLVLKSNPKMPAYGNDGTIYVPSKKEIFYLEAKFYTNLTKAINKAVDSLKEHNEVTQENIDHKTELFRNIKTKSNDEIIEITDDVNEKLVLFLICDNIFKEEDVLKCLKKNNGLIELKKSFEVIIFVLPILSKSEFLESFKKQSILRGNQYYVQ

SEQ ID NO: 1433 - protein, 546 aa, unidentified
  source 1..546: note = Related to JAHUZB010000013.1; note = Enterococcus alishanensis
MKMRLQELKSFNDIASSLNVTTGHLRRLLFKEKNNLYFEFEIPKKNGTFRKIYAPNDSLLFIQKRLCKILNSSVKLHNKAYGFINERSIVDNAQLHLKKNVLLNIDLENFFPSISFGRVRSMFMNYFKLDKNVSTILANICCHPNGFLPQGSPTSPVISNILCKTLDKDLDRLAKNSFGATYSRYADDITFSTKKSFKENIVIEKNGEIILGSSLTDIIRRNGFKINPNKTRLQKAIQHQEVTGIIVNQKLNVDRRYIRKIRAMLYSIEENSNNLSIPLEKFAEAGYKGNDIENILRVIKGMINYVSMVKGKYDAVFEQLANRYNTILEELEIENLKPIFIPPKICLEESVCVIKETAITLFSDKENMITAYYGQGSGFLLKNHGIISNYHVFEYLIEDLSRGFSTIKNEFFVEVFFGKRTSKLVKAKIEKYNKDKDLVLLVPEDSSLLDFGFEKFEDVLEQNTEVYLLGYPDFADGDQMKFEKGHYLRTVNSKGIKKYEISQIIFGGNSGGPVLDRENRVIGVATEGKRISINRIIPIEYLHDLK

SEQ ID NO: 1434 - protein, 552 aa, unidentified
  source 1..552: note = Related to WVEQ01000007.1; note = Carnobacterium sp.
MRIQEFESFKDIADALGIKSGHLRKLLFEERNNLYSDFEIPKKDGSLRKIYSPSKKLLFIQRRLLLILENSIKVHPQAYGFVKGKGTVSNASLHLRKNYLLNIDLKDFFPNITSGRVRSMFLNYFKLNNTVASTLTNLCCHPKGFLPQGAPTSPIISNILCKTLDRNLDRLAKNSFGSSYSRYADDISFSSNRPFKENIVSEQNGNVILGSSLLDIISSNGFKINLDKVRLQKNHQHQEVTGIVVNDRLNLDRRYIRRVRAMLHSIEVNIDDLSIPTKKFEESNYKGNTFDNLLMVIKGMIDYIGMVRGKADNIYEKLAVKFNYILELLELDNIKPLFITEKIENNVCVIKFKKIFLFKTDFSEMVELDYGQGSGFLLKSYGIVTNYHVVEGLIESGFLNGFPKSTNEFYIETFFGKHSSKIVKAKINKYSKEKDLVLLIPEDLSLLDKGLDISTDALNLNEEIRLLGYPEFYEGDELKNELGNYLRTVVDNVEGNSIKKYELNTMIFAGNSGGPVINSDGKVIGVATEGRKIETNRAVPIDYIKTLQSLDI

SEQ ID NO: 1435 - protein, 542 aa, unidentified
  source 1..542: note = Related to NZ_CP047363.1; note = Macrococcus canis
MKIQNINSFTELSFVLGYKSGHLRRILFNINSSSYTSFEIPKKNGEVRKIYSPQSQLLILQKKVAAILENSFNPHYKSFGFIKGKSIEKNAKLHLKRKYLINIDLKNFFESITAGRVYSMFVNYFKLDRNIAAILTNICCHPEGFLPQGAPTSPIITNILCKTLDKELNNLSKKYSVTYSRYADDITFSSNKAFNSCFLTREESLSDDIKRIIEQNGFFINDNKFRYSKFNQRKEVTGIIVNEKLNVDRRYIRKIRAMLYSIENNLDNLEVPRTKFDKSHYKGDSIENLLNVIKGMISYTTMVKGNNNISTKLAMRFNDILECLEIDSVKPIKVKPLDINEEKVCVIKLENVFFYSKNGEPYDIDYGQGTGFILKNVGIVSNYHVFEFIIEEIEKEKKPLCEDKYFINLYFGINCTKKVKAKVLKYDIDKDLVILQPKDLNILEMGFELEEGTIENNSKVTLLGYPSYNEGDRIKEEQGKLLRKINDIKGFEKYEISSVIHAGNSGGPVLNNKGKVLGVATEGRGNDINKVVPITNVLSMLK

SEQ ID NO: 1436 - protein, 560 aa, unidentified
  source 1..560: note = Related to NZ_ATXL01000020.1; note = Bavariicoccus seileri
MRIQDISTFDQIAKALGISTGYLRRLLFEERDNFYTEIEIPKKNGDSRKIFVPSDELLQLQKKLNTILISSFNPSSRAFGFVQGRSTVQNASLHLKKKYILNIDLLDFFPSISSGRVRSMFINYFKLSSIVASTLTNLCCHPDGFLPQGAPTSPTISNILCKTLDKELINLARKLGKITYSRYADDITFSTNSTFSRKLVRRNNGEICLGNELIEIVEKNGFEINSSKTRLQNNNQHQEVTGIKVNRKLNIDRRFIRKIRAMLFSIESNLDDLSIPATKFAESDYKGDSIGRLMKVIKGMISYVGMVRGKNDALFIGLAKRFNKLLLVVDQFKDEKPIVIDSGLSQLPNLVCVVPQTNIQLWKKDNEMNIFSEIDYGQGTGFLIKGIGIVSNYHVFEFVIDSIKDGFLPRETEYFVNLRFGASQSKKISAKISFFSEELDLVILIPEDQIILNNGFERELREPEQNETITLLGYPDFSEGDQLKMERGDYLRTTFSKKVEMYEISPIIFAGNSGGPIINKSDKVIGIATEGRRIALNRAIPIKYVDEEKLTTLTYTLFKF

SEQ ID NO: 1437 - protein, 588 aa, unidentified
  source 1..588: note = Related to CP027781.1; note = Clostridium botulinum
MAGKVELPFCFGGFLLLLKELKSFSDIAEALSVSSGNLRNIIFEYKKNSYEKFDIPKKSGGIRTIYKPNSQLAAIQHELCDILYNSYKPHYNAHGFIKDKSILTNAENHVGKKYILNLDLENFFESVKFPRVRGMFINYFGLKENVATILANICCHPEGFLPQGAATSPVITNILLKTLDKELTRLAKESNWAKYSRYADDITFSSNKKFIKNIVEEIDGQIVLGKELVWLIQKNGFKVNEKKTRLQTKYDHQEVTGIVVNKKLNVDRRYIRRIRAMLHSIDMNKNDLKIPKDRFKKKYFPRNCNCSGDLFLTLKGMITHVGHVKGIYNLVYKNLAMKFNRLLLECRLPYPAPINILEKSDVYYDNVFVIDSSKDIFFIDNNGDMESYDYGQGTGFYLKGYGIITNYHVLEYVLDEINSGKKPISSSGNQYFIEFFSGRDPSTIMKAKYLYGSKEKDIVVLEPSDSSLIGQGFDIFKSKIIPQNMELNLLGYPDYNKNDDLKIESGKFLRKIVPDGNSRIEITQTIFGGNSGGPVLNSDNEVIGIAVRGDGKYPNTAIPIYEVENLHASHIESLPNSSVKDNNLSMQR

SEQ ID NO: 1438 - protein, 575 aa, unidentified
  source 1..575: note = Related to NZ_RHLQ01000054.1; note = Lysinibacillus halotolerans
MSLIFHISDIKNYQDLADYLEVTTGYLSKVINDPNRYQCFEIPKKDNSLRSIYSPTKDLLVIQLKIKKLIEQNFNPHYKAHGFINGKDFITNAYNHIGKNFVLNLDLNNFFESISIKRVNNMFQRYFKVRPNISTVLAHICCHPDGFLPQGAPTSPIISNVICKSLDKDLTELAKSLKLTYYSRYADDITFSCKKKDFPKILAEDINGNIVLSNHLTNLIEKHGFKVNLNKTRLQSKYMHQEVTGITVNKKINLNRRYIKRIRAILYSFKKYVDEPDIPIGKFCEFYNITNNNIEETKYRIFNILKGHIIHISHVKGYNDSNFLDFMRKFNELLELYSLSIPAIKVLDSSNNFFKRNTLVIYPLNSLDDPQYFVDRDFIKNGNFEIDSVCYGQGSGFYLKDIGIVTNYHVVSLIIEEVLEKKLTFCKEYYLEYFTESNGKQYKYHAKIIAYDKEKDIAILKPKYPDLVDSGFKYNKRFNINDSITLLGFPNHTTGSEFRSDKGKIIRKIKNKNISTYEIDAKIFAGNSGGPVLNYKNEVIGIATKGFTDRGIVPPEFIPIKYAIEVYKNHTDKKL

SEQ ID NO: 1439 - protein, 565 aa, unidentified
  source 1..565: note = Related to NZ_ATCL01000009.1; note = Exiguobacterium sp.
MNNPFSNLTVKLKKSDDELINAFGSLSTFEDVASILEVSSHALWIILVKNKPYNYREASIPKKDGGERKVYIPNNNLFILQQKLKYVLELIYSPHFTSHGFVNDRSIISNAERHVNKKFVINIDLKDFFPTIKYNRIVNMFVKVFRCSPNIANTLANIVTHHEGFLPQGSPISPLISNVIARTMDDQLFKLCKEIKEVQYTRYADDLTFSTNRKKIPNSIVKNSNNSYELSDKLINIIENNGFEINYKKFRVQSEYDHQSVTGIKVNKKLNINKSYIRMVRVYLYIFEKNEDINQAIKEFNLRRPKKSNLKHRLIKNEFQNQIFHLKVLKGMIEFIGSVRGRRDRIFNKFSKRFNTICETAGLNNIQINIPLLLEEVIDNKILVVGNNDQYFYTLDQGINTKEISLSKSLAVSNNERGIISTKANWTTFRDDFEGTHYYDFHTIPLYRKNTTDVLSYLKINRVAENDLIYFEGPEELTKNLQEINTEIESLKIGNVILVGLHNNTIEIFEGILTKRILFGESKFIFKPISNENLPISFGFVFNQVGNLVGTLSRGNSELYVNSIK

SEQ ID NO: 1440 - protein, 566 aa, unidentified
  source 1..566: note = Related to JACTIL010000004.1; note = Listeria seeligeri
MADKFTLLEEIDDVLNFKFRNLNNFKEIADMLEVSSEFLHSILYKKRSYETFFIQKKSGGYREIKTPNNNLKLIQKKLAYILSLNYKMHKSAFGFIKNKSIIDNANLHINKKWVFNFDLEDFFHQFNQGRVIGLLRKYYKFNNTVAGILAEICCYENTLPQGAPTSPILSNILAFELDREFQKECKKYHCTYSRYVDDISISTNKSHFPKNLAYKNSQEEIILGEIAQTILDKTSFKVNPKKVYLRHETQHQNVTGLVVNEGVNVSRTYIKRIRATLHNLRVSNEEDGKNKFFLELSKHSSSRSQQFDMYAILKGKIQFVGQVKGKENQVFRKLATSFNQLDLPASVKPISILSSTEKKRCQNTYIVEVGYEIGEELFYYTGTAFYMKGVGIVSAAHTFKNYYDCKEYADSHHLYLINENKLTEKINITKKYIDYELDIAIFDIDTQLNTDDWGFEYSNSIIEGQSCVLLGYPRHIDGNTLNTEFGKITQKINQKCPNRFNKKTGTLGVEQTRFKISSDIYSGNSGGPILNDDDRVIAIAVKGYGDNAVEVNTVVPISDIFTYMLP

SEQ ID NO: 1441 - protein, 565 aa, unidentified
  source 1..565: note = Related to CP030808.1; note = Listeria monocytogenes
MTEKFTLLKEIDDVLIFKFRNLNNFKEIADMLEISPEFLHSILYQKKSYETFFIQKKSGGSREIKSPNNNLKIIQKKLAYILSLNYKMHKSSFGFIKNKSIIDNAKQHTNKTWVFNFDLKDYFHQFNQGRVIGFFRKYYKFNNVVAGVLTEICCYENTLPQGAPTSPILSNILSFELDREFQKECKKSNCTYSRYVDDVSISTNKFYFPKKIAYKDAQEEITLGEISKKILDKTGFEVNQSKVCLRHKTQHQYVTGLVVNEGVNVSRKYIKRIRAALNNLRTNNETNGKEKFFIELSKHSRNSSQQFDMYSILKGQIHFVGQVKGKDNQVFRKLATSFNQLDLPVSIKPISILSSTEKKRCQNTYIVEVGYENDEGIQCFTGSAFYMKGVGIVSAAHTFRDYYRCIKEAVNPYLYLINENKPTEKIEITKKHIDYDLDIAIFDIDSSEDTANWGFEYSNSIFEGQSCVLLGYPKHTDGNNLNTEVGRITQKLKQKHPNKFNKKMSDLGVEQTRYKISSDIYAGNSGGPVLNNDERVIAIAVKGFGDNGTEVNTVVPVSDIFSYMI

SEQ ID NO: 1442 - protein, 578 aa, unidentified
  source 1..578: note = Related to JAARWF010000001.1; note = Listeria booriae
MDNKSILLNAIDDVLIFKFRNLNNFKEIADMLEISPQFLHSILYKRKSYNVFQIQKKNGGTREIKSPDNNLKIVQKKLAYIISLNYKMHRSSFGFIKKKSIVDNAKPHTNKKWVFNFDLKDFFNQFNQGRVIGLFKKYYKFNDSVAGVLAEICCHENVLPQGAPTSPILSNILSFELDREFQHKCKKYNCIYSRYVDDITISTNKAYFPKKIARRDAEGEIVLGSVSQEIVDKADFQVNQSKVYLRHSSQNQHVTGLTVNEGVNVSRKYIKKIRATIHNLKVNNEKVAEEKFFKEYLKGPIPKKTDLNMYSILKGRIQFVGQVKGKENSLFRKLAKEFNDLKLPKQVNPISILTALEKNRRRYCFIVEVGHILGEDIYHYTGSAFYLKGIGLVSAAHTFKEYYENKEYADKHYMYVVNENKPDEKIPIVKKHIDYALDIAIFEMPTKLRDNNEGFLYSTTVNVGQKCVLLGYPKHFVGNTLNTEFGQINQELKVRLPDKYNSVTGELGVIQKRYKISAVIYAGNSGGPIIDEREKVIGIAVKGHGENGVEVNTVVPISDIFTYIQDYSLEHRTSLSSK

SEQ ID NO: 1443 - protein, 564 aa, unidentified
  source 1..564: note = Related to NZ_FYBO01000001.1; note = Listeria sp.
MQQIQLKEIDEVLVLKFRNLNNFKEVADLLEISPQFLRDILYEKRKYSHFYISKKNGGEREIFSPVNNLKIIQKKLAYIFTLDYTPFKSSFGFVKKKSIIDNAALHTNKKWVFNFDLKDFFHQFNQGRVIGLFRRYFNFNNVVAGVLAEICCHQNILPQGAPTSPILSNMLCFEVDRELQKLCSSKQCTYSRYVDDITISSSKDYFPRLFAFKDGEGRMRLGRLLEEILRKTGFDVNQEKIYLRTPNQNQNVTGLTVNEIVNVNRNYVKRIRASIHNLKVNTEEAAREKFFIEYTKRKAHINPNANVYSILKGQIQFVAQVKGRENPVFKKLASQFNSLNLPSNINPISPLTRVEKFRRRNCFIVEISFEREGEFFCNTGSAFYLKKIGLVSAAHIFKDYFEHYDSAVKREIYIVNEVDRKHKIKINKKYIDYDLDIAIFNLDTTIDTMNWGFNRSDTIYENQKCILLGYPEDCNGNTLNTEFGKITQVISNSFPNKFNSIEQELGLTQIRYKISATIYGGNSGGPILDIHENVIGIAAKGTSDNGITINTFVPISDIKFLMNS

SEQ ID NO: 1444 - protein, 561 aa, unidentified
  source 1..561: note = Related to ABHH01000013.1; note = Carnobacterium sp.
MTKRIDQLKTEDSNLISNFRKLNSFYDIASLLEVTPKFLYYILNVEKSYTPFKIPKKNGDMRTIMAPSKNLKIIQKKLSYILTKSSSLNKSAHGFVQGKSIITNAAMHVNKKWVLNFDLKNYFDQFNQGKLIGFFKSYYKFNDEVIGILVSICCHNNILPQGAPTSPILTNILTYNFDKQMSQLCRKNNYIYTRYVDDITISTDKYEFQKRFVYYNENNDVQIGNAINKILEKTNFEINTKKTRLRINYQNQTVTGITVNRKLNVSRKYIRKTRAILHNLKVNNDNVAQKKFDEYYPVRHYRDYKASDKYNVVKGMIEHVAQVKGRDDRIFKKLALSFNDLNLPEHVYELNLYSPFEKNLRKNCFVVEIEYSLYGDFYPATASAFLLKGVGVITSAHTFKQYLEYKDEVEDIKIWAFRENETTLKRPLDIKNFDFTLDFAICHVAGINHTEYGFEFSKHISLGEDITLLGFPQYQHKNLLNKEHGVITQEINEYFQEKLNPKTQSPGYNQKRYGISSQIFEGNSGGPVLNSDYKVIGIATKGITSDAVKVNTIVPISDIFQ

SEQ ID NO: 1445 - protein, 581 aa, unidentified
  source 1..581: note = Related to NZ_RHHV01000019.1; note = Brevibacillus parabrevis
MSYFRAKPTLQASDAKLVSSLKSLQNFDDVASLLEVTPKHLRYILFEKKVSGYYKCFDIPKKSGGSRKIWAPQGSLKILQEKLNKIFSLTYKPNITSHGFVKDRGIVSNATVHLRKRHVLNFDIEDFFHRINFGRVRGVLKSFFGMSWDAATVIANICCYNNVLPQGAPTSPIISNMICFNMDMEMRKLAKKHNCHYTRYADDLTFSTTRQTFPSAIAHLDEERVVYLGSKIQKILDNNDFAVKKSKTRLNNRDQNLSVTGITVNKITNVERNYIKKVRAILKCLESHPLSEAQKIFESKYYSKPGKKNAEIMNVVKGMISHIGYVKGKQDPIYEKLARRYNRLAGIETLKVGEAFLKDWSQNVFVIEVGYDNSGVFDPQQQGTGFFLKDVGFVTNHHVVKEYIDDPDIYEIRVHRSRYNKKCFQAKVKMYCKERDIAILEIDGFNITGFDYDLINYDGQSIKVIGYPRYGHEDSLFVDQGTIVQYRSEFMRTIYNKKTQELGLYQERIICSARIIYGNSGGPVINTRGQVIGIATKGFSNVSKKEEDDDSSAASYLVKIGDVFDMIGEKEESVPSPVSAI

SEQ ID NO: 1446 - protein, 578 aa, unidentified
  source 1..578: note = Related to NZ_VDZO01000006.1; note = Paenibacillus xylanexedens
MSHFMAKSQLKASNEKLLESFRTLQSFDDVADILEVSPKHLHYILFKKPKSQYYRSFAIPKKNGGYREITAPTRSLKILQEKLNRIFSLVYKPNITAHGFIKGRGIVTNATVHVRKKHVLNLDLEDFFSTINFGRVRGILKSFFKIGDDAATVIANICCYNNVLPQGAPTSPILSNMICFKLDKEMRNIAKLYNCDYTRYADDITFSTNHQTFPKEIALFREENIVHLGIKVENIIESNGFKTNNSKTRLNNRNQKLAVTGLTVNKIVNVNRGYVRKTRSILRCIEKYSLEKAQEIYVEKFAKNHKGVKIINVVQGMITHIGHIKGKQDQVYEKLARRYNRIRGEEVLKIGDTFLSQNICVIEVGYYDDEQNFMPEVQGTGFFLRGVGLITNRHVIKEHLELPEIYSIKIHRSKYDYTYYNAVVRMSDEERDIAILDVIGIAPEGFEYDNDNYTGQNIKLIGYPDYGHKDSLYMDQGVITQYRKQWMPNVYNLDTEELGVFQERIVCSVRIVIGNSGGPVVNLNGQVIGIATKGFKKIDKSEKDDTSTEASHLVKIEDVFELLAEQEQKLLTNTLENV

SEQ ID NO: 1447 - protein, 579 aa, unidentified
  source 1..579: note = Related to NZ_BOSB01000004.1; note = Paenibacillus lautus
MNYFNAKPELMANDQSLISSFKSLQSFRDVCNLLEVTPTHLRYILFEKTPSQYYTFFTISKKSGGIREIIAPNGALKILQEKLNKIFKLAYKPNASIHGFTIDRSIVTNARMHLGKNHLLNFDLADFFPSINFGRVRGVLISFFGMGSEAATVIANICCYKNSLPQGAPTSPILSNMVCFNLDKQLQLVARKNGCTYTRYADDITFSTTKHLFPKSIAFVENEIVYIGPKILKILEDNSFKVNHLKTRLNNRLQHLGVTGITVNKILNVKRDYIKKIRAILRCLEINSLEQAQFIFETKYTKIRNKAPNSEYPSILNVVKGMIDYVGAVKGTQDPIYEKLAFRYNQICKLPVFKIGEENTESWNKKVWVVELCIEAEDDGKIEYIPVIQGTGFFLNDIGFVTNAHVVRDYREYDIIRISRSRYGSEVKKASVIKLDRDRDIAILKIDDFEDWSGFNHSFVHYIGMDVKVIGYPNFGGNDSLYVHKGEILQYRVEHFPDKYNKATDSLGMNQHRTVISARIIAGNSGGPVVNMQGEVVGVATKGFKEISPGKHDDDTATSIMIKIEDVISFANEMEPTKA

SEQ ID NO: 1448 - protein, 575 aa, Bacillus sp.
  source 1..575: note = Related to LYUE01000007.1; note = Bacillus siamensis
MSYFDAKIELQATDEELIHSFKDLENYRDVCSLLEVTPKHLHYILYKKKNLYYQFDIPKKNGGTREIYAPCDSLKILQQKLNYIMSLIYKPKYTIHGFVKSRGIVSNAKQHLGKSYILNFDLYDFFPSINFGRVRGILRSYFGLGDHAATIIANICCFNNSLPQGAPTSPILSNIVCFNLDKELQFIAKQHSCIYTRYADDITFSTTKKDFPKSVAFKTDSQIFLGKKILKVIEKNSFKVNENKTRLHNRYQNLSVTGITVNEKLNVPRNYIKRIRAMLRCIETNTPEDAQVIFLEKYKFRYRANMEPPNIMNVLHGMINYVGFVRGLDDEIFKKLALRYNLIVGNDKIKVKKDNLALWESYVWVVEVGYKDDDDFYAEEQGTGFFLKNVGFVTNAHVIEKYDGESINAIYLNRSRYSEEQKLASIITIDKDRDIAILYVEGFDIDYGFSYNIHHNLGQEIILLGYPNHGDGNSLYINKGQLVQYRSHYMPNTLNKETGKLGVKQERVTISSRIVTGNSGGPVINLQNEVIGIATKGFKDISPNLKDDSTAESMIVKIKDVLSVLSQMSKLHREN

SEQ ID NO: 1449 - protein, 580 aa, unidentified
  source 1..580: note = Related to NZ_VDST01000009.1; note = Priestia megaterium
MSYFDANIELQAKDEDLIVAFKKLKDFRDVCDILEVTPTHLHYILYKKGPSKLYHPFNIPKKGGGTRQILAPNDSLRILQQKLNYIMSLIYKPKFAIHGYVKGRSIVSNAKQHLNKNYILNFDIEDFFPSINFGRVRGVLKSFFGIGKDAATIIANICCYNNLLPQGAPTSPILSNMICFQLDKEMQLIAKQHSCVYTRYADDLTFSTTKKSFPKAIAYHGDDCVHLGKRILATIESNGFKINNNKTRLHSKYQHLGVTGVTVNEKLNVKRDYIKKIRAILRCLEINSLDEAQKIFEDKYIRRHTKEVNFPNIMNVVRGMINYVRLVKGPEDSIFEKLARRYNKIAGVEVFTVGIQHSRFWTSYVCVVEVGCKDEDEFYADDQGTGFFLQGIGFVTNAHVVKKFNGIEFNAIYINKSRYDQTKIAASILTMDEERDLAILKIDGFESNIGFSYSTNYYGGQPITLLGYPNHGGTDSLYTENGEIKQYRPHYMPNKYDEKTGKLGVHQERIVISPRIVTGNSGGPVVNSQNQVIGVATKGFNEISPGSKDEPTADSIIVKIEDVLALHTEMRSDETPIANQ

SEQ ID NO: 1450 - protein, 581 aa, unidentified
  source 1..581: note = Related to NZ_AUCI01000050.1; note = Salibacterium aidingense
MNTNFKANLQIKSSVEDIQKKFKNLSSFDDVSDLLEISPKHLRYILFEMKDRYKSFEIPKKNGETRSIVAPSKSIKILQRKLNYILSLNYSNRPTSHGFIKGKSIVTNAQPHVKQSVVLNFDLKDFFSTINFGRVRGVFIKFFDIGDDAATVLANICCKDNVLPQGAPTSPIISNIVCYKLDKELLKFAKKHSCVYTRYADDITLSTNKKHFPNEMIQLNKQTYTLSKSLFNKIENNGFKINDNKTRIRYCSQRMEVTGLTVNEKPNVTRHYIRNIRAIIRSIEKYGLEVAQEIHEGKYIKIHLKSTPQITNLLIGKLNYVKMVRGIEDSVFNKLAKRFNKAMGDELVETYKSKRELRELHTYVVDCGFIVDGEFINESQGSGFFLKGVGFVTNAHVVKLYKENNSNELPYEIRIHRSRYSDTVLKAILTIYNRDLDIAILNVEGFNSDYGYSYNLDNEYGQEIRVMGYPNHNKRDSLATDSGEIKQYRDNYLKETVNQETGELGDFQERFVVSARIVDGNSGGPVINNDDEVIGIATKGFRTLTDSGYDEDTDTSIAVKIEDVIKLIESKDQKDLNYQHY

SEQ ID NO: 1451 - protein, 487 aa, unidentified
  source 1..487: note = Related to JACPFP010000003.1; note = Candidatus Dojkabacteria bacterium
MDESQITNICTFDELANALEIEPSKLRYILWGKKPPSYYSRFTIPKANGTKRQISAPQGPIKVLQYRLLRILNAYYSPKRVVHGFTKGRSIVSNANSHINKNWVVNIDIKDFFPSINFGRVRGLFLKSFPGMTKESATAIAQLTSVFNSLPQGAPTSPIISNMICSRLDRDLMDFARQDNIKYSRYADDITLSGDGAVRSSIGEYSNGLLVLSSKCIKIFNDNGFQINSDKVRVSFKYRRQEVTGLVVNSKINVSRKYIRNLRALLHNIETLGLSEAQELYTEKYHGRGSLQSYIHGKLLFLRMVRGSSDNLYDRLVNSFNLNIADRPGNDSNTHLPTRAEIKAILSRLDPSYGNRYHRIWRELYDETDSTGENLKTALYLMREVIGGLIRRFAKNESVENYLNLSPNLRITRLQRCKYLSEKSLATGEERLAKLFMYIPGYYNDLNKLHSLEIVDKVDVKVLVDKVNELIIEVVKSIEMLELFRLS

SEQ ID NO: 1452 - protein, 552 aa, unidentified
  source 1..552: note = Related to JABBOU010000010.1; note = Acidithiobacillus sp.
MSFVRNRVNSNRNRSETIKEFCDNIGVSKEGFLLYNKENEKEYKVFDLIKKNGSLRKVKAPSAGLAGLQRKISKILQTIYNQPNCVHGYVPDRSVVSNAQCHVNKRYILSIDINDFFGSITRNRILGLFRSIFSDQNLCEALTNICVVDGCLPTGSPASPVLSNMIMFKMDRKIMSICKNNHVFYTRYSDDLTFSTKTKSFPSEFVYLDACGSLTLGKSIVAIFKENGFSINLKKTKLRSRSNRQVVTGVVVNKITNIPSSYMSNLRAIKNSISKHGVDGAQKIFDENYKETRYKNRVNIGHHISIKDMVRGKIEYIGMVRGKQDALYRKNLDWYNKNFRSLGDPEECVYPIYFIIDMPEKSKQKDHRIKNDCGQGTCFFLEDVGILTADHFLPSVEDVEAAGDHLRLYFETKDGCKHNVKIENRYPKIDMAVLSLEDNLFRSKKLYVNTDFSHSDRLTVSLYGFPDCAVGESLQVRDSVITGTRNRADEKEIIIRDGIKAGMSGGPVTDQANRVVGVIHKGGIDESGKCYYKPINDLYHIIKPMHSSNRSR

SEQ ID NO: 1453 - protein, 568 aa, unidentified
  source 1..568: note = Related to LCCS01000006.1; note = Parcubacteria group bacterium GW2011_GWD2_42_14
MVLNKNFPVDIPEDIRDCRNITDLAKLLNINLKALFFFAYKKERLYLSFNIKKKNGGARNISAPIEALKNTTKKINSYLSVVYEEYKPKSVHGFVYDRDVVTNAGNHLDRKYILNIDLLNFFETITAQRIYGLFKRYPFIFGNKFASILTGIVTYNNCLPQGSPCSPVLSNMVCLKMDKQLINLANENGWRYTRYADDITFSANKISSNLANFASDGINVGEKIVNIINKNGFAINEKKTRLSSHNQSKWVTGIKVNKKCNVSRKYVRNVRAMLHVWEAYDEKLAEKTYNAKYNFGKNKKFRSVVNGKIEHIGHVKTKKDLIYIKLHNRYCELVGESHKRLPETKKDEYLNKVLMIQGQSGYGSGFFITQHLILTCAHVVKGSKKVKFTTRLNKLPVEFKEASVIDINIEKDYAILFSEKKFNEFVFKCNLNKGLNMYSHNDAYISVGYAGFRTDGNFWVEPSIADQKIVQTNQRKNVNSFDVSGAMWKGMSGGPIILEHTDYVEGYIVNGASSLDTSEDVKSHSFYPISNIPKKYYEPKFLTLLIDEMYGSRFTETKEVGMPDQFFT

SEQ ID NO: 1454 - protein, 527 aa, unidentified
  source 1..527: note = Related to NZ_CP037755.1; note = Proposed Pseudocnuella soli
MNLPEAAYHFFEMSLFAKDDKSLLEAFYSAKNYIDLADVFEITPKQFKFHVFMVPGDKKYVQFTLQKKSGGVRNIYAPNGNLKFIQNKLSYILYKIYKPTFSAKGFVLNESIVSNARLHSGKKAILNIDIKDFFESINFGRVYGLFKSKPFSFNTEIAAELANICCFDNKLPQGAPTSPIVTNMICVGLDKNLQSLAKKYNLIYSRYADDITFSTDFKFLPQAIALGKLNVVEVGETVKSILIKHGFKINDKKSRIYYHFNRQVVTGLIVNKQVNVSRNYIRNLRGIIHSIEKFGLPAAEIEFQRKYDKQRLPGKSVPPFTFYLKGKLSFLAQVKGTESSVYISIVKKLRSLIPGEFEKTLTKLEELRKDFDDLNKLVYKGASITARQRGFEFEKFLAELFSFFKIDVTESFKRVGDEQIDAAINFDSWHYLIECKWKSTQCDTRDVDSLTMKLSRSGSQTGGLFISINGWSANVVENLSRNPIKNTILINGDDIKDILVEKVALDQLLKFKLQRLNLYSEPYARWE

SEQ ID NO: 1455 - protein, 466 aa, unidentified
  source 1..466: note = Related to JAIOIR010000177.1; note = Melioribacteraceae bacterium
MLSITNNTMEVVTDTFNKKYSKYFRNIDESTISEEQFSNRLKSSWKSSSWVNDNESFFANYLVNDDFLLQIIKNSTLPDFQKHLALEEFKRRWQQYEIAKEKFLQIVSGRDLAVFFELKYQSFLSTIGLLKFNNQKKYSEFTIPKKSGGARIINSPNQQLLHLQRKLNFILNLFYDPPKAAHGFINKIINKEKVSSRGIVSNAKSHSGRKLILNFDLEDFFPSITGNRIFSFFRASPFNFNKEVAGLLTEICCDPNIKGLPQGAATSPILSNMIARRLDIKLIHLASKHKLIYTRYADDITFSSNKLDVPSDFLDEFYSVITSEKFKINREKTRQHRYSQKQIVTGLIVNKKANVSRKYIRNVRAILHNIENYGYDKCEEVLNEKYAKSKKGMISLENYLRGRIEFIGNVRGKNKEQDKNDIYNKLKNRFENLVVGPSFEPSPIIENETSNRNSKTLSERMKEIDK

SEQ ID NO: 1456 - protein, 577 aa, unidentified
  source 1..577: note = Related to NVXJ01000024.1; note = Arcobacter sp.
MKIIRFLLNILEEFYLLHTRNFEYALWNIREYGYRTKKITKKNGTARELNIPPSFVKTMQKKINELLQEQYIAPKPVHGFIKADENNKKSIISNANMHTKKYIVINLDIKDFFDSINFGRVRGLFLSKPFEINEKIATRLAQLVINDNKLPQGAPTSPILSNFICKQMDHNLIKVAKKFSLTYSRYADDITFSSHKKNLNLKYIIKEITEVVKNNGFTVNTKKTRFQMAHHTQIVTGLKVNQKVNINTKYKKQIRSMLYSWFTDGLTKATQLHFKEYNKQKRKYLPEKEKSFKNIVIGKINFLGLVCGTDNPLYQKYRHTYFLLSDKFILTRKLDEYEELDINDIKRRKALSIFIQIYNSILIFTEGETDILYIKSALQSFQKKGMYLDLNLRFCNLRGWVNVKNIHEIFYKNTNKSNDLTLINRRKCVSPFIPKSFKLCFILDADDDGIRKYFKHQKHKNYHLIDEANQGYIEKFIDKNIIIDIIKNSGYSIDPTKAGTTKQKLIDHLKDNKEKDEIFSIDNYIVYKLLLIKKTELANIISKKDIDFSNFKEMFDFLKKLEPDNDYADELCCNSLY

SEQ ID NO: 1457 - protein, 568 aa, unidentified
  source 1..568: note = Related to SDAZ01000111.1; note = Sulfurovum sp.
MNELEDFYTHNKKVIEYALLIIRKENYTKKYISKKNGSLRELNIPPPFVMQIQKKFNSLLQKLYSPPAPIHGFIEKKDDIVKSIVTNANQHIQKHIVINVDIKNFFATINFGRVRGLFLAEPFKTTEQIATRLTQLVITENQLPQGSPTSPTISNLISLKMDNQLTRLAKRHKMVFTRYADDITFSSYRKNINVQEVIEEIEKIVKINGFSLNPQKTRVQYPHQSQTVTGLKVNQKINLDRKYVRQIRSKLFSWYSAGLDKATELHFEKFNKQSVKYASADKTSSYKKIVLGKIHFLGQVLGQDNSHFIRFLHTYYLLESNFVLDREKVEEIYEKFDLNNPNPNDVIKTFSQIYDSMLIITEGITDVIYIKQALKYFQSKGKFIDLKLRYCTMGGYVDVIKLHKILHDKDLCKSFCDVEKRNFILPLINKNLKTYFVLDADEKQILDYFNNKNQLMKNYFLLDEVNRGYIEKMIDKEIIIDFIMSKGYDIDPTREELGDKSKNGLKEYLKSSKFTDEEIHAPKNTSYIAHKKKIIEKTRLAKHIKNKEDVDYGNFESLFLKLDEIKNH

SEQ ID NO: 1458 - protein, 574 aa, unidentified
  source 1..574: note = Related to NZ_CP041166.1; note = Sulfurimonas xiamenensis
MHKIEEFYHSHKKIFEYALYQIRTKGYSEKIITKKNGGQRKLNIPPTFAKVVQKKLNTLLQDIYIPPKPVHGFIKSYKFDTKNIVSNALKHTKKSIVINVDIENFFNTVNFGRVRGLFISKPFEIDKDIATRLAQLTVFNNELPQGAPTSPIITNLICKKMDFQLLKVAKENSLVFSRYADDITFSTNKQNINIENIISDIEQVIVDNGFKINTSKTRVQLQNQTQTVTGLKVNQKVNLDRKYIRQIRSMLFSWYTDGLKEAAEKHFEKFNKQPDKYLTDLESSFKNILIGKINFLGQVKGRDNFLYIKYRHTFYLLDSNFSLSKKLNEFEKLDLNHLNQRCVTTIFTQIYSSILVFTEGITDIMYMKKALKYFQEKGKYEGLHLRYCNLESWSNVSNIHKVFYENQKDLSIINMRKCILPYVKDDLKFCFILDADDRNIKQYFERYKHTNYFLIDDDRSGYIEKLFEQGIVIDKIKKLGYTIDTTKEGLQKSTIKALKEYVSSELVTEEAIHSIPSTSYIAYKDKIIKKTDLANFITKDDSVTYDDFESIFVYLDSMKHNKDYVKPLCCNSLY

SEQ ID NO: 1459 - protein, 579 aa, unidentified
  source 1..579: note = Related to FAXN01000046.1; note = Sulfurovum sp.
MKILEQFYNDYEKLFELALYDNRKKKYKRKNISKKSGGKRRLLIPPETTDKLQKKLNRILQTIYNAPNSVHAFIKSKENEEKKSIVSNAKQHVKKQIVINIDIKDFFDTINFGRVRGIFLAKPISLDETLATKFAQLISYDNKLPQGASTSPIISNIICKKMDHNLIQFSKKHSLTYSRYADDITFSTHKNSLDTDFILNEIEKIIVDNGFEINTLKTRIQLANQSQVVTGLKVNQKVNVPRKYIRQVRSMLYSWKTEGIEEASKKHFKSFNNQTKKYIDSKEESFKNIVLGKINFIGQVKGTDDLNYIRFYHTYYLLDSSFSLKEKLDYFEHFDFYNMQQDRAKLLLTQIYDSLLVFTEGVTDIIYIKEALKFFKNKKMFTSLNLRYSYFGGYADVIKMHRILYDEHIVRMSKLNELDIANIRKCILPNIDKSLKFCFVLDADEIAIEKHFEKHDYKNHFLLDLKNKGYIEKLLDKELIKKIIKKYGFKIDVNRKEFSEKTKTELNKYMKIKNKYSNISAVSNYIAYGVKIIEKTNLAKFISNKDDVDYSKFEDLFCVLEKINHNFRSPKQLCCQSLY

SEQ ID NO: 1460 - protein, 578 aa, unidentified
  source 1..578: note = Related to NWVX01000040.1; note = Malaciobacter marinus
MNELENFYLTNKKNVEYALFLIRSEGYRNKTISKKNGNTRILSIPPDFTKIIQSKFNEILQELYIAPKPVHGFVKTNNDISKGIITNASMHIRKSYVINVDIENFFDTINFGRVRGVFLSEPFNTNEKIATKLAQLVSFENKLPQGAPSSPTISNIICKKMDHELIKIAKEYSLTYSRYADDITFSTHKKKINKIRILRAISKVIKNNGFTINENKTRVQKYIHTQIVTGLKVNQKVNIKREYIRQIRSMLFSWYKDGLASSADKHFDRFNKQESKYIDNREESFKSILIGKINFLGQVKGKENRLFIKFRHIYYLLRDEFKLLEKTNTKFSFEHIDVNNLTSNEVLKIFTQVYDSRLILTEGVTDVTYIKSALKYFQSKGEFQSLKLRYCWVGSISILVTFFKILYAHKMKELDIINKRKCVLPLVDKNIKISFVMDSNDDKINTFVKAKNFNNYYLLDLSNKGYIEKLLDKNKVIEFIESNGYIIDTTRPELKPDSKRGLEEYLLSSQKSDGEIHSVQKTSYIAYENKIIEKTKLSKLFEESEDIEYEKFRELFTHLEKIESISIQNEKLCTGSIY

SEQ ID NO: 1461 - protein, 574 aa, unidentified
  source 1..574: note = Related to PDKI01000002.1; note = Arcobacter sp.
MNELENFYITNKKNVEFALLKVRDEKYVIKNISKKNGKTRILHIPPSYTKIIQKKFSQILQKQYIPLKPIHGFVKIENNTSRNIITNASNHINKRYVINIDIENFFDTINFGRVRGLFMSNPFNINESIATKLAQLVTYENKLPQGSPTSPIISNLICRKLDHQLIKIAKDYSLTYTRYADDITFSTYNKKINYIRIIRDIDKIIKNNGFIINKSKTRIQKFNQTQIVTGLKVNQKINVSRKYIKQIRSMLFSWYKNGLENASNLHFDKFNKQESKYILDRNESFKNILIGKINFLGQVKGKEDRLFIKFTHTYYLLRDEYFLKEKQNKFEILDINNLKYCEIIKIFTQIYDTKLVLTEGITDIIYIKQALKYFKNNNKFKNLKLRFCQVGSISNLIEIYKVLFENPKDLTVINRKKCLLPYIDKKLNMCFVMDSDDKQIELLKKTLHFHNYYLLAEDIGGYIEKLFNKNLIIEIINKNGYVIDTSNPKLQDSSKKGLEEYLRSTKKSDNEFHAVPKTSYIAYENKILKKTELSKFIIDSENVNYDRFENLFNYLENIKIIDFKYDKLCSNSIF

SEQ ID NO: 1462 - protein, 602 aa, unidentified
  source 1..602: note = Related to MICH01000013.1; note = Sulfurimonas sp.
MFFKNFLRNTTKHVLNLFKKKKNYENILIDEFHNRESKIFYKNNKKIIELSLSNIRNNKAYFHKEISKKNGGKRRLSIPDSYTKVVQKKINILLTKFYHAPKSVYAFVKSSDNKKNIVTNAYMHINKKIVINVDIENFFNSINFGRVRGLLMSYPYNIDKDLATKIAQLTIFNNQLPQGAPSSPVISNMICYKLDKQLMHLAKEYRCMYTRYADDITFSTNDKYLNQKAFFKELNKKINENGFSLNSSKTRVQKYCHSQIVTGLKVNEKVNLSKKYIRQIRSMLHSLHKDGLAEASVKHFKLYNIDEKYSKDKEKSFKRILRGKIDFMGMVLGKEDYKYKKSIYLFYLATNNYLPLNYYQKLEKMNSEDEDFLKLSLQEMYSSIVVFTEGETDITYLKAALNFFHSKDKFLELKIRFVSLGGFPEVIKYHKAIFLTKNDNVTLELREKLSPYLNKSVNYYFLLDADDPDIKNYFNKTYVPNSFYLIMEKTDGYIEKCFQKELIKDIINKHGYKIEPEKSTKQKVTNQLLNHLRNNSKKDDFFSIDSYIVYAEKQIFKTILAKYICDNKEVDYSVFKDFFDFIIKNKTNNLIPTKLSIDDEYK

SEQ ID NO: 1463 - protein, 523 aa, Leptospira sp.
  source 1..523: note = Related to NZ_AP025028.1; note = Leptospira kobayashii
MAKVRTLIWAFLYHMLTLDEFEEKIGISIGKLNYIGYILKEEDKYLNFEISKRNGNSRQINSPNSILKHIQNRIKLILEENFHPYSVVHGFVNDKSILSNAKKHLNAKWILNLDIENFFGTINFGRVLGLFLSKPYKFDKKIATLIAQLVTYQNVLPQGSPASPIISNLICNKMDRDFISFCKSKHLIYTRYADDITISSQKRKYMNFDSTLDEDLLEDIKKLVNENGFKINSDKVSFSYGKDGGIVTGLRVNEKINIPRKTIRSLRGLYHSIRSNGYQVANEIYNRKYKNLNRLPKENKELINHINGHLNFIFMIKGQFDDVYSNYYNKFKTQLKLNIKSPIPKSVWDYIFIMESESTQKQGTAFKLNKFGIISCEHVYDNYSKIFLKNNFSKKFDLELIKKDERIDLIKSRALDLFIEDGLEINLDFHYKIGSKLRLLGFPNYRIGDSGMDKLITIVSKRTVSGVERILVDSGIVAGNSGGPILDLNGAVVGIAVTGAEDHDKLDVTENHSFIPIKYLLQF

SEQ ID NO: 1464 - protein, 618 aa, unidentified
  source 1..618: note = Related to LKGI01000141.1; note = Lacticaseibacillus paracasei
MDNPFSELDTNEISASFRHISNVSELASFLGVTRQKLFYYCAEHLNKKHYELFDIPKKNGGTRTIEEPTKGLKLIQKKIAFAVSINYHPAACVSAFTEGRSIRYGAERHKGARKVVCFDLENFFPSCPQYKVFGVFYKFFKLPKEVSDCLARLCCYKKHLAQGGPSSPILSNVMLNSMDKKFLSLAKKTKTVYTRYADDMSFSSKGDMPSLIWQNNNISSYITSIVQESGFHIKQEKTRILGRSCRMQVTGVVINKFPNVPRTYYRRVRAMLHNFKTTKDYEETKKNFLKYYGKSDDCNPAKVIQGMISYIFQVRNDGGTHSTLARNMMQEFNTIQWPGNEKFKVEMAMPHSYKLHKAVFAVETKIGEDFFYGTAFLCNNKIISCSHIFKKGHEKKLSDEIEYVHLIEHNVEDNSIYKKYNVTRIEYWPDFDVAYLHTDSCINKAKQKQFSTPNFLHQGGNKVFVVGFPASLQTGSSSRMYEEKETIQEDHRVELQYNEFAVGQKQTIIDKRRMTFISNQNGGINPGNSGGPILDISEKKVIGIALKGDNVKDSKSLSNNRSEFFDLYEWLNMDKPKAFTWEKIVGKLKFEFKHLYLFVYIHNSKNCDLLGRLHNKLF

SEQ ID NO: 1465 - protein, 406 aa, unidentified
  source 1..406: note = Related to NZ_CP065154.1; note = Lacticaseibacillus paracasei
MLSNIILYAFDKQMLELARRTKTVYTRYVDDITFSSQNTMPRLLWQGENWSTTVKKIVEEAGFQLSEEKTRKFGKGNRLSVTGVVVNEKMNVRRMYVRKIRAMLHNFKITEDYDSTVKKFNGFYLKDKIVDPERVLKGMISYVYQIRSDPEQDQVLSRRLMQDYNSINWPGGSRFELKLAIPQKFKRYNAIFAVEVVTLFKDFFFGTAFLCDGKIYSCCHIFENRNEPDDQPKSIKLIEFDPETLEVHKTYKVDKVDLWSEDDISMLYSSALNKTKRKSFNSPAHPLKGPAKVDILGYPEAFQIGEKSRMYTAEETTIITIGDNISQSHKSENSRSVVLLTNDNGGIQSGNSGGPVVSIGNGTVVGIAIRGAQPKDGNYEVVRSEMVDFYNWLHSNKRTPETLRLR

SEQ ID NO: 1466 - protein, 580 aa, unidentified
  source 1..580: note = Related to BJWE01000002.1; note = Pediococcus parvulus
MKDLFWTKNNTDIKRQFPDLKSARELASFLSIKYSQLTYYVSKGKKYKSFQVKKKNGEIRILEAPIVGLLLIQKKLAYTLGLIYTPSPSAMGFVKGRGIRKNAQVHVNSREVLNLDVENFFPSIRSNLVFGVFHKFFRFNIKLSDTLTKLVCLDGALPQGAPTSPILSNIIMNSIDRKFTALARSNHCLYTRYVDDITFSSRNTIPRTLFRNKDVSDLIKQILKEKGLKVNENKVRLRKRFQRQDVTGVLINKKINVQKNYLRLTRAILHSFELNEYKDAKKVFLSHYRNENHLGKKIEPEHVVKGMISYIYQIRKDPKDDEAVSRKLMQRFNRINWPYNSKFDQKISNPVLFQKLNSTFQVYVSFKKENGDFDRFTGTAFLCNGEIYSCSHTFVQGSRKNVGPELNDAQLVEFDSFKKNQRKCYKITKIEYNTDLDFCHIYTNHKFEGGFRKPTTAPYENEKLQVVGFPSILDHNNTVGLYQKSGRITSTFSEPNPDYDKEKGEVEDGKLFMPLKQRLLINTDATILEGNSGGPILTKDLVVIGIVLKGQNRESATNNTALDFNFALNSDFLMKKYYLK

SEQ ID NO: 1467 - protein, 538 aa, unidentified
  source 1..538: note = Related to NZ_AZLR01000004.1; note = Oenococcus oeni
MNAESKKIRSQFTQLFNVDELASFVGTNAQTIQTITNKTTSYYKSFELKKRSGGSRTILAPKQQLLSIQKKIATTLEKIYPVSIYSHGFIYKKGIKTNAEEHLRSTELLNFDIDNFFDNIPEYRIFGIFRYYFNMNNYISGILKELTCVERHLPQGAPSSPILSNIICYKIDKDLGKLARRNHCKYTRYVDDITFSSKRKLPSSIYNRINKSCSNNIVKILSDSGFTINHRKTRLLTKSQRQEVTGITTNKQLNVSKTYIRSTRAMLYNFKNSKYQVANAKFKKYYKAKQNLNPNSEILPEEIIKGRISYIYQIRKSRKEQSLDNSVTHKLMQSFNMVYWPKGSKFDQKIANPEKFKLYNSIFEIEVKAKDEDLCEKDNIMTYTATAFLCEGKIYSCFHIFKKPKQIIEPKLKEYDCYTKKIRATYEIASIDFDQNFDVSIIHLNNTCKIKKSGFKSPKKDATENEQLILAGFPEFSHHQGNTLNLYKKNTQIEDIYKENITKLNKPPYSFSNKMKAEKNLLFFQYFSLFNKIIAVFV

SEQ ID NO: 1468 - protein, 584 aa, unidentified
  source 1..584: note = Related to JAAUUP010000156.1; note = Deltaproteobacteria bacterium
MDEDKKYKTFTIPKRSGGRRQILAPCGPILGLQHKLRDFLDACYEPPPSTHGYVPGRSIRTNAVPHEKCQYMMKLDIVDFFPSITFARVYGLFKAAPFRFTNKVASTLANLLCYREVLPQGAPTSPVVSNLICQRLDRDLLKFAREYSSQFTRYADDLTFSTKDGAQWGLVVLNDKRKCPHPEIERIIQENGFRLNEAKTRFLNKYCRRIVTGVVTNERLNVPQSYLRTTNRMLKLAGTNGLDNVGRWYCQDNHIFSSTVMNFADYVVKVLQGRIAYAKMIRGSDDPICQKHSIYLDNIVSGRPLTYGAGNYMKFAKLTPLRVLHLSDFHFRVETSWNATPLLEDLVNCIGDPARMSLLPPDLVVVTGDIAFSGRKAEYALAADFLSQLCARISLPINRVFMVPGNHDVDRAAVSDVALREQKDLLKLDEPGARISAMFKDADIRRVLLRRLDSYVDFCKNFYGSGLRAEPWWKETVQVRDMNIGISGLCSSWMSVSDGEQGQLMLGLPQVNEVMHRGFTHDLTMTLLHHPLNWISEKDAESVDEIRAWSDVVFHGHVHTSDIATTYSQCRGDDDIGSRSGVRW

SEQ ID NO: 1469 - protein, 346 aa, unidentified
  source 1..346: note = Related to NZ_CP029480.1; note = Arcticibacterium luteifluviistationis
MKKLYLADIEERSRRFLGCRTIDDLCCLGFVKNELLLHSLNISYYSFELRKKSGKMRQIESPNESLKKVLRQFNYYLQCVYYIHQTDASQGYIITPKKSKVCKSILENARVHLRNRFMLNIDFQDFFHQISFERLAKRLSETPFKFDTSTSKLLALLFTYKGRLPMGAPTSPVLSNLCVMKLDMEMSEWSKKNGVTYSRFVDDLTFSRDDSEFISDTYTEINHICLKHSLKVNPAKIKYFGEGSLRKVTGLILRETIDIEDGFYHELDKDFNRMKNLVEVVIINHGVKSNDEVQTFKKEIEGQINFIGMVEGYNSPIFNQYRQKLKAVMNPAEEVLSVRWTNFNYV

SEQ ID NO: 1470 - protein, 346 aa, unidentified
  source 1..346: note = Related to nan
MRKLYRDEVKNRACQFLECQNMIDLHRLGFDTARIKLLALAPPYYCFDMPKESGGVRHIEAPEEHLKDVQRQFNRYLQCVYFEIQTPPSYGYIIRTKGQTPWKNVLENARQHLGARYMLNVDFKDFFHQFTLRRIHRMLQCPPFQFDNKTAHLLARLFCYKGRLPMGAPTSPALSNIGTIAFDNDMYAWASNQKLTFTRFVDDMTFSSPIVPLTDEHLAHINTICQKHALLINPDKTVFFGEADTKKVTKLLLRDTVDIDPDFYRELDKDIIRLKHLTEVNILMENHKRGQLLRKFKKEVEGQVNFIGMIEGFDSSIFYKYRMKMKEALKPDNKALSSRWTNFNYF

SEQ ID NO: 1471 - protein, 346 aa, unidentified
  source 1..346: note = Related to BQJU01000031.1; note = Saprospiraceae bacterium
MRKLYLKEVEQLAKQFCACENLKDLERLNFAINRIRLLSLNPQYDVFKVPKPNGKTRLIEAPEVELKEVQKQFSNWLQCVYFLLQPKSVFGYIQRVKDVLPAKNILEHARQHLGAIYLLNVDFQDFFHQVSHTDLVRLLQRPPFRWTKKAAAILAKLFTRNGRLPMGAPTSPVLSNFAAIQLDLDMEKWAQKQGINYTRFVDDLSFSTKDQALTTAHLDQVKTICAKHQFVINPQKIKWYPPGVSKKVTGLVINETVDIDPSFYQELNRNLNRLQGLSDVNAIVNQSRQNDLYQDFKKEVQGMINFIGMIEGYGSQLFFDYRQKLKEALHVSPECLSVRWTNSQYF

SEQ ID NO: 1472 - protein, 339 aa, unidentified
  source 1..339: note = Related to JAIOTP010000164.1; note = Desulfobacula sp.
MNRCFSSFMAMREPGDMCALLRLPLFKLKLLSLRSVYNTFEIKKNGGARLIETPAQPLMKYLKSLKNFLQAAYYYLKTDAAYGYILNPGQTKNPRNIMTNAKIHLGNPWMLNIDLDDFFHQVKEKHVQQIFGMLPFRFSGELVQLLCKLSCYKGRLPMGSPTSPPMSNFAMIPVDNRLLKWARSNGIVYTRFVDDLTFSSQKPINSCTLTRIEEILYEYRWKINQDKVVLFGESDIKKVTGLELRNRVSVPDTYFEEVAKDIVRLEKAKELVIRAPFHESTAWIKKLEQHVNGQINFLGMVYGYGSPEYLNKRTKADAVLQRDYEPESLNWLDFPYQFF

SEQ ID NO: 1473 - protein, 336 aa, unidentified
  source 1..336: note = Related to PHDA01000024.1; note = Bacteroidetes bacterium HGW-Bacteroidetes-7
MLGKIKTTKELALYLGTSYEKLNKIDPEKSFASFYINKHGSTEKRLIEYPRGELFRILDRLSDGLQWLYLDHLTTAAYGFIRKLKPNKDPRNIYTNAKRHLGKKYLLNIDLDDFFHQVDTRKLQNLFSDYSLFSLNQESEQLLVKLVSYRGRLPMGSPTSPSLSNFATIGIDNDLSVWAGRNSFDYTRYVDDMSFSSNIKITQNHINQIIEILFAHRFLIDPNKTKIFGPQDTKEVTGLVLGKTITVPDEFINAFMKDINRFSEMHHLACQNPDSRVFEWLEKMRKVLQGRMAFLKMVHGPKNETYKLFQLKLDNIYKPELLETSVSWRYAGYEYS

SEQ ID NO: 1474 - protein, 348 aa, unidentified
  source 1..348: note = Related to NZ_FNZH01000018.1; note = Cyclobacterium xiamenense
MAVGYRHIYRTARYLRSCRQLSDLEGLIKVSKADITLHSLHPKYYEFRVLKKNGGFRKIEAPQPGLMDLLRKLNFVLQCLYFFEKPPASYGFVMSHKGNKQPRNIRTNAERHINSACMLNVDFEDFFHQIKVDKVYAVLVNPPFHFSRESADVLATLCTFKGRLPMGSPASPALSNFAVRDMDWMLDAWSKERGYRFTRFVDDLSFSSETSAFHPTMMPEINAILSNFNMKINPTKTKWFGPGEVKVVTGLEVTDQVRIPGSFYYDLSNDLKRLKYSIEAQVQVMGSQHNEMVEKLKKQVRGKINFVGMIQGKGDRKYTDLLRDYDNAIHPDIDKLSVRWVDFPYQDF

SEQ ID NO: 1475 - protein, 344 aa, unidentified
  source 1..344: note = Related to JADJWN010000021.1; note = Saprospiraceae bacterium
MATPIKTIRTRNHAFRSMRVIGDLCRLTGESNLVLGLMADKPRYRQYFMRKKDGSKRPIEDPDARLKAVLRVINDHLQAVYYYLRPGAVHGFTISSTSDETERNILSNARAHMQSHYMLNLDLKDFFHQITQKSVVQLLSSHFDQWDDSLIHLVAGLCCFRGRLPMGSPASPALSNFAMTDLDHELMTLCKVYDVVYTRYADDLTFSSREPMSSVFRDMVNDAVRHRGFEINPKKVRYYIMEDSKVVTGIIVTKDELCLPEEYMHQLRKEIDLYRNSVIVDTMYETGMSGKKLSLFEQEITGKLSFAKMVMPDDDEVKELEDLFYNEVDVHSVMQSWLDIPYIF

SEQ ID NO: 1476 - protein, 350 aa, unidentified
  source 1..350: note = Related to JAGQVH010000109.1; note = Chitinophagales bacterium
MHMGSSSLRFFRSNAKRFASVRSKEQLARELDSSKYTLELLAVSPPYRSFKIPKKDGTWRSIEEPEEELKLVLKLLAFHLQTVYFFIKPPCAYGYILSHRSDPDKRNIVTNAHRHIQAHTLLNVDMRDFFHQCDEAEVVSVLRPHFPEMEQDCLELIANLTTYHNRLPMGSPASPVLSNYAAFRLDHAMLAWSQERNIVFTRYVDDMTFSSRTVLPVEYVKQLEEACAKFGFPLNPAKTKYYGPEDEKYVTGLMLTKEEVVLPGKYFSFLQDDLDRFAALYPVFSCLSDERSSAWVWHFEQGLTGRINHIGAVYGRSSATFRHYQKKLQAAKRPVAEEIYMNWLDLPYET

SEQ ID NO: 1477 - protein, 349 aa, unidentified
  source 1..349: note = Related to CP083757.1; note = Cytophagaceae bacterium
MTFGDIQTKASLVSKCDTLTELCFLLKTPRKALLAIADKPDYNEFFMPKPDGKGRRLIEDPVAVLQYIQEILNDYFQAVYYLIRPEAAYGFQLSFDDDHAGRNIRTNAERHLHKPWLLNMDFKDFFHQVTSQKVEMILRGDSFSFDKECVEVLCSILTYKGRLPMGAPTSPVLSNMAVMEMDNQLGQMAKEKRLIYTRFADDLTFSGHQEINEFTIKAIKAVVAQFDYFFNENKTRLFTPEMEKTVTGVKLGDRLGLEPKYLDKVSLEIQKYEHTKEIQGINGIESSEYLTKYEQQLSGHIEFIGFIYGKQAPEYVHLKKRYDKAESSSYFDSRSWMEFDRHYTFFNKK

SEQ ID NO: 1478 - protein, 348 aa, unidentified
  source 1..348: note = Related to NZ_KE384045.1; note = Runella zeae
MARLNKIKKIKKLAEYFASIHTTEQLATFVGVPVYQLTLLAEFPAYNCFSIPKQNGKPRMIEDPHKPLKKVQQILNSALQCGYYCNKTHAAFGFLLNPEDDTDPRNILTNAQRHINRLWLLNVDYVDFFHAVSTHRVVELLLSDYFSFDEPTALLIAQLCTYKGRLPMGAPTSPVLSNWAARTLDEELLAWSHRHGFVYMRFADDLTFSRQEPILPQHVQEIRAISTVNGFTFNEQKLKICAPSAEKIVTGLVVGKNGVQLPSGFLGELEAEILKFRTVLEVQARAGRAQSVWVEEFRTQLEGHLSFASFVLGEDHADYRRLSRLLEEAMQPSVAHDSVSWLHFNYFF

SEQ ID NO: 1479 - protein, 365 aa, unidentified
  source 1..365: note = Related to NZ_FOFB01000012.1; note = Lewinella agarilytica
MAKKVSIYELRRRANSFLACKGTLDLARHWRVDNVRLAVLAIEPEYREFRIPKKKPGTFREIEDPRPKLKAILRKLNRDLQAVYYFQRSPAAYGFLTSPARDPDPRNILTNAQQHLGAKWLMNVDMRDFFHQIETHEVAELFRQPPFSFPKATAKLLAGLTTYKGRLPMGAPTSPILSNWYAIPLDKTLTEFARQREWTYTRYADDITFSSKTSPIKFEDVGRVNVLVRGRELELNHNKTVIYPPDAPGKEVTGLIVGAEQVQLSSEFLAKVKDGLRRLNDVVDTKYLMPSGRLAKTPWVEEIAQQVRGLVSFAQKVLPPADPLGMELEEAYATALAPPQNYGPVSWLEFGYLDFRIDTNPDQIK

SEQ ID NO: 1480 - protein, 360 aa, unidentified
  source 1..360: note = Related to RFJJ01000149.1; note = Bacteroidetes bacterium
MPKRPTIRTLRRHAEQFRACRGQTQLSWLLRTEPVRLAMLAADPKYATYRIPKKRKGTFRLVEDPEPRLKRVQKRLNYYLQAVYYFHRPKNAFGFITNPVDDPDQRTIATNAARHLGCQWMLNVDMKDFFHLVNRERVYELFRASLLKFPKNLARVLADLCTYRERLPMGAPTSPVLSNLACIPLDHDLDHFAEQRGLTYSRYADDLTFSSREQPINWELIPQINEWITAYDFQLNPAKSKLYGPADPHKEVTGLIVGVQQVSLSPDYIASLRKGIQQLDQVVNAKYVMPSGRLRATTWVDEIAQQLQGRLAFASQILPDTDPLRIELETAMDEALAPPTEYGPVSWLDFGYTLFNMPPA

SEQ ID NO: 1481 - protein, 375 aa, unidentified
  source 1..375: note = Related to SBLB01000002.1; note = Spirosoma sp.
MPGYRYESDGEEISIARGHTIDMKYTRKRVNWLARQFGQLTDPASLSQLLGVQLHLLQLLALQPRYNTFRVPKKNGTFRLIEDPEPHLKQVQKRLNTYLQCVYYLRRTPATYGFQISVDGDNDPRNILTNARRHVGNPWMLNADFLDFFHQVNYDWVYRLFTREVFTFEPDLAELLAKLTTYGGRLAMGAPTSPVLSNLATMPVDDALTELARSYDWTYTRFADDLTVSAQACIAPAQVQEFLNTIAPFGLAFNEAKFAVRSPAMPKTVTGLVVTAQDVQLPASFVTDTLTEIEKLGHLLEIHYRSGRPVTRWLEQYQQQVEGQLAFAEFILDDADSQLHSLRAAFVRIQQTPDLGEPVSWINAAYLEPASHTLY

SEQ ID NO: 1482 - protein, 350 aa, unidentified
  source 1..350: note = Related to NZ_CP013355.1; note = Lutibacter profundi
MKNQKLTLNQIKRNDVLIKKCKTSKQIASLLNCSAKELTLHSFEPIYYHFKVPKKRKGAFRYIEAPSQEIKHLQRKLNYYLQSVYYLNQSKASYGYIIKAIGQKNTKNIYTNALQHLGSTYMLNADFKDFFHQIALNDVVQIFKSKLFNFNKNTAYTLAKICTYKGRLPMGAPTSPALSNLYSIALDHDLSTWATLNKLIFTRFVDDLSFSSKNNLLNQTHFKQINNIALKYHLNFNPNKTKYFSKTDKKIVTGLVLNNTVDIDKSYYNELDKDINRLQKVIEVHHITGKTQGLAFLKEFKQQIMGKINFISTIEGKNSKQYLTYLNSFHNALEVNNELVNRWTKFSNYI

SEQ ID NO: 1483 - protein, 349 aa, unidentified
  source 1..349: note = Related to NZ_FOZP01000010.1; note = Lutibacter maritimus
MKQQKPTLNQLKWYENQIFNCKTLEEISVLLNCSKNELLLHSYNPEYYQFSIPKKSGTFRIIEAPNESLKRLQRNLNQYLQAVYYLNQSVCSYGYVISILGEKQTKNIYTNATQHLAKPFMLNTDFKDFFHQIKIDDVTQIFKSEFFNFDIYTATTLAKLCCYKDRLPMGTPTSPVLSNLYTLKLDNELLQWAKKHNTSYTRFVDDLTFSSVTTSFSPLHFKQINEIALRHKLNFNEEKTRYLNSDDIKTVTGLVLNTTVDIDNAYYLELGKDLIRLKNVMEVYYITGKTHIITFLKTFKQELFGKINFIGTIEGRNSKQFLNYLNLFYNALEPDTDLVQRWTKFSNYV

SEQ ID NO: 1484 - protein, 347 aa, unidentified
  source 1..347: note = Related to JAAYJT010000001.1; note = Bacteroidales bacterium
MKITFKKLKKEADLFCKLSTLNDLAAVISVSKNEILLMAFEPVYYHFTVPKSTGGQRYIEAPDIELKKIQRRLNYFLQKVYYLNQSRAAHGYIISVIGEKNPKTILSQAEKHLGANYMLNVDFSDFFHQISITDVKNIFQCSPFKFNQYAAYTLAKICCYKDRLPMGAPTSPVLSNFYTRSLDEDLIKWSMPQKITYTRFVDDLSFSSLDSPFNITHYEQITEITNNYGLVLNPSKTVYYDIKDEKIVTGLILRETVDILPEFYEELDKDINRLKAINEVVYITGKIQKPLMLSTFKQEVMGKIAFIAQIEGKNSPEYNHYMEKYEDAEAPDEELSVRWTKFGNYLI

SEQ ID NO: 1485 - protein, 350 aa, unidentified
  source 1..350: note = Related to JAIORQ010000052.1; note = Bacteroidales bacterium
MSKKHTKKQILNKAAEFSNCKNIKQVSFVLKVSPMQLATSALLPQYYYFKMKKLKGGFRNIEAPEPPLKKLQRKLNTYLQYCYYSEQTKAAYGFIINPRKQKAKNIVSNAQQHKNNSYMLNIDFDDFFHQISIKEVIAIFRKSPFNFNKNTAGILSKICTNKGRLPMGAPTSPVLSNFACSGLDKELQQWADTRIITYTRFVDDLTFSSNMPITKQHYNEIKEITDKYDFQIETTKTKWYGKEQEKTVTGLTVGETIAIPEAYYTELDKDLHRLQKTTEVHIITGQVYKADAGKKFKQEIMGKINFIAVVHGYDGNKYETYMQKYEDAINPPDKDELSMRWLRFSNYMQF

SEQ ID NO: 1486 - protein, 349 aa, unidentified
  source 1..349: note = Related to JABXHO010000062.1; note = Flavobacteriales bacterium
MKLNQKLTRKQIYKKAKMLFSCTTLKDVEQLIGAELNSISLHAFDPGYFHFTMPKSNGELRYIEAPEDELKRLQRKLNHYLQCAYFVVRTPSCYGFTIGAISEKNPRNILSNAQKHLNCSYLINVDVDDFFHQISTERVQFIFENDPFRFDRYISKTLAKLCTYKGRLPMGAPTSPVLSNFYTIEPDTELQKWSENQSITYTRFVDDLTFSSTKNLNSRHIESISGILDGFNLPLNSGKHKLYGPEDPKTVTGLVVGNSVEIAPSFYCALDEDLVRLKKVVEVHQITGMTSGLSFLKRFKQEVMGKINFVKQIKGTFSEEYVRYLDQFHEALEPDERFVARWTSFNNYV

SEQ ID NO: 1487 - protein, 350 aa, unidentified
  source 1..350: note = Related to JADLBE010000330.1; note = Saprospiraceae bacterium
MNKRHTSEWRRLGEDLLQTRTPDDLSRLLGITTARLADTAEAPAYATFYVDKRNGGKRLIEDPAPPLKALQRRLNDLLQGLYWLERSEAAYGFVVNPLDDPHPRHIVTHAERHLGCRRLINVDLEGFFHQIDNDRVRKTLLAPPLQLEAEAVELLVALTTWKGRLPMGAPTSPVLSNLAFRDEDLYLTRFARDRGWLYTRYADDLTFSSRNQDMEPHHLHEIVQHLEDGLKYTVHPEKRRYSDDGDIKSVTRLVLEGNQVTLPEEYFHQLDETLNDLSSARRVHHRMGGRHTLWLEDYNARIEGLLSYARYVLDERDPVYMDLKRRYDDANQASPDDFGAYTWFDFPYFE

SEQ ID NO: 1488 - protein, 347 aa, unidentified
  source 1..347: note = Related to nan
MLSLRQLQYRRNRLTKLRTMQELCLLLGKPGHKLELLCAQPMYNEFHIRKRNGGKRHIEDPRPPLKRVLGILNDLLQGVYYFEKTEAAYGFIAIARDDPAPPRHIVTHAERHLGCRWLMNIDLTSFFHQISTEMVLDRLKDPPFHFDDEVADLMARLCTYKGRLPMGAPTSPVLSNLVFQREDEVLKAWADDHGWLYTRYADDLSFSSQKEISSWEMQQTINLLENHSYAVHPEKRRLYGPDDVKNVTRLVLGDGELELPPDFLEELRDCIEDLRRTTRTHLRMGVARPPAWLTKYRQRLNGMMGFAKHVLGEYDEDFLQIQRSYDEAVNPPDEDFGTYSWLDFPYW

SEQ ID NO: 1489 - protein, 345 aa, unidentified
  source 1..345: note = Related to JAGQXW010001063.1; note = Saprospiraceae bacterium
MDNSIAALAGLRKAFFAMRTAGDLAELLAVSPAHLVAVAFRPWYHIFELPKKDGTMRLIEDPDDRLQPLQDGLNDYLQAVYWHQRSPAAYGFLVIPTGDPEPRHIETNARKHIGKPWLLNCDLEDFFHQITAGRVHKLFADAPFGFDEEVCDLLVRLTTFRGRCPMGAPTSPVLSNLVFSATDADLTDLARRRGWTYTRYADDLSFSSYDPLDWDDYTHIQRAVIRHDYEFNPEKAALFGPDDPKIVTGLLLGTQDVEVPPDFFPQLTDDIHQLAGAMRVQFRVNPRGSRTTARFRRSVEGKLRFAERIMGRKHPGVAKLWKDYRNAVKPPAKHIQRSWFDFEYW

SEQ ID NO: 1490 - protein, 355 aa, unidentified
  source 1..355: note = Related to JABAQK010000028.1; note = Haliscomenobacter sp.
MADTITIKGMESRARRFLDVQTVEQLAKILGKDPMKLAVLAALPQYREFDIPKKNGGKRHIEDPAPPLKKVQRKLNDFLQAVYFFHRTDNAFGFITNPVDDPSPRHILTNAQAHLGCRWLLNVDMKDFFHLVSQERTEQLFEAPLFGFGEHVSTLLASLACYKGRLPMGAPTSPVISNLVSIPLDEDLNAFARERGWTYTRYADDMSFSSQTEIPPDAVQEIEAWVKAYDFELNPAKVKLFGPGSPNPKEVTGLHVGETEIGLGADYTGQLTGAIQHLNDIVDAQYLTPSGKSQPSRWVEELEAMVRGKLEFARQILGEADPLYQDLSLRLENALEPPETYGPLTWLEFGYATPR

SEQ ID NO: 1491 - protein, 353 aa, unidentified
  source 1..353: note = Related to JAEUUQ010000028.1; note = Saprospiraceae bacterium
MADTITIRGMRGRADRFLACQTFDQLARLLGKQPLQLVGLAAHPQYREFYIPKKSGGKRLIEDPVPPLKKAQRRLNDYLQAVYYFHRTASAYGFLTNPVDDPQPRHILTNAGQHLGRPWMLNVDMKDFFHQITQERAQELFKAPIFGFNDEISTALAALCCYKGRLPMGAPTSPILSNLASIPLDQDMEDYARDRGWVYTRYADDMTFSANEPITEAHFSEIENWITAYDFILNPTKKRFYGPGDKKEVTGLVVGDSEVELADDYLDMLTGAIQHFSDIVDAQHLTPSGKNQPSPWVAELQAQVKGKLEFARQILGENDERFIDLETRLIKAAEPPESYGPLTWLEFGYDVKL

SEQ ID NO: 1492 - protein, 354 aa, unidentified
  source 1..354: note = Related to JACJXZ010000021.1; note = Lewinellaceae bacterium
MADTITIQGMRNRAKRFLSSGTLEGLALSLGKASLKLLALAEQPSYNEFRIPKKSGGMRRIEDPTPELKKAQRKLNDYLQAVYHFQRTDAAYGFLANPVDDPSPRHILSNARVHMGCRWLLNVDAKDFFHMVSEERVKQVFQSGPFHFEEPIAGLLASLCCYKGRLPMGAPTSPILSNFASVPMDHALMELARKYDWKYTRYADDMTFSAQEEITEAHFAEVGAIIRSHGFLLNPEKKKHYGPEDEDKEVTGLLVRESRIDLPEGYLEQLEKAIDHLDKAIDAKYSMASGRGQKTAWLEELEQQIRGKLEYARQILGEGDLLYLDLVVQLDEALTPPDYYGPMAWLDFGYALPK

SEQ ID NO: 1493 - protein, 350 aa, unidentified
  source 1..350: note = Related to JAIUPL010000043.1; note = Bacteroidetes bacterium
MANHPSRLELRALKDAFLAIRTPADLCSLLAEDMLELSALALKEDNYEAFFVQKRNGEQRLIENPSPPLKRIQRKLNDCLQAVYHFHRSSAAYGFLSACSDDPPWAHRGIVANARQHLGRPWMLNMDVEDFFHAILADRVAWVFLNKPFSFDTELTNLLMRLCIYKGRLPMGAPTSPILSNFAARLLDTDLELLARSKQWLYTRYADDMTISSRQEITEDDVQLLRDYYRAHSFEANEKKTKLMGPKDVHTVTGIVLLENRLDLLPEFFEDLDSEIGKLSEIAGVKGRLGITLMDWVDDYAEKIQGMISFAAHVLGESDARVVKAEKALGKAQHGPKDYGAVSWLDFPYH

SEQ ID NO: 1494 - protein, 347 aa, unidentified
  source 1..347: note = Related to JACJXW010000005.1; note = Lewinellaceae bacterium
MDKKTRQRHQHNKAVFCSIRSIRSLCSLLKTDQRRLLLLARQPPYKVFTVPKKDGGERQIEAPGAELKKVLGHLNRYLQSVYYFEKSSAAYGFIVGVLNDDDRRNVVTNARKHAGRPYLLNIDLIDFFHAITREQVVEIFQSKPFQFKKDLPELLADLVTYQGRLPMGTPTSPVLSNLACRELDEQLSAFAEDMLWVYTRYADDMSFSSRKPIDADKIDSVRAIIEKAGFEVNQRKLKTYGPEDDKIVTGLLVTDKVTLAPDYLPQLDEDIRQLQNVLLIQNEQGQLSTRWVEQFKKNIIGRLNFAGFVLKRSDERYIDLKDAYYTAINPPQEDFGAVSWRGFPYNL

SEQ ID NO: 1495 - protein, 347 aa, unidentified
  source 1..347: note = Related to JAGQXN010000602.1; note = Phaeodactylibacter sp.
MDKKTIARHQHNRDVFCSINSIRSLCSLLKMDQRRLTLLVRQPPYKVFTVPKKDGGERIIEAPGTDLKGVLGRLNRYLQSVYYFEKSSAAYGFIVGVHDDNDRRNVVTNARKHAGRAYLLNVDLTDFFHAVSRERIVEIFQSKPFQFKRDLPDLLAGLTTYQGRLPMGTPTSPVLSNFACRELDARLTTYSGNMLWVYTRYADDMSFSSNKPIDADKVDSVRAIIREEGFEVNERKLKVFGPEDDKIVTGLLVTDKVTLAPDYLSGLADDIHQLQNVLLIQNEQGQLSTRWVEQFKKNIIGRLNFAGFVLKRNNESYMELKDAYYTAINPPQEDFGAVSWRGFPYNL

SEQ ID NO: 1496 - protein, 347 aa, unidentified
  source 1..347: note = Related to JAGQXH010000872.1; note = Lewinella sp.
MKKDTRERHQHRKMVFCSINSEHTLCRLLHIDQRRLQLLAKQPAYKSFTVPKKDGGQRQIEAPNAELKRVLGRLNRYLQSVYYFEKSSAAFGFIVGVTNDDDRRNVITNARKHLGKPYLLNIDLLDFFHSISRDRVYQIFREKPFNFRRNVPDLLADLTTYQDHLPMGTPTSPVLSNFACRDLDRELLIFSQTHDWTYTRYADDMSFSAAEPILQGQVEALGAIIQQAGFAINPRKTQLFGPEDEKIVTGLLLTDTVTLAPDYLPLLQAEIDQLRNLLLVQNEQGELSTRWVEQFKKQLMGRLNFAGFVLRRNHPDYMALKDAYYAAIHPPQEEFGAISWRGFPYNL

SEQ ID NO: 1497 - protein, 347 aa, unidentified
  source 1..347: note = Related to JADJZS010000008.1; note = Haliscomenobacter sp.
MDKRTVERNLHVKTVFFGVRSIRALCGVLQIDQRRLLLLAKQPPYRSFTIPKKDGGERHIEDPGAELKKVLGKLNRYLQSAYFFERSMAAYGFILGVQNDNDRRNVVTNARKHLKRPYLLNTDLRDFFHTIARDRVYAIFAGPPFHFPKEIPEILADLTTYQGRLPMGAPTSPVLSNFACRNLDLELAAFSENMLWVYTRYADDMSFSSHQPIDADKIQSVRTIIEKEGFAVNERKVKVYGPNDLKIVTGLLVADDVQLAPDYLPNLEAEINRLQEVLVAQNEQGQLFTNWVEQYKKQITGRLNFAGFVMKRSNPEYMRLKDAYYTAIHPPQEEFGAMSWRGFPYNL

SEQ ID NO: 1498 - protein, 346 aa, unidentified
  source 1..346: note = Related to JACSRK010000282.1; note = Saprospiraceae bacterium
MDKKTRERHQHQKMLFCGIGSVRALCGLLQTDQRRLALLAQKPPYKTFSVPKKEGGERLIEAPGEELKRILSRLNGLLQSAYFFEKSSASYGFIVGVLNDDDRRNVLTNARKHAGRKYLLNVDLKDFFHYVSRDMVLKIFTGEPFRFKGELADLLADLTTFQGRLPMGAPTSPVLSNFACHDLDAGLITLSENLLWVYTRYADDMSFSANQPFNAEKIASVGALIHNAGFVVNQQKIKIFGPGDEKIVTGLLVTDTVALAPDFLPRLEADISHLQQIMKAQNEQGQLLTKWVEQFKKQIIGRLNFAGFVLKKSNDAYIRLKDAYYTAINPPEDEFGAVSWRAFPYN

SEQ ID NO: 1499 - protein, 348 aa, unidentified
  source 1..348: note = Related to NC_015510.1; note = Haliscomenobacter hydrossis
MDKQALYQHQQQKTVLCSINSLNELARLLRLDQRKLTLMAERPNYRTFEIPKKDGGMREIETPGDDLKRTLGILNRYLQSVYLFEKSSAAYGFVVGVKNDDDRRNVLSNARKHIGKPYLLNIDLANFFHSITRERVLKVFTEAPFRFKRELPDVLADICTYRGRLPMGAPTSPVLSNLACMDLDRDLSILANSLFWNFTRYADDMSFSSDTPITPENIVSLRKIITDAGFTLNEQKLKLYGPADPKTVTGILLEADDCTLDPSYLDLLDEEIKRLHEVMRAQNELGQLNTRWVEQLKQQIRGRMAFAGFVLKRKNERFVELKNAFHSAINPPTEEFGSISWRGFPYNF

SEQ ID NO: 1500 - protein, 347 aa, unidentified
  source 1..347: note = Related to NZ_JPOS01000080.1; note = Phaeodactylibacter xiamenensis
MDKRTRQRHLQLKTQFCSLRSVTEFSMLVKTEKRKLQLLAAQPAYNTFTVPKKDGGERLIEAPAPALKKAQGSINRFLQSIYYLEKTTAAHGFVVGVRNDDDRRNILTNAKKHLNKTYLLNIDLQDFFHTVTRDEVLDVFMKPPFNFKRQLPDLLADLLTYSGRLPMGAPTSPVLSNFACREMDRRLTAMAEDMLWAYTRYADDMSFSSNRNIDEETVNTVIRIIREEGFVPNKRKIKVYGPKDQKVVTGLLISDKVSLEDNYLAQLETDIRQLGDVLLAQNEQGQLATRWVEQLKQQVRGRLSFAGFVLGRRHERYNQLKDAYYNAVNPPQEEFGAISWRGFPYNF

SEQ ID NO: 1501 - protein, 347 aa, unidentified
  source 1..347: note = Related to JAAAOU010000417.1; note = Bacteroidetes bacterium
MDKRTRQRHLQNKKKFCGLRSVSELCLLLKTDKRKLELLANQPPYKTFTVPKKDGGERLIEAPGGPLKKVQGLLNRYLQSAYFLEKSTAAYGFVVGVRNDEDRRNVLTNAKKHLGKTYLLNIDLQDFFHSVTRDQVLDILLKPPFNFKRRLPDLLADLLTYNGRLPMGAPTSPVLSNFACRELDRRLSAMAEDLLWTYTRYADDMSFSGNRPFDEEKVNSVLRLIREEGFTPNPRKIKRFGPKDEKVVTGLLLTDKVQLEKGYLDQLQQDIQQLADTLRAQNEQGQLATRWVEQFKQQVRGRLSFAGFVLGRRHERYQQLKDAFYTASNPPQEEFGAVSWRGFPYNF

SEQ ID NO: 1502 - protein, 344 aa, unidentified
  source 1..344: note = Related to nan
MKTLSKRRLKQRRDKFLSMRYVDDLAELTSFVRYKLTLIAGVPQYHFFSVPKRNGGLRHIENPARKLKKVQRTLNNFLQAVYFFEKTEAAYGFIIRARDEAPRDIVSNAHQHLNVPWLMNMDLTDFFHYVKREDVFHIFCHVPFNFSEDLAEILTQLTTYKGRLPMGAPTSPVLSNFATIDMDIDLLAFAQARGWTFTRYADDMSFSMDTAPMDSEIEAIRQIAGKHQFLFNETKLKIYGPEDEKLVTGLRLGEEVTLSSAFLQEIREEIDRLQKVVEARAMAGQPPSKWVEKYTQQVQGRMAFAEKVLGEYDPIYVELEKAFNRALNPPDRFSSVNWLDFPYH

SEQ ID NO: 1503 - protein, 324 aa, unidentified
  source 1..324: note = Related to JACETV010000001.1; note = Emticicia sp.
MARLLGIEHRTLDYLAERPQYNEFDVPKKNGGFRHIEDPDNELKNVLRLFNDYLQAVYYFRKSDAAYGFVRVPDNDTAPRNILSNAEKHRNRPWMLNVDFLDFFHQIKQIEIYELFVCPPFNFGEELAVLLSKLTTYKGRLPMGSPTSPVLSNFATLLLDQDLLGFATKKDLVYSRFADDLTFSANSPLSVEHLTGIRQICAFYGLKLNENKINFFLPHQTKIVTGLIVTNRVDIPHTYLEDLRKEIDKLRTVLEINYRTGRQASEWVQRFHQQIEGAIEFIRQIETSKSPDYQQIRQYYAESQQMAENYQPTSWLDFGYHKFI

SEQ ID NO: 1504 - protein, 356 aa, unidentified
  source 1..356: note = Related to JABARE010000025.1; note = Saprospiraceae bacterium
MTLFEQRNNPAMAGKIRTQGNAARFIQLRNCQDLAVSLRIDAYRLQLLVLQPKYNCYSVRKPKGGFRLIEDPQGRLKSVQSRLNDFLQSAYLPLRPECAYGFTRAKSEDDDRTVVGNALQHLGCRYLLNIDLKDFFHQVSDEKIDGVWQSHFRRFDAGLRQLLTGLVCFRQRLPMGAPTSPALSNFASLEMDHHLTEYAHRSCMHYTRYADDLSFSSTEPIGKGEYHDLRNIIGECGFEVNPSKVRWFGDGEAKEITGIELGEECLRLPGNYLGRLAREIERYRAFFELESRYQTGASGKKLKLFEQELRGKLEFARQVLTEDDPVWQKLAESFEQAQFALEDFESVDWLDCPYLY

SEQ ID NO: 1505 - protein, 345 aa, unidentified
  source 1..345: note = Related to JADJYQ010000001.1; note = Saprospiraceae bacterium
MSIKTAIKIRAKRFSKIETLRDLCSLIRKHEQQVVLMAHQPRYHRYEIPKSKGGLRLVEDPEKKLKIVQTFINEHLQAFYSLIRPECVYGFVIKREAGEDRTITGNAMQHLGCNYLLNVDLKDFFHQVSRVRVEEIFKIHFNHFHDELIDILARLTTYHDRLPMGAPSSPVLSNMASIEMDRELIQYSKHTGLVYSRYADDLSFSTLDLMEPEHLDNIKSIISQCGFNVNPQKIKWFGHEDRKEITGILLDGNRLGLPELYLEGLQKELMRYKSYMEVESRYRTGASAKKLKLFESELRGKINFALTVMPEDQGVGKLFDQFEEAKEIMQDFESVSWLDLPYEFF

SEQ ID NO: 1506 - protein, 344 aa, unidentified
  source 1..344: note = Related to JADJXG010000001.1; note = Saprospiraceae bacterium
MANRSTIRSKAKRFEKLRTVFEFAHWLGREEAKLQLLSFKPRYKEYQIPKPGGGWRQIEDPEPKLKSVLQKLNEHLQACYYSVRPASAYGFVISASEDEDRNIVTNAKKHLGCKHLLNIDLKDFFHQIREDKVVAIFSRHFPQFEDALIDLLARLVCYKARLPMGAPTSPVLSNYAAIPLDEQLMAYCSQSGISYTRYADDLSFSSKQAISRIDYEHFLHCVQTCGFEVNPKKIRWAKENNPKEITGLFLKMGEVCLEENYLRQLETEIGRYITYYEVEARYRTGASMKKLKLFEQELRGKLSFAQLVEPDNERIDYLRDQMDQAKEALEDFESVHWLDLPYGF

SEQ ID NO: 1507 - protein, 345 aa, unidentified
  source 1..345: note = Related to JADJKX010000012.1; note = Saprospiraceae bacterium
MAASSTVKLRARKFSQLRSVFDLAHVLKVPQHNLVLMGSKPRYRVYEIPKPKGGMRLVEDPEKSLKKIQSHLNDFLQAAYYLIRPDCAYGFTIACPGDQLRNIKTNAERHLNCKYLLNIDLKDFFHQVKDIHLINLFNRHYPEFDSELVSCLSNLFSYHGRLPMGAPTSPVLSNYAMLELDHGLQNYCKSGGIVYSRYADDLSFSSTNQIQDFDFVSIDAMIKDYGFEPNPKKIKWYEPKDKKEITGLVLGDDGVELQDGYLQHLYQEIQRYKIYLEVESRYRTGASLKKLKLFEQELRGKIQFATMILPENEELLNWMQMVEDAMSVLENFESVDWLELPYSIY

SEQ ID NO: 1508 - protein, 333 aa, unidentified
  source 1..333: note = Related to JADJZM010000017.1; note = Bacteroidetes bacterium
MKCRTTDDLAQACQTDANQLVLFGLKPRYKEYYIPKNKGEMRLIEDPSKELKKIQTHLNKLLQAWYYTQRSDASHGFGIATSKDEQARGIKTNASVHLQCNYLLNIDLLDFFHQIEFPRLQKTFETYLPKQKADIRNLLLQVCCYKNRLPMGAPTSPVLSNIACLDLDGSLQQLCKHANLNFTRYADDLSFSSLLPIEKEVQDMIKDAIMHEGFSINYNKVNYFSIEDEKLVTGLVLHPDGVRLPKEYVPLLLKEIERLKIINDVEYRYQTGMSRKKLNLLEQEIQGKIRFVSDVLGSHAIETLSIEKAYLNAIQAPEDFESLSWLELPYEFL

SEQ ID NO: 1509 - protein, 341 aa, unidentified
  source 1..341: note = Related to JAGOCA010000053.1; note = Saprospiraceae bacterium
MATGIPIIRKRQRAVLNVKSMSDLSKLLQCQEHVMAAHALTPEYDTYFIPKKNGKRLIEDPNPVLKEMQGILNDHLQAVYFYIRPAGVFGFCISSTTGEEKNIVSNAKKHIGNDYMINIDLKDFFHQIKTNRVAQIINDVFLHSETEVKEMMTALMVYKGRLPMGAPTSPILSNFALQNLDHEITNICQSFGVTFTRYADDLTFSSMEYMNDTFEAMIKDAIVYEGFEINPEKVKHYLPSSIKIVTGIVVGREDLRLPELFLDQLQKEVIIYGNVVLAEHRYQTGMSQKKLDQFRQEISGKINFAAMVDSENPKLLKITDTFNANDEIENLSFDWLDIPYA

SEQ ID NO: 1510 - protein, 344 aa, unidentified
  source 1..344: note = Related to JADJXD010000001.1; note = Saprospiraceae bacterium
MATNPRIIKKRKDAIDRVRTTADICKILGENELRLQLMANSPRYKVYTIRKKNGNLRLIEDPEIQLKEVLRTINDHLQAVYYYQRPDCVHGFCISSTHDPDRNVVSNAQAHMMSATMLNIDLKDFFHQISVSQVKGIIKRQFHRWDNYLAAMIASLCTYKKRLPMGSPTSPILSNFAMLELDHELMQLSRVFEVTYTRYADDLTFSSGSDLPTDFVKMVRDALQHHGFTVNENKVKYYQASDIKIVTGIIVNPTGLSLPDDYMTQLRTEIDLYRNSRLVDAMYQTGMSERKMTLFEQEIIGKLNFGYMVMPDDPELNELNQLFEVEIDVESMTQSWLDIPYNMM

SEQ ID NO: 1511 - protein, 345 aa, unidentified
  source 1..345: note = Related to JAIBAX010000022.1; note = Chitinophagales bacterium
MMSSLKIKQQVQSLLRSKSVDDLAKVLKFTAENITLLSISKKYEVYKIPKKDGSFRMIEDPYAPLKALQKRLNEVLQCYYATIRPSPVYGFCISTSPDKPLNIKTNAQRHVGNPWMINIDLKDFFHHISEKRVQNIFSTNFKHWDKNLVKTMAAIATYKHRLPMGAPTSPVLSNLACINLDHELQNFTKNSGITFTRFADDFTFSAHHELNKNDIDIIFSALHHYGFLENQKKVVIYPPDDIKIVTGLVVGNDDVSLPKDYIPQLLIEIDRLKNILSVEKRYQTGMSNKKLQLFKQEIEGKINFATTILGNQHVDIQHIEQAYIDATAPEDDYLSMNWLEMPYSL

SEQ ID NO: 1512 - protein, 341 aa, unidentified
  source 1..341: note = Related to nan
MKRKKLNTIYKKITSIRFIEQLGFLTGISPHIMVLQSVLPKYDMFYVRKRTGGKRLIENPNPILKNIQRKLNKYLQVVYYIHCPQPSHGFVINVKRGKKKGIISNAKVHIGNDYMLNIDLKDFFYYIKYNTVYKIFNSDLFNFNTYLVKILADLCCKDERLPMGAPTSPVLANLACIDMDLKLESICNSFAIKYTRYADDMTFSGLNPIPDHLIKKIYSIIDEYGFVVNEKKVKLRGINDQKKVTGIIVGDGLSLAEFFFEETLIEISKLKTLMELNYRYRGNKDKLVNKHKQKIDGYINYATQIYGKDNEKVQQLIDELDKAMSIEDFIEPMSWDDFPYV

SEQ ID NO: 1513 - protein, 311 aa, unidentified
  source 1..311: note = Related to CP058707.1; note = Bacteroidetes bacterium
MKSNPLYTDYRIKKNSGGFREIEDPCPVXKKIQRGLNGYSQLEYSSCRPQASHGFCVALPKEEIPRGIKSNALCHLGNPYMVNFDFKDFFHQIRSEQIHKILKEQFPEQHSDLRTTLXIRLTTRNDRLPMGAPTSPVLSNFACIHLDEELDSICRASSITYTRFADDLTXSSKKVIESVELKMIRDCINNHGFQINEQKYKYSGPGNEKIVTGIVLENDRLGLPKTFLSQLRNEIERYNHVLMVESRYKTGMSHKKLKLFEQELQGKLSFATEILFPDDPVLLELIREFEHLLNSPEDFELTNWLDIPYNF

SEQ ID NO: 1514 - protein, 343 aa, unidentified
  source 1..343: note = Related to JAEUUL010000001.1; note = Bacteroidetes bacterium
MKNSGITYQSNLFHALQRTADLEKLLHTDIPGLIQLFREKPYQSFYIPKKNGGRRLIENPKPVLKEMLKRLNLLLQCSYLQFRPKCVYGFTIRKGSEKSRNIISNARRHVRKKFLLNIDLKEFFHSVKENRVRQIFESKLGKKDPLLVLLLSKLVTLNGRLPMGSPTSPVISNLALLDTDWELEALCSNLQLEYTRFADDLSFSSNQRITTKDIQLLKQVIRYHGFEINREKVKLYGPEDTKWVTGLIVEETVKLPPDYLLLLEKEIFRFKEFTLLHHKYKSGADEDKIKLIQSEIRGKWNFANMVIPGDEKLMELQLQMEYAFNPVEEYESTNWLDMPYTFF

SEQ ID NO: 1515 - protein, 336 aa, unidentified
  source 1..336: note = Related to JACJYP010000014.1; note = Lewinellaceae bacterium
MYTFSEQKSELNTTQVTALGKRFENLRSVAELAGLLGTTEPLLSRQMARPVYYTFYIPKPGGQKRLIQHPAPALKIVQQSLNRYLQAMYYGVKPDCAYGFILSPSDELRPRNIYSNALAHLKGEWFLLFDLKDFFHTVTLTHLRDLFRNVLFFPPELCNALCQLCAYQGRLPMGAPTSPVLSNLCCLFFDYQLERLAAGAQAVYTRYADDLTFSFRSEPPSGFADEVRMVVLRHGFAVNESKVRLQSRPEQPEITGLVLGKNALPVPGKNWLKSLKQEIKIYTWLMSEAVRERGLFHAWVFDRFRRSVQGQIEFLGFILGKDHREYRKLAGKVRWG

SEQ ID NO: 1516 - protein, 334 aa, unidentified
  source 1..334: note = Related to JADLDL010000205.1; note = Saprospiraceae bacterium
MYTFSEQKSALHTTQLATLGQRFEALNDVQGLAKLLSVSEAVIAKHVDKPVYHSFHIPKPGGRKRLIQHPTAALKAIQQVLNHYLHAVYFGVKPDSAYGFILSPVDELRPRNIYSNALAHSKGEWFLSFDLQDFFHTVTLTQLRDLFRRVFFFPPELTAALTGLCTYQGRLPMGAPSSPVLSNLCCLFFDFQLEQLAASAKAVYTRYADDLTFSCRQAPPPEFGDQVRQVVLRHGFVVNESKVRLQTRLEQPEITGLVLGKKVLPVPGKAWLKRLKQEIKMYRWLMSEAVRERGLFHAWVFDRFRQSVAGQVEFVGFILGKDHGEYRKLAGMVR

SEQ ID NO: 1517 - protein, 336 aa, unidentified
  source 1..336: note = Related to QWGW01000034.1; note = Haliscomenobacteraceae bacterium CHB4
MYAYLPPKSDLTTLQLKALAQRFEALTDVPGLAKLLGITENSLTKAAAKQDYLSFYVPKPGGEKRLIQHPASALKMLQQTLNGYLQAVYHGIRPDCAYGFILSPADELQPRNIYFNAMRHIKNEWFLLVDLKDFFHTVTKTHLKNLFRHLFFFPPDLTSVLTDLCSCQGRLPMGAPTSPVLSNFACLGMDHQMEKLAETHRAVYTRYADDLTFSFSTPPPADFLESVRAIVLFHGFVVNDKKVRLQSRLEQPEITGLVIGKGSKPVPGKEWLKHLRQEIKIYRWLMSEAVRERGLFHAFVFDRFKKSVLGQVEFVGFVLGKGHKEYRKLAGKVRWG

SEQ ID NO: 1518 - protein, 336 aa, unidentified
  source 1..336: note = Related to JAGNMJ010000669.1; note = Saprospiraceae bacterium
MYYFQQFKSELSTAQLRTLSSRFEALESVKDLSVLLKKETPALMKMAESPSYQEFYIPKPGGEKRFIQHPAPTLKAVQQELNRYLQAVYYGIRPPCVHGFVVSPGDESQPRNIYTNALAHTRGHWFLNIDLKDFFHTVTAQHVFDLWRHIFWFPEHLSTLLACLCCYGGRLPMGAPTSPVLSNLVFYELDGQLLQLARSSDAIYTRYADDLTFSFPRPPADDFTDRVRHLLLTHGFTVNEKKVRLQGRLEQPEITGLVVGHGAKPVLSKSYLKTLKKEVVIYRWLISEAVQKRGFFQQWLFDQFRKSITGQIEFAGFVLGKGDRVYQRLAGKMRWG

SEQ ID NO: 1519 - protein, 333 aa, unidentified
  source 1..333: note = Related to SCUG01000636.1; note = Saprospiraceae bacterium
MYDIAPPSLELTLAQMDAKAARFLAIKHPGELAGLLKADAALLAKFAAKPHYAVFSIPKPGGAKRIIHNPHPDLKTIQQSLNLYLQCAYCQLMPPCAFGFIPRPTDEPRPRNIYTNALVHFGSQWVLNLDLKDYFHTVTSRHLTWVFRELFGFPEALANQLIALASYRGVLPMGAPTSPVLSNLAALPLDQELQPFANLLDAAYTRFVDDLTFSFDTQPTPEVIAAIRQKVEKHHFILNETKIRLTAKKDNPEVTGLILKSPHPDVSGSFLKKLKKDIRLYRRLTTPGMMQRGIFHASVLDKLRRSIAGQVQFVKFIRGRVEKGLKRWEKVVG

SEQ ID NO: 1520 - protein, 333 aa, unidentified
  source 1..333: note = Related to JACJYR010000001.1; note = Lewinellaceae bacterium
MYTIYPPSLDLTLAQSDAKAARFLAIKHPGELASLLKADAAKLAKFVAKPYYQVFSIPKPGGARRIIHNPHSDLKTIQQTLNMYLQCAYYQLKPPCAYGFIPRPTDEPKPRNIFTNAMTHLGSEWVLNLDLKDYFHTVTSRHLTWVFRELFGFPEALANQLLALVSYRGVLPMGAPTSPVLSNLAALPLDADLQSFANLLDALYTRFVDDMTFSLEQQPTPEVIAALRQTVEKHQFTLNETKIRLTAKKDHPEVTGLLLKEPHPDVSEHFLKRLKKDIRLYQKLTERSMMERGIFHANVLDKLRRSIAGQVQFVKFIRGRVERELKVWEWAPG

SEQ ID NO: 1521 - protein, 332 aa, unidentified
  source 1..332: note = Related to JABWBR010000013.1; note = Saprospiraceae bacterium
MYGVIPQALELTLAQLDIKANKFRALRHPGDLAGLLKADAAQLAKFAAKPHYQVFHIPKPGGDRRTIHNPQAELKTIQQNLNVFLQAAYYGIKPPCAYGFIPRPTDEPRPRNIYTNALVHEGSEWVLNLDMKDYFHTVTSRHLNWIFKELFELPEALSLHLIGLCTYKGVLPMGAPTSPVLSNLAALPLDAELQGIAAQYNALYTRYVDDLTFSFDAEPDILFTGVVREAVERHGFMLNESKIKLTRKRDHPEITGLILKPPKPDVSKTFLKHLKKDIKLYRELISADMMHRGIFHASVLEKLKKSIDGQLQFLAFIRGKQDKAYLRWAALA

SEQ ID NO: 1522 - protein, 342 aa, unidentified
  source 1..342: note = Related to JAHBTU010000001.1; note = Saprospiraceae bacterium
MQYFRQSFKKLTSQQVLAKGQLLVKARTVKAIAALTMTEETWMREQAVNPQYYAFQAPKANGTFRLIENPHPKLKEFQRALADMLQGVYYGIRPRASYAFVPSTADETSPCNIYTNALRHCKSKWILQLDLKDFFHSISAHRIKELFMRIPFEYPEDTAQVVARLVTSKNRLPMGAPTSPVLSNLICFELDHLLDKLSRDHGWTYTRYADDMTFSGAKRFSNESVEIIRQQIEGNDFVLNYEKTQQHRIEDEPEVCGLALKEDGKPDLSNMFVKDLKADIKTYKQLTSDKMIAQEIFSAEALNRFRQHIEGELAFVRFIKGPNNGLYLKLRFMLADGMLGVE

SEQ ID NO: 1523 - protein, 342 aa, unidentified
  source 1..342: note = Related to JADJYG010000004.1; note = Saprospirales bacterium
MQYFRQPFKQLTAQQVLTKGQFLLKAQTVKAIGSLLLCEEAWMREQAANPQYYAFQAPKANGAFRLIENPHPKLKDCQRLLADLLQGVYYGIKPRASYAFIPSTADETSPSNIYTNALRHCQSKWVLQLDLKDFFHSISAQRIKEMFLAIPFNYPEDTALVMARLVTSKNRLPMGAPSSPVLSNLVCIDMDHQLDKLARDQGWTYTRYADDITFSGERRFTNETVELIRQQIEGNDFVLNYEKTALNRTEDEPEICGLAVKPGGKPDLSERFVKDLKTDIKIYKVLTSDKMIAQEVFSAEAINRFRQHIEGELSFVRFIKGPHHGLYLKLRFMLADGMMGVE

SEQ ID NO: 1524 - protein, 342 aa, unidentified
  source 1..342: note = Related to JACJYO010000002.1; note = Lewinellaceae bacterium
MLYFRQPSKKLTTQELLTKGQFLLKARTLKAIGALLMCDDSWIREQAASPQYYSFQAPKSSGAFRLIENPHPKLKECQRLLADLLQGVYYGIRPRSAYAFVPTTADESSPCNIYTNALRHCRSKWVLQLDLKDFFHSISAHRIKTMFCALPFNYPEDIAQVLAKLLTSKNRLPIGAPTSPVVSNLVCIELDHQLDKLARDYGWTYTRYADDITFSGEKRFKNETVEHVRQHIESNGFVLNFEKTAISRTQDEPEICGLAIRPEGKPDLSSRFIKDLKMDIRIYKTLSSDKMIAQDLFPAEAINRFRQHIEGELSFVRFIKGPNHGLYLKLRYMLADGLPSAE

SEQ ID NO: 1525 - protein, 345 aa, unidentified
  source 1..345: note = Related to RFHL01000354.1; note = Bacteroidetes bacterium
MSTPEYHQLTPATVKLSTHQVAARARTFLSQPHLGQMAHLLGLDKNQLVLLSKSPRYDCFFIPKPKGGKRLIEAPREPLKGTQQRLAKWLQCVYFVHRSEAAFGFMMVPVDDEDPRHIYTHAQRHREATWLLNIDLKDFFHQIPADRVLRLFQQAPFGLTPKAAACLTGLCTFQGRLPMGAPSSPVLSNFACRDLDAELEALARREGWVYTRYADDLTFSGPKPFTQAHWESISGLIGAAGFKMNTKKMRLRHRKDKPEVTGLILKKNPDVSPDFLAGIEADLLVLEALVSERMLLRDIFSRQPVKRLRRSIQGQINFLKAIRGKDHKSCRKLQNRLDQSVIKLK

SEQ ID NO: 1526 - protein, 340 aa, unidentified
  source 1..340: note = Related to JACJYN010000022.1; note = Lewinellaceae bacterium
MYLKISTQTGDKPSAYELQEKGRQFIAADTFPALAELLNIKEETLRAKMYNRKYTQFFVPKPNGEKRLIENPEDWLKSLQGQLNKHFQAAYYMVRPPCAYGALLAVADEVKPRNIYTNALRHIGQKWLLNVDIRRFFPSISYEKVYMTLRRPPFSFNPNAAKCLSMLTTFEQRLPTGAPTSPILSNIICLPLDSMLLQLSKKHGWAYTRFIDDLSFSGENKFKKKHLRAIQGILLSQGFLINEKKLKINRVRDKPEVTGLILKKKKPDISPSFLKRLKKYIHLYHIMTEQDMLNRQLFPAELIQRYRNFINGQLAFIKFIRGEGDKDYLRLFKRFQPRGY

SEQ ID NO: 1527 - protein, 344 aa, unidentified
  source 1..344: note = Related to JADHTI010000120.1; note = Bacteroidales bacterium
MKRGKTRGYQKNAANFLGIRTHMELANLLGISLSQLEVLINKPTYKEYTIRKKRHGVRIIYDPSPMLKAVLKQLSFFLNAVYSTLQNDCVYGFIPHLDKTGPQKNIRENAIKHVGKNHLFSLDLKDFFHSISTKRVFQIFQEEPFNFYKSIAVPLALLTTYRKSLPMGANTSPILSNFACLELDAELSRLASRSDLEYTRYADDLTFSSDLPFTDQLKSDIREIIQKHGFQINEKKVRERSKNRRQVVTGIKVNTKPNLDRKYIRNLRALLFDWRINGIYKAVIHHYNLDGIPTFQQITHFLSSTRGRISFVGFVRGKEDPIYQKLQVEFERLTTFHGHKELSG

SEQ ID NO: 1528 - protein, 362 aa, unidentified
  source 1..362: note = Related to JAJTDX010000011.1; note = Cryomorphaceae bacterium
MKDIQQTAIEFNSEISNGAFETTLVNKKQFTRTQKKALELLRIESDQDLILFSGVSANALLRNINAPVYSEKNIRKKNGGFRSLDIPEKSLKLLQEKLNDHLQSVYTYLRPQTTHGFVRYPNRKSCNILKNASVHTSKNYVLNMDLKDFFHSVNALRVKHVFQNSPFKFNEHLSNCLALLTTYKGRLPQGAPSSPVLSNFAALSLDYKICKLCKTYAIDYSRYADDLTFSSQSFMPEAFKNELNNLIEKEGFHVNADKTRLRSKNRKQLVTGVVVNHKANVDRTYVRKLRAMIFDSEINGLPSAAAKHLNLTTKPTTDHISFFVRRLNGMLAFMSQIRGKDDALTLKMKNRFLNVLSIPLNQ

SEQ ID NO: 1529 - protein, 371 aa, unidentified
  source 1..371: note = Related to DPFD01000024.1; note = Chitinophagaceae bacterium
MRSPAELLAFAKSNKKIIFRYLYGNSDRCPAVLKQLRKHELSALLFLTIESPAELCRFLHTPFFQLENIINHPSYERYTIRKKKGGHRQILEPEEQLKHIQKCLNYSLQAYYLCVKPNQVHGFVVNPHYLGTQCNIVENAKAHTGKKQVLNIDLKDFFPTITAKQVKHVFTSSFFNFSEELANAFTXLLTTYEGNLPIGAPTSPVISNFVCYKLDSDLIHYCKINHLTYTRYADDLTFSSDSDITLYKTLEIVNLIKKNHFEINEKKLRKQSCNRRQSVTGLTVNEMVNVDRRLLKKIRAMLHDLTRSGMLAAAQRHFKMAWESEAQLKMMFMYRLRGYINFVGQVRGKSDALFLRLKASYENVVRTTDLV

SEQ ID NO: 1530 - protein, 378 aa, unidentified
  source 1..378: note = Related to JMTN01000017.1; note = Pedobacter glucosidilyticus
MITIEEILTLSKTNKSELQKYFSGGSYHLDKSMESFQKHELNALYFLSIEEPKELTRFFKTSFFQLEEILNNPLYKNYTIKKKRGGARQICEPEKHLKSIQKRLNYFLQAYYLWIKPNEVHGFVVNPHYLGIHCNIVENAKVHVNKKDVLNIDLKDFFPSISAQQVKNIFSSNYFNFNEQISTALTLLTTYEGKLPIGAPTSPVISNFICHQLDNDLITFCKQNNLTFTRYADDLTFSSDNTISDDNTLNIFDLIKKNQFEINEKKVRLKRSHRKQTVTGLTVNSKVNVDRKLLKKIRAMLHDLVKNGIETSVKKHFNIGNIEQRHKVIFINRLKGYINFVGQVRGKNDSLYLKQKSTFNNILISSKGKSLEIDMKQA

SEQ ID NO: 1531 - protein, 434 aa, Flavobacterium sp.
  source 1..434: note = Related to VFPJ01000001.1; note = Flavobacterium branchiophilum
MSNIYNIAVVFLQPKSSCKQENIAIYCDAHCVPLLINSKKTKDNLQRLFLNKNRMTVPEIQQLVQRHKKEFKKYFSDDFYLTNLALQDFKKHELNALCLLSIEEPFELAKFLTTPIYHLEELLNNPPYKHFTIQKKRGGTRQIFAPENSLKGIQKRLNYFLQAYYLWLKPHHVHGFVINPHYLGTSCNIVENAKVHVSKNFVLNIDLKDFFHSITANQVKDIFSSHFFNFSEPIAIALTLLTTYKGKLPIGAPTSPVLSNFICHELDDDLLRFSAENDLTFTRYADDLTFSSNFKISHDITLDIINLIKKNFFEINSKKIHLKTQNRKQIVTGLTVNQKVNVDKKLLKKIRAMLHDVSINGIEKAAQRHFKLNKIDKRYSSQFMNRLEGYINFVGQVRGKGDTLVLKFKEEFKLIFEIEIHKESNKKLDENNIK

SEQ ID NO: 1532 - protein, 376 aa, unidentified
  source 1..376: note = Related to JAFDYI010000013.1; note = Bacteroidetes bacterium
MPTIEEIVTFSKAHKSNIQKYFNGGHPYSTLPKLVQKIKKHERNALFLLSTETPTELCTFLKTPFFQLEEIINNPIYKQYEIKKKRGGNRQIYSPEKKLKAIQRRLNYFLQAYYLWIRPNEVFGFVVNPHYQGTFCNIVENAKPHTGKKHILNMDLKDFFPSISASRIKSVFASSYFNFSEQIATALALLTTYEGKLPIGAPTSPVISNFVCFQLDADLKNFCETTGLQFTRYADDLTFSSNLLISNETVLDIINLIKKNGFEINEKKLRLKSSNRKQTVTGLTVNERVNIDRKLLKKVRAMLHDLTTNGIDVAAKRHFNWSGETDAKQRSKFIHRLEGYIHFVGQVRGKNDAVYTKLKQPLDKFSATQQRAEQMW

SEQ ID NO: 1533 - protein, 372 aa, unidentified
  source 1..372: note = Related to JADLGP010000058.1; note = Chitinophagaceae bacterium
MPIVKEILTFSKDHKSKIQKYFNGGYLYSKTPKLLQEKKKHELNALFLHTIETPAELCKFLNTSFFELEELINNPVYKNYTIRKKKGGERQIYSPEKKLKAIQRRLNYFLQAYYLCIKPNEVFGFVVNPHYLGNYCNIAENAKPHTGKKHLLNIDLKDFFPSISASRIKSVFTSSYFNFSEQIATALTLLTTYEGKLPIGTPTSPVISNFVCFQLDADLKNFCKTNGLQFTRYADDLTFSSDTLISIDIVLDIINLIKKNSFEINEKKLRLKSSNRKQTVTGLTVNEKVNVDRKLLKKIRAMLHDLTTNGIDIATKRHFNLNGEIDTKHRGKFINRLEGYINFVGQVRGKNDTVYIKLKQPFDKVFSNTATC

SEQ ID NO: 1534 - protein, 366 aa, unidentified
  source 1..366: note = Related to JAGOLH010000034.1; note = Bacteroidales bacterium
MTNTSTIIEFARRNKGVLQNHLADGSLRLPVALEILEKHQLNALYLLSIETPIDLCSFFKSGLLQLESIINNPQYTHYTIKKKRGGNRHIYAPNKKLKAIQKRLNYFLQAYYLMIKPEEVHGFVVNPHYLGSHCNIVENAKAHTGKKHLLNIDLKDFFPRITAKQVLDLFSSPVFGYSDQVATAITLLCTYEGRLPAGAPSSPVISNFICLNLDADLKAFCATHNLEYTRYADDLTFSSNAAIETNTLLDIISLIQKNNFEINSNKLRIRPANRRQIVTGLTVNEKVNVNRKMLKKIRAMLHDLSTNGVETATRKHFKISGKAKPFQEGKFLQRLEGYINFIGQVRGKTDALYIGYKEQFEQAFEN

SEQ ID NO: 1535 - protein, 356 aa, unidentified
  source 1..356: note = Related to JAGNBV010000013.1; note = Bacteroidales bacterium
MIQKYHFEGLYLNNIVLQQFTRHELNALFILTVKKPLELVKIFNVSFCMLEEQINHPAYRYFTLPKKNGGSRDIYAPSVKLKSIQQCLNYYFQAYYLFIKPEEVHGFVINPHYLGKRCNIAENAKAHVKKKYVLNIDLQDFFPNIKAKRVKETFLSPVFNFNEQIATALTLLTTYKGLLPAGAPTSPVISNFICLKLDKELKYFSELNDLTYTRYADDLTFSSNHEIPGDMILDIICIIHRNDFRINEKKLRLKPSNRKQTVTGITVNQKVNVDRKLLKKTRAMIHDLGTHGLYAATSRHFKVAEDKNSSLNAKFIRRLQGYINFIGQVRGRDDAVYLKLKTTYLSLFSFQTEDFC

SEQ ID NO: 1536 - protein, 371 aa, unidentified
  source 1..371: note = Related to JACPOC010000038.1; note = Bacteroidetes bacterium
MNSQEEILSILIPAKDKIWNSFYGIPIRKKSKQLEQLKKHELNALLLLTINKPSRLAQFLSTPFFELEGIINNPNYRHYTIPKKKGGMREIYAPANSLKKIQRRLNYFLQAYYLCIKPKEVHGFVVNPAYLGKKCNIVANARLHIGKSHVLNIDVKDFFPSISAKQVKGIFSSHLFNFNDQISNALTLLTTFEGRLPAGAPTSPVISNFVCTKLDSDLIEFCSLNSLSYSRYADDLTFSSNNVIDNDIILDLINIINANNFKINDKKLRLKASNRKQTVTGLTVNEKVNVDRKLLKKIRAMLHDLTTNGIDKAAKHHFNINKDIDEKLRGKFIYRLEGYINFVGQVRGKKDLLYVGLKSKFDNEFKVIPLS

SEQ ID NO: 1537 - protein, 368 aa, unidentified
  source 1..368: note = Related to JADKCP010000006.1; note = Bacteroidetes bacterium
MNSPEELIYLARNKKWLVWKDNFLELAGKDLALHKFKKYELVALRLLSIETASNLVKLASVSLDTLQNNLNHPEYKHYQTKKKKGGSRLINAPTGELKKIQKRLNNYLQAYYLCLKPKEVHGFVLLAPLIQQRSNIVANAEVHVGKKFVLNLDLKDFFPSITAKRVKAFFMSPLFNYNEQIANALTLLCTFQGKLPIGAPTSPVISNFICLKLDADLQNFCAANELNYSRYADDLSFSSNSSISNDTILDLINLITKNDFTVNYKKLRLKSSNKRQTVTGITVNEKVNVNRVLLKKIRAMLHDLTSNGLEVATHKHFKFNGFVDQKYKERFLFRLKGYINFIGQVRGKEDFIFLKFRNELKMILIEIT

SEQ ID NO: 1538 - protein, 386 aa, unidentified
  source 1..386: note = Related to JAFDYB010000054.1; note = Bacteroidetes bacterium
MKNLPDISIALKNVRENFNSYFNWNSLPQNKSEKYKLHEINALILLSIKIPTHLCLALSNSISGIEVLINNPVYTELKVKKKSGEFRQIYAPNYELKRVQKRLNYFLQGYYLCIKPNEVNGFVINPFPFDAKCNIAENAKYHVNKKHVLNIDIKNFFPSISAYRVKKIFTSELFNFNEQVATALTLLCTYKGVLPIGAPTSPVISNFICFQLDRDLKNFCNEKNISYSRYADDLTFSSNEKITDEIISEITLLINKYGFELNKNKFRLRLSNRKQVVTGLVVNEKVNIDRKLLKKIRAMLHDMSRNGIEVAAKRHFKSENPPIKTNSLTNKNTAIFESEQSDNEINIAFACRFKKIVIGYINFVGQIRGTDDRLYNSFKAAYKNSW

SEQ ID NO: 1539 - protein, 392 aa, unidentified
  source 1..392: note = Related to JAIBCH010000012.1; note = Saprospiraceae bacterium
MMTVEEILKLSKTSKSKLQKYFSGGSYHLGKSMENFKKHELNALYFLSIDKPAELTRFLKTSFFQLEEILNNPTYKNYTIKKKRGGTRQIFAPEKHLKSIQKRLNYFLQAYYLWIKPNEVHGFVVNPHYLGTHCNIVENAKVHVNKKFVLNIDLKDFFPSISARQVKEIFSSTCFNFNEQISTALALLTTYEGKLPIGAPSSPVISNFVCLELDLALKEFCQKINSEYFYNDNNKLLHKKKQFVFFETYDIAYSRYADDITFSSNIPISTEMLSNIISIIHQYGFELNEKKLRFKLSNRKQTVTGLTVNEKVNIDRKLLKKIRAMLHDLTTNGIEQSVQRHFKVTNIEQRHKATFINRLEGYINFVGQVRGKSDSLYVKQKTAFDNVFEQRK

SEQ ID NO: 1540 - protein, 333 aa, unidentified
  source 1..333: note = Related to JADJOU010000017.1; note = Bacteroidetes bacterium
MKHEKIINFVESNLEIIRSNINSREIIFGILQGPQHKFQRNAAVFLSITHAYDLCNFLQLSYSVLQNQINNPVYKQFEIKKKSGGMRSIEEPNDILKGIQKRLNYYLQAYYLWIKPAEVHGFIIRPQQYEHRYNIVENARAHIGKKHVLNLDIKDFFSSISVAQIFELFQSDYFRFNENMCVALTLLVTHQKHLPTGAPTSPVLSNFICLGLDRDLREFAEANQLTYTRYADDLTFSSDVHIPEDVVLDVMNILKKHAFDINPKKIRMSSSFRKQVVTGITVNDKVNVDRKLLKKVRAMLHDFAENGLKEATSKHFKISVDEDSIYCRVLSID

SEQ ID NO: 1541 - protein, 362 aa, unidentified
  source 1..362: note = Related to REAG01000285.1; note = Cytophagales bacterium
MLTPFRFASLVFKIRYAPPNFVKKMIRIVNKRYHFLKIKNASDLSKLLFVSFENLQIEINQPTYKTFEISKKSGGKRIIHQPLDNTLRIQNELLSIFQNYYTKIKPNHVHGFVSYSKKDGKKSNILENAKPHVGKKHLLNIDLKNFFPSITAKKVKQLFESDFFKFNTNIATSLALLTTFEGKLTIGSPTSPVISNFICYPMDIILAEFCKKNNLTFTRYADDLSFSSYDYIKNDTLLDIINIITENGFDVNYKKLRFANSNAKQTVTGITVNQKPNVDRTFLKKIRAILYDINQNGLEMAAFKHYSISKKGENTLSFLNVLEGYILFVRQIRGVNDTYYQCFNNKLKEIRLKNLEIENKKI

SEQ ID NO: 1542 - protein, 364 aa, unidentified
  source 1..364: note = Related to JADKDL010000038.1; note = Bacteroidales bacterium
MNNIKNKAKQWRNKYVSTETKRFTFNKNERKRYTFNALHLLSLENETQLCRMLDISLDTLSEVINNPVYQTFEIPKKKGGKRTIDAPEDILKDIQRKLNYFLNAYYLMINPEVVFGFVIQPHELGKICAIAENAKPHVGKRQVLNIDIKDFFPSIKTTHVKALFQSELFQFDEHLASLLALLTTYKGTLPIGAPTSPAVANFICYQLDKELQEFCKENDLSFSRYADDLTFSSDTKFHSDTILDIVSMINKRGFSINEKKFRIQSANKKQTVTGLVVNAKVNVDRKFIRKLRAIMHDIRLNGVKIAAQHHFNLKQEPDEKLLAYFIHRLEGLINFVGQVRGNHDKIYTRFKYEFDEIFTTSLNV

SEQ ID NO: 1543 - protein, 368 aa, unidentified
  source 1..368: note = Related to JADKCJ010000003.1; note = Bacteroidetes bacterium
MNNRKEMARRWRKKYVSADTNRFKFNKKARQKHTFNALHLLSLENENQLCRMLDIQLGSLSNVINNPIYQSFEIPKKKGGKRNIDAPDDELKNIQQKLNFFLNAYYLMIKPNAVFGFVIRPSEYGKICAIAQNAKQHVGKYQVLNVDIKDFFPSINAAQVRALFQSEIFQYDEHLATLLALLTTYKGKLPIGAPSSPAISNFICQQLDDELQLLCNAKEIAYTRYADDLTFSSSVKIDTDFILDIVSIINKHHFRINEKKFRIQSENRKQTVTGLVVNQKVNIDRKYIRNLRAILHDIRLNGVEEAAKNHFKLKQRPNDTTINYFINRLGGLINFVGQVRGNQDFIYYRFKGTFDELFASRLKQPKYF

SEQ ID NO: 1544 - protein, 352 aa, unidentified
  source 1..352: note = Related to JADLAH010000132.1; note = Chitinophagales bacterium
ADTGRFFFRRDAPQRYPFNGLHLLSVEHESQFCKMLDVTLKAMSALIHHPAYTTFEISKKKGGKRTIEAPDEDLKEVQRRLNYYLNAYYLMIKPASVFGFVIQPKENGRYCAIAENARPHVGKKQVLNIDIKDFFPAIKAGRVKALFTSEIFGYNEHLATLLALLVTHKGALPVGAPTSPAIANFICYPLDMELMQFCSDHGLTYTRYADDLTFSAEETIDTDDILDIVSIINSHHFAINEKKFRIRSAHQQQMVTGVVVNRKVNIDRRLIRRVRAILHDIQQNGLIAATMRHFRIDEMPDDAAISYFSRRTVGLVNFIGQVKGPKDPVYLRYKRILDDLFPSSVSSPKTYF

SEQ ID NO: 1545 - protein, 359 aa, Flavobacterium sp.
  source 1..359: note = Related to NZ_CP089095.1
MTLINKIHTRLAEYNSYYYGPFEAIEFRFEQTFFVSKLLSLIEISDLCLLLKTRLFDIEHVINQPQYETFQIPKKRGGSRLIQTPESQLMFIQSRLNFYLQNYYHLIRPECVHGFVINPNKNEKKCNIVENAKIHVQQKYVLNLDLKDFFPSIQAYRVKELFLSDYFRYTEHIATALTLLVTYDGKLPIGAPTSPVISNFICLELDEALSVYCKKNEIRYSRYADDLTFSSNHFISKTIITDLEYIINSFQFKLNPKKTRIKTKNRKQTVTGLVVNEKVNVDRKIIKMVRAMLHDTLQNGISKAAKKHFKSINEIRNTSEAYFLNRLEGYINFIAQVRGNDDSIVIKFRYYYKMIFQLA

SEQ ID NO: 1546 - protein, 359 aa, unidentified
  source 1..359: note = Related to AAXX01000006.1; note = Flavobacteria bacterium BAL38
MILINKIHARLEEYNSYYYGPFEAIDFRFDQTFFVSKLLSVVKIADLSLLFKTRLFDIENLINHPQYETFQIPKKRGGNRLIQTPESQLMYIQSRLNFYLQNYYHLVRPEGVHGFVINPNKKEKVCNIFENAKIHVQQKYVLNVDLKDFFPSIKAYRVKELFLSDYFRFNEQIATALTLLVTYEGKLPIGSPTSPVISNFICLELDSALSAYCMKNEIRYSRYADDLTFSSNQSISKAQYTELKEIIEQNQFELNVKKTRLKSNNRKQTVTGLVVNEKVNVDRKIIKMVRAMLHDTLQKGISKAAKNHFKSKNEIRNTSETYFLNRLEGYINFIAQVRGHDDPIVLKFKYHYKMIFQLA

SEQ ID NO: 1547 - protein, 363 aa, Flavobacterium sp.
  source 1..363: note = Related to NZ_QLSZ01000003.1; note = Flavobacterium aciduliphilum
MNNPLKTIDKIHTRLEEYNAYYYGYQGDVVFKFNQTFFVQQLLSVVKLSDLKVLLKLNFSWLGPLINAPHYDSFSIPKKSGGMRKIEAPEVLLRATQARFNFYLQHYYHLVRPEGVFGFVINPNKKESFCNIVENAKLHVHKKYVLNLDLEDFFSSIKAYRVKALFQSEYFRYTEEVANALALLVTYNGTLPTGAPTSPVISNFICLQLDAMLLAYCNENALHYSRYADDLTFSSDREITTLHLEELSKIIHSNHFTINSKKTRLRLHHRKQTVTGLIVNEKVNVDRKTIKMVRAMLYDALQNGVSKAAKKHFSITKETSQMSDTYFLNRLEGYINFIAQVRGKEDAMVQKFKEEFKMVHLLS

SEQ ID NO: 1548 - protein, 374 aa, Flavobacterium sp.
  source 1..374: note = Related to NZ_CP037933.1; note = Flavobacterium nackdongense
MKHKLLLDKIHSRIEDYNRYFYSSENDVIFRFEQKFFVTKLLSIVTIPDLKILFKVHLSYIEKVINEPNYTSFLIPKKNGGNRLIQSPESDLKKIQMKLNFYLQQYYHWIRPDGIYGFVINPNKKEKICNIVENAKVHTNQKYVLNLDLKDFFPSIKAYRVKELFLSEYFKFSDCVATALALLTTYEGKLPIGAPTSPVLSNFICLELDADLVAFCNKNQINFSRYADDLTFSSNNEITDETINIISEIIKKNQFSINPKKTRLKSSNRKQTVTGLVVNKKVNVDRKTIKMVRAMLYDASNNGITIAAIKHLKLDRNANVVDVSYFLNRLDGYINFISQVKGDDDLLVLKFKSEFKNLAKMKTKHIKSNSYNNS

SEQ ID NO: 1549 - protein, 400 aa, unidentified
  source 1..400: note = Related to JADJXZ010000007.1; note = Crocinitomicaceae bacterium
MVTAFTCFCVAHCVPLLKADEIQIISNGSFFMLTSDELISTARRYKRWMKLNYRLRYSMRPAVLNHLSKNEFESARLLMIENSHDMICFFDQIPKSYLEKILNEPNYTEYALNKKKGGQRKIQIPEPVLKRMQKKINAALQAYYLLIGYENSFGFVKKTSHAAFTSGIATNASKHIGQQVVLNLDLKDFFESVSAARIFTLFKSPLFKFNEDIAAALALLCTWQKRLPTGAPTSPILSNFICLELDQNLHEFSLKNKLNYSRYADDLTFSTNERITEEMKIELKEIICRNQFEINAKKWRIRTQNQKQLVTGLVVNEKVNVDRKFIRKIRAMIHDLKLNGLENATGNHFRKSTKNNHELQFRFINKLHGYIDFIGQVRGREDTIYKKFKWELVPFGMADS

SEQ ID NO: 1550 - protein, 364 aa, unidentified
  source 1..364: note = Related to JADJEU010000021.1; note = Crocinitomicaceae bacterium
MTKTNDIIQYARANKKWAQHRKVSIANGTAGIKDVIQQREMAALHFLCMDSAHDLTRLFKRDISFVEYCMNYPVYVEHLIAKKTGSKRIILAPDKNLKRMQRGLNYYLQCYYNLIKPDVVFGFVKTIRRQKNPSAIVQNASMHQKKKYLLNLDLENFFPSISAKRILTLFSGPHFQFNSEIATALALLTTYQGKVPVGAPTSPILSNFICLEMDEQLIELASRHQLTYSRYADDLTFSSNEFITPEILKEIRSVIEQNQFKLNEKKLRFRNAGKQQIVTGLTVNEKVNVDRKFLKKVRAMAHDLEKNGLEDAAQKHFRRNSPSEEMNATFLNTLAGYVNFIGQVRGKEDGVYLRYKRIFSPIPS

SEQ ID NO: 1551 - protein, 352 aa, unidentified
  source 1..352: note = Related to JAIOZE010000006.1; note = Crocinitomicaceae bacterium
MKLKINSTMKWESILEKRDSHAANIRRLICTSNGVIPSFSHSLREGRVLTFLSVSNWIELSCFLQLSPIKLEQVINCPNYRQFTIPKKKGAPRLIFQPDPDLMKIQRKLNRYLQDVYSFQLPECVHGFVCKSNQVSRSIVTNAQPHINKQRVLSIDLENYFPSISAKRIKVLFCSWGFNEEIATALTLLCTFKGGLPAGAPSSPVLANLCTMELDSKLIEFSKNNELTYTRYADDLTFSSNDYILDDTILRVLEIIKSTDFSINMKKNRCMGRNSKQKITGIVVNEKLTADRKVKKKLRAMLHDLAKNGLEIATQRHYSIVGQPTDLEQNRFLKHVIGVQSFVNMVNNHRFS

SEQ ID NO: 1552 - protein, 342 aa, unidentified
  source 1..342: note = Related to JADJDM010000008.1; note = Bacteroidetes bacterium
MDKIEVNKIVNASKLNQFRTIELLDKLSCFLKVNTEVFSNRLNYPVYTTNRIPKKKGGWRELLVPETELMRIQSKLNVCLQLYFNKIKPDCVHGFLMNERTGEELRSIVSNAQAHVGKSFLLNIDLKNFFPSISAKRINELLHDKLSLFPNEKMANAVTLLCTYKGFLPTGAPTSPVLSNIVCLPLDYELSTYCENNQITYTRYADDLSFSSNRYFSEKCISEIRQIIKEQQFAINEKKFRINSRKSQQRVTGLVVNNKVNVDRTYIKTIRACLHNWKLNGLEHATAKHYFVIAPSTEEQAQFSNKLKGQIEFIGMVRGKKDEIYIKYKGEFKYLIGSSVFP

SEQ ID NO: 1553 - protein, 300 aa, unidentified
  source 1..300: note = Related to JADJDM010000011.1; note = Bacteroidetes bacterium
MVNPTIFEDRLNSPVYTTNRIPKKKGGWRELLVPEKELKYIQKNLNFYLQLYYNDIKPDCVHGFLMNERNGDKTRGIVSNAQAHTGKAFLLNIDLKDFFPSISARRIKHQLFNELDVFANENIANAITLLCTYQGYLPTGAPTSPVISNIICLQLDKSLMAFCKERNITYTRYADDLSFSSDNYFSDECINELKNLIEQHHFKINEKKFRINSSKSKQTVTGLVVNTKVNVDRKYIRNIRACIYNWRMNGLEFATAKHYQVISPDMEKQTEFANKLKGQVEFVGMVRGRKMKFIRDTEEI

SEQ ID NO: 1554 - protein, 397 aa, unidentified
  source 1..397: note = Related to SSGS01000121.1; note = Crocinitomicaceae bacterium
MHAFSTSFHTHAFHLKISTTALFLLLTMTHSDNKRTEKIREAFFAQIQSEAKEERKQNRLKAIQSREKFVGRFLRMQLAGDLCKLVKEDYNSLNEMINRPNYHSFSIPKKRGGKREITAPDKRLLRVQKKLNRYLQFVYLGVRPTAVHGFVMQVSDGSVQANIVENAKVHVGKRAVLSIDLVDFFPSISAKKVKDLLMGSPFNFNEHIAVPLALLMTAERKLPQGAPTSPVISNFICLQLDETLRIWALNHNANYTRYADDLTFSADLAFSEEQQADLRKLIEAYGFVINVKKLRQRLKNRKQTVTGLTVNTKVNVDRRYLKRIRAMLHDLNTNGIEEATIRHFKLVRRASPEQRLLFVNRLEGSIAFIGQVRGQSDPIYQRMRKAFFDMSSSKKEK

SEQ ID NO: 1555 - protein, 370 aa, unidentified
  source 1..370: note = Related to JAIOZF010000070.1; note = Crocinitomicaceae bacterium
MNKPANEFQPSISNGNFKQTLAERRIEVKKNRIKNFQMRENYSNRFLRMQCATDLCLLLNEPFYNLEFLINKPNYNTFSIPKKSGGKRDISAPEKNLLRVQKKLNRYLQFIYLRLRPTNVHGFVLQVGNHEIQANIVENAKHHVGKKAVLNIDLEDFFPSITARKVKELLKSAPFQFNEDLAIAIGLLTTHKGRMPQGAPTSPVISNFICLPLDHAMQQWSIKNKVNYSRYADDLTFSADIVFSPSQILELRAIIESFGFRLNEKKLRQRLNNRKQSVTGITVNTKVNVNRRLLKLVRAMLHDLRVNGIETATRNHFVSPENPYFDRKKFFLNRLEGSIAFIGQVRGLDDPLYTKMKTEFYLLLDSKNTD

SEQ ID NO: 1556 - protein, 359 aa, unidentified
  source 1..359: note = Related to JAJTDQ010000129.1; note = Cryomorphaceae bacterium
MTVYEFVEKQRPELKQSLRTQTMKIKSSPELTKHTISAGLLLSLQNAQDVCAYFQLPRAVLEQLINSPKYRSFSIAKKRGGKRLIQAPELGLMKVQRILNHGLQSLYACNPNPSVFGFVINDEQANPASPIVQNAAPHVGKAYVLNIDLKDFFPSIRAHRVKELFMSQQFRFNEQTATVLTLLTTYQGRLPQGAPTSPIITNFICAKMDAEMRKIANDKGWTYTRYADDLTFSADLFFDAEAVAEIRSMIVSNHFVINEKKIRQKGKGRRKEVTGIVVNTKPNVKRSYIRQVRAMLHDLEKNGRTIASANHFKNSPVVRENDHSVFINRLRGYISFIGQVRGKEDPIFLRFQEKMKALT

SEQ ID NO: 1557 - protein, 373 aa, unidentified
  source 1..373: note = Related to VEQH01000117.1; note = Flavobacteriales bacterium
MNQTELLAYKATYNSVFRQYLNSPRKTFKPPFLLSKSIQYALYFLAIERPLDMCAFFKIHHQELEDIINQPTYVTHFLLKKKQGLRTIKAPIGTLKLLQQKLNRHLQGVYLNLKPTCAKGFVINPPGSSLKANIVENALPHVAKKYVLNMDIRDFFTSISDKQIYHLFKSSPFDFSPQIAAAFTYLVTVDDCLPQGAPTSPILSNFACRSLDEKLMEFANHHQLNYTRYADDLTFSSDIPFTKEQIATIKKTLREEGFEPNEKKFRLRTSNKKQLVTGLVVNEKVNVDRKMLKRVRAILHDLRLNGASKAAQNFFKSESKPNETDILLFFKKLRGMIDFIGQVRGKEDVLFVKMRQDYSSSFAIEEDRMVYYR

SEQ ID NO: 1558 - protein, 383 aa, unidentified
  source 1..383: note = Related to JAFLBV010000001.1; note = Ignavibacteria bacterium
MLTAILDGIRKNYTKATFYTYRQIVVNKKKGGKRIISIPGLLLRKSQRSLLPFFQQLRTHSCAHGFVVGKSIITHASLHLAKESILTLDIQDFFGSITSEHLEKIFRSHGVQKSEDLELLIKLTTINGKLPQGAPTSPILSNAVVFEMDFELNEWATKNNLIYSRYADDMVFSSETRTIEKTCIDEVSQITQKFGFKLNNSKSRIMPRGKRQVVTGLVVNTKLNVKREYLRNTSAILHNISNNPFSALSQVSRGSVFATYQSYEKEYLSRNLSLSSFHYLIRNQKQQQKLINPTKIRLHRKSHFSNYPIFRLLLLLQGVNGRISFISSVIGENQISVQKLRNQFKEIEKELFGNYSINWSTNTTRLYKIILRECPQLRTRIKG

SEQ ID NO: 1559 - protein, 319 aa, unidentified
  source 1..319: note = Related to PCUD01000174.1; note = Ignavibacteriales bacterium CG18_big_fil_WC_8_21_14_2_50_31_20
MDYFYKKIKRLILAWEDGTPNSDNIPSNYDYSRFKIIKKDGGHRIIYSPYGHLKKIQRGISELLYKNVELHGASHGYTINKSIITNAKQHLKKNCIINIDLENFFQTINTVMLNKSLKLFFPDITDELLIKIIAICSFEGSLPQGAPTSPILSNLVCYSLDLKLSELAISHNLDYTRFADDMTFSTNNKIVELQLKNDINGIIQSEGFRLNEKKYRVLKKRHRQSVTGITVNEKINVTRKYIRGIRAALYNWETYGKKEASRRYFESAKTKICRSHNFEVSLRGKIEFVGNVRGKEDEIYSKFKNKFEIINLFEKINQF

SEQ ID NO: 1560 - protein, 630 aa, unidentified
  source 1..630: note = Related to NZ_VYVA01000005.1; note = Flavicella marina
MNINTGILFFVMKKFNYHKIKYKNTELEEFISKELNSHLIKNILKHKSSFYKSFTVLKKNGAKRRIDQPHYKLMDIQKKIANYLLVKRKKNSSSHGFEYYRSIVTNAEKHINKNIVLNLDFKEFFKNISKSQVLSVLRNSFDITNESAYLLTELVTFNNCLPQGAPSSPVISNYVCNNLDNDLKTYCKEYNIIYTRYADDLTFSFNFKKLPRQIVDEIISIIVKHGFKLNDQKFRYFHKNSRQLVTGIVVNDHVNIKREFYKKVRAILHNWKTKGYVVTKQKFDLEYPNKNFRKTLLGWVNYIGYVRGKDNPMYLTLSSSLELLLRTKYPKSEFKTDEKYCDKCKTGILIETKEGGVKNNFKKSNDASYFFECNNEECNFSENIDSKYFFLKSKAYLKNNNLEKVKELLEKSIELDSNNYKAYNNLGVISYNKKEYKVSVEHYSNSIKAYRERAKPYYCRGRAYANLQQFENAILDYLKYIQLSTRKDVLNSVYFHLGQAYFKTHKYEEALNYVNLHIERFEITKAVIALKTACLNNLNNLNKRFELKIYKDASKIYDVIEKNENIWFEYQTIDSDESVKVALVSLIPKGILFNKEINSLSVKGYNLINKKEETYLIDNIANLINVPKEI

SEQ ID NO: 1561 - protein, 442 aa, unidentified
  source 1..442: note = Related to DPRR01000040.1; note = Ignavibacteriales bacterium
MGSSFFNFMSRKFTISQFRKLNNDFLDVESPNKLAEILGIKTSVLIKNIKYQRYTSFTSIHKGKKRIVAEPNFELKQIQRRLNNYLQAIYYFNKHENVHGFVKCVTNEKIRYSILSNALPHVGKSYVINADIFRFFPSITGKMVKDVFLGEPFFFEDNLASALALLCIQKNWLPTGAPTSPVISNLVCMELDEELNVLANKNNYSYTRYADDMTFSGENKPDEKFKDELTSILESFGFKLHKKKYRVLTKHTRQTVTGIVVNEKLNVKREYKRNLRALHHDIKVNGIENALLKNRSVQILTIQGIESFKNSTLSKSLFVDKVAEYSKAISNAGNIDGEVEYLLFADLELDGFIIDVFDNHKQAVKKMHELWHFIASLWTLSHNDIVGKISAISQKRYRLTEETRYETIGLEGCSNGFYTVGVVKLNNKFTQEEYEKKRGRIR

SEQ ID NO: 1562 - protein, 443 aa, unidentified
  source 1..443: note = Related to JAGRNG010001065.1; note = Leptospiraceae bacterium
MAKHYLRELQHIYNLKILSQYLGKDEYELQNLLYRKTYSSFLIPRKNGKHRSINAPSDELKYVLQNLNRFLSAIYNEMQGQEHPAHGFTLGKGILSNAKIHSGKAFVLNLDLKDFFPSISRNRIKEVFSSEPFMLKTEIADYLSELVTYYDTLPQGSPASPIISNLVCWNLDKTLSDFAKKNLLVYTRYADDLSFSSNQKIDTEIIKQIEDYIQKEGFQLNTDKTRIQNRTERQVVTGVTVNVKPNVSRKFIRRIRAILHSWETLGYEEADTIFQSSYKRRKGVFKAPSLKYYLIGNIAYIGHIRGQDDSIYNNFCIKLFRLSDRKVFKGQIERFIQSLQSDIDNQQFSETNLENRIFNLAKKAFEPHQIRYNNILRKYYTLRKKTKINITKGKNYSSLFLASLETSPEFKELLYESGRFGDKEYYSQYIKEAKRLIRNTNLI

SEQ ID NO: 1563 - protein, 342 aa, unidentified
  source 1..342: note = Related to JAGPCI010000303.1; note = Bacteroidia bacterium
MAIKTIAQLCSMLQVTAKEFQHILALPEYVSYSIPKKSGGIRAVEAPQGLLRELQGRLAKYMQPFYTQHKLPCVHGFVKAFNNEPKYGVLTNAKPHLNKPCVLNMDIKNFFDSISAKHVKQALQQYPFMVSDEVSTAIALLCTHNKKLPTGVTTSPLLSNIVFYRVDKALIDLVNEINSTKCKDDVAIYYTRYADDLTFSGEVKLVNEIQARIVEILASYGFEVNTKKTRLQKTYAAQWVTGIKVNNKPNVSRLYVRNLRATIHNLQNNTATDAVKKHLGTTPNKEIDLSDVHTMLASIRSKIAWVGLVRGKTDDVYLKLKRNFKEAEQKILLHEVPEKKRN

SEQ ID NO: 1564 - protein, 333 aa, unidentified
  source 1..333: note = Related to JAJTFA010000003.1; note = Sphingobacteriales bacterium
MRSLEELLKILAISSELLQQLLAAPEYTIYHISKKSGGTRTIQAPQGLLRQTQVLLAKYLQTVYSRHHLPCIHGFVPSAGLLKYGVLSNAVPHLNKPFVLNMDIKNFFESITAKKVKKSLCEFPYYFNEEVATAIALLCTYQKQLPTGAPTSPVLSNMVFYIPDVALLQWITDVNETKQIDETGISYTRYADDLTFSGSANLVLSLQARIISFFATEGFEINAKKTRAQTPHGPQWVTGIKVNERLNISRYYIRNLRAVIHQMRVHAAEAVVCRYLKLPATTQINTAHVKKMLSSVQSKIAWVGMVRGKADPIYLRLQTQFNVAREVMLVKES

SEQ ID NO: 1565 - protein, 348 aa, Flavobacterium sp.
  source 1..348: note = Related to NKJD01000090.1
MNTIILDNNNHWDSLLFINANTLDKMAFSLSCHLSFLQRQVESPKYFQFKVSKKSGGFREINAPNAELKYLQRNLSWKFNKIYSSPDGVHGFVKGTFLETRHIVSNAKLHIGKKWVWNLDIESFFSSITTQMVINRLMEAPFNFDENKAKYISLLIIYKRQLPMGSPCSPVVSNLVCENMDAQINQWVANQNKFQPEINLVYSRYADDITFSTDLAISDEHKLEIYDILNQYGFEVNRKKERIQSNKQSQWVTGIKINEKPNVDRSYIRNIRAALHQIRAKGLQEAATNFFNLKELANTTEIDRFLRILQGRISHVGFVKGKDDSAYLKYWRELGEVMAPIQKEPLIY

SEQ ID NO: 1566 - protein, 333 aa, unidentified
  source 1..333: note = Related to JAFDXR010000008.1; note = Bacteroidetes bacterium
MKSKYKFLDSQLAIEDISSILNIRFTELIKNIEKPNYTTFRIPKKSGGHRVVFAPCSDLMKIHNIVNNKLRSTYHMMQPKVVHGFTYKTAKEKYLDIGIKANAKMHLNKKCILNIDIKDFFPSISISRVRAMFECPPFNYDHNLATGLALLFCYKGQLPAGAPTSPLISNFYCLKLDADVLELSNSENITYSRYADDLTFSSNAIIDTKFVVKVSEILKNFGFEINRKKLRKASNFQAQYVTGIKVNQTLNLNRTYYRNLRAVLHSIEQIGVSASMLKYKGKKRYILGEEHKFLSSVRGRIEYLGYIRGNNDVLYKELKNKFNALIDRAPINY

SEQ ID NO: 1567 - protein, 330 aa, unidentified
  source 1..330: note = Related to RGVD01000053.1; note = Bacteroidetes bacterium
MKEITKNRFLSLQFVDELSMILGMSLGDFTSAIENANYKSFEIPKKSGGTRLISSPDSLTRKLQSKLYVYLKSYYHSVHPKCVHGFIPKFKAKASHHIKANAQVHLGMPYLLNIDIKDFFHSISTTRVRSLFANSPFYFSHEVSTALALLCCYERKLPMGACTSPVISNLICLQMDALFIKWSNEQKIKYTRYADDISFSSMMAFSHKQIEDIRTIIQNERFEINEKKLRIQSRYTSMWVTGIKVNQKLNVNRTYIRNLRAILYDIKTNGWEKACKKHFHLNENTKNEEELKSKFYFKIKGKIQHIGYVKGYSDEVYSKLNNQFLGLQIL

SEQ ID NO: 1568 - protein, 342 aa, unidentified
  source 1..342: note = Related to NZ_CP060007.1; note = Lacibacter sp.
MEIKPFHRKITDLQIQQFLHFNSVHDLSHLINIDTDIIEHVLDEPKRYHEFPIPKRKGGKRLIHSPSRPLKDIQKRLSIYLTRIYHEYAPAYVHGFIRSNKKTSSRNILTNATQHLDRPYVLNIDIENFFPSINAELIKSAFNKLPFQMYSDEGASIISLLLTRNWILPAGSPASPIVSNIIFYETDIALHKYCIKNKLVYTRYADDLTFSGELINDHMTEAIKKIIIYHGFMINDKKVRLQSKQSAQYVTGIKVNNKLNVNRKYIRQLRSILHDWESNGIDIASTRYYAGKLHRYQNRLDMYTSFKASVHGKLAFLQQIKQEEPVLQGLYKRFIALKNTYM

SEQ ID NO: 1569 - protein, 333 aa, unidentified
  source 1..333: note = Related to VEQB01000383.1; note = Bacteroidetes bacterium
MNTHRIEKFIAAKSMRQLELSLLASRNELKQWVQNPDYRTFEIPKKKGGTRQLHAPAPPLKRIQQSINELLQILYVPTQNAYGFMLKQAGEINRNTLQNANCHLQRNFVWNLDIQNFFPSISTKRVKAIFMEGPFYMTDEIASYVALLCCYQKQIPAGAPSSPMLSHFACLQMDNSLQKFIAQAAFKPYQISYTRYADDLTFSLDLLPSDEIKNGIESIILEHGFVLNTSKNRIQHKHQGQWVTGIKVNQKPNLDRKYIRKLRAIIHHVEAKGIIAATARYLTLAEEQIKQKEISFFLNSVRGKINYVGAVRGKEDVVFKKLITTFNSAINGI

SEQ ID NO: 1570 - protein, 376 aa, unidentified
  source 1..376: note = Related to SHWY01000031.1; note = Bacteroidetes bacterium
MYLQSSENVADTNPDFPSENPEEEKRKFACLFLIIKQFKIYMNKNYDNLEQLANIKTPDELLNLLEVSPSSLIAMVENPQYETFHIPKKAGGYRCIDAPSEDLKRVQQKLASHLSYLFINFQTRSVMGFVPHYKGINNPAGIVENAKRHIGQPIVLNIDVADFFPSIKISSIKKMFMQKPFSFNDELAHLLALLTCYKGKLPQGAPTSPILSNFFLLRADLKIERIMKKRELNYTRYADDITLSGFLFPQDKLPDIVQEILTPFGLRLNEKKIRYQTFVGRQEVTGIKVNVKLNLDRRYIRRIRAILHCWDVKGIEHAATVFHKRKINNALEFTSTIRGMIAHVGNVRGKEDVIFLRFHEKFNSLSIFEEMKVVAM

SEQ ID NO: 1571 - protein, 550 aa, unidentified
  source 1..550: note = Related to NZ_QICD01000043.1; note = Paraeggerthella hongkongensis
MVDNKHGALLDIESKEDFAYYLERPIKDLTMLAYAKNGIRYKTFEIGKKRSGEKRTIEAPVGYLKAVQRQLLELFNEAYRPPQCVHGFVSSCSIASNAMSHVKKSAVVNLDLRDFFPSITGDRIHGLFRKDPFSFPEDVANLLTELVCYKGSLPQGAPTSPILSNMICYRLDKQLVSYAAKNKLVYTRYADDITFSSTSRSAINKLFNESELGINSVSPEVRNIIGSNRFEINETKIHIARKSSRQQVTGIIVNEKCNFPRKEYRSLRVLFNNWALVGFEYAGAEYAKRNHSYSSKLFNEAGLISETLLKKHIRGRLEYYTMITGPNKKASQPLAKLWNMYHDVTGEKVPISTPERTVCQTEICYSRQNDQGDPIPLCENGTSFLTDKGYLFTCAHCLCDIHHEYKKIGDERCSFPTLKVLYEPELSDFLIDKTLDVAAIKAPPFMKNEAFALTNGNYFPQIGESVKAYGFAGGDSSIRCIEAAVAETLKAGRVRVDRPFIHGMSGGPVFNTRGEAIGLLTGGSAPDDYSHDGEFVLFSAISEQLPNAFR

SEQ ID NO: 1572 - protein, 549 aa, unidentified
  source 1..549: note = Related to JAFRJC010000116.1; note = Eggerthellaceae bacterium
MRTRADVAAFLGVTPQQLGFLAFSSVPKYTVFNINKKRPGEKREIKAPILVLKRVQRRLADVIASIYESNNPPNSVHGFRLNRSIATNAKCHVHREAVLNIDLENFFPSINGGRIRGLFLHEPFNFPEEVADTLTNLCCDAGGLPQGAPSSPVLSNCICKRMDKRLLSFARENDLVYTRYADDITFSAFNKRRLRHACLSDGSPSLQLSSELLKIIEGNGFSVNTTKTHLSTRSSRQEVTGVIVNEKCNFKRSDYRELRVLLHNWLDVGYKHAGKEYIKHKPEIALAIVDDDDTISERKLRSHIRGRLAFYTMLANQNPGISKPLRRLWTMYAGATKEIVPTVDPESAIWQIVTYYDYVSSKDGSVKNFSKVGTVFKADGECLITAAHCVADLDEVNVCSEAVCEIAYGPVPQFCELGNVDWNPKSDYAVLHEMPEMLNNITGLTCDGTYRAQVGETVWAYGYSDAKPQLRCIEARVSEVHSDGRFYRVDRPFIEGMSGGPIINSRGSVIGIAVHGSAPREYVYDGEFLSIAHVNLGTNYQTNESCSAS

SEQ ID NO: 1573 - protein, 549 aa, unidentified
  source 1..549: note = Related to NFIU01000004.1; note = Olsenella sp.
MASQEISFTSIATNAQLAEYCGVSWDELKMLAYANRIKRYTEWLVPKRNGEGFRRISSPMANLRRVQRAIANGLSEFYSPLKCVYGFVCERNVAMNALQHARKRTVLTLDLKDFFPSISAPRVRGLFMKAMDFPQDVADTLTNLVCYEGSLPQGAPTSPVISNMICFKMDRALLNFAANSGFTYTRYADDLVFSSTSAYSARKMVDQGKNVVDGINRFIIDTIESNGFEINERKVHVANRGSRQIVNGIIVNQKCNIRRSQYREFRALFHRWIREGCSSAAAAYFGNKKNHCYKAKLCDGDELCDEKSFVRHIRGRLDYFSMVVGVNGHPTEPMAKLWTLFHQAAHERVPYLTFEKSAVQLSYVFDSKEKNDAVAAESSGVIVRDILLTCAHGLPEESTDANGDAVPIEIRTAFDERFYIKASSFRKCSGFDFAFVLLDAKLGNMGVRSINTAYLPQAGETIYASGYAGGKMPSHCVQASVLPNRYGNGSIVVDRAFIKGMSGGPVFNTRHEVIGIVLKGSDESSYSRDGEFLPFSAIADLEPFALLKK

SEQ ID NO: 1574 - protein, 558 aa, unidentified
  source 1..558: note = Related to JABZQH010000155.1; note = Mogibacterium diversum
MALNFGKETFSDNVNITNSFLEIQTPEDLAAHIEENVKVLKKYAYPGKRIFYSILIIPKKDHSPRLIEAPCNDLKRILRKITDQLTYIYQPPACVHGFVCSKSVATNAHSHVNKYFVSSFDIKNFFPSISAKRVRGLFKNIFFYANDNLIDLLTNLVTLHKHLPQGYPTSPIISNMICLQMDKQITKYCKEKHLFYSRYADDITISGNSKRLISNIFISSKAEDLTLCPDFSNIIESNGFSLNSQKTHISFKSDRQTVTQIIVNKKCNIPREVYRSLRVLFYNWQKNGWQYAANEYAKFISDHHYISFRNDVNSPMLTDEQLFKKHIRGRLAYYTMIDAQNSIPSTPLTKLWEMYLQCTKEHVPMSLIENNVFQLEITYDYEIDGKSNNFTSSSTGFLTEKGLFTCVHGLKELNQKYDIPENTNVEVACLNKSLSRKFPSQIPIKDFLLCEEDDIAFYRYKNIKPLSNLVINFNYLPQISEHVTGYGIPGGETDVYPIEAIVDSFKLDKSCVRITPTFYKGMSGGPVLNARQEVIGIILEGSSFDDLSRCGLFIRLLS

SEQ ID NO: 1575 - protein, 541 aa, unidentified
  source 1..541: note = Related to NZ_JADNOH010000001.1; note = Collinsella aerofaciens
MLNGFQSKADLAGFLDLSLEKLDLFVNPTSMYQLYRSRLVPKRCGGYRELLIPRSDLKKAQRIIACELEKSYSPLPCVHGFVKGRSIKTNAETHVGSQVIVGLDIKDFFPSISSKRVYGLLISKRLGLTPEVAFCISRLVATPKGLPQGAPSSPVISNMICLGMDKQLMHLFHEYHYQYSRYADDLTFSFRSSFFFYRHFYSGGKLRLPNKLRNAITNFHGIASFELNEDKSFYSFSFSRQLVTGVVCNKKTNIKREQYRRLRSTLHRLSVGDCNGAMGCYYGKSVGEITDAEIRMFEPSLRGSLDYYKSLIKDPWTSGPLMRLGSLYNNSKPEDAPVFPVALHQDSILYLEGVDCEQNPFEGLGFYLTGYGLVTAWHVICDAVSRDMESGEIRIFSSNKTPLARFIYSNDLLQENKRDAAILKDVPSEMIKNTPQLSPNIDLPTKGEKITAYQHHFSESGFSFELHGGELLRLGDPNEEGTLCYTNCSFMHGMSGGPVFNGIGQVIGIVHSATEQGKLGSFLPLRDCFRSTDVYGKWIIF

SEQ ID NO: 1576 - protein, 541 aa, unidentified
  source 1..541: note = Related to QSIL01000003.1; note = Collinsella sp.
MVDELQTKKELADFLNLSLDKLDYFVSADSFYSLYRHRLVPKRNGGFRELLIPRSDLKRVQRIIAKQLEKHYKPLPCVHGFVRGRSIRTNADIHVGSQVIVGLDIKDFFPSISSKRVYGLLKSKKLGLSSEVAFCLSRLISTPKGLPQGAPSSPIISNMICLGMDKQLMHLSREYHYQYSRYADDLTFSFESSYWFYRHFYSDRKLRIPNKIRVAITEFHGNKSFEINENKSFYSCNYSRQVVTGVVCNKKTNIKREQYRRLRSTLHRLSIGDEEGAMGCYYGKSSSDLSEEEKGTFRASLRGSLDFYKSLLKNPWSSGPLMRLGSLYNQSKVEGDSVFPIALHQDSILYLEGINSKDEPFEGLGFYLPSYGLLTAWHVISDAVFDDREKRNIGVKSSAKISLGIFSFGKSTVQTGRHDAAILNDVPPEIIQSFPRVSVSTDLPSKGDKVFAYQLHHSENGFRFDLLDGELLEIGSPSEEGTLCYTNCLFQHGMSGGPVFNGMGKVVGIVHSATEDGKCGSFLPLRDCINSTEVYGIWKTF

SEQ ID NO: 1577 - protein, 570 aa, unidentified
  source 1..570: note = Related to CP024960.1; note = Collinsella aerofaciens
MCCLHIIFCYVSIKYDSTEEPAINFKENLMLNELQSKTDLAGFLGLSIEKLDFFVNSSSMYDLYRNKLIPKRNGGYRELLIPRSDLKKVQRIIAKELEKSYNPLPCVHGFVKGRSIQTNAETHIGSQVIAGIDIKDFFPSISSKRVYGLLVSKKLGLTPEVAFCISRLVATPKGLPQGAPSSPLISNMVCLGMDKQLMHLSHEYHYQYKRYADDLTFSFKSSFYFYRHFCSEEKLRLPNKIRNAITDFHGTESFEINEDKSFYSCSFSRQLVTGVVCNQKTNIKREQYRRLRSTLHRLSNSDIEGAMGCYYGKSIAKLTDAERGIFQAALRGSLNFYKSLIKNPWTSGPLLRLGSLYNKTKPEDTPVFPVALQQDSLLYLEGEDDKETPFEGLGFYLTGYGLVTAWHVICDAVSHDMERREIKVSSSDKTPLAKFKFSKSIVQDNKRDAVILREVPQEILKKIPKLPAVMDLPVKGDKISAYQQHFSESRFSLELHSGDLLRVGDPSEEGTLCYTNCSFQHGMSGGPVFNDLGQVIGIVHTATEQGKLGSFLPLRDCIRSSDVYGEWQVF

SEQ ID NO: 1578 - protein, 570 aa, unidentified
  source 1..570: note = Related to NZ_VOXD01000052.1; note = Lewinella aurantiaca
MKFKKITANRRNFIKFISPSDNEVYDFDTVKKLSQNRHNYYKKVKIPKKNGGFREILIVNGEIKRIQEKILELLQSVYNDSSTPKCVNGFVKGRSIYDNAAIHTNKKHVINFDIKDFFKSVTLEKINTYLSYKPISLPRNQYPNVLISYLCTYDRYLPQGAPTSPILSNIVLKNFDYAMIMLAKKHKLVYSRYADDLTFSGNEDIDFFSFKNTVAQKLNKHGFEMNMNKSRIQYSWQRQIVTGLVVNNKVNIKSEFVATTKSMIYNWENYGIDIAKEKFNQHRKHSDGIHFENVLRGRIDFIGSILNRSGEYKNPVFAQLNLKYWILLNCIDYSFVSEKSVRDKLFNRNYESEKIAYDSSLYESQEYRFISYCFKVYTQMEIIYKYYFYLRFNGDFMKIGMFMYDNSKNIRKQFKRMFSECEDEDKKIKLAKQRISGIKNLKEISTFNIESLFMDQLYRKRNRSLPKFFNFIREIRNYHAHAGEKIVKQTFEEVQSDVKSIIESKNLSEVTLESKTFTGVSHEELRKINHYQFYLWFQSSPFDDVREILKELAFEVKLIENRIKKNAHNT

SEQ ID NO: 1579 - protein, 343 aa, unidentified
  source 1..343: note = Related to DMWN01000144.1; note = Flavobacteriales bacterium
MITENHIQALKASTDADSFVQAMMPGVDYLIDSKRSKLEHSEIVKVVKNFELFTSSASIRRYRTFEIPKKSGGSRKIEAPVLPLKTLQRLILLFLESVYDAPAQVHGFVKDRSIITNAMSHSNKAHVLNIDIEQFFNSVRQTRVRALFNKHLGFSQYSSLMLSKLMCHRGCLPMGAPTSPLVTNLIFQRADKRIFAASKKMNVTYTRYADDLSFSCDSVESLHRTKRLIAVIIRQEGFKVNPKKTRLLHRADCQSVTGLVVNDKVNVLRTYRRTTRAINHRLEISIKEHSGDTNMALIAASEYHAMKTGQNDARPPISHLNFIKGRQAFEYGVLKSSQSPEES

SEQ ID NO: 1580 - protein, 788 aa, Vibrio sp.
  source 1..788: note = Related to JAGDJZ010000001.1; note = Vibrio alginolyticus
MKSLLTPCSKKDTPPEDFSSQLQRWLIFRPEFDIKVLQKQNCWPITGQHYKSFNVQKRNGSTRQLVTVDKKLKSVQRNLLHYFEQYYDVSKHAYGFVGETANFKVNKKNLRTRGVITNALAHTNKKVVISLDLENFFPSITFPRVMGLLKSKPFNFSNKEAAILASLVCLPKAIDDKRGLPQGAPTSPIISNLICKKLDYQVGKMAQKYDLIYTRYADDLTISTNNLKRINANKIISLVRDCVERNGFRINKEKTKVMYRNQRQMVTGIVVNEGLNLPKKNVDALKATLHNLEHVYKNIDEAVDGSNKNNYDSFTPLVYCGVFYKGRYIRTISRGQKSTKPTSDKEFNYIYSRHILGRVLWYGQVVTTGINTPYDLSNRKHISPKQYSRIVKFEEMLSSLYRISIKFNWPIEHIIFRLSNKLSHLQSIVKTNPELSLESTEPNKDEIELKHRFSNLKNTKEDRKQFFDDSPSTLKRALIVENRSHSLFSFKSIKKHVEDGWYIPTVQQEVFKELDTGQLSDLFHRSANAQGHNVLNLILEIVKVVKPRSRYLSEEVKDKIVMVHKELLKLIRSEGEGVCIEYSKESTSTKLAIQAINDLKLSTRLYEDDTDNFYNRIVLDAVKQSGTEHLVNIDRQGMETRLVTDIKAWRDSIVHILFSIKQHADKSEVGIGSPQPKPYTIKFREENPITNIPRAVEIYRLNVDLPFNKKLNIASNIEYGLIDKWLTGRDLLLAIKRFMPIGDIFTHGNYLDCDNFTVNLTEHSFKKENNITHKSYGKLFISLQEINN

SEQ ID NO: 1581 - protein, 786 aa, Vibrio sp.
  source 1..786: note = Related to NZ_MCSL01000005.1; note = Vibrio cyclitrophicus
MRNLLTPLSKKTSPQEDFFSLLQLWLTSRPEFDIKVLQKQNCWPITEQHYKLFTVEKRNGKTRTLVTVDKQLKSVQRNLLQYFEKKYEVSQYAYGFVGGTSNFQANTKHLRTRGVVTNALVHTNKKLVISLDLEDFFPSITFPRVMGLLKSKPFDFSNKQSAILASLICLPKGIDDKRGLPQGAPTSPIISNLICKKLDYQLGKMAKKYDLSYSRYADDLTISTNNLKKINANKVISIVKSHVERNGFRINSEKTKVMYCNQRQMVTGILVNEGLNLPKKQVDSLKATLHNLENVYKNVNESVKGANKNKYDSFSPVGFYKGGYRGRYIRSIGKGKKSNKPTSDKEFNYIYSRHILGRVLWYGQVVTTGINTPYDLSKRKYISPKQYSRIIKFEEMLSSLYRISIKFNWSMEHIIFRFSNRLSHLQSSVKMNPELLIEPIEFNTEEVELNNRFSKLKKNNEECKVFFDNCPASLQRALIVENRSRSRFLYGSIEKYIESGWYIPAMQQEVFKDLDNGQLSDLFHKSSNEKGHNVHRLLLDMVKLVKPRIRYLSEEMKDKILIVHKELLKLMRSEGESVCIEFGKDSEKSKLALQAISDLKLSTRLYEDDTDNFYNRIVLDAVKQSGTENLVNIDRLGMEARIVTDIKAWRDSIVHVLISIKQHSEKTELNLGSSQQKPYTIKLRDENPITHEPRAIEIYRLNVSLPFKKELNINTESGLISKWLTGRDLLLATKKFMPIGDVFSHGNFIDCEDFVVNLTTHNYIKKENIISDDYGKLFISLEEIKN

SEQ ID NO: 1582 - protein, 786 aa, Vibrio sp.
  source 1..786: note = Related to JAHUGE010000005.1; note = Vibrio fluvialis
MKSLQTPLSKKAVSSTDLSSLFQRLLTTRPEFDTKSLREQNCWPITGRHYKEFTVQKRNGSTRRLVTVDKRLKSIQRNLQQYLEQNFEVSQYAYGFIGEATQSHKGRQDLRARGVVSNALAHTNKKVVISIDLEDFFPSITFPRVLGLLKSQPYSFSNKQAAVLASLICLPKSIDDKRGLPQGAPTSPLISNLICKKLDYQVGLLAKKYDLVYTRYADDLTISTNNVNKVPPIKILSLVKSCIERNGFKVNSKKTKVMYPNQRQMVTGLVVNEGLNLPKKQVSSLKATLHNLEFKYKNVDDAVKDSNKNNYDSFNPVGYYSGLHRGRYIKSVAKGRKSTKPTSEKEFNYIYSRHILGRVLWYGQVVTTGINTPYDLSKRQHISPKQYVRIIKFEEMLSSLYRISIKYDWSIEHIILRFSNKLSHLKSSLRLMPNYSLNTIEPPQEEVELKERLLNLKNTQEERKKFFDNAPTSLQRTLTVDNKSRKEISFVSIKNRIDNGWYKPDFQQELFKELDHGRLSDLFHRSSNDKGHSVQELLVEIVNVVRPRLRYLSKEMRERIVTVHRELLKLMLSEGEGAYIEYGKDSSAKPIIQAISSLKLATRLYEDDTDNFYNKIVLDAVKQSGTENYINIDRSDMELRLVTDIKAWRDSLVHILFSIKQHLDKTELDIDSLSHKPYTIVFRDENPISSEPRAVEIYRSNESLPYKKKLEIPLNSDSGFLDKWVTGRDLLLAIEKFMSVGDVFVHGNFKDCDKYKVNLTEHSYIKEDNATSKVYGKLFFTLQENK

SEQ ID NO: 1583 - protein, 786 aa, Vibrio sp.
  source 1..786: note = Related to NZ_MCTZ01000016.1; note = Vibrio lentus
MKSLQTPPPSKNISHVDLSSLFQRWLISRPEFDTKALQQQNCWPITGRHYKEFVVQKRNGNTRRLVTVDKKLKSIQQNLLQYFEKKYEVSQYAYGFVGEVPRVQTNKQNVRTRGVVSNALAHANKKVVISLDLEDFFPSITFPRVIGLLKSQPYGFSNKQSVVLASCLCLPKSIDENRGLPQGSPTSPIISNLICKKLDYQVGRLAKKYDFVYTRYADDLTISTNNINKISAKEIISIIKSCIERNGFRLNKEKTKIMYRNQRQMVTGIIVNEGLNLPKKQVDALKATLHNLEYKYKSVDEAVKGSNKHNYDSFNPVGYYRGLNKGRYIKSISKGRKSTKPTSDKEFNKIYSRHILGRVLWYGQVVTTGINTPYDLSNRKHISPKQYSRIIKFEEMLSSLYKISSKFHWKMEHIIHRFSNKLSHLKSSLRLIPDFSLSSLELNSEDMDLKTRLPTLKSTLEERKDFFDLCPKSLQRTLVIDNKSRKKFKISSLENRINNGWYKPEVQKELFKELDNGRLSDLFHRSSNEQGHSVQDLLFEIIDSVRPRLRYLSEEVKEKIVVVHRELLKLMLLEGENSHIEYGKDSSTKPAIQAINDLKLSTRLYEDDTDNVYNKIVQAAVKQSGTENLINIDRSDMETRLVTDIKAWRDSLVHILFSIEQHADKTELDSAALHQKPYTVVFRDENPITQEPRAIEIYRLNKDLPFKKNLNIAPNSSSGFIDRWLTGRDILLATEKFISIGDVFVHGNFRDCECYTVNLTEHSYIKEQKPNSSNYGKLFISLQEIK

SEQ ID NO: 1584 - protein, 801 aa, Vibrio sp.
  source 1..801: note = Related to NZ_PIEZ01000024.1; note = Vibrio splendidus
MKNLSIPSPKINPTQDSFLSMFFRQFDSNPEFDTTVLKKQKCWPITTEHYRPFTIRKRNGTLRELVTVDKNLKKIQSNLLIYFSKNYEVSKYAHGFVAKEIENQFPNNKEEYLVGGRLRAKGVITNALSHTNKKVVISLDLKDFFPSITFPRVMGLLKSKSFDYSNKQAAILATLTCLPSSVDTKRGLPQGAPTSPIISNLICKKLDYQLGKIASKYDLTYSRYADDLTFSTNNLKRISANKIISRVTECVKRNGFVINNPKTKIMYNNQRQMVTGIIVNDGLNLPKKEVDAIRATIHNLENKYKSVDDAVKGFGKLKNKNPYDSFVPLGYYTGGYKGRYIRNARKGKKANKPTTNKEFDSIYALHILGRILWYGQVVTTGVSTPYDLSKRKNISPKQYSRINKYEEILASFYRVSMRFNWPVEHIILRLANNLPHLQSLVKMSPQFLLEPIFLNSEETYLKNSISKLKKEKSDYIKFFESAPESLQRVLVVENCSHDNFIFNTIKKCVEKGWEVPSIQQELFKDLNTGDLSDLFHKSYDSTGHSVKKLIIDLVRVVKPRLRYLSSSIQNKIILVHKELLDLMRSEGEDVRIEYGNESTKTKQALQAIRDLRLAVRLHDDDTYNFYNKVVLEAVNRSGTSDLVNIDRDDMECRMVSDINAWRDSLTKVLMSIKQHADTTEKELSPSQHKPYTIKFKDENPINGESRRVEIYRLEVTLPFKEKLEIDTDFNEGIISKWKVGGDFNSAIKRFLAIGDIFVHGNFIDCENCTVNFTEHSYKLEKNIVRKNHGKLFISFQEIKSK

SEQ ID NO: 1585 - protein, 795 aa, unidentified
  source 1..795: note = Related to PYMT01000050.1; note = Photobacterium phosphoreum
MTTKFSHPQKRNFNSFIRLNFFSTNAPEFSTTELKKNKCWPITEKHYKSFTITKRNKTERELVTVDKNLKVIQSNLYDFFKQKYNISKYAHGFVAKDPLILSLLKEQDKPLRSKGVITNALSHTNKKVVISLDLKDFFPSITLPRVIGLLKTQPYNFSNKQAAILASLICLPKNIDKKQGLPQGAPTSPIISNLICKKLDYQLGLISKKYDITYTRYADDLTFSTNNLKRISATRIVEKVAECVKRNGFKINDSKTKIMFSNQKQMVTGILVNEGLNLPKKDVDALRATLYNLDKVYTSTDDAVKGFWKLKGKNPYDTFTPVGFYLGGFKGRYIKSPSKGIKSTKPTIEKEFEKIYAQHLLGRITWYGQVVTTAINKPYDLVKKQHISPKQFSRIKKYEEMLATFYRISIKRKWPIEHIVLRRAYNLPHLQSLMKMNPIYLLDATFLDENKEIEQLKNKVSELKTDKEKYTEFFRSAPRSLQRVLRHENRSHNNFSLESIKKFTNFGWQDPIKQKKVFNAIDNGELSDIFHQSINRDGDNIKETIIKFVTVVGPQLIYLSKDVKNKLINVHKELLALLISEGESFNIDFYKENPKTEQALQAVRDLKSAIRLYEGNSENFYTKIVLEALKITETIDMVAIDKRDMAPRMVTDINAWRNALIKVLMSIKQHTDETEKHSNAQKQKPFTIMFREHDDDENITTAIEIYRLNSELPFKKELKIDTEVKNGNVKKWKTGGDLKSAVSNFLSIGDIFIHGKFNDCKDITFNLTEHVYKVNKEIKENEYGKLFITLEELNN

SEQ ID NO: 1586 - protein, 798 aa, Vibrio sp.
  source 1..798: note = Related to RCFZ01000008.1; note = Vibrio vulnificus
MNKTSISSPKAKTVDLKSIFMAFEKWRSNRPEFDTAALRKRKCWPVTAKHYKKFTLKKRNGSMRQLVVVDKNLKEIQSSLAIHFSQNYKASEYAYGFVAKESELTAAKTQPELSLDKLRPKGVITNALAHTNKKLVISMDLKEFFPTITFPRVMGLLKSEPYKFSNKEASILASMICLPKEIDDKRGLPQGAPTSPIISNLLCKKLDFQLGRIAQKYDLNYTRYADDLTFSTNNLKRISANKIIHEATKCVERNGFHVNVDKTKVMYSNQRQMVTGILVNEGLNLPKKQVDAIRATLHNLEKKYKTVDESITSFWKIGKKNSYDSFVPLGYYAGGYKGRFIKSASKGYKGNKPTTEREFNYIYSMHLLGRILWYGQVVTTSINEPYDLKKRKFISPKQHSRIIKFEEMLVSYYRISIKYKWPVEHIILRLANKLPHLQSLIKMNPGFLLDSLLLSVEEHELIERFRKLGRDKEEYTRFFKSSPPDLQRVLRVANRSHNNFSHSTIKECVENGWQFPNKQQFLFNELNTGNLSDLFHKSLDKKGHNVEKLLSDLVLVCRPRLRYLSPNIKSKIVAVHRELLDLIRTEGGDVFIDLENETKKTELALQAIRDLKSEIRLYDGDSDNFYQKIVRVALNRSGDSNIFAIDMDGMASRMVTDIKAWQDALTKVLISIVQHTKSLDDKAQGQALYTIKFRDRNPINCKPRAIEIYRLNYELPFKQKLDIDANSNCGQVMKWLTGGDLTLAIKSFLSVGDIFVHGKFLDCDDVTVNLTEHQYIREKHEPIDKLGKLFITLQEISE

SEQ ID NO: 1587 - protein, 412 aa, Vibrio parahaemolyticus
  source 1..412: note = Related to NZ_NNOA01000433.1
MNNASISSHKPSNRDLDSIFMAFEKWLKNRPEFDTAILRKRKCWPITAKHYKKFTIKKRNGSNRELVVVDKNLKELQSNLAAYFAQNYEVSDYAYGFVPKEPERRIGGKEQSELLVEKLRPKGVITNALSHTNKKLVISMDLKDFFPTITFPRVMGLLKSQPYNFTNKQASILASMVCLPKDVDDKRGLPQGAPTSPMISNLICKKLDFQLGKMAKKYDVSYTRYADDLTFSTNNLKRVSANKIVHEATKCVERNGFRVNVDKTKVMYSNQRQMVTGILVNEGLNLPKKHVDSIRATLNNLEHKYKSVDEAVVGFWKIGKKNSYDSFVPLGYYIGGYKGRYIKAVNKGFKGNKPTSDKEFNKVYALHLLGRILWYGQVVTTSIGEPYALTKRKYISPKQHSRIIKFEEMLAS

SEQ ID NO: 1588 - protein, 807 aa, Vibrio sp.
  source 1..807: note = Related to MCVM01000002.1; note = Vibrio lentus
MAQLLNMNNIQKDPSQDKNTTVDSFLEMFERWLLTRPEFDIAALGKRKCWPITSGHYHRFSIKKRNGSKRELVSVDKNLKALQANLATYFEETFEISKYAHAFVPKESADKATFKQQEGLLVNKLRPKGVVSNALAHKNKKVVISIDLKEFFPTITFPRIMGMLKSKPYNFSNKQAAVLASLICLPKDIDDKRGLPQGAPTSPIMSNLICKKLDYQLAKMASKYDITYTRYADDLTFSTNNLKRIPAKEIVSIVTKYVERNGFQVNTTKTKIMFKNQRQMVTGILVNEGLNLPKKQIDALRATLYNLEHEHNSVEDSVIEFWGLKNKQPYDSFIPVGFYNGGYRGRFIKSNKKGVKAHKPTSKKEFDKIYALHLLGRILWYGQVVTTTIDAPYDLSKRQYISPKQFSRINKYEEMLASFYRISIKFSWPVQHIILRLANKLPHLQSLVKMKSISELDPTILDEVGIELHGQVLKLRTEKEKYTEFFNSAPLSLQRVLRVHNQSHINFDLDIIKKCISSGWEEPFKQQKVFKEINNADLSDLFHKSSNRKGHNAKKLLNEIVRVVQPQTRYLSDNVRIKITKVYSELLTLIRLEGDSVCIDLENENTKTEQALQAIRDLKSEIRLYDNHTDNFYQRVVLPAVKNSETSSLVAIDKKDMNPSIVTDINAWRVALTKVLISIKQHCDKTELMEDTSSHRPFTITFRDDNPVTGAPRVIEIHRLNLDLPFKKKLEVDTTMVEGKVMRWLTNGDLSSAVREFLPIGDIFVHGNFKDCENATVNLTEHFYKINDELKVSDYGKLFFSLQEIKE

SEQ ID NO: 1589 - protein, 807 aa, unidentified
  source 1..807: note = Related to NZ_UGYP01000001.1; note = Shewanella putrefaciens
MAQLFNMQNIQAGSSKPKNTNFSSFLKLFEHWLKTRPEFDIKTLKERKCWPITAGHYHRFSIKKRNGSKRELVSVDKNLKEMQSNLATYFEKTFEISKYAYAFVPKESEKKATIKQQETLLLDKLRPKGVVSNALAHQNKKVVISIDLKDFFPTITFPRIMGMLKTTPYDFSNKQSAVLASLICLPKDIDEKRGLPQGAPTSPIISNLICKKLDYQLAKMARKYDITYTRYADDLTFSTNNLKRISAEEIVSSVTQYVERNGFKVNETKTKIMFKNQRQMVTSILVNEGLNLPKKQIDALRATLHNLEHEYNSVEEAVNEFWSLKNKQPFDSFIPVAFYPGGYRGRFIKSNKKGLKANKPTPKKEFDKIYALHLLGRILWYGQVVSTTISVPYDLSKRQYISPKQYSRIKKYEQMLASFYRISIKFNWSVEHIVFRLANKLPHLQSLIKVKSKSELDPTILDKIGKELQGKVSRLRSEKEEYTEFFNSAPRSLQRVLRVQNQSHISFDLDTLKKCVEFGWNEPLKQKKLFKEINTSMLSDLFHKSSNGKGHNAEKLLNEIVRVVKPQVRYLSDNVRVKLTKVHSELLTLVQLEGKNVCIDLENENIKTEKALQAIRDFKSEVRLYDNDTDNFYQKVVLPAVKSSETSGLVTIDKKDMDPSIVTDINAWREALTKVLISIKQHCDKTELMEDASSHMPFTIKFRDENPVNGAPRTVEIYRLNSKLPFKKKLEVDTAIVEGKVMRWLFNGDLSSAVREFLPVGDIFVHGKFKDCEDVTVNLTEHFYKVDKTLKVNPYGKLFFTLQEMKE

SEQ ID NO: 1590 - protein, 791 aa, unidentified
  source 1..791: note = Related to PYMW01000008.1; note = Photobacterium phosphoreum
MNNKRTAKNNNFLAYWLGIKSPELDIKVLKNIKCWPITANHYNRFTIKKRNGSKRELVSVNKSLKTVQSDLAEYFAVTYGISKYAHAFISKEPETLSVFSQEAILVDKLRPKGIVSNALPHTNKRVVISLDLKDFFPTITFPRVMGMLKGEPYNFSNKQAAVISSLICLPKDIDENQGLPQGAPTSPVISNLICNKLDYQLGKMSKKYDITYTRYADDLTFSTNNLKRISAEEIVSLATQYVDRNGFKVNEAKTKIMFKNQRQMVTSILVNEGLNLPKKQVDALRATLYNLENTYNNVEDAVDKFWNMKNKKAYDSLVPVGFYKGGYRGRFIKSKNKGLKGNKPVSKKEFDKIYALHLLGRILWYGQITTTAINTPYDLSKRQYISPKQHSRINKYEEMLAAFYRISMKFNWSVEHIVLRLANKLPHLQSLVKMNPNFLLEHILLDDLELELRDKVSKLRIEKEKYTEFFDSAPRSLQRVLRVFNRSHNSFALNKIKSCVESGWPVPLKQQILFEKLATEELSDLFHKSTNIKGHNVKTLLEDIVKVVRPELIYLSDNVRVKITRVHRELLSLMRTEGDGVCIDFENETAKTEQAVQAIRDLKSEVRLYESDIDNFYLKIVLPAVKNSRTLNIVDIDKDDMNPSIVTDIYAWREALTKVLISIKQHIDKSESIGNSSGKKPFLIKLRDEHPTSSLPRAIEIYRRDVELPFNKKLDIDVNSAEGKVMKWLTGGDLSSAVKAFLPIGDIFVHGNFKDCENVTVNLTEHFYKVEDNLEISGNGKLFFSLQEIKE

SEQ ID NO: 1591 - protein, 791 aa, unidentified
  source 1..791: note = Related to NQLU01000007.1; note = Photobacterium phosphoreum
MNNKRNVKNINFFSFWLGIKDPEFDIKKLKDIKCWPITKNHYNPFTIKKRNGSKRNLVSVNKNLKTVQSDLAEYFTKNYKSSKYAHAFICKEPESLSILKQEALLIDKLRPKGIISNALAHTNKQVVISLDLKDFFPSITFPRVMGMLKGQPYNFSNKQAAIIASLICLPKGIDENQGLPQGAPTSPVISNLICNKLDYQLGKMSKKYDITYTRYADDLTFSTNNLKRISADKIVSLATQYVDRNGFKINEAKTKIMYKNQCQMVTGILVNEGLNLPKKQNDALRATLYNLENKNNKVEEAVAKFWGIKSKQAYDSLVPVGFYKWGYRGRFIKSKNKGLKTTKPALKNEFDKIYALHLLGRILWYGQVATTGINTPYDLSKKQYISPKQHSRINKYEEMLAAFYRISMKFNWSVEHIVLRLANKLPHLQSLVKMNPNFSLEHILLDKLELDLRDKVSKLRNEKEKYTEFFFSAPRSLQRVLKVSNRSHHNFTLIKIKSYVESGWPVPLKQKAVFDEIATGDLSNLFHKSTNINGHSVKNLLKDIVRIVRPELIYLSDNFRTKITRVHRELLNLMRTEGDGVYIDIENVTPKTEQAVQAIVDLKSDIRLFENDIDNFYLKIVLPAVKNSGTLNMVDIDKDDMNPNIVTDIYAWREALTKVLISIKQHSDKSESIGNIQGKRPFIIKFIDENPVNGSPRAIEIYRRNIQLPFNKKLEIDINSSEGKVDKWLTGGDLSFAVKEFLPIGDIFAHGNFNDCNNATVNLTENLYKIDGKLKLNDSGKLFFSLQEIKE

SEQ ID NO: 1592 - protein, 796 aa, unidentified
  source 1..796: note = Related to NZ_CP068228.1; note = Shewanella algae
MKTTPILSSKVDSDDKFPFFSILESWGVNSPEFDTVVLKKLKCWPVSKKHYKPFTIEKRNGTERHLVAVDKNLKLMQQRLAVYFERAYPVSKYAHAFIPKRSKFAYELNSSPQIRPTGVITNALAHTNKKVVISIDIKDFFPNITFPRVLGLLKSKPYDLSNRQAAILASLICLPKGIDENRGLPQGAPTSPIISNLLCKKLDNQLGAFSKKNGITYTRYADDLTFSTNNLKHISTSKIVEHVTNFVERNGFNINTLKTKVMYKNQRQMVTGIVVNDGLNLPKKQVDAIRATLHNLEHNYKSVSEAVYDFWLVKGKNAYDQFVPLDFYPGGYKGRYIKSKNNGEKRNKPTSDIEFNKIYALHILGRILWYGQVVTTAVNEPYDLSKRKYISPKQHLRINKYEEMLATFYRISMKFNWPIEHIILRLANKFPNLQSLVKMNPMFLLEPVTLDANELAIKDKVNSLRSDKLEYTAFFESAPDSLKRVLRVENRSHTNFDLKNIKQCVEYGWETPTKLREVFNEFDNGKLADLFHKSSDRKGHKVVDLLKELVSFVKPRIRYFPARVKRKIIVVQKELLHLIRAEGEEVYIDLENETTVTKKASQAIRDLKFAIRLYDSDTDNLYNRVVLEAIKSSDTLELINIDKDNMNPRIYTDIDAWRESLTKVLISIKQHTHDDERVIDQKQLKPFTICFREENPLTGSPIAIEIYKANSKIPFKKKLNISEKSNSGLVNKWITGGDLQRAVRDFMPVGDIFVHGDFIDCKNITVNLTEHSYKKEKTVYHNKYGTLFISLQELRA

SEQ ID NO: 1593 - protein, 802 aa, unidentified
  source 1..802: note = Related to JABXHM010000094.1; note = Alteromonadaceae bacterium
MKKNNQKKVKEESATDFFDFIKDLLARRPEFDTKKLADKGCWPISKSHYHHFSIKKRNGSYRQLVTVDYRLKEFQSNLRRYFEKYFTISKHAHGFVSTSTSQVGATDLEKEFLSELNRPKGVVTNALAHTGKKVVISIDLKDFFPSITFPRVLGMLRKSPYDLSNKQAAVIASLVCLPKDMDEDRGLPQGAPTSPIISNLICNKLDYQLGRFAKKYDLKYTRYADDLTLSTNNLKRITPKKIIDEVTRHVERNGFQINDAKTKVMYQNSRQMVTGILVNDGLNLHKKHVDALRATLHNLENKYDSVERAINEFWTLKDKQPFDAFVPLGYYNSGIRGRYISSSKKGIKRPMPITKQEMHKIYALHLLGRILWYGQVVTTAVQSPYDLYKRPHISPKQYSRIKNYEEMLASFYRVSIKFKWPVEHIILRLSNRFKHLQSLVAMQPNLLVEPIVLNDAEQKLKVDVLKLRKKEDYLEFFRTSPESLKRAIWSISSSPSNHSLEDIKQYVNHGWPVPEIQREVFKQLDTGTLSNLFHKSYESGGHSVNELLEEIVKVVKTRLRYLSPVVRRKILSVHKELLAIFRLEGNDVRIDLEKKVKSHESALQAIRDLKAAVRLYEDDTENFYNKIVLPAVKESGMSNFVKIDNNDMEVRLITDIAAWKNALIKVLDSVKEHMESSERVRKASEQFPFTLKFREANPETEEPMALELYRTNAEIGFKKIPDLETNKSHGLVKKRLTGGDLSLAVKEFLPIGDIYVLGKFERKGECIKDISINLTDFSFVKCKSVKHSKYGQLMFSLVEKES

SEQ ID NO: 1594 - protein, 726 aa, unidentified
  source 1..726: note = Related to JACGVB010000087.1; note = Colwellia sp.
MVSVDSKLKSIQTSIKEELEEKYPTSKFAHAFISNNLDTLDDIVRPKGVISNALAHTNKKVVISIDLKDFFPTISFPRVLGMFKQQPYFFSNKQASILASLVCLPKGVDANRGLPQGAPSSPLISNLICNKIDKQLGQLAKKLDCIYTRYADDITFSTNNINRVKPSALVNEIRKHVVRNGFEVNEEKTKIMFSNQRQMVTGIVVNDGLNLHKRHVDALRATLYNLEFKYKTTSQGIKAFWKLGSLRSFDSLVPVGFIKGETPIRFVKSASKEDGKKRLIKTTGKYQVKTYALHILGRILWYGQVVTTAISDPYSLSKNSYISPKQERRIKKFEEMLAAYYRIADKLNWPVKHIILRLANKYPHLQSLIHFDPRYTLKNIALLVAESDLITKVNKLGKDNQEYLDFYKESPETFQRHLLLRSRFKQSFKIHDIRTLAENGWVDPKLQNELFEELNTRKLADLFHKSDDGKGHKVEEILLELVKVVAPKLRYLSSNVRTKVLQVHKEFVGLIGAEGKDVKLDLEIETDLTKSAIQAIRDLKNATRLYEHNNDTFYSRIVLPSINDSDTTKLVDINTSGMAPRLITEIGAWKKALTKVLQSIKESASKVNLDSKQKPFKIKFKDANPVTGEPVTLEIFKVGHDNPFGKNLNLPENSSSGFIQKNLLGRDLTNAIEQFLPVGDIYVQGNFKDVDNAKINLTRHKFERIEEMSKDNKESLFFVLKEYQSK

SEQ ID NO: 1595 - protein, 898 aa, unidentified
  source 1..898: note = Related to JAIPFF010000020.1; note = Thiohalocapsa sp.
MSDTTEPKEPAALTLAALIDRDEQSAAGDEQRKIDSRRDLARYIGIPLRHLADVLYEADRSRFYTVKTIPKASGGTRTLHAVSGKLKDVQRKALDKLQRKFPPSDRAHGFVPGRSIITNAIPHRRKKLVVKLDIVDFFPSIRVARVFGMFQAPPFRFGREAAMTLAQLACVPEHNGPLPQGGVLSPYVANVICRRMDQRLASIARQHRCNFTRYADDLTFSTNDANRLDADRLIAKVREVVEGEGFAINDAKTRVLRQSDRQIVTGIVVNDGLNVTRRYLRSLRAILHNMEKEGIEAQLIKGSGLKDRRASRLELVPDGDGYRLGNHKLTKEQAVERFLQHLVGRFAFVGQVVNAEGQDNQQIRYRRVVLYKRLLNRFRRSVRSAVHAGLGDGPKHCERAIRSLMERYASVEQESEWYRRAKERRESELERWRESKEGRRISAALARTTNASELCRFVQKEAKSDVRYWPVNCGDNPEALRVRVEENARYPSLNRGTTRQVVNGFKDTSDLGGLTHRGDATPASLLQILLDRYEPHYYELPNALRKLVDPMSAALRDIVLQDGEDVSLDLFKDPRLDRHVKQLKEGTRLIAPGSKKDEGKPITELLTDAYEKGLERAEKKPGTSVPWKDRFISPHQAIYTVVPALWISLVDIFHSIGIHSEHREIEVETYITEQGCFQIRISDANSSGLEIPPARDFAHGKIRHAAFELFAIAGYWIFTRFEDGAVHRVDMLTGKTARATDARYPGFTHLIVLPNEKGFIEEPSVGDAATGSDSAATPRRTVRVLIIDNNEQRRNDNVQCWSSLPDVELDAVAQIDRESYRCRELDLVLVHESNPESEWIHQDVEDRWPVVFFSGNNTLDCEVHEGRWFVSPVFLREHFGKLVDKIVHEGGKDCVGLS

SEQ ID NO: 1596 - protein, 877 aa, unidentified
  source 1..877: note = Related to NZ_WNKT01000028.1; note = Allochromatium sp.
MEKMTTRTKIYWRRDLAQYIGVPLQDLLEILYKENRRDYYRIRSIPKASGGTRTIHAVSGKLKDIQRKVLDKLQADFPPSSRAHGFVPKRSIITNAIPHRRKKVLVKLDIRDFFPSIRFARVMGLFQSAPFHFGREAAITLAQIICVPGDNGPLPQGGVLSPYVANVICRRLDQKLAAIAREHRCHFTRYADDLTFSTNDVKCLNREQFIARVEAAVANEGFTINSKKTRVLRQSDRQIVTGIVVNDGLNVTRKYIRNLRAILHNIEKNGLETQLIKDGGFHDRRASRLELKRDGDGYRLGTRQLTKEESIERFLQHLVGRFAFVGQVVNAEGQENRQIRYRRVVLYKRLLKRFYICICRIEKNENLGKGPEKCKSTLEKLMKKYSSFDQQSEWYNRAKECRQSKLEQWQNSKEAQTIRDELACITTLEDARRFLTAQACSDVRYWIECSGNFEDIKIKLAKFAQYPAFNFFDTRQVLHGFKDTQDLGALTHHGSTPAHLLNILLKRYEPHYYKLPDYEPPYSLRGLVDPMSDALRNIVLEDGEDVFLDFNDPRIESKVAKLKQGTRLSARQGQAHIGTMIEEMLQSAYEEGLKRANQTPKKSVPWKGRLQNPREDIYTVIPALQGSLVDIFESMYRNRKSGQIEVETSVTESGCFQIRIADVDGASLRVPPGRDFAHGKLRRATRSLFVIAGYWIFARFNDGSVHRVNMLTGETVKVADDRYSGFTHVLVLPNNEGRIDPPSVGKSSLDVSVAKTSRRTLRVLVIDNNDQERYDNELRWQTLPDLELKTVAAIDRETCASYAPDIVFVHFNNDERKWITQENTNLCPIVLFSGEFMSECMIHEGCWCVSRTFLKERFGDLIDQIVRKERKDCVGLS

SEQ ID NO: 1597 - protein, 881 aa, unidentified
  source 1..881: note = Related to NZ_NRRY01000013.1; note = Lamprobacter modestohalophilus
MEFTTTPSSLNSRKDLADYIGLPLGELNNILYAGNRSRFYKVKMIPKASGGERKLHAISGELKSLQRMALDKLQTDYPPSPRAHGFVPERSIITNARHHTNKKLVIKLDLLDFFPTIHYGRVVGMFQKPPFSFGYEVAKTLAQISCLSQEEAGILPQGGAMGPYIANVICRRMDKRLASVARNHRCNFTRYADDLTFSTNDVRRLEIPQLITEVSGIVESEGFKVNSEKTRVLRPSDRQIVTGIVVNDGLNVPRKYINSLRAILHNMEKEGIEKQLVKGKLFGANNPKISRLEFELVGEGYRLGSRAYSKDEAVDLFLRHLLGRFAFVGQVVNANGQQERQIKFKRVILYKRLLKRFHSCVIDPRNNGLGNGPKKCARAIVRMMKQYSSFDQESKWDRRIKEVRKSKLESWQQSGDGRKVCKALDRINNLSDLKVFLENESKRDIRYWWVCGRDFVTDKEQALKYASYPPVDYRWTRQVLCGIKNTQGKNLGILTHYGDDGHANTPAKLLEVLAENYEPYYYWLPIRLRKIIDPVSDALRNIVLQDGENASLDNFGDIRLEPVIKTFKLETRLSNSDRAADGTYIFQLLKDAHEAGQRQANRKEIKSLSLVMHQKMPSKQYTVVPSLRIALIDIFHSMYVNSESDGISVDTRITHRRCFQIRVTGPLHHPLLCRPSRNFAHGKLSRAARELFGIAGYWICSTFEDGREYRIDMLTGKAALISNEHKLSFSHIIVFPNDNDEIDESIHGVEVIDSVPENAPQQKIRVLLIDNNDRRRDENVKRWRALKNVDIKAVARIDRASYEKLDLDLVLIHESNPEVETNELVFDDQTRIIVFSSGNKTEDCVTDEGLFYVSSIFLQKNLAKLIDKIVVEGQKDCVDLS

SEQ ID NO: 1598 - protein, 634 aa, unidentified
  source 1..634: note = Related to JABJEJ010000239.1; note = Deltaproteobacteria bacterium
MEIPLKRLTYCLYKTSRESAYTRKDLPKSNGGVRTIHAVSGPIKGLQRTALDKLQEDFKPTAYAHGFTPEKSILTNAYVHQGSKIILRIDLKDFFPSINFGRVRGMFMSPPFKFGEQAATAMAQMSCLAGSEDVLPQGGVLSPYIANMLCRRLDARLAGLSRTWKCRFTRYADDCVFSTNDTKRLNAEKFVAQVEEIIREEGFQINPDKTRVMYPHERQMVTGVVVNDGININRRYYRSLRALLHNWKKYGISSQLVKSGGFKDERNPGPRFERDGDIFRLNGWEFSKEQAEEKFARHVLGRILFLLQATNFVPPSTEGYLEGEKDETAKKMVAKRKEALAEKPRSQAAQKLLLKYFHLVSKRKHLDDLKNAAYRQLQRYPIRELVARHPHLKIELRSGISRYQIRAQALQEYQKRPETRKCVERIHECDDLAEAGGLLDELANTDVRFAGLPRGDLRVLLKEMTKFASYPAFGANHARSFFASLRDSETGLGQILHHPEHSMSDLNESMGKFVDPVFWWLPFGLREDIDKIDDLLEGVSRQLGDDAKIDWLAHELTEKETLKLKKDTRFHRKEGTRLHEAVNEVVKRVAKTYDRELPEICNELSDKSTAYTHVRSVRLALDEIILSMITHSDK

SEQ ID NO: 1599 - protein, 916 aa, unidentified
  source 1..916: note = Related to QNFE01000008.1; note = Gammaproteobacteria bacterium
MPKIFLKKHQTEYIIKNRATNRKSIVAIMAGKKMKNMLSGDKIKKAYKKFTIAKAKKGTRTLHAPSTELKDLQRTILDKLQKPFRPSIYAHGFVKSTSNKARSIITNASYHKSKKYIIKTDIKNFFPSIKKEQITQMLVNEPFEFTIKTAEKISSLACLDGKKKVLPQGGVLSPYLSNMLCCNLDDKLSGLATKNHCNFTRYADDITFSTNDKKIKFKPLIQQIYKIVESYGFVVNRGKTKVLTPADRQVVTGIITNDGINVNRKYYRNLRAIIHNCEDESLNIFNIDTIAGQIGRFIKYKIQKRNKNNAIELKYSWSFKDSRCSRPNIFSDSVMRSEYILLNKKVGVQDVKLMRDYGGVNLQVPFLKGEFLNQLFGTDKFKNNEKYAMRLYKYNSDIESLSTGRLYLKNKKYAEILLDGKWIGCEKYTEKNPKIYNILENKFKVLQEKHKDNDRFFYKSVIYNKGFEEKEYMLENFALTKINTQQQTIQYENYNKVDKNHTGDYHIAVKKNYAVHSFFKHLLGRFVFYGSVVLSNNQDKNYDRYKRVGAYEKLLYRFYKLVEKHCNKSLQKQTLNLIKKTPKLKDDFNVLKKMTDDYKKQKEKSLEKFHYDSKYATEIDNTESIEALDDIAKKLSKKDVRFFRIDKYHKDEPKDYQNYLMAILKKPAIDLKKTMGVLLSFKGSQDGLGVITHDTEKLNSKQIFETVNKCFTQYYYYLPQGIREEFDNYIDALNNQDGRQSQRFQSQAEKLKKNTRFGNNSDEEFLLKDSVDEAILNAKKEVKKSDIKIHNEIKRASFYTHVPTIKQVFEKIIHSLYKNSKGSEITISCDHKDDEKKYQVIITDNSDANITNNGREFVNGKLSSVMGLTFGLCDYFIETEFNKKRKTINMHNGEFLKTLPTHKKGFTHILQFATKI

SEQ ID NO: 1600 - protein, 490 aa, unidentified
  source 1..490: note = Related to JABHVJ010000179.1; note = Candidatus Woesearchaeota archaeon
MTNDIIQEILRKRKINRSTPLMQKINNKKDLLSFFGDEIGQENFDNVLYGEEKEQYKKFVINKATGKPRTLHAVPPKLKHIQRIALDKLQSVKQYQPSSYAHGFVLKRSIITNAIPHRRKKRIIKMDLKDFFPSIHEDRVRDMFMGKPFSFGKEAATIMAHLSCLNDGSGILPQGGVLSPYVANMLCLKLDKKLAKVAIKNHCNFTRYADDITFSTNDVSEDSISNLIKETSNIIESEGFVVNTEKTKVLTPNRRQVVTGIIVNDGVNVNRRYIRNLRAAIKNCEEQGIGSQMQRFVFKDHRCSGPDKFDGTNGEIRNYFLHHLFGKITFFGNVVLSNNQDLKNKKNSDTYRRVQTYEEILYRFYDLIKNVKTSRRFKKSVVAAVNNRPNLSKRLSFAQQGVSIRGKALKKYRSTYKAKKLKDDLELVTNINQLRSFIGDVAETNPSFFNTAIPVDLDEAKEKLGTRLSFPPVNLDIATGVLQSLVEDEG

SEQ ID NO: 1601 - protein, 830 aa, unidentified
  source 1..830: note = Related to JABHPQ010000081.1; note = Candidatus Marinimicrobia bacterium
MPKESKNNKMTVSSRSDLADFFGVKNKYINWVLYADKSASGYKKFTINKASGKIRTLHAVTKKLKKLQRIALDHLQADKRFQPTAYSHGFTQQKSIITNAAYHKRSKRIIKMDIKDFFPTIHFGRVQGMFMAPPFKFGKEAATVMAQMSCLDDGSGALPQGGVLSPYIANMMCRRMDKRLAAVARNHSCRFTRYADDLTFSTNCISDENIGKLVQEASAIVEAEHFIVNKEKTKVLTPKDRQVVTGIVVNDGLNVNRKYIRNLRAIIRNCEQFGIKSQIVKLGGFKDNRNSRISIKGEENLSEERFLRHILGKLNFMGDVVFANLNDKDGKKIDDNSVNMNRMVRIKTHADLLTRFYKLVANESGVDGVYDKIEISIVNNGKKNPYCKIMDLISEINNQARKYLDEFERLEGVTRIVDEKKYPLVDKKQTRVFLDSFRNSINGMGAFTHAHGEEFTIHKAMGILLKKCHPAIYYLPEAFKKEIYSYIHYITNIGIKNGANYSWNVMSDTKSVALKRATRFDSMENSLSSTVDSCIRYVKKQNNISSDLNVINCIKNNQLLQIYTFVPGIESALNNIIHSMLKNTEAQINKYILIDVNQATDLIEIIVRSEDIMISSFVPEDKHGKLTLATKSTKGLCDYWVEVDSVSLDLTNKRVCFDMHTGKIIDGIIPSFSSGFVHKLRFDTADKIRDTDVENREISAITPIENKIDYLYKVLLLDHNIDDRREIKRNLLEIDGVSEQSLTILKNISQVDFESMKLDIAFIHKNNKETSNIALWETSGIKVIFFSGEIRQNSTINAEKSQFMVKEETMKSAARLKSYFEKKLSGKITT

SEQ ID NO: 1602 - protein, 730 aa, unidentified
  source 1..730: note = Related to JABHLS010000018.1; note = Bacteroidetes bacterium
MEIIFGSKTPGPTTVLAKQIGFPANKLRDILYGPNNRSAHYKRIAIPKNSSTPANPKIRVLHAVSKDLKNLQRATYDYLAAIYSPTKYAKGFVIGESILTNAWPHRRQAVLLKFDIKDFFPSINFYRVRGMFMAWPFNFSPATATIYAQICCMDNGPIAQGAVTSPYISNMICRRLDKRLSQFAQKHHLVFTRYADDITLSSNSKHLAIKKVQQEVVEMIESEKFIVNKEKSKVLFPSQRQMVTGIVVNDGVNVPRKYIKQVRAILYKCETLGVARVVSEHLTHVKPGQPCAPIHRELKPTGEYLDVDVPINRDVYMRNGTDKEISFYQVTLIFLSHLRGRILYIGQVAKANHESIWEVSYASANSPRGYPERTVYLKRYKIYRELLDRYNSIVNFEDYGKELSIKVKSLESRYMEEEEIDFFMARDIEQIKSDMSERAETEARFFYSISPAMLENDIKDKLLIMLNRFPPDIITTRAVLQSAQDTGSMIMRLLHNEVIQREEFDDYFNEYLTVKEKLPYRLEKEITAFLKEASYLFRRENIDEYNFYLDEQFNRDRVIPFKNNSRFVLNPRKTSGGTDAYEMIKGIVHSRAVRDKMNENSVRIMIPEDQNEWRIDLYTHVSSVKWSLHRIIESMVVNSQDTIIHITFEFQREGFSTLRVYNEDVTEIANTPSRALAHGKLKKAMEYLDGLAEYYIEANFAGTGWSSVNMYTNQSQEIESLIGFTHRIVF

SEQ ID NO: 1603 - protein, 679 aa, unidentified
  source 1..679: note = Related to JABGYV010000129.1; note = Candidatus Marinimicrobia bacterium
MKAHIFEVAQELNVKPGVIRTALYVGNRGDYYTLNEIPKRNGGVRTIHAVNGRLRVLQKVAYNWLSNNYSPRHEAKGFVIGGGIIENAKIHRNKKLVICYDLKDFFPSITFARVQGMFMSFPFEFAKPKATLFAQICCLPDENGPIPQGGVTSPFVSNMICRRLDTRLHKLAIKKRMHYSRYADDLTFSTDDNVGYEKFTKIVREIIEDEHFELNEEKSRIRTKSTRQVVTGIVVNEGLNVNRKYIRSLRAALHNCYVHGVLSQIDKKTKYKDPWNTCPPIKKIANKNYVLYKNGASIEIKDAKYKFLEHLFGRIQFIGHVAKSNEHLNPVHHNKRVEIYNNLLEMFEKVRENEKITGKLKIQAKKALYQQQDNALLESIKRYTLDELNEFVDEQKQTDPRYFTYSFSEGDIMEYRDEVGNLAQYPSPTNEMVMQYLNSLKDSENKILGKLVHDTTISFGEFNNFRMQFEKDKIELPKLLRDRLDGFINTDIMNFIKDKDVNFNIFSDITFVEKSINKLKKATRFFNGTGNIGDDETDLVKMIESVFKNARNPNNLNLKIDRLNTFGAYTDVQSVKYALSLIIDSMIDNSNGSTVFCKTDKQNKVIELFDDNSEPLDILPNRDFVNGKLRKTIFTLTALCEYSIIANFKKGGWKNINMMKGEVIESEEYPGFTHQLTFR

SEQ ID NO: 1604 - protein, 382 aa, unidentified
  source 1..382: note = Related to PDTW01000019.1; note = Candidatus Gracilibacteria bacterium
MKDLNLNLITIIIIFIVIIITIFKGKLSVFNKKKRNFNLKFLNKIPILNPDYNTFYIPKRDGSERQIDAPNTQLKNIQKNILRELNKTYLFPSFVSGFKKNASIKNNASKHTNKKIIINIDIEDFFHSITENKIRKTLRAYKELQNEEIEKLINLVTYRGRLAQGAPTSPFIANLVFLGIDNIIIKLLKKYDKKVSYTRYADDITFSSNNTKIKNAIRIIVDSILPKYGYVAKKKKTTIYRAHTKQIVTGLVVNKRVSYPRNKYMKLRAMVFNFLSKGDGNINIIKGHLSFLKSVDRKKYLKLKFYYRRNFKENNNYKVLFNKQKKKHKKASFTNPHTGKREVKFDYSGKKIEKNDYKYESAFENIKKSKKNNDDDKNDLII

SEQ ID NO: 1605 - protein, 341 aa, unidentified
  source 1..341: note = Related to AMFJ01000004.1; note = bacterium (gcode 4)
MLITIIVIISIIVFFITSKIWIGAKKKWIMKMSDLFKRVLEFDAPDLSYTTFTIPKKDWTSRQIEAPNAQLKKTQQTLLHLLSNNIILPWYVTGFRKKFSIKTNAKKHVGREVVINLDIKDFFTNVTTQKLRQRLEYLKVDNEIISRFEKLCFNNWHLPQWAPTSPFLANFIFVPIDEAIIKTAKKYDKNIIYSRYADNITLSSNVKNISNLIRIISEWIMPKFGYTINSKVNLSRKHTRQTVTWITVNEKISMPRHKYMLLRAQVHAYLTKWTWNTLEIAWRLAFLYLLDKKKYWKLQKYYKKKFWETQELSAVFRRNPKKVKLDIYKKWFINPRTWQKF

SEQ ID NO: 1606 - protein, 445 aa, unidentified
  source 1..445: note = Related to NZ_QEKT01000010.1; note = Convivina intestini
MKKDFTNISTYQEFIEYIKSFSEYQYLTRTLSKDFLQRINETQNMGDFYTTKMISKKAGGNRELAIPIEELKHLQKALLGVLKKYQRLSIRKSKWSSNYDYISPAFKSIKIGSHNKFYVNKLDLKNRHTKGIPSHVVHASHHTNKKLVITFDFENFFTTIRPNRIRGIFKGYFKFSDFVCTLLTSITTHFKVGLPQGAPTSPYLSNLATYEFDKAFHKECKKLGIYYSRYADDVALSTNNYSVLYNNSIFSEKPKNGKRLQFCDYLNNLLEQNHLTIKGSKTRVMSYWNRQVVTGIVVNKKISIGKDELVRARSVLINIGKTLTILDYRMGIIAVDKQIKKFYDEYQLRNSHEEELQTIRDDNERSLCMLCIALLTIHSLIEYYSQVMPTNSKLIKIKELYNSIQYNLFYNKNYRHIIIKNNHLFKFNLHSFPIFLIEKLNFQSH

SEQ ID NO: 1607 - protein, 320 aa, unidentified
  source 1..320: note = Related to JAFRDY010000085.1; note = Leuconostoc mesenteroides
MSKLSSINNVASLVKVINHKLYIKKYEPITIDFLKKNIHKYVDRNIPKKRGGFRTLNIPNDQLLHVQEILLELFYESQDRIVRENKWISQIDRSAPAYKPSNYYLNKPAHWIHAQNHVNKAIIVSFDFHDFFGSLYSGRIYSVFIKYFKCNKAVATILTNLTTFNHSLPQGAPTSPFLSNLVMYYFDKTMIKISRENSVRYSRYADDVILSSNDSQFLDNTNFFEKSFNNGQNIEFSEQISKLLLGYHLSLNPNKTRVYNYWNQQKITGIVVNHHTNISRRKLVVHRSILINLIKAIDTKDFDNIKGYEQLKININKALS

SEQ ID NO: 1608 - protein, 837 aa, unidentified
  source 1..837: note = Related to JADJNF010000001.1; note = Saprospiraceae bacterium
MNLFKITSSEFLNFIFANLESSKGIDKDFITLVKNIINYQYKFYQIFLIRKANGKLRPIAAPYPELKSIQKSIVKYLDLNFIPHPNSFGFQKNKDIKGNAKMHLNNKFVFNADIKDFFVSIKFSHFRKKMLPNENIFSDDSNPLSILRVFCFISDAENKQLSKEDTHYFLPQGAPTSPILSNIYFYDLDEKIFDLCKQLNINYSRYVDDLTFSSNENYFENNSDFRNKLVSILNSDGLSLNESKNKLYYKYNTQIVTGLIVNQKLNVHQRVIKDLRKWIYIYERYGIEKLNLIFENDYHSKNRNSRNFKINTFSALESKVAYVGYIKGYRDSTYLILKEKIGNILKHKVIESNEEKSLIILDSSFFIHGKKSYRLKFYDGLNIPIDEITVTKNYFKKNKWKFKKILSDWGISNQSVYFRIVINNPINIDLNTALVVKKGDTIYYEYEDTEFNNSSKRTDDNFEIQVVAYNITDENGYITIVSIDTPNAIKSVVATIPTVNVNQTSEQQKHLKDLRARFLKDKTFIPVKVSNTSSITDYRYGLFSEEKSTHRQVTEEDLLNPKAIVGILSTPWNSEKGEQATVFIKKEQVQLPYPAPIAQTGSVVLLIDNQIHVLHTKKIKDVPVKYKQLTKLLKQFASEANADVRNGIWKQLIGRGSTDGIVIYRTENSNIDVERQGEVVNNRGIGPQLFYNPDTNTIIYEGKRYNVNEENINDIIDDLAERRVHIEEALVETSKDYKKDIVEYLTTDLAELNTKTGTYQIAPTIYTEIGNVEVQDNTKTEVKLTPQEEQAALFDFLPSVAKETKEVVNPKTEEASETTIAKRILPKADGEDMSDIL

SEQ ID NO: 1609 - protein, 422 aa, unidentified
  source 1..422: note = Related to JACSSC010000036.1; note = Candidatus Competibacteraceae bacterium
MKNLMIKDKENILIQPGIFFYTHGYYSATHALDFIHSADSYKKISIPKRNGKIRTVYQPHPKLHAMQSTIKPFLHKVYFKICQKHGMISYEKRSHMSKQAWNRHIELRRRFPTIEDFADHIDELFDEYSDEADKRYGKENPNDKLHMSSMLLDFDYDFFCYKGIDPELSYKKTFKYYGSVVQHARNAVRKPYLFKCDIKDFYPSITDKKLYRILSSEPYNTYISPEIAALIVSVCTHRSRLVQGACTSPILANMFMIHADNFFSKNLKKSCTYNRYSRYVDDLIFASDQPIDAAEISKQISGYLSSMGLQLHPKKTRYLLPHQKKIVTGVVVNQKINIDRRYIRCIRAMLHDAEAQGIEHAALRHASGKHGKIEAIDPQYFLKRLQGMISWVQYVRSPHENNCQQLINRFNNLQKKWEQSKY

SEQ ID NO: 1610 - protein, 544 aa, unidentified
  source 1..544: note = Related to JAEINT010000042.1; note = Labilibaculum sp.
MKKERINTVNDWNKLNKLSGNKEILSHLYKILSRFADTLKNEIIAEIEKKNKPKAEQIKLSKWSISIDRLLYLSGQDNLKKQYHKVEIPKKRGGVRILNIPSKKLRFVQRLLLDFLSENFETHKCAYGFVKGKSIVDNAKLHVNKKHVVCYDIKDFFPSITGRRIYGMLQQYPFNANKDVARIIANIATYYDDEKSEKILPQGSPTSPYLANMICRKMDSRIFNFFKEKNIHYTRYADDLTFSTNDSKKIELILKNVPRFIKEEGFELNNSKTRVQNYYKRQIVTGIIVNKKISLPREYIRGLRALLHNVEKYGWESQVNRKIISFESDDYLKFINFQKETNNEEENKKLQKLTKSKFDEYNKTQNNEHKLIHGKNYIDLRLKSQKYPSQRYTQVDMMKEIIKGKIEFWGMVRNIRDKEGKIIKTDNTYKNLKDEFELLNLMQRKEDVQYIKVSRKFENIIKSYENNKSIDEKTKKEIIDNINSLKKLKNENLSEIVKNMVSPILHNPKRTSEILIKFHKDDNVLKYTNHDWDKEDDNMKFLTN

SEQ ID NO: 1611 - protein, 716 aa, unidentified
  source 1..716: note = Related to CP020382.1; note = Rhodothermaceae bacterium RA
MRLPDWDKATVKAYETRWSALKASGPTDVYSAVATLLSTQSDNPVPEDLIRHLVGSKNRKRHYHTVEIPKRRGGVRTLTVPSDTMKWVQRGLLQVLTHLFPRHRCAVGFERGESPLTHARHHVRKRFVYVVDIEDFFPSITWARIYGMLQAYPFELPPHAARVLANLATYDGALPQGAPSSPILANLLCRKLDSRLFKWARTNGYQYSRYADDLAFSTNKNEFPVSDRKFIEQVIQEEGFSINAEKSRLMPYSRRQMVTGLIVNKKPNLPRSYVRGLRALLHNVERHGWESQVGRTPVFKRAYEWTLYRDKKMSPEKLLGIQLDQIFYDHLVHPTAVLHKARDVASLQRVVQGRIAYLGLVRGKDCPIYQRMRDQYLALVRQESEMARGRAIYQEKAREVESTPDEPKGPNRYAEIKKYEQLPEPEYRSKLQELGVRTLEYLFLLRTNQSFEDLKKVAARIAYSTTTSPEETARFFAEFDDDKTFRGLLHEPIGLELSPGELVGACEEALSRYKLPNKLRKRTEELLEECRVLLHANPDVYPWKNDNLRDKVLLPYKKDTRFDVAHGLTLKERLEEHIQILEKRYDKFFEVDADLMLRTFVPDVLNAIKILLISMAQHTSAGKIHIQVPEVLGQGPIEIHIFDEDSVMQCAPDLLKGVLKGESAGALRRLRGYAYWTITAPFSDGSSYTFNVMTNEKFKAPEPASGVRHTLTFPQV

SEQ ID NO: 1612 - protein, 360 aa, unidentified
  source 1..360: note = Related to NZ_KB907919.1; note = Kushneria aurantia
MVTLGRRITSRHRNIKPVFTLKHLSALSGVDYGFLRHTVGRNTDAYTEFKIKKRSSSDVKKNYRTICVPSPALMKVQRWIAGNILSHVSAHPCSVAFSVGDRLFDAVAPHCPSKWLVKLDVRNFFESIKEVSVYHVFLQLGFEPLIAFEMTRLCTYVASNASNNNDRWHDSFFLPEHVITLYQYPEQGHLPQGAPTSPMLANLASRSLDERLAALADENLVRYTRYADDMTFSSDDVDFGRKRAGLLIKRVYQQLDRQSLSPNTAKTTVIPPGARKLVLGLSVEETVPRLTRQFKNSFRQHIHYLLRDDVGPTKHAAARKFASTTGLRHHLEGLLAFAAQIEPMWAAAQRNRLQAVSWPY

SEQ ID NO: 1613 - protein, 383 aa, Pseudomonas sp.
  source 1..383: note = Related to DAFSJF010000019.1; note = Pseudomonas aeruginosa
MEHWNPQLFRNQAAGVPPELVAHMVTVGRRITSCHRAVQPVFTLKHLAVLSGVDYGFLRHTVGRRTDVYTEFRIRKRPSANGQNRYRTICVPSPALMKVQRWIARNILSHVPAHPCSVAFSAGDSLFKAVAPHCPSKWLVKLDIRNFFESIEETSVYNVFHQLGFEPLIAFEMTRLCTYARSDPSLGPNHRTDGLFLPERIITLYQHPAQGYLPQGAPTSPMLANLVCRTLDDRLSTLADEHSVRYTRYADDMTFSTDKVDFGRESAGVLIKLVYQQLARQALSPNTAKTTVVPPGARKLVLGLGVEEAAPRLTRQFKDLLRQHIHYLLHDDVGPIKHAAARKFASTTGLRHHLEGLLAFAAQIEPSWAATQRSRFNTVSWPY

SEQ ID NO: 1614 - protein, 383 aa, Citrobacter sp.
  source 1..383: note = Related to NZ_RHWV01000005.1; note = Citrobacter farmeri
MERWNSQIFRNNAVGVPPELVVHMTAVGKRITSYNREVQPVFTLKHLAVLSGVDYGFLRHTVSRDTNAYTEFRIRKRSSVHGQTHYRTICVPSPSLMKVQRWIARNILSHVPAHPCSVAFSTGDSLFKAVAPHCPSKWLVKLDIRSFFESIDEISVYHVFKQLGFESLIAFEMARLCTHVGAEPSHEPDMGHDSHVLPERIIKLYQHSRQGHLPQGAPTSPMLANLVCRSLDERLSTIADKHSVRYTRYADDMTFSSNEVDFGRERAGRLIQLVYQQLNRQALRPNTAKTTVVSPGARKLVLGLSVEEDVPRLTRQFKESLRQHIYYLLHDDIGPAKHAATRKFASTIGLRNHIEGLLAFASQIEPTWAALQISRFQTVSWPH

SEQ ID NO: 1615 - protein, 382 aa, unidentified
  source 1..382: note = Related to NZ_CADEYZ010000005.1; note = Burkholderia gladioli
MQRWNPQLFRKQASGVKPELLAHLVKVGRRITQAHRDVQPVFTLRHLAALSEVDYGFLRQTVARRTEAYAEFKIKKRGSEHLSPQYRTICAPSPSLMKVQRWITQNILAHVPAHNCSVAFSKGDSLYKAVEPHCLAKWLVKIDVQSFFESISESTVYRLFNNLGFEPLVAFEMARLCTRDQHDAQHKKEQWKDYSPASLYVIEQYMHSVQGHLPQGAPTSPMLANLVCRALDERLAAIAEEQNLNYTRYADDITFSSLDPNFEREMAKALIQRVYRELARQGLKPNTAKTTVVPPSARKIVLGLSVEEETPRLARHFKDLLRQHIHYLTHPEVGPIKHATARKFASVVGLRHHVGGLLTYAAQIEPDWAAKQRMRFLEVKWP

SEQ ID NO: 1616 - protein, 384 aa, Pseudomonas sp.
  source 1..384: note = Related to JABEMH010000060.1; note = Pseudomonas fragi
MERWNPQLFRKQASVVAPDVLAQCIAVGRRITALHRDVQPVFTLKHLAVLSEVDFGFIRQTVARRTDAYTEFRVKKRSTQNGDPRYRTICVPSPGLMKVQRWIAQNILAHVPAHACSVAFSKGDSLYKAVEPHCSAKWLVKLDIRNFFESISEASIYLTLQSLGFEPLIAFEIARLCTRVVDDGMHRNDRWLNNFKHLSPYVIAQYTQTQQGHLPQGAPTSPMLANLVCRALDERLLAVAERADVRYTRYADDMTFSSDDASFGRDRAQKLIQAVYKQLACQSLSPNMAKTTIVPPAARKVVLGLSVEEAEPRLTRQFKALLRQHIYYLSRRDVGVIKHASARGFTSVTGLRHHLEGLLAFAAQIEPKWAAIQRSHFQAIKWPY

SEQ ID NO: 1617 - protein, 383 aa, unidentified
  source 1..383: note = Related to SEFB01000022.1; note = Rubrivivax sp.
MERWSPRQFRKEAKDVDPDVLQRAIAVGNRIVELNREVQPVFTLKHLSVLSGVGYGFLRQTVARRTESYTAFRIQKRPTPDGERRYRTICVPTPALMKVQRWIAQNILKHVPAHDASVAFSKDDTLYKAVEPHCSAKWLVKLDIRKFFESISEASVYLVFRSLGFEPLISFELARLCTRVVDAPMYRSDAWLNAHWNDEYVIEQYRQVWQGHLPQGAPTSPMLANLVCRKLDERLASISESFSVQYTRYADDMTFSSVDRSFDRARAMKLIGKAYEQLSLQGLGPNKTKTSVTPPGGRKVVLGLLVEEEKPRLTREFKAMLRQHFYYMLREDVGVVRHASSRGFISITGLRNHLQGLLGFAAQIEPEYAARQREKFSRVSWPL

SEQ ID NO: 1618 - protein, 386 aa, unidentified
  source 1..386: note = Related to JAHNIZ010000026.1; note = Paraburkholderia fungorum
MERWSSHQYKKVAHERGVPSAVVENAVAIGREIVRKNPNVQPVFTLRHLAELCEVDYALLRQYVSRGFDPYESFRVRKRPGPNGERRYRIICVPNPPLMKAQRWITQNVLQYGVVHNASVAFAPKSKLLHATEPHCNARWLIKLDIKRFFESIPERFVYRVFRDFGYQALVAFEMARLCTRLYPGPLFDSRKWTSSGLRESPYKIHAYDQSWQGHLPQGAPTSPMLANLVCYKLDELLADLADSDGLQYTRYADDLTFSTNSKEFSREQAAAVVGKVFQHLAQMGFSPNRSKTSVIPPRGRKVVLGLLVDGSRPRLSREFKASLRQHLYYLTLDGWGPVKHAKVRGFASLVGLRDHVLGLIGYAGQIEPAYALARRREFETIKWPI

SEQ ID NO: 1619 - protein, 395 aa, unidentified
  source 1..395: note = Related to CP000050.1; note = Xanthomonas campestris
MSDWRPQHYRKNAPAGSPASTIDAALEVASITSTANSRLPPIFSLRHLAHYTSINYNILRAAISRSGPEPYRSFRIRKRTEKSSERYRHISVPSHALMCVQRWINQRILQQCQVDDASTAFAKDSKLIEAATIHCKSRWLVKIDVRNFFDSINEISIYRVFNSLGYQPLVAFELARLCTRKSARHSKNWLNFRPETRDVWAAPDDEGKAWSSDMVIKSYDALHQGYLPQGAPTSPMLSNLAMRSFDEKVRDLALKRGFFYTRYADDISLSTERTSSRVTCVELIRDVHQLLHEEGLSPNFAKTKIVPPGAKKIVLGLLVNGEKPRLTREFRLRLRQHLHFLEKPNGPVEHAAKRKFASVSGLRHHLLGLAAYAAQIEPEYGQDIQQRLRNIPWPS

SEQ ID NO: 1620 - protein, 396 aa, unidentified
  source 1..396: note = Related to JAIOAG010000002.1; note = Stenotrophomonas maltophilia
MSDWRPQHYRKHAPCGLGSGVLDAAIKVAAGTRQANAKLPPIFSLRHLAHYSGINYYVLRAAVSRSGVEPYRSFRIHKRPPSHVRRYRHISIPSPALMQVQRWINQRILQQCEVDEASVAFAENCKIFDAAKLHSQSRWLIKIDVRDFFDSINEISVFHVFNRLGYQPLVAFELARLCTRESHHRKGKNWKNFRLKDNEIPSLWDESEPRWKSNMVIKSYDSQHQGYLPQGAPTSPMLSNLVMKDFDEKVGALASENGFFYTRYADDITLSTADQSSRTDCVQLMRAVYQLLHEKGLSPNVAKAKIVPPGAKKIVLGLLVNGDKPRLTREFRLRLRQHLFFLEKENGPVEHAKRRKFASVSGLRHHLMGLAAYAAQIEPAYGLKIQQRLMTISWPS

SEQ ID NO: 1621 - protein, 396 aa, unidentified
  source 1..396: note = Related to NZ_RWJW01000004.1; note = Xanthomonas axonopodis
MSDWHSQRYRKAAPAGQSSAVIDAAIQTASITKQVNAKLPPIFSLRHLSHYTSINYNILRAVVSRSRRESYRSFQIQKRSGRGASRFRSISVPSPALMQVQRWINQRILQQCKVDEASVAFAKHATLTEAAKIHCQSRWLIKIDVRNFFHSINEISVYRVFKSLGYQPLVAFELARLCTRQSLIGPGKQWENFRSTKDDIQAALDDKPVMWSSDMVIKSYDSPRQGYLPQGAPTSPMLSNLVMRSFDQKLRDLASESQFYYTRYADDITLSTTEPSSRATCLALMRKVYQLLHDEGLSPNAAKVQIVPPGAKKIVLGLLVNGDTPRLTREFRLRLRHHLYYLEKPNGPVEHAAKRDFASVSGLRHHLFGLAAYASQIEPAYGAQIQQRLRSIPWPA

SEQ ID NO: 1622 - protein, 397 aa, unidentified
  source 1..397: note = Related to MTCS02000083.1; note = Haliangium sp.
MTRWRPQRYRAGAVAKGISPQIVEHALRTAEITHAVNGKLPPILTLRHLAEYTGVDYGTLRSVARRSDEVSYRVFRIRKRPAHKGERRFRVIAVPSAPLMQIQRWINKRVLMHADVHPASVAFAEDDNIREAAAVHCQCKWLIKLDVLNFFESISEISIYKVFRSLGYQPLISFELSRICTRISKSTANRSSERWINFRPGSAVDTDGVSSISGMTIRAYDEYRIGHLPQGAPTSPMLANLAMRELDQNLTEVAKVHGLFYTRYADDLTFSTREDSDRRKCQHIIGQIYRALANVGLSPNRCKTRIIPPGGRKIVLGLLVTGPEPRLMRDFKARLRQHFYYLERPNFGPSQHARKLGFSSVIGFRHHLAGLVSYAAQIEPEYGQRMRNRLKNIKWPI

SEQ ID NO: 1623 - protein, 392 aa, unidentified
  source 1..392: note = Related to JAAXRA010000003.1; note = Rhizobium laguerreae
MTTWRPQHFRSAATAAGRDPSTIRNALAVAENIRRHNPALPPIFSLKHMAELTGNDYGVLRSIVKRDEPDPYRIFTIRKRPSFDGERRFRLITVPRPALLRTQKWICQQILAKATPHGSSVAFSKGNTLFDAARPHCESRWLIKMDVRNFFESINEIAVYRVFRSLGYQPLVSFELARVCTRLGGPTPLRSTPRWHYDPKNWPSISAYQVYRYGYGPRMGHLPQGAPTSPMLANLAMREFDHAVDEIAARHGLRYTRYADDLTFSTDSDDFDRGKAGHFIGLVYKEMGKVGLSPNITKTRVASPGARKVVLGLLVDGKRPKLPREFKQNMRRHIFCLTHEGLGPVRHAQERGFSSVRGFRRHIQGLLAFANQIEPEYAAGCRQQLRGVVWPL

SEQ ID NO: 1624 - protein, 392 aa, unidentified
  source 1..392: note = Related to NZ_NWSJ01000022.1; note = Rhizobium anhuiense
MTSWRPQHFRSAAAAAGRDPSTIQNALAIAQGIRQHNAILPPIFTLKHLAELTGTEYAALRSIVKRDEPDPYRIFTIRKRPSYDGERRFRLITVPRPSLLRTQKWICQQILANIVPHSSSVAFSKGDTVYDAANPHCESRWLIKMDVRNFFESINEISVYRIFRSVGYQPLLSFELARICTRLGGATPLRMTPRWNYNSRQWSAISSYQVYRYGHGPRVGHLPQGAPTSPMLANLAMREFDRRVDHLATHHGLRYTRYADDLTFSTVSDDFDRGLASHFIGLVYAEMGKVGLSPNVTKTRVASPGARKIVLGLLVDGKAPKLTREFKQNMRRHIFCLTHEGLGPTRHAEERGFSSVRGLRRHIQGLLAYAKQIEPDYAANCRRQLQSVVWPL

SEQ ID NO: 1625 - protein, 390 aa, unidentified
  source 1..390: note = Related to NZ_BCYZ01000072.1; note = Sphingomonas pruni
MTSWSPQHFQTVADSAERDPKVIQNALTAARVIRSTNPALPPVFTLGHLAHLTGSEFFQLRSVARRDEPDPYRLFRIRKRPSFEGERRFRIITVPQPHLLRVQRWITQAILANALPHQASVAFSKGNRLRDAAAVHCNSSWLIKLDVTNFFESISEISVYRIFRSLGYQPLISFEMARICTRLGGPTTRKRGERWRVHFKPREIKSYDVYRPFGGARVGHLPQGAPTSPMLANLAMRSFDTEVDKLAVEHGLRYTRYADDLTFSTKGEFSRDQAAHVIGLAYKAMGRVGLSPNATKSRVAPPGSRKMVLGLLVDGAEPRLPREFKESMRRHLYYLCRTDIGPVAHARARGFASTIGMRHHIEGLLSFAKQIEPSYAAECKRKFANIDWPI

SEQ ID NO: 1626 - protein, 372 aa, unidentified
  source 1..372: note = Related to NZ_CP021467.1; note = Komagataeibacter europaeus
MANALATASQLKIPSLPPVFTLAHLAQQAGVDYGVLRRVAQRSPNEGYRVFRIRKRPAYTGERRYRQIAVPSPQLMKVQRWITQAILSKAAAHSASVAFSKGDKLADAAAPHCGCKWLIKMDVRNFFESINEIAAYRVFRSLGYQPLVSLEMARISTRLAGWSPRRATNRWRVEDWRHMERRWSEIEAYQAYRDDSGPLLGHLPQGAPTSPMLANLAMREFDAQAAAIAEQNGMIYTRYADDLSFSTDQPITKADCRRLIGTIYNLMGTIGLSPNVTKTRVSPPGARKIVLGLLVDGKKPRLSREFRALMRQHLHYLMKDGVGPVRHARARGFVSVAGFRNHLRGLATYARQIDVVYGDGLLRELDKVSWPV

SEQ ID NO: 1627 - protein, 383 aa, unidentified
  source 1..383: note = Related to SADI02000018.1; note = Mesorhizobium sp.
MSRWSPQQYRSNAQNIDPDIVAHAIETARLIHEVNAEITPVFTLRHLAYATDVDYGLLRAIASRAHGEPYRLFVIKKRPSRSGEKRFRVIAVPSPGLMKVQRWITHRILGHIRPHPASVAFSKGDKIVSAVRPHCGARWVIKMDVRNFFESINEISIYRVFRSLGFQRLISLEMARICTRLGTPTISRLHQRWKSNYQRETIHVYGAGRMGHLPQGAPTSPMLANLAVRKLDELIEEIATKCGMIYTRYADDLTLSTKDMTFNRDQAGIVIGKIYAAMGLYGLSPNITKTNILSPGSRKIVLGLLVDGEKPRLSRDFRNLMRQHLHYLGSLKHGPAEHASKRGFSSIRGMKHHIYGLATYARQIEESYGIECIAALNKIEWPI

SEQ ID NO: 1628 - protein, 383 aa, unidentified
  source 1..383: note = Related to RZQP01000036.1; note = Mesorhizobium sp.
MSRWSPQQYRRSAKDTDPGIVANAIETAKLIHAVNADVAPVFTLRHLAHAADVDYGLLRAITSRADGEPYRLFLIRKRPSHTGEKRFRVIAVPSPALMKVQRWITHRILGHVRPHSASVAFSKGDTLVAAAEPHCGARWIVKMDVRNFFESINEISVYRVFQSLGFQRLISLELARICTRLGSLTTSRKNPRWWSNRERETIKVYGARRMGHLPQGAPTSPMLANLAVRKLDELIEEIAAKHGMIYTRYADDLTVSTKDKTFNRDKCRAVIGEIYAAMAKHGLSPNTAKTIILSPGSRKIVLGLLVDGEEPRLQRDFRILMRQHLYYLTSPKHGPADHARIRGFSSIRGMRHHIHGLATFARQVEKPYGEECLSALNKVNWPV

SEQ ID NO: 1629 - protein, 385 aa, unidentified
  source 1..385: note = Related to LMHK01000002.1; note = Devosia sp.
MTRWNPQQFKRDAERAGLDPAVTANAIRTARLVTSVDPDLPPVLTLRHLAALTRSDYLMMRGIAMRSQNEHYRLFRIRKKPAHDGEKRFRVIAVPEPGLMRAQRWIAQRILARIRPHGASVAFSKGDKLVEAARPHCGARWLIKLDVSNFFESINETAVYRVFRSLGYQPLVCMEMARLCTRLGTTTHYRSRPRWLLTRERSTIEVYSRRRMGHLPQGAPTSPMLANLAVRLFDEAIQELADANDLAFTRYADDIALSSQDAKFGRDRCAAVIGKVYAKMGEFGLSPNATKTRVASPGARKVVLGLLVDGDEPRLPRDFRANMRRHLHYLCVPGADIAVHAAARGFDSISGMKNHVFGLAMFARQIERDYGDECLSKLNAVAWPR

SEQ ID NO: 1630 - protein, 384 aa, unidentified
  source 1..384: note = Related to JAAOYS010000006.1; note = Dyella sp.
MEDWLPQLYQKQGTEAGIAPRVLANANLTAKSIRAVNRHVPILFSLNHLAVRCGVPYSFLRAVVERHDFQFYRSFRIRKRPLKGRVRFRLISAPVPFLMRVQRWIAQEILSNGYPHETSTAYAKRSSPLKAAALHCDARWLIKIDVMNFFESITEVSAYRAFRRLGYQPLLSFEMARLSTRVRSALRQLPSPYWHTQAHRWPKIESYQCWRKGGLPQGAPTSPMLANLASIALDECLAEVARKYRLTYSRYADDLCFSTSGDFSRKDCAGVISEVYAGLRKFGLRPQTMKTTVSPPGARKVVLGLLVDRNTPHLTREFKARLRQHLHYLRKADVGPARHAERRGFSSVIGLRHHVEGLVEYASSVDAVYGESRRRELAEVSWPF

SEQ ID NO: 1631 - protein, 383 aa, Bacillus sp.
  source 1..383: note = Related to NADW01000002.1
MENWLSQRYRMDANKQGVDPEVVEHAVATAENIRSINPNVPLLFSLKHLALRAGVPYEFLRAVVERQERHFYRTFRIRKRPLEGRIRFRLIAAPVPPLMSVQRWIATQILSEGHPHEASVAYARHSSPLKAASFHCNARWLIKIDVMNFFESITEVAAYRAFRRFGYQPLLSFEMGRLCTRVRSWRRQAPPYWQSKSWRWGKIDSYKFSTKGALPQGAPTSPMLANLTALELDALVTRLANKHGLVYTRYADDLCFSTPGEFSRAQCSQLVGEVYKALRRFGLRPQTMKTVIAPPGARKVVLGLLVDGQKPRLPREFKARLRQHLHFLTHPSVGPALHAARRGFASIIGLRHHVSGLIEYAASVEPAYGARCRSQFANVQWPF

SEQ ID NO: 1632 - protein, 385 aa, unidentified
  source 1..385: note = Related to QQSY01000005.1; note = Dyella solisilvae
MTHWSPQRYRSLGQRRGIDPSVLENAVRTGNITCAANPHVPTLFSLKHLAYRSGVDYSLLRAIVERRDPEPYRTFKVRKRSSSPQHARYRVIAVPSPALMRVQKWIAQRILAVAPAHSASTAYGKNCNISDAVLPHCSSRWLIKLDVRSFFESISESAAYGVFRKLGYQPLISFELARICTRVYSKTRLRSYKYWDVEPARWSAIPSYQYFRKGSLPQGAPTSPMLANLAVRQFDANITAIAEKYGLIYTRYADDLALSTSGEFSRQKCHSVIQKVYGEMRAFGLSPNATKTAISPPGARKLLLGLLVDTDRPKLTREFRAKLRQHVFFLQSPKAGPVKHARHLGFQSLIGFRHHIHGLVNYAYEIEPAFGERYKEALKAVEWPL

SEQ ID NO: 1633 - protein, 383 aa, unidentified
  source 1..383: note = Related to JACRPC010000021.1; note = Rhodospirillales bacterium
MTMWRPQSYQRRGKELGIEETLLARACAIGSAVIAVNPALPPVFTLRHLAYQVDADYGLLRAIISRSLRDPYKVFRIRKRPSTVGEKRFRVICVPDPELMRVQRWISQRILSHANPHSASVAYAKGSTILAGAEPHCGCRWLIKLDVRNFFETISEIAVYRVFRSLGYQALVAFELTRLCTRLGTKTPLRIGQRWQVHFGRHMVIGDYSASRMGHLPQGAPTSPMLANLAVLAFDGEVNEIANKHGLIYTRYADDIALSTTDKTFSRTVAAKVIGEVYAAMGRYGLSPNVTKTRVSSPASRKVVLGLLVDGNAPRLTREFKANLRRHLHYLGRPDVGPAKHAAARGFAAIAGLRHHVEGLVAFARQIEPEYGERSAKLLVDRL

SEQ ID NO: 1634 - protein, 388 aa, Pseudomonas sp.
  source 1..388: note = Related to CP032456.1; note = Pseudomonas savastanoi
MKDWTPQHYRRAPGAANLPASVMEAAIAASGKTVAVHSSLPPILTLNHLAHLTQVPYKHLRDYVTREIESYKIFRVRKRARPGKPTTFRVICVPPPSLATAQRWIAQHVLSKARPNAASTAFAPGSKLVDATAPHCASRWLIKVDVQRFFESISEVDCYRVFRSLGYQPLVAFELSRLCTRTGNFSRLHRAIKWRRKISLSKSKIPGYASRDIGHVPQGAATSPMLANLVMREADTLMTSLADRLGLTYTRYADDLTFSTSDPKFDRQTAIKTVNEAYAILRRFGFTPNIAKTTIASPRSRKIVLGLQVDQDKPRLTRAFKMKMRMHMYYLERRDIGPLVHAERRGFSAVAGMRNHLMGLAAYAIQIEPEYGRNLRERLEALDWPVLY

SEQ ID NO: 1635 - protein, 388 aa, Pseudomonas sp.
  source 1..388: note = Related to NZ_CP018420.1; note = Pseudomonas veronii
MKDWTPQHYRRAQGASSIAPLVMDAAIVTSQKTVAVHPSLPPILTLKHLAHLTQVPYKHLRDYVTREVESYKVFRVRKRGRLGQPTSFRVICVPPPSLSVAQQWIAQHVLAKAKPHAASTAFAPNCRLIDAASPHCTSRWLIKVDVKRFFESISEIDCYRVFRSLGYQPLVSFELSRLCTRTGNFSRIRRTVKWRRKVSLSKSKIPNYASRDIGHLPQGAATSPMLANLAMREADILLTELAERLGLTYTRYADDLTLSTTDVTFDREQARRTVNEVYRILQRFGLNPNLAKTTIASPRSRKIVLGLHVHQETPRLTRAFRMKIRMHLHYLERKDVGPLKHAERRGFSAVAGMRNHLMGLAAYAIQIEPDYGREVKARLEAVEWPVLY

SEQ ID NO: 1636 - protein, 388 aa, Pseudomonas sp.
  source 1..388: note = Related to PPEF01000002.1; note = Pseudomonas protegens
MKDWTPQHYRRSKGASNVPTAVMNAAIATSQKTVAINPSLPPILTLNHLAHMTQVPYKHLRDYVARDVESYKTFRVRKRARPGRPTSFRVICVPPPSLAVAQRWIAQHVLAKARPHAASTAFAPKCKLIEAAAPHCSSRWLIKVDVQRFFESISEIDCYRVFRSLGYQPLVSLELSRLCTRVGHFSRMRRAIKWRRKAPLAKSKILKYASRALGHLPQGAATSPMLANLVMREADTLLTSLADRFGLTYTRYADDLTFSTADTAFDRKSARNAVNEVYGILRRFGLTPNLFKTNIVSPRSRKIVLGLQVGQDVPRLTRAFKMKMRMHLYYLEREDVGPLAHAERRGFSAVAGMRNHLMGLAAYAIQIEPEYGMGVKARLEAVQWPILY

SEQ ID NO: 1637 - protein, 388 aa, Pseudomonas sp.
  source 1..388: note = Related to CP077977.1; note = Pseudomonas aeruginosa
MKDWKPQHYRRAPGASKVSVPVLAAAIATSEKTVAVHPSLPPILTLKHLAHLTGVPYKHLRDYVSRDTEAYKIFRVRKRARPGTLTSFRVICVPPPSLAIAQKWIAQHVLAKAKPHSASTAFAPNCRLVDAAKPHCASRWLIKVDVQRFFESISEIDCYRVFRSLGYQPLVSLELSRLCTRVGRFNGMRHGIKWRRKASIKKSKIVRYALLRLGHLPQGAATSPMLANLVMRDADELLTSMADQLGMTYTRYADDLTFSTASPVFERQTARRVINEIYQVLRRYGLTPNLAKTTIVPPRSRKIVLGLQVDQDEPRLTRAFKMKMRMHLHYLEREDVGPLKHAERRGFSAVAGMRNHLMGLAAYASQIEPTYGRDLKDRLEKLDWPVLY

SEQ ID NO: 1638 - protein, 388 aa, Pseudomonas sp.
  source 1..388: note = Related to NZ_LT629756.1
MKDWKPQHYRRAPGAADVPASVMAAAIATGAKIVAVQRSLPPIFTLKHLALLTQVPYPHLRDYITRKTDAYKIFRVRKRARPGQPTSFRVICVPPHSLAVAQHWIAKHVLAKGVPHSASTAFAPDCRLIDAAAPHCASRWLIKVDVQRFFESISEVDCYRVFRSLGYQPLVSLELSRICTRIGPLNSLRRSAKWFRKAPLAKSKIRSYAVPRIGHLPQGAATSPMLANLAMKEADVLLTALANRYSLNYTRYADDLTFSTADHSFKRNDARMAVHEIYGVLRRFGLAPNLTKTAIVSPRSRKIVLGLQVNQDVPRLTRDFKMKIRMHLHYLEREDVGPLKHAERRGFSAVAGMRNHLMGLAAYAAQIEPAYGQAIKARFERIAWPVLY

SEQ ID NO: 1639 - protein, 388 aa, Pseudomonas fluorescens
  source 1..388: note = Related to NZ_CABVIT010000001.1
MKDWKPQHYRRAAGAVGVPAPVMAAAIATGQKTVAIHPSLPPILTLKHLAHLTQVPYLHLRDYIAREIDAYKIFRVRKRARPGQPTSFRVICVPPHSLAVAQQWISQNVLAKGKPHHASTAFAPNCRLVDATAPHCSSRWLIKVDVQRFFESISEVDCYRVFRSLGYQPLVSLELSRLCTRVGPFNGLRRSRKWFRKAPIEKSKIRPYAVSRLGHLPQGASTSPMLANLAMREVDGLMTAMADRYGLTYTRYADDLTLSTSDPEFQRKDARKAIYEIYGILRRFGLNPNLTKTAIVSPRSRKIVLGLQVDRDEPRLTRAFKMKLRMHLHYLEHEDIGPLKHAERRGFSAVVGMRNHLMGLAAYAIQIEPDYGKDIKMRLERVKWPVLY

SEQ ID NO: 1640 - protein, 388 aa, Pseudomonas sp.
  source 1..388: note = Related to FNJJ01000006.1; note = Pseudomonas guguanensis
MKDWKPQHYRRSPGASAVSSSVMAAAIATAQKTVAVHSSLPPILTLKHLAHLTQVPYLHLRDYVSREVEAYKIFRVRKRARPDQPTSFRVICVPPQSLAVAQRWIAQHVLAKGKTHPASTAFAPNCRLVDAAAPHCASRWLIKVDVQRFFESISEVDCYRVFRSLGYQPLMSLELSRLCTRVGPFNGMRRSRKWFRKPPLSRSKIKSYAVWRLGHLPQGAATSPMLANLAMRDVDVLMTGLADRYGLTYTRYADDLTFSTADPGFEREDARKAIYEVYGVLRRFGLTPNLAKTTVASPRSRKIVLGLQVDQDAPRLPRAFKLKMRMHLYYLERDDVGPLKHAERRGFSAVTGMRNHLMGLAAYAIQIEPAYGKDIKARLERVKWPVLY

SEQ ID NO: 1641 - protein, 389 aa, unidentified
  source 1..389: note = Related to JAESND010000005.1; note = Jeongeupia naejangsanensis
MTDWKPQPYRRAAEDLGISKAVLDASIAASLAVVDVNPSLPPILTLKHLSHLSGVPYQDLRLIVSRENADPYKIFRIRKRPRRDGLTQFRVICIPEVKLAEVQQWIARKVLAHGRPHSASTAFAPGSRLVDAVQPHCGSRWIIKVDVRRFFESVSEIAAYRVFRRLGYQPLMSLELARLCTRVGPITKLRRTRHWTRVAPLDAATIRSYAVRHLGHLPQGASTSPMLANLVMCDADAELTKAAESFHLIYTRYADDLTFSTRNAAFDRSAAVTLIKQVYRVLGRFGLEPNLAKTQVVPPRARKIVLGLLADQDVPRLTREFKKKMRMHLYYLERADVGPVRHAQQRGFSAVAGLRNHLLGLAAYASQVEPMYGAELRKRLMAVSWPIVY

SEQ ID NO: 1642 - protein, 389 aa, Chromobacterium sp.
  source 1..389: note = Related to CP029554.1; note = Chromobacterium phragmitis
MTDWKPQPYRRAAQSLGISEAVLDASVAASQAVVAINPSLPPILTLKHLSYLTGTPYQYLRQVVSRDELNPYRVFRVRKRPTPCGRVQFRVICVPDIKLAIVQRWIARKVLALGRPHSANTAFAPGSRLVDAVEPHCGSRWIVKVDVRRFFESISEISAYHAFRLLGYQPLMSLELARLCTRVGNFSKLRRQRRWIRLAPRHVAKISSYAVPRLGHLPQGAPTSPMLANLTMCEADAVLTKAAESFGMVYTRYADDLTFSTSKDSFDRKDAKVLIKQIYQILGRFGLVPNLAKTQVVPPRARKIVLGLLVDQSTPRLTREFKNKMRMHLYYLERADIGPIQHAQKRGFSAVVGLRNHLMGLAAYACQVEPKYGDELKKRLKAVPWPVVY

SEQ ID NO: 1643 - protein, 389 aa, unidentified
  source 1..389: note = Related to FOZE01000001.1; note = Mitsuaria sp.
MDDWKPQPYIRQAQQLGVAQSILDAAVAASEAVVAAHPSLPPILTLRHLAHLTDTSYLKLRDWVSREIEDPYRVFRIKKRPVAPNCTAFRTICVPDVELAFLQRWLSRNVLSWGRPHSASTAFAPGSTLLAAVEPHCGSRWLVKLDVRRFFESISEVSVYKAFRRLGYQPLVSLELARLCTRVGPASRLYANARWTRRAPRYVAAIRKYAVVRFGHLPQGAPTSPMLANLVMRDVDEELTKVAKLHGMTYTRYADDLTFSTPRRDFGREIAVELIQKVYRSLGRFGLQPNLAKTQVVPPRSRKVVLGLLVDGKEPRLTREFKNKMRQHLYYLERPDVGAVRHAQARGFSAVAGLRNHLLGLAAYASQVEPQYGAELARRLNAVSWPVVY

SEQ ID NO: 1644 - protein, 390 aa, Alcaligenes faecalis
  source 1..390: note = Related to NZ_CP013119.1
MNDWKPQPYRREAQRRGVSPEVLAAAIAASEAVVAVNPSLPPILSLRHLSHLTGVPYQLIRAWVTREGAGESPYKTFSIRKRPKKDGTKQFRFICVPQHDLGLTQRWIASKVLALGRPHSASTAFAPKSKLFEAVEPHCECKWLIKVDVQRFFESITEIAVYQVFRKLGYQPLVSLELARICTRLGPPGRYRPPARWRRHAPLDAHIINSYSTRALGHLPQGASTSPMLSNLVMVDLDEKLSKLASSVNMTYTRYADDFTFSSHATDFNREAAERFIKDIYHALGQFGLKANLAKTQIIPPRARKVVLGLLVDGKTPRLTRKFKAKMRMHLYYLKHAEVGPLRHAERRGFSSIAGLRNHLLGLAAYAIQIEMEYGLELKTRLEAIQWPLL

SEQ ID NO: 1645 - protein, 389 aa, Pseudomonas sp.
  source 1..389: note = Related to AKJM01000112.1
MTDWKPQPYRRAAEELGVSEAVLEAAIAASEAVVAVHTSLPPILTLGHLSHLSGVSYQDLRSFVSRDEPDPYKVFRVRKRPQPDGRLRFRVICVPDARLGDAQRWIARHVLVHGRPHSASTAFAPKARLIDAVRPHCGSRWLIKIDVRRFFESISEISVYKVFRRLGYQPLVSLELARLCTRVGPNTWLTRTQRWWRRAPLHVSTIRNYALPRLGHLPQGAPTSPMLANLVMREADIELSKIAKSYGLNFTRYADDLTFSTTKPKFDRAAAGSLIQQVYQVLGRFGLEPNLAKTQVVPPRARKIVLGLLADRDAPCLTREFKNKMRMHLHYLEHEDIGPVRHAQHRGFSAVAGLRNHLLGLAAYASQIEPVYGAEIKTRLMAVPWPIIY

SEQ ID NO: 1646 - protein, 390 aa, Pseudomonas sp.
  source 1..390: note = Related to NZ_LT629691.1; note = Pseudomonas thivervalensis
MKDWKPQPYRRIAQELGVSDAVLRSALAASEAVVAVHPKLPPVLTLKHLSRLSGVGYMDLRRYVSREDPHTYKVFCIRKRPQPDGRIRFREICVPEHSLCDVQQWIVRHILVHGRPHSASTAFAPGAKLIDAVQPHCGSRWIIKLDVRRFFESISEISVYNVFRSLGYQPLVSFELARICTRIGSDKTWLSKTRRWRRKAPLHVAAIRNYSAKQLGYLAQGAPTSPMIANLVMRAADAEISALSEPFGITYTRYADDLTFSTNSAHFDRTTASALIRKVYQTLGRFGLQPNLAKTQVVSPRARKVVLGLLADGVSPRLTREFKGKLRMHLHYLEHVDVGPIKHAQRRGFSAVAGLRNHLLGLAAYAIQIEPEYGYAVKARLMAVHWPIIY

SEQ ID NO: 1647 - protein, 389 aa, unidentified
  source 1..389: note = Related to NZ_VEHL01000001.1; note = Bordetella sp.
MENWRSQHYQSVGRSQGIAPEILNAATQTGTAIVRTNARLQPVLTLRHLAYLADCDYGFLRAVVGRAIENPYRVFAIHKRPAPSGNARFRTICAPDPRLLGVQRWLVTNVLNHAPTVHPASKAFAPECTLVKAAEPHCGARWLVKVDVRNFFESISEIAAYRAFRALGYQALVAFELARLCTRLGRFTPRRSHPQWLRKRNRIYRIASYNHAEGRIGHLPQGAPTSPMLANIAMQAADAEFDMLASSAGMVYTRYADDIVFSTKDKDFTRDLAAGLVGSAYRILGKYGFSPNVAKTEIIPPRARKVVLGLLVDDLTPRLPREFKEKMRMHLYYLKRDDIGPVRHAKKRGFIAVASLRNVLYGLAAFATQIEPTYGSRIRRDLDAIEWPT

SEQ ID NO: 1648 - protein, 391 aa, unidentified
  source 1..391: note = Related to NZ_CP028901.1; note = Orrella marina
MENWHPQHYQAVGHSQGISPDVLAAAMQTAKVILRVNPRLQPVLTLRHLAYLTDCDYGYLRAVIGRGIENPYRVFTIHKRPGPSGNARFRTICAPDSQLLKVQRWLVTNILNHATAAVHSTSKAFAPGCTLMKAAEAHCGARWLIKVDVQNFFESVSEIAAYRAFRNLGYQALVSFELARLCTRLGHNTPRRGHAQWLRKKAGVAYKISKYNHSMGRIGHLPQGAPTSPMLANLAMRAADAEFDNLARIDGMTYTRYADDLVFSTCDSGFTRDKASAIVGSVYRILGKYGFSPNVAKTEIVPPRARKIVLGLLVDEPSPRLPREFKEKMRMHLYYLKKDGIGPARHASKRGFISVAGMRNVLYGLAAFATQVEPTYGSSLRQDLDAIPWPT

SEQ ID NO: 1649 - protein, 390 aa, unidentified
  source 1..390: note = Related to JACRAR010000013.1; note = Betaproteobacteria bacterium
MENWRSQHYRNFGTRKGVSPEILEAAVQTGEAIVRTNARLQPVFTLRHLAYLTDCDYGLLRAIVGRSLQNPYRVFRIHKRPRSDGLNRYRTICVPDPQLLAVQRWLASNILNHAASSIHAASTAFAPGCTLLRAAEPHCGAKWLIKVDVQNFFESVSEIAAYRAFRRLGYQALLAFEFARLCTRLGNRTLRRSHQQWRRDPWRRYEIAAYNHSQGRIGHLPQGAPTSPMLANIAMHTTDVDLDALALSFRLTYTRYADDLVFSTTDPAFTRKLASSFVGSVYGILGKYGFSPNVAKTQIVPPRARKVVLGLLVDEPSPRLPREFREKMRMHLYYLKKDGVGPARHAVKRGFTAVASLRNVLYGLAAFATQIEPQYGAGIRAELDSINWPT

SEQ ID NO: 1650 - protein, 390 aa, unidentified
  source 1..390: note = Related to QUNA01000002.1; note = Paraburkholderia sp.
MGNWRPQHYRTIGSEKGVPRDVLDAAVQTGKAIVRTDAQLEPVFTLRHLAYLTDCDYGLLRAIVGRSIQNPYRVFRVHKRPGPDGQKRYRTICAPDPQLLTVQRWLSTNVLNHASSSIHAASTAFAPGCTLLNAAEPHCGARWLIKVDVQNFFESISEIAAYRAFRGLGYQPLVAFEFARLCTRLGRKTSRRSHAQWRRAPWRRYKIAAYNHDQYRIGHLPQGAPTSPMLANIAMHGADEALHALARSSGLTYTRYADDLTFSTTALDFNRELASIVVRSVYRILGEYGFSPNVAKTQIIPPRARKIVLGLLVDEPNPRLPREFREKMRMHLYYIKKDGVGPARHAANRGFTAVASLRNVLYGLAAFATQIEPQYGLSIRKELDAVAWPT

SEQ ID NO: 1651 - protein, 389 aa, unidentified
  source 1..389: note = Related to NZ_KE386569.1; note = Methylobacter luteus
MADWKPQPYRAKAQSLEVDPTILDAAVAAGNEVVAIHPSLPPIFTLKHLAYLTDTKYSVLRMMVGRHIEEPYRVFKIRKRPGPDGAARFRVICAPSPTLLAVQSWLARKVLVHARTKVHSASTAYAPGCSILEAASPHCGCRWLIKVDIKNFFESVSEISAYHAFRSLGYQPLVSFELARLCTRVGSQTRHRAHRQWQRHLPSTKSKIHDYVYWRLGHLPQGAPTSPMLANIAMYKADGELTAWGLKHGLVYTRYADDMTFSISDEGFNRNKAAAVIRGIYRIIGKYGFAPNVTKTQVVPPRARKVVLGLLVDQNEPRLPREFKMGVRMHLHYLKSPKFGPAVHAANRGFTAVAGLRNHLFGLVAYAAQVEPAYGTRIKSELEAVKWPI

SEQ ID NO: 1652 - protein, 386 aa, unidentified
  source 1..386: note = Related to JAIETD010000002.1; note = Methylobacterium sp.
MLTKRPQHYRSLGRCAGIDDVIIERALATAAIQDRVGGRIPTILTLRHLAELAGVPYGFLRGVAARRFPDPYTTFQVRKIARPGEEGYRTITVPPPLLMSVQRWISGNILVHGRPHAASTAYAPGSSVVKAAERHCGCRWLIKLDARRFFESISEIAAYRVFTTDFAFQPLVALELARICTRLPENARTNRARRWLAKVSGYGAILDYHAAQLGHLPQGAPSSPMLANLAVREFDDEMARTAQQHRMTYTRYADDIALSTSDPAFTRSRASDVVLAAYAAMGRHGLSPNTTKTNVVPPGARKLVLGLLVDGDRPRLTREFKDSLRMHFHYCLMPDVGPVAHAEKRNFVSVIGLRHHLGGLVAFASQIEPEYGASLSEQMKKIVWPL

SEQ ID NO: 1653 - protein, 307 aa, unidentified
  source 1..307: note = Related to CABVPY010000024.1; note = Burkholderia lata
MLAKGGTPSRGYRMISVPRPDLKHVQRWICDNILALEKPHSASKAYTPKSTLVEAVEPHLGCRWLIKLDLHAFFDSIPETSVYKVFEGIGYQPLVAIELARICTRLSPDSRWRAHSRWQSRRPERYSNVKGYAVKRLGYLPQGAPTSPMLSNLVMRVFDADLTAAAVKRGFQYTRYADDLAFSTKEMSSRNLCGALITDVYKLIAKYGLAPNLSKTAVTPPGGRKLLLGLLIDGEKPRLTKEFREELNRHLYFIDKYGVQSHADHRKFESIYGLRHHLFGLAYYARQIDPTYGQAVLARLNAVPWPI

SEQ ID NO: 1654 - protein, 386 aa, unidentified
  source 1..386: note = Related to JAFCZG010000487.1; note = Deltaproteobacteria bacterium
MCSWCPQQFRKEALKNNIDLNIIEHAIKNAELVSAVSSELPPLFSLRHLSHLTGVDYVVLRPVVERNYSNPYKIFRLKKGVKGHQNRGFRIICVPDASIMKAQRWIAKNILSCGEASSASFAYAKSSKIIDAAKLHCGCRWMLKLDVRNFFESFSEIAAYRVFRSFGYQPLISFELSRICTRLGNQTKTHSHPKWMATNKNYTVINKYISRRIGHFPQGAPTSPMLSNLAMKLFDNEVIGIATKHGLVYSRYSDDLCLSTADKKFNREKAKTIINAIYKEMMKIGLAPNITKTQIIPPGARKIVLGLLVDGEAPKLSRAFRSKLRMHFYYLKHVDIGPPLHAKNRGFESVMGLKNHIQGLIAYARQIDPAYASSCTDQMNGIDWPL

SEQ ID NO: 1655 - protein, 387 aa, unidentified
  source 1..387: note = Related to NZ_VIKR01000006.1; note = Aliikangiella marina
MHIWCPQQFRKAGEANNVDPKVIENAIQVASAVQAVDKRLPPIFSLRHISHLTGVDYFVLRSLVERNYIEPYKVFKLDKKNKRSGNRGYRIISIPSPQLMIVQKWIAKNILKFGEVHTASFAYAENSKIIQAATLHCNCTWMIKLDVSNFFESFSEIAAYRVFRTLGYQPLISFEMSRLCTKLGTETRLRRHPAWQSSSFSKYHKISRYRNRAIGHLPQGAPTSPMLSNLAMKNFDSAVSKIALDNNLVYSRYADDLCLSTNDKSFDRTIARKVIISIYEKMNAIGLKPNLTKTQIVPPGARKIVLGLLVDGNSPKLSREFRAKLRMHFHFLCRSDIGPAKHAERRGFESVMGLKNHIQGLIAYARQIDPTYASSCDEHMDNINWPF

SEQ ID NO: 1656 - protein, 386 aa, unidentified
  source 1..386: note = Related to JAESRL010000013.1; note = Porticoccaceae bacterium
MHSWCPQQFKKNGIKQGVNPEVIEHAVQNAALVKAVSNNLPPIFSLRHLSNLVGVEYSLLRAVVERQQLDPYKVFKLKKRSKRTSSHPFRIICVPDEFIMKTQKWIAQHILSQGSVHHASKAYAKNSNIVDAANLHVECRWVIKLDVNNFFESFSEISAYRIFRSFGYQPLISFELSRLCTRLGPHTKLRSNSYWTATRHKYKIIKRYKNHRIGHLPQGAPTSPMLSNLAMKGFDKEVSVIAENAGLIYTRYADDLCLSTTSEDFSKSKAQIVINNIYEKMRNIGLRPNITKTQILPPGARKIVLGLLVDGDKPRLSRDFRSKMRMHLYYMMREDIGPVLHAKNRGFESVIGLRNHIQGLIAYAKQVDESYGLVCACKFETIKWPM

SEQ ID NO: 1657 - protein, 384 aa, unidentified
  source 1..384: note = Related to NZ_CP034142.1; note = Marinobacter sp.
MHRWNPQQFRKAAEEQGVAPKVVENAISCAEITRSVDPRLPPLFSLRHLAHYVEADYSLLRKAVARSGDEPYTTFKLKKNGKRAYRIICVPDIFLLEVQRWIAQNILAFGTPHHSSVAYAKNCNIVDAASVHCGCRWLIKLDVANFFESFSEIAVYRVFRSLGYQALISFEMARLCTRLGAHTKTRSGNRWEVRDDRIYKIDGYKNCRIGHVPQGAPTSPMLTNLALREFDKDIGDIAAEYGMYYTRYADDMFFSTKDLSFNREIGKKLISRLYGRMKAEGFRPNISKTRIHPPGARKLVLGLLVDGAVPKLTREFRSKIRMHLYYMNKQHIGPALHAQNRGFDSVMGLKNHVEGLINYAHQVQPDLGARLRAEFKKIAWGASV

SEQ ID NO: 1658 - protein, 367 aa, unidentified
  source 1..367: note = Related to VENF01000020.1; note = Methylophaga sp.
MSRKHSQLLPLQGLQPASASTGACFPVINSLKQLADMTETDYAILRQFVARQQPEPYKTFRIRKKSGGFRIIAIPDENLLKVQQWIYRQILTLVRPSPVSYAFQKGKSIQNAASVHCGCRWLIKLDLYNFFSAISEIDVYRVFRSLGYQPLIAFELARLCTRLGSLTAFRRRNRWQIADHYAVISQYHGQRMGHLPQGAPTSPALSNLVMVNFDRKVLCLAAEEQLTYSRYADDLCFSTPLRDFSRARARAFIHQIYRLMRSHGQSPNMSKTVIVPPGARKIVLGLLVDGEQPRLQKQVRNKIRQHIFHLNHADIGPEKHAQKRGFHSTAGFKKYLDGLLSYVSDIDPDLEQTYRHQLAGVRWPLET

SEQ ID NO: 1659 - protein, 364 aa, unidentified
  source 1..364: note = Related to NZSL01000007.1; note = Methylophaga sp.
MGRKHSQLFFTHDSQEISASSNCLPPIKSLKHLADLTETSYRDLRKIITRQSPEPYKVFRIRKKSGGFRIIAIPDESLLKVQQWIYRHILSQAQPSPVSYAFQKGKSIRDAASVHCGCRWLIKLDLYNFFGAISEIDVYRVFYSLGYQPLIAFELARLCTRLGSLTAFRHRHRWEIEGNSTIISQYQGQRMGHLPQGAPTSPALSNLAMVAFDRKIMNLAAEEQLTYSRYADDLSFSTPLTSFSRELAKAFIHRVFRLMRTYGQSPNMTKTKIITPGARKIVLGLLVDGEEPRLQKSVRNHIRQHIFYLNHSDVGLQKHAQKRGFLSTDGFKAHLDGVLSYVHDIDPSLAQNYRHQLADVYRLV

SEQ ID NO: 1660 - protein, 400 aa, unidentified
  source 1..400: note = Related to NZ_CP013376.1; note = Burkholderia cepacia
MKTWSPQNFQSRAKEKSGQAVIGNAQKIAKQIQTINPKLPVIFTLKHLSVRARISYGFVRSVVSRNPSEPYRSFSIRKRISAPRGKTSKRKAMGVKHEVGEHSFRRICVPTPRLMQLQRWIDKNILSVAPPHTASVAYSQGKKLIDAAQLHCGSTWLVKLDVKNFFESITEIDVYRVFLSLGYPALLSFELARICTRLGIDSKYARKDVFAVRRLARRKGHVAAYFGSRMGRLPQGAPTSPKLSNLVMRSFDEDMTNLAQKEGMTYTRYADDLCFSTRSRTYTRDKATKLIRSVYDALGATGLGPNRTKTVVVPPGARKVVLGLTVNDVRPRLPAELKSRMRVHLHYLKLFGPTEHAKRSGFSSTLGMYRHLAGICAFAQQIEPDVAKDWLTKLQGISWI

SEQ ID NO: 1661 - protein, 385 aa, unidentified
  source 1..385: note = Related to QBMO01000003.1; note = Alphaproteobacteria bacterium
MTPWRSQAFRAEAIAGGGSAGVITNAVATAAALHKHTPDAPPVFTLGHLAHLTDVHYRFLRQVVERQDPERYRRFRILKRTSGAGGAPRYRIICVPDPRLMRVQRWINANVLALGHVHKASTAFKAGDNIVAAAGVHCDAKWMIKIDILNFFESVSEQSVYHVFRGLGYQPLISFELARLCTRRGESSNARRGKRWAHSVGHAKRITNYHSSVLGHLPQGAPTSPMLANLAMKGFDEAVSRLADTYDLSYTRYADDLTLSSLGLFDRSRAQTIVSEVYDQLRCWGFRPNLAKTLIVPPGARKVVLGLLVDRQVPRLTKAFRARMRRHLYFLSHPQHGPVKHAAALGFASVYGLRNHVSGLIAYAQQVDANFAADAWGKFDAIVWP

SEQ ID NO: 1662 - protein, 386 aa, unidentified
  source 1..386: note = Related to JABJCF010000323.1; note = Nitrospina sp.
MTPWRSRSYVDSGSTAGCDETIVKNAAETGKMLLERTPGAPPIFTLKHLSQLTGVNYSFLRRCVERVESEPYRRFRIRKRQNPNEKKQRYRIICVPDPRLMAVHRWINTNILQLVPPHAASVAFGKGNNIAEAAANHCASKWLIKLDIVNFFESISEQSVYHVFSRIGYQPLIAFELARLCTRLGQPSYARWSRRWSARSYRFEKISSYQKEQLGHLPQGAPTSPMLANLSMTAFDASIRQVANDFDLAYTRYADDLTFSTTSVEFNRNKSQTVIPKIYAELLKYGFKPNLTKTKISSPGSRKVVLGLLVDGAEPRLTKKFRDNIRQHLYFINHPNIGPVQHANKKGFKSIYGLRNHVQGLIAHASQIDKEYANAAWEQFNHVLWP

SEQ ID NO: 1663 - protein, 391 aa, unidentified
  source 1..391: note = Related to NZ_FOYI01000015.1; note = Poseidonocella sedimentorum
MEPWRSQHFKKFAISKGSDLATVDAAIAIGKALQVKSPNCQPIFSLKHLAYSADVKYKFLREVVERSTEDKYRVFKIHKRGIPGQTSKRFRIICAPDPQLMKMQKWIARNILAHGRTHDASVAYQAGSNIVDAASLHCGCRWLIKLDIINFFESVTEQNVFRVFSDMGYQPLVAFELARICTRKGSATWRRNRAYKKWRTRNHIYTSIHAYSAVDILGHLPQGAPTSPMLANLAMVDFDKSVEDVANSFGLTYTRYADDLTFSTKSDAFSREVAQKVISEVYKVIRRFSFEPNLTKTQVVPPGARRVVLGLLVDGPTPQLSKKFRNQLRRHLHHVSADWPGVVEHAEKNHFQSVFGLRNHIEGLIAFAHSVDPEYAKKAWEKFAKIDWPQA

SEQ ID NO: 1664 - protein, 380 aa, unidentified
  source 1..380: note = Related to JAHLLJ010000012.1; note = Deltaproteobacteria bacterium
MWHPHSFKYQGKKEAVDDGIVQTAIEIADKTSSVHPELPPIFSLRHLAHLTNVSYGFLRHIVCRNIDEPYEVFQIRKRIYSKKKAYRIVCVPSPDLMCVQRWIAHKILRLGDTHPASMAYAPDSKIYRAALQHCECKWLVKIDVKRFFESISEMKIYHVFLQFGYHPLVAFEMARICTRVGKGSTFWRKPQWIPQRHVYYKITDYMSDRLGHLPQGAPSSPMLANLAMKSLDQKLQRIADKFQVSYTRYADDLTFSTKDKVFGKHNSRKIVRKVYDVLRAHGLLPNTLKTTISHPGARKVVLGLLVDGPKPRLSRQFRSRIRQHLYYLQKDPIAHARARGFISVWGLRNHIQGLLAHTKEIDTDFYDKTSSEFNLVDWPL

SEQ ID NO: 1665 - protein, 425 aa, unidentified
  source 1..425: note = Related to JACHBD010000013.1; note = Rhizobium lentis
MAWNSQRFVRAGELAGVDADILNNAVIIAEQTLRVQSSGPPILTLGHLAHLSGQSVKYLRSLVSREGEDPYRQFTIRKRPVPNQSPRLRFIAVPEPQLMSLLRWILSEILEKAPCHPASSAFAPESKLFNAAFKHRGAQWLIKVDVRDFFESITEIDVYRVFLERGYQPLTALELARICTRLRDVHREKGSIATRNRRSSMRTPNGIGEYNSRIMGTLAQGAPTSPMLANLAVRALDEKLQGVSEKFGVRYTRYADDIILSTTDKTFGRQRSIQLVGEIYAALGLYGLAPNTSKTLIVPPGARKVVLGLLVDGSKPKLTREFRAKMRMHLHFLLHEGVGPRAHAANRGFSSVEGLRQHLLGLIAFAGQVDLPYALRYKNLFRSIDLERRRHLTSSQSESPLRLGWKHLLEPAGATLGSIRRSHPT

SEQ ID NO: 1666 - protein, 387 aa, unidentified
  source 1..387: note = Related to JAAXSV010000011.1; note = Rhizobium laguerreae
MAWNSQRFVRAGELAGIEAEILENAVAVAEHTLGVRSPGPPILTLGHLGHLTGLSVKYLRSLVARDGDDPYRQFTIRKRPVPGQPPRFRFIAVPEPQLMGLQRWILSEILERAPCHPASVAYVPGSRLFKAANQHRRAQWLIKIDVRDFFESITEIDVYRVFLGRGYQPLTALEFARICTRLRDNLRESGAPAPRKRRTKMRGSESVAAYYSAVMGTLPQGAPTSPMLANLAVQGLDEKLQAIADKVGLRYTRYADDLIFSTSDKSFGRERSIQFIGEAYSALGEHGLTPNTSKTLIVPPGARKVVLGLLVDGAKPRLTRDFRAKMRMHLHFLLHKNIGPKAHASNRGFSSIEGLRQHLLGLISFAAQIDRSFANECRRQFRLVEWS

SEQ ID NO: 1667 - protein, 387 aa, unidentified
  source 1..387: note = Related to WUFA01000001.1; note = Rhizobium leguminosarum
MVWNSQRFVKAGVLAGVSTEILDNAVTIAEHTLSFRSPGPPILTLGHLGHLTGLSVKYLRGLVARDGEDPYRQFTIRKRPIPGQPPRFRFIAVPEPQLMDLQRWILSEILQHADCHPASVAFAPGSRLRTAAYEHRRAQWLVKIDVRDFFESITEIDVYRVFLARGYQPLTALELARICTRLRDVHREKGSPAPRNWRTRMRAPNSVGAYYSAVMGTLPQGAPTSPMLANLAVKDLDDKLQAIANKVGLRYTRYADDLTFSTTDKTFGRERSVQLVGEVYTTLGLHGLAPNTSKTLIVPPGARKVVLGLLVDGSKPRLTRDFRAKMRMHLHFLLHEDVGPTAHAIHRGFSSVEGLRQHLLGLIAFAGQIDRSFAEECKVKLRSANWP

SEQ ID NO: 1668 - protein, 392 aa, unidentified
  source 1..392: note = Related to NZ_VNHV01000015.1; note = Maritimibacter alkaliphilus
MRTWNSQRYFAEGLAAGVDESILNNAIATAEHTLRQPSPGPPILTLGHLGHLAGVDVGILKTYASRQDADPYREFSIRKRPIPGQPPRYRTIAVPEPPLLRVQTWIASEVLRHAPCHSASTAFAPGSRLAQAAARHCRAVWMVKIDLRNFFESLTEIDVHRVFLERGYQPLVAFELARLCTRLRDKHRNDTAVLPQRRTPKFRHSSLTSLYPRDLLGVLPQGAPTSPMLANLAVRDLDERLTAIAKTFGVRYSRYADDLTFSTTRKSFGRSRAHDLVGRVYETLAARGLAPNQSKTTIVSPGARKVVLGLLVDGDTPKLTRDFRSRLRKHLYHISAPDQGPVQHAARRGFASVEGLRQHLLGLIAFAGQIDPVYAAKCRAILDSSDWSQTRR

SEQ ID NO: 1669 - protein, 390 aa, unidentified
  source 1..390: note = Related to NZ_PGOI01000009.1; note = Pseudorhodobacter sp.
MNDWHSQHYLDAGRQAGIDEELLQRAVAAAEYTLTRPNHGPPVLTIGHLAQLCGVETGLLHAYVAREGDDPYREFTIRKRPIPGEAPRYRFIAVPEPRLLQVQTWIATEILRQAPCHGASKAFAPGNRLITAAGVHCRAQWMIKIDVRDFFESITEIDVHRVFRERGYQPLVAFELARICTRLRDDHRHPTSFLPQRRKPKYYGGSGYSVYPRTLIGVLPQGAPTSPMLANLAVRDLDEVLTSLASQFGLRYSRYADDLTFSTRRKSFGRARAKDAIGQIYQALINRGLSPNRAKTAIVSPGARKIVLGLLVDGTRPRLSREFRSRLRMHLYFVAHPDHGPAQHAKMRGFASVEGLRQHLLGLIAFAGQIDALFADWCRAEMRRANWPLT

SEQ ID NO: 1670 - protein, 405 aa, unidentified
  source 1..405: note = Related to QOCE01000045.1; note = Phaeobacter gallaeciensis
MDRAVPRCAAFLHGAIRTTLAESKQMTLWRSQPFLTAAKKDGREDQVVKNATKIATHLIRKSPGVEPILSLRHLGHLTGTPYNMLRSVVRRDEPEPYRIFRIRKRPLANEKLRFRTIAVPAPWLMELQRWLNVCILEHISPHSASMAFSRGNSIRDAAAPHCGARWLIKMDIMNFFESVTERQVFRVFEDIGYEPLVAFELARLCTRLGTRSTHAGHPRYRSSLNRMEIKDYSDPLMGQLPQGAPTSPRLANLVSRDLDKALTKLADERGFVYTRYADDLTFSSREALNRTAIKPIIGAISGIIGDNGFSPNVAKTTVSSPGARKIVLGLLIDGDEPRLSREFKQKLRQHLYYLREHGPVIHAGRNGNATTFGLRRHVFGLLQHARQIEPVYGNSCLEEFAKIQW

SEQ ID NO: 1671 - protein, 380 aa, unidentified
  source 1..380: note = Related to JAGHRB010000006.1; note = Ruegeria sp.
MTAWRPQRFKAAAGKAGCEQNVVSHAVTVASHVLIRSPGVEPILSLRHLGHLTDTPYYRLRRLVRREDPEPYSVFRIRKRPLPNEKLRFRTIVVPSPWLMDLQRWLNVNVLEHVPPHPASVAFSRGNSVLEAAAPHCGARWLIKMDIKNFFESITERQVYRVFDDIGYEPLVAFELARLCTRVGNRTSRKYHQRYHSPWQAREISEYTNAFMGHLPQGAPTSPRVANLAARDLDKALSNLADARRFTYTRYADDLTFSTSKKIDRADVRPILGEISKIVSENGFSPNVAKTTVSSPGARKVVLGLLVDGEEPRLTREFKQRLRQHLYHLRKHGPAIHCLHNGNATPFGIRNHVLGLVMHARQIERPYGDACLQEFNSIGW

SEQ ID NO: 1672 - protein, 391 aa, unidentified
  source 1..391: note = Related to CP036420.1; note = Cereibacter sphaeroides
MRRDPPHQRWSKQMTSWRPQPFSTMARAQGRDSATIQNSIDAAQRLAEITPNAEPIFTLKHLAHLTGAPYVLLRGIVSRHEPDPYRVFKIHKRPLPGEVTRFRTIVIPNQSLMDVQRWINVHILEHVKPHRASAAFTRGDSIKRAAERHCGARWLIKMDLRNFFESVTERQVYRVYLSIGYQPLVAFELARLCTRVASSHARLSRYHAPWGWKTIEGYRHPTMGHLPQGAPTSPKLANLVARELDENLEQLARSNGFVYTRYADDLTFSTLGASSRCAVRSFIGDVSESIAQAGFTPNQAKTQVSPPGSRKVVLGLLVDRDEPRLSREFKSQLRQHLFYLKRHGASAHASRQGSATIFGLRRHILGLIQHARQIEEQYGNSQLKSFKELHW

SEQ ID NO: 1673 - protein, 338 aa, unidentified
  source 1..338: note = Related to LR743509.1; note = Hyphomicrobium sp.
MRHLSVRAGVPYAYLREIVERNATRDYRLFRIRKRPVRNQRLRYRIITVPEARLKKVQQWIDRHVLCAAEPDEASVAFTKRSSVYAAASIHCGARWMIKIDIRAFFESISERQVYHVFHEIGYQPLVAFELARLCTRLRRRAPPLKRWSLGFDRRYEISAYINGQVGHVPQGAPTSPRLSNLVVRELDEDIRTIAASAGLTYTRYADDLTLSKTTDDFSRAAAVKVIRKIYRVLGAHGFAPNLAKTQIVPPRARKIVLGLLVDGDRPRLQREFKARIRQHLHYLMHPKFGPAKHAKAQGNATIYGLRNHIKGLLAFAHGVDPEYARKQTELFNRVHWP

SEQ ID NO: 1674 - protein, 373 aa, unidentified
  source 1..373: note = Related to NZ_WPZV01000002.1; note = Ruegeria arenilitoris
MISSSKRNPWHPSEFLEACQRKGAISTVAGPALEIAQRIKAQGPNLPVLLSLAHLAATVDVPIGLLLSYVERDKDPYRVFSVSKLGPNGETSNRRTICVPEPLLSKTQSWIAVQLLNNCTPHAASTAYAPGSSLYKAVRQHCGARWLLKIDLKNFFESINEMMVFDTFISLGYPRPICFQLARLCTRVFGAAQDDFARMRLGVLPQGAPSSPMLANLAVYKLDVSLSEIAAKNGWIYTRYADDLAFSTRSVSSRHETKELMWSILDQIRSFGLTPNKRKTSISPPGARKILLGLNVDTDRPRLTRSFKNNVETHVYAITNPAIGFNKHLEARGFESGPSMIRHIAGLIAYARSIEPDYADSLYKRLTTEAVRS

SEQ ID NO: 1675 - protein, 373 aa, unidentified
  source 1..373: note = Related to NZ_JAEDOS010000003.1; note = Ruegeria sp.
MTSSSNRNPWHPSEFIDACQREGAVSNVAGPALDIAQRIKAQGQDLPVLFSLEHLAATVDVPIGLLLSYVQRGKDPYRVFSVSKQGSKGLRSNRRTICVPEPLLSKTQSWIAAQLLNNCTPHPASTAYAPGSSLAKAVRPHCEARWLLKVDLKNFFESIDELKVFDTFVSMGYPRPICFQMARLCTRVFGAERGDNASTRLGVLPQGAPSSPMLANLSVYRLDVSLSEIASRSGWNYSRYADDLAFSTRLESSRHATKDLMWSIFDEIRSFGLTTNKRKTIISPPGTRKVLLGLNVDTDRPRLTRSFKNNVETHVYAITNPEIGFNKHLEARGFRSGPSMIRHIAGLIAYARSIEPDYAEKLYKRLTTEAVRS

SEQ ID NO: 1676 - protein, 374 aa, unidentified
  source 1..374: note = Related to WUWG01000003.1; note = Proposed Oceanomicrobium pacificus
MTGWSRRNPWSPTAFMQACRREGEVETIAEPALGIARRIKAQGPDLPVLFSLEHLAATVDVPIGLLLSYVDREKDPYRVFSISKKRGPKSEASNRRTICVPEPLLSKTQCWIAAQILNNCKPHSSSTAYAPGSSLVNAVKEHCGARWLLKVDVKNFFESINELMVFETFSSLGYPRPLCFQMARICTRVFGTAQFEVSKARLGVLPQGAPSSPMLANLAVNELDEAISEIAIRRGWIYTRYADDLAFSTKRESSRHEAKELIFSIVDEIRSFGLSPNNRKTTISPPGARKVLLGLNVDTSRPRLTRRFKNNLETHVYAITNPSIGIKKHSEARQFRSEQSMIKHIAGLIAYARSIEPEYADKLYRRLTADAIST

SEQ ID NO: 1677 - protein, 385 aa, unidentified
  source 1..385: note = Related to NZ_JACHCP010000006.1; note = Rhodanobacter sp.
MRSWRPQNFVREGQLRGVDDDVINNAVLTAARLRQRSPVLPPIFSLGHLAWLVGASYELLRDVVSRYTVDPYRSFQIRKRPLPGQGKRFRRICVPDTFLMLTQKWIASNLLVRVPAHSASVAFSKGDRIVDAVQPHCESTWLIKMDVVNFFESIDERVVYRVFRRMGYQPLVSFELARLCTRIGAPTAARRGRRWNPIRNSESKISSYEAPRLGHLPQGAPTSPMLANLAVIEMDERLSEVAGKAGFVYSRYADDLAFSSRRQLDRKSCREVIASASAILDVFGFSVNSAKTSVRPPGSRKVLLGLNANSVQPRLSRELRDRLLRHRYFLLHPQIGPAKHAKRLGFDSTIGFKNHLFGLVAYAAQVEPGFAMVLKEDLAQISWPL

SEQ ID NO: 1678 - protein, 384 aa, unidentified
  source 1..384: note = Related to PZOX01000020.1; note = Vitiosangium sp.
MSSWRPHLYKSNGIAQGRARVTLLNAIVQAQKVQARGLPAILTLGHLSKHVGVPYLLLREVVRRKRDTAYREFPVAKRSGGWRRIYVPEPLLLRTQRWISRYVLANLTPHSASVAYVRESSVFKAAEMHCRCQWLIKVDIQDFFESISERQVYLVYLQAGYQPLVAFELARLCTWVFDEQSLRYRRKRWRTSPERRSVPGEIGGYRDSRIGHLPQGAPTSPMLSNLVMAKFDAAAEAIALSEGCVYTRYSDDLSISSDASDFGRSRAENVVRELFALMRGSGFEPNPEKTVIAPPGARKIVLGLLVDSDRPRLRREFKSRLEAHVHGLVKFGPVQHARQRDFKSIFGMKRHLYGLLTYAEQIDSAFAEPLRKKLDSVVWPGVEP

SEQ ID NO: 1679 - protein, 388 aa, Pseudomonas sp.
  source 1..388: note = Related to NZ_VJOY01000004.1; note = Pseudomonas mangiferae
MSRWSSQPYLKAGRKAGVPGDVLKNAVKTAKQVKQGCPPILTLNHLSHLTGVPHSFLHRMVSRTYRTEAYNVFKLRKPNVGHSADRFRWICAPSEELLRVQRWINTHILSKVEPHEASYAYDNRHGVLDAAELHCGAQWLIKLDLTNFFESVLEPRVYELFRSFGYQPLVAFELARLCTRVRASGNPDRRFGNRELPAGLPYPADPRIGHLPQGAATSPRIANLVMQSLDESLHDYACDNELVYSRYADDLVFSSKNAFDRQEAIQHIKLIGKCLIEEGFWLNEAKTKIVPPGARKIVLGLLVDGDEPRLSKSYKKYVSDQLYYLSHPKIAPMAHAKRHGFQSLQGLINHVSGKIAYGFSIEPDWAKKQGKQLKGISGKLELDHVIFP

SEQ ID NO: 1680 - protein, 388 aa, Pseudomonas sp.
  source 1..388: note = Related to NZ_JH635998.1
MNRWSSQLYLKTGREVSVPDDTLQNAVKTAKQMKHGCPPIFTLKHLAHVANVPYPFLHRTISRTYRTEAYNVFKLRKPNVGHSPDRFRWICAPSEDLLRVQRWINTNILSRVEPHEASYAYDKRHGVLEAAELHCGAEWLIKLDLTNFFESILEPRVYDLFRSFGYQPLVAFELARLCTRVRSSGNPDRRFGNGELPAGLPYPADPRIGHVPQGAATSPRIANLVMQSLDESLQDYALEKDLVYSRYADDLVFSSKKAFDRSHAHQHIKSINARLIEGGFWLNEAKTKIIAPGARKIVLGLLVDGDTPRLPKSYKKFVSDHLYYLSHPAIDAKTHAKHRGFQSLQGLINHVSGKIAYGYSIEQDWAKKQGDRLKEICSKNELDHVLFP

SEQ ID NO: 1681 - protein, 388 aa, Pseudomonas sp.
  source 1..388: note = Related to NZ_CP007637.1; note = Pseudomonas simiae
MSRWSSQLYLTTGRKAGVPGDILQNAVQTAKQMEHGCPPILTLNHLAHLAGVPYPFLHRTISRTYRTEAYNVFKLRKANVGHSPDRFRWICAPSEDLLRVQRWINVHILSKVDPHEASYAYDKRHGVLEAAVLHCGAEWLIKLDLTNFFESILEPRVYKLFRSFGYQPLVAFELARLCTRVRKSGNPDRRFGNTTLPVGLPYSGDPRIGHLPQGAATSPRVANLVMQSLDENLQEYARENELVYSRYADDLVFSSKNAFDRSQVALHIKMINACLIKEGFWLNEAKTKIIPPGARKIVLGLLVDGDRPRLTKSYKKYVTDHLYYLAHPNIDAMTHARHRGFQSLQGLINHVSGKIAYGFSVEPDWARVNGARLKEICSKIQVDYVLFP

SEQ ID NO: 1682 - protein, 388 aa, Pseudomonas sp.
  source 1..388: note = Related to CP031146.1; note = Pseudomonas plecoglossicida
MTRWSSQPYLKEGRGLGVPQDILQNAVKTAKRMKHGYPPILTLNHLAHLTGVPYPFLHRTVSRTHEKEAYNLFALKKPNVGHSPDRLRWISAPCEDLLRVQRWINANILSHAESHEASYAYDKRHGVLEAAELHCGAEWLIKLDLTNFFESILEPRVYKLFRSFGYQRLVAFELARLCTRIRVSGNPDRRFDHRTLPAGFPYPADPRIGHLPQGAATSPKIANLVMYSLDEQLQAYATKNELAYSRYADDLVFSSSNPFDRPQAIEHVKAINECLIKAGFWLNKAKTKIIPPGARKVVLGLLIDGEQPRLTKAYRKYISDHLYFLSHPDIDAITHAEHRGFKSLQGLINHISGKIAYGYSIDPDWAKEHGNRLKMICRALEVDHVIFP

SEQ ID NO: 1683 - protein, 388 aa, Pseudomonas sp.
  source 1..388: note = Related to NZ_JAHSTV010000019.1; note = Pseudomonas farris
MNRWSSQPYLKAGRKSGVPEDILKNAVKTANQMKHGCPPLLTLNHLSHLTGVPYPFLHRTISRTYKTEAYNVFKLRKPNAGHSLDRFRWICAPSEDLLRIQRWINVHILSKVEPHEASYAYDNRHGVLEAAALHCRAEWLIKLDLTNFFESILEPRVYELFRSFGYQPLVAFELSRLCTRIRASGNPDRRFGNKTLPAGLPYHADARIGHLPQGAATSPRIANLVMQSLDENLQAYATENELVYSRYADDLVFSSRNAFDRSEAIQHIQSINECLVEEGFWLNKAKTRITPPGARKVVLGLLVDGEKPRLPKIYKKYVSDHLYYLAHPEIDAMTHAKHRGFQSLQGLINHVSGKIAYGFSIEPDWAKKQGAQLKAVCKTIEVDHVVFP

SEQ ID NO: 1684 - protein, 388 aa, Pseudomonas sp.
  source 1..388: note = Related to NZ_CP085704.1
MNRWSPQRYLKAGRQEGVSEATLQNAIDTAKQMKHGCPPIFSLNHLSHLIGTTYPFLHETVSRENEEEAYKVFRLKKPNVGHSPDRFRYICAPCEDLLRVQRWINNHILSRIEPHEASYAYDNRHGVLDAAALHCGARWLIKLDLTNFFESILEPQVYELFKSLGYQPLVAFELARLCTRLRVSGNPDRRYKNKTPPEGLPYTGDTRIGHLPQGAASSPRIANLVMRSLDESLQYFASENDLTYSRYADDLVFSSRAEFDRSQATQHIKAINNRLVDEGFWLNKAKTKIVTPGTRKIVLGLLVDGKKPRLPKSYKKYVSDHLYYLSHPTIDAMAHAESRGFQSVQGLINHVSGKIAYGFSIEPVWGKEQGDRLRGVCRELDLDHVIFP

SEQ ID NO: 1685 - protein, 388 aa, Pseudomonas sp.
  source 1..388: note = Related to NZ_CP061943.1
MTRWSSQPYLKAGRQAGVSESILQNAVQTAKQMKHSCPPIFTLKHLAHLTDVPYPFLHRTISRKYRAEAYNVFKLKKQNAGHSPDRFRWICAPTEDLLRVQRWINTHILSKIQPHEASFAYDNRNGVLETAQLHCGATWLIKLDLTNFFESILEPQVYELFRSFGYQPLVAFELSRLCTRVRASGNPDQRHGNKPLPPGLPYSGDTRIGHLPQGAATSPRIANLVMQSLDETLQTYATENDLMYSRYADDLVFSSKGVFDRPQATQHIKAINKCIAEEGFWLNTAKTKIVTPGARKIVLGLLIDGGTPRLSKAYKKHVSDHLYYLAHPKIDAMAHATRRGFHSLQGLINHISGKIAYGFSIEPDWANEHGKRLKGICAKLHVDHVLFP

SEQ ID NO: 1686 - protein, 371 aa, Pseudomonas sp.
  source 1..371: note = Related to NZ_UVZC01000005.1; note = Pseudomonas viridiflava
MPEDVLQNAVKTAKQMKHGCPPILTLNHLAHLTGVPYPFLHRTISRTYRKEAYNVFTLRKPNSGHSPDRVRWICAPSEDLLRLQRWINTNILSKVEPHEASYAYDSRHGVREAAELHCEAQWLIKLDLTNFFESILEPRVYELFRSFGYQPLVAFELARLCTRIRARRNPDQRHGNKSLPPGLPYSRDSRIGHLPQGAATSPKISNLVMQSLDETLQAYAEDNELVYSRYADDLVFSSRKPFDRSQALQHVKSINQCLVEEGFWLNKAKTKVITPGARKVVLGLLINGKKPRLTKAYKKYVSDHLYFLAHPDIDAITHAEHRGFKSLQGLINHISGKIAYGYSIEPDWAREQGNRLKVICAAHEVDHVIFP

SEQ ID NO: 1687 - protein, 387 aa, Pseudomonas sp.
  source 1..387: note = Related to CP024630.1; note = Pseudomonas aeruginosa
MKRWSPQAYLKAGRAAGIPEDVLQSAVKIAAQMHEGCPPIFSLKHLANLTGVPYPFLHRTISRTYKTEAYTVFMVHKTNVGHSPDRFRTICAPSPELLKAQRWINKYILSNIPSHHASYAYEGRNGVLEAANVHCQATWLIKLDLTNFFESILEPKVFTLFRSLGYQPLVAFELARLCTRTRKTGNPRVMSRAGGGSPALPYKNSLIGHLPQGAATSPKIANLVMRSLDEKLFKFAQDNDLIYTRYADDLIFSSRQPFDRTVPSAYILAINQLLRAEGYWPNRAKTKVVTPGTRKVVLGLLVDGSEPRLTKTYKKYVRDHLYYLSHPEISPELHAKRKGFRSLQGLINHVSGKIAYGISIEPEWGTAQGEKLKEICQKWQVDHVLFP

SEQ ID NO: 1688 - protein, 387 aa, Pseudomonas sp.
  source 1..387: note = Related to NZ_AVEP02000116.1; note = Pseudomonas avellanae
MKRWSPQSYLKAGHAAGIPEDVLQNAVKIAGQMLDGCPPIFSLKHLATLTGVPYPFLHRTIDRTYQTEAYTVFRLQKASVGHSPDRFRYICAPCPELLRAQRLINKYILSNLTPHHASYAYDGRNGVLEAASVHCQATWLIKLDLTNFFESILEPQVFKLFRSIGYQPLVAFELSRLCTRVRVRGNPDTKFWSGELSSSFPYKDSRIGHLPQGAATSPKIANLVMRSLDEKLYDLASKNELIYTRYADDLIFSSRQTFDRALASRHIRAVNQVLREEGYWLNRAKTKIVPPGTRKVVLGLLVDGPVPRLTKSYKKYVSDHLYYLSHPEVSAEAHAARRGFNSLQGLINHISGKIAYGISIEPLWGAEQGQRLRQICGRLLVDHVMFP

SEQ ID NO: 1689 - protein, 387 aa, Pseudomonas sp.
  source 1..387: note = Related to MKGS01000151.1
MNRWSPQHYLKAGRAAGIPEDVLQNAVSIAAQMHEGCPPIFSLKHLANLTSVPYPFLHRTISRTYQTEAYTVFRLQKANIGHSPDRYRYVCAPSPEMLRTQRWIHKHILASLKPHHSSYAYEKRNGVFEAASLHCQCIWLIKLDLTNFFETILEPRVYKLFRSLGYQPLVAFELTRLCTRIRPRGNPENRLWRGELTENLPYIGSAVGHLPQGAATSPKIANLVMKSLDEKLYEFASLNELTYTRYADDLIFSSTKSFDRALASKHIETINKLLRDEGFWINRAKTKVVTPGARKVVLGLLVDGAEPRLTKDYKKYVSDHLYFLSRLDIDAEAHAKRKRFDSVQGLLNHLSGKIAYGISIEPKWGAERGTKLRQICDRLSLDHILFP

SEQ ID NO: 1690 - protein, 382 aa, Pseudomonas sp.
  source 1..382: note = Related to NZ_FYDX01000020.1
MNRWSPQRYKSEGLNQGVDQNTLSNALSTAELLRANSPKLPPIFTLRHLAHEAGVPYALLRAVVARSERAEAYKVFKLKKAVASFGANRFRYICVPHPSLLKVQRWIHKHILMQVDAHPASYAYKEKTSPCDAATMHAGCTWMIKLDATNFFESILEPDVYFVFRDMGYQALVAFELARLCTRVRPTGNPVKANRVKEGQGNLPYRTIKIGHLPQGAATSPLLSNLVARKLDCALTGLANDRGLTYTRYADDLTFSSFGDFDRDISTNLVREIYEIMRTHGLWPNKSKTKIIPPGARKVVLGLLVDGPVPRLTKEFKAEVRTHIHFMLRPDVGVRKHLRARKFDTPWGMQNYLFGKLAYAQPIEPRWTARMRDLLRKIDWTS

SEQ ID NO: 1691 - protein, 382 aa, Pseudomonas sp.
  source 1..382: note = Related to NZ_CP061723.1; note = Pseudomonas putida
MNRWSPQRYKSAGLNQNVDKGVLNNALRTAQLLHANFPLLSPILTLRHLAHEAGVSYGFLRGVAARSERVEPYKVFKLKKNVVSFGANRFRYICAPHPSLLKMQRWIHKNILMHVHSHPASYAYKEKTSPRDAAAMHAGCKWMIKLDATNFFESILEPDVYRVFREMGYQALVAFELARICTRVRPSGNPVKTDRFKDGMGNLPYKNVAIGHLPQGAATSPLLSNLVARTLDHSLAEFANSKDLAYTRYADDLTFSSFGTFNRDGAENIVREIYEIMRAHGLWPNKSKTKIIPPGARKVVLGLLVDGHVPKLSKEFKAEVRTHIHFMLRPDVGVSNHRKARKFDNSWGLKNFIFGKLAYAQAIEPIWTSRMRDLFMKIDWDS

SEQ ID NO: 1692 - protein, 382 aa, Pseudomonas sp.
  source 1..382: note = Related to NZ_LHVL01000030.1
MNRWSSQHYIRIGNDQGVAPAILKTAAETAKHLHKCNPNFPPVFTLRHLAHYTGVPYGFLRMVVARNKQVEPYRVFKLKKQVRSFGRERFRFVCAPHPYLLKAQRWINREILAKIPGHEASYAYSPGSSVYDAASMHAGCRWLIKLDATNFFESILEPKIYEIFRTIGYQPLVAFELARVCTRTRPSGNPVYSNRADPNKKGLPYNTVQIGHLPQGAATSPHLSNLAARDLDESLKNFALLNQLIYTRYADDLTFSSTEEFVREDVVKKIHEIYGFMRANGLWPNKSKTQIVPPGARKIVLGLLVDGAQPRLTKEFKQEIRTHLHFLQRSDIGVRKHLKARGFDSFWGLRNFLVGKLSYAKSVEPEWESKMNRLFVKINWDT

SEQ ID NO: 1693 - protein, 375 aa, Pseudomonas sp.
  source 1..375: note = Related to JACVBX010000001.1
MTRWSSQLYIKEGRSKDVPRDILRDAARTAELLISPDLPPVFTLRHIAHLTGVPYNFLREVVSRSSDPYRVFKLKKNSPNLVGRYRYICAPHPKLLKVQRWINREILESLQPHEASYAYTKGAGVLKAAEVHSGCRWMIKLDVTNFFESILEPRIYKIFRGLGYQPLVSLELARLCTRVRPYGNPVYRNKQDANLPGLPYMVAEIGHLPQGAATSPLLSNLAVYELDKELSSYSIEHELTYSRYADDMVFSSEAKFSRSAVLVMVHELYDIVRKHGLWPNRVKTKIVSPGARKVVLGLLVDGKKPRLTSEYKQEVRTHLHFLLREDIGVEKHLVKRGFDSRFGLRNFLLGKIAYAQHIEPKWAGEMRNMLHLVKW

SEQ ID NO: 1694 - protein, 388 aa, unidentified
  source 1..388: note = Related to NZ_CAKLIV010000056.1; note = Pectobacterium versatile
MNSWNSQLFKTEGRARGIPNEILDNATKIAKQLKYAGLPPIFTLNHLSHLCGVKYSTLRYIVERKHNDDAYKVFKLKKSGVGFSDERVRFVSVPNSELFKVQRWIHNNILKLIPAHENSFAFHSNGGILKAAYPHCNKKWMIKLDVSNYFESILEPTVYNAFLKMGYEPLVSFELARICTRVKPHHNPVKKNRINWLLNTDLPYKTIEIGHLPQGAPTSPLLSNVCSIKLDELLSDFAGVNNLTYTRYADDIVFSSADFFNRDLCNGYIKSVYSIMRENNLWPNRTKTKIIPPGARKIVLGLLVDTDRPRLTKEYKKEILTHLYYIFNESIGLEKHCKARGFDSVYGFLNFINGKLTYANFIDPEWSKPLIYKLKCVARPYIDLDSSC

SEQ ID NO: 1695 - protein, 385 aa, unidentified
  source 1..385: note = Related to JACVUO010000002.1; note = Pantoea sp.
MKIWSPHLYISQGIADGVSPDVLNSAVATAKKLRYLDLPPVFTLKHLSVLSGVSYSSLRFIVQRRDPSSNYKTFKLKKSNAGFHPDRVRFISVPEPSLLIVQKWIHEHILKKIPHSKSTMAFHADGGILKAAIPHCGNNWMIKIDIKNYFESISEVKVYDAFVQAGYQPLISFEMARLCTRVRNKSNPIKMYRHDDTLGTQLPYTTVEIGHLPQGAPTSPLLSNICTKKLDASFFEFSIAHGINYTRYADDIIFSSRSFFSRDICVSLIKEIKYILNKNGFWPNEAKTKIVTPGARKIVLGLLVDGPVPKLTSEYKKEILMHLHFASRKDIGIISHCNRRGFKSVTGFLNYLEGKISFASSIEPLWARKVNATFVYIKNKYNNTI

SEQ ID NO: 1696 - protein, 382 aa, Pseudomonas sp.
  source 1..382: note = Related to NZ_LPNO01000008.1
MTNWSPQHYVETGEQHHVSAAVLNAALKTASVIRSRNKDVPIIFTLGHLAALTGVPHSFLRAVITRDDFAPYKVFKLRKRSAGFAKDRFRFICAPHPKLLRVQRWINERILKHIPIDIASYAYRENTSIQDAAIQHCECNWLIKLDMSNFFESILEPKIYRVFRELGYNRLLSLELARLCTRIRHFGNPSMPKEKKLLKKFPYRKSRFIGHVPQGAATSPLLANIVSRGLDASIREFSRTMNITYTRYADDLIFSSKSKFDRQGAHSLVKDLYELIKAHGYWPNLTKTKVSPPGARKIVLGLLVDGRTPRLTKEFKSEIKTHIHFITRPDVGIAKHMLNRGFDSTAGLRNFLYGKLSFAAHVEPLWAAKMRSKLDQVNWPKR

SEQ ID NO: 1697 - protein, 382 aa, Pseudomonas sp.
  source 1..382: note = Related to NZ_LIGO01000012.1; note = Pseudomonas corrugata
MTNWSPQRFLETGKQRLASPLVLEAALQSAKLIKSRNKNVPVIFTLGHISAHTKVPYHFLREVITRENLKYYKVFKLQKRNAGFTKKQVRFICAPHPYLLRVQRWINERILKHIPIDDSSYAYRANTSIADAAFQHCECRWLIKLDLSNFFESILEPKVYKVFRELGYNRLLSLELARLCTRTRNYGNPSISREKISQKKLPYIKNKYIGHVPQGAATSPLLANIISRDLDVSLKQFSKNLGLVYTRYADDLIFSTKTDLTRAQLNQHINELYKIIKSHGYWPNFTKTKISPPGARKIVLGLLVNGVTPRLPKEFKAEIKTHIHFISRSDIGVAQHMANRGFESAEGFRNFLYGKLSFANHIEPDWAARRKCELDRVDWAGL

SEQ ID NO: 1698 - protein, 388 aa, unidentified
  source 1..388: note = Related to NZ_CP014579.1; note = Paraburkholderia phytofirmans
MVNWRSQHFINEGRQQGIAEPLLRNATLIARRIQAVNADLPPLFTLRHLSHEVGVPYLALRSIVSRKFTCEPYRVFSLRKKNVGHGSRRFRVICVPDPALLKTQRWIHSRILKFGRCHEASGAYSKGSGIYDVASTHCNARWLVKLDVTNFFDAILEPKVYQVFARLGYQPLMAFELARLCTRLRHDGNPKRKSKTGYRKIWTYGSSVVGHLPQGAPTSPLLANLVAYDLDSELFALAENANVRYTRYADDIVFSSSEKAFTRSDAEGLIRGAYACLERHGLWANRAKTHVVSPAARKIVLGLLVDGPVPKLQREFKDKLRMHIHYLHHPQIGPVEHARRRGFDNVLGLQRHLLGLAAFAMGIEPAWGRQQMDEIKRANWPIGIPPFK

SEQ ID NO: 1699 - protein, 388 aa, unidentified
  source 1..388: note = Related to NZ_CADETV010000001.1; note = Burkholderia anthina
MVNWRAQQFINEGRQRGVSAPILQNAVQIARQIQSVSNDLPPLFTLRHLAHEVGVPYLALRGIVSRQFIDEAYRVFTLRKRNVGHDSRRFRVICVPNPALLKTQRWIHSKILKLGRCHEASGAYSKESRIYDVASIHCNARWLVKLDVKDFFDSILEPKVYQVFIKLGYQPLVAFELARLCTRTRYTGNPKRRSKRQYPKIQGYRNPVVGHLPQGAPTSPLLANLVAYDLDSELLALAGKTNVRYTRYADDIVFSSADKAFTRADAEKLIDETYACLKQHGLYPNRAKTNIVSPSARKIVLGLLVDGPTPRLQREFKDRLRMHIHYLHHPQFGPVEHAKRRGFDNVLGLQRHLLGLAAFAIGIEPVWGRQQMEEIKRATWPIGIPPFK

SEQ ID NO: 1700 - protein, 390 aa, unidentified
  source 1..390: note = Related to QBTZ01000001.1; note = Acidovorax sp.
MNHWNSQRYLASGRSQKRAANVLANAASTAELIRKAAPGAAILFTLNHLARETGVPYHYLRSVTERGGLNSNTFYRVFSLKKHNGGFRGKRTRTICAPEPLLMKTQRWIHEHILTKGCPHSASSAYRPGSRIRDAAEQHRNARWLVKMDVTNFFESILEPKVYEVFRSFGYQPLMAFELTRLCTRIRKGGPKRHKVNDTARIGRYSSGSLGHLPQGAPTSPLLANLAAFDLDCELNSLATSNGMVYTRYADDIVLSSSAEDWSKSKAVTLLKQGHDILKAHGFQPNLAKATIAGPGGRKLVLGLSVSGAEPRLTRDFKNKLRAHIHYLQKYQSQGIPPHEKLKFDSRLGLQRHVFGLAYYAIGIERAWGAARLAELKALPWPVEHGISFV

SEQ ID NO: 1701 - protein, 389 aa, unidentified
  source 1..389: note = Related to NZ_LMHZ01000013.1; note = Noviherbaspirillum sp.
MNHWQSQRYLKEGLATNKNIGLLNRAIATAEAIRAVNPHAPPILTLNHLAHETGVPYDFLRGVVTRGGSSDHSFYHVFTVKKNNVGHAHGRTRTICVPHPMLIKAQRWIHENILQFGRFHEAACAYRPGSKIVDTASLHCEARWMVKMDVTNFFESILETKVYKVFRSFGYQPLVAFELTRICTRIRKESPRRIQPSKAGISSYANNYVGHLPQGAPTSPLLANLAVYDLDKELSLLARQNGMIYTRYADDITFSSVTSTWSRAKAVQLLCDGHAKLKSHGFWPNHAKAHIVSPGSRKIVLGLTVDGTAPRLTKQFKNTLRAHIHYLERFQLSNRPPHQVLGFDSILGLQRHVFGLAYYAMGIERGWGAARLAELKSISWPAEHGIAFD

SEQ ID NO: 1702 - protein, 383 aa, unidentified
  source 1..383: note = Related to CABFMN010000087.1; note = Xylophilus ampelinus
MTSWDSQHYLSSGLVAGIDAGLLARVDATARRMLAVNPTATVIVSLGHLASLCDVPYGYLRRVIRRDATLEPYRVFALARGGHGPTRRPRTICAPEPLLLRAQRWIHANVLQHAKAHAASTAYAKGCSVVEAARVHCGASWLIKLDVSNFFDSILEPKIYQVFLAQGYQPLVAFELARLCTRVRSKGNVARSTGSGVPGPYVYPSIGHLPQGAPTSPLLANLVSFAFDEEVSQLARRFCLRYTRYADDMTLSFRGTGFDRTKAREVIGACYRIMLDHSLWPNRTKTQVIPPGARKLVLGLLVDGNRPALTREFREQMRMHLHFLETQGPVSHAQHRGFGSVIGLQNHLFGLAAHAMGVNKAIGRDWMYRLQRLPWPAAFEMPV

SEQ ID NO: 1703 - protein, 402 aa, unidentified
  source 1..402: note = Related to NZ_VUYU01000002.1; note = Massilia rubra
MTHWQSQLFEVDAPPDAPVDAALAIANAIRSINPLLPPLFTLSHLAHETGVPYKYLRNTVARGKVDEQYSVFRIQKRAPSATIQYRWIAAPHPLLLKTQRWINTNILKNIAVHNAAFAYIKEGSAYKAACLHNQAKWLVKVDIRNFFESILETKICKVFETAGYQPLLAFELSRICTRIATPEMERALAPNGRVPNSLKGLKYSISAYNSFALGHLPQGAPTSPMLANIVAKEIDDEISSLAEKYKLRYSRYSDDIVLSTPSTQFGKEMCKEVVGKLYRILLSAGYQPNVEKTKISGPGSKMIVLGLLVDGKTPRLTSEFKSKLRMHLFYCRTRSPQQHAVKRKFASLLGLKNHLIGLISYAGTIDAAFASKCYAELNACSWPIFDSADFDSIIESTVKILR

SEQ ID NO: 1704 - protein, 399 aa, unidentified
  source 1..399: note = Related to NZ_WKJJ01000024.1; note = Massilia rivuli
MSNWQSQLFKQDAPPGAPVSAAIAIASEIRSTNPFLPPLFTLAHLAHETGVPYKFLRSVVARTGATEHYTVFKIKKRSQNAIKQYRWIAAPHPFLLRVQRWINDNILKKLPVNEAAFAYLEDRSAYKAAIVHKNAKWLMKVDIENFFETVLETRIYKIFLDAGYQPLLSFELSRICTRIANPELERAYSINGFAKVKTKGTKYVIEAYASSALGHLPQGAPTSPMLANLIAKDIDEKIAELADRFDLRYTRYSDDIVLSSKSNDFGKANAAKAIGQLYAILRRAGFQPNMEKTKVSGPGSKMIALGLLVDGNKPRLTSEFKDKLKMHLYFCRTRSPQAHAVARKFDSVIGLKNHLLGLISYARMVDSSFADECLAQMNSCHWPITGPIDLSLILESLKA

SEQ ID NO: 1705 - protein, 305 aa, unidentified
  source 1..305: note = Related to RKJT01000001.1; note = Burkholderia pseudomallei
MAAPHPLLLRVQRWINTEILSKLQQHPASYAYRSGRCAFDAARRHQRARWLVKADVTNFFESILEPDVYSIFRSAGYQPLIAFELARICTRVRTVDEINPKDLRTSRTKSAAYKIQAYRSAYIGHLPQGAATSPLLANLVANPLDVTLSQVATRTGFRYTRYTDDIAFSSASLDTTRADAVSVAGAIHSALYKHGFSPNLAKSVIRGPGHRRIVLGLLVDGDRPRLTSEFKDTLTLHLRHLEMSGPIEHAKARGFHSIVGLKHHIDGLIAYAKGVDEAFAAKCAQKLGRVSWPLLTPLDLDAIVP

SEQ ID NO: 1706 - protein, 363 aa, unidentified
  source 1..363: note = Related to JAAUUP010000100.1; note = Deltaproteobacteria bacterium
MESKGVAVVLSLSHLSKLTGASYWSLRQVISRHGDMPYRPFRIPKRSGGARLIFEPHPMLRHVQRWILDSILSKVRPNDNAYAFVQGRNAIDAARKHCGAKWLVKADIVNFFESIQEFKIFKVFADIGYGPLVGFELSRLCTYPYRVGHPRYEQPEWTHRLGQEHGENGYIGSYFGSYFDSRIGHLPQGAPTSPALSNFTCKWLDQKLARYAEMHEWEYTRYADDIVLSKVAANRAEAIEALNYVRWVAARSGFMLNSKKTKIVPPGARKIVLGLLVDGDRPRLTKKFQNDLDMHCHYGLKLGAKRHSERRHFRSVLSFLDHVQGKISFAFQVDPLRAEGWASKFLIIRSEYLASVGSDVCNG

SEQ ID NO: 1707 - protein, 387 aa, unidentified
  source 1..387: note = Related to JAIUHI010000001.1; note = Mesorhizobium sp.
MSAPSPQRYASGASRQGIDAVTLENALATLARIRATDPRITPVLTLRHFSVLTELPYLFLRRTVARRGHAEYRFVLLKKRIPGRSAKRMISIPPKSLAVAQRWLVDHVLRYAPVHPVSFAFHPESSPVQAAEQHPNTKWLLKVDIEDFFHSVSEGTVSAIFTRLGFPKLLAFEFARLCTIGLDRGPGKNPAPHAGPISFYALGYEGFLPQGAPTSPMLANLAMLRIDTLLASLAEERGLRYSRYADDLTFSTDTDRTLVEMRRLQRDVCGILNDSGFRHNQRKTGIRGPGTRRIVLGMLVDGPMPRLQRAYKDMIRLHLHYLSSPAYGPAKHALARKTGVSSLYHHVRGLISWAQQVEPAFGQQALEQFASADWPPIQPRQIEGRLG

SEQ ID NO: 1708 - protein, 388 aa, unidentified
  source 1..388: note = Related to JAAYVT010000069.1; note = Phyllobacteriaceae bacterium
MSTPSPQRYASGARQRGVDPATLKNALATFARIRTTDPRITPVLTLRHFSVLTELPYRFLRGTVARSGLVEYRTVYLKKRIPGRSAKRMISIPPPSLASAQRWIVDHILRYARVHPASFAFHPDSSPVHAAEQHPNTKWLLKVDIEDFFHSVSEGTVSAIFFRLGFPKLLAFEFARLCTISIDRGRSRNPAPHAGPITAYAYGYEGFLPQGAPTSPMLANLAMLRVDALLADLAEERGLRYSRYADDLAFSADNNRSLAEMHRLQRDVCQILNDAGFQHNRRKTVIRGPGTRRIILGMLVDGPTPRLQRAYKDIIRLHLHYLASPAYGPAKHALARKTGISSLYHHVRGLIAWAQHVEPAFGRQALEKFTSVNWPTIQPRWVERGSND

SEQ ID NO: 1709 - protein, 389 aa, unidentified
  source 1..389: note = Related to NZ_VCDI01000012.1; note = Lichenicoccus roseus
MAAPSPQRYLSGGRRQGVATVTLDNALAAFARLRETDPRITPVLTLRHFSVVTGLPYFFLRRSVARRAHIGYRFVYLRKRIPGRSSMRMISIPPPSLAAAQRWLVDNVLRYVEPHPASFAFHPDSSPVLAAEQHPDTQWLLKVDIEDFFHSVSERHVSAIFASLGFPKLLAFEFARLCTIGLDRGPGRNPAPHPSPIALYQSNFEGFLPQGAPTSPMVANLAMVRTDEFLSMLAEARGFRYSRYADDLAFSSDKSRTIAEMRGLQREVCRILNEAGFRPNHRKTVIRGPGTRRVVLGLLVNGPTPRLSRAFKDNIRLHLHYLTSPDHGPAKHALARKTGTSSLYHHVRGLIAWATQVEPAFGAAALRTFRSASWPLIQPQEVGEEDDWL

SEQ ID NO: 1710 - protein, 394 aa, unidentified
  source 1..394: note = Related to NZ_CP010954.1; note = Sphingobium sp.
MPVPSPQRYASGGRRQGIDSQTLDNAIAAITRIRATDPRITPVLTLRHLSVLTELPFLFLRRKVARQERVGYRTIFLKKRIPGRSSMRRISIPPKSLAHVQNWLVQNVLQYTSAHPASFAFHPDSSPILAAEQHPNTKWLLKVDIQDFFHSISEGTVASIFSRLGFPKLLAFELGRLCTIPCNRGPSRNPKPHPSPIEFYRSDFEGYLPQGAATSPMLANLAMSMTDQRLSALAEKFGFRYSRYADDLAFSSPNDHALADLQKLKRNVFHILNSSGFRPNLRKTVIRGPGARRIVLGMLVDGKEPRLSKEFKDNIRLHLYYLTSPQHGPQKHALSRKTGVSSMYHHVRGLIAWARQVEKTYGEEALAKFKSVNWPPIQPRMVHCSLDDLRDKDD

SEQ ID NO: 1711 - protein, 344 aa, unidentified
  source 1..344: note = Related to NZ_BAJW01000019.1; note = Acetobacter persici
MRHLSALTGLPFLFLRRTVARKEHVNYRKVYLKKRIPGRSTKRLILIPPKSLAVAQGWLVQNVLRYTVAHPASFAFHPESSPVQAAEQHPSTKWLLKVDIQDFFHSVSEGRVSAIFAGLGFPKLLAFELARLCTVAADRGAGRNPQPFAGPINYYDNPFEGFLPQGAATSPMLANLAMLSVDEALSGIAKRTGFRYSRYADDLAFSTKKDSSVAQMNRLKREVIAVLNDNGFRPNLRKTVIRGPGSRRIILGMLVDGPDPRLSKEYKDNIRLHLYFLTSQKHGPQKHALSRKTGVSSLYHHVRGLISWAKQVEPAYGQLALEKFQTADWPPIQPRRIFKIEAEF

SEQ ID NO: 1712 - protein, 388 aa, unidentified
  source 1..388: note = Related to NZ_SLXP01000012.1; note = Rhodovulum marinum
MPAPNPQRYRSQGRLEGVDDTVLDHAVETFERIRAVDPRITPVLTLRHLSHLTDIPFLHLRDLVGRRAHRPYKFFYLKKRIPGRNRVRMISVPNGTLMSLQRWIVDNILQFTRPHAASFAFHPDCRPYEAAAEHCGCAWLLKIDLEEFFHTVSEGRVAAVFENLGFPRLLSFEFARLTTVACERPGSRPDPGERWPAIPYYQCEHEGMLPQGAPTSPMLANLAMLKVDEILSALAEEYGMTFTRYADDLAFSCGEEYDFAHVQRFKRLVLEKLNKSGFRPNHRKTVIRGPGTRRIVLGMLVDSERPRLPREYKDNIRMHLHYLTSESHGPSVHAASRQTSVSGIFHHVRGLIAWAETVEPDYGARALENFESVDWPPLEPNRLLGHRG

SEQ ID NO: 1713 - protein, 390 aa, unidentified
  source 1..390: note = Related to JACIJP010000010.1; note = Sphingobium subterraneum
MSLPSSQRYRSQGRREGVDDAVLNNALAAMRRIRAVDPRITPVLTLRHLSHLIDVPFLHLREIVARRARRPYKFFYLKKRIPGRSRMRMISAPNATLLKIQRWIVENILQYTTAHEASYAFHPGSRPFDAAQEHCGCEWLLKIDLEDFFHSISEGRIAAVFAHLGFSKLLSFELARLVTVGCERPGTRTDPAIRWPAIPYYQSKHEGMVPQGAPTSPMLSNLVMFKTDEILARLADAHGMKYTRYADDLAFSCGPGKNEIHVRRFMRLVLDQLNHAGFRPNHRKTAIRGPGSRRIVLGMLVDSDRPRLTREYKDMIRLHLHYLTSPSYGPALHALARKTSVSGIFHHVRGLIAWSQIVEPDFGAGALTRFEGVDWPPVQPDPYDEEANDT

SEQ ID NO: 1714 - protein, 389 aa, unidentified
  source 1..389: note = Related to JFYY01000007.1; note = Sphingomonas paucimobilis
MPPGPQRYRAQGRREGVDETVLANALSVIDRIRAADPRITPVLTLRHLSELVGVPYPHLRDLVARRVPRSYKFFYLKKRIPGRTSTRMISVPNKTLLSIQQWIVSDILRFTSAHEASYAFHPGGRPLEAAEEHCGCAWLLKVDLQDFFHTISEGRVAGIFAELGFNRLLAFELARLVTVACERAKPSDPAARWPTIPYYQCAHEGMLPQGAPTSPMLSNLVMHRTDGVLARLARAHGMRYSRYADDLAFSCGADRDAAHVRRFKRLVLKSLNEAGFRPNLRKTTIRGPGSRRIVLGMLVDGDRPRLPKGYKDMIRLHLHYLTSPDYGPAAHAQARKTSVSGIFHHVRGLISWAETVEPAYGKQLLARFWSADWPPLEPTYLDDLSEDGD

SEQ ID NO: 1715 - protein, 391 aa, unidentified
  source 1..391: note = Related to NZ_JACONT010000017.1; note = Sphingomonas albertensis
MPAPAPQRYRSEGRRKGVPPDVLANALASISRIRDTDPRIEPVLTLRHLAFLTDVPYRYLRQVVARSAATGYRTFRLKKRVPGRSRMRTISVPPPSLKEVQRWIVENVIQHVAPHEASYAFHPGSSPYLAAEEHCECSFLLKVDVQDFFHSIGEGSVAAVFEAIGFQKLISFEMARLVTRPIPSSKPAPDPAARWVAIPYYNYPHEGVLPQGAPTSPMLANLVMRHADQRLANLATRMGMRYTRYADDLAFSAPHGSAIALADMRRCRTQVLRILNEYGFSPNLRKTVIRGPGSRRIVLGMLVDGDRPRLAREFKDNLRLHLHYLTAPSHGPAAHAMARKTGVSSMYHHVRGLISWAQCVDPEYAADALALFRTANWPLVQPRWSGASDDD

SEQ ID NO: 1716 - protein, 387 aa, unidentified
  source 1..387: note = Related to NZ_BPQL01000193.1; note = Methylobacterium goesingense
MNLPNPQRYRSEGRSLGVDEITLDNAIATIKRLQASSPSLPAVFTLRHLAHLTQVKYGYLRYIVRRKVNYRHFRISKKLPGRNRYRLISIPPANLSKLQRWISNNILRHLSPSSASYAYHPGSNPRFAAEQHCGCEWLIKIDVQDFFHAISEGRIAEIFYKAGYPRLLSFELARIVTCVLPGTIKRAASYSARWPVISQYQHDREGVLPQGAPTSPMLSNLAMRALDERLIALAAKNGMIYTRYADDLVFSCKNRTKPTIDKVKRSILRELSREGFQPNLRKTAVRGPGSRRIVLGVLVNGKEPRLTRDFKENLRMHFHFLTSEKHGPHNHANNRGTSISGIYHHVRGLIAWAKVIEPAYGANLMVRFHSINWPSLQPHSIFEDMEK

SEQ ID NO: 1717 - protein, 386 aa, unidentified
  source 1..386: note = Related to NZ_CP030037.1; note = Bradyrhizobium sp.
MSLLSSQRYRSRGRRLGIDPTTLERAVATIERIQRSDPRLTPILTLRHLSELTGAQYGYLRRVVGRILGGYRHVHFKKRIPGRSRRRVISIPPRRLLEVQQWIAQNVLRFAEPSRASFAYHPSSSPVLAAEEHCGCEWLLKVDIVDFFHSITEGRVSAVFYRLGYPRLVAFELARLTTMQLIRGALQRDAERWSAIPYYQSEYEGVLPQGAPTSPMLSNLVMKDLDERLIELSKQHGMRYTRYADDLAFSCGKGRDRSHVERFKRLVLAELSREGFNPNLRKTVIRGPGTRRIVLGMLVDGPSPRLPREFKDMLRLHLHFLKSEGHGPSAHAQKRRKSISGLYHHVRGLIGWAMSVEPDYGARILAEFERVAWPPVQPRWSERPDR

SEQ ID NO: 1718 - protein, 416 aa, unidentified
  source 1..416: note = Related to FNXB01000037.1; note = Rhizobium tibeticum
MLVSRSDIFMLRNGTSLSRRRLGGASCHYPPNGVKVMQSWSPQQYRYDGAQHGVSDETIESVIARVELIAAVNPSITPVLTLRHLSELCGVEYGFLRRIVSRSTVPYRVFSLRKRIPGRTRHRLICVPRNELKAAQDWIVRNILRHTKAHGASFAYHPKSRPELGAHRHCGCDYLLKIDITDFFHSVSEGRIFRIFAELGFSELVAFELARLTTIIAQGTERPDWIAAARWPAIPAYQTSYEGFLPQGASTSPMLSNLAMLALDARIAGMASDAGLVYTRYADDLTFSGRKPHDLKSMKRFKRKVFDALNEAGFRPNLRKSSIRGPGARRIVLGMLVDGPRPRLAKEFKDDLRKHLHYLRSKDYGPAKHAAANKTSISAMFHMVRGLIGWATRVEPQYGRSCLVEFRKVVWPPLIP

SEQ ID NO: 1719 - protein, 428 aa, unidentified
  source 1..428: note = Related to RPNF01000004.1; note = Sinorhizobium meliloti
MGILDVQSIGFSMLVSRSDIFMLRNGTSLSRRRLGGASCHYPPYGVKVMQSWNPQQYRSDGAQKGVASETIESAIARIKLIGAANANVTPVLTLRHLSELTGVDYGFLRRVVSRSIVPYRAFSLQKRVPGRTRHRLICIPRDELKSVQDWILRNILTHTKAHEASFAYHPRSRPELAAQSHCGCHYLLKIDVQDFFHSVSEGRIYQIFVDLGFSELVSLELARLTTIIAPGTGRPDWVAAVRWPNIPAYQTPYEGFLPQGAPTSPMLSNLAMVALDARISAMASKAGIVYTRYADDLTFSARAPHDAISLKRFKREIFAVLNEAGFRPNLRKTSIRGPGARRIVLGMLVDGPRPRLAKEFKDDLRKHLHYLKSPDFGPAKHAAANKTSVSAMFHMVRGLIGWATRVEPEYGRSCLVEFRKVVWPPLTP

SEQ ID NO: 1720 - protein, 383 aa, unidentified
  source 1..383: note = Related to LXKM01000017.1; note = Agrobacterium sp.
MQSWSPQHYRFHGTTENVPESILESAISRIELIRARNPNITPVLTLRHLSLLADVDYVFLRRVASRSTHPYRAFMLKKNVPGRTRLRLICVPNKNLKKIQDWIVRNILRHTRAHRKSFAYHPYSRPEFAAQAHCDCDYLLKVDIEDFFHRVSEGRVYKIFCDLGYSELVSLELARITTTVAEGTERPIESIHFRWPAIPAYVSPYEGFLPQGAPTSPMLSNLAMLGLDEQLDSMAREEGIVYTRYADDLTFSARRPHNAATIKRFKRRVLALLNDTGFRPNHRKTMIRGPGARRIVLGMLVDGPKPRLPNEFKDEIRKHLYYLQSEKFGPAHHSAANKVSISTLYHIVRGLIGWAARVEPEYGRRCLQQFKLIEWPPIDRGSS

SEQ ID NO: 1721 - protein, 446 aa, unidentified
  source 1..446: note = Related to NZ_QJKM01000019.1; note = Rhizobium terrae
MGTTGVQSIGFSMLASRSLFFMLRTGTSLYRRRLRYASRQYPPNGVKVMQAWSPQHYRYEAERHGVQDETIDNAIARIELIVANNANVTPVLTLRHLSAMSGVEYGFLRSVISRSMMRKKYRVFSLRKNVPGRTRYRLICVPNEELKTVQDWIVRNILRHTRSHPASYAYHPKSRPEFAAKAHCGCDYLLKVDIQDFFNRVTEGKITRIFRDLGFSDLVSFELARLTTVTAQGMELPEGLSERRWPAIPAYQSRYEGFLPQGAPTSPMLSNLAMLALDEKLQELASSEGISYTRYADDLTFSARKPHDFESIKRFKRKVLTELNAAGFRPNLRKTHIRGPGMRRIVLGMLVDGQRPRLTKEFKDDLRQHLHYLTSDDHGPATHAQANKTSIGGMFHIVRGKIGWATRVEPEYGRKCLIQFRTIKWPPIERAKSGTISLDFDMIDEP

SEQ ID NO: 1722 - protein, 393 aa, unidentified
  source 1..393: note = Related to PEGF01000002.1; note = Caulobacter sp.
MSSWNPQHYRFDGERQGVPGAVIDSALAIMERIRRVDPRMTPVFTLRHLSEMTGTRYGLLRSVVARRTHPYKVFTLKKAIPGRTRVRLICTPNRELKTTQDWIVRNILQHTRAHPASYAYHPGSRPEFAARMHCGCDFLLKVDIEDFFTRVTEGKICEVFEGLGYPDLIAFELARLTTVVASGGKSPSVDPAVRWPTIKAYQHAAEGFLPQGAPTSPMLSNLVMRHLDDRFAAMAAAANMKYTRYADDLAFSARKPHTRATVAAFKRKVLRELSEAGYRPNLRKTAIRGPGARRIVLGMLVDGPEPRLSREFKDDLRQHLHYLASEDFGPSRHAERQKLSVSTLYHRVRGLIGWAMRVEPKFGAKCLAQFEAVAWPPIDIRSPINAIDWDELA

SEQ ID NO: 1723 - protein, 384 aa, unidentified
  source 1..384: note = Related to NZ_NEFY01000006.1; note = Marinobacter vinifirmus
MSFWSPQRYQFEGEKHGIDDDAIAASVEVIKRIQNINARLPIVLTLRHLSWLTDTNYGYLRKVVSRESGKYKRVLFKKKVPGRSRYREIHIPEASLLAVQKWITAKILSNTSAHPSSFAYHPDSQPIFAASRHCGCKWLLKIDIENFFHSISERMVYKVFRDLGYTKLLSFELARITTTTGLSNKKSEDIFRSDSSRWPSIPNYYCSDEGFLPQGAPSSPMLSNLVMKAIDKDLEYLANCNGFTYTRYADDLAFSTEKNATIADINRFKKEVNRLLIEAGFNPNRRKTAIRGPGARRIILGILVDSKNPRLSKEYKDQLRQHLYYLRSQEHGPSKHAEARKLSVSTLFHHVRGKIAWAEKVEPEFGALCLEKFESISWPPLDNW

SEQ ID NO: 1724 - protein, 380 aa, unidentified
  source 1..380: note = Related to NYXE01000056.1; note = Rheinheimera sp.
MSSWSSQRYKFEGETQGIDDSVLDSSISAIGRIQKVDERLPIILTLRHFSLLTDCHFGYLRRVVSRESREYKRILFKKKVPGRSRYREIHVPEQELLEVQQWVTAKILSNTKAHHSSFAYHPNSQPIFAASQHCGCKWLLKIDIEDFFHSISERMVYKVFKDLGYNKLLSFELARITTIVKARDKSQASSDLTKWPAIPTYCKNSEGFLPQGAPSSPMLSNLVMKSVDEKLATLAKTNGFIYSRYADDLAFSTKLNVGMVSMRQLSKLVSCLLSAEGFNLNKRKTVIRGPGTRTIILGILVDSKKPRLSKEYKDDLRQHLYYLCSQDHGPSKHAEIRKISVSTLFHHIRGKIAWAEKVEPEFGAYCLEQFNGIKWPPLGY

SEQ ID NO: 1725 - protein, 388 aa, unidentified
  source 1..388: note = Related to NZ_JACHOW010000011.1; note = Longimicrobium terrae
MPAWNPQRYQHEGKIRDIDQGILDSVVRIINRIRAVDARLPVILTLRHLSVLTDVPYKYLRDVVSRQAGDYKRVLLKKRVPGRTRHREISIPNPVLAGVQKWINENILQFTSAHPLSYAYHPESQAVFAATPHCGCRWLLKVDLTDFFHSISESDVYAVFKSLGYSPLLAFELARLTTMLSASSRPAPADFTERWSSIPAYACEKQGVLPQGAPTSPMLSNLVMRDLDEGLAQLAEAAGYTYTRYADDLAFSTAKDVGLEHVQRLRKSVLLKLAKSGFSGNLRKTVIRGPGARRMVLGILVDGHEPRLAREYKDALRQHLYYLLSPAHGPAKHAGARNLSVSTLFYHVRGKIAWAERVEPSFGSACLEEFEKVDWPPVDVARQRSRDA

SEQ ID NO: 1726 - protein, 395 aa, unidentified
  source 1..395: note = Related to NBDP01000036.1; note = Bosea sp.
MRITSPQHYVAAGQGLAIDPLVLENASRAISQIWSRNINLFPLLTLNHLSVATGLNYGFLRRVVARKGGPYLYSHFYMRKRVPGRRKVRMISIPAPKLAQCQSWIVRHILKHVPPHSGSYAYHPHSNPVFAARRHTEAVWLIKVDIQDFFHAINEHAVYRVFRSLGYASILSLELARLCTMTAERPRQAKDPSARYVSPAVEYYQTPYVGVLPQGAPTSPMLSNLVMRDVDQGLSDLAKESAMRFTRYADDIVFSCADKRLGSSVRLVRNKILEILNQAGFRPNLRKTVIRGPGDRKVVLGMLVDSAHPRLMKEFKDELRLHIHYLRHPKFGPAHHALARKTSVTSIYHHVLGLIFWARTVEPTYGARLLKEFKLIQWPPITRRDYYATVRQAGD

SEQ ID NO: 1727 - protein, 395 aa, unidentified
  source 1..395: note = Related to RCIZ01000007.1; note = Mesorhizobium sp.
MRITSPQHYVAAGHELAVDPLVLENASKVISRIWSVNPNLFPLLTLNHLSVASGVDYGFLRNVVARKTGNYRQFLMRKRVPGRRRVRVISMPVPKLMHCQHWIVENILKHAKPSPDSYAYHPNSNPVFAARRHTNSVWLIKVDIEDFFDSVHEHDVYRVFRSLGYAGILSLELARICTMAAKWRPDTDERWARYKGHGVAYYRNQWIGVLPQGAPTSPMLSNLVMRDVDQKLARLASSSCMRFTRYADDIVFSCSDRRTAETVRSVRSQILTILNEAGFRPNRRKTVIRGPGDRKLVLGLLVDGKKPRLAKEFNDEIRMHLHYLGHPDFGPARHATARKTSIAAIYHHVLGLIFWARAVDKTFGSELLRQFNSIAWPPVSERHYFATMEQQENHR

SEQ ID NO: 1728 - protein, 385 aa, unidentified
  source 1..385: note = Related to NZ_JAHVKC010000001.1; note = Pseudooceanicola nitratireducens
MRQTSPQQYKAAGHELEIAPAVLNNAAAAMQRIASINSQLFPLLTLKHLSIESDVSYGFLRKTVAREAGRYRHIYLRKKVPGRKNVRMISIPEGRLLRCQKWISENILRFGAPHQASYAYHPGSNPVFAARAHTEAKWLIKVDIQDFFHAISEHQVYRVFRSLGYARLMSFELARLCTMPCERLEPDTADVKYLEATITHYYSPYVGILPQGAPTSPMLSNLVMKELDAKLAKLADDNAMNFSRYADDIVFSCKDARPSQSVNRVKRLILKALNDEGFRPNLRKTKVRGPGTRKVVLGILVDGKQPRLPREYKDKIRQHLHYLTHPDFGPAGHASARKTSVSRIYHHVFGLICWAKAVEPSFGEEALRSFNAINWPPISRPKFYS

SEQ ID NO: 1729 - protein, 323 aa, unidentified
  source 1..323: note = Related to WIEL01000040.1; note = Rhizobium leguminosarum
MARWNPQRYQDEGEKQGIDPGVLDAASKAIANIQAVNPSLPPILTLMHLSKVTEVNYPYLREIVGRKIDPYKSFALRKRTPGLHRTRTIHVPEDYLLTVQRWISRAILRQAAPHSASFGYHPGSSPVTAARRHRNAKWLIKIDLKDFFDNIREPAVFDVFRSLGYGSLISFEMARIVTRAPDAKRAQIAIDEHRIPFYSVDSNGFLPQGAPTSPMLSNLVMRGLDAKLQELANEHDFRYSRYADDLVFSCRDQKSRSAAQTLRDAALQALRAGGFTPNMRKTTIVAPGGRKIVLGLLGAVEVQGFFWGLFVIQAADGTICADG

SEQ ID NO: 1730 - protein, 375 aa, unidentified
  source 1..375: note = Related to NZUJ01000046.1; note = Ponticaulis sp.
MRFPSLQQYKAKLVSFAVAQPLFSRLVRVLLRIRSTSDSIYPIFTLRHFCQIVGADFKFLRLVIGRKFPYTYTTFYLKKNSPSRGFREINVPCNELRLVQRWLVENIISHVHPSEHSFAFHPGSSPYAAAAEHRNTKWLLKVDIKDFFHSVSEHEVYDIFYGIGFQKLLAFELARICTIPSTDSASLVSKERKIEDYQSNRIGRLPQGAPSSPMLANLAMRKVDHEIASCCAEYDLRFTRYADDIAISSDDDCGLDTLIQIRRQVFRILRAHGFDPNPRKSVIRKPGDRKIVLGLLVDTERPRLTSEFKNNLRMHLYYLMKPSGPSAHAKARNSSITTVHAHVLGLIHWARYVDSTYGNARLAEFKSVNWPKGTW

SEQ ID NO: 1731 - protein, 384 aa, unidentified
  source 1..384: note = Related to NZ_JABVZR010000001.1; note = Novosphingobium sp.
MAHPWDPQTFIAGARLAGRSEVTIQACQAAAIAIKRTHPDLPVILTLNHLAHLADVNADFLQEVAHRKIDPYRVFRVKKRGVANLVPAQPRRYRTICVPEPRLMRVQRWIAQNILQVTPSHTASFAFIKNRDLKGAAEMHVNAKWVVKMDVRQFFESIPEAAVYRVFRTFGYGALLSFQMARICTRRPDHHRRDTRALLGRGGQRPYRLHPMGHLPQGAPSSPMLANRAVEALDRRLERLAISAGWTYTRYADDLAFSRTTDATRSEAMKLVKLAELSLQIHGLVVHRQKTSILSPGSRKILLGMLVDTGKPKLTKAFRNNIETHLYALTHKKIGAEKHRTKRGFSSLIGMRRHILGLIAYAHQVDEAYAATLYAKANSVDWTR

SEQ ID NO: 1732 - protein, 384 aa, unidentified
  source 1..384: note = Related to JAALZB010000008.1; note = Agrobacterium tumefaciens
MAHRWDPQTFIGGARVAGRDEYTIEACKAAATAVKRIHPDLPVIFTLNHFAHLVDVDADFLAEVAHRKIDAYRVFRVKKRGVANLVSAPSRRYRTICVPEPRLMRAQRWIAQNILQVTPSHRASFAFTKGRDLRGAATSHANAKWLVKMDVRQFFESISEAAVYRVFRAFGYGALLSFQMARICTRLPDHHHSDNRDRLGRGGRGPYRAQAVGHLPQGAPSSPMLANRAVEALDRKVERIANKSGWTYTRYADDLAFSRSDDARRGDSMKLVKLIEMSLMSNGLVVHRQKTSITASGGRKILLGMLIDRGEPKLPKSFRNNIETHLYALSHANIGAEKHRATRGFASLIGMRRHIMGLIAHAHQVDKTYAAKLYAQVNLVDWNR

SEQ ID NO: 1733 - protein, 384 aa, unidentified
  source 1..384: note = Related to VFSZ01000005.1; note = Mesorhizobium sp.
MPYRWDSQAFIVGARSEGRSESTIQACLAAATAVKRKHPDLPIIFTLNHLAHLADVNADFLQEVAHRKIDPYRVFRVKKRGVANAVPAPPRRYRTICVPDPKLMRVQRWIAQNILQATPSHHASFAFTRDRDLVDAAKKHAGAKWVVKMDVRHFFESIFEDSVYQVFRSFGYGALISFQMARICTRLADHNRNDARALLGRGGRRPYRQHSKGHLPQGAPTSPMLANRVVETLDQKLDLIAITADWAYSRYADDLAFSRITTTTRRQAMSLVKKVEAELAKFGLETHRQKTTIVSPGGRKVLLGVLIDTDKPRLTKNFRNNIETHLYALTSQKIGPEQHRLKRNFVSLIGMRRHILGLIAFAHQVDETYAAKLYTLFNTVNWNR

SEQ ID NO: 1734 - protein, 385 aa, unidentified
  source 1..385: note = Related to NZ_QDKO01000010.1; note = Caulobacter sp.
MRHPWSSQQFRLGALAAGRSEAIIAAAESIARDIKRRNENLPVVLTLHHLAHLVDVPIEPLQKIIFRQIDPYRVYRVKKRGTPNGAAAPPRKYRTICVPHPQLMRLQRWIAQNILNEVAPHDASFAFTPKRNLVGAAWRHTEARWLLKMDVRHFFESISERQAYWVFRTLGYTALLSFQMARLCTRLTQHGVADPRRAAGRGHTGLPYWQHPQGHLPQGAPTSPMLANLVMRSFDRRVEALAQSTGWGYSRYADDLAFSRRDGSSRGAAMHLAKAVEHELALLGLVSHRAKTSVVPPGARKVLLGVLVDSTRPALTRAFRNNVETHLYALTSPKIGAAAHRAKRGFASSIGMRRHIEGLIAFAHQVDRAYGAKLYAQFNDIDWTR

SEQ ID NO: 1735 - protein, 389 aa, unidentified
  source 1..389: note = Related to KB291762.1; note = Brevundimonas diminuta
MTFTWDPQQFEAGALGAGLDRRSVEAALAAGAAIKASHPDLPVVLSLGHLAHLTDVSAGVLDKIVRRRLDPYKVFRVQKRGTPKAGNAPARRYRTICVPTPGLMRVQRWIAQNILNVITPHAASYAFTPNVKMSDAIKRHANATWLVKVDVRHFFESISETQVYWFFRRLGYPALLCFELGRLCTRLAPDHRVYATDPPVTPGSRPSAGHDLPYPPRLQGWLPQGAPTSPMLANHIVEPLDVKLSAMARSGGWRYTRYADDLHFSRTSKFTRKAAVDWSHEVERELVRLGLRANRQKTTITPPGARKLVLGALVDSSTPRLNRGFRNNVETHLFALTHPDIGVDKHQAKRGFASTIGMRRHVQGLIAFARQIDRPYGDKLLVQFESIKW

SEQ ID NO: 1736 - protein, 378 aa, unidentified
  source 1..378: note = Related to PCOO01000001.1; note = Ochrobactrum sp.
MLHPWDSQAFAEGAKKIGRSDATIANALAVADAIKKSNVNLPVILSLGHLAHLTDVGLPVLRNYTERSDDPYRVFQVKKNHVGKAPRRHRTICVPEPSLMRVQRWIAQNILNAQKPHPRSYAFAPCRSLVQAAERHAGCRWLIKMDFKDFFESIDERRVYLVFRSMGYGALLSFEMARLCTRLPGAYSAKPQEAAALSTGYKFQQPGFLPQGAPTSPMLANLVVRALDRRLERIGLKYGWVYSRYADDLAFSTKDISGRGAAIALVKQVEREVRDFGLRENPAKTSITPPGHRKVLLGLLVDRDQPRLTKSFRNNVETHLFALGHPKVGAMAHCAARGFRSVTGLRRHLAGLIAFAHAVDKPYAARLYADFDKVDWSR

SEQ ID NO: 1737 - protein, 378 aa, unidentified
  source 1..378: note = Related to NZ_LMCH01000057.1; note = Pseudovibrio sp.
MKHPWDSQNFVRGARASGRDLDTISAAVSIAKAIKQVSPNLPVIFSLSHLAHLVDVSPKDLRPIVDRMSDPYRHFRLRKKSGGNGSKAPKRRFRDIYAPQPHILRTQRWIAQNILNLIQPHPSSFGFAPGSDMLAAATLHCGCAWLLKMDVSNFFESITERQAYQVFRECGYTALLSFQLARLCTRSIDKKHYSHLRETEFPHPSATEGFLPQGAPTSPMLANLAVYSLDVKLKQIADELGWKYSRYADDIAFSTEQSVSRTDALKLRGIVEGTLKSFGLSENSNKTRISPPGARKILLGVLVDRERPRLTRRYKDNIETHLYALNHEKIGVLAHQANRKFSSVTGMRHHVLGLISFAYHVDRKYGNKLYSEYNRVKW

SEQ ID NO: 1738 - protein, 378 aa, unidentified
  source 1..378: note = Related to NZ_CP066786.1; note = Martelella lutilitoris
MKHPWDSQTFRRGARENGLDAVSIEAALSIAKAIKSTAPDLPVIFSLSHLAHLVDVSPKHLRPIVDRMSDPYRHFRLRKKSGRKGSKAPRRRYRDIYAPQPHLLRTQRWIAQNILNVLKPHSSSFAFAPDSDMLDAATQHCGCTWLLKMDVSNFFESITERQAYQVYRGCGYTALLSFELARLSTRSVDQKHYFHLQESEFPHPEAVEGYLPQGAPTSPMLANLAVRPLDMKLKRIAAELGWKYTRYADDMAFSTDRVRTRKEALQLKAIVETALTRFGLSVNQSKTRISPPGARKVLLGLLIDRERPRLTRQFKDNIETHLYALNHAKIGAQAHRDKRGFSSITGMRHHIRGLIAFAHHVDPDYAQKLYKDFNRIKW

SEQ ID NO: 1739 - protein, 380 aa, unidentified
  source 1..380: note = Related to JAEUMP010000012.1; note = Hyphomonadaceae bacterium
MSHPWDSQTFTAAARAAGRSDAVIDASLRAATYIKDRHPDLPVILTLAHLAHLTDVSGEFLRGVVDRETDPYRVFQLNKRSRPNAPQRAHRTICVPHPLLMRTQRWIAQNILNVIDPHRASFAFAPKRDIVQAAKRHAGCRWLVKLDVTDFFTSIREDAVYRVFRALGYGALISFELARLCTRAPGSSRRKHRASHDQRLPYHRKHCGFLPQGAPTSPMLANLASYQLDEDFEALATSRNWIYSRYADDLAFSTKHPSNRSEALHVSRKAEALLERHGFAANRSKTCIAPPGARRLVLGLLVDRGAPRLPRAFRDNIETHLYALAHADIGPLRHLNKRGFASLIGMRRHIEGLIAFAHQVEPTYAARLYARFKKVAWPAQ

SEQ ID NO: 1740 - protein, 380 aa, unidentified
  source 1..380: note = Related to VGDE01000018.1; note = Alphaproteobacteria bacterium
MQAWNSQRFRAGAKASGSSEETIQAAIEIAACIRKENPRLPVVFTFHHLSHLTDVSSEFLQDVAFRKVDAYRTFQLKKRGKPNSVPAPARRFRTISVPEPGLMRVQRWISQNILNVTTTHAASFAFTPKRDLKQAAMRHREAKWLVKMDITSFFESIKENKIYFVFRKLGYPPLLCFQMARICTRLPIEHGSKIPKQDKMLPYKRRTEGFLPQGAPTSPMLANLVAHALDNDLSMLAAQEGWIYTRYADDLSFSHTECRSRQEAVALVRRVESLLKRHGFLHNPTKTTISPPGARKIVLGLLVDREDPRLPKSFKNNLEAHLYALRSPKIGARAHVKRRGFTSHIGLRRHVYGLLAFAHHIEPSYAKKKYAEFNMIDWSA

SEQ ID NO: 1741 - protein, 380 aa, unidentified
  source 1..380: note = Related to JXQV01000002.1; note = Agrobacterium tumefaciens
MLHPWDSQQFRRGAKDAGRPDQVIDRAIATARRIKRKNRDLPVIFSIFHLAHLTDIDVDSLLSVVDRTEDHYRIFRVKKRSVPGRVAPSRRYRTICVPSPALKRIQRWIAQNILNVTETHPASHAFAPESDLVEAANEHLRSSWIVKLDIINFFETVTERQVYYVFRSLGYAALLSFQLARICTRTLKLTPKGRAGSEGRVPHERYIAGHLPQGAPTSPMLANLAVRQLDDELDNLAKRLGWKYTRYADDLTFSLEGKSSRGKAAELMSLASQTLSRAGFTSNKLKAKIIPPGARKVVLGVLVDTDRARLSKKFRNNLETHLYALTSHKIGVRSHMQNRGFDSVIGMRQHIEGLLAFAHHVDEKYAAGLYRQFNSIDWLA

SEQ ID NO: 1742 - protein, 320 aa, unidentified
  source 1..320: note = Related to NZ_JAHYCB010000008.1; note = Rhizobium populisoli
MLSFVERTHDHYRIFRVKKRATPGTTAPTRRYRTICVPSPALKRVQRWIAQNILNIIDPHEASHAFAPESDLVEAANKHLGCSWLVKLDIVNFFETIGERHVYYVFRSLGYTALLSFQLARICTRTLRLTPNGRAGNDGRLPHEKYIPGHLPQGAPSSPMLANLVARHLDEELTALASSRGWTYTRYADDLTFSVHGKSSRGKAAEIMAVATQALARQGFASNKLKSKVVPPGARKLVLGIVVDTEHTKLSRKFRNNLETHLYALTSDKIGVKLHMANRGFDSIVGMRKHVAGLLAFAHHVDEKYTARLYQQFNSINWLT

SEQ ID NO: 1743 - protein, 375 aa, unidentified
  source 1..375: note = Related to NZ_LHZT01000085.1; note = Acetobacter tropicalis
MLSWNPQQFTREAKKEGCSQPLINAAIQTASLIKKVDIGLPVIFTLSHLAQITDTPLVKLGAYSRRTSKNSYRVFRLKKADRRKFRVICVPEPTLMHVQRWLAQNVFQTRAAAPHQASYAYYSDTRRGLLNAAKQHAGCLWLIKMDIQNFFGSIMEPQVYKVFRDLGYSALLSFQLARICTYVGDKPSPRRKKSYGIPNSYCENLGYLPQGAPTSPALANLTTRLLDSELEKLAQENGWRYSRYADDIAFSTTQTINREVAKSLVLLVREKLINFGFTPNDTKTVISPPGARCIVLGLLVDGPYPRLTNDFRNNLDTHLYALLSKKIGVKKHQEKRGFDSVTGMRRHIMGLLAYAHSIDREYSRKCYEKFNKIIW

SEQ ID NO: 1744 - protein, 408 aa, unidentified
  source 1..408: note = Related to JAAXBO010000012.1; note = Rhizobium leguminosarum
MNYLTSQHFRSVGISLNIESKVLDNAVLVHQRIRKQSPNRGVVFTLAHLAHLTGVHYNFLRMCVSDPGTGSYREFFIKKSTSGQKKNKRAASRPMRRISIPAPMLMLVQRWILHRILHTAEGHEASVAFHKDADIKRAAKLHCGCRWLIKLDVQNFFESITEEQVFKVFVRLGYPRLLSFELARLCTKVIGPEDRSLSPTTRFANFGRGPYEDAAFIDPSTPRRLRRDAPLIVSRRVLPQGAPTSPLLANLAVTELDTEILAIAEEHGLIYTRYADDIALSTKRKDFSRDEASQVIGKVYAAFARARLLPHTGKACVRPPGALKIVLGLVVNGPEPRLTREYRNKLRLHAHILGRLGIEPADHAKALGFRSVLSMRRHIYGKVEHARRIEPDFASKIADTLSKVNWLL

SEQ ID NO: 1745 - protein, 314 aa, unidentified
  source 1..314: note = Related to NZ_CP090091.1; note = Rhizobium leguminosarum
MRRISVPAPLLMHVQRWILHRILHTAAGHEASVAFHKDADIKGAAKLHCGCKWLIKLDVQNFFESVSEEQVFKVFVRLGYPRLLSLELTRLCTKVIDPEKRVRTRFTRLASYGRGPYEDDAFLDQSLKRRERLGSPILAQRRVLPQGAPTSPLLANLAVFEMDREIMEIAIEHDLVYTRYADDIALSTNRDNFTRDEASKIIGKVYACFARARLVPHPGKACVRTPGALKIVLGLVVNGTEPRLTREYKNKLRLHAHILGTKGIDPSEHAKALGFRSVLSMRRHIFGKLEHAKRIEPDFAVKIGNSLKAVNWLL

SEQ ID NO: 1746 - protein, 408 aa, unidentified
  source 1..408: note = Related to NZ_CP092346.1; note = Rhizobium gallicum
MNYLTSQHLRNIGTSLQIEPEVLDRAVLIHRRVTSQNTKRAVVFTMSHLAHLTGVHYNYLRMCIGDPGLLSYREFFIKKSTSGRTKGKKSPSRTMRRISVPAPMLMLVQRWILHRILHTAAGHEASVAFHKEADIKKAAKLHCGCKWLIKLDVRDFFESISEEKVFKVFSGLGYPRLLSFELTRLCTKVLDPGKRIASQNTRLANVQRGPYEDDLFTDQRIPRRQRLDADVLTHRRVLPQGAPTSPLLANLAVFDMDEEIMEIAARHGMVFTRYADDIALSTKRTDFTRDEASKVIGKVYAAFEKAGLIPHPGKACVRTPGALKIVLGLVVNGSEPRLTREYRNKLRLHAYMLGTRGILPSEHAKALGFKSILSMRRHIFGKLEHAKRIEPEFANKIDITLKGVNWLL

SEQ ID NO: 1747 - protein, 425 aa, unidentified
  source 1..425: note = Related to NZ_CP065229.1; note = Erythrobacter sp.
MSSFSPQHYKQIGRRLGVDPAVLETAAKIGTRITASAPDRAVVFSLRHLSALSGVPYQFLRDWVGRWGPDPYREFFLAKKPDGRTANKPSRRPKRRIAAPTPILMRQQRWLVERVLHHAPRHPSSMAFHRKADIVETARLHCQCNWLIKMDIRNFFESIYEPSVFNVFVELGYPRLLAFELTRLCTRIVPENRLKWASGLKHGLFDARRGPKFYSRVRKQPDAKGQHAIGKRDRFHEWVTGAIGSDRLPLPLGSLPQGAPTSPLLANLAVRGLDERINIIAAEHDMTYTRYADDVALSTERKDFSRKEAGQVIGKIKREFEREGLLPHHSKTRLVSPGARKIVLGLVVDGKAPRLTREYRNKLRLHAHMLGTRGISPSAHASALRFRSVISMRRHIEGKIAHARRVEEPFADKIAAQLAKVDWTL

SEQ ID NO: 1748 - protein, 425 aa, unidentified
  source 1..425: note = Related to NZ_CP016461.1; note = Blastomonas sp.
MPSFSPQHYIQIGRRLGISPTVLARAGAVGTRITANAPDRAVVFSLRHLSALSGVPYRLLRDWVGRWGPDPYREFFIAKKSDNRRTNKPSVRPKRRIAAPTPDLMRQQRWLVERVLHHAPRHPASMAFHRDADIVETARLHCKCNWLIKMDIRNFFESIYEPAIFKVFIDLGYPRLLAFELTRLCTRIVPENRLEWKTGLRHGLFDPRRGPKFYNRVRGTPDVTGRRTIHTRDRFHEWAMGAVGSDRMPLPLGSLPQGAPTSPLLANLAVRALDERITLIAAEHDLVYTRYADDVALSTQRKDFTRKEAVQVIGKVLREFEREGLRPHHAKTRLISPGARKIVLGLAVDGNTPRLTREYRNKLRLHAHMLGARGINPSAHATALRFRSVVSMRRHIEGKIAHAHRVEPAFADDIKAKLQGVDWTL

SEQ ID NO: 1749 - protein, 391 aa, Pseudomonas sp.
  source 1..391: note = Related to NZ_JACAQV010000005.1; note = Pseudomonas salomonii
MSVWRAQPYINAGRRAGADPVALAHAVRYGQSIVRHSASLVPIFTLKHLAVLSGTPYGVLREIVGRDATSMKDQPYRIFRIRKRIAKKGEAQRLRTICVPSPMLLRVQRYIHERILVRLPVHPASIAYNPGRVMVEDVAVHCGCQWLIKVDIKNFFEAIPEQVVYRVFRNAGYPALISFEMARLCTRVPMPFALERPFNFPPNRSERYSISAYSKRLQGSLPQGSPSSPLLANLCSRALDERIEELALRHGLVYTRYADDIALSSEDKSFGRGHARYIVRKLHAIMRDCGFAPNLAKTIVVPPGGRKVLLGLYVDTERPRLSREFRAKLEQHLHFCLRPDVGAIAHSKHRGFDAVLGFRNHVRGLVAFAIQVDPDYGAKRLSEFNKVEWPL

SEQ ID NO: 1750 - protein, 391 aa, Pseudomonas sp.
  source 1..391: note = Related to NZ_UWGW01000546.1; note = Pseudomonas viridiflava
MSVWRAQPYVNAGRRAGADPVALAHAVRYGQSIVRHSASLIPIFTLKHLAVLSGTPYGVLREIVGRDATSMKGQPYRIFRIRKRIAKTGEAQRLRTICVPSPMLLRVQRYIHERILVHLPVHAASIAYNPGRVMVEDVAVHCGCQWLIKVDIKNFFEAIPEQVVYRVFRSAGYPALISFEMARLCTRVPMPFALERPFNFPLNRSERYSITAYSKRLQGSLPQGSPSSPLLANLCSRVLDERIEELALRHGLVYTRYADDIALSSEDKSFGRGHARHIIRKLYAIMRDCGFAPNLAKTIVVPPGGRKVLLGLYVDTDRPRLSREFRSKLDQHLHFCLRPDVGAMAHSKRRGFDAVLGFRNHVRGLIAFAIQVDPDYGEKRLTDFNKVVWPL

SEQ ID NO: 1751 - protein, 391 aa, Pseudomonas sp.
  source 1..391: note = Related to NZ_CM001559.1; note = Pseudomonas chlororaphis
MSVWRPQPYKKAGELAGADPTALAHAVRYGQTIIRHNAEVTPVFTLRHLSVLSGTPYGVLREIVGRHATSKKDLPYRIFRIRKRMARPDGIERFRTICIPSPVLLRVQRYIHEHILVHLPVHPASIAYNPGKKLIDGVAVHCGCNWLIKVDIKNFFEAIPEQVVYRVFRQAGYPALISFEMARLCTRTVMPFSPDGPFNFTQNRPDKYKITSYSNRLQGSLPQGAPSSPLLANLCSRLLDERIEELALLHGLVYTRYADDIALSSEDKRFGRGNAKDVIRKLYAIMRDCGFAPNLAKTIVVPPGGRKVVLGLYVDTSRPRLSREFRSNLEQHLHFCLHPDIGAVAHAKHKGFDAVLGFRNHVRGLVAYATQIDPAYGAKQLADFNKVKWPF

SEQ ID NO: 1752 - protein, 391 aa, Pseudomonas sp.
  source 1..391: note = Related to NZ_UWJA01000102.1; note = Pseudomonas viridiflava
MTVWRPQHFRKNGLKAGADKAVIANAIEYGKAIVRCDPALTPVFTLRHLAALSGTTYEVLREIVGRQAVVGKEQPYRIFRIRKRKPRPDGAERFRTICIPSPMLMRVQRYIHDHILTHLAAHPASIAYNEGKKIVDEVAIHCGCKWLIKVDIKNFFEAIPEQSVYRVFRGAGYPALVSFEMARLCTRVVPLNWTEGPRGNSQNLDSKYSIARYSNRYQGSLPQGSPSSPLLANLCSRRLDDRIEQLAIEHDLVYTRYADDLSLSTDDPEFNRTKASQVIGRLYAILAECGFAPNTMKTAVVPPSGRKILLGLYVDSDRPRLSREFRYKLEQHLHFCLHAGVGPVEHAKRRGFDAVFGFKNHVRGLVAYAVQIDPEYGAKRLAEFHKVAWPF

SEQ ID NO: 1753 - protein, 401 aa, Pseudomonas sp.
  source 1..401: note = Related to NZ_CP077076.1; note = Pseudomonas fakonensis
MAIWRPQPYKATGQKLGVNQVALVNAIKYGKSITGHHPSLTPVFTLRHLAALSGTPYAVLRGIVGRQTETGTDRAYRIFRIRKRLSKKGEPQRYRTICIPSPVVLRVQRYIHEHILTHLAVHSASIAYSEGNKIAEEIAVHCGCKWLIKMDVKNFFEAIPEQAVYKVFRGAGYPALISFEMARLCTRVVPLNWSEGPTAYPTNRISRYSITTYSNPSKGVQPAGTQVQGSLPQGSPSSPLLANLCARGLDEMLSELADEYGLVYTRYADDLAFSTSDKSFDRRRASQVIGRVYAIMAKCGFVPNTAKTVVVPPRGRKILLGLYVDSDRPRLSREFRYKLEQHLHFCMHPKIGPVLHAKRRGFDAVLGFKNHVRGLIAYAVQVDPEYGAKRLAEFHKVMWPF

SEQ ID NO: 1754 - protein, 401 aa, Pseudomonas sp.
  source 1..401: note = Related to NZ_FOTU01000001.1; note = Pseudomonas syringae
MAIWRPQPYQKTGQQLGIDPAVLASAIKHGKSIIGHHPSLTPVFTLRHLAALSGTSYAVLRGVVGRKTELGSDRSYRIFRIRKKISKVGGAQRYRTICIPSPVLLRVQRYIHEHILMHLPVHSASIAYSAGNKIAEEIAVHCGCKWLIKVDVKNFFEAIPEQGVYKVFRGAGYPALISFEMARLCTRVVPLNWTEGPHGYLNNRCSRFSIAAYSNPSQDARPAGTQIQGSLPQGSPSSPLLANLCARKLDEKIEELADDCGLVYTRYADDLALSTDDQCFTRRKAKQVIGRIYSLMASCGLTPNTAKTVVVPPGGRKLLLGLYVDSDRPKLSRDFRYRLEQHLHFCLHPGVGPVSHAKQKGFDAVLGFKNHVRGLIAYAVQVDPLYGEMRLVDFNKVAWPF

SEQ ID NO: 1755 - protein, 391 aa, Pseudomonas sp.
  source 1..391: note = Related to NZ_UUET01000191.1; note = Pseudomonas viridiflava
MVVWRSQLYRKTGRQLGVDNSILDAAVLYGKAISNHQPCLVPVFTLRHLAALSSTPYNALREIVRRHQLGGGMHPYRLFRIRKRISKKGGEERFRTICIPSPVLLRVQRYIHEHILIHLPVHPASIAYNEGKRIVDEVAIHCGCRWLIKVDVKNFFEAIPEQAVYRVFRGAGYPALVSFEMARLCTRVISRSRDEGAFGYRDNRSLRYSIKAYSQALQGSLPQGAPSSPLLANLCSIPLDHEIEKLAEEYGLAYTRYADDLALSTPDTTFDRDQARQVIVRLYAAMARCGFVPNTAKTAVISPGGRKVILGLYVDTERPRLSRDFRYKLEQHLHFCLHDGVGPVEHAKHRGFEAVLGFKNHVRGLIAHAVQVDPEYGARRLADFHKIAWPF

SEQ ID NO: 1756 - protein, 389 aa, unidentified
  source 1..389: note = Related to NZ_LPFA01000028.1; note = Burkholderia cepacia
MAIWRAQHYRQNGLLQGIDPQLLSRAIEYGDAITRSNRNLTPVFTLRHLALLCGASYAALRAYAGRKNDEANHPYRFFRIRKRTGPGERPRRRTICVPAPELRKAQRFIHDSILSYLPVHPGSIAYSRHTRPVEEIGIHCGCRWLIKLDVQNFFEAISERAVYRVFRNAGYPALISFEMARLCTRIVPGNRDEGPSGQTSGRVGRYSIEAYWNWRQGSLPQGAPSSPLLANLCSFGLDTLVANIASEYGMVYTRYADDIALSTTNHHFSRSDALRVIQQVYAAMRQCDLQPNTAKTMIAPPGARKIVLGLYVDQSTPRLTREFRSRLEQHLHFCLHPDVGPVAHARRKGFSAVLGFKNHLRGLIAYATQVEPGYGATKLVDFQRVAWPF

SEQ ID NO: 1757 - protein, 388 aa, unidentified
  source 1..388: note = Related to PBYJ01000011.1; note = Oceanospirillaceae bacterium
MNHWRPQHYRKQGTKSGKDPVIIKRAIEIGTSITRKYPTITPIFTLNHLALISGTSLHKLRKVVSRNESDGYHYRFFQISKRCRKKSKPTKRFICIPSSDLMRVQRVINSVILSKVPAHSASVAYTKGSSIYNAASIHCGCKWLIKLDIKNYFESISERSVYSIFRSIGFPALLSFEMARICTRVIPRRGLTYDSRWINPRFEKGKIKAYRNRDVGSLPQGSPSSPMLANLASVHLDEEIADLAYKNGLEYTRYADDITLSTDNEYFSRLKASKLIQEVYFVMRKYGFEPNTTKASVTPPGGRKVVLGLLVDGASPRLTRDFRSKLRQHLYFCRKDGYGPIKHAKHKNFASILGFKNHLAGLISYAKQIDPDFGKKMNDEFNKIEWPF

SEQ ID NO: 1758 - protein, 381 aa, Escherichia coli
  source 1..381: note = Related to CP059835.1
MKQWSPQRYRAEALIQGVKPEIIDSAILHTKKIINLNPKVIPILTLRHLAFMAGVEYSFLRKVINREHFHPYRFFLIRKRRSISKRKIFVPEPQLLKVQKFIHDNVLKHILPHDASFAYTPYSSIYDAAHVHINSRWLIKIDITNFFESISEIDAYHVFKYNGYSNLISFELARICTWPIPRSRNERLHRLQNKYLKEYKFYDRKQKLGSTPQGAPTSPCLSNLVCKNLDAEISFLCEKLQVRYSRYSDDITISSTNKSFSRHNAQHIIDSIYRILNKYGFNPNKYKTKIIPPGAKKIVLGLNVDKDSVGLDKEFKYKIKQHIHFCLHEKVGPVQHARFKGFSSVIGFRNHLYGLIVYARSIDVIFGEKMLSKYNEINWPF

SEQ ID NO: 1759 - protein, 381 aa, unidentified
  source 1..381: note = Related to NZ_CP011118.1; note = Yersinia enterocolitica
MKQWSPQRYRSEALIRGVEPEIVNNAILHIKKIVNLNDKLLPILTLRHFAFMAGVEYSFLRKVINREHFHPYRFFLIKKKKSISKRKIFVPEPQLLKAQKFIHDNVLKNISPHEASFAYTPQSSIYYAANMHINSRWLIKIDITSFFESISEIDVYHVFKSNGYSNLVSFELSRVCTWVIPRSPKERLPRLKNKYLKEYDFYNRSSELGSTPQGAPTSPCLSNLVCKHLDSEISLLCEKLKVRYSRYSDDITISAVNINFSRTNALDIVDSIYRILRKYGFNPNKVKTKIIPPGAKKIVLGLNVDKNRVNLDKAFKYKLKQHVHFCLHEKIGPVKHSKFKGFSSVIGFRNHLYGLIIYARSIDAMFGEEMQKKYERISWPF

SEQ ID NO: 1760 - protein, 308 aa, Acinetobacter sp.
  source 1..308: note = Related to CP018254.1; note = Acinetobacter baumannii
MRKKNSLEKRRIFIPHPQLVKVQKYIHQNILKFVECHENSFAYTPGISIVDAASLHTNSKWLIKLDITAFFESISEVSVYKVFRSLEFPALLSFELARICTWNSPRNRNTIPPRFKISKKTNYTVYSSTEGIELGHLPQGAPTSPSLSNLVCRELDKQLTAFSVKNELEYSRYSDDITFSSKNINFSRKDAIEIIKMVYKILINYGFTPNIQKTKIISPKAKKIVLGLNVDREKVKLDKKFKNKINQNIYFCLHPDIGPVRQAKYKKFSSVLGFKNHLHGLIIYALSIDKEFGEKALNNYNKIVWPIH

SEQ ID NO: 1761 - protein, 386 aa, unidentified
  source 1..386: note = Related to NZ_PUJU01000037.1; note = Photorhabdus tasmaniensis
MRQRWSPQRFQASAKNQDIDQNTIEHAIKHAKNIIQHGKYILPIFTLRNLSFLAGVEYSFLREIVSREYIHPYRFFYIRKKGRNRRRKICIPNPQLCKVQRFLHKEVLQEFQVHPACFAYIRDSSIVDAASVHVESRWLLKLDIVNFFDSISEISVYRAFRENGFPALISFEMARICTWLSLRNPHEIDSRWKIDHRHNYKIYHRSSISEMGSLPQGAPSSPMLSNIVCFKLDETLEELAVENGLRYTRYSDDLTFSTNSINFNRKNATLFISKVFSILKSFGFEPNKTKTEIIPPSSKKVVLGLNVDKKSVSLDKNVKYKIKQHIHFCLHSDVGPINHAKRKGFSSVIGFRNHLKGLINYAKSIEPEFGEKMLSLYKKIKWPLDI

SEQ ID NO: 1762 - protein, 394 aa, Vibrio sp.
  source 1..394: note = Related to NZ_CP073273.1; note = Vibrio fluvialis
MNNIWRPQLYISEARSQGIPTDIINNAVAIGDRITNKGLNIPIIFNLEHLAKLSGVDYDQVYKLTKRAGENSSGKDYYRIFAIRKKDTKSKRYICVPSKNLLRVQKYINQFILHNLKSHPSSMAYNKGCKIVDVANVHRQAKWLLKIDIEDFFENISEVDIYKIFFSSGYSKLLSFQLARLCTRIVPYQKEHAEKYSHSRWRAHKNYNNKNYNFHVIGSLPQGAPTSPLLANLVLRELDEKITKIALSYGVRYTRYSDDLTFSSCDIKFGRKNCYRLIREIYDSLYSNGFSPKKNKTKIISPGSRKVVLGLIVDGNKPKLTKEFKANILRHLHFCNLESVGPVQHAKHQKFDSVIGFNNHLKGLVSYSLSIDPKFGSKVKSLYESINWPSLPFN

SEQ ID NO: 1763 - protein, 393 aa, unidentified
  source 1..393: note = Related to JACFTX010000002.1; note = Photobacterium damselae
MNNWRPQQYRIEAQRKGVPENVINSAIAIGDKISSTGLNIPIIFNLEHLSYLSGVDYNQLYKLTKRVGERFYEKENYRIFTIKKKNSKSKRYICVPNHKLLRVQKYINKFILQQIKTHHASMAYNSGCQIVDVAKLHCNSRWLIKIDIKDFFEEISEVNVYSVFNECGYSNLLSFQLARLCTRIVPYQKEDVLNNIKSRWKSSKQYRNINYNHDVTGSLPQGAPTSPMLANLFFRALDEKIMTIANKYNLIYSRYSDDIALSSRDDLFGRSKCHQVVKDVYKVLYSSGLSPQKGKTKILSPGSRKIILGLVVNGSSPKLTKEFKKNLLQHLHFCNLKSIGPVRHAKYKKFDSIIGFRNHLHGLISYALNVDPNFGKKVKQQYDHIDWPPLPFV

SEQ ID NO: 1764 - protein, 390 aa, unidentified
  source 1..390: note = Related to NZ_KE383828.1; note = Oceanospirillum beijerinckii
MYKNWNPQRYRKNANRDNISHDVIRNAIEIGNRINSVNRDIPIVFTLNHLSVLSKSKLSFLESIASRNYEDKPYRFFKIRKKGKNSNDKRRVICIPEPRLLSVQQYINEEILSKIPSHECAMAYSKGKGVYDAAELHCGCRWLIRIDLKDFFDSISERQVYYVFNKLGYPKLLSLELARICTRVYPRFIYPSEKSKWISNRSKDSGIASYTCSGNMLGSLPQGAPTSPALSNLVCKSLDGDLLLFSEQHGFLYNRYSDDLYLSTTSDLSRKDIRCFLLSVYGLLNKREFQVNKNKTVISGPKTKKLVLGLNVDKEYPKVRREVKNQIKQHLHFCLRKDIGPVIHSQKKKFSSVVGFRNHLLGMINYVNQIEPMYAIKLRKSFDRIDWPFI

SEQ ID NO: 1765 - protein, 381 aa, unidentified
  source 1..381: note = Related to NZ_CH672406.1; note = Idiomarina baltica
MNRWSSRAFKKHNSDKPAAVVETAALYGRKIQTSCPELPVIFTLNHLALKSGVPYNNLRSFVDRTIERPYRSFTLRKNGLGSNPRKFRVIKVPQQDLKKAQQFINQNILSKMEPHECSVAFSPGSKIYDAASEHCNARWLLKFDIVSFFESITEKSVYRVFRRYNYPALLSFEMARICTALKARPPINWGGAPPNIRYRTIPGYSNKNLGTLPQGAPTSPMLANLVSYNLDRRLKLIADAYNCHYSRYADDITFSTDSSLSRGEVSRIIAMINSTLREYGHTMNKAKTTIAPPGARKFYLGMNIHGDSPQLRKSFKRKLKQHLFFCEKNSVGPEKHSKHLGFVSVIGFKNHLRGLINYANQVDTVFGENCMKRFQSIDWPL

SEQ ID NO: 1766 - protein, 385 aa, unidentified
  source 1..385: note = Related to NZ_AKKU01000003.1; note = Alishewanella agri
MNRWSSQLFQKEARRLGRSEDVIDNCLNAAALIQLKNSQITPIFSLRHLSYMAKADYGFLRAIVSRDDRIDSYRTFQIRKRKRRKNDKERYRNINVPSHDLKKTQQWINKHILSHVSPHQCSMAFYKDSSIIEAVNAHVGAKWVIKVDVKNFFESINEISVYRVFRELGFNALLSFELARICTKKRTMLPSRSRKWISTGRRETISTYAQPIQGFLPQGAPTSPMLSNLASLRLDQEIFKFCAHEGFIYTRYADDIVISVHRDVKKSECSNIINKLYRVMASNGLSPNKTKTIVLHPGARKVILGLMLTDKGVMLTKEFKSRLRQHLFFLNSENVGPVEHAQHKGFVSIIGLRNHIIGLLSFAKAVDKNFASKCQADFDRIVWPI

SEQ ID NO: 1767 - protein, 383 aa, unidentified
  source 1..383: note = Related to NZ_LCTG01000001.1; note = Gluconobacter oxydans
MTLWDSQAYIVEARATGINPNIVTAALGHANAIRSVSRDLPIIFTLSHLAQACGVAHSYLMDVADRRIDPYRDYITKKREKPHRTAFSRRYRIICMPDPELKKVQRWVHQNILSKVTPHRASTAYSNSNTLLDAAARHTNARWLIKIDIERFFESIKEPYVAGIFERLGYPDLLSFQLARLCTRLPSLKSRKDIFCRRSKPVKGVMQNDWIGFLPQGAPTSPQLANLVMRRFDRRMTSLSRTEGLRYSRYSDDMIFSTLGSFSRPQATSFVHQVYDVLGAYGFEANRTKTSIAAPGARKVVLGLLVDRDEPRLTREFRSNIETHLHYLERPNVGPVAHAKAREFDSIIGLQNHLLGLIAFARQIDRKYGDELRARLHRINWPA

SEQ ID NO: 1768 - protein, 383 aa, unidentified
  source 1..383: note = Related to NZ_JSXI01000043.1; note = Sphingomonas sp.
MTLWDSQIFTAGARAANVDPAVISAAVGHANAIRSVSIDLPIVFTLAHLAHLSGVSHRYLIEVAGRGSDPYRDYIAKKRQAPGSTAASRRYRTICMPDPELKKVQRWLQQNMLSKIAPHAASTAYSEDDTVFAAAARHVNARWLIKIDIERFFESIKEPYVASVFERLGYPDLLSFQLGRLCTRLPTLKSRKDIFKRRSKPARGVMQHEWIGFLPQGAPSSPQLANLVMRRFDRRATAAAKKAGLRYSRYSDDMIFSTAGSFSRERAEHFVHDIYDVLGAYGFEANRTKTSIAAPGARKIVLGLLVDRDKPRLTREFRAGIETHLHYLERPDVGPVGHAEVREFDSVIGLRNHLEGLVAFARQIDQPYGDRLKARLRAIVWPA

SEQ ID NO: 1769 - protein, 384 aa, unidentified
  source 1..384: note = Related to JAFKFG010000027.1; note = Alphaproteobacteria bacterium
MQNWNSQLFSKGAAAAGVSPSIIASANAYARRIISCNSDLPIVFTLKHFAHLTELPFDNLVKIVERKEDPYRSFLIKKRSRPGDRAVARRYRTICIPDTTLMFAQRWIDQKILSKVDPHNCSTAFHGNSSIVRAAQRHCGCRWLIKIDIQRFFESITESSVCRVFQSLGYPDLLSFELGRLCTREPSVLSRRWKFRRTRSYPSGVHQHPSIGFLPQGSPTSPRLANLTMREFDEGVNSISRSYGLVYSRYADDLIFSTDAATFSRVEAEALISRIYQVLLEYGFEPNRTKTMISPPRARKIVLGLLVDRDTPKLTRQFKQDLENHVFYLSHPRHGPSQHANKRNFTSVIGLQNYVQGLLAHAAQVDSAFADRMRAMLAQVKWPI

SEQ ID NO: 1770 - protein, 377 aa, unidentified
  source 1..377: note = Related to JABMRO010000623.1; note = Planctomycetes bacterium
MNRWVPHIYRQTGQQKDVPDAIINEALSQAHRVQNKELPAILTLRHLAFQTDVSYTNLHKIISRDVDPYRSFSIKKRSGGWRRISVPQFELLKVQKYIDHFVLSRIADSSYSYAFKSKTSIADCANQHLSCRWLVKIDLRHFFESLSEMQAYRVFNEAGYNNLVSFELARLCTKVLPLTAKKYSKPNWRSVGHISMYSFYEDKYNRIGHLPQGVPTSPRLSNLIVRGLDREIVEATDEYDLTYTRYADDMTFSTGSSCFSKKKGRDFINKIYSLLPKYGLRPHPQKAQIVPPGARKIVLGLLVDGDKVRLTKHFRSNLECHLYYCVKNPISHATNRGFASVLGLKNYVNGLLAYANQVDPDYVNKISSDVGKPDWPI

SEQ ID NO: 1771 - protein, 372 aa, unidentified
  source 1..372: note = Related to NZ_FNIN01000001.1; note = Desulfonauticus submarinus
MKRWSPHLYKIYGKKNKKDDKLIENALNQADILQNRNLPVVLTLGHLARHTDIPYQTLRKLVARQVNAYRIFRIRKRSSGYRVICVPNKDLLKVQRWIDKFILSNLESSPYSYAFEEGQSIVDCASQHLSCRWLIKIDLRNFFESLSEIQVYRVFKVAGYNNLVSFEMARLCTKQSKSGWKLYNPYWKSYPREKIPLYNADVIGHLPQGAPTSPKLSNLIMKNLDFEVNNIAQKFSLVYTRYADDMIFSTIDSSFDYKKAKCFIKDIFNILPKHGLLPNRQKTKIIPPGGRKIVLGLLVDSEKVRLPKDFRNKLECHWYYCTKDITQHAEKRGFKSYLSMQYYIKGLISFARQVDSDFVEKLKKKYGEIKWL

SEQ ID NO: 1772 - protein, 383 aa, unidentified
  source 1..383: note = Related to JAGRCJ010000081.1; note = Caldilineaceae bacterium
MSIGPPHTYVTEGRKRGVSNQILRDSLEQARKVQEKGLPPVLTLRHLSSLTNVEYKLLRKIVARRQDDAYRSFLITKHSGGKRVICVPHPSLKRVQRWINQKILMNVSTHWRSYAYSRNSSIVDCAQQHCGCNWLIKLDIRQFFESITEIQVYQVFQNLGYQPLVSFELARICTRTYSSYNELELNKKWLSQPEAYSVIPFYQYKYLGHLPQGAPTSPMLANLVCKLMDEALFNIAHDEGLVYTRYADDIVLSSSDIHFTRKKAQSVIRKVSSVLTKYEFEPQHNKTSVVPPGARKLVLGLLVNNSTPRLTRTFKCKLERHIWAVGKFGLANHAHHIGFDSIWGFVRHLEGLISYAMMVERRFGESMQIAFQKTLDGNGWNNN

SEQ ID NO: 1773 - protein, 381 aa, unidentified
  source 1..381: note = Related to VTRK01000013.1; note = Comamonas thiooxydans
MMWSSQHYLAQGRQLQISEAILQTAMKQSRRLVQRRPQSLPVLLTLGHLAKRTGIPYSSLRAYVGRQAIEPYRRFRIRKRSGGIRRICVPEPALSAIQGWIAENILQRVDVHSASHAFKKGDSIARCAEVHAGARWLVKMDIADFFGSISEIDVFRVFKSLGYNSLVSFELARICTELPLNSAKYAFSSWRRSHARRGIPAYNQQYVGRLPQGAASSPMLANLAMINTDQRLTEIANSFGLEYTRYSDDLTFSTTGDFDRASAYALIEQVANVLKRRNLFPNKAKTKVVHPGARRVVLGLLVDGVAPRLTRAFRDRLRQHLYFLEKRGIEAHVQARAFESAGGLYRHLRGLVDYANSIDSAYAAPVLARLEALPWRPEVKI

SEQ ID NO: 1774 - protein, 376 aa, unidentified
  source 1..376: note = Related to NZ_CP049990.1; note = Pusillimonas sp.
MWSSQHYLAQGKQLQHNNEVLQEALKQSRRLVQHRPQPLPVILTLFHLAKRTGVPYSALHAYVGRQAIEPYRRFRIRKRSGGIRRICVAEPRLGSIQAWIAENILQRAEVHPASHAFRKGDSISRCAEVHAGARWLVKMDIADFFGSISEIDVFRVFKSLGYNPLVSFELARICTELPAKSAKYLLPSWQLHHTRRQIPGYSQKHVGRLPQGASSSPMLANLSMIRTDQTLSEIANSFGLKYTRYSDDLTFSTAGDFDKASAYALIEQVANVLKRRNLFPNRAKTSVVHPGARRVVLGLLVDGDVPRLTRTFRDRLRQHLYYLEKHGIVAHVQARAFESAGGLYRHLRGLIDYANSVDPAYAAPLLARLEALPWRS

SEQ ID NO: 1775 - protein, 376 aa, unidentified
  source 1..376: note = Related to JAKZFD010000012.1; note = Pelomonas sp.
MWSSQPYLVRGRKLGLSPELLQEAVKQSRRLAQRHPQPLPVLLTLCHLAKRTGVPYSSLRAYVSRQAVEPYRRFRIRKRSGGVRRICVPEPTLGAIQTWIAEHILQRAQVHRASHAFKKGDSIVRCAEQHSGARWLVKMDIADFFGSVSEIDVHRVFVGLGYNPLVSFELARICTELPSRSDKYALSSWQCRYARRGIPAYGQQYIGRLPQGAPSSPMLANLTMVATDQKLEEIALKAGLLYTRYSDDLTFSTAGDFDKGRAYGLIEEVAAVLKSRGLFPNRAKTVIVHPGARRLVLGLLVDGDAPRLTRVFRDRLRQHLYYLEKLGIAAHVQARAFESAGGLYRHLRGLIDYANSVDPTYAGPLLARLEALPWAR

SEQ ID NO: 1776 - protein, 376 aa, unidentified
  source 1..376: note = Related to NZ_CP028294.1; note = Acidovorax avenae
MWSSQHYLARGREIGRSPELLQEAVKQARRLVHRHPQGIPVLLTLCHLAKRTGVPYSSLRSYVGRQAIEPYRRFRIRKRSGGVRRICVPEPNLGAVQAWIAEHILQRVDVHQASHAFKKGNSIVRCAEQHVGARWLLKMDIADFFGSVSEIDVYRVFVALGYNSLVSFELARICTELPAASAKYALRSWNCHRFRSGITHYQQKYVGRLPQGAPSSPMLANLAMLKTDQLIAELASKEGLIYTRYSDDLTFSTSGDFDRRRANKFIEEVAAILKARGLFPNRAKTVVVHPGARKVVLGLLVDGDAPRLTRQFRDKIRQHLYYLEKNGIKAHVEARAFESIGGMYRYLRGLIDYAKSIDSAYAAPLLRRLEALPWPR

SEQ ID NO: 1777 - protein, 378 aa, unidentified
  source 1..378: note = Related to JACEZU010000002.1; note = Duganella sp.
MWSPRHYLEQGRLQKQPSAVLAVAVEQIKRLQAHNPPLPPILTLKHLAKVTKVRKAKLECFVERIAPEVSYKRFNIKKRTSGYRKISIPEPDLMKVQAWISQNILQLPSVHSASKAFRKHDSILKCAEVHCGAKWMIKIDIADFFGSITEIQAYRVFKDLGYNPLISFHMARICTDLIPKSQKYKMQAWQIFENKYSITEYHNKNNFGRLPQGAPTSPLLSNLVMLRLDKTIAELAEKQGLRYTRYSDDITFSTKGDYSRKQAVEFVASVSALLKADGLYLNRKKTVIVPPGSRKIVLGLLTDREYPNLTKEFKEKLRQHLYYIKTLGVEAHMRRREFDSVGGLYRHILGLINYANLVDPTYAYKMKQQFKSLPWPGQ

SEQ ID NO: 1778 - protein, 383 aa, unidentified
  source 1..383: note = Related to NZ_JACHHM010000011.1; note = Parapusillimonas granuli
MPWSPQRFLAEGLRRGRDHKALMEAIRQISRMQRQRPVLPTLLTLGHLACRTQISYEYLRDIIARNTGHPPYRSFRITKRSGGLRVISVPSPQLMKVQSWLTTHVLNKVQPHPTSYAFSPGSSIADCARQHAGATWLVKIDIADFFGSITEIQVFRVFQMLGYNKLVSFELARLCTILPIVSAKHKLKPWKTKFPRKPIDYYSEQLIGRLPQGAPTSPMLANLAMRDIDEELQHLADSLKLVYTRYSDDITFSTKGKFSRTAASAVIKQTTAILKRRGLFPNRAKTAVIHPGARKIVLGLLVDQEQPRLSRKFRDRLRQHLYYLETRGITAHLEARGFDSAGGLYRHLRGLIDYANMVDQPYAQKQLLRLQALPWGSTLNASS

SEQ ID NO: 1779 - protein, 381 aa, unidentified
  source 1..381: note = Related to SEEN01000026.1; note = Hyphomicrobiales bacterium
MLWSPQRFLEEGLLRDRDYYALQEAIKQITRMRRRGPGLPVVLTLGHLANRTRVPHEHLRDLVARNTGQPAYRTFRISKRSGGSRVISVPGPQLKKVQTWLTQHVLRKVKPHIASHAFSPGSSIADCARQHAGARWLVKVDIADFFGSVTEIQVFHVFRRLGYSDLVSFELARLCTTVPFASAKHSMKAWQVRFPRRRIHFYSEKLMGRLPQGAPTSPMLANLVMREADEELQNLADSYGLVYTRYSDDITFSTRGEFSRDQAVTVVRQSATILKRRGLFPNRAKTAIVHPGARRIVLGLLVDSDQPRLSRAFRDRLRQHLYYLETRGIMAHVEAREFDSAGGLYRHLRGLIDYANMVDQPYAQQQLSRLLALPWSSVAQV

SEQ ID NO: 1780 - protein, 394 aa, Pseudomonas sp.
  source 1..394: note = Related to RKKU01000049.1; note = Pseudomonas neustonica
MWSSQRFIRQGLARGISQQILDAAVEQVEALAKGPIRLPAILTLGHLAQRTDVSYISLRRLVADEYRHPYRTFTILKRKANKSGYRGRREISVPTPELLTVQRWLSAHVLRQVRPHPASHAFSPGGSIVKCASEHCNAKWLIKLDIADFFGSISEIQIYHAFRKLGYQPLISFELARLCTDRPRKNVPPAFVRGRNRMPSGKVRFKARVIDQYDHRYIGYLPQGAPTSPMLANLVMRDIDVQLAAIASRYELRYTRYSDDINFSTTENFSRDKAHELIQRVAKCLIKKGLGLNKSKTTIAPPGAKKLVLGLLVDTAKPRLCHQFKDRLRQHIYYIERFGIEAHAQRRAFDTTAGFIRHIKGLLDFAYMVEPAYALDLTERLQVAVFSWDDSFVI

SEQ ID NO: 1781 - protein, 377 aa, Pseudomonas sp.
  source 1..377: note = Related to NZ_CP018420.1; note = Pseudomonas veronii
MDEPTIRAVIAQVKATVAPPLRLPAILTLGHLAQRSGVSYDALRRLVAGTQHHSYRQFKIRKKSEQARKRRSFRIIHIPCPPLFEVQRWISTYVLRELPVHPSSHAFSPGSSIVKCAEIHCKARWLVKLDVHDFFSSVSEIQVYRVFRSLNYGALISFEMARLCTYRPNRETFKLALPGRFRVPSGIVRHPGRGIKSYSHKYVGYLPQGAPTSPMLANLAMKDIDVAISKIASDHGLRYTRYSDDLTFSTEGDFSRGKALNVIQEVAKKLIVHGLMLNNPKTTVAPPSARKIVLGLLVDGADPRLMKSFKDKVRQHLYFCGKYGVEEHAARRKFDSVGGFVRHLRGLIDFGNMVEPCWAADMYDQMSKVLGSNKFDL

SEQ ID NO: 1782 - protein, 396 aa, unidentified
  source 1..396: note = Related to PFJY01000128.1; note = Hydrogenophilales bacterium CG_4_10_14_3_um_filter_58_23
MWSSQHYRMNAKEHGLSKETIDAAIAQTIAVVEGPHKLPAILTLGHLALRTGVDYVALRGLLTGSCCHQYRHFKIRKRVNGPEKTIRYRKISVPTPDLYRVQRWIAVHVLRSVPVHGASHAFSPGNSIVKCAEKHCGAKWMVKLDILDFFGSISEMQAYRVFHSLGYQPLVSFEMARLCTYRPKHDVPPNFVLPRYQIPSGRVKKRNRVIESYNHPYMGILPQGAPTSPMLANLAMRDIDEKILSIANRFGLQYTRYSDDLTFSTRNDFDRQQASLLIQEIANLLIKRGLMLNRQKTAIIPPGARKIVLGLLVDGDLPRLSRPFKDRIRQHLYYLEKFGPDQHVSKRCFDSVGGFFRHLKGLIDFANMIEPQYARESYVRLCAVVSDAQIESPQNQ

SEQ ID NO: 1783 - protein, 381 aa, unidentified
  source 1..381: note = Related to CP021181.1; note = Rhizorhabdus wittichii
MWSPQHYRERGRQLGADDDVIERAAAAIESFIDKHPNRPPLLTIGHLARRSGVSWFHLRQFVEGSRSGIYRYFRIRKRSGGHRQISVPDPKLMIVQRWIARHILAAIPVHRASFAFAPQSSIVGCARQHCRARWLIKLDISGFFGSISEIQVYRVFLGAGYAPLVAFELARLCTHAPSGSKRYAKRTWTAALTERAIRPYTQPHIGYLPQGAPTSPMLSNLVMRETDKLVAAVATKAGVTYTRYSDDMTFSTIGSFDRERALAVIREVTAILRRAGLSVNEKKTKIVPPGARKLVLGLLVDGAEPRLTRTFRDRLRQHLHYLQKLGPEAHRAARGFDTVSGTHRHVRGLIDFAQSVDPALAEKMREKFDAVAWSLDRPGAE

SEQ ID NO: 1784 - protein, 381 aa, unidentified
  source 1..381: note = Related to SECT01000232.1; note = Oxalobacteraceae bacterium
MWSPQHFRETGRQLGADHDLTERAATAIETFTDRHPTLPPILTLGHLAHRTGVSWFQLRLIVESGRWTNYTFFRIRKRSGGHRQISVPDTKLMIVQRWIAGHILAALPVHRASFAFAPKSSIVGCAAQHTGARWLIKLDIAGFFGAVSEIQVYRVFLDAGYAPLVAFELARLCTHAPSGSKRYGRQEWLAHATHRPIYAYRHPHIGYLPQGAPTSPMLSNLVMRGPDRKIATLATKAGLTYTRYSDDITFSTTGVFDRAKAMAVVRETTAILRATGLEVNGRKTRIVPPGARKVVLGLLVDGKVPQLTREFRDRVRQHLHYLETRGPEAHRAARNFDTVAGLYRHVRGLIDFANSVDAVFADRMLTKFDAVRWSLDSPEDT

SEQ ID NO: 1785 - protein, 384 aa, unidentified
  source 1..384: note = Related to NGUN01000003.1; note = Sphingobium sp.
MWSPQHYHEAGQQLGLDDAMVQRAATAIEDFLDRHPKLPPILTLKHLASRTGISWYHLRKMVLGSRASDYTFFKIRKRSGGHRQISVPDAKLMAVQRWIAAHILSELPVHRASFAFAPKSSIRRCALQHCGARWLIKMDISGFFGSISELKVYRVFLEAGYSPLVALELTRLCTHAPSGSKRYDRPEWLAHATRRKIPAYRQFHIGYLPQGAPTSPMLSNLVMRELDKEIAALAARAGVTYTRYSDDITFSTNGDFDRARAMLLVRQVTARLRRVGLSVNGRKTCIVPPGARKVVLGLLVDGAEPRLTREFRDHLRQHLYYLEKVGPEAHRDARKFDTVSGMHRHIRGLIDYAKSIDEGFAAKMRLKFDSVPWSPDVAPPSEDA

SEQ ID NO: 1786 - protein, 381 aa, unidentified
  source 1..381: note = Related to QFNB01000026.1; note = Pelagerythrobacter marensis
MWSPQHYREIGEKSGADPVVTDRAVAAIDAFMEKQPKLPALLTLGHLAQRTGVSWFHLRQYVEGQRSTEYTYFHIRKRSGGHRLISVPGQQLMMVQRWIAAHILAELPVHRASFAFAPKSSIVRCAKQHCGARWLIKMDISGFFGSISEIQVYRVFLQAGYAPLVAFELARLCTHAPNGSKRYARAEWLAPTTWHPIVAYRQPILGYLPQGAPTSPMLSNLVMRDIDKQIAALANAIGLTYTRYSDDITFSTMGEFNRERAIRVVRKTTAILRRIGLKVNDNKTRIIPPGARKLVLGLLVDGIKPKLTRGFRDGLRQHLYYLEKLGPEAHRKARNFDTVTGLYRHVRGMIDYAKSVDEPFFDEMRTKFEAVAWSLDSPADD

SEQ ID NO: 1787 - protein, 382 aa, unidentified
  source 1..382: note = Related to JAEMRT010000003.1; note = Sphingopyxis sp.
MWSPQHYRDKGIEQGHEAELVSRAAAAIDSFVDAHPQLPPILTLGHLARRSDISYFQLRRLAEGPRWNHYTFFRIRKRSGGRRLISVPEHRLMIVQRWIAEHVLKKLPVHRASSAFADGASIVKCAKQHCRARWLIKLDISGFFGSISEIQIYRVFLAAGYAPLVAFELARLCTHAPSGSARYDRAQWRSRDNWQLPIMRYRQPHIGFLPQGAPTSPMLSNLVMVGMDKLLAALATAEGLTYTRYSDDITFSTTGAYDRQRATEVIRSTSRLLRTIGLKVNDQKTRVVPPGARKIVLGLLVDNPEPRLSRDFRDRLRQHLHYIEKFGPEAHRAARGFDTVSGLYRHVRGLVDFAKSVDRNYASAMRDRLDAIAWSPDFPVET

SEQ ID NO: 1788 - protein, 379 aa, unidentified
  source 1..379: note = Related to NZ_JACRVS010000011.1; note = Acetobacter sp.
MWSPQRYRELGLEKGVDPEVVDRSAEAISDFLDSYATLPPILTLGHLAARTGIPYYKLRKIVVGQRTLEYQYFWIRKRSGGRRLISVPEPDLMHIQRWIAGHLLARQPVHRASAAFRPKASISKCARQHCEARWLIKLDISGFFGSISEIQVYRVFRRMGYAPLVAFELARLCTHAPANSKRYQQDSKWLVRKCESRKFYTQWGIGYLPQGAPSSPMLSNLIMVEADKKIAKLATNQGLTYTRYSDDITFSTTRGYDRERAKKIVRDTTAILRRMGLAVNDKKTRIIPPGGRKIVLGLLVDGSHPKLTRDFRDRLRQHLYYLQKFGPEAHQLERGFDTVSGLYRHVRGLIDFAKSIDANYAARVQKKFEAIKWSLDFSD

SEQ ID NO: 1789 - protein, 376 aa, unidentified
  source 1..376: note = Related to NZ_SCNH01000027.1; note = Sphingomonas sp.
MWSPQRYIEHGLTEGYDAELVRSAAGQIDDFLEKHPDLPPILTLGHLGKRTSLPYARLRKLVSGLRSNDYSYFRIRKRSGGHRQISVPEADLMWLQRWVSAHILSKLKPHRASYAFAPKASIVSCAKAHCEARWLIKLDISGFFGSVSEIQVYRVFLAAGYAPMVAFQLARLTTHAPYFSMRYKRPEWRAVPDRARLPYLFRTRLLGFLPQGAPSSPMLSNLVMRQIDAKLHAIALSAGLTYTRYSDDITFSTRGGFDRERARAVVSKTRRILAKEGFTLNSKKTRIVPPGGRKLVLGLLVDGSEPNLTRAFKDSLRQHLHYVCTFGPDAHAKRRGFDTVSSLYRHLLGLINYAKSVDEDYALRARTKLNSVQWSL

SEQ ID NO: 1790 - protein, 343 aa, unidentified
  source 1..343: note = Related to NZ_CP013949.1; note = Bradyrhizobium sp.
MRLASALPLFTYGEVKVTMSWSSQHYITKGLASGRDRELLETAAKEIERAVYSNPTPLPAVITLNHLARRCGVSYNSLRAIVARNGKQYSYFRIRKRSGGHRLISVPEAELLRVQKWIHTYILSQAKAHEACFSFLRKKSIRDCAAVHRGATWVIKIDISAFFGSISERDAFDIFKGFGYNPLVAFEMARIVTDAPLYSKRYQAVPWKRDPGEYEIAQYRSAKVGYLPQGAPTSPLLSNLFMINIDQQLQALAEHRKLRYSRYSDDMTFSTRGDFSRERAKELIHAVAAIIRVKGLRINTAKTRIIPPDGRKVVLGLLVDGTAPRLSRKLRDNLRMHIFHMRK

SEQ ID NO: 1791 - protein, 379 aa, unidentified
  source 1..379: note = Related to CP090554.1; note = Neorhizobium galegae
MAWSSQRYISAGLKLGFSPDVLNIASEQLEQHITGLPPFPALLTLNHLAKRTNVPYLELRPLVRGQKPDAYHHFYIRKKSGGHRRISVPEPTLMRIQQWIATHILNIAPVHQASYAFSPGSSIYKCAYQHRKARWLIKMDVTGFFGSISEIQVYRVFRSFGYQPLIAFELARLTTYAPISSPRYLLKEWQARTHSSPIDDYHRANIGYLPQGAPTSPMLSNLVMRSVDERIAKIAEKYGLRYTRYSDDITFSTTAEFDRKRARDVIRSVTKMLTRVGLHVNAGKTVVVPPGGRKVVLGLLVDGPEPKLSRDFRSNLRQHIFFLESLGPMEHAKARGFETISGMYRHIRGLIDFANMVDADYAAELLSRFQRVNWPFAIP

SEQ ID NO: 1792 - protein, 383 aa, Citrobacter sp.
  source 1..383: note = Related to DACSWP010000009.1; note = Citrobacter freundii
MWSSHIYKKQGLTKGISPYLLTEAITQIELLVYSQNNLPSILSLSHLAKRTGVEYKLLRCYVMRTGATSVEPFEIYKKFSIRKRSGNRRFIHIPTPKLMRTQRWISEHILAKLPVHAASQAFNKGNSIKKCASRHCGAKWLIKIDIEDFFSSISEIQVYRFFRSLNYQPLVAFELARLCTVGTHNKSPRGVFSNWKIINPNNAIPSYNQKLLGYLPQGAPTSPLLANLIMNDCDKALQTIARKNDLIYTRYSDDLTFSTTDKKFDRSKAKTFIFDAYKILSKHGFRPQFRKTTIVPPGSKKIVLGLNVDSEQPRLAKHTRDSIRQHLYYLEKMDPVQHAFNRQFDSVWGLKMHLRGLIDYANMVEPDFAKACLAKFNAIEWPV

SEQ ID NO: 1793 - protein, 383 aa, unidentified
  source 1..383: note = Related to CP068391.1; note = Serratia proteamaculans
MWSSQSYKKQGLANGLSVPLLNEAIAQSELLLYSEYTLPSILSLKHLAKRTSVEYEWLRSFVIRTAINGVENFEIYKKFSIRKRSGGRRFIHVPSPKLMHTQRWISEHILKALPVHPASHAFRKGNSIKKCALRHCGAKWLIKIDIADFFSSVSEIQVYRIFRSLNYQPLVAFELTRLCTVGTPGLSPRANFPHWKTKEFNEAIPLYHQTMLGYLPQGAPTSPFLANLVMKNCDKSLNALAQKNGLVYTRYSDDLSFSTRDKDFGRSRAKHFVFEAYKIISQSGFRPQFRKTTIVPPGGKKIILGLNVESEFPRLAKSTRDTIRQHLYFLEKVGPVQHAFNRKFDSVWGLKSHVRGLIDYANMIEPDFAEVSLEKFQAIEWPV

SEQ ID NO: 1794 - protein, 383 aa, Aeromonas sp.
  source 1..383: note = Related to NKWH01000001.1; note = Aeromonas veronii
MWSSQTYKQQGLAKGLSESLLTQAISQSELLIYSEYNTPSILSLNHLAKRTGIEYEWLRSFVMRKAIKGVENFEFYNKFSIRKRSGGRRFIHVPTPKLMRTQRWINEHILAKLPVHPASQAFRKGNSIKKCALRHCGAKWIIKIDIADFFSSVSEIQVYRIFRTLGYQPLVAFELARLCTIDTYCESPRRIFPQWRSKKSNKAIPSYDQELLGYLPQGAPTSPTLANLIMKDCDTALQTLARNNGLIYTRYSDDLVFSTKDKNFGRYRAKQFIFESYKIISKAGFRPQLRKTTIVPPGSKKIVLGLNVESEVPRLMKCTRDKIRQHLFFLEKVGPVQHAFNRQFDSVWGLKMYVRGLIDYANMIEPEFSKACLEKFNAIEWPV

SEQ ID NO: 1795 - protein, 453 aa, unidentified
  source 1..453: note = Related to CP022196.1; note = Celeribacter ethanolicus
MTSASERFKFAPSGAKEDRYTTVRWMLGYGFRGLTEKPTHGWRRRTLPHPAYASGHQSAPSPAATHRSSFMWSSQSYKNQGLAKGVSETLLDNAIVQSELLIYSELSLPSILSLNHLAKRTCVEYEWLRGFVMRRAMNGVEDFESYKKFSIRKRSGGRRFIHVPTPKLMHTQRWINEHILKGVPVHPASQAFGKGSSIKKCASRHCGAKWLIKIDIADFFSSVSEIQVFRIFRSFGYQPLVAFELARLCTVGTYWESPRGSLPQWKTRHPNKSIPLYDQKILGYLPQGAPTSPLLANLAMKDCDRALQALAHKNGLAYTRYSDDLSFSTKDKGFSRSQSREFVCDAYAILSRSGFRPNLRKTTVVPPGSRKIVLGLNVETEHPRLTKSIRDRIRQHLHFLKKVGPVEHAFNREFDSVWGLKAHLRGLIDFANMIEPDFAEASLKEFDSVEWPV

SEQ ID NO: 1796 - protein, 310 aa, unidentified
  source 1..310: note = Related to JAIUZF010000015.1; note = Salipiger thiooxidans
MHTQRWINEHILKDVPVHPASQAFGKGNSIKKCASRHCGAKWLIKIDIADFFSSVSEIQVFRVFRSLGYQPLVAFELARLCTVETYWKSPRGSLPQWRARRFNGSIPSYHQEILGYLPQGAPTSPLLANLAMKDCDKSLQTLAQKNGLAYTRYSDDLSFSTKDKNFDRTQSRKFVCDVYSVLSRSGFRPNLRKTTIVPPGSRKIVLGLNVETEHPRLTKNARDRIRQHLHFLKKVGPVEHAFNREFDSVWGLKAHLRGLIDFANMIEPDFAAAPSRNFTLLSGRCRHAAVLCERHFQAMKSTTVHTIQYW

SEQ ID NO: 1797 - protein, 384 aa, unidentified
  source 1..384: note = Related to JAHVJB010000004.1; note = Mameliella alba
MWSSHTYELEAIELGRPRETIDASIEQIENLNETNPPAPAILTLNHLAKRTGVGYEWLRAFVMRQLMPGMDGDARPYRKFSIRKRSGGYRTIHIPEPKLMHTQRWINYHILREVSPHSASQAFTNGCSIKKCAIKHCGAQWMIKIDLEDFFGSVTEIQVYRVFRSLGYQALVSFELARLCTITPGDRSLRSRHPHWRVWKPNKEIPTYSKKYLGFLPQGAPTSPRLANLVMRRCDQEIQKLAKSYGLTFTRYSDDLCFSTRTKKFNRHAASKFIGEAYMVLAKYGYQPNLRKTSVVPPGAKKVVLGLTVDGQEPKISKEVRDKIRQHLYYLAKVGAAEHAHRRGFDSVWGLKCHLRGLIDFAHMIDEDLAQSYIKKFNEVDWPV

SEQ ID NO: 1798 - protein, 377 aa, unidentified
  source 1..377: note = Related to VIRH01000027.1; note = Rhodobacterales bacterium
MWLPQTYIKEAKSKGLDSQTIDAAVDQVDTVLRKAENIPSLLTLNHLATRVGVNVKELRQFVDRTDLDAYQRFSIRKRRGGRRFISIPAPQLMRTQRWINEFILKPLPVHGSSHAFERHSSIVKAASVHCGARWLIKIDVEDFFGSISEIQVFRLFRSLEYQPLVSFELARLCTIGTSPHSPRKEYPNWRVHKRNKIIQGYSQQLLGYLPQGAPSSPRLSNLIMKPLDEALYLEAKQKGLYYTRYSDDLCFSYHNTDFNRRNATELVSAVYRILSSAGYRPNMRKTTVVPPGSKKIVLGLNIENDQPRLSKPFCDKVDQHLYYIKKYGPVEHSHRRKFDSVWGMKSHIRGSIDFAKMVEPERSAVWLEDFNRVEWPV

SEQ ID NO: 1799 - protein, 383 aa, unidentified
  source 1..383: note = Related to JAAXTE010000009.1; note = Rhizobium laguerreae
MWSSHRYRLEARQKNLPESVVQAAIAQSEKLLTADPSLPSILSLKHLAVRCDVPYSDLREFASRRPIDGNQPSLPYQNFSIRKRSGGRRFIHVPNPKLMVVQRWINNHILQEVKPHRASHAFTRNSSIKKCAQIHCGSAWLVKLDIADFFESVSEIQVFRVFSGMGYSPLVAFELARICTIRTPTHSPRQYFKQWVVRNINHTIYAYNDRYLGYLPQGAPTSPLLANLVMRQCDKELSEIAATFGMRYTRYSDDVTFSSLDPALGRDACRKLIFEAYAVLSSAGYRPNARKSTIVPPSARKLVLGLTIDGAEPGLTKEFKDRLRQHLYFLEKLGAIDHAFNRKFDSVWGMKAHIKGLIDFAKMIEPNYAAVCRERFNLIDWPV

SEQ ID NO: 1800 - protein, 383 aa, unidentified
  source 1..383: note = Related to AHZC01000134.1; note = Rhizobium sp.
MWSSHRYRLEAREKQLSETVIQAAILQSEKLITADPALPSILSLNHLSVRCGIPYWELREFVSRRSIDKNEPSMPYENFSIRKRSGGRRFIHVPNRQLMAVQRWINNHILQDVKPHIASHAFSRKSSIKKCAQVHCGSAWLIKLDISDFFESVSEIQVFRAFQGMGYTPLVAFELARICTIRTPAHSPRQHFKQWLVKKANHTIYAYNDRYLGYLPQGAPTSPLLANLVMRQCDKELSEVAARFGMKYTRYSDDLTFSSHDPTLGRDPCRELIFEAYSVLSRPGYRPNARKSTIVPPSARKLVPGLTVDGAEPGLTKEFKDRLRQHLYFLEKLGPVDHAFNRKFDSVWGMKAHIKGLIDFAKMIEPKYAALCRERFQKIDWPV

SEQ ID NO: 1801 - protein, 383 aa, unidentified
  source 1..383: note = Related to WIDU01000012.1; note = Rhizobium leguminosarum
MWSSHLYRVDARKKGLSEATIEAAISQSEKVINADPSLPSILSLKHLASRCGVPYSELREFVSRRAMFTIAPSMPYNKFSIQKRSGGRRFIYVPNRSLMTVQRWINTHILAQISPHGASHAFTKRSSIKRCALVHCGSAWLVKLDISDFFESVSEIQVYRSFKSMGYTPLVAFELARICTIRTPRHSPRERYGQWRIRELNEEIYAYNEHLLGYLPQGAPSSPLLSNIVMRDCDMLLSQIAAKFGMKYTRYSDDLTFSSLDPQFGREACRNLIFEAYAILSKAGYRPNARKCTVVPPSGKKIVLGLQIDGTEPRLTKDFKDRIRQHLYFLEKFGPLNHAFERKFDSVWGMKAHIKGLIDFAKMVEPGYAEICRRRFNLIDWPV

SEQ ID NO: 1802 - protein, 423 aa, unidentified
  source 1..423: note = Related to PAYC01000024.1; note = Idiomarinaceae bacterium
MWWEAGVPVLFGKALAEREHSHSGNVPSLARVARATVRSGLIGVIVMWSPLSYKRKGLEIGIAEELLDSAIEQTENVIEENPDLPSILTLNHLSTRTKTSLETLKAYISRDEPDAYRKFSIAKRSGGRRFIRVPAPQLAHVQKWIHHHILSHISPHRASYGFRKRTSIKDCARKHCGARWLIKLDIVNFFETISEIQVFSVFQKLGYQPLVAFELARLCTVSSDEYSPRRNYGNWWAFKSYKVIRNYEQKLLGYLPQGASSSPMLSNLVMWKCDEQISKIAKKNGMKYSRYSDDIALSTSSKDFNRALAKQVIQEVNRVLSQYGYLPHFKKCKVVPPGARKVILGLNVDGAVPVLQRETKDRIRQHLYFLKKHGPVEHALARGFDSVWGLQSHLRGLIDYAKAIEPEYAAKRLREFREIDWPF

SEQ ID NO: 1803 - protein, 377 aa, unidentified
  source 1..377: note = Related to JXYC01000005.1; note = Marinomonas sp.
MWSPQLYLKLGIQEGHSTELLERAISQSDAVINSEYSLPSILSLKHLAVRTGVSYESLRSIVSRSAPKTYNKFSIRKRSGGRRYIHVPSLELMHAQRWINEHILKKIKVHPSSHAFIEGSSIQKCASKHCGAKWLIKLDITDFFESISEIQIFRSFKELGYQPLVSFELARLCTVPTHHKSQRRHYIQWRSWYRNESITDYNKSLIGYLPQGAPTSPLLSNIVMRKNDEELKKLAHKFKLTYTRYSDDLSFSTRSKNFDRYKAKELVFEVYRILSKSGYLPQYRKTKVISPSSKKVILGLNVDGDTPRLQKEFKDRLRQHFYYIKKLGLDEHIINREFDSVWGFKSHLRGMIDYANMIEPEYAKKQLETFKSIDWPI

SEQ ID NO: 1804 - protein, 374 aa, unidentified
  source 1..374: note = Related to JAAOIO010000006.1; note = Endozoicomonadaceae bacterium
MWSPQSYKKIGSEKGLSDELLETAITQSKAVFCNIPSILSLRHLACRTGISYRKLRCFVERSSYVPYKKFSIKKRSGGRRFIHVPDPDLMHVQRWFNEYVFKLVPVHPSSYAFTTGSSIKKCAAEHCGAQWLIKLDITDFFESVSEIQVFRLFKGLGYQPLVSFEMARLCTVLILDKSPRTHYSQWHVRKENKIIPQYNQKMLGYLPQGAASSPLISNLVMKECDEKLTNIANRYKLSYTRYSDDLSFSTRSKNFCRSKAKDVIFEVYEVLSKAGYRPQLRKTKIISPSSKKIILGLNVDGAEPLLQKEYKDKIRQHLYYIEKLGVAKHVEKRGFDSIWGFKSHLRGMIDYANMIEEDYAKKCLDRFSNIDWPV

SEQ ID NO: 1805 - protein, 376 aa, Vibrio parahaemolyticus
  source 1..376: note = Related to CP006008.1
MWSPHNYKEQGLEKGLSDELLERAISQSEDVIERNHDLPSILSLKHLSVRTCTSHQKLTRFVAREEFSYEKFSIKKRSGGRRFIYIPEPTLLHVQRWINEFILKPIPVHQASFAFNPGSSIRKCAAKHCGAKWLIKLDITDFFESISEIQVYRLFREFGYQPLVAFQLARICTIATPEMSPRRKFNNWKVRRKNKNIPRYNQRILGYLPQGGATSPIISNLVMRELDSEFSKIARKYRLVYTRYSDDITFSTRANTFERDSGRRLITEVYNLLNLSGYKPQYRKTKIVPPSAKKIVLGLNVDGRAPRLQKEFKDNIRQHFYYVETLGLSEHIVNRGFDSVWGFKCHLKGLIDYANSIEPEYARKLVVRFNNIDWPV

SEQ ID NO: 1806 - protein, 377 aa, unidentified
  source 1..377: note = Related to PUHN01000047.1; note = Rhodobacteraceae bacterium WD3A24
MWSPHQYRAAAKEKGLSDATIEAAIDQIETVEQGTPELPAILSLNHLATRARVPYQYLRSVVSRSEPSTYRKFSINKRSGGRRFIHVPEPPLAHVQKWINRFILRQVPVHKASFAFAPGSSISGCAARHCGAHWLIKMDITGFFESVSEIQAYRCFEELGYQPLVAFELARIVTVGPLDQSPRHRDPVWKVREPNAAIPSYSSGALGYLPQGAPTSPMLSNIVMKPVDEEIAAAARKAGLIYTRYSDDLTFSTPAKEFGRSAATDFVHTVGQILAAAGFRPQHRKTKIIPPGSRKIVLGLNVEGTAPKLRKEFKDNLRLHLHYLDKFGPAEHAKARQFETIWGMKAHIRGLIDFANMVEPVYAKGMLDQYEQIEWPF

SEQ ID NO: 1807 - protein, 380 aa, unidentified
  source 1..380: note = Related to NZ_CDRJ01000001.1; note = Ralstonia solanacearum
MWSSQRYLSEGKKNGAAQLVIDNAISQIELVLDQNNNIPAILSLKHFSLRSHVGYKFLRSVVEREEEDDKQGVQVYRYFNIRKKSGGTRTISIPHPQLLIAQKWLATNVLSKLSASNYSFAFSPGSNIVACAKKHVEANWLVKMDVKDFFGSISEIDVYRQFRKLKYQPLVAFELSRIVTWPKSPRVDSPRWELDSVRSSIGSYIHTEIGCLPQGAPTSPMLSNLVANALDEELSRVANKFGVRYTRYCDDLTFSTRRKSFDRNQAKALIEAATMTMLPLGFSPNEKKTVVIPPGARKQVLGLNVDGPVPTLSKEFKSKIRQHLFFLTKNGPAAHAADREFDTIWGLKRHLYGLADYAFMVEPEYGKHVKSALSSINWPV

SEQ ID NO: 1808 - protein, 375 aa, unidentified
  source 1..375: note = Related to NC_017559.1; note = Ralstonia solanacearum
MWASQHYFQEGKSLGVDEDILVSAVDQIERVLDVNGDLPSILTLNHLATRAKVGHAFLRRVISRTQNGAYRHFAVKKRTGGQRWISVPHPQLLNVQRWLAKHVLNQIDASRHSYAFEPESSIKKCAEQHIHAKWMVKMDVEDFFWSISEIDVYRQFVSLGYQPLVAFELSRLATWPLFAHGPAKAAVWRARPREGIPTYSWGNMGCLPQGAPTSPMLSNLVMRELDDRIHRAARKHRMVFTRYADDLTFSSRDETLGRAACRELIGEVGDLLRQRGFNPKHKKTVVVPPGARKVVLGLNVDGDAPRLPKEFKSKMRQHLYYLRTAGPAAHAAKRSFDTVWGLQRHLRGLADFAHMVEPEYGSELLRALQAVSWPV

SEQ ID NO: 1809 - protein, 395 aa, unidentified
  source 1..395: note = Related to JADGAR010000007.1; note = Magnetococcales bacterium
MEFPLHNYLKSLRDIGARDGYIKAIQRNAKPLADCGLPVILTLGHLAHITDVSHGILTDIIKRQIDPYRVFAIRKRNGGKRFICVPETGLLNAQRWIHDEILCSLAATKNLSCHATAYAPGCSHVINAKRHVGAAWILKFDITRFFESISERQVYRVFRGLGYRSQVAFCLTRLCTRVLPTNVDHRLLRHTKRWQTGDQRNQRNFSGARVIGHLPQGAPTSPMLANLVCIPLDTDMQNIAAREGLTFTRYADDMTFSGEMLDRAAAVKISREVSIVVGRYGFGINLQKTSIAKNGGRKIVTGLSVDGDVVRLPRAYKDAIRQELFYLDKHGIQEHCARIGHKNHLSYLLRLAGRIRYATSIEPVIGQRMMHLFLRIFPTFQETERLIFQDFVSDD

SEQ ID NO: 1810 - protein, 395 aa, unidentified
  source 1..395: note = Related to JADFZH010000217.1; note = Magnetococcales bacterium
MEFPLHNYLNSLRDSGARVEYISAIRRNAQPLVDCGLPVILTLGHLAHVTDVSHGILADIIKRQIDPYRVFAIRKRSGGKRFICVPEKGLLTVQRWIHKEILCAPVALRKLSCHATAYAPLSSHIVNAKRHIGAAWILKLDITRFFESVSERQVYRVFRGLGYRALVAFCLTRLCTRVLPSTVDHRLRLRTKRWQTGDQRNQRNFPGARVIGHLPQGAPTSPMLANLVCVKLDADLQKIAAREGLTYTRYADDMTFSGEVVDRAAAIRISREISIAVGHYGFGINLQKTSIAKNGGRKIVTGLSVDGEVVRLPRAYKDAIRQELFYLDKHGIQGHCARIGHKNHLSYLLRLAGRIRYAISIEPVIGQRMMEKFLRIFPTFLETEQMVAQVFVKDD

SEQ ID NO: 1811 - protein, 388 aa, unidentified
  source 1..388: note = Related to NZ_LMUI01000048.1; note = Methylocapsa sp.
MEFPLHAYLNHLQTEGASGEFIAAVRRNAKPLADRDLPVILTLGHLAYATDVRYGTLNGIVRRQIDPYRVFAIRKRNGGKRSICVPEPGLLSVQRWIHEHILCSHYALSRLSNQSTAYAPGCSHLANARRHISAAWLLKLDITRFFESISERQVYRVFRGFGYRALVAFFLTRLCTRVLPFAVDRRLKRQIRRWRTGEPRRYLNAAVVGHLPQGAPTSPMLANFVCTVLDAELQTIAVREGLTYTRYADDMTFSGGIGVACSPAEIIREISTIVGKFGFGINSQKTSIAKNGSRKIVTGLSVEGDMLRLPRSYKDELRQELFFLKKYGIAEHCSRTNHKNHMSYLLRLAGRIRYAVSAEPIIGTRMMLQFQHLFPNFTEIEQSLFDRP

SEQ ID NO: 1812 - protein, 402 aa, unidentified
  source 1..402: note = Related to JADGBU010000012.1; note = Magnetococcales bacterium
MEFSLHTYLNRLRTRGASDEFVEIIRRHAKPLSDRGLPVILSLGHLAFATSNSHEVLHGIVKREVDPYRGFWIRKRSGGKRYICVPEGGLIRTQRWIHDHILCSTWGKKSLSMAATAYVPGSSHIDNAKRHSGADCVLKLDITNFFETISERQVYHVFHGFGYRPLVAFYFSRLCTRVLDPKHDVRSPTVRWAGKKKRWQTEANRKNNNYHTVGHLPQGAPTSPMLANLVCFGLDLELQQIADSINLVYTRYADDMTFSGSFTTKEQISQFICQVSAVVGKFGFSINQQKTSLSRTGGRKIVTGLSVEGDALRLPRAYKDAIRQELYYIERYGLSGHLERVGYANHLTYLMRLKGRIQYWFSIEPATATPSIEQFRAIFPNFNEINELVTGDSSRGIPGTPY

SEQ ID NO: 1813 - protein, 455 aa, unidentified
  source 1..455: note = Related to KN323041.1; note = Burkholderia pseudomallei
MASQYPCRLFETHERGSESAVLDTAFLSARWVDDQLELRGLAIRPSSHHAERVKARNMKFSLHAYLKPLRENGASQEYIEALARSAKPLVDNGLPVLLTLGHLAHVCDVPYGMLVGIISRHTNPYRVFSIRKRSGGKRFICVPEPLLMQVQRWIHDQILCSPFALARLSRHATAYAPQNGPVPANQRRIADHVKNAERHLGATWIVKLDISNFFESISERQIYHVFREFGYRALVAFCLARLCTRVLPLTADKRLRSRAKRWHPGKEYKILATKVVGHLPQGAPTSPMLANLVCVELDRNLQSIAVREALTYSRYADDMTFSGEFHDRSDAVIVLRELSRVVAAQGFSINALKTNIAKNGGRKIVTGLSVDGDSIRVPRAYKDKIRQELYFIGKHGLTDHCNRIDQRNQLSYLLRLAGRIRYVSSVEAEAGNLMMKKLLSLFPTLLDTERILSEI

SEQ ID NO: 1814 - protein, 388 aa, unidentified
  source 1..388: note = Related to NZ_CP050013.1; note = Serratia marcescens
MNFSLHSYIKHLRDTDASEDYIKTVQRHARTLVNNNLPVILTLGHLAHSTNSFHNTLLNIVKREVDPYRVFSIGKKSGGKRLICAPELNLLNVQRWINQYILKSELALKKISSNTTAYVPGGSHIKNAERHVGASWIIKIDIVNFFESISERQVYYVFRELGYRALVAFNLARLCTRILPHKLDNRKYNKKRWRSKKQYAYCNSKVAGHLPQGAPTSPMLANLVCVMLDAKLQCIASEYGLSYTRYADDMTFSGHFDDKKTALIFMREISNTVINYGFSINSQKSSIAKDGGRKIVTGLSVDGEHIRLPRAYKDKIRQEIFYIKKYSLESHCSRTRKGNRFSYIMHLAGKIRYAILVEPTFGNKMMSEFVNIFPDFLDMEQILKSSIR

SEQ ID NO: 1815 - protein, 388 aa, unidentified
  source 1..388: note = Related to JAFKLC010000111.1; note = Rhodospirillales bacterium
MNFPLHAYVRALKRSGASEQFIQQVRDKAKPLVATGLPVILTLGQLSFATEIPYRILLSIIGRAVDPYRLFSIRKRAGGRRFICVPEPRMMFAQRWIHQNILSAPSVTAGMSCAAMAYKNSASHVANARAHLASDWILKLDVTRFFESVSERQVYHVFHSLGYPALVAFGLARLCTRVSFGSRGGRHPGASARWSSRDRYDFLGYPDLGHLPQGAPSSPMLANLVCIPLDSQIEKIAEEHNLVYTRYADDLTLSGSLIGADETLEVIRKVSNSLGQFGFGVNVRKTRVVRRGTRMIVTGLSVEGETLRVPRDYKDRLRQELYYIEKFGLREHCQRIGQRNYAAYLRRLSSRIGYVSCIEPATGKKLEAKFTNLFPGFGELKELILSFP

SEQ ID NO: 1816 - protein, 376 aa, unidentified
  source 1..376: note = Related to RFVU01000153.1; note = Betaproteobacteria bacterium
MEFPRPATAVPLPFDATLAQLAHATGMTTARLQGIVSRRIDPWHTFSIRKRGGGRRTICVPDADLLALQRWVHRHLLCHPQSLARLMPQATAYRPGGSHLANAEAHLGAGWLLKLDLVRFFESISERQVWHVFRALGFAPRTALLLTRACTRVLPLAVDRRYFDRTPRWRTGAERSPNEKFHPRPRVVGHLPQGAPSSPMLANLVCHALDAQLQQLAQSCSEHAVRYTRYADDITFSGPPMTAAALNALCGRLLREATRAITRYGFGVQWRKVQLVRRGARRIVTGLLVDGDALHVPRPSRDALRQALYHLEQQGIEGHCAWLRIDDTQAYLARLRGQLAYLRSIEPVRGARMLAQFDRLMAARGTVGTTGQMRNA

SEQ ID NO: 1817 - protein, 397 aa, unidentified
  source 1..397: note = Related to JAFEJZ010000162.1; note = Agrobacterium sp.
MTAFSLHDYLSVLRAEGSPSDYIEALRRNAQPLVSRGLPVLLTLGHLAFVTDVDYRYLNAVVRRTVDPYRIFSIAKRSGGKRYIVVADRKLALVQSWIHRNILTSAAAMRSISSAVTAYVPGSSHIANASRHRNASWLIKVDVARFFESISERQVYYVFRQLGYRALMAFALTRLCTRVLETKDFRARKKGRWQKRTVSPDRPLGIGHLPQGAATSPMLANLVCRKLDSSLSEIADDRGLIYTRYADDITMSGEFQDRMDAESTIGLISGLLGGVGFGINHQKTSIAKDGGRKIVTGLSVDGDKLRVPRSYKDNLRQHLYYIEKFGLNEHCVRIGQAHHLAFLLRLAGQIRYVRSVEPPLGAEMLNRLRRAVPEFDAIDGLVSAAYDTDTDPSQGGG

SEQ ID NO: 1818 - protein, 391 aa, Acinetobacter sp.
  source 1..391: note = Related to NZ_KB894370.1; note = Acinetobacter tjernbergiae
MSTHNYITELNTPGVNPTYKRVVRQLVTPLLQKNLPVILSLKHLSVLLDIPYIVVHKIVYRDGDFYKVFAIKKRSGGKRWITIPDYFLMKAQKWINNNILNAQEAQAMLSINSTAYKKKSSHIVNASMHLGEKQLIKLDILRFFESISERQVFNVFKKLGYKNSVSLILARICTRVIPIHLDKRFIKNEQRWTTKYNYKYDQQKNKIKRIGHLPQGAPTSPALANFVCCNLDADIEDLIDQFNLNSYTRYADDIIISGNFQDKNTAISCIFRVSRILRNYGFKTNYLKTKYCGSGDRKIVTGICINDENQLRVPIEYKNKIRQEIYYIDKFGLLNHCERLNISNPLNYLMRLEGKINYIKTVELDKGIYFMNKLEKAIPNMNEIRLLNDLP

SEQ ID NO: 1819 - protein, 365 aa, Acinetobacter sp.
  source 1..365: note = Related to NZ_NIWI01000032.1; note = Acinetobacter baumannii
MSTHNYLTELNKHDVNPSYKRVVRQLATPLLQKKLPVILSLKHLSVLLDIPYIVLHKIVYRDGDFYKVFAIKKRSGGKRWITVPNHFLMKAQKWINENILNIQSTQDFLSISSTAYKKSSSHIINASMHLGEKQLIKLDILNFFESISERQVFKVFKNLGYKNSISLILTRICTRLIPLNKDKRFFKKEKRWTTKYTYKYDNQNNKLKRIGHLPQGAPTSPILANLVCQDLDSEIQNLTDQLNLNYYTRYADDIIISGNFINKELAISCIHKVSKILREYGFKTNFLKTKYCGSGDRKIITGICINDENQLRVPIEYKRKVRQEIYYIKKFGLLNHCEKLKIYNPLNYVLRLDGKINYIKTIEPD

SEQ ID NO: 1820 - protein, 390 aa, Acinetobacter sp.
  source 1..390: note = Related to KB849902.1; note = Acinetobacter baumannii
MSNHNYLTSLRNSENINSEYKKSISKYARPLIREELPIILSLKHLSVLTDVPYNTLYNIVFRKIESYRIFAIKKRSGGKRWITVPTPYLMRVQKWINKNILSNSHVLSYISNNSMAYKKKSSHIKNALVHHGETKLIKLDITNFFESISERQVFHVFKKIGYKNSVAFILTRLCTRILSLNNDIRLLNKEKRWFSLYQYKHLDNEKTIKRLGHLPQGAPTSPMLANLVCLELDKQIEDMCLLEDFNYTRYADDIVISGDFSDKENAINHIYEISKILRTHGFKTNYLKTKYCGAGDRKIITGLCINDPSSLRVPSHYKKKIRQEIYYIKKYGLIEHCRKLNIKNPLNYLNRLEGKIYYLICVENENGKKALENLEDAIPNIHELRQLAEI

SEQ ID NO: 1821 - protein, 372 aa, unidentified
  source 1..372: note = Related to NZ_LPGQ01000067.1; note = Burkholderia ubonensis
MRKVPAVFTLMHLAHLTGTSWQSLRNTITRQQDDYRVFEIRKRSGGNRRICAPAPMLKSVQFWIHKNILCSLGARALLQEASTAYAPGSSIKKNAAIHAGAAWLIKLDIKDFFESISERQVYHVFRRLGYPALLSFEMARLCTRVVPPRDDKVPRRREKMWRWTNQTCKHFTPYPCETAVGHLPQGAPTSAMLANLVAVELDKKIQVIADANGASYTRYADDIVLTLAVATRVQCDTIFRAVADVVSHSGFRVNRIKSHVRGPGARKVVTGLVINDVRPRLARSMREDIKLALYHIKKHGLLGHAERRHSKNPLGYLNHLVGLIYFARSIEQDFGVWALSELRIAMDDHKDLLSILRTFDSSQDQRYSYRNI

SEQ ID NO: 1822 - protein, 352 aa, unidentified
  source 1..352: note = Related to nan
MRATVARSKDNYTTFEIRKRSGGNRRICVPAPALKLAQGWIHKHILCSPGALALLQQASTAYAPGSSIKMNASAHAGAAWLIKLDIKDFFESISERQVYHVFKSLFGYPALLSFEMARLCTRVVPPRNDGVARRRERMWRWTNRASKHFSPYSCVTAVGHLPQGAPTSAMLANLVAVEIDKQIQAIADANDATYTRYADDIVLTLSDGTRSHCDAILQKVAHVVNTAGFRVNRKKSYVRGPGARKVVTGLVINDDRPRLTKASREEIKLALYHIKKHGLLSHSERRHSKNPLGYLNHLVGLIYFARSIEEDFGARALIELRTIMADHRDLLSVLQTFEAMPAERESYSYRSI

SEQ ID NO: 1823 - protein, 381 aa, unidentified
  source 1..381: note = Related to NZ_BPUQ01000001.1; note = Caballeronia novacaledonica
MSIADQLTENKVPLIFSLIHLAHVSGVKWSLLRSFVRRDSDFYGCYEIRKRSGGNRRICVPEPALKLIQKWIHANILRSTGALARLHSASTAYAPGASIKKNADSHVGAAWLIKLDIKDFFESISERQVYWVFRDLGYPALLSFELARLTTRVAPPRRDGTMRHRDKMWRWSNNASQAYPAYKPGRVTGNLPQGAPTSAMLSNLAVRELDVQIQLIAARHHATYTRYADDITLTLVQGSRPACAEIFRSVADAITHAGFRVNKCKSRISGPGSRKIITGLVITSKAARVAKNVRSEIEIALHYIKKHGLLDHIERCGHKNPVGYLNYLYGRIYFVRSIEFDFGTRALEELNALIKTYEGLGWSSKPFKIVRSDLVFHSAKK

SEQ ID NO: 1824 - protein, 352 aa, unidentified
  source 1..352: note = Related to JADKFD010000029.1; note = Rhodanobacteraceae bacterium
MVERKIDDYRVFTIQKRSGGNRRICSPSSTLRRVQTWIHRNILCAAGSLAKIHAASTAYAPGSSIRANAKVHTGAAWIIKIDIKDFFESISERQAYYAFRSLAYPALLSFELARLCTRIAPPRDDGAQRKRDLLWRWNNDRAKTGNPYGLVQSVGHLPQGAPTSAMLANLVFAALDVRINAIAQKHGATYSRYADDIVLSLTSGCRVECAKIFRDVTSVISHAGYRINRSKSRITPPGARKIVTGLVTNDVTPRLPREMKEDIMLSIYHIKKHGLLSHMERRKSSSPLGYLNHLIGRILFAQSIENKFGSCALNELRVAMAPYRDLLDMARMLNPKTSGSNDFTALYLLVFP

SEQ ID NO: 1825 - protein, 404 aa, unidentified
  source 1..404: note = Related to NZ_CP034547.1; note = Burkholderia cenocepacia
MLGPSLHAIEFHARGFNEQYVKALVDTAKHLSAKRVPVVFTVMHLATLSKTSWSALMQTIVRQSENDYRVFSIRKKSGGFRRICVPAPHLMQTQRWIHDHILNSRGALDCLHGASTAYGKGSSILNNASAHAGSKWLIKIDIKDFFESISERQIYYVFRRFGYKALLAFELTRICTRAIPPRYDGRPRRRDKTWRWSNSQVVGKGPYLATATVGHLPQGAPTSAMLANYAVASLDEKIQAIADGVGATYTRYADDIVLSMTNSSRELCQTIFRQVCVEITTSGFRLNEKKCFVRGPGDRKIVTGLMVNDVKPRLTKSIKDEIEVSLHCIGKFGLLSHIKRKKIKSPLGYLNHLNGLIRFAYSIDDRFGNWATKELDRVLAPERETIELLKNFSGRPRPNRHMFG

SEQ ID NO: 1826 - protein, 404 aa, unidentified
  source 1..404: note = Related to NZ_BBQM01000001.1; note = Cupriavidus basilensis
MLGPSLHAIKAHAHGLNEQYVKVLVDTARQMSVKRVPVVFTLMHFATLSNTPWAALIQTIGRRAENDYRVFNIRKKSGGFRRICVPVPHLKRAQRWIHDQILKSRGALDYLHEASKAYGDGDSILNNASVHAGSEWIIKVDIKDFFESISERQVYHVFRKFGYRALLAFELARLCTRTAPRRYDGQPRRRDKTWRWGSPQVAGKVPYRSRTTVGHLPQGAPSSAMLANYVAASLDTKIQTIADAAGAAYTRYADDIVLSLTNSDRESCQEIFRQVCLAVTTAGFRLNEKKCLIRGPGSRKIVTGLVVNDVKPRLTKSIKDEIELSLYYIGKFGLLSHAKRRKTKSPLGYLNHLTGLIHFAHSVDDRFGAWAQKEFDRVLAPERETVELLRSFSGRPRPNRHMLG

SEQ ID NO: 1827 - protein, 367 aa, unidentified
  source 1..367: note = Related to NC_018020.1; note = Turneriella parva
MLLWTPHLFEKAGIQRKYDIPYIARLIDYGNQLSQRNLPVIFSLKHFSRLTDINYSYLRAVIDRTEYPYKTFKIRKKTEGFRRISVPDSRLLVIQQWLHKHILSKIQPHFSSTAFNPGCSIMRNAQPHCGANWLIKIDIENFFDSISERQVYTQFKALGYSKYLCFCFARLSTRLASREAKKYKKPRWQNKRHQYPEFIGNLPQGAPTSPILANLVCRQLDAQIHQLIQPMGLIYTRYADDIVISGNALTRKDASKLIQEISKILNRSGFQKNSLKTRILSPGARKIVTGLNVNGPNPTIPKKLKYSIRAELHYAKVFGVAEHCKKLGYHKIDGFRNQIRGKIDFVRSVNPKLADKFYAQLDDINWP

SEQ ID NO: 1828 - protein, 341 aa, Leptospira sp.
  source 1..341: note = Related to NZ_RQHG01000016.1; note = Leptospira adleri
MLPNIIPLQTIGELANITGVPYSYINNIIKLKEDSYRSFSISKRSSNTKRKIFVPKPMLMKVQKAINRYILQNIQPHPIATAYSYGSNPIKNAAYHCNSSILLKFDIKDFFHSFDERDVYYLFLSFGYNRLLSFQLARLCTKIVESTWFPNEYKDHYIYPSLTIKKKSTFLPQGCPTSPMLSNLLMRTFDNKLEMLANKFSLKCTRYSDDLTFSSESKMSQDSIKIVIAEVNKMLGKKFRMNREKQKVYHKGQRKIVTGLIVNNDTPKLTKAFKNDLRMHVHFIAKYGYVEHALKRNCDPFSFYNHFNGRMKWAELIEPAFVNKLKHLLVNISIPFTYSAE

SEQ ID NO: 1829 - protein, 331 aa, unidentified
  source 1..331: note = Related to NZ_CP028271.1; note = Mixta intestinalis
MTQWNPNLFRKEGLSKGYDSHYLTRLVEQGETINERNLPVVFSLAHLANLSHTLYSDLHGFVSRNELERKDFPYKNFSISKRTGGKRWISIPTPALMAVQYWINQNILNRVIPHAAAYAYVPKRKIIQHAQRHCGSGWLIKIDIKDFFGNISERQVFDVFLNLGYPKLLSFEMARLCTRVTPKRKGKRWCNTNNEHTITGYDSKFVGSLPQGAPTSPALSNLVCIGLDKQLTSLAISEGATYSRYADDICFSLPMGCRKSALHIKKEISKILHGYGFSDNSKKTRLIPPGARKVLTGLNVNNDTPRIPKEIRDSVRMHLYYAKKKWYRNSL

SEQ ID NO: 1830 - protein, 378 aa, unidentified
  source 1..378: note = Related to NZ_JUJG01000015.1; note = Pectobacterium carotovorum
MTQWNPNLYRKEGLSKGYNVHYLTSLVEQGEKSNEKNFPVVFSLAHLANLSRTLYSDLHIFVSRTAIKRKDFPYKNFPIAKRTGGKRWISIPTPALMAVQYWINQNILNKATPHSAAYAYVPNKKIIQHAQRHCGAAWLIKIDIKDFFGNISERQIFDVFLELGYPKLLSFEMARLCTRVTPKRKGKRWRNIVTEHTISDYDSRFVGSLPQGAPTSPALSNLVCMNLDKKLTSFAISQGATYSRYADDLCFSLSDGCRKDALYIKKEISKILREHGFSDNSKKTRIVPPGARKILTGLIINDELPKIPKEIRDSVRMHLYYAKKNGIASHCTIRGFRSVIGFKNYLSGMIGYISSINPQQGKKLRTEFNSLPWIDFDL

SEQ ID NO: 1831 - protein, 378 aa, unidentified
  source 1..378: note = Related to NZ_CP091099.1; note = Pantoea agglomerans
MTQWNPNLFRKEGKSKGFNPEYLTALVQQGEKTDGLGFPVVFSLAHLANLSRTLYSDLHSLVSRNELERKDFPYKNFPISKRTGGKRWISVPVPALMAVQSWINHNILSRTKPHAAAYAYVPKKKIIQHAQRHCGADWLVKIDIKDFFGSISERQVYNVFLGLGYPKLLSFEMARLCTRATPKRQGKKWRNEISTYSISSYNSEFVGSLPQGAPTSPALSNLVCFELDVALTSLATSLDATYSRYSDDLCFSLSEGNRKSALNIKRQASKILREHGFSDNSSKTRIVPPGARKMLTGLNVNNASPKIPKEVRDSVRMHLYYSKKLGIPQHCKNRGFRSIIGFKNHLSGVIGYIYSIDKDLGNKYKIEFDSLPWIDFGI

SEQ ID NO: 1832 - protein, 378 aa, unidentified
  source 1..378: note = Related to JAANQB010000011.1; note = Cronobacter sp.
MTQWNPNLFRKEGISKGYAPNYLAALIERAEKINENNVPVVFSLAHLANLSGTLYSDLHSFVSRNALEQKDFPYRNFPIKKRSGGKRWISVPVPPLMAVQSWINTNILNKITPHASAYAYVCNRNLIQHAQRHCGSDWIIKIDIKDFFGNISERQVYSVFVELGYPKLLSFEMARLCTRATPKRKGKKWINYANDHTIESYNTPYVGSLPQGAPTSPALSNLVFSIVDKKLSSLALSHGATYSRYADDLCFSLIQGNRHISLALKKEVSKILNEHGFSDNSKKTRIIPPGARKMVTGLCINSSSPKIPKEVRDAVRMHLYYAKKLGIASHCMSRGFRSVIGFKNYLAGMIAYVSSVDVKLGTKFRQQFNLLPWIDFDI

SEQ ID NO: 1833 - protein, 377 aa, unidentified
  source 1..377: note = Related to PPXQ01000003.1; note = Massilia sp.
MQWNPNLFRKEGNARGYDDLYLNALVSQGQRTAARGLPVVFSLAHLANLSRTLYADLHGFVSRSGIEYPDFPYKNFPIAKRTGGKRWISIPVPQLMAVQQWINQNILNKVVPHPAAFAYVPKRRLIEHASLHCGADWIIKIDIKDFFSNISEKQVFNVFLGLGYPALLSFEMARICTRVTPLRKGARWKNSFKAHSISSYDSRFVGSLPQGAPTSPALSNLVCMKMDEELTEWAISKSVTYSRYADDLCFSFVNSSRQSAYDLQREVTKILRKHGFSDNGKKTRIIPPGARKTLTGLNINAASPSIPKEVRDSIRLHLYFSEKNGISEHCEKRGFYSIIGFKHHLFGLISYVLSVDKSKGEKFRQQFNALPWLDFEN

SEQ ID NO: 1834 - protein, 378 aa, unidentified
  source 1..378: note = Related to JADJBR010000009.1; note = Zoogloea sp.
MTHWNPNLFRKEGSAKGYELAYLNALVEQGDKSTALGVPVVFSLAHLANLSRTLYSDLHGFVRRAEISRADFPYKNFPISKRTGGKRWISIPVPPLMAVQQWINQNILNRVVPHAAAFAYVPKRKLIDHAKRHCGADWLVKIDIKDFFSNISERQVFDVFLKLGYPKLLSFEMARLCTRVTPKRRGARWTHVTGEHAISDYSSQFVGSLPQGAPTSPALSNLVCIELDKELTQLATALSATYSRYADDLCFSFVGGSRQSAFDLKREVSKVLWKHGFSENTKKTRIVPPGARKVLTGLNVNASFPTVPKEVRDLVRMHLYYAKLRGIPDHCKERGFRSVIGFKNHLFGLIGYVATVDVTHGEIFLSQFNSLPWVNFDL

SEQ ID NO: 1835 - protein, 377 aa, Achromobacter sp.
  source 1..377: note = Related to CADILF010000059.1; note = Achromobacter deleyi
MRWNPHFFRREGVNKGYDSNYLEALVRQGNLSSGERLPVIFSLSHLANLSKTLYSDLHGFVSREDIFRENFPYKNFTIGKRSGGRRWISVPVPPLMAVQKWISQNIVNSVLPHPAAFAYVRNRRILDHAYRHCGADWMLKIDIKDFFGNISERQVFNVFLSLKYTRLLSFEMARLCTKASPNRQGERWCNVDLDYSVSGYSSKFIGSLPQGAPTSPGLSNLVFSPIDHQLSELAQAESAVYSRYADDLCFSFTGSSRSAAVKMKRAVAEILWNAGFSENLKKTRIIPPGARKILTGLNVNDSTPTIPREVRNLVRMHLHYARVNGIPQHCRERGFRSVIGFRNYLLGVIGYVASINDQAGKKFLYQFNELNWIDFGL

SEQ ID NO: 1836 - protein, 378 aa, unidentified
  source 1..378: note = Related to JAEUMY010000005.1; note = Betaproteobacteria bacterium
MTRWNPNLFRKDGLAKGFNPEYLGALIAQGESLVSNQMPVVFSLAHLASLSRTLYSDLHGFVSRSDIQRKDFPYRSFPIAKRSGGVRWISIPAPPLMAVQQWICQNVLNRVEPHAAAYAFVPRRRLLDHAQRHCGATWLVKVDIKDFFSNISERQAFQVFLRLGYPKLLSFEMARLCTRVTPRRKGAKWTNSNDDHSIPEYDCRFVGSLPQGAPTSPALSNLVCMDLDRDLTELAVSKSATFSRYADDLCFSLTSGSREAAFALKRDVSKVLWKHGFSENPKKTRVVPPGARMVLTGLLVNANVPTVPREVRDLVRMHLHYAKKNGIPMHCKARGFRSIFGFKNHLLGLIGYVASVDKKHGADFYAQFNQLPWIEFDL

SEQ ID NO: 1837 - protein, 384 aa, unidentified
  source 1..384: note = Related to NZ_ATWO01000001.1; note = Desulfotignum balticum
MTRWNPNSYYKEGKNKGYSSNYLNSLVVHGKKIAANNIPVIYSLKHLALLSGTNYNELYQIVSRLDIDPEGPSPNYPYKIFPIRKRRGGKRLIAIPYPTLMAVQRWVSQEILNKLPVHPAAFAYVAGKKNPLRDHAKLHCDADWILKLDIKNFFSNISERQIYKVFKTCNYYSLLSFEMARLCTMIVPSRRKRRWNNSKQFKNKNLYPCDHIGFLPQGAPTSPALSNLTCIDMDNELTKLALENGANYSRYADDLCFSFTISTRRDLLKFKRTACELLWKNGFSENKTKTKILPPGSKKVITGLIINSGKPMIPKELRDRVRMHLYFSKKLGIPEHCKRRGFRSIIGFRNHLYGLILYIKSIDPKKGEVFRAAFKDLPWVNFNI

SEQ ID NO: 1838 - protein, 380 aa, unidentified
  source 1..380: note = Related to CP033575.1; note = Shewanella algae
MNRWNPNFYYKEGIKRGFNTEYLDKLIEQGRKIQENNIPVLFSLAHLASCSRTQYSELHSFVARTEYGPEGYPYRNFPIRKRSGGKRWISVPAPPLMAVQSWINKNILNSIPTHPTAFAYVNGIKSPLKAHAEKHCDADWVLKVDIKNFFSNISERQVYRVFRSLSYSKLLSFEMARLCTRITPGRTGKRWNIDWNESGVEGYSCTCLGSLPQGAPSSPALSNLVCFELDTQLHELALSRNATYSRYADDLCFSFIKSSRDEVYQFKREVNKALWDNSFTENPKKSHIIPPGARKIVTGLIVNSDKPSIPRELIDAIRMHLFYSEKFGIPAHCRKRGFRSVIGFRNHLKGLIMYVYSIDPKKGNEFLEKYNRLPWLEFEI

SEQ ID NO: 1839 - protein, 381 aa, unidentified
  source 1..381: note = Related to NAHO01000032.1; note = Snodgrassella alvi
MKRWNPYFFRKQGEELNYNKNYLDKLIQIGSQIDSKLTPVIFSLSHLCKLASVSYQEMHDIIARKNFTSFGYPYRNFTIRKRSGGYRWISVPCPSLMIIQHWIASEILRQMKPHQAAYAYVNNLTSPIKSHVQNHCGAKWILKLDIEDFFGSISEKQVYKVFKNYQYPDLLSFEMARLCTKISRNRKGKKWVNDRKNNVELSSYFSKYIGCLPQGAPTSPALSNLVCINMDEELSLLSRNNDANYSRYADDLCFSFYTTNRRNVYMFKKQVCEILWKYGFQENIKKTHIVPPGARKIVTGLIINEHEPTIPREVKDNIKMHLYYAKKFGIPEHCKNKGFRSVIGFKNHLEGLINYVTSVNPEQGKKYEKAFLTLPWLNYKL

SEQ ID NO: 1840 - protein, 379 aa, unidentified
  source 1..379: note = Related to NZ_JAHNZV010000197.1; note = Psychromonas antarctica
MNRWNPNTYHRNGLEKGFDPDYLLTLVKSGKAIKSKHKPVIFTLSHLANCTDTQYSDLHAFVSRKGYFSDTNPHYRTFSIKKRTGGQRTIHAPHPVLKIVQSWIARNILADANIHEAAKAYKKGESIVDNASPHCEAEWLLKLDICDFFHNCSERQVYYVFKSMNYSSLLSLELARLCTKVDDKRPLHRWNNTNKQYKIEEYSSFRVGSLPQGAPTSPALSNLICETLDEILIMLSLKYSGCYTRYADDLTFSFNNSTRAKVMDFKRQVSNELKKFGFEINKQKTRVIPPGARKIVTGLNVNGSQPSLTRELRDKIKADLYYCKKYGVVNHCEKNKYKSIIGFSNHMKGMISFVYSVNPELAGKYKIKYDELDLPTLVL

SEQ ID NO: 1841 - protein, 379 aa, unidentified
  source 1..379: note = Related to NZ_KB905170.1; note = Colwellia piezophila
MNRWNPNIYHRNGVDKGFEPDYLLTLVQSGKAINSKHKPVIFTLSHLANVTDTQYSTLHEFVSRKGYFSNIEPHYRTFSIKKRTGGHRTIHAPHPVLKKVQSWIARNILADADVHEAAKAYKRGESIVDNALPHCESEWLLKLDICDFFHNCSERQVYYVFKYMNYSSLLSFELARLCTKIDDKRPLRRWNNTNKQYKIEEYGSFRVGSLPQGAPTSPALSNLICEKLDEILFMLSLKYSACYTRYADDLTFSFNNSSRAKVLGFKCQVSNELKKFGFEINKKKTRIIPPGARKIVTGLNVNGNKPSLTRELRDKIKADLYYCKKYGVVNHCEKNKYNSIVGFSNHMNGMISFVYSVNPSLAEKYKKQYEELDLPSLVL

SEQ ID NO: 1842 - protein, 379 aa, Vibrio sp.
  source 1..379: note = Related to CP010032.1; note = Vibrio anguillarum
MNRWNPNTYHKNGIEQGFNPDYLVTLVKSGNAIKSKRKPVIFTLAHLANCTDTQYSDLYAFVSRKGYFSESEPHYRTFSIKKRSGGNRIIHVPHPVLKIAQSWIARHILDDGDVHDCAKAYKSGESIIDNASPHCESEWLLKLDICDFFHNISERQVYYVFRKMQYSSLLSLELARLCTKIIDKRPNHRWNNNPKNYKIKEYSSDRVGSLPQGAPTSPSLSNIICKDLDETLFMLALESNACYTRYADDLTFSFNNTTRKDIVNFKRKVSNELIKYGFKINAKKTRIVAPGARKIVTGLIVNGPVPTIPRELKDKIKADLYYCKKFGVANHCIKNKYQSIIGFSNHMRGMISFVNSVDKKLALKYKKAYDELNLPTLIL

SEQ ID NO: 1843 - protein, 379 aa, Enterobacter sp.
  source 1..379: note = Related to VWWR01000002.1
MNRWIPNTYHRNGLIQGYDKTYLKNLVQTGNIISGTHHPVIFTLGHLSKCTNTQYDDLHSFVSRKDYLSEIEPHYRTFNIKKRTGGYRNIHVPHPVLKIVQSWIARNILRQVDVHDCAKAYKVGESIYDNALPHCGAQWLLKLDIKDFFSNISERQVYYVFRKMNYPALLSLEMAKLCTKVDHLRVGKRWSNTEKNYAVKEYLFDKVGSLPQGAPTSPALSNIVFKELDELLFMLSLNHEACYTRYADDLTFSFHSSSRAEIIAFKRLVSKELLKFGFNINPKKTRIVPPGARKIVTGLIVNTHKPSIPKEIRDKVKADLYYCEKYGVINHCVKNNYKSIIGFSNHISGMISFIYSIDPVQGGKFKKVYDKLNLPLFVL

SEQ ID NO: 1844 - protein, 380 aa, unidentified
  source 1..380: note = Related to NZ_CP078092.1; note = Geobacter sulfurreducens
MSIWSPLLFNAEGKKQGYDCRYLHKLTDQGNKLSDSGLPVIFTLAHLCAMAGVSFSLIHSCVSRKYDPYRSFTIKKRSGGYRQIVVPEPELMHLQRWINEFILKRAKVHSCAAAYISGSDIKMNASKHLGANWLIKLDIQRFFESISELQVYYIFHRLGYPKLLSFEMARICTRVDTQSNRHFRPRWNNRIHHFEILEYCDSRVGYLPQGAPTSPSLSNLTCRKLDKEIYDLSCRSDCRYTRYADDFAFSFIDLDREKASNFVNQVSRIISSYGFRKNARKTKIIPPGSKKIITGLVLGNGKVHLQKELKDYIRQNIYFATKYGVDEHCKKRGFVSIDGFYNHLEGIVNFALFIEPDFGEKAFEEFRAIKWPSLIVGLHA

SEQ ID NO: 1845 - protein, 370 aa, Leptospira sp.
  source 1..370: note = Related to NZ_NPDS01000002.1; note = Leptospira barantonii
MLNGGPFKYIKESLIKSNSILYKIKISIYVRKLSSKNLPILFNLKHLCNIINVSYVKSKDIVSRKYYAYKHFTIKKRSGGVRHIHIPKDELRLIQKWVHNNILLKNSYDDSAFAYISGRNIKMHAERHCMARWVLKIDLENFFENTTERKVFHIFKKMGYSNIMSFDLARLTTIPVNIKAKEKLKKWKNKSSINKSDRILGSLPQGAPSSPLLSNLCFADLDREIFSIANSAEFVYTRYSDDLIFSTFEGDRMKVLNLLKDVRKLLSIGGYRINNKKVKILSPGARKIITGLNINQGFPKVNKSYIMEVKKHLYYCLKFGPLSHCEKINFRNIVSFKAFLKGRINYIKLIDPVVGLKLSQKFELIHWPII

SEQ ID NO: 1846 - protein, 320 aa, Leptospira interrogans
  source 1..320: note = Related to CP043881.1
MNVSYTKTKDIVDRKSYPYKHFSIKKRNGGFRNIHIPQDELRLIQKWIHKNILLKNNYKDCAFAYIPGRNIKMHAERHCMARWLLKIDLENFFENTTERRVFHVFRNMGYSKKMSFDFARLSTIPMNIKKKESSGKWKNRFPIGRLDRILGSLPQGAPSSPLLSNLCFSELDRKIISIADSFEFVYTRYSDDLVFSCFEGDRIKVIKLLKSIRKLLSMYGYRINNKKIKIITPGARKIITGLNINQNTPKVSKSYITEVNKHLYYCKKFGPLSHCERIKFRNTVSYRDHLKGRIDYIRLIDPVEGTKLLQKFELINWPLI

SEQ ID NO: 1847 - protein, 392 aa, unidentified
  source 1..392: note = Related to PSRA01000192.1; note = Bacteroidetes bacterium
METWSTHQLYQSAVASLGLDAAADLRVYCQRLRLKGVAVVFTLGHLARITDVNYQTLRESVNRRRESANYRMYAVKKRSGGRRFIHSVCTDLFKVQRFINQEILQKCMPHPASFAFHNSGGIRKCAAMHCGARWLFQSDLTDFFYNVTEIDAYRVFQEIGYRHVLAFELARLCTTTHLPRSQMRRLYVEEWAYFNKHARKQTGDGEDDSVTMPYAARFGVAGVLPQGAPTSPMLSNLAAAKLDESLQNFASKNGFVYTRYADDITISASDLPKSVSSLHRSIVQIIRKSGFKENRKKTRIAGPGSKKVVLGLLVDGDQPRISKETYRRIDRHLHASLKYGLVETAVHEGFDSAFGFHNHLSGLVAFVKDVDTKRWEEFALRLSKVRVPWSEN

SEQ ID NO: 1848 - protein, 398 aa, unidentified
  source 1..398: note = Related to NZ_CP036298.1; note = Aureliella helgolandensis
METWSAHQLFTTAERSIGKSAAYALQSYAQSLEAKKLPVVFTLRHLSTITGVSYRVLHQTVNRKREACNYRMYAIKKRSGGRRIIHSVCEDLIRVQDFVNREILQRCQPHPASFAFHSSGGIKECASMHCGARWVFQFDLSDFFYDVTEIDVYRIFDDLGYRSLLAFELARLCTTTKLPRHLKHLLYHCANPDNLIQDFEDDFEKPGNGVRRLPYPERHGVVGVLPQGAPTSPMLSNLAARRMDELLQSFAFDSGFVYTRYADDLTFSAARLQDKHGVCSVRREVIGLIRKSGFKENSKKSRIAGPGSKKVVLGLLVDGDTPRISRETYRRIDRLLYGALQNGFESASAFNKFDSALGFYNHLGGLIAFVKSVDEKRWSEFSNRMRGIEQKWGDFGDI

SEQ ID NO: 1849 - protein, 394 aa, unidentified
  source 1..394: note = Related to JAAXWO010000007.1; note = Chlorobiaceae bacterium
MDAWSVHHLYENAKNQRDMQTAASLRDYAAQLRSSGLPVIFTLGHLAKIVGVETEILHETVNRQRESANYRMYAVAKRSGGRRFIHAVTPELFRVQQYLHKEILCGVKPHPAAFAFHSSGGIRQCASQHCGARWLFQYDLKDFFYEISEVDVYRIFNGLGYRKLLSFEIARLCTTTRLPISFKRYLRASYSEKPNFDNVELLDDAFSGYLKFKPYLHSQRTGVLPQGAPSSPMLSNLAARHLDESLHEYAFQLGFVYTRYADDISISAYDLPSKMSRGDIHRAIVHRIRKARFLENEKKTRIAGPGSKKLVLGLLVDGDSPRLSKETYMRIDRLLYAANKYGLVNTAKHENFYSAYGFYNHLSGLVAFVKDVDIKRWAEFKLRLSELDVPWETT

SEQ ID NO: 1850 - protein, 378 aa, unidentified
  source 1..378: note = Related to PNKZ01000003.1; note = Pirellula sp.
METWSAHQLVTAAEPSLGPAIAEQLRRYSTQLRRQELPVIFSLQHLAKITGVQYQTLHDTVRRRREAANYRMYAVSKRSGGRRFIHAVCGELKAVQQFINAEILQRCKPHPCSYAFHSSGGIRQCAAAHCGARWLFQFDLADFFYDVTEVDVYRIFHGLGYRRLLAFEMARLCTTTRLPKTFLQLPATRRRDLTQVGDHEVDRIRPYQRHQRGVLPQGAPSSPMLANLAAAALDCTITEYADNNGLVYTRYADDITLSARDLRYDRARIRRQVISMIRKCGFRENPNKCRIAGPGSKKVVLGLLVDGESPRASRETYRQIDRLVYGVRKFGGKAAAAHFGFESEYGFRNHLAGLVAFIKSVDLDRWNELSEVLRHVGI

SEQ ID NO: 1851 - protein, 374 aa, unidentified
  source 1..374: note = Related to CP045236.1; note = Burkholderia cepacia
MEDWSAHQLFQAASASLDRSTATALSAYARTLQSAKLPVVFSLRHLSGIVGVSYKMLRESVRRKREAANYRIYRIAKRDGTFRHIHEVTSDLFRVQTFLAHEILAKVSPHPAAFAFHAGGGIKKCAAQHCGARWIFQYDLSNFFYSINEADVYRLFCHLGYRPLLAFEFARLSTTIRMPPYMAGIINMVSPDHRGMPYADACNKLGVLPQGAPSSPAISNLVAKDLDDRLTKVAVHYKLVYTRYADDITISAMDVGKGRSRGEIHRSVIHAIRKSGFVENESKTRIAGPGSKKLVLGLLVDGPQPRLSRQMYERVDTRLYACRKFGLEATADFYKFDSAYGFYNHLAGLLSFIKDVDPLSWNSFAPRFKEIPPP

SEQ ID NO: 1852 - protein, 390 aa, unidentified
  source 1..390: note = Related to JAGRPC010000052.1; note = Verrucomicrobiae bacterium
METWSTHHLYNDALAVHDTDTALEIRSYAQNLITKGHPVVFSLEHLSRITHVSYAMLRATIERNRESANYRMFAVSKRSGGLRFIHAVTGDLQIVQRFINQEILQNCRNHPASFAFHSSGGIRKCAAQHCGAKWLFQFDLSDFFYAVNEAQVFRIFREMGYRELLAFELGRLCTTTRLPRNKHMYLKWRPGPPLFPRFGGEARGEGLPYPQSSGQLGVLPQGAPTSPMLSNLAAGKLDESLSAFANDLGFVYTRYADDITISATNIPRGVAIGTICHRVIDCIRKAGFTENREKIRIAGPGSKKVVLGLLVDGPQPRISRETYKRIDRHLHAAKIYGLEATAQHEGFDSAFGFHNHLTGLVRFVHDVDLKRWADFSQRLTSIEVPWQAMP

SEQ ID NO: 1853 - protein, 388 aa, unidentified
  source 1..388: note = Related to nan
MEVWSVHQLFEQAKADLGVDRSSELRKYAQYLIHSGLPVIFSLKHLSKITRVNYGVLRDTVGRRRESANYRMFPVKKRSGGRRFIHAVSGQLFSVQQFINADILQNVAPHTSSFAFHWNGGIQKCAAMHCGAKWLFQFDLSDFFYDINEIDVFRIFQQLGYRKLLAFELARICTTIHLPAHLKCTFKVHRYFPECHPPYGVSYDAGVLPQGAPTSPMLSNLAARELDERLFEFAVANGFVYTRYADDITLSARELPSRVSVGDIHRQSTHIIRTCGFRENKKKTRVAGPGSRKIVLGLLIDGDQPRISRETYNRIDRHLYAATKFGIVETASHEGFDSAYGFYNHLAGLISFVNDVDKKRWTEFHARLSKITVPWQTPSGTQYGEFSQ

SEQ ID NO: 1854 - protein, 394 aa, unidentified
  source 1..394: note = Related to NZ_LT907975.1; note = Pseudodesulfovibrio profundus
MEEWSVHQFQQGAIAASAPCVDDLVRYARLLKNNGLPVIFSLGHLCKITRSNYKFLHNIVNRKVDSQNYRLFPIKKRSGGIRHIHAVAGKLYKVHDYINNDILQSCSPHPSSYAFHRSGGIFKCAKQHCESRWIFQFDLKDFFYSISEAMVFTALKNLGYKKLLAFELARICTTRHLPANKIRYTARFSKSLPSYYNNKPYRETYHHGVLPQGAPSSPMLSNLVALRLDETLSAYADENGLTYTRYADDITLSTLALPSKVSVGGIKRAVIKIIRRAGFIENPKKIRVAGPGSRKTVLGLLVDQSSPRISRHTYKRIDRLLYSISQYKLAGVAEHDGFDSSFGLYNHLHGLINYVKDVDYSRWEEFSKQFQPIKEQFESEFDVSNTAQFMLSST

SEQ ID NO: 1855 - protein, 395 aa, unidentified
  source 1..395: note = Related to NZ_SJPT01000002.1; note = Novipirellula galeiformis
METWSAHQLYTEAESSLGEAAARNLQAYSEQLRAKGLPVIFSLRHLAELSGVRYWFLHETVNRMREVANYRMFAIKKRSGGRRHIHSVSNELGRVQQWINQHLLQNCKPHAASFAFHKEGGIRQCAERHCGARWLFQFDLVDFFYDVSERDCFNVFKGLGYRPLLAFELARICTTTRLPAWCPRAEFHGEQLRWENIWCEDDLNPVNPNTSRNFPYYERFGRLGALPQGAPTSPMLSNLAAKYLDESLQHFANKNGLIYTRYADDITFSACRLGVARGRVLWQVKDLIKRAHFAVNPKKTRIAGPGSKKLVLGLLVDGSTPRISRETYKRIERLLYGAKQFGFEAAASHFKFDSAYGFHNHLSGLVAFVKDVDRKRWQEFNAVLLNAKSSWGNDV

SEQ ID NO: 1856 - protein, 377 aa, unidentified
  source 1..377: note = Related to SHMQ01000020.1; note = Candidatus Acidulodesulfobacterium acidiphilum
MEDWSTHQLKENAIIKLGSEKANDLQKYTTNLKIQSLPVIFTLNHLGIITNTEYSFLYKTVCREREYVNYRMFPIKKRSGGTRFIHAVSKKLSIVQTFINNIILQSQQPHNCSYAYHPSGGIKKCAAMHCNAKWLFQFDLADFFYRINEIDVYNIFQRMGYRKLLSFELARLCTTIRLPRQLQSMLKQFKSFSLDDYPFYNNDFIGVLPQGSPTSPMLSNLAAMELDEDLYVFALKNGFIYTRYADDLTFSAINLPQGMSIGKIRWQIIQIIRKNCFKENSNKIRIAGPGAKKIVLGLLVDGNQPRISKEMYKRIEKIFYYVNRFKFENTAKHLGFNSTFGLINHLLGLISYLKDVDSDRYGLFNKKFNELMLSLGC

SEQ ID NO: 1857 - protein, 376 aa, unidentified
  source 1..376: note = Related to DNVK01000297.1; note = Lachnospiraceae bacterium
MEAWSTHHLAQQAAKTLGSDAAASLQSYAQVLISKGLAVVFTLGHLSRITGVSYQVLRDTVDRKRDSANYRMYAINKRSGGLRFIHSVSRDLLIVQRFINQHILQKCAPHPSSFAYHPSGGIKKCATMHCGARWLFHFDLKDFFYDITEIDVFHIFKAMGYRNLLAFELARLCTTTCLPKGQERLLFHSTNSKYNVYRDPNGIVGVLPQGAPTSPMLSNLAAQKLDEELSSFALMHGFVYTRYADDITFSASYIPKGLNIGNIQRQIIHIIRTTGFEENNQKIHIAGPGSKKVVLGLLVDGNEPRISREMYHRIERYLYAIEKYGLRNVACHEGFISAYGFFNHLTGLIAFVKDVDQKRWEEFSSRISRIQTPWHL

SEQ ID NO: 1858 - protein, 382 aa, unidentified
  source 1..382: note = Related to NZ_QGKL01000023.1; note = Leucothrix arctica
METWSAHQLYNDAKHRFKDIEKASSLRSYAQFLIDKNLPVIFSLKHLAKINDLNYSFLRLTVERRRESSNYRMYAVKKRAGGRRFIHSVTKKLLKVQTFINTEILQYCLPHPSSFAFHPSGGIRRCAEQHCSARWMFQFDILNFFHAINEVEVFNIFTGLGYRPLVAFEMARICTTTHVPNHLKPLLFRKSNNTPYNFYANKSGAIGVLPQGAPTSPMLANLVAKKLDEELSSFVRKHGFTYTRYADDITISAVDLPDNLSIGEIHRSVISIIRRCKFRENIKKTRVAGPGSKKLVLGLLVDGDKPRISREMYKRIDRNLHALEKYPIADVAKYEGFDSSFGFFNHVSGLVAFTKDVDTERWEKFKKRIDGIELPWESKLVT

SEQ ID NO: 1859 - protein, 380 aa, unidentified
  source 1..380: note = Related to CABVQD010000004.1; note = Burkholderia sp.
METWSVHHLSQQATSVLGKSIAQDLTSYAQRLRRSGLPVVFTLRHLSRIVGVDYSLLRASVERRRESANYRMFAIKKRSGGRRHIHAITGDLFKAQQFINAEILQKLNPHPASFAFHPGGGIRACAAAHCGARWLFQYDLSDFFHSISEADAYKVFFTAGYRPLLAFELARICTTTRLPDHLKHHLWAHRAWRDYKFYGDHTHAMGVLPQGAPTSPMLSNLAAHHLDIVLTEFADRHGMSYTRYADDLTLSTSSDLPDGMSIGNIHRAVIGIIRKSGFQENKKKIRIAGPGSKKIVLGLLVDGTAPRLSKETYKRIDRHLHATQKYGLANVASHEGFDSPLGFYNHLSGLIAFVKDVDLVRWKEFHDQFSKIESPMNGGV

SEQ ID NO: 1860 - protein, 383 aa, unidentified
  source 1..383: note = Related to SSEJ01000200.1; note = Gammaproteobacteria bacterium
MEAWSVHHLSQAVTPVLGKSAADHLKDYAQRLRRANLPVIFTLRHLAKITAVEYGVLRATVERRRESANYRIFAVKKRSGGRRHIHAVSGDLFKVQQFINLELLQKLRPHPASYAFHAEGGIHKCASVHCGARWLFQYDLENFFHALSESDAYRVFMKAGYRPLLAFELARLCTTTRLPAHLKHHLRPKRHAASMKAYQFYVERSGATGVLPQGAPTSPMLSNLAAFDLDEKLTAFADLHGFTYTRYADDLTFSAGGELPERMSIGDIHRTIVGVIRKCGFRENTKKTRVAGPGSKKVVLGLLVDGTVPRLPRETYKRIDRHLHATQKYGLVAVAAHESFDSAIGFHNHLAGLIAFVKDVDTARWEEFHRQFSMIPAPMSAGT

SEQ ID NO: 1861 - protein, 382 aa, Pseudomonas sp.
  source 1..382: note = Related to CVTP01000021.1
MEDWSVHHLHKAAELKLGASEAAQIRIYAQQLIRKKMPVIFTLKHLSMIAGVDYLALRRTVERRREAANYRMFAIKKRSGGRRFIHSVTEPLHRTQQFINSEILQKIEPHPASFAFHSSGGIRKCAEVHCGARWIFSFDLADFFFKISEAKAYEIFHKAGYRPLLAFELARICTTTRLPKKLHYLLRNTDNAWCQNENWGKYQIYSRHAYSIGVLPQGAPTSPMLSNLAALKLDVALTEFADKYGFSYTRYADDLSISSCSDLPSSLSIARICRIVIGIIRKCGFEENQKKTRIAGPGAKKIVLGLLVDGPTPRISKETYKRIDRHLHAIQKYGFAEVATHEKFDSPIGLYNHIHGLISFVKDVDPKRWGEFNCQLLAMPAP

SEQ ID NO: 1862 - protein, 382 aa, unidentified
  source 1..382: note = Related to NC_008786.1; note = Verminephrobacter eiseniae
MEAWSVHHLSQKAEPILGQAAADDLKTYALRLRQAGLPVIFSLGHLSRITGVDYSLLRATVERRRESANYRMFAIKKRSGGRRHIHAVTGELFKAHQFINTEILQKLEPHVASFAFHADGGIRTCASEHCGAQWLFQFDLANFFYSVNEADVYGVFVGLGYRPLLAFEMARICTTTRLPKHLLPHLWTHRSHKSHGYQFYADRSGAMGVLPQGAPTSPMLSNLVARRLDEKLTEFSTQYGFVYTRYADDLTLSCGGNLPRGMAIGNLHRKVTGIIRKNGFRENLDKTRIAGPGSKKVVLGLLVDGEGPRISKETFKRIDRHLHASEKYGLPDVAKHEKFDSPSGFYNHLAGLIAFVKDVDKVRWEEFHARFSRLQSPMNSSA

SEQ ID NO: 1863 - protein, 382 aa, Pseudomonas sp.
  source 1..382: note = Related to DAFPEA010000002.1; note = Pseudomonas aeruginosa
MEAWSVHHLSQKAEPLLGQAAADDLKAYALRLRQAGLPVIFSLGHLSKIVGVDYSLLRASVERRREAANYRMFAIKKCSGGRRHIHAVTGELFKVQQFINSEILQKRKPHAASFAFHPDGGIRACASEHCGARWLFQFDLSNFFYSVSEADVYGVLAELGYSPLLAFEMARICTTTRLPEHLKRYLWSALSHKVRDYRLYVDRSGAMGVLPQGAPTSPMLSNLAARNLDKALTAFSTQYGFVYTRYADDITLSSGGNLPEGMSIGSIHRSVIGVIRKNGFRENPDKTRIAGPGSKKLVLGLLVDGEVPRISKETFKRIDRHLHAAERYGLVDVAKHEKFDSPIGFYNHLEGLIAFVKDVERERWKVLYDRFSKLQAPMNVGS

SEQ ID NO: 1864 - protein, 394 aa, unidentified
  source 1..394: note = Related to JADZHH010000033.1; note = Shewanella algae
METWSVHQLSTAAKSTLDESSVVHLKSYAQSLKRSGLPVIFTLGHLSKIIDIDYSFLRATVERRRESANYRMFAIKKRSGGRRHIHSVTGGLLQAQQFINSEILQKIEPHSASFAFHKKGGIRACASMHCGARWMFQYDLADFFYSVNEANVYGIFSALGYRPLLAFEMARICTTLRLPNHLGHLLIDPRTKVKGKFYNLYQRYMEVPGFGTMPYMSSMGVLPQGAPTSPMLSNLAARNLDVELTDYADQNGLIYTRYADDLTLSSSENFPEGLSIGDIHRSIVGIIRRNKFKENRKKTRVAGPGSKKLVLGLLVDGDSPRLSKETYKRIDRHLYSIQKYGILSVSKHEKFDSPLGFYNHLSGLIAYVKDVDTNRWKEFHRRLLEISYPIEMNY

SEQ ID NO: 1865 - protein, 387 aa, unidentified
  source 1..387: note = Related to NZ_CP012264.1; note = Cronobacter condimenti
MEIWSAHQLYQNAESSLGKTQALNLRNYASNLKKNNLPVIFTLRHLSKITGVDYRLLRSTVSRRRESANYRMFAIKKRSGGRRHIHAVTGEIFKVQHFINSEILKKLVPHNTSFAFHPNGGIRKCAEQHCGAKWLFQFDISDFFYSINESDVYMVFKNAGYRPLIAFELSRLCTTIRLPQHLQSLISVPKHSTKEYKLYGQNKEKNLFWDISEPWPLGVLPQGAPSSPMLSNLATVKLDISLSEYANKYGFTYTRYADDITLSCGGTLPDSVSVGKIKNNIISIIRKHHFKENVSKIRVAGPGSKKIVLGLLVDGNVPRLSKQTYKRIERHLYSIKKFGLSEVARHEKFDSPIGFYNHVAGLIAFVKDVDNARWLEFSQKFVSIEHP

SEQ ID NO: 1866 - protein, 387 aa, unidentified
  source 1..387: note = Related to JAAQVQ010000001.1; note = Providencia heimbachae
MEIWSVHQLYQEAEASLDKESALNLRNYANNLKKRNFPVIFSLRHLSIITGVDYSVLRSTVARRRESANYRMFAIKKRSGGRRHIHAVTSELFKVQHFINSVILQKIKPHNASYAFHSDGGVRKCAEQHCGARWLFQFDIADFFYSINESDIYNIFVSAGYRPLLAFELSRLCTTLRLPTHLRSLILLPKYSVKEYKFYNQYNTNHNSRIIPEPFPLGVLPQGAPSSPMLSNLASEKLDVSLADYADKNGFIYTRYADDITFSCGNDLADGVSVKKVRRDVISIIRKHHFIENTNKIRISGPGSKKVVLGLLVDGNAPRLSKETYKRIDRHLYAIQKFGLNEVAKYEKFDSPIGFYNHVAGLIAYVKDVDNARWLQFHQRFSIINHP

SEQ ID NO: 1867 - protein, 390 aa, Salmonella sp.
  source 1..390: note = Related to AAMXLY010000014.1; note = Salmonella enterica
METWSTHHLSQEAEVLLGKESALKLTRYSNKLKRNDLPVIFTLRHLSKIVKVDYKLLRSTVNRQRESANYRMFAIKKRSGGRRHIHAVTGELFKVQHFINSEILQKIKPHNLSFAFHTNGGIRKCAEMHCGARWLFQFDIENFFYSINESDVYKIFLAAGYRPLLSFELARICTTLCLPAHLASLIQRNAHSRKKYKLYNPNKNCSSSFLDEYRPKPMGVLPQGAPSSPMISNLVAKELDISMEEYADKNSLIYTRYADDITLSSSSDLPKGVSTGKIRRDIIEIIRKNHFKENRNKTRIAGPGSKKIVLGLLVDSERPRLSKETYKRITRHIYAIEKFGIEEVAKYEKFDSALGFYNHICGLISFVKDVDHERWNDFHKKISKITPPTN

SEQ ID NO: 1868 - protein, 391 aa, Pseudomonas fluorescens
  source 1..391: note = Related to JAGGOG010000019.1
MVSWSAHQLYMEAKSKLGTQQATNLRQYARVLQRKNLPVVFTLNHLAKITGISHTLLRDTVERGRERKNSRIYSIKKSSGGERFIHVINDDLAFVQKFINSEILQKLTPHPCSYAFHESGGVRECAEIHCGARWLFKFDLCDFFYHINERHVFEVFLNAGYRNLIAFEMARLCTTTRMPSNLHYLLKPNKSGIETQDKKYRFYNQHNEKLGLLPQGAPTSPMLSNLVAFKLDQKLETFAREHGLTYTRYADDITFSTSDDLPEKTSIGYIQRSVIKIISQCGFRNNTGKMHVAGPGSRKIVLGLLVDGEKARISKATFKRVDRLLHSIKVYGLDAVSVHEQFKSPVGLYEHLRGLLAFVKDVDTARWDEFKIQFHQVTSPWTDEPIVSGSL

(The sequence listing continues in the following parts.)
